United States Patent Application Publication US 2007/0067865 A1 - sequence listing, part 19

SEQ ID NO: 121606 - DNA, 736 bp, Arabidopsis thaliana
cattcttccaatcgcacttcctttaccagatcagacgtcaatttcaactcttcagtgaagagatttctttcaccgaattttctactccgatcgatcaattgaagattgaaatggaagctaattcaggcggaggaggaggagctgaaggcggaagagcggtaaccggaggaggaggaggaggaggagggagcgatgtggaattggtgagcaagacgttgcaagtggagcataagctattctattttgatcttaaggagaatcctcgtggaaggtatctaaagatatcggagaagacgtcggcgacgaggtcaaccatcattgttccttcctccggcatctcttggttccttgatctcttcaactactatgtcaattctgaggaacacgagctttttagcaaagaattgcagcttgattccaaggtgttttacttcgatatcggtgagaacagaagaggacgcttcttgaaggtgtcagaagcatcggttagtagaaatcgaagtaccattattgttccagctggaagctctcctgatgaaggatgggcagctttcaggaatatattggctgagatacatgaagcatcaggactttttgtgatgccaaatcaggtgaaaccttctgatggacaggaacacttggttgatgatgttggagctggttttatacctgggcatggtagtcagcagccatcttcttcagaacataatgtggatcgcacaattgactcgccagg

SEQ ID NO: 121607 - DNA, 505 bp, Arabidopsis thaliana
  unsure (1)..(505): unsure at all n locations
nnnnnnnnnnnnnnnnnnnnnnnnnnnnnnnnnnnnnnnnnnnnnnnnnnnnnnnnnnnnnnnnnnccacgcgtccgcccacgcgtccgcccacgcgtccgcccacgcgtccgctttgatgacgttcacccaaacaaggcggatgtgataatggccttggcaggatcaagcggaggctcatgggctacgggtttgtctcagaaaccgaagtcgaagaacaacacaagtgacggtccatacaagctaggccaaatgtatgaaggaggcagctctaaggaaacaccacaaatgcccccggaatttcgtgcaaggccgagtcatcaacctacctccagtgcctgtcaccggatctttacacaaccaggtagagagcatcaaggaagcatcatctcaaggggacgagatatcagagatccggttcacagatcagatcctgaaaaagaagccacatggattaaagtctgaatatgagagacgatgagtgtggctgttcttctaagttgtt

SEQ ID NO: 121608 - DNA, 617 bp, Arabidopsis thaliana
  unsure (1)..(617): unsure at all n locations
nnnnnnnnnnnnnnnnnnnnnnnnnnnnnnnnnnnnnnnnnnnnnnnnnnnnnnnnnnnnaactctatctcacaatgagattcccacgcgtgcgctgtgcttcttctgcgatcaactaagatccgatccgcgagcgtttcagacttcgatcagatccgattaagagaagcaaatcgggtcgggtatgactcgtcgatgttctcactgcaatcacaatggccacaactctcggacttgtcccaatcgcggcgtgaagctctttggtgttcggctcaccgaaggttcgatccggaaaagtgcaagtatgggtaatcttagccattacacgggttctggatcgggtgggcatggaaccgggtccaacactccgggttctccgggtgatgtccctgaccatgtcgctggtgatggttacgcttctgaggatttcgttgctggctcttcctctagccgcgagagaaagaaaggaactccatggacagaggaaggacacaggatgttcttattaaggtttccagaagcttggggaaaaggtntttggagggntttnaagnaacttttncccctngggacctcaaaagtttngccattttaanannttaatagnanccattntc

SEQ ID NO: 121609 - DNA, 460 bp, Arabidopsis thaliana
  unsure (1)..(460): unsure at all n locations
tttgtttctctatctctttctcacaattagattctgtgcttcttctgcgatcaactaagatccgatccgcgagcgtttcagacttcgatcagatccgattaagagaagcaaatcgggtcgggtatgactcgtcgatgttctcactgcaatcacaatggccacaactctcggacttgtcccaatcgcggcgtgaagctctttggtgttcggctcaccgaagcttcgatccggaaaagtgcaagtatgggtaatcttagccattacacgggttctggatcgggtgggcatggaacccgggtccaacattccggggttctccgggtgatgtcccctgaccatgtcgcttggtgatgggttacgggttctaaggnttttcggttccttgggntctttccccttggcccccggggagaaagaaaaggaacctcccttggccaaagggagggcccaaggttttttt

SEQ ID NO: 121610 - DNA, 497 bp, Arabidopsis thaliana
  unsure (1)..(497): unsure at all n locations
nnnnnnnnnnnnnnnnnnnnnnnnnnnnnnnnnnnnnnnnnnnnnnnnnnnnnnnnnnnnnnnnnccacgcgtccgctttttttgataggactactgggaaggaacctggagaagcaagctccaccgccactacggcggagactgtggaggagagatcaggctccggaagatggcggcggccgagagatttaaagggtggcggcgatatcgaagggattccacaggttttgggtcgtttggtttcgaatggttcaagtaagattgcatgtctttacacacagcaaggcaagaaagggactaaccaagacgccatgctcgtctttgagaacttttgttcgagagacgatacagtgttttgtggtgtattcgatggacatggaccatttggtcatatggttgccaagaaagtccgagatacattgcccttcacactcttaacccagttgaaaatgacctcagagccagatcaaagcagcttagttggtgccaatggttt

SEQ ID NO: 121611 - DNA, 630 bp, Arabidopsis thaliana
  unsure (1)..(630): unsure at all n locations
atcgactcacttagggaaagccggtccgcctgcaggtaccggtccggaattcccgggtcgacccacgcgtgcgcccacgcgtccgcccacgcgtccgctcgcttccggtggtgaacttttagctcgatcaatcgaatccgacgagctcgtcgccgttaaaatcatcgagaagaagaaaacaatcgaatccggtatggaaccaagaataatcagagagatcgatgcgatgcgtcgtcttcgtcatcatccaaacatactcaagatccatgaagttatggcaaccaaatctaagatctatctcgtaatggaactcgcttccggtggtgaacttttctcaaaagtcctccgtcgtggacgtcttcctgaatcaacggcgcgtcgttactttcaacaactcgcctccgctcttcgtttctctcaccaagacggtgtcgctcaccgtgatgtgaaacctcagaatctactcttagatgagcaaggtaacctcaaggtctctgactttggtttatcagctttaccggagcatctacaaaacggatttgcttcacaacggcgtgtggctactccggcttatacaagctccggagggtntttnnncgggnggggggtnacggccggggcnaaaannnt

SEQ ID NO: 121612 - DNA, 482 bp, Arabidopsis thaliana
  unsure (1)..(482): unsure at all n locations
ggtccctgaaacctctcttcagaaaactcaggcaccattttctccttccgccgccgccatggaatcacttccccagccgcaaaaccaatcatctccggcaacaactccggcgaagatcctccttgggaaatacgaactcggtcgtcgtctcggtagcggaagcttcgcgaaagtccatttagctcgatcaatcgaatccgacgagctcgtcgccgttaaaatcatcgagaagaagaaaacaatcgaatccggtatggaaccaagaataatcagagagatcgatgcgatgcgtcgtcttcgtcatcatccaaacatactcaagatccatgaagttatggcaaccaaatctaagatctatctcgtaatggaactcggttccggtgggtgaactttttttnaaaaagtcctccgtcggggtcggttttcnnaatnaacggngggggtggttanttttnaanaaantggncncccgnttttgggtt

SEQ ID NO: 121613 - DNA, 519 bp, Arabidopsis thaliana
  unsure (1)..(519): unsure at all n locations
annnnnnnnnnnnnnnnnnnnnnnnnnnnnnnnnnnnnnnnnnnnnnnnnnnnnnnnnnnnnnnnnnnccacgcgtccgcccacgcgtccgcagcgatttcataaaagccaaaaatcaaataacgatgatgaaagggatctcttcagtttctcaatcgatcaattataatccatacatcgaattcaatcgaccgcagcttcagatcagtactgtgaatcccaatccagctcaatctcgattttcccgccctcgatccctccgtgttctctcactctccgccgatccatcggcaaatcggaatcctaaatcagccgttgacgcacacgcgccgccactggtggttgtgggatctgcgaacgccgatatctatgtggagatcgagagattacccaaggaaggggaaacgatttcggccaagacagggcaaacgctcgccggaggaaaaggcgcgaatcaggcggcgtgtggagcgaagctaatgtatccgacttacttcgttggtcgtttgggagaggacg

SEQ ID NO: 121614 - DNA, 518 bp, Arabidopsis thaliana
  unsure (1)..(518): unsure at all n locations
aaagaaagagaaaaaaaagctttcgtagtgtctattgaaaccagagaaaagccaaaggggatgcaaccaacatccgtcggtagtagcggcggtggtgacgacggaggaggcagaggaggaggaggagggctaagtagaagtggactatctcggatccgttcagctccagcgacttggcttgaagctttacttgaggaagatgaagaagagtctttgaaacctaatcttggtctcaccgatttgcttaccgggaactcgaacgatttaccgacaagtcgcggctcgttcgagttcccgattcctgttgagcaagggttgtatcaacaaggtgggtttcaccgacagaatagtactccggcggattttcttagtggttctgatggatttatccaaagctttgggattcaggcgaattaccgattccttatcggggaaatcgatgtttctccgggaagnaagcggccttgagaaatggaagacttttttttcnccnagtnnttccaaatnaagggnnaanc

SEQ ID NO: 121615 - DNA, 637 bp, Arabidopsis thaliana
  unsure (1)..(637): unsure at all n locations
ccgnnnnnnnnnnnnnnnnnnnnnnnnnnnnnnnnnnnnnnnnnnnnnnnnnnnnnnnnnnnnnnnnnnnnnnnccacgcgtccgagatattaaaaaacccaaacttttatttcccccaatcaaaaaccctaatttcttcttatcttgtttggatttttcatttcttctgtttgattttattccacaaacacaataaaaaagtttgcattttttcctcttctaagctcgtttcagatcttcgatttcaccatttttataaactattatgcgaacttagttttgttctttgtgattttgtatgacaatgatcttcttctctaagcttaatcgctccatttctcgttcaaagggatttttgtacggtggtggtgttagatcggcggcaaggctacttacttcgccgggacttgaggcggcgtctgtgaatgaagtggaaggtggattagggtttataagaagacactttgcttctttagcttcacggaagggtttagtcaataatgatttgattggtgtttttgctaatccaagacttcgtagattcttctctgatgaagctcctaagaagaagaattatgagaactattttcctaaagataagcaagaacccaagagtgatcagaaatcagagcataa

SEQ ID NO: 121616 - DNA, 660 bp, Arabidopsis thaliana
  unsure (1)..(660): unsure at all n locations
nnnnnnnnnnnnnnnnnnnnnnnnnnnnnnnnnnnnnnnnnnnnnnnnnnnnnnnnnnnnnnnnnnnnnnnnnnnnnnnnnnnccacgcgtncgcccacgcgtccgcccacgcgtccgctcgcttgccttcttcttccgctcacaatctcttcctttctcgttccttctcttcttcgatcagacgattcaatcgcttctcactcaaaccacttcgctccttcgcatccatgtcttcttcttcccccgacgctgctcagactcctctaaccaccgctccttatggctcctggaaatctccaatcaccgccgacatcgtttccggagcttcaaagcgtcttggcggcaccgccgtcgattctcatggccgtctcgtcttgctcgagtctcgccctaacgaatccgggagaggagttttggtgctacaaggagaaacatcaattgatattactccaaaagacttcgctgtgagaactttaacacaagaatacggtggtggtgctttccagatttcatcagatgatacacttgtgttctctaattacaaggatcagcgattgtacaagcaagacattactgataaagattcatctccaaagccaattactccagattatggtacaccagctgttacttatgcagatggagtctntgattcacgc

SEQ ID NO: 121617 - DNA, 1211 bp, Arabidopsis thaliana
accaataaaaccgctctcgagagacgaatcgctctcagcttcttctagaaccttctccttctccttcgacgcatcgtcgccttcaagatcacactacctcgcacaacaatggagttctggggtgttgaagttaagaatggcaaaccacttcacctagatcctgggctagacaggctcgtgcacatctctcaggttgctttgggagagagtaagaacaatgtaaccgaaccaatccagctttacgtgactgttggatcggataagcttctcattggaacgctatctcatgagaagtttcctcagctgtctacggagattgtcttggaaaggaactttgcgctgtctcatacttggaagaatgggagcgttttcttctctggttacaaagttgatgcatctgatcccgagcctgaggatttgattgatgatcaacttgaggctgctggtttcaaagctgctccgaaatctgctgcgaaacaggtgaactttcagttgccaaatgaagatgtcaaagccaagcaagatgatgacgctgacggtagtgaagaagattcttcagatgatgatgatagtgaaaactctggagacgaggaggaagagaaggttactgctgaatctgacagtgaggaagatgactcatcagacgacgaagaagatgactcctcagaagaggaaaccccaaagaagcctgaaggacccaagaagaggtctgcagaacccaactcctccaagaaccctgcgtccaacaaggaaggctaaggtttgtaactcctcagaaaacagattcgaaggaaccgcatgtccatgttgcaactcctcatccctcaaaacaggcgggtaagaattctggtggaggcagcactggagagacatcgaagcagcagcagaccccgaagtctgcaggagcgtttgggtgcaagtcgtgcaccagaacctttacttcggaaatgggattgcagtctcacacaaaggccaaacacagtgcagctgcttgagaagaagaagcagcatgatgactactctctataatatctactctagaactttgatgtcttttggtacttaaatctggaacttgcgagtgagccagttttagttggtcttttttttcaggcatttcttcctgtttaactttatcgttttggtagctgaaactgtgctaaacctttgtttgtgtttagtggtatggatattaagtctaaatgtagcct

SEQ ID NO: 121618 - DNA, 940 bp, Arabidopsis thaliana
  unsure (1)..(940): unsure at all n locations
nnnnnnnnnnnnnnnnnnnnnnnnnnnnnnnnnnnnnnnnnnnnnnnnnnnnnnnnnnnnnnnnnnnnnnnnnnnnnnnnnnnccacgcgtccgcggacgcgtccgcccacgcgtccggccattctgggatgtgctgtttttacagcatatggtgctatggctcatgctgctgagatccgtcctggagattctattgcagttattggaattggtggtgtgggctccagttgtttgcagatcgcaagggcttttggagcctcggatatcattgctgtggatgttcaggatgataaattacagaaggccaagacacttggtgctactcatattgtcaatgctgctaaagaagatgctgttgaaaggataagagaaataaccggtgggatgggtgttgatgttgctgttgaagccttgggaaagcctcaaactttcatgcagtgcacactaagtgtgaaagatggtggaaaagctgtgatgattggactctcacaagctggttccgttggagaaattgacataaatcgacttgttcgtagaaagataaaagttatagggtcttatggaggaagagcaagacaggatcttcctaaagtagtgaaattggcagagtcagggattttcaatctcacaaacgcagtctcaagtaaatacaagtttgaaggtgcaggaaaagcatttcaaggtctcaacggaggcaaaatcgtgagccgaggtgttgttgagatactataaccaatatagccttttgattctggtttgtgaatgactgcttcacacctgtttcactgaggtctatttttagttgctacaatcttcacccaaggtcattgttaatctgatatttgtgtttgtttagccagtgaaaaggaaaaaaaaaaaaaaagggcggccgctctagaggatccaagcttacgtacgcgtgcatgcgacgtcatagct

SEQ ID NO: 121619 - DNA, 561 bp, Arabidopsis thaliana
  unsure (1)..(561): unsure at all n locations
nnnnnnnnnnatacggactcactttagggaaagactggacgcctgcaggtaccggtccggaattcccggttcgacccacgcgtccgaccgttcgctagtccttgtgttattggtcatgagattactggtgaagttgttgaacatggtccacttactgatcacaagatcattaatagatttccaatcgggtctcgtgtagttggagctttcattatgccttgtggaacctgttcttattgtgctaagggccatgatgatctatgtgaagacttctttgcttacaacagagccaagggaactctttacgatggcgaaactcgtctctttttgcgacatgatgattcaccagtgtatatgtatagtatgggagggatggctgagtactgtgttacaccagctcatggtttagctcctctaccagagtctttgccctactctgaatctgccattctgggatgtgctgtttttacagcatatggtgctatggctcatgctgctgagatccgtcctgggggttcgctatgggggtgtgtggaatgggggcgggtggctcgacggtgg

SEQ ID NO: 121620 - DNA, 640 bp, Arabidopsis thaliana
  unsure (1)..(640): unsure at all n locations
tttcttgaccctggaacccnaacttcagcgnnccctagttgaagntggtggaannctntgatgatggcnctcacagctggtccgttggngaattgccntaatcgacttgttcgtagaaggttaaagttataggatcttatggaggaagagcaagacaggatcttcctaaagtagtgaaattggcagagtccagggattttcaatctcacaaacgcagtctcaagtaaatacaagtttgaagatgcaggaaaagcatttcaagatctcaacgaaggcaaaatcgtgagccgaggtgttgttgagatactataaccaatatagccttttgattctggtttgtgaatgactgcttcacacctgtttcactgaggtctatttttagttgctacaatcttcagacaaggtcattgttaatctgatatttgtgtttgtttagacagtgaaaaggaaaaaaaaaaactgtagtaactggacaaaatttataattttactgtttttcatttctttccaacatttattgtttttctatactgttaatatttttaattaaaaaaaaaaaaaaaaagnnnnnnnnnnnnnnnnnnnnnnnnnnnnnnnnnnnnnnnnnnnnnnnnnnnnnnnnnnnnnnnnngtgtcctaa

SEQ ID NO: 121621 - DNA, 410 bp, Arabidopsis thaliana
  unsure (1)..(410): unsure at all n locations
aaggatcattaatagatttccaatcgggtctcgtgtagttggagctttcattatgccttgtggaaccngttcttattgtgctaagggccatgatgatctatgtaaagacttctttgcttacaacagagccaagggaactctttacgatggcgaaactcgtctctttttgcggcatgatgattcaccagtgtatatgtatagtatgggagggatggctgagtactgtgttacaccagctcatggtttagctcctctaccagagtctttgccctactctgaatcttgccattctcggggtgtgctcgtttttacagcaatatgggtgccaatggctcatgctgctggaagatccgncccggggggcttttcttttccagttattcgggtaatttggggggttggggggccca

SEQ ID NO: 121622 - DNA, 560 bp, Arabidopsis thaliana
cacgttcatgttgagccgccccccccagccgcccctagtattcgccagctcctatacgactcatatagggaaagctggtacgcctgcaggtaccggtccggaattcccgtgtcgacccacgcgtccgcgagatcagaatgggatttctgtttttatcaaggcagtgtggtcgaacatcttgatggtcacactgatataatccacaaacagctatacagcgattggttaccttgggggatgaagagaagagatttttcgctacggcgttactggagaagggaagacgatggcacatatgttattctctatcattctgtatttcacaagaagtgtccacctcagaaaggctatgtccgtgcgtgccttaaaagcgggcggttatgtgatttctcccatagcacaacggaaaacaatcagttgtgacgcacatgcttgctgttgattggaagtcctggagatcttatgtgaagccgtcggcttagactcgatctaattaccgcgaagaatgctcggaagaatttctgccctgagagagctttttagggcaaaacacggaagct

SEQ ID NO: 121623 - DNA, 840 bp, Arabidopsis thaliana
  unsure (1)..(840): unsure at all n locations
ataatacgactccttaagggaaagacggtacgcctgcaggtaccggtccggaattcccgtgtcgacccacgcgtccgctcagacacaaagatatttacatttttgcagacaataatgggtactttggtcaacggtactattccggcgatgaagtgtcccaagaatgtggcgatgatgaagacaacgtctaacggagtgttcgatggagagagtccattagatttcgcttttcctcttgtcattcttcagatttgccttgtcgtcgccgtcactcgctctttggccttccttctccgtcccatgagacaaccacgtgttgtcgccgagatcattggcgggattcttcttggcccgtcggctctcggtagaatcacgtcgtacaagaattcaattttcccggcgagaagtctaacggtgctcgacactctagcaaacctcggcctccttctcttccttttcctcgtcggactcgagatcgatctgacatctctccgacgtaccggcaaaaaagcgatttccatcgccgccgccggatgcttctccccttcggtatgggcattgtcacctccttcgctntccctgaagcttcttcttctggcgacaatagcaaagtacttccgttcatcattttcatgggagtcgcgctctcgatcactgctgttggagttgtggcgagaatactcgctgaattaaagctactcacaaccgtctcggccagatttcaatgaacgccgccgaattaacgactgcgggcttgggttttctagctctcgtgatctcttccggcataagattctcggttgtccttctgggtctgtaagggaatgcgttgggatcggg

SEQ ID NO: 121624 - DNA, 399 bp, Arabidopsis thaliana
ccggggggacccacgcgtccgcaaaaaacctttaattaaaaaattgagaactctcttaccttcccatactccggcaacggtaacaacggcggcgagaagaagacacgtcatacattgcgccggtaagagatctgactctttctccattaattccagtagctccgattggcaaagctcctgcgccattctctcaagcaaagttaactcacaagaacaatctgaatccttatcttccaattccaatggatcatcatcctaccacgtttccgccgtcaacggtcacaacaacggcgccggagtctcagatttgaatctagttccattcaacaacaaccaatcgattcaatcgaagaagcctttaagtatttcagatctatctccagctccgatgcatggatc

SEQ ID NO: 121625 - DNA, 800 bp, Arabidopsis thaliana
  unsure (1)..(800): unsure at all n locations
aatacgactcactttagggaaagctcgtacgcctgcaggtaccggtccggaattcccgggtcgacccacgcgtccgagtagatcgctctgttttcttttgttttctgatctctctttagtctttgaatgattggtgaagagtgttttctgggaacttgccttaagctatagctagaaagatacacaaagatatatccatctcaaagctcctgatgtgaagagtgtttgttctgtttttctaatccaagagatattgtccggaactgttcttcagtgtttggtgtcttagaagaaagaaacacttttggagcattatgcataggagtttctgaagatttcaagctaattactatcattaatcagctatgaagtttatgaaacttggatctcgtcctgacactttctacacttctgaagatttaagatgtgtgtcctctgaagcttccagtgattttactattgaagtgtcaggaagcagatatcttcttcacaagtttccactgctcctcaaatgcttgaggcttcaaagaatgtgctctgaatctccagaatccatcatccatcttccagagtttccaggaggagtggaggcctttgagctctgtgccanattctgctacggaataacgataactatcagcgcgtataacatcgtagcagcgagatgtgcagcagagtatcttcagatgtcagaggaggttgagaaaggaacttggtgacaagctngaagttttcttcattcttgcatncttaatggatggagagactccatagtcacacttcagaccacgataagcgtt

SEQ ID NO: 121626 - DNA, 941 bp, Arabidopsis thaliana
ctcttaagcaggcgatcgggttgcttccggagaatgctttggttgggtttgtgtcgtttggtactcaggctcatgtgcatgaattggggttctctgagatgtctaaagtttttgtctttaaaggcaataaagaagttaccacgcgtccggttggggcttgggtcttcttcgaggagagctcctacttctgggttttctaaaggagcgcaaaacggattccagagttccggtgttgacagattcctgctgcccgcttcggagtgtgaatacacactggacttgcttttggatgagctccaatcagaccagtggcctgttcagccaggtcatcgtccccaacgatgcacaggggttgcattgagtgtagctgcaggattgcttggagcttgcttacctggaactggtgctagaattgtagctttggttggaggtccatgtacagagggccctggaacgattatctcaaaggatttgtcagatcctgtgcgctcccacaaagatctagataaagatgctgctccttattataaaaaagctgtaaagttttatgatagtattgcaaagcagcttgtcgctcagggtcatgtgttagaccttttcgcttctgcacttgatcaggtcggggttgctgaaatgaaagtagccgttgaaagtaccggtggtctcgttgttctgtctgaaagttttggccattctgtatttaaagattcctttaagaggatgtttgaagatggcgagcactctcttggtctctgcttcaatggcacgcttgagataaattgttcaaaagaccatcaaattcaaggggttatcgggccttgctcatcattagaaaagaaaggtcccaatgttgctgacacagtcattggagaggggaatccagtgcttggaaatggtggggctcgacagagtacctgcttgactgtattctttgatctatc

SEQ ID NO: 121627 - DNA, 1307 bp, Arabidopsis thaliana
aatacgactcctttagggaaagccggtacgcctgcaggtaccggtccggaattcccgggtcgacccacgcgtccgcccacgcgtccgcttagatcgatttctaaagtcttcgtcttcttcttcttctgataactagctttttcaatcttctgaagctttaattttttcatacccatggctaatcgttatgatccaaatcctttcgctgaggaagaagaagtcaatcctttcgctaatgctagaggagttccacctgcgtcgaattcgagactttcgcctttgcctccagagcctgttggtttcgattatggtcgaaccgtagacattcctcttgacagagctggtacacaggatttgaagaagaaagagaaggaactccaagccaaagaagctgagctaaaacgacgagagcaggacctcaaacggaaagaagatgctgctgcacgagctggaatcgttattgaagtgaaaaactggccgcctttcttcccacttatccaccatgacatcgcaaacgaaattccggttcatctccaaagactacagtatgttacctttgcaacgtatttggggttggttctttgtctgttctggaatatcatcgccgttactacagcttggatcaaaggagatggagtgacgatatggcttcttgccttaatttacttcatatgcgggtgttccaggaggctatgtgttatggtatcgaccactctaccgtgccttcagaactgatagtgcattgagctttggatggtttttcttgttcatatgctccacatgctttctgcgtcttgctgagttgctcacctgtcgcttcaaggaaatctttgctggatctaccgcatagatgctagtgtcagcatttcaagcaattgttgggatattctacttcattgggtttgcatttttctgcctcgaatcagtggttagcatctgggttattcagcaagtgtatatgtacttccgaggcagcgggaaacaagatcaaatgagacgggaagcagcgagaggagccttgagagccgctgtttgagagttctccttgtaacattctggtttgtgtatgcactgtttcttttttcagattttcttgaagtctctctctctctctctctctctctctgctctataaacaaaaaaaaaaagatttaatttttcctttgtacctttatgtcatgtaaatttgtttgttcaaaaatcagagttcagattcaaaaaaaaaaaaaaagggcggccgctctagaggatccaagcttacgtacgcgtgcaggcgacgtcataagactcttctatagtgctcctaa

SEQ ID NO: 121628 - DNA, 605 bp, Arabidopsis thaliana
  unsure (1)..(605): unsure at all n locations
ccnccccncnnagactganggccatggccttggagggttcctggncaaagcccncatgcttccgcgcttgctgcattgcccccctgcgtcttcaaaggaaaacctcttgctgggatcttacctgcaatagatgtcttaagcggtcaagcaattgttgggatattctacttcattggggttgcatttttctgcctcgaatcagtggttagcatctgggttattcagcaagtgtatatgtacttccgaggcagcgggaaacaagatcaaatgagacgggaagcagcgagaggagccttgagagccgctgtttgagagttctccttgtaacattctggtttgtgtatgcactgtttcttttttcagattttcttgaagtctctctctctctctctctctctctctgctctataaacaaaaaaaaaaagatttaatttttcctttgtacctttatgtcatgtaaatttgtttgttcaaaaatcagagttcagattcatacgtattttgaaatcaaaaaaaaaaaaaaaaaaaagnnnnnnnnnnnnnnnnnnnnnnnnnnnnnnnnnnnnnnnnnnnnnnnnnnnnnnnnnnnnnnnnnntcgcctcaa

SEQ ID NO: 121629 - DNA, 599 bp, Arabidopsis thaliana
  unsure (1)..(599): unsure at all n locations
tgactcccggcactaatacngactcactataggagaaagcctggtcccgcctgcaggtacctggtccggaattcccgggtcgacccacgcgtccgatttctacagtctccattcttggatgggtttgctctctgtttctctcttcgctgcccagtgggtgactgggttcatgagcttctggcatagaggagaagtacggactacaagaaccacgtttcttccctggcatgtattcctcggactctatacctatggtttagccattgccacagctgagaccggactgcgtgagaaactgacgttccttcagaccaagaggaatgtccccagacgcggttctgaatcaatgactgtcaatggtttagggcttggcttggctctactcggttgcattgttataactgctgctattctgccaaagtatcagagccattctcgtgatgagaaactcgtttattcatctcaagatcgtcctaaatgtttgtcttcttgagttcttaattntcattctttctagtttagattggtttggggacaaactacacatctctggtgtacaaaaagaacaaattagttcttcgaaaatgtattaccgcatt

SEQ ID NO: 121630 - DNA, 609 bp, Arabidopsis thaliana
  unsure (1)..(609): unsure at all n locations
cagctctcctacgactcactattnggaaagctggtccgcctgcaggtaccggtccggaattcccgggtcgacccacgcgtgcggctctttgtttccactctctctctctctacctctcacatcgttctacttctagggtttggctaatttagattcaacatctcctttaaaattctctgttcttttgtattcctaatctttaacaatttaagaagaaatggattcgaattcatggatcaattgtccccctgtgttttcatcatcgccttcttcacgccgttaccaatctcgatcagatttgtatttgggagatgttgaaggagaagacgatttgaaagctgagtttatgtgtcctttttgtgcagatgagtttgatattgttggtctttgttgtcatattgatgtgaatcatcctgttgaagctaagaatggggtttgtcctgtctgcacaaagaaggtgggattggacattgttggccatataacaacgcaacacgggaacgtatttaaggtgcagcgaggaggaggttcgtaaaggtggtatagctcaccnatctacnctnaaaaagggttcgngaggtactttcagccttggngggctccctttgc

SEQ ID NO: 121631 - DNA, 463 bp, Arabidopsis thaliana
acggacgcatgcgcggtcgcgtgagcgagaaagtcggaatttttccgagaaaattcaaaagggcgaaaaaaagagcttttgcgtacagttttcgaattggtctccttcgtacgggcaagctatggttcaagagaactatgaatgaaactgtggtgtaagagaatatcaatggttgttatctgctataatgttttttggaccaagtgagtttgatgctgatgaaatgggttatgcaatgagtagacttgagatagaatccgatctatgtgatactggaaaagacgtttgtggagttggtagtagtagtggtagtcacagatcaagtgaacatttggctgatctagaccatgaaatcagccaggttactaaattgaaatctagtcctcatcaacggtatagccgtgaagtccctgggagacatcagttacctgtgtctactgtgaggatgttggcaggtcgagaa

SEQ ID NO: 121632 - DNA, 1016 bp, Arabidopsis thaliana
  unsure (1)..(1016): unsure at all n locations
gaaagattgttacaaggccttgggagtagttcacaagctatggtctgaagttcctggaaagctgaaagattacatttctcatcccaagttcaacgggtaccaatctttgcatactgtagtgatgggtgatggaactattccgctggaagttcaaatacggacaaaggagatgcatttgcaagctgaatttgggtttgcagctcactggagatacaaggccgcgcgccgcaaacactcatcgtttgtgcttcaaatggttgaatgggcaagatgggttgtgacctggcattttgaaaccatgagcaaagacggatcgtcgatctgctcttctgagcccttgtgcagtttcccgtctcacgcagaagactgtccgttttcatataagcctagtggtaaccaagaaggaccagtctatgtgattgtaatcgaaaatgagaagatgactgtgcaagagtttcccgagaattctaccgtgtcggacctgttacgcagagcaggaccagggagctcgagatggtcaatgtacagcatcccggcaaaggaagagctaaggccaagacttaaccagacacctgtaagtgatctgaaatgcaagctgaagatgggagatgtggtggagctgactccagccatacctgacaagtctctgactgaatacagagaggaaattcagcggatgtatgatcgagggcttgcgttttcacggcctcaccgtgcagctactggtaccatggttggctggggaagctaactgattctcttaattacctttgttcatgtatatatactatagttgcatatatagtataatgcttcagaagatttgttgtaccttcggtattgttgattcccacacaacagtgtatataagatatgcctatatgttctaaaaaactgactctggtcattaatatttgattctcttacaaaaaaaaaaaaaggacggccgctctagaggatccaagcttacgtacgcgtgcatgcgacgtcatagtcttcntataagtcacctnnnn

SEQ ID NO: 121633 - DNA, 893 bp, Arabidopsis thaliana
  unsure (1)..(893): unsure at all n locations
catggcttctaacaaacgctgtctgaatcatatttcgattctgatttttcttcatggattcgtatagccaataagttttttcaatattcaaaacaaaaaccccatcaaaataatctccggaccagtttctctttcgattcagtcggaccggaaaaacaatggcgtctgtgaaccctttcgatctcttggacgatgacgcagaggatcccagccagattgttgcgtctaagccattgaaggttgtggctccggttcagactgctaagtctggtaagatgccgactaagccgcctcctccttctcaagctgtgagggaggcaaggaacgctcctggtggaggtcgtggtgctggacgtggagggagttatggtcgtggtggacgtggtggaaacaatagggattcaaggaacaatgatggtcctgccaatgaaaacggatatggtggaggctacagacgctcagaagaaggagatgggagctagacgtggtgggccttttggtgggtaccgtggtgttcgccgtggaagctacagcaatggtggtgattcaggtgactctgaaagaccacgcaagaactatgaccgtcacagtagaacagcgtacgggaatgacgataaacgtgatggagctggccgtgcgaattggggaaccactcaggatgatattactccggtgactgaagaatccacagctgttgtggacaagaatttgactgttgagaagcaagatggtgaaggtgaagcaactgatgcaaagaatgaaacacctgctgagaaagcagaggaaaagcctgaggacaaggagatgactttggaagagtatgagaaggttttggaggagaagangaaagctcttcagnaaggaaaagcctgaggacaaggagatgactttgg

SEQ ID NO: 121634 - DNA, 552 bp, Arabidopsis thaliana
  unsure (1)..(552): unsure at all n locations
gattggatttggttcaactaatggtggttttacgattgcaggcggaggtgttaaaatctttttcctggccacaatatatgcattgatcggatgtccactctcttatgtactatggtacaggccactctaccgagccatgaggactgacagtgctttgaagtttggttggtttttcttcacctacttgattcacattggcttctgcatcgttgctgccatcgcccctccaatctttttccatggaaaatcattaacgggtgtgcttgcagcaattgatgtcatctcagacagtttattagctgggatcttctactttatcggattcggtctcttctgcttggagtcactgctgagtctatggggtcttcagaaaatttacctctactttaggggaaacaagtgaaaaggagataaagacgaagatgatggtaattttcccttacgatataaggctgaaatatgngacccccangatgaataccattancggttgagcgtgtgtgatgaggaatccttaggaccaagacaaaaaatggtgccggcatcctaggc

SEQ ID NO: 121635 - DNA, 828 bp, Arabidopsis thaliana
  unsure (1)..(828): unsure at all n locations
attaagaaattgagatctgacatatcagtgaactgcttgttcgagtccttggaggatgtgaacgagccgtagcatcttttggctaggtcccagagctttcctcctccgggtaaaccgtgtgtcatgagggatccctgcatggtagaacccaaagtcattttgaagtaagaggaggttcaaagaatggaccgacaatccgaaaagagtcaccacggcgtatttctctccttggctatggcggtagattccttcgaggaatacgcagcgattaacgccgagggacgcttaatgccgcccataacttttaaccctcttgccttgcatccagccacaagtttgagagtctgatctctatccaatttgagcctcaccagttgcgatctccggttcgaattctctgcgtccacgaaattcaaattcgaaaaccgaaacgcgttcaacgagtaaccaagcacgtcgatgccacgcgcccagaacggtttatcccctttcccactcggaatcagctcctctatcgccttacttaatcccaccgccgtctccgtcgccgccaccacgggaccgtttccgaaaccatcagccgccgtctctttcataaactctctcagaagcgtaaccgccgcagtacgatcgaccgccgccgtgttcaagccgaaaatgtgaggtattccgtttgctcttccgtcggtcggttagatcgtagaggccttgaccggtaaaaaacggggtgactngggtttttatccaacggtcgtcggtttatccacgtcgtttttttaaancttgtgtttcttaggttantcttttnttgntcancnnattgntntg

SEQ ID NO: 121636 - DNA, 462 bp, Arabidopsis thaliana
  unsure (1)..(462): unsure at all n locations
gcgtttaacggagtaacccagcacgtcgatgccacgcgcccaggacggtttatcccctttcccactnggaatcagctcctctatcgccttacctaatcccaccgccgtctctcgtgccgcttggagtcactgctgagtcctatgggttcttcagaaaatttacctctactttagggggaacaagtggaaaggagataaagaggaagatgatggtaattttcccttacgatataaggtctgaaatatgtgtatctcctatgaatgtaattaccattttaccgtttgatgcgttgtgttgattgaggtaaattctttagttactatagtagcaagagagagtggttgttcggccatttctttatgttttttactctgttcttctctggtctgtaatataccaatatcgtctcttaaaaaaaaaaaaaaaagggcggccgctctagaggatccaagcttacgtac

SEQ ID NO: 121637 - DNA, 439 bp, Arabidopsis thaliana
tgactgatgaaggaatcgagagtcgggtatgcattatcctaacaacagaaccgaattcgtcggagctccagccccaacccggtatcaaaaggagcagttgtcaccggagcaagagctttcagttattgtctctgctttgcaacacgtgatctcaggggaaaacgaaacggcgccgtgtcagggtttttccagtgacagcacagtgataagcgcgggaatgcctcggttggattcagacacttgtcaagtctgtaggatcgaaggatgtctcggctgtaactactttttcgcgccaaatcagagaattgaaaagaatcatcaacaagaagaagagattactagtagtagtaacagaagaagagagagctctcccgtggcgaagaaagcggaaggtggcgggaaaatcaagaagaggaagaacaagaagaatggttacaga

SEQ ID NO: 121638 - DNA, 597 bp, Arabidopsis thaliana
cggcactatacgactcacttagggaaagctggtacgcctgcaggtaccggtccggaattcccgggtcgacccacgcgtccgacttgattgatctgatcatcagatacttgcagcccccaataattcactatctctctctcttactcttttgttacaattctgttaacaaactttgacgtcaccatttgaattcttatccaattcccatttcctaacagaatttttcctctttttctctttctctttttcattccttagagattcttgattctcccacttccttctttagtcgttacagtctttgctctgttttcaaaaaaaaaaagttggttcctttctcaacttttttcccgggaaagtgaatgagagctaaaagggtttatcatgtttgagattccgggtaatacaattcctctcaaataaaaagtttccatttttaatcttctttccaaattctgtagttttatggataagttagggttgagcaaaaggggttattttgatttcgctctcaagaacaaaaaatggatattattagcagtaagtggttacggtgcttttagggtttatcattctccttcaatttcccagaaacgg

SEQ ID NO: 121639 - DNA, 949 bp, Arabidopsis thaliana
aacacttctacttgaatcgcattggaagagcatcgtcacgactccatcacacttatatattttgtttattcaaatcttctttcagatttttatacaaaaaatataaattaaataaagaatcccataaatatctctctatcgaactctctctgcttttacaaatctcagaatctccttcagcgaattcacatctcagctgcttttgaatccgccgtaactaaaaacaatcctccttttctcgattcgttaaactatggccccgccggcaggacaaacggcggcggtggctgaagcggctggcgccgatggtgctccaccgcagcagcagcgtggatttggttccacgatttccggcatcgttagaatcgccgtcttttggtattttgcttctaagttcttttctcctaagcagaaacctatggatcccactgctccgtctcagctcatgactaatctcttccacaagggcgaatcattggatatgtggttttatctatcagagcaggagaagttcaatgactttggcaatgatcgtgcgctatattggcatgagacgaatataccttatgctgtatggacaccagagagtattaggaccaagtcacttacgtattatccatctgagacactacagaataatggaagtctgtatgctcatatcttttttgctcgatctggatttcccattgaccccactgatcctgaatatcaacctcttaatagttttagtaggacgcatgctgtggcgacttactttccaaagcagaaaaaaaataagaagaagagtctcttgggcagtcccaaagactctgatgaatccgaacctgaagttgagaaagttggagataagagatcagatcccaaggaagaggtccctgtggaatggatatccctctggaaacctaatgtcacgattaacctggttgatgattttactcactattcacag

SEQ ID NO: 121640 - DNA, 594 bp, Arabidopsis thaliana
  unsure (1)..(594): unsure at all n locations
tatacgactcatatagggaaagctggtacgcctgcaggtaccggtccggaattcccgggtcgacccacgcgtccgcggtgatcttcgcttacgcagtcaatttccctatccagaagtttctccaatcacaaagcatcgtcactccaagtgcctacatatcagctgcaacgcttgtgatccatctcatactttcgtggatcgctgtgtatcgtcttggttacggtcttttggctttgtctttgatacatagcttctcgtggtggatcattgttgtggctcagattgtttatattaaaatgagtccgagatgtcgtcggacttgtgaaggttttagttggaaagcttttgaaggtctttgggattttttccgattatcagctgcttctgccgtcatgctttgtcttgaatcttggtactctcagattcttgttttactcgccggacttctcaagaaccctgagcttgctttggattctcttgctatctgcatgtcaatttctgcaatctcattcatggtctccgttggattcaacgcagctgcaaagtgtgagaagtaagcaacgagctaggnagccggaaaccnggagcaagccg

SEQ ID NO: 121641 - DNA, 1115 bp, Arabidopsis thaliana
  unsure (1)..(1115): unsure at all n locations
ggggagggcgcgggcgagggtcccgcgggggcggtagtattcgccggctcctnnnnnnnnnnnnnnnnnnnnnnnnnnnnnnnnnnnnnnnnnnnnnnnnnnnnnnnnnnnnnnnnccaggcgtgcgcgatgatttcgtcttccgtcgtcagctcatgaaactaaatctctcgaatctcagatttctacgtacccgaaaatcgttaatctcccagacgcgagcaatgactcaaaatccggatccaaaacctgatccatcgcaggttctagacgatatcctctgttcggagcagcgtgatgggcagattgaggaaacagtcgacacagcgccggcgagcttgggctctccaagtcgggtcttaagcattgatactagagtagagagagcttgggcacactggaaaaaactgggtagacccaagtatatcgttgctccaatggttgataactctgagcttccgtttagattgctctgccagaaatacggagctcaggctgcttatactccgatgttgcattctaggatcttcaccgagactgagaagtatagaaatcaggagttcaccacctgtaaggaggacaggccattgtttgtgcagttctgtgctaatgatcctgatacgttattggaagctgcaaagagagtcgaaccttactgcgactatgttgatatcaatttagggtgtcctcagcgtatagcgaggcgaggaaattatggcgcattcttgatggataatcttcctttggtgaaatcacttgttgaaaagttagctcagaacctcaatgttcctgtctcctgtaaaatccggatcttcccgaacctggaagatacactcaagtacgccaagatgctagaagatgctggttgctcgctcctagctgttcacgggcgaacaagagatgagaaagaccggaagaaatttagagctgattggagcgcaatcaaggaagggaaaaacgctatgagaatccctgtcttagcgaatgggaatgttagatgcattgaagatggcgataacttgcatcaaaaagaccggtggtgaaaggtggtcttctttggggagacccttctttgaaaacccgggggccttttgcttgggttaagaaccgcttga

SEQ ID NO: 121642 - DNA, 510 bp, Arabidopsis thaliana
  unsure (1)..(510): unsure at all n locations
gccnnnnnnnnnnnnnnnnnnnnnnnnnnnnnnnnnnnnnnnnnnnnnnnnnnnnnnnnnnnnnnnnnnnnnnnccaggcgtccggttggttttggaccttttggttctccatcttcaaaatctcatcaatccgattagagaaattagggcaacgtaattttggcgaaaatcctctctctgttacgaatagattgtttttgattactaaagctggattcgtctctggtgctgtagattttcgagatccggtcagagtcgttcgtgaaaagctccttgtttaagtgttacgggctacatcggacgctgactggcttttcatggaatttgagtgccaagagagacttgaagctgcgaacgatcaaagaagtgagtctggtcttttgaataccgatttgagaataggtaatgatgggtctgttgagattccaaatgtgaagttgtgttgtcagaaaaagaagggaactttagtgcccagtggctcgaaacagttactctcttgacaggatttg

SEQ ID NO: 121643 - DNA, 858 bp, Arabidopsis thaliana
gtttcgtcctcgaagcttttagaacttagccaagcagctgttgtttcttagttgactccctctccgacgaaaatggtgtccacgagcaagatcaaatccgttgatttctataggaaaatcccgagggatttgacagaggcgtctctgtctggtgctggattgtccattatagcagccctctctatgatatttctatttggaatggagttgaataattatttggctgtcagcacttccacatcggtcattgttgacaggagcgctgacggagacttcttgcgcttagattttaatataagcttcccgtcactttcatgtgaattcgcatctgtggatgtcagtgatgtattaggaactaacaggctaaatgtaacaaagacaattcggaagttttctattgattcgaatatgagacccactggttctgagtttcatgccggggaagttttatcactcattaatcatggagatgaaactggtgaagaaatagttgaagattcggtaccacttactggacgcaactttgacacatttacacatcaatttccaatcttggttgttaatttctatgcaccgtggtgctattggtgtaatcgcctgaaaccatcatgggagaaagcagctaaacagagataagagagatatgatccagatctggactgacgtgttattttggcagaagttgactgcaccgaataatgtgatctctgtcggaggaatcatatacaagggtattcatccattcgcattttctgcaaaggcagtgatcttaaggatgataatgcacaccatgaccatgaatccgactatggagatcgtgatacggaaagcttagtgaagatggtggtgaatctggtt

SEQ ID NO: 121644 - DNA, 1431 bp, Arabidopsis thaliana
  unsure (1)..(1431): unsure at all n locations
atgatcctgccagcacnnnnnnnnnnnnnnnnnnnnnnnnnnnnnnnnnnnnnnnnnnnnnnnnnnnnnnnnnnnnnnnnnnnccacgcgtccgcccacgcgtccgctctcggactacgtacatgcctacaatgcctgcactcacctgatttaattattggtttagacaaatatcttcagtattatgtctcacaggcgaaatctggctgcggctctcggactacgtacatgcctacaatgcctgcactcaccagatgtacaacgggatcaaaattccaatggaagaagaaagaaaagacacctaccactcagaagagagaatctcaggtttcggctatgaacggtgagaattcttttggggcacgcaaatatgtgtcagaataaacagcttgcacaaaatccgcagtgagcttgatgttgtggaaaaaagagtgatcacacattttacggaactgtgagtcagctcacaccgatgacttttccaacggctaagaaaaaaagtttgagctcacaccagcggcttgcatagaaggcgttcaacagctttctgagtctctggctnataaggtcgtcttccacgacctaagccacacgttatgggacgggttatacatcggagacctctcttcctctagaatcgatcctttcctcaaggaactcgaacagaatttgacagtcatagcagagacagtacatgaaagagttcgaacacgcatcatcaccgatattatgagagcctctttagatggcttcttaccttgcctgcttgccggaggaccctctagggcgttcacaagacaagactctcagataatggaagaagatttccaatcaatgaaagatatgttctggctaacggagacggtctagccatggacctgatcgataaattctcaaccactgtcagaggcgtgcttcctctgttcagtacagatacagacagtttaatagagaggttcaagggaacgaccctcgaagcatatggttcttcagctaagtcgaggcttccgttgcctccaacatcaggccagtggaatggcatggagccaaacacactcttacgtgttttgtgttaccgtaacgacgaatctgccacgaggtttctcaagaagacatataatctacctaagaagctttagtaaacttacggctactactgcaacgtataataacctcacaagatgaagagtgtgtgttccacttgcaggagggagcctccgagatttggattagtgagtttcaatttttttttggttttaatgggttttttttctaatacattcctatacggactatttaattcatttatatcttttgttattattatttttgaagtatccaaataaaaaaaaaaaaaaaaaaaagggcggccgctctagaggatccaagcttacgtacgcgtgcgtgcgacgtcatagactcttctatagt

SEQ ID NO: 121645 - DNA, 541 bp, Arabidopsis thaliana
ctatacgactcatattggaagctggtcgcctgcagtaccggccgggattccgggtcgaccacgcgtcgggagtgattatgaaagcgtgtaagcctgcactcgagtctaattacatcacgaaagttattcacgattgcaagcgtgacagtgaggctctatacttccagtttgggataagattgcacaatgttgtggacactcagattgcttattctctgattgaagaacaagaagggcggaggagacctctagatgattacatatcgtttgtttcactccttgctgatccacgttactgcggtatatcctatgaagagaaagaagaagttcgagttctcatgcgccaggacccaaagttttggacatacaggcctatgactgagctcatgatccgcgcagctgctgatgatgtccgcttccttctgtatctctatcacaaaatgatgggaaagctaaatcagcggtcactatggcatcttgcagttcgtggtgctttgtactgtcggtgtctctgctgcatgatgatgctgatttgctgatt

SEQ ID NO: 121646 - DNA, 562 bp, Arabidopsis thaliana
cacacgcgtccgggacagtcccctcaaataaaagttgtgagagctgtttcgtcgctttgatcgaaatggcgtcgtcttctccaactcagctagctcacgtcccgattcctccagaaccaggaggaaggtcgccgacacaagaagctaatgagccaccagttccgatttacattgtgacggatccgtttcaacttcctgctgatttcctaaacccttctcctgaaaagaaattggttatcggttttgactgtgagggtgttgacctctgccgacatgggaaactttgtatcatgcagattgcattctctaatgcaatatacttggttgatgtcatcgaaggtggagaggtgattatgaaagcgtgtaagcctgcactcgagtctaattacatcacgaaagttattcacgattgcaagcgtgacagtgaggctctatacttccagtttgggataagattgcacaatgttgtggacactcagattgcttattctctgattgaaggccaagaacgggcggtgggggccctcttgggtggtttccatatcggttgttttaccccctt

SEQ ID NO: 121647 - DNA, 511 bp, Arabidopsis thaliana
  unsure (1)..(511): unsure at all n locations
nnnnnnnnnnnnnnnnnnnnnnnnnnnnnnnnnnnnnnnnnnnnnnnnnnnnnnnnnnnnnnnnnnccacgcgtccgctatttcacaaaatcaggttattgttatctctggagaaacaggttgcggcaagaccacacaaatcccgcagtttattttagaatccgagattgaagcaaaccgtggagctttttccagtatcatatgtactcaaccaaggagaatatctgctatgtctgtttcggagagggttgcttacgagagaggagagcagttgggtgaatctgttggatataaagttcgattggaaggtgttaaaggaagagatacccgcttactcttctgcaccacaggcattttgttgagacgcttgttggtagatagaaatttaagaggagttactcatgttatcgtggatgaaattcatgagcgtggaatgaatgaagacttccttcttatcattcttaaggatctgctatctcgtcgctcagagcttaagctgattttgatgagt

SEQ ID NO: 121648 - DNA, 588 bp, Arabidopsis thaliana
  unsure (1)..(588): unsure at all n locations
gcatctagcctcctctcccttcccgtgcccccctgatattcgccnnnnnnnnnnnnnnnnnnnnnnnnnnnnnnnnnnnnnnnnnnnnnnnnnnnnnnnnnatagtgcttgggttccaggcggtccgcaatctggtgccactgttggtgaactttattacaggattgcggagaagagcaaagtccatgggttcccggcgggtttgtgctcgagcttaggcataggaggacacataacaggcggtgcgtacggttccatgatgcggaaatatggtctaggtgcagacaatgttctagacgcaaagattgttgatgccaacggtaaattactcgatagagccgcgatgggtgaggatacattttgggctattagaggaggcgctggagggagttttgggataattctagcatggaagatcaagcttgttcctgttcctaagaccgtgaccgtctttaccgtcaccaaaacgttacaacaagacgtgggtaacaagattatctcaaagtggcaaagagttgcggacaagcttgttgaagagctattcatcagagtgctcttcaacgtagctggaaccggtgggaacaagac

SEQ ID NO: 121649 - DNA, 413 bp, Arabidopsis thaliana
aaattaaaacaaatcaatgttgatattgaatccaatagtgcttgggttcaacctaggtgctacagcttggtgagctgtactactgaatttctgagaggagcaagatccatggatttcccgcgggtttgtgcacaagcgtaggcataggtgggtatatgacaggcggtggatacggtaccttgatgaggaagtatggtcttgcgggagataatgttctagacgtaaagatggttgatgcaaatggtaaattactcgacagagccgcgatgggtgaggacctattttgggcgattagaggaggcggtggagcgagtttcgggatagttctagcatggaagatcaagcttgttcctgttcctaagactgttaccgtcttcactgtcaccaaaacgttagaacaagacgcaagattg

SEQ ID NO: 121650 - DNA, 661 bp, Arabidopsis thaliana
  unsure (1)..(661): unsure at all n locations
acaaaattttcccattaaatcgcaaagttaattttgcgattttttttctctttttttctggttgggttatttattttccccttttaaaaaacttctgcaacttgtcttgaaatctggggtaaaatatttcttcattggtttctggaaatctcggggaacgatttgttgggttttcttctttgtactctctcctcacattagcttttgttggtgggattttttgaggatggtgattgctgcagctgtcatcgtgcctttgggccttctcttcttcatatctggtctcgctgtcaatctctttcaggcagtttgctatgtactcattcgaccactgtctaagaacacatacagaaaaattaaccgggtggttgcagaaaccttgtggttggagcttgtatggatagttgactggtgggctggagttaagatccaagtgtttgctgataatgagaccttcaatcgaatgggcaaagaacatgctcttgtcgtttgtaatcaccgaagtgatattgattggctttttgggatggatttttgggctcagcgggtcaaggtttncctgggaaagccgcattaagccttgtaaatnnaaggaggttttncccaaattnccttnccngntaaatagggcttgnccaaaantggggttnnccggggntnt

SEQ ID NO: 121651 - DNA, 410 bp, Arabidopsis thaliana
cgttcggaatccttgtggttggagcttgtatggatagctgactggtgggctggagttaagatccgggtgggtgctgataatgagaccggtcaatcgaatgggcaaagaacatgctcttgtcgtttgtaatcaccgaagtgatattgattggcttgtgggatggattctggctcagcggtcaggttgcctgggaagcgcattagctgtaatgaagaagtcttccaaattccttccagtcataggctggtcaatgtggttctcggagtatctctttctggaaagaaattgggccaaggatgaaagcactctaaagtcaggtcctcagcgcttgagcgacttccctcgacctttctggttagccctttttgtggagggaactcgctttacagaagccaaacttaaagccgcac

SEQ ID NO: 121652 - DNA, 454 bp, Arabidopsis thaliana
tttactttcttgaacttgtcttgtgccctctttccaatacactgaaatccacttcaaaatatttatttaataaaaagaaaagaaaagaaaaaaactctgccaggatggcttctttgatcacaaccaaagcaatgatgagtcatcatcatgttttgtcgtcaactagaatcactactctttattccgacaattccatcggcgatcaacaaataaaaacaaaacctcaagtccctcaccggttatttgctcggaggatcttcggtgtaaccagagctgtaattaattcagcggcaccgtctccgttgccggagaaagagaaggtggaaggtgagagacggtgtcatgttgcgtggacaagtgtacaacaagagaattgggagggtgaacttactgtccaaggaaagatacccacttggctgaatggtacgtacctaagaaacggtcctggtctatg

SEQ ID NO: 121653 - DNA, 544 bp, Arabidopsis thaliana
aatccgactcactatagggaaagccggtacgcctgcaggtaccggtccggaattcccgggtcgacccacgcgtccgcttaactctaacggagttaactaacgtcgacattatgctagagggagatgagaaacagagccgagctctggatttcaatcgactcgaggttttgtcattactaggtcgtggagctaaaggagttgtgtttcttgtccgcgacgacgacgctaaattgcttgctttaaaagttatacttaaggaagccatcgagaagaaaaagaagggtagagaaagtgaagatgatgagtataaacgcgtgagtttcgagcaaggagtattaagcagattcgaccatcctctctttccgtctcttcacggtgttttagctaccgataaagtcatcggttatgcgatcgattattgtccgggacagaatctcaattctttgaggaaaatgcaatcggaaagtatgttttccgacgagattatcaggtaaatttgttgttgtttgacctaaatctttcatgtatacgtcttttttttttt

SEQ ID NO: 121654 - DNA, 542 bp, Arabidopsis thaliana
  unsure (1)..(542): unsure at all n locations
atgannnnnnnnnnnnnnnnnnnnnnnnnnnnnnnnnnnnnnnnnnnnnnnnnnnnnnnnnnnnnnnnnnnnnnnnnnnnnccacgcgtccgagcaaacaacaaatggctctttcaatcgttcttcttcccttcattctcattctcataccgacttttctcagttcggttttcgccgtttcaccactcaaaactgatacgttaaaaccggggcagcagctcagagactgggagcagttgatctctgcggatggtatcttcactctcggattctttacacctaaagactcatctacttccgaactcgggtcagctggtcttagatatcttggtatttggcctcaaagtattccaataaatctagtttgggtgggtaacccaaccgaatcagtttctgattcatctggttctctatccattgacaccaatggggttctaaagataacacaggcaaacgctattccaatcttggtgaaccaaagaccagccgcgcagctttcattggtcgggaatgtgtctgccattttactcgataccgggaac

SEQ ID NO: 121655 - DNA, 661 bp, Arabidopsis thaliana
  unsure (1)..(661): unsure at all n locations
taatacgactcatatagggaaagccggtacgcctgcaggtaccggtccggaattcccgggtcgacccacgcgtccgtgtaactcaaagccctcgctttaccgaagaaataaaagaaataagtgttgatcatggttcatctaacaacaatggtacttcttaccaaactcttgatgagaaattcgttgaggacatcgagaatggcgataagttctctggttctttggagaaaaaacccctggttgggtcacatttgcctcctagtactccttcaacaacagctccttcacctctcttgggtcttcctgaggtttctcacattggttggggtcattggttcactctccgtgaccttcaactcgcgactaatcatttctccaaggagagtatcatcggagatggtggttatggagttgtttaccatggaactttgactaacaaaacccctgtggctgtcaaaaagttgctcaacaatccaggtcaagctgataaagatttcagagttgaggtggaagctataggacatgtccggcataagancttagttcggcttcttggatatttccgttgaaggaacacatagggatcctggtttatnggtacatgancattgggaccttngggcattggntttcttggggcnttgtttcnnaanggggnttt

SEQ ID NO: 121656 - DNA, 568 bp, Arabidopsis thaliana
  unsure (1)..(568): unsure at all n locations
nnnnnnnnnnnnnnnnnnnnnnnnnnnnnnnnnnnnnnnnnnnnnnnnnnnnnnnnnnnnnnnnnccacgcgtccgaaaaaaaactcaaaactcaaaaccatctttgtgaaaaaaaaatggaaggaagacaatattaccctccgagagaaaacgttgaaggaaacagaaccaccatgggaggaggacctcactcaccgtggcattcaccggttccttatctctttggtggtttagcagcgatgcttggtctcatagcttttgctcttctaatcctcgcttgctcttactggcgtctctccggttatctagacggcgaggaaaaccagagcagagagagagatcttgaagtcggagatgtgaaacctgacaaaacggcggtgaagcctgtagctttgccggagaagttcttggtgattatggccggaaatgtcaaacctacttacttagcaacgccgtcggtaaaaacgtgtacttgtgacgatgatgaccatgaagatgatgacctggagggaagtgatcaggtggtgccgcggagtagtgaaagtaacggtgagacacattgacaaa

SEQ ID NO: 121657 - DNA, 528 bp, Arabidopsis thaliana
ggtgatgccaaagtagacgactacttgtagtaaacaaaacctttggctttaacactctcctccaaatcccagatctctctctgtctctgtcccgcggagtccccgagagattgatcaccatcacttttgtaccttccttgtactacctatggcgtctgctagcttcgttaagcctaacaccctctcttctccatggatcggccaacgctcctttgctcacacctctgcttcttcttctcctcctcctcgagtctccttcgcgatccgcgccggtgcttactccgacgagcttgttaaaaccgccaaaagcattgcatcccctgggagaggtatcttggcgatcgatgagtccaatgcaacctgtgggaagaggcttgcttctatcggcttggataacaccgaggacaaccgtcaggcctacaggcaacttctgcttaccactcctggcctcggcgattacatctctggttccattctcttcgaggagactctttaccagtccaccaaggacggtaagacctttgtcga

SEQ ID NO: 121658 - DNA, 806 bp, Arabidopsis thaliana
  unsure (1)..(806): unsure at all n locations
cgcgtccgaacgaaggaagatcacacgtgaaaatagtcatcaaccaaagtaagaagcgcacacacacaaacatatttctttcactacccaaagagatggcgacatcgggaacatatgtgacggaggttccattgaaaggatcggcggataaacactacaagcggtggagagatgagaaccacctcttccccgatgccatcggccaccacatccaaggtgtcactgtccacgacggtgaatgggactctcatgaagccatcaagatttggaactatacatgcgatgggaaaccggaagtgttcaaggaaaggaaagagatagacgatgagaatatggtgataacgttcagaggactagaaggtcacgtcatggagcagcttaaagtgtatgatctcatatatcagttcagccaaaagtctcccgatgatatcgtatgcaagatcacaatgatttgggagaagcgacccgatgattcgcctgagcctagcaactacatgaagttcctcaaaagcgttgttgctgacatggacgagcatgttctcaaagcctaaatccctttcgaaccatcgtcatcacctatcatcatcatcatcatcatcatcatacatctccctttgtgtgtgaacttgtatgggtgtttatatctttcatttgcgtagtgcaaaatcatttttaaataaattatggtttgagaaaaaaaaaaaaaaaaaagnnnnnnnnnnnnnnnnnnnnnnnnnnnnnnnnnnnnnnnnnnnnnnnnnnnnnnnnnnnnnnnnnnnnnnnnnnnnctactccaactttttctt

SEQ ID NO: 121659 - DNA, 729 bp, Arabidopsis thaliana
gaaacaaacaaacaaacaaaaaacacacttcactcgctacacaaggaagagagatggcgacgtcaggaacatatgtgacggaggttccattgaaaggttcggctgagaaacactacaagcggtggaggagtgagaaccacctcttccccgacgccatcggccaccacatccaaggtgtcaccatccacgacggtgaatgggactcccatggagccatcaagatttggaactacacatgcgatgggaaaccggaggtgtttcaaggagaggagagagatagacgatgagaatatggcggtaacgttcagaggactcgaaggtcacgtgatggagcagcttaaagtgtatgacgtcatctttcagttcattcaaaagtcacctgatgatatcatctgtaagatcactatgatctgggagaagcaaaacgatgacatgcctgagcccagcaactacatgaagttggtcaagagcctcgctgctgacatggacgcccacgttctcaaagcctaatccttctcacctaaacccatcatcatcgtgtgtgtaacttttgtatgatgttttcaatataataaatggggtttgcatgtatggtttcatctactgtaatatgctttgatgttgtttataataattaatgatttaaagagtaaaaaaaaaaaaaaaaaaaaagggcggccgctctagaggatccaagcttacgtacgcgtgcatgcgacgtcatagctc

SEQ ID NO: 121660 - DNA, 468 bp, Arabidopsis thaliana
  unsure (1)..(468): unsure at all n locations
caaaaaacacacttcactcgctaccgaagaagagagatagagagagggagatggctacgtcaggaacatatgtgacggaggttcctttggaaaggatcaagcggagacacactacaagcggtggagggaatgagaaccaccttttccccgacgccatcggccaccacatccaaggtgtcaccgtccacgacggcgaatgggactcccatggagccctcaagatttggaactacacattagtagatgggaaaccggagatgttcagggagaggagagagatagacgatgaaaaacatggcggtaacgttcgttggactagaacgtcacgtgatggagcagcttagcctgtgtgatgctaccatttttacagttcattcaaaagtccccggttgattttgtttcaagtncctttnncctgggggaagnganccgtttgntngcttnaccccngaacttcntttnngtttg

SEQ ID NO: 121661 - DNA, 901 bp, Arabidopsis thaliana
  unsure (1)..(901): unsure at all n locations
caaaaaacttctctctcttctctccgaaaaatcttttagagagagaaggttgataaaacttcttgccgtccggaggtttttccggtttacatgtcccgagtatgcgggcttatcatctggcagctcctcactcctttagtgatgttggccagctctcgtccggtattgatggctttcaaagcagcgatggccggcttcgtatcggcttctttgccgtttgcttcttcatgtttactgtttttgtttcctgtgcggtttctcctatagtttgctctgttggatctgccgcttcatctttgtcttaaactcaagacggttcatggtttcgattatgcctttgtttggtgattataagcttcttttcctatgctgatgttaattgccttttcgtcgctggttctatggttttaagagtttcaatatgggaggccatcagttatggactcttcaatttaatcaatttatctttacccaagtttgctggaatttatagcaactagttaaaattggttaattgatgtttgtccttttttacccggtgagcaaaaacaaaatttcattgttaggataagttttccggcgatgatcaattgaccggagttgagctctttgtgcgatggaggttggtgggataacacgtgtcctcatacgtatcgttagacacgtcctttgaagcatatcttcttctttggttttttgcttgggcttctttgtaagcttttgttgtaattggactggcttgttgggcttgtaaaagtttatcaataataaaacagttgagacaaaaaaagaaaaaaaaaaggtcggccaccgaaaagtgagctggtcgacccggcaatnnnnnnnnnnnnnnnnnnnnnnnnnnnnnnnnnnnnnnnnnnnnnnnnnnnnnnnntagctg

SEQ ID NO: 121662 - DNA, 1567 bp, Arabidopsis thaliana
  unsure (1)..(1567): unsure at all n locations
atgannnnnnnnnnnnnnnnnnnnnnnnnnnnnnnnnnnnnnnnnnnnnnnnnnnnnnnnnnnnnnnnnnnnnnnnnnnnnnnccacgcgtccgcggacgcgtgggtcacttttttgcatctttctcaaaatatatcaaaggagacttcataaagaaagaatctttagtgtggagagactaaaaggacaccacaagcttatttcataagaaacttcaaattagaatcagaaacaagagcatccttcttcatttacacaggtaaattaggtgtaaaaatggtgatgagaagtgtggatctacgatcagataccgttactagaccgacagatgcgatgcgagaagcaatgtgtaacgcagaggtggatgatgacgtcctcggatatgacccaacggctagacgtcttgaagaggagatggctaagatgatggggaaagaggctgctctgttcgtgccatccgggacaatggggaatctgatcagcgtgatggttcactgcgacgtgagaggcagcgaggtgattcttggcgacaattgtcacatccatgtttacgagaatggagggatatcgactatcgggggagtgcatcctaagacagtcaagaatgaagaagacgggaccatggacttggaggccattgaagcagctattagagatcctaaaggaagcacgttttatccatcaacaaggttgatttgcttggagaacacacatgccaactctggtgggagatgtttgagcgtggaatacactgagaaagttggagagattgcgaagagacatggcgtgaagctccatatcgacggagcccgtcttttcaatgcttccattgcacttggagttccagtccataagcttgttaaggctgcggactccgttcaggtgtgtctctctaaaggtcttggagctccggtaggatctgtaatcgttggttcgcaaagcttcatagagaaggcgaaaacggttaggaaaacattaggtggaggaatgagacaaataggtgttctgtgcgcaaccgctttggtcgcactcctagaaaacctcccaaggctacaccttgcccacaagaaggcttaagttgttagcttgggttgattcaaatggaagggtttggagtaaatgttgcagccgtggagaccaacatgattttcatggatatggaggatggttcaagacttacggctgagaaactgcggaagaatctagaggagaatggcattctccttatccggggaaactcatcccggatcagaatagttatacaccacccagataacaacaagtgatgtgcattacacattgtcttgctttcagcaagcaatgctaacgatgcaggaaccaagccgaacctaatttggcgaaaccgaaatgcttcttcttttcttttcaacttattaaatattgttgtctaaagtacattttaattaaaactataagcatttcaatgaaattgtcaccctcattcctggatgtttgagtttttaattgataagttgttttacctttgattatgaagattatcaatcattatttgctcatcnnnnnnnnnnnnnnnnnnnnnnnnnnn

SEQ ID NO: 121663 - DNA, 524 bp, Arabidopsis thaliana
  unsure (1)..(524): unsure at all n locations
agagactaaaaggttctgtttcagattctcaaattttttttttttattgaaaaagatctttgaatctcccacacccattcgaatttcctcttatgatttaggagattctgtgacaccacaagcttatttcataagaaacttcaaattagaatcagaaacaagagcatccttcttcatttacacaggtaaattaggtgtaaaaatggtgatgagaagtgtggatctacgatcagataccgttactagaccgacagatgcgatgcgagaagcaatgtgtaacgcagaggtggatgatgacgtcctcggatatgacccaacggctagacgtcttgaagaggagatggctaagatgatggggaaagaggctgctctgttcgtgccatccgggacaattggggaatctgatcagcgtgatggttcactttcggccgtgagaggccaagccagggtgattctttggggcaattatcaccatccctctttccggganttgggggggnttcgctttncggggggnncatnct

SEQ ID NO: 121664 - DNA, 769 bp, Arabidopsis thaliana
tatgttgatatgcttaagttccaagaccgattgcactcattcccatatttccacaaagcagcaatcagagctatcaggtgctacctgaaattgcatgactctcccaagtcaactgctggagaagatgaaatgtcaaagttggctcctgctcagaagaagaaaatcaagaagcagaaaaaggcagaagcccgagctaagaaagaagctgagagtaagagtgaagaatcaactgccagtggtgcctctaagtctggcaaacgaaatgtgaaacctgtagacccagatcctcatgggcaaaagttaattcaggttgaggagccaatggcagaggcttcaaagtacttgagactactccagaaacattcacctaattctttggagactcatttactttcctttgaggtcaatatgagaaaacagaagtttctgcttgcattccaggctgtcaagcaattgcttaaattgggtgcagagaaccctgattcacatcgttccttggttaaattctttctcatgacagaatcgataagtgctccaacgactgaagctgagaaacttcgttggagggtcctagaggctgagcgcccatcaatcagtcaattgcagaataaatcactaatggaagcaaacaaagagtttcttggtagacacgaagattctttggtgcacagagctgcatatgcagaaatgctgtatattttagatccaagcaagaaaaccgaggcaatcaaaataattgaagactcaaccaataaagtagtgcaaacaa

SEQ ID NO: 121665 - DNA, 496 bp, Arabidopsis thaliana
atacgactcactttagggaaagccggtacgcctgcaggtaccggtccggaattcccgggtcgacccacgcgtccgtgattgtatttcgctaccagatgaagttgtagaaacacaacacgtcaatacctctgttgaatcagacacatctgcttatggaacagcatttgatgcatttggagggggtgaaagtggaaaggaagcttgccatgctattgctgcattatgtgaagtttgctccattgattccttaatatcaaattttatccttcctttacagggaagtaacgtgtcaggaaaagatggtcgtgtccactgctccctgaatatcaacactgaaactggacgcttatcggctagaaggccaaatttgcagaaccaacctgcattggagaaagatcggtacaaaatccgtcaggccttcatagcatcacctggaaattcacttattgttgctgattatggacagctggaacttaggattctggcacatctttgt

SEQ ID NO: 121666 - DNA, 384 bp, Arabidopsis thaliana
cggacgcgtggggtggaatgctttacgtctactatcccgaggactcagttggtggtggtttcaacaatatatacgagtttaggggtcttatatcaggaaagcagtattatcctgctgattctctttctgacaatcaaaagggttacgtcgatggactggtgaggaaagcctatgaaaactgggatcaggttgttgagtatgacagcaagtcacttatgaacttcaatcaagttagcaaaacagatgccattaactactctatgccaatttcagttccaagccaaccatctacttcttattcagacgtaactgttgaagcatataatcagagtccggctttaaagtttcccggtcaatctcagctagctgatactcaatacatgc

SEQ ID NO: 121667 - DNA, 642 bp, Arabidopsis thaliana
  unsure (1)..(642): unsure at all n locations
cgccaacctctaattcgattcactctagggaaagctggcacgcctgcaggtaccggtccggtattcccgggtcgacccacgcgtccgtacggctgcgagaagacgacagaaggggccccgaaattttttagcaaattctctacctctatctctctcttctctgggaggaaaaatggagatatcggttgcatcggtaacaatatcagtagttctagctgttgtgtcatggtggatatggagaactttacagtgggtttggtttaagccaaagatgcttgagcattacctgagaagacaaggtcttgccggaacaccttacacgcctctagtcggcgatttgaagaagaatttcaccatgttgtcggaggcaaggtccaaacccctcaaactaacggatgacatctcacctcgtgtcgtgccttatcccttgcaaatgttcaagacttacggaaggacttactttacatggtttggacctatcccaaccatcacaataatggatcctgagcaaatcaaggaagtgttcaacaaagtttatgatttcccaatttataacaaccctaccaacccaaaagcggccccnnnnnnnnnnnnnnnnnnnnnnnnnnnnnnnnnnnnnnnnnnnnnnnnnnnnnnnnnnnn

SEQ ID NO: 121668 - DNA, 606 bp, Arabidopsis thaliana
  unsure (1)..(606): unsure at all n locations
tatagggcgaattgggtaccgggccccccctcgaggtcgacggtatcgataagcttgatatcgaattcgcggccgcggtatggagactttacagcggtttggcttaaaccaaagatgcttgagagttacctgagaagacaaggtcttgccggaactccttacacgcctcttgtcggtgatttgaagagaaattttagcatgctggctgaggcaagatccaaacccatcaacctaacagatgatatcacaccacgtatcgtgccttatccgttgcaaatgctcaagactcatgggaggactttctttacatggtttggacccataccaacaatcaccataatggatcctgagcaaatcaaagaagtgttcaacaaagtttattaattcccagaaggcacatacgtttcctctgggcagattaaatagcgggctgggactcgttagttatgatggtgataaatggccaaaacacccgaaggatcatcaacccggctttccaccttgaggagatccaaggttataagcgttcttttccgtagtcccagtttaggttatgatggatggccatttgtnctnaccaantngtggccnntnctttntgncaga

SEQ ID NO: 121669 - DNA, 1086 bp, Arabidopsis thaliana
  unsure (1)..(1086): unsure at all n locations
atcttctccgatattctaaaccctgagaatggtcacaaattctctaactctctctctctctctctagtagaaaacatggagatatcagttgcatcggtaacagtttctgtagctgtagttgttgtgtcgtggtgggtatggagaactttacagtgggtttggcttaaaccaaagatgcttgagagttacctgagaagacaaggtcttgccggaactccttacacgcctcttgtcggtgatttgaagaggaattttagcatgcgggctgaggcaagatccaaacccatcaacctaacggatgatatcacaccacgtatcgtgccttatcccgttgcaaatgctcaagactcatgggaggactttctttacatggtttgggcccatacccaccaatcaccataaatgggtccctgacgcaaatcaaagaagtgttcaacaaagtttttggtttccagaaggcacatacgtttcctctgggcagattaatagcggctggactcgttagttatgatggtgataaatggacaaaacaccgaagaatcatcaacccggctttccaccttgagaagatcaaaaatatggtacctgcgttccaccagagctgcagcgaggattgttggcgaatgggacaagttagtgacgggataaaccagtcatccctgtgaggtggatatttgggccttggctttgtgacgtcatgactgcagatgtgatctcccgtactgcatttggcagcagctacaaagaagggcagaggatatttgagctccaagcggaattagcacagctcatcattcaagcttttcggaaagctattatccctggatatcgttatttccctacaaagggtaatagaaggattgaaaagcagcagcttagaggaaatcaaatttatacttagnggggntccntaaacaaaaggcttnggggcaaagagaaagctttgggaagcaccaagtgncnggttttcttgggnattacttcttnnaatccgatttttgggccaaaccaaangngattggatnggtnccccgggncctnnttggggggtccaagttttntnntttcnttgggaaagggcntctt

SEQ ID NO: 121670 - DNA, 475 bp, Arabidopsis thaliana
tatgtttagaatatggtacctgcgttccaccagagctgttgggaagttgttggcgaatgggatcagttagtatcggataaagggtcgtcatgtgaggtagacgtttggcctgggcttgtgagtatgactgcagatgtgatctctcgtactgcagttaggcagcagctacaaagaagggcagaggatatttgagctccgagcaggactagcacagctcatcattcaagcttttaggagagcttttcatccctgggtatagggtaaatgaaaaacttacacttcgtcttctaggtactgcaattctatttaatagtaggaccgggtgctctccacaatcctttttgagccaattttttgtgtcgttatctcccaacacaatgtaacagaagaatgaaagcagcagccagagaaatccaagttatactaagagggatcgtaaacaataggttatgggccagagaagctgttgaagcac

SEQ ID NO: 121671 - DNA, 1061 bp, Arabidopsis thaliana
  unsure (1)..(1061): unsure at all n locations
acgggtgtttgctcttctcgtggctctattttttttgacatatttgttagaagggcaagtcagaattaaaaacgatctgaacgaaaatgttacctgtggttggtacacaagggaggaggataataaagtcacaaccattttggccattgaaggtgcaagaacatctcttctaggtctctatgcagcgatatttatgcttatagctctcctgattaaatttgagctcacttcgcttttgcgtgagaaattctctgagaggagtggtcagtcaaaaacccaaggaggcgcaagagggattttcccgacacgaatgaggttgatgcagcaacgccgagccacctcgatccaaagctttgcagtagagaaaatgtcagaagagggagcagcatggatgccttctgttggtaatgtcgccaccatcatgtgctttgccatatgcttaatcctcaacatccacctctcaggcggctcaagcaagcgantattcttcctggctccaatcttacttctcctgaaccaagactctgatctcttatccgggtttggtgataaacagagatacttcccggttacagtagcctttccatacatatttggcattatcctcgctctacactgtatgggaagaagtttggtttggtggaaacacagggtggggagtcgaaattggaggccgtgaatggttttttgcggtgaaggaacctggctctcctaatactcacagcaccaggtcacatcatattcaacaggtacgtttggagttacaccaccaaacacacagacgcgtcgccgatgctgaccgtgccactttgctttgcagccgtaataataacagacgtgtttcaagttagggttctgggagttttaggcattgtttactctgcggctcagtatgtgatatctaggcaacaatatatgaaagggctgaggtatatttagacagtcgtaggattgattagtaatgttttcgaccctttttgtaacagaatttgtgaaacagtgttttcatttcccagctttgtttctcagtggatgcattggaaattgccaatatacgacgt

SEQ ID NO: 121672 - DNA, 1483 bp, Arabidopsis thaliana
  unsure (1)..(1483): unsure at all n locations
atgatatgccnnnnnnnnnnnnnnnnnnnnnnnnnnnnnnnnnnnnnnnnnnnnnnnnnnnnnnnnnnnnnnnnnnnnnnnnccacgcgtccgaaaagatacttcttttctttacatgggaagacttttagaaggctttggcgttgggatcatctcttacactgtaatactgaacttaactagctatttacttatggaataacggttcagtatattaatgcaactcggttcgtgattttaggtacctgtatatatcgctgagatagctccacaaaatatgagaggaggattgggttcggttaaccagctttctgtgacaattggaataatgttggcgtatttacttggcctctttgttccatggagaattcttgcagttctggggatattgccgtgtacattattgataccaggtctctttttcatccccgaatcccctcgctggctggcaaaaatgggtatgacagatgaatttgaaacttcattacaagttcttcgaggatttgagactgatattaccgttgaagttaatgaaatcaagagatctgtggcatcatctacaaagcgaaatacagctcggtttgtagatctcaaacgcaggagatactatttcccacttatggttggtatagggttgcttgtacttcaacaacttggtggaattaatggtgtcctattctattccagtccaatatttgaatctgcaggagttacatcgagtaacgcagcaacattggggtcggggctattcaggtagtagcgactgcaatatccacttggttggtggacaaagcaggtcgtcggcttctgcttactatctcttcggttgggatgacgattagccttgtaattgttgcagctgctttctatcttaaggaatttgtgtctcctgattcagacatgtacagttggctgagcatattgtcagtagttggagttgtggcaatggttgtctttttctcattgggaatgggaccaataccgtggctcattatgtctgagatccttcctgtgaacataaagggtttagctggaagtattgcaactctagccaattggttcttttcttggttgatcaccatgacagcaaatttgctgttagcctggagcagtggaggaactttcactctgtatggattggtttgtgcattcacagtggtgttcgtgactctatgggttcctgagaccaaaggcaaaactcttgaagaacttcaatccttgttcagatgaacaaattgaaacaacttcattctttgtcaccctctctctccctctctgttttggccaagaacaagaagaaacaagagattttccagctttgttaattgggctgagaacgttactaagatttgtttgtttgttcgttgtgtgtcaataatcgcattatcttcaaaaaaaaaaaaaaaaagnnnnnnnnnnnnnnnnnnnnnnnnnnnnnnnnnnnnnnnnnnnnnnnnnnnnnnnnnnnnnnnnnnnnnnnnnn

SEQ ID NO: 121673 - DNA, 1043 bp, Arabidopsis thaliana
  unsure (1)..(1043): unsure at all n locations
actgagtactctgtgtttggttctctttccaatgtgggtgctatggttggtgcaattgccagtggtcagattgcagaatacattggacgaaaagggtctcttatgattgctgcaattcccaatatcattggatggctttgcatatcatttgcaaaagatacttcgtttctttacatgggaagacttttagaaggctttggcgttgggatcatctcttacactgtacctgtatatatcgctgagatagctccacaaaatatgagaggaggattgggttcggttaaccagctttctgtgacaattggaataatgttggcgtatttacttggcctctttgttccatggagaattcttgcagttctggggatattgccgtgtacattattgagaccaggtctctttttcatccccgaatcccctcgctggctggcagaaatgggtatgacagatgaatttgaacttcattacaagttcttcgaggatttgagactgatattaccgttgaagttaatgaaatcaagagatctgtggcatcatctacaaagcgaaatacagttcggtttgtagatctcaaacgcaggagatactatttcccacttatggttggtatagggttgcttgtacttcaacaacttggtggaattaatggtgtcctattctattccagtacaatatttgaatctgcaggagttacatcggagtaaccgcagcaacatttggggtcggggctattcaggtagtagcggctgcaatatccacttggttggtggncaaagcagggtcgtcggcttcttgttactatctcttcggttgggatgccggtngccttgnattgttcagctgcttctancttaaggaattngtgccnctgtcaggcatgncagntggtngnatattgcagaagtgggtntgaatggtgccttttnccattnggattggccaaacccggggcatatgctngccccctgnacaaaaggttnctgagnttnacttccaattggcttttggtnccctcanaattcttacctggnggggggctnntc

SEQ ID NO: 121674 - DNA, 505 bp, Arabidopsis thaliana
  unsure (1)..(505): unsure at all n locations
nnnnnnnnnnnnnnnnnnnnnnnnnnnnnnnnnnnnnnnnnnnnnnnnnnnnnnnnnnnnnnnnnnccacgcgtccgatttgcaaattcctttgatcagatagtgaaaacgattctctctatattgccgatcgatctccaagtttgctaaatcgccgggaactttactgaaatttggagctagtcatgtcttcggatcctgacaaaatgatgtccaaagccgacaaaatgacaaagctcacgcttactagatggagtgctgattggagaggtgctactgagttgtatgagcaagcagcaaatgggtttagagcatcaaacaaatatgagaaagctaaagtggctctcgagaaagcttcaaaaggacaagagatgcaagcttctccttgggatgctgcaaagcatatggagtctgctgctgccttagcacagaagctaagtatttggaatgaagttgctgatttttatagaaaggcgtcggagctgtatgttgagtgtggaagggc

SEQ ID NO: 121675 - DNA, 1542 bp, Arabidopsis thaliana
  unsure (1)..(1542): unsure at all n locations
nnnnnnnnnnnnnnnnnnnnnnnnnacccacgcgtccgcccacgcgtccgcccacgcgtccgcccacgccgcggccagcgattcttctttcttcttcttctcagatcctttcaccgagtaagaagattttaaagatgccgtcaacgccgacgacgccgactacaacaacgccgatcacggcttcgtattggtgttacagctgtacgcgtttcgtcagcgtttgggctgatcaaggcacaacaaccgtcggtagcgtcgcttgccctcactgcgacggcggttttatcgaacagattaacgattcttcctccgccgctaccgaattaacgattccggcttctactgaagtaagatcgatcaataacaaccgtagatccgtgattagacgccggagatccggtcgtcgtccgtcctttaatccggtcatcgtacttcaaggaggcgccggcgagagagaagagggagaagaaggagatgcggctagagatcgacgcgcttttgagttttattacgatgacggatccggatcgggtcttagaccgcttccggattctgtatctgagatcttgatgggatctggattcgagcggttacttgaacagctaagccaaatcgtagcgtcggctactggaattggtagatctggaaaccctccggcgtctaaatcggcgattgagtctttacctagagtcgaaatctcggattgccacataggctcggaggctaattgcgctgtttgcacggagattttcgagacggagacggaggcgcgtgagatgccgtgtaaacaccttttccacgacgattgcatcgtaccgtggctatcgattcgaaactcttgtcccgtgtgcagattcgagctaccttcagagcctaatcgacggagcaacaacaacgaggaggataacgccgtggggatgacgatttggagacttcccggtggtggattcgccgtagggaggtttaacgcagcaatgagagacggagagagagttttgccagtggtgttaacagaaatggatggtggtgggattggtaatagccaggatggtcctagacggatctcatgggttaggtcacacggtacactcgaatcggatagtaacggtactggctcaggttccggccccggtggaagattgaggaggatggttcgtggaatggtgtcgttaatgaggagagtgagaccaaaccgtagctcttcttcttcatcagctgcgatatcaacttcttctgataatctggatttgaacattgaagtagaatctagggttttggataggtcaaattcagtgatgagaagatacttcagaagaaacagaagtaacagggattcttcgtcttcagttcttcattgattcagaaatatatatatattattttttggtttgttcattcaacaatgtaaatataagattcagaagaaaaagattggtgcttcgttttctattataaaaaaaaaaaaaaaaaaaaagggcggccgctctagaggatccaagcttacgtacgcgtgcatgcgacgtacatagctgttctatagtg

SEQ ID NO: 121676 - DNA, 688 bp, Arabidopsis thaliana
acttccggtggtgggattcgccgtagggaggtttaacccagcaatgagagacggagagagagttttgccagtggtgttaacagaaatggatggtggtgggattggtaatagccaggatggtcctagccggatctcatgggttaggtcacacggtacactcgaatcggatagtaacggtactggctcaggttccggctccggtggaagattgaggaggatggttcgtggaatggtgtcgttaatgaggagagtgagaccaaaccgtagctcttcttcttcatcagctgcgatatcaacttcttctgataatctggatttgaacattgaagtagaatctagggttttggataggtcaaattcagtgatgagaagatacttcagaagaaacagaagtaacagggattcttcgtcttcagttcttcattgattcagaaatatatatatattattttttggtttgttcattcaacaatgtaaatataagattcagaagaaaaagattggtgcttcgttttctattatcaattcgattaattcttccttatgttgttacatcaaaatgtataatgttcatatagaagtgttcatctttaaaaaaaaaaaaaaagaaaaagggcggccgctatagaggatccaagcttacgtacgcgtgcatgcgacgtcatagtattctataggtcgcctaaat

SEQ ID NO: 121677 - DNA, 1655 bp, Arabidopsis thaliana
gttttaaaaagggcaaattagagagatttctccttcaataacaaaaaatcgccagctttatctctctctttttcacatcccatggctagatggtgacgacgattcacgcataaactagggttcccccacaaatcatcttacacgtatcctctattccttccttcctttctccgtcatcatcatttttcccaccgacaacaatctctcggagtttggatcaataatggcgttgaagtctagttctgctgatggtaaaaccagaagctctgttcagatcttcattgtgtttagtttatgttgcttcttttacattttgggagcatggcaacgaagtggttttggtaaaggagacagtattgctcttgagatgaccaacagtggagctgattgcaacattgttcctagcttgaatttcgagactcatcacgctggcgaatcaagtcttgttggtgcttctgaagctgcaaaggtcaaggctttcgagccctgtgatggtcgttacacggattacactccttgtcaagatcagagacgtgccatgactttcccgagagatagtatgatttaccgagaaaggcattgcgctcctgagaatgagaagctccattgtcttataccggctcctaaaggatatgtgacacctttctcttggcctaagagtcgagactatgtgccttatgctaatgcgccgtataaagcattgactgttgagaaggctattcagaattggattcagtatgagggagacgtttttagattccctggtggtggaactcagttccctcaaggtgctgataagtatatcgatcagcttgcttccgtgatacctatggagaacggaactgttaggactgctttggacactggttgtggggttgcaagttggggagcgtacttatggagcagaaatgtgcgtgcaatgtcttttgcaccaagagattcacacgaggctcaggtccagtttgctctcgagagaggtgttcccgctgttattggtgttcttggtaccataaagttgccatacccaacacgtgctttcgacatggctcattgctctcggtgtttgattccatggggagcaaatgatgggatgtacttgatggaagttgaccgtgtgcttagacctggtgggtactggattctgtctggtcctccaatcaactggaaagtcaactacaaggcatggcaacgtcccaaggaggaccttcaagaggaacaaagaaagattgaggaagctgctaaacttctttgttgggagaaaaagtatgaacacggtgagattgcaatttggcagaagagagtcaatgatgaggcatgccgatcaagacaagatgatcctagagccaatttctgcaaaaccgatgataccgatgatgtctggtacaagaaaatggaggcatgtattacaccgtatccggagacaagtagctcagatgaagtagctggtggtgagcttcaggctttcccagataggctcaatgcagtgccgcccaggatctctagcggttcgatctctggtgttactgttgatgcctatgaagacgataacagacagtggaaaaaacatgtgaaagcctacaagagaatcaacagtctacttgacactggaaggtaccgtaacatcatggacatgaacgcaaggtttggtggatttg

SEQ ID NO: 121678 - DNA, 532 bp, Arabidopsis thaliana
ctcctcttctctctctctcaatctcaatggctctgttttaaaaagggcaaattagagagatttctccttcaataacaaaaaatcgccagctttatctctctctttttcacatcccatggctagatggtgacgacgattcacgcataaactagggttcccccacaaatcatcttacacgtatcctctattccttccttcctttctccgtcatcatcatttttcccaccgacaacaatctctcggagtttgggtattattacttctctcatcaaccaattgtaccactagatctcccagattccttcattatctctatcaataatggcgttgaagtctagttctgctgatggtaaaaccagaagctctgttcagatcttcattgtgtttagtttatgttgcttcttttacattttgggagcatggcaacgaagtggttttggttaaggagacagtattgctcttgagatgaccaacagtggagctgtttgcaacattgttcctagcttgaatttcgagactcatcacgctggcg

SEQ ID NO: 121679 - DNA, 781 bp, Arabidopsis thaliana
gagaaagtcgtacaacaactacaacgaagaagaagagtaaagaaaatggtcgtcgaggagtcatcatgcgtttacaagaacggagacgcgccagtggaggcgcgtgtgaaggaccttctctctcgcatgactttgccggagaagatcggtcagatgactcaaatcgaacgcagagtcgcttctccctccgcctttacagatttcttcatcggaagtgtactaaacgctggaggtagtgtaccgttcgaggacgctaagtcatcggattgggctgatatgattgatggttttcagcgatcagcgttagcgtcgcgtttgggaattccaattatctatggcactgacgctgtccacggcaacaataatgtctacggcgccactgtcttccctcacaacattggcctcggagccaccagagacgcagatttggtcagaagaattggagcagcaactgcacttgaagtaagagcgagcggggttcattgggcattttctccttgcgtggccgttttgagagatccgaggtggggaagatgctatgagagttatggagaagatcctgaacttgtctgtgagatgacttctcttgtctcgggcctacaaggtgtgccaccagaagaacacccaaatggttatccttttgttgcaggaagaaacaacgtcgtcgcgtgtgtcaaacactttgttggagatggtggtactgacaagcgcataaatgaagggaacaccatcgcttcatatgaagaattagagaagatacatattcctccttatctgaagg

SEQ ID NO: 121680 - DNA, 428 bp, Arabidopsis thaliana
gaaaggcgggaccgatccgccattaatgctaccacccaactacaaggcttttctcacacactctcttctctcaatctcttggctcagaacaaagaagataaaaaaaaaagtgtgatatattgtgagaagattgcagaagcgtgtccaacttggttccctctctctctgaaattactcaatcatggggatttgcttgagtgctcaggtcaaagctgagagctcaggagcgagtacgaagtatgacgccaaagatataggaagtcttgggagcaaggcttcgtctgtgtctgtaagaccaagccctcgaactgagggtgagatcttacagtctccaaatctcaagagttttagctttgctgagcttaaatcagcaaccaggaattttagaccagacagtgtgcttggtgaaggtggattcggttgtgttt

SEQ ID NO: 121681 - DNA, 514 bp, Arabidopsis thaliana
  unsure (1)..(514): unsure at all n locations
nnnnnnnnnnnnnnnnnnnnnnnnnnnnnnnnnnnnnnnnnnnnnnnnnnnnnnnnnnnnnnnnnnnnnnnnnnnnnnnnnnnccacgcgtccgcaaagctaaggataaagaaaataaatagtaaatggaagggtttcttcgctttcttgtagcgaaagccatcttattggctttagcatcttcatttgtatcttgttacgacccaagtcctcttcaggacttttgtgttgccgtcgatgacgctagtggtgttttcgtgaatggaaaattctgcaaagacccaaaatacgtgaaagctgaagacttttttacttccggactaaacatcgccggaaacacaataaaccgcgttggctccaacgttacaaacgttaacgttgacaaaatccctggactcaacaccctcggagtgtctcttgtccgaattgactttgccccgggaggtcaaaacccgccacacacgcacccacgagccactgagatcctcgtggttgtcgaaggaacactcttagt

SEQ ID NO: 121682 - DNA, 857 bp, Arabidopsis thaliana
  unsure (1)..(857): unsure at all n locations
nnnnnnnnnnnnnnnnnnnnnnnnnnnnnnnnnnnnnnnnnnnnnnnnnnnnnnnnnnnnnnnnnccacgcgtccgcccacgcgtccgcccacgcgttccgaaaatgtttaactatgtgattattcttcctttagctctcttcctcttggcttacaaattcttctttacatctaaaaagcagcgttactatctccctccctctccatcttactctctcccaatcctcggccaccacctcctcatcaaaccgccggttcaccgtctcttccaccgcctttccaatatccatggcccaatcttctacctccgacttggttcccgccgtgccgtcgtcatatcttcctcctcgctggcaagagaatgcttcacaggtcaaaacgatgtcattgtatcaaaccgccctcgttttctaacctccaaatacattgcttacaactacacaaccatcgcaacaacatcttacggtgaccactggcgtaacctccgccgcatttgctccctcgaaatcgtctcctcaaaacgtctcgccaactttctccacatccgcaaagaggagatccagcgcatgctaacgagactctcacgtgacgcccgtgtcggcaaagaggtcgagctcgagtctatcttgtacgacctaacgttcaacaatatcgtgaggatggttacagggaagatatactacggcgacgatgtcagcgacaaagaagaagcagagttgttcaagaagctttttactttcatcaccactaatagtggcgcgaggcatcctggagaatacttgcccttcatgaagatattcggagggagctttgagaaggaggtgaaagctgcaacaaaagtcatcgatgaaatgttg

SEQ ID NO: 121683 - DNA, 568 bp, Arabidopsis thaliana
  unsure (1)..(568): unsure at all n locations
aaaaacctctaatctcatgtctatgtcttgtctttagatactatcttactctctcttcgagaacttatgtctttagaacggtcggagttcgtcgacggtgttgcggcacggagtctcagtgagatctcagaagttgacgccgtgagaattggaggtgatattatatcttcagcgagacgtctcatcgcacttttaaggtccgtaggagattgtcaatggcttcatcatccacccgttattgctgaagctattagaaggtatgatgagctatggatgccgttgatttctgatctaacggttggtttaaagccaccgatgattttgcctcctccttgatgttgaatggggttgggttttgtcactggtttgaatccagtgagttaaagngattactgggnaaaggggnatcccaaaaccttttagggagcctgcgnattnccgccgaanaaacgagggttacccgggtttccatgngnaaannnctgggggtnccgnaaccctttaaggggttttggaaaagngggcccgggncccttnaacggtccttagtaannanataaagcnggna

SEQ ID NO: 121684 - DNA, 510 bp, Arabidopsis thaliana
  unsure (1)..(510): unsure at all n locations
gcannnnnnnnnnnnnnnnnnnnnnnnnnnnnnnnnnnnnnnnnnnnnnnnnnnnnnnnnnnnnnnnnnccacgcgtccgcaacacacgactagataaactctaaatcctcacagcagatcacgtgctaatcacatggctccggggcttactcaaaccgctgatgctatgtccaccgtgacgataacaaaaccgtcactgccatcagtccaagacagcgatcgagcttacgtgacgtttcttgctggaaacggtgattacgtgaaaggagtcgttggtttagccaaagggttaaggaaagtcaaatcggcttatccactcgtagtagcgatgttacccgacgtcccggaggaacaccgtcgtatacttgtggatcaaggatgcatcgtccgtgaaatcgaacccgtttacccacccgagaaccaaactcagttcgccatggcttattacgtcatcaactactctaaactccgtatctggaagtttgtggagtatagtaaaatgatatatt

SEQ ID NO: 121685 - DNA, 670 bp, Arabidopsis thaliana
  unsure (1)..(670): unsure at all n locations
aaaaagaatcagaaagaagaagaagaagactccaaaaacgatgccgtattacaccaacgacgacaatgacgtcgacgatttcaccgaatacgatccgatgccttatagtggaggctacgacatcaccgtgacatacggccgttcaattccaccgtccgacgagacttgttaccctctctcctctctctccggcgacgcctttgagtatcagcgacctaatttctcttctaaccacgattcttctgcttatgacgaccaagctcttaaaaccgagtacagtagctatgcacgacccggacccgttggatctggatctgattttggccggaaacctaattctggatatggagggagaacggaggttgagtatggccggaaaactgaatcggagcatggatctggctatgctaatggtggaagaaatttgggagcgattaaccgtgaagccttagctaattggcgggcaccaacggttgttggtgacgatggtcacaaaaaacatagtggtaaggattatgatgatggagatgagaagagtaagaagaaggagaaggagaagaagaaggataagaagaaaggtggtaataactctgaagatgatgagtttgagaagaaggagaagaaagagcagaacaaggagcatcatgatgatgatggttatgatantaac

SEQ ID NO: 121686 - DNA, 654 bp, Arabidopsis thaliana
  unsure (1)..(654): unsure at all n locations
tacgactcacnatagggaaagctggtacgcctgcaggtaccggtccgcgatcccgggtcgacccacgcgtccgcccacgcgtccgcccacgcgtccgcggacgcgtgggcggccgcgggggccgcttttaacaactctcgtcgtcatctccaccgtccgttttctctcagctatattttaatggcgacaattcagaagcttgaagaagttgcaggcaaagatcaaactctaagagccgttgatctaaccatcatcaacggcgtcagaaacgtcgaaacttcaagacctttccaagtaaatcccacagtgagtctcgagcccaaggcggagccggtgatgccgtcgttttcaatgtctttagctccaccgtcttcgacaggaccaccattgaagagagcttcgactaaagaccgtcacacgaaggttgaaggaagagggagaaggatacggatgcctgccacgtgtgcggctaggatttttcaattaactcgagagttaggtcacaaatccgacggcgaaacgattcggtggttgttggagaacgctgagccggcgattattagccgccacgggtacgggaacggtttcccgccatcggccatgttcggtttaacgggaacctttaaaattcccgacggacggacggaacgttga

SEQ ID NO: 121687 - DNA, 602 bp, Arabidopsis thaliana
  unsure (1)..(602): unsure at all n locations
nnnnnnnnnnnnnnnnnnnnnnnnnnnnnnnnnnnnnnnnnnnnnnnnnnnnnnnnnnnnnnnnnnnnnnnnnnnccacgcgtccgcccacgcgtccgaaagcaatctgggttgtctgattatttccaatgacttccttctctgtctgattcgtttgtttcggcgattcaactcttcttcaacgccctgagagtcacgcacgagaattggattgatggtttttcacacgcaggagaggcgattcgttgtcttcttcttgtcccgttgacctgtttcgatctcagatggtgattatgcagcagctgattctaaattagggcatttaaatccgccttccaggtgaatttttgaaaagtaattaaagggtgttcttgaatggacttgaaaatggataatgttattgggggaaagtttaaacttggtcggaagatcggtggtggctcttttggagaactttttcttgccgtaagtttgcaaaccggagaggaagcagctgttaagctggagcctgcgaaaacttatgcatccccaacttcattatgagtcgaagatatacatgcttctacaaggaggaagtggcatccccagccttaagtgggttg

SEQ ID NO: 121688 - DNA, 463 bp, Arabidopsis thaliana
cactacatatatatatacgcacatacgtacacagttcgaaggttttagctgcgagtatgaggaaggaactgtgtagaaactttcagcgtggcagttgtaggtatggggaaaactgtagatttcttcatccacaacaagctaagccaaataatccctttggctttggtacacaaaaccaacaacaacaacagcagcagcagcaacaaaatagttcgaacccttttggatttggtgtacaaagtggtggttccagcagaccgaatcagttccagaatacttggtcacgaacggcttctacacctactggtggtggtgctgctgcttctacacagcagactggtaaacagacgcagccggcagatcataaatgcacagatcctgctgcgtgtaagcgggtaatgcaagacgattttaagaatgagagacccatgtggaagctcacatgctacggccactggaaata

SEQ ID NO: 121689 - DNA, 911 bp, Arabidopsis thaliana
  unsure (1)..(911): unsure at all n locations
cttcctttagctcggtcgtattggtggaatgtacggatacaattacacagaacactatgccatgatcgcaagctctatcgctctctatagaaagctggacgcctcaggtccggtccggaatcccgggtcgacccacgcgtccgcaagagttcagcaaccacaagtgtatccatctacatcttcttctacttcatcatctttctcgccttcatcctccggttcaagtggctcgtttggtacagcattcataggtctagccgcaattcttgttctggcagcactggcttgtgtgtttggaagactatgcaaccgcggtggaaagcaacccaaagacaaaaacaacaacaaagcttcgaagcatgagaaaccatcgtcaaagaagagccgtgagattagacctgtggagcgtgaaccaagagaaagaggtgatgtggagtttggtttcgatatgaagcggcctggtcctatgagcaaacccactggtcgaaacggaggggacatagaatttgggtttgataacaagagaggagaaggtggtggtggaggaggtggaggaaaaggagggaaaagaccacctccggttatatattaaccatgtgtaaggtgacctcagacacggaggtttccgacttcaagctccggtcagaacattgtcttaataagacaagagaattcatcaatgcttgttcactttatcttattcttgcttgtttgtttttggtcttgttttgggtcgtttggttttgtttcatatgggtatgaaacttaggtatcaaatatatatgaaagcaagaaaaaaaatatgagataacaagtaacaaaaaaaaaaaaaaaaagnnnnnnnnnnnnnnnnnnnnnnnnnnnnnnnnnnnnnnnnnnnnnnnnnnnnnnnnnnnnnnnnnntgtcctaa

SEQ ID NO: 121690 - DNA, 500 bp, Arabidopsis thaliana
gcttattcgattttcttcagatttgaaatggtgtcgttcaaggtctctctcgtctctacttcgcctattgatggccagaaacctgcgacttctggactccgtaagaaggtgaaagtgtttaagcaaccaaattaccttgaaaattttgtccaggcaacgttcaatgctcttactacagagaaagttaaaggtgcgacacttgtggtttctggtgatggtcgttattattcagagcaagctattcagattatagtaaagatggcagcagctaatggtgttagacgtgtgtgggttggtcaaaacagtctgctatcaactcctgcagtatcagctattattcgtgaaagagtaggggctgatggatctaaagccacaggagcatttatcttaacagcaagtcataatcctggtggcccaactgaggatttcggaattaagtacaatatggaaaatggtggaccagctcctgaatcaatcactgataagatttacgagaacac

SEQ ID NO: 121691 - DNA, 474 bp, Arabidopsis thaliana
  unsure (1)..(474): unsure at all n locations
gaaagaagaaagaagaagaataaaagacaaggcttgaacgtccggtgaaagaaagaattcagctttccgcactaaccacttctgaatcctaaccaacaagcttctccatttcgtttttcgcgtctcgattccaaattccacttaagacggcggattttctcaccgggaaattggttttagatggataggactgaggaaatcgaagaatcccccgccggaccttcttccggatccgcgaaattgaagctcggaaacagagcagatcctttccttgttgtttgtagatgcttcagcctcgttacctctctcatcgccattctctgtgttgtcgttaacgttctcgctgccgttcgctccttccgtgacagccacgatctcttcgatggaatattccggtgttatgctgtggtgattgcttgttttgttgttctcgttgagactgaatgggggttaatttccaaaattttncaaggg

SEQ ID NO: 121692 - DNA, 1088 bp, Arabidopsis thaliana
  unsure (1)..(1088): unsure at all n locations
gttttctagggcaatctcggccacttttacttacagaaaaccttctctctaaacttcttcgaaaatctcacagagcttcttcttcttcgcttttagggtttttgctctattgtttcgagtgacccaacttcgaagcttatagatcgttaccttagaaaatggtgggtatgtcgatgcagccatatggtattcaatcgatgcttaaagaaggttacaggcatctctctggtctcgacgaagccgtcattaagaacattgaagcttgcaaggagctctccaccattactcgcacctctctcggtcccaatggaatgaataaaatggttatcaatcatttggacaaactgtttgtcacaaatgacgctgctactatagtgaatgagctcgagattcagcacccggctgctaaacttctggttttagctgctaaggctcagcaagaagaaatcggagatggagctaatctgacaatctcctttgctggtgaacttcttcaaaacgctgaggagcttatcaggatgggacttcatccgagtgagatcattagtggatatactaaagctgtcagcaaggctgttgaaatactggaacaactggttgagactggttctgagaccatggatgtacgtaacaaggatgaagttatttctcggatgagagcagctgttgcaagcaagcagtttgggcaagaggaaataatttgctctttagttactgacgcatgtattcaagtctgcccaaagaatccaacgaatttcaatgtggataatgttcgtgtttccaagcttttgggaggaggcttgcacaattcttgcatagtccgtggtatggtcttgaaaagtgatgctgttggtagcattaagcgaatggagaaagcgaaggttgctgtatttgctggtggcgttgataccactgcaacagagaccaaaggaactgtcctcattcatagtgctgagcagctagagaactatgcaaagacagaggaagctaaagttgaggagttgattaaagcagttgcggaattccaggggccaaagtcctttttagtggggggtccatttggggaaaantggnnttcctttttttnt

SEQ ID NO: 121693 - DNA, 877 bp, Arabidopsis thaliana
  unsure (1)..(877): unsure at all n locations
atactgactcacgttatgggaaagcatcggtacgcctgcaggtaccggtccggaattcccgggtcgacccacgcgtccgaacaagtgggctacgatctctcgtcttctcaatggacgaaccgataacgctatcaagaatcattggaactcgacgctgaagcgaaaatgcagcgtcgaagggctaaagttgtgatatttggtggtaattggagggtatcgatggtaattctatgagaagagcaaccgttgaaacgtacagcgagtggtggtggtggtgtctcgactggcttgtatatgagtcccggaagtccatcggtatctgacgtcagcgagcaatctagtggtggtgcacacgtgtttaaaccaacggttagatctgaggatacagcgtcatcgtctggtgaagatcctcaactatcttagttagtctcttacttggactgacgagacggatcgagtcaacgagacggatcaacttaaccagaatacggttatggacggtgttatactgtggtgctgtttccgttcgatggaagagcagtagatgtggatattacgacctacatggatatctggtgattcgtggtgagtcatgacggtggttcggagatgatanggacggaggtgacgagtacatggaggattacagtaggacactctgtggtcgtagtctgcgacgacgtggggttcatgatgcacacatgtaacagncgtcggtaaggttagacagttatagtgcacaattcgcattgggagagtgggacaggatagaccagtctcctctgatcttggaataaatttaagctttatgttaagacagaaagaacacttaggtgagcgaatttaagtggggctatcatatagactcttgggtgat

SEQ ID NO: 121694 - DNA, 667 bp, Arabidopsis thaliana
taggtgcactatagaagagctatgacgtcgcatgcacgcgtacgtaagctcggaattcggctcgagttcttcccaacacacacaaaaaaaaaaaactgtaacgaccaaaaaaaaagaggacgcgttagaagaaaaaaaaagaacaatccgataaaaagatccggcgatgtcaaacccgacccgtaagaatatggagaggattaaaggtccatggagtccagaagaagatgatctgttgcagaggcttgttcagaaacatggtccgaggaactggtctttgattagcaaatcaatccctggacgttccggcaaatcttgtcgtctccggtggtgtaaccagctatctccggaggtagagcaccgtgctttttcgcaggaagaagacgagacgattattcgagctcacgctcggtttggtaacaagtgggctacgatctctcgtcttctcaatggacgaaccgataacgctatcaagaatcattggaactcgacgctgaagcgaaaatgcagcgtcgaagggcaaaggtgtgattttggtggtaatggagggtatgatggtaatttaggagaagagcaaccgttgaaacgtacggcgagtggtggtggtggtgtctcgactgggcttgatatgagtcccggaagttcattcggatctgacgttagcgag

SEQ ID NO: 121695 - DNA, 490 bp, Arabidopsis thaliana
  unsure (1)..(490): unsure at all n locations
cannnnnnnnnnnnnnnnnnnnnnnnnnnnnnnnnnnnnnnnnnnnnnnnnnnnnnnnnnnnnnnnnnnccacgcgtccgcgctcccacgctctctcctcttcctcggatcttccatcttctctctaacagcaaatgactcagtcgtaaccttctacactttctctctctccaatttttcacattttatttttggcttccgagctatgaccccagtgcgtctgcttcgtctcgaccgctgatcggaataaaaccaccgccgagtttcctaggtctatgtgtattgtaatatcctccggaaatggcagctttcctcgtcatgtttatcttcacgatcgctctgttcgtcgcactcctttgggttttcttcaagtctctcccttggattctccggcatagtgctggaataactctcagttttcagtttgatggaatggaactgcttgaaggatgttgcattgcaattcaagaggggtctattggatctatag

SEQ ID NO: 121696 - DNA, 947 bp, Arabidopsis thaliana
  unsure (1)..(947): unsure at all n locations
taatacgactcctatagggaaagctggtacgcctgcaggtaccggtccggaattcccgtgtcgacccacgcgtccgtacggctgcgagaagacgacagaagggggccggaaaaaagaagtagaagacgacgacgatggcgggatttgagagctatgtggttgttcacaacatagcaaagcgtcacaacgtcggaactttagctcgtagcgccactgcctttggtgtgacggagctaatcctcgtcggtcgccgtgatttcaacgccttcggtagtcatggttcagcttctcacatccgtttccgccattttcactctctcatcgaagctcgcaactatctcaaggaggagaaagattgcgatatatgcggcgttgagattgcagatggagcttctgcggttaatgaacatcctttcaaaagaaacactgcgtttcttctcggtaatgagggatcaggattatctgcgaaggaatacgaaatatgcgacttctttgtatatattcctcagtatggctgtggcgctgcctctttgaatgttactgtttgcagcttctattgttttgcatcactttggagtttgggctggattttctgaacgtgttcgggatggaagcaaatttatagtggctgatagacccgtaagacaaggaagacgaaatttctgcgccggcacagaagaatccgtcattgaagagcggaagttgaggaaagaaagtgcagaaaatgggtttttcgatgacaatggaaatgaaaatggaagttcatcatccgaccttttggacggtttgttccttaacgaataattatcttttataaaagaacaaagtcttgatttgggttccnnnnnnnnnnnnnnnnnnnnnnnnnnnnnnnnnnnnnnnnnnnnnnnnnnnnnnnnnnnnnnnnnnnnnnnnnnnnnnnnnnnnnnnnnnnnnnnnnnnnnnnn

SEQ ID NO: 121697 - DNA, 726 bp, Arabidopsis thaliana
cggacgcgtggggcaaaaaagtcttacgtcacactcccatgtagtagccgtcacttctcgtcttcctcctagagattacccaactctctcgcttcttctttttcctcttagggtttcttcatcctttagggtttccacaaaaattcaaaacctacttggaaatatttgggcttgaagaaggaagaattagatggaaggaagaaggattacggcaagccctagaccttgtagtggaagaagaattgtggctaagaaaaggtctcgacccgatggattcgtcaacagtgttaaaaagcttcaacgaagagaaatctcttctcgtaaagatcgagctttctctattagcaccgcccaagagagatttcgtaacatgcgtctcgtggagcaatatgatactcacgatcctaaagggcactgtttagttgcattaccgtttttgatgaagagaactaaagttattgagattgttgctgcaagggacattgtttttgcgcttgcacattctggtgtttgcgcagcttttagtagagagtcgaacaaaagaatatgctttttaaatgttagtccagatgaagtcatcaggagcttgttctacaacaagaacaatgattctctcatcacaagtttctgtttatgcttcagacaatttcagctctttgaaaggcagatccactagaattgagtatattctgaaaggtcaacccgatgcaggggttgctctttttg

SEQ ID NO: 121698 - DNA, 415 bp, Arabidopsis thaliana
gataaccttcgtttttcaggagtttctttctatatttcttcatcgatttcgttcagtctttgagagaggttcgtcgacgtattatcgtcggaaataagctatgagaatctatttctcatagctccagtaatgtgaaatcgagacaacgcttgatcttcagaatctgctaatccatgggagattcaatcacattccggtagatttttttccagtttctggggaagtcaaaaatttccagggtttccgatttttgttttccttttccaaatgttctcgaatcagtttgttctcttcttctctcttctcctatgtctcccatttgttttcttctttgtagcgccacatgtgtttccttctcctcctggggaatctttaatcccaatctccgatgagattgatgaccggagtttattca

SEQ ID NO: 121699 - DNA, 971 bp, Arabidopsis thaliana
  unsure (1)..(971): unsure at all n locations
aatacgactcctttagggaaagccggtacgcctgcaggtaccggtccggaattcccgggtcgacccacgcgtccggaaatttggtatgggcaacttctaagcacgacgtgtatcttatgtcaaattttctggttacacattattcttctctaacgtctggaaagcatgaagttctcaatgtccgtggtcatgttgcgccatctgagaaacatcctggatgtttacttgaaggatttacgcagactcaagtaagtacacttgcagtaaaagatgactttctggttgctggcgggtttcaaggagaacttatttgcaagcatcttgatagaccgggtgtcagcttttgctctcgtatgacttatgatgataatgctataaccaatgctattgagatctacaacaaacccagtggtgcacttcattttactgcgtcaaataatgactgtggagttagagactttgacatggagagataccagcttgttaagcatttccgttttccttggccagtgaatcacgcatctttgagtcctgatggtaaattactggctattgttggagacaacccggagggccttattgtagaccccaacacaggaaagacgttggaaacactatcaggacacttggacctttcctttgcctctgcgtggcattcggatggagtcactttctctacaggaaaccaagataagacttgtcgtgtatgggacatccgtacctatctcagtctgttactgtcttgaagggtaacctgggagcaatccggtcaatccgtacacatcagaggaaaatacatggccatggctgaaccggtgactttgtccatggctattgatgtctcaaaacgggtattaaacagagcagggaatcgncttctttttgggggaaantnttggaataanctttanaggccttnacaaaaanaggnggtnntttttttgggggtattggggcccnnncntttttgg

SEQ ID NO: 121700 - DNA, 410 bp, Arabidopsis thaliana
gacttttcctttgcctctgcgtggcatccggatggagtcactttctctacaggaaaccaagataagacttgtcgtgtatgggacagtccgtaacctatctcagtctgttgctgtcttgaagggtaacctgggagcaatccggtcaatccgctacacatcagatggaaaatacatggccatggctgaaccggctgactttgtccatgtctatgatgtctcaaacgggtatgaaacagagcaggaaatcgacttctttggggaaatctctggaatatctttcagccctgacacagaggcgctatttattgggggatgggaccgcacttatggtagcctccttgaggttggtcggcgcaggaactaattcctaccttgactcgtatctttaagctagaagagaagtatacaca

SEQ ID NO: 121701 - DNA, 668 bp, Arabidopsis thaliana
  unsure (1)..(668): unsure at all n locations
aatacgactcactttanggaaagctcgtacgcctgcaggtaccggtccggaattcccgggtcgacccacgcgtccgcttaggcatcccaatggaagagtattctccggtaatggactacggatgctgcattcaagcttggtgagcctggtacttgtctgttgtttccttaggcatcccaatggaagagtattctccggtaatggactacggaagacatcatcatcctcctgcaacatctgcagctctcatggagctaaccactcgtctggatttcttcaaggaacgacggtcacaacttatggaacagattcagattcttgacctcaactatggttcctcttcttcttctctgcaccgatcctcttctccaccatggaattaggctctttgagaagctcttgtccaaaaaaatagaaaaatgtaaagaaagtctcgtctgtgcagactcttcatgcttgtaaaaccggttcaaggttaaaccaactatatatttaccacgaaattgatgagaaattgtttgctcttgcttcgttgtcagtgtgatttatgtgagtgaggtttgtaaaagctgggggatttcctcggtttgtttctcattttaaagggtggccgactaaaattcagttattgaaataaaaacataaaaaaaaaaggggcggccgtttaa

SEQ ID NO: 121702 - DNA, 991 bp, Arabidopsis thaliana
  unsure (1)..(991): unsure at all n locations
atacgactcctttagggaaagccggtacgcctgcaggtaccggtccggaattcccgggtcgacccacgcgtccggcccagagttgacataattgcatccacataatatttttttctccgatcatcggaaaaagcagtaatcaagatgcagaagctcaacgacatcttctccggtggaggagacggcgacggaacaaccgatagtttccttgaagatggatcggagggtctctgtgctctctccaccacccagagaatgtacggattcgccgcgtctttagccactggtctgctacttatgttcctgtctatgattgtatttgggatccccatcaaatttgcactgctcttcacatttggaaatgttctagctattggaagcacagctttcctcatgggacctgagcaacagatgagtatgatgtttgaccctgttcgtttcttagctacatccatttatatcggatgtgtcgttgttgcactcatttgcgctctcctgatccatagcaaaatcttaacggtccttgcgatcttatgtgatatttgcgcactgatatggtacagcctcagttatattccattcgcacggagaatgggctctgaaatatgatccgtctttgtgacactgagctatagtcagtcatctggcagcagaacacacagcacataaattgttctatactggtctcgagaacttgtgatctgattattcttaaacgaatcttgcttgtttttgacctgatcgtgtgagtcagaagtaatgcagtgaggtttggttatttggggtcttgaagctctggtgtgtatttcggtgcttaagctcttctgttgcttcagtcttaaaacgttgtttggcattttgtgtgatcaaatacaaagatttctttttctttnnnnnnnnnnnnnnnnnnnnnnnnnnnnnnnnnnnnnnnnnnnnnnnnnnnnnnnnnnnnnnnnnnnnnnnnnnnnnnnnnnnnnnnnnnnnnnnnnnn

SEQ ID NO: 121703 - DNA, 583 bp, Arabidopsis thaliana
  unsure (1)..(583): unsure at all n locations
nnnnnnnnnnnnnnnnnnnnnnnnnnnnnnnnnnnnnnnnnnnnnnnnnnnnnnnnnnnnnnnnnnnnnnnccacgggtgcgcccacgcgtccggctttcactcgccattattggtccctcttcttcttcttcttattctctggatctctccttctccctctcttctttctacagttatttcgctttagcagattacttaaatccacggtttcttcttctccgggagcatttatggcgtcagcggtgacggcgtcaggcaaggtggagaaaggacatcagctatatagagacggcaagtataaggaggcgcttctcttctatacggaggctcttactgctgctaaagctaaaccacagaagatcgctcttcacagcaaccgcgccgcttgttacttgaaattgcacgatttcattaaggcagcagaagaatgcacttgtgttcttgagcttgatcagaaacatagcggagcgttgatgctgagggctcagactttagtcactcttaaagaataccaatctgctccttttgatgtcaccaggcttatggagttgaaccctgattctgaggtttatcagaacctc

SEQ ID NO: 121704 - DNA, 561 bp, Arabidopsis thaliana
atgatactccagctctctacgactcactattgggaaagctggtccgcctgcaggtaccggtccggaattcccgggtcgacccacgcgtgccctcatctgccaccaaaccaaagacataatttcttcggtgacttccatggctccgcctgtctctgatgattccctacagcctcgagatgtttgtgttgtgggagtggcgcgaacgcctataggggacttccttggctccctctcgtctttgactgctacaagacttgggtccatagccatccaagccgcacttaagagagcacatgttgatccggcccttgtggaagaggtcttctttggcaatgtcttaactgccaatcttgggcaagcaccagcaagacaggctgcacttggtgctgggattccctattctgtgatctgcaccactatcaacaaagtttgtgctgcaggaatgaaatctgtaatgctagcgtctcaaagtatccagctcggcttgaatgatattgttgttgctggtgggatggagagcatgtcaaacgtacctaagtacctcccggacgcaagaagggg

SEQ ID NO: 121705 - DNA, 1471 bp, Arabidopsis thaliana
  unsure (1)..(1471): unsure at all n locations
ctactccctctcactatanntatagctcctgcacgtgccggtccggaattccagggtcgacccacgcgtccggtctaccaccggacagattattcgatgcaaagctgctgtggcatgggaagccggaaagccactggtgatcgaggaagtggaggttgctccaccgcagaaacacgaagttcgtatcaagattctcttcacttctctctgtcacaccgatgtttacttctgggaagctaagggacaaacaccgttgtttccacgtatcttcggccatgaagctggagggattgttgagagtgttggagaaggagtgactgatcttcagccaggagatcatgtgttgccgatctttaccggagaatgtggggagtgtcgtcattgccactcggaggaatcaaacatgtgtgatcttctcaggatcaacaccgagcgaggagggatgattcacgatggtgaatcaagattctccattaatggcaaaccaatttaccatttccttgggacttccacgttcagtgagtacacagtggttcactctggtcaggttgctaagatcaatccggatgctcctcttgacaaggtctgtattgtcagttgtggtttgtctactgggttaggagcaactttgaatgtggctaaacccaagaaaggtcaaagtgttgccattggtggtcttggtgctgttggtttaggcgctgcagaaggtgctagatcgctgtgcttctaggatctcggtgtgatttaactctaaaaattcgaccaagtaaggaattcggtgtgccgagtgtgtaacccgaaagcccatgacaagccaattcaacaggtgatcgcttagatgacggatggtggggtggacaggagtgtggaatgcaccggaagcgttcaggccatgattcaagcatttgaatgtgtccacgatggcttgggtgttgcagtgctggtgggtgtgccaagcaaagacgatgccttcaagactcatccgatgaatttcttgaatgagaggactcttaagggttcttttttcgggaacttccaacccaaaactgacatttccggggttgtggaaaagtacattaacaaggagctggagctttagaaattcatcactcacacagtgccattctcggaaatcaacaaggcctttgattacatgctgaagggagagagtattcgttgcatcatcaccatgggtgcttgaagccattctctcgcagatgatgttcactttgtgttttacttcctttatgcattcacagcaataaaagaaagaaatctccatcgcttttggttttcttctctgtcttaagttagtcgttttcgtgtctaatctattacttatcattgtaatagactcttcttctattgagatttgaatataaactaaaaaaaaaaaaaaagaaaaaaaaaaaaaaaaaaannnnnnnnnnnnnnnnnnnnnnnnnnnnnnnnnnnnnnnnnnnnnnncgcc

SEQ ID NO: 121706 - DNA, 728 bp, Arabidopsis thaliana
  unsure (1)..(728): unsure at all n locations
atacgactcatatagggaaagctggtacgcctgcaggtaccggtccggaattcccgggtcgacccacgcgtccgaaaactaacaaaagatcaaaagcaagttcttcactgttgataatgtctaccaccggacagattattcgatgcaaagctgctgtggcatgggaagccggaaagccactggtgatcgaggaagtggaggttgctccaccgcagaaacacgaagttcgtatcaagattctcttcacttctctctgtcacaccgatgtttacttctgggaagctaagggacaaacaccgttgtttccacgtatcttcggccatgaagctggagggattgttgagagtgttggagaaggagtgactgatcttcagccaggagatcatgtgttgccgatctttaccggagaatgtggggagtgtcgtcattgccactcggaggaatcaaacatgtgtgatcttctcaggatcaacaccgagcgaggagggatgattcacgatggtgaatcaagattctccattaatggcaaaccaatttacccatttccttggggcttccccggtcagtgggtccacagtggtcacncttggcaaggttctnaagtcaatccggntcntcttttncaaggcttgnattttcaattnnggtttgcntctggggaagggnaccttttaattnggtancccngaaaggcaaagtttccattttggctttggcntntggtttgg

SEQ ID NO: 121707 - DNA, 544 bp, Arabidopsis thaliana
gggaaagctggtacgcctgcaggtaccggtccggaattcccgggtcgacccacgcgtccgaattcaccaattttagaattcccattctcattttctctctctttctatttctccaaatttgcctaaagattttacattttatcttcaatccttccttgatttacgtttgaaatatttcgacccaaaactatactgatggagagaacaaacagcattgagatggatcgagagagattaacggcggagatggcgtttcgagattcatcatcggccgttataagaattcgaagacgtttgccggatttattaacgtccgttaagctcaaatacgtgaagcttggacttcacaactcttgcaacgtgaccaccattctcttcttcttaattattcttcctttaaccggaaccgtgctggttcagctaaccggtctaacgttcgatacgttctctgagctttggtctaaccaggcggttcaactcgacacggggactggacttacctgcttggttttcctctccttcgttttgaccctttacttggcta

SEQ ID NO: 121708 - DNA, 806 bp, Arabidopsis thaliana
  unsure (1)..(806): unsure at all n locations
cnnnnnnnnnnnnnnnnnnnnnnnnnnnnnnnnnnnnnnnnnnnnnnnnnnnnnnnnnnnnnccgggtcgacccacgcgtccgaacagaaaaggcagatgtttacagcttcggtgtggtggcaatggagattgttagcggaaagagcaacgcgaaatacacgccagatgacgaatgttgtgttggccttctcgattggttttcaatttcaggcatttgtgttgcaaaagaaaggggatatcgcggaaattctggatccgaggctggaaggaatgttcgatgtgatggaggcagagagaatgataaaggtttcacttttatgcgccaacaagtcttcgacattacggccaaacatgtcgcaagttgtgaagatgcttgaaggggagactgagatagaacagatcatatcagaccctggagtgtatagtgataacttgcacttcaagccatcgtctttgtcgtctgattatatcttgtcgattccttcatcatctgaatctgcttatgatctgtaccccctcagccccgagtccattgtctttactatacagtagcctgaaccctctgattatctctacgctagggttgttgttgtaggctacttcgggctcgagaaaagattgtaattagggctaatatcgctagttgtacttggaaaagaatttattttgttttagaagaaaaaatcatccttnnnnnnnnnnnnnnnnnnnnnnnnnnnnnnnnnnnnnnnnnnnnnnnnnnnnnnnnnnnnnnnnnnnnnnnnnnnnnnnnnnnnnnnnnnnnnnnnnnnnnnnnnnnnnnnnn

SEQ ID NO: 121709 - DNA, 1001 bp, Arabidopsis thaliana
  unsure (1)..(1001): unsure at all n locations
cnnnnnnnnnnnnnnnnnnnnnnnnnnnnnnnnnnnnnncccacgcgtccgcccacgcgtccgcccacgcgtccgcccgtgcccttctccttcttggcggctgcggccatttttttcttctttctctcttctattctatctcttaaaccctagatttgatctgggtttttcctgattccatttagggtttctctatcttcttttttttcttcttcttcttctttctctttggtcgcatccccttttatccgagaaggatctatccaaatctttgtttgtcgaatctcctctcatggctaccgttgctcctcctgctgatcaagctacagatctgttgcagaaactatccttggactcgccagcaaaagcttcagagatccctgagcctaacaagaagactgccgtctaccagtatggaggcgttgatgttcatggtcaagttccttcttatgatcgatctttgacaccaatgcttcccagtgatgctgctgacccttcagtttgctatgttcctaatccttacaatccctaccagtattacaatgtatatgggagtggtcaagagtggactgactacccagcttacacaaatcctgagggtgttgacatgaattctggaatttatggagagaatgggactgttgtgtatcctcagggttatgggtatgcagcgtatccttactcgccagcaactagccctgctccacagcttggcggggaagggcagttgtacggtgctcagcagtatcagtatcctaactattttccaaacagtggaccgtatgcttcatctgtggctacacctacccagccggatctctctgcaaacaaacctgctggtgtgaagacactacctgcggatagcaataatgttgcttctgctgctggtatcacanaaggaagtaatggatcagctccagtgaaaccaactaaccaggctacccttaacacctcaagtaatttgtatggtatgggtgctccaggaggaggtttggctgctg

SEQ ID NO: 121710 - DNA, 703 bp, Arabidopsis thaliana
  unsure (1)..(703): unsure at all n locations
nnnnnnnnnnnnnnnnnnnnnncgactcactttagggaaagctgctacgcctgcaggtaccggtccggaattcccgggtcgacccacgcgtccgcggacgcgtgggtttgtttgcttcaccagagaagatcgaagacgaagaagacgagaaagagagataattagggtttagaatggcggaggatctagttctcgatacggcgatcagagattgggttctgattcctctctccgtagtgatggttctaatcggtattttgagatactttgtctctaagcttatgcgttctactccaactcctgatgctaagatggttaaagaagggcaagttgttattagagctcggaatcttaaagtcggtgctaattttatcccgccgaaatcattccgtgctcggagattctacttcagcaacgaggagaatggtttgctacatgttcccaagggagaagctcaaaatccacaagctgctatgttttctgatcctaacatggccatggatatgatgaagaaaaatctttctatgattattcctcagacactcacttttgcatgggtcaacttcttcttctctggatttgtgcgcaatcctttcctgctcaagtcaatatgtcaatgctgctgcctgcatgtgttgagtgctctgacttactgtgtaagtgctttgtatctaccctgcaggtgtacaacgcgaggtatcca

SEQ ID NO: 121711 - DNA, 655 bp, Arabidopsis thaliana
  unsure (1)..(655): unsure at all n locations
cttcttctctggatttgttgcagccaaaataccatttccactgactcagaggttcagatcaatgttacagaatggcattgacttgagcactgtcgatgttagctatgtgagtagtcgttcctggtacttcttgaacttgtttggattaagaggcttgttcagtctcattctcggagatgaaaatgccattgatgacacacaacgtatgatgcaaatgggtgggtttggatttgatgcatcaaagagtctgggtgcagagaaggatggtttagacataatccagcacgaatgggcactacctcgatttgagcagcgcgcagaatctgtattaagaaaactcgtgaagtagagagaaacacgataaggttttcagtgaaatctggtttacttcactcgatgttgaaaacattcgaactttgtagaaacttttacttgaaactgagtcttaacagtgagttcttgtgtttcagctcgtagattccgctctggttttcttttcgtcatctgtcaattattgtgacactcactactctctcaaaaaaagaaaatgttctccgtaaaaaaaacaaaaaaagnnnnnnnnnnnnnnnnnnnnnnnnnnnnnnnnnnnnnnnnnnnnnnnnnnnnnnnnnnnnnnnnnnnnnnnnntgaatcg

SEQ ID NO: 121712 - DNA, 683 bp, Arabidopsis thaliana
  unsure (1)..(683): unsure at all n locations
tactccaactcctgatgctaagatggttaaagaagggcaagttgttattagagctcggaatcttaaagtcggtgctaattttatcccgccgaaatcattccgtgctcggagattctacttcagcaacgaggagaatggtttgctacatgttcccaagggagaagctcaaaatccacaagctgctatgttttctgatcctaacatggccatggatatgatgaagaaaaatctttctatgattattcctcagacactcacttttgcatgggtcaacttcttcttctctggatttgttgcagccaaaataccatttccactgactcagaggttcagatcaatgttacagaatggcattgacttgagcactgtcgatgttagctatgtgagtagtcggttcccgggtactttcttgaaccttgtttggattaagaggcttgttcaagcctcaattctcgggggatgcaaaatgccattggtggcacacaaccggatgatgcaaatggggggggtttgggttttatgcatcaaagggggcttgggtccagaggaaggattggttnggcataatccagaccggatnggactaccncggttttngcagcggnagnaatctgtttnagaaaccccgnaaggtnggggaacccggtagggttcagggnacctgggtnttnccgggttgaant

SEQ ID NO: 121713 - DNA, 823 bp, Arabidopsis thaliana
  unsure (1)..(823): unsure at all n locations
nnnnnnnnnnnnnnnnnnnnnnnnnnnnnnnnnnnnnnnnnnnnnnnnnnnnnnnnnnnnnnnnnnnnnnnccacgcgtccgagaaggatacctcaatttcatgggaaacgaatttggacacccagaatggatcgacttcccaaggaccgaccagcaccttcctgatggcagagtcatcgctgggaataatggtagttatgataaatgccgacgtaggtttgatctgggagatgcagaatatcttagataccatggactacaagagtttgatcgagcaatgcaaaatctagaggagacgtatggtttcatgacttcagagcaccagtacatatcccgcaaggatgaaggagacagagtcattgtattcgagagaggtaacttgctcttcgtcttcaacttccactggaccaacagttactctgactaccgtatcggttgctctgttcccggaaagtacaaaatcgttttggactctgataactctttatttggaggcttcaaccggctagatgactccgcggagtttttcacctctgatggaaggcacgacgataggccttgctccttcatggtgtatgcaccgtgcagaaccgctgtagtttacgctgcagtagatgatgatgatgatgatgaacgttcttctcttgtcccataggcctgttacccgaagatgtttaggagcaaagacagttgtccgagtttacctactgtaagcttctttgtactacaaaaaattactcgttgatcttcttctcctttagttttcgcttgcagcatcattataacttaaaaatgaaataaaaaggtcgtgccctaanaaaa

SEQ ID NO: 121714 - DNA, 564 bp, Arabidopsis thaliana
  unsure (1)..(564): unsure at all n locations
nnnnnnnnnnnnnnnnnnnnnnnnnnnnnnnnnnnnnnnnnnnnnnnnnnnnnnnnnnnnnnnnnnnnnnnnnnnnnnnnnnnccacgcgtccggaaaaaggttggagctttatcatcatcagcttcgaaaccaccacctgcgccggttagaggagcaagtggaggagagacttcgaaacaagtaaagttgaagcctttacattgggataaagtaaaccctgattccgatcattcaatggtttgggacaaaatcgatcgtggatcattcagtttcgatggcgatttaatggaagctctgtttggatacgttgccgtggggaagaaatcaccagaacaaggcgatgagaaaaaccctaaatcaacgcaaatattcatacttgatccgagaaagtctcaaaacacagcgattgtgctcaaatcattaggtatgacacgtgaagagcttgttgaatcactcatagaaggaaacgatttcgtgccagacactcttgagaggttagctagaatagctccaacgaaagaagaacaatcagccattcttgaattcgacggtgacacggcaa

SEQ ID NO: 121715 - DNA, 1040 bp, Arabidopsis thaliana
  unsure (1)..(1040): unsure at all n locations
atacgactcacttagggaaagccggtacgcctgcaggtaccggtccggaattcccgggtcgacccacgcgtccgcccacgcgttcggattcttcttctctaccatattcgttgaaaccagagaagatggtgggtgtgtcgccgaagatcgctccgtcgatgttgtcatcggactttgcaaatcttgccgcggaggctaagcggatgatcgatttgggcgccaattggcttcacatggacattatggacgggcattttgtttctaacctaacgattggtgctcctgtcatcgagagtttgaggaagcacacaaatgcatatcttgattgccacttaatggtgacgaaccccatggattatgtggatcagatggctaaagctggggcgtctggtttcacattccacgttgaggtggcccaagagaattggcaagaacttgtgaagaagattaaggctgctgggatgaggccaggtgtggctctaaagcctggaacacctgttgaacaagtctatcctctggtcgaaggtacaaatccggtcgaaatggttcttgtgatgactgtggagcctggatttggaggccagaagttcatgcccagcatgatggacaaggtcagggcattgaggaccaagtacccaacacttgatattgaggtggacggcggcttaggcccttccacaatcgatgcagcagctgcagctggagccaactgtatcgtcgcaggaagttcagtgtttggagctccgaagcctggggacgtcatatcccttttgcgggctagtgttgagaaagcacaaccctccacttaaggaagttggtgccctaactctatgagccaaggtcttaagctaatacttttttatttctttgaaatggaataaaccttagatcttagttacttgttatacaattaaaatgtgtctgagagcttttgccctagcgatgaaattccacaagaaaaaaaaaaaaaaagnnnnnnnnnnnnnnnnnnnnnnnnnnnnnnnnnnnnnnnnnnnnnnnnnnnnnnnnnnnnnnnnnnc

SEQ ID NO: 121716 - DNA, 690 bp, Arabidopsis thaliana
  unsure (1)..(690): unsure at all n locations
ccagctctactctactcacatctagggaaagctggcacgcctgcaggtgccgggccgcaatacacgggtcgacccacgcgtgcggcttcatcatcttctttctagtctctctctctctcttcaccgcgtacacagtaacacagaccctttttccctcttactcaaggttcttctttgtcatcttgttgccgaatccacaaagaggagaataaagattcgacctttattagatattaacgactctggatttttgggtttttggagttggatccacatgggttcttatccggatggattccctggatccatggacgagttggatttcaataaggactttgatttgcctccctcctcaaaccaaaccttaggtttagctaatgggttctatttagatgacttagatttctcatccttggatcctccagaggcatatccctcccagaacaacaacaacaacaacatcaacaacaaagctgttgcaggagatctgttatcatcttcatctgatgacgctgatttctctggattctggttttgaagtatataagccaagttcttatgggaggagggtatgggagagaagccctggtaggttccaggaggctttgggcctcaagctggctgggaacnncctcagtgggccttgggggaaaacccnttgggnttgggctttgggnaacccggnnnggc

SEQ ID NO: 121717 - DNA, 760 bp, Arabidopsis thaliana
  unsure (1)..(760): unsure at all n locations
atgatatgccnnnnnnntnnnnnnnnnnnnnnnnnnnnnnnnnnnnnnnnnnnnnnnnnnnnnnnnnnnnnnnnnnnnnnnnccacgcgtccgcggacgcgtgggcggacgcgtgggcttggtcacgaggcgactctcactgtggagttcgatattcaggcaatctcaaaagcttccacgacaaaggtgtcaaatttggtcatcatgacggagtataagcaggagcaggaaatggagattgaagctcttgaagctatacttatggatgagtttaaagaaattcattctagtgaaagtgggcttaatacttcgaatcgatgctttcagattacagtgactcctcaggatgatgaactggaggaattagcaatcccaccagttcagctggctttggttttctcgcacacagaaaattacccggacgaggctccgcttttggatgttaaaagtattcgaggaatccatgttagtgacctcaccatcttgaaagagaagcttgaacaagaggcatctgaaaatctaggtatggccatgatctatacactggtctcatcagcaaaggactggttgtctgaacactatgggcaagatgatgcagctgaatttgccgaagtagaagctgccaaagaggatgaggtaattgtccctcatggagaacctgttacgctagagacattcttggcgtggagagagagatatgaggcagagcttgcacttgagcgagccaagttgatgccggagtctgctcttacagcaccta

SEQ ID NO: 121718 - DNA, 519 bp, Arabidopsis thaliana
  unsure (1)..(519): unsure at all n locations
gtaaagttctgattctctcctttaggtttatctctcgttaacgtcgctcttggtcacgaggcgactctcactgtggagttcgatattcaggcaatctcaaaagcttccacgacaaaggtgtcaaatttggtcatcatgacggagtataagcaggagcaggaaatggagattgaagctcttgaagctatacttatggatgagtttaaagaaattcattctagtgaaagtgggcttaatacttcgaatcgatgctttcagattacagtgactcctcaggatgatgaactggaggaattagcaatcccaccagttcaactggctttggttttctcgcacacagaaaattacccggacgaggctccgcttttggatgttaaaagtattcgaggaatccatgttagtgacctaccatcttgaagggaagcttnnncaanggnatttgaaaanttnggntggccatgcctttnaatnggnntattagnaangcctgttttttancctttgggaanttttccctta

SEQ ID NO: 121719 - DNA, 447 bp, Arabidopsis thaliana
ctctctttctctctacaaacaaaataacgagaacttcaaaaatcaaatgggtctttgtgtatctgttaatcgaaacgagtacgtttcttcgtcgacgacggctaaaatcgtaacaattaacggcgatctccgtgaatacgatgtaccggtgttagcatctcaggttctggaatctgaatcgacgtcttcttcttcatcatcatcatcttcttcttatttttctatgtaattccgattctctctactacgacgattttatcccagcgattgaatctgatgagattcttcaagcgaatcagatctatttcgtccttcccatctctaaacgacaataccgtctctctgcctcggatatggcggctctccctgtaaaagccagcgtcgcgattgagaagcagcggggaagaaaatcgccgtcgtagaagcggaagaatctctccggttgtg

SEQ ID NO: 121720 - DNA, 1167 bp, Arabidopsis thaliana
  unsure (1)..(1167): unsure at all n locations
nnnnnnnnnnnnnnnnnnnnnnnnnnnnnnnnnnnnnnnnnnnnnnnnnnnnnnnnnnnnnnnnnnnnnnnnnnnnnnnnnnnccacgcgtccgtgaaattcaacttctagtcttctcctccaactactggcaaattagggtttctgagttcgagaaaattcgtagcagagtgtgaaaatggaaggaagcaaaagcgaggcagtgttcgattccatgaatctaaatcctcagattttcatcaacgaagcaatcaactccgtcgaagattatgtcgaccaagcttttgacttctatgcccgtgatgcatccaaatctctcaaaatcaaaggatctgataaacaaaagtcacaagctttatcaaatggtattgctcgtgttcgtggtttgctactatctgtaatcgacaatcgtttgaaattgtgggaaagctattctcttcgattctgtttcgcagttcctgatggatttgtgttaccaaagagtgaggagtcttcgtctgtgcatcaggatgggttatatgatctagaattagatgcagaattggattctttaagggataagcttaatgtggtgggaaagaggtctgttgagcttgactctgagctccaggctttagaaagaagctcggtttcgagggaacggtctttgagactcgttaatgaagctttggagctttatgatgagtcttctatggatgaaatattcaaagagatgacgaaaatggcatcggaacttcgtgcaagcgtggagaggctgaaaacaagaagaatgaaagcaagtgaaagcgctaaagtaaagaggctaaagaaccatggcaaagagttttcagcaatgacttttgatggaaagcttgaagacctcgaaaagtttcaagccgagttaaggaagatgtgaaaatttgttaacctttgcagcaaaagaattgtggtttgtcaaagataatgctctaaactgacttttttttgtaaatgactaacttgacttcttctctttatagactacgtcgtttctggcttaccaaacggtcactttcagattaggattcacaaatgattaaattatgaaattataaactgaaaaaaaaaaaaaaaaaaaaagnnnnnnnnnnnnnnnnnnnnnnnnnnnnnnnnnnnnnnnnnnnnnnnnnnnnnnnnnnnnnnnnnnnn

SEQ ID NO: 121721 - DNA, 855 bp, Arabidopsis thaliana
  unsure (1)..(855): unsure at all n locations
nnnnnnnnnnnnnnnnnnnnnnnnnnnnnnnnnnnnnnnnnnnnnnnnnnnnnnnnnnnnnnnnnnnnnnnnnnnnnnnnnncccacgcgtccgttcctctctcctcctccctccgcttctctttctctctgtaaccaacatgagcaggatcagcggcgatggcggctctagggtttctattccggctgatctgcttcaaaccattcaaaacatcagagaggttaccggtaaacaacattccgacgaggatatcttctctgtctttaaggagtgtttcagtgatccacatgagaccactcagaagcttctctatttagatacatttcatgaggtgagaagcaaacgggagagaaagaaagagaatttagtgccaaatacacaaggaaggggccggactggacggaagaactttgcttcaagttacacagatgccagtaatggaagaagtgcagcttttaaaaagcagagtggagctaatcacataataggaggttctggaactgcttcgtctgctcctaacaatgcaagaaacgacacaaaaccttcttccataatggccccgaaccctataagtcttccaagtggaatcagtaaccagaaaattcaagatgctatcatatcccctgtggacaaggtggacacagaggaacagcctctctccaaggctacttcttcttctaagggatgttgtgagccggataagtctaaagaaagtagtgtatcagtggctggatcagattctgttgtagaaacgatactcaatatgctgtagttgaaacttttcagatcccacaacagtccgagcgagtattaagagtgagggtgcagcagtaatgcagaatgagtccttctca

SEQ ID NO: 121722 - DNA, 554 bp, Arabidopsis thaliana
ccagctctctacgactcactatatggaaagctggcacgcctgcaggtaccggtccggaattcccgggtcgacccacgcgtccgatcagcggcgagggcggctctagggtttctattccggctgatctgcttcaaaccattcaaaacatcgagagacgtcaccaggtaaacaacattccgacgaggatatcttctctgtctttaaggagtgtttcagtgatccacatgagaccactcataagctactgtatttagatacatttcatgaggtgagaagcatacagtagagaaagaaagacaatttagtgccagatacacaaggaaggagccggactgcacggaataactttgctgcatgttacacagatgccactaatggaagaagtgcagctattaaaaagcacagtggagctaatcacataataggaggttctggaactgcttcctctgctcctaacaatgcaagacacgacacataagcttcttccataatggccccgaaccctataagtcttccaagaggaatcagtaaccacaaaattcaagatgctatct

SEQ ID NO: 121723 - DNA, 1145 bp, Arabidopsis thaliana
  unsure (1)..(1145): unsure at all n locations
aatacgactcctttagggaaagccggtacgcctgcaggtaccggtccggaattcccgggtcgacccacgcgtccggtgggcgtaggtattgccatgggcttttggcgactttggagcttaagagtagacacgatctgatctcaaggctattcaactctgtcgtgccttgtaaagatgagattagttttgaggtgtatatgaatgatgaagccatggatcacattgtgtttgctatggcgaggaagaaggcggctaaaacgatgcacaacgagctgagggatctgcagagatttggaaggatggtcccagtccggcgggagaagtgggtacggaggagtagctgtgtctctgagtctaaggaggagctggagatatttcaccgatgtgtactgatcaggttttggtgacaagtcttttaaaagtttgggaagtatttcatctcaatgcatttctcggatcaacatcctggcaaacacaggaagatgctgcttttcaagtttgccttacctgatattaaacacatggatgatatggttcggttgatagcgctaattccgtattacattgacttaattgggcgctacaagctcagctctcaggcaaggaacaaaactgacggtgctaggcaaaaggcggctcaggaagcgtacaaggaacttgagaatgtgagacaagaggcattgcagagaaagaaagccgaaaagaagaaaatattggaggaggcacaggcaaagcttagctccgaggctctaaggaagaaagaagcaaaagaacgtgcacgccagatgaaaaagtcaatgccgaaagttaagatgagtcgtggtcactagaatcaagcataagggacacactgtcatgtcgtccattggaatagctactccctttttagtcctttcgattagatattttgaactttcatgaatctctctacttgcagttgatttttacttcattacgatttcccctatagtggcaccgaggccttacttccgataatcctccgggacctctttgaatcataagatgagttttgaagttataggcataaaaacaaagggcaaccgctctagaggatccaagcttacgtacgcgnnnnnnnnnnnnnnnnnnnnnnnnnnnnnnnnnnnnnnnnnnnnnnnnnnnnn

SEQ ID NO: 121724 - DNA, 646 bp, Arabidopsis thaliana
  unsure (1)..(646): unsure at all n locations
cccacgcgtcagaaaaaaaaaactcggaatctgaatccgatcaaatctgaacaacaccggcgacgaatctctgcggcgtagatttagatttcatcccggggagacttaaattgatgcagtagtgaaatatcacggcgaagggatggtttgttggtaaaagagccaattgaaatcagttatgtcatcgggaggagccggagagtataacgaagacagacatctgttacgatccaccgacggagatgaagtcggcattggcggaggagagggtgatctagatgttgaatctcagtctccggctatcagaagtggagctggaggagttagggatctgttcaagcatatagatcggagattttctctttccggtcgtcgtttaagttttaaacggatggagaatatcagagtcgatagagagcgccataaatccttcttccttcttcagcgttttcggcttcttggagaagaagattggtnggtggtatcagtaatttccatagcgttgatgancgaaatacgggtncgggtttatgaggagtctncgngntaagtcncnccctaagngggnnctcttcnaattgctncctattgggttcccctgaatttttcnccgttaaaaaagggnnatgcnatcnanggggggggc

SEQ ID NO: 121725 - DNA, 1296 bp, Arabidopsis thaliana
atacgactcccttagggaaagctcgtacgcctgcaggtaccggtccggaattcccgggtcgacccacgcgtccgcccacgcgtccgaaaacttcagagagaaagtggatgggggacacgaaggtagagacaatctcgaggttagctcaatggagaattgaaaattttggtccttgttctttcaaaaagtccgatcctttcaaagtcggaatttggaattggcatctgtctatagagaggaatcgctatctatcagtgaggctattcccagaactttctcgagtatctaaagagcaacctcctgttgccaaatttgttcttcgtgtctccaacgttggccccaatcgtagattctacatctctcctgtttatgagaagctgctgcgtacaactgatgattgtgtgtggcatgttgactccagtttccacggtcgattcaccattgatgttgagtttcttgatctcaaaatctgccctgtgaatggtggtgaagcttctcctgtttggccaaccgatgcaacaatgcaatcaatctctactcaaaccactctcaaatgcttatcccggatgctagaggaaagcatactaaccgatgtaatcatccacacagccgatggaacactctctgctcacaaagctatcctctcagctagctcaactgttttcaaaagcatgttccaccacgacctcatggaaaagggatcatccacaatccacatagacgacatgtcgagagaatcttgcatggctctactaagttacctctacggaaaccatacccaagaagagttctggaaacacaaggctcgccctcctcggcgctgcaaacaagtacgacataacggatttgaaagcagcctgcgaggagagcctaatggaagatataaactcgagtaatgtgctcgagaggctacaagaagcttggctttatcagctggagaaactgaagaaagggtgtttcatgcatttgtttgatttcggaaagatttatgatgtcagagaagaaatcagcagtttcttcaggcaagctgatcgagaactgatgctggagatgtttcaagaggttttgtctgtgtggaaaccggtctaatatacacttacacacatactttgaacatttcagcttgatggtgttttgtttatagtcttcttgttctcttctgtgtgtgtaactaacaacaactctggattttgttgtatcactctgtctaatgtatagtagccgcaaattcaaacagcccgggggatccactagttctagagcggccgccaccacggtggagctccagcaaatgtt

SEQ ID NO: 121726 - DNA, 663 bp, Arabidopsis thaliana
  unsure (1)..(663): unsure at all n locations
ttaggtgccactatagaagagctatgacgtcgcatgcacgcgtacgtaagctcggaattcggctcgtgggggacacgaaggtagagacaatctcgaggttagctcaatggagaattgaaaattttggtccttgttctttcaaaaagtccgatcctttcaaagtcggaatttggaattggcatctgtctatagagaggaatcgctatctatcagtgaggctattcccagaactttctcgagtatctaaagagcaacctcctgttgccaaatttgttcttcgtgtctccaacgttggccccaatcgtagattctacatctctcctgtttatgagaagctgctgcgtacaactgatgattgtgtgtggcatgttgactccagtttccacggtcggattcaccattgatgggtgaggttcttggatctcaaaatctgcccctgtgaatggtgggtgaagcttctccctgtttggccacccgttgaaacaatgcaatcaatctctacttaaaaccactttcaaatggttatccccggttcttgggggagggattctaacccgtgaaattctccacaaagccggtggggcaatttttggtaaaagggtccccccttaggtgggccaactttttaaaaatttccccgcccttggaagggnttcccatttc

SEQ ID NO: 121727 - DNA, 447 bp, Arabidopsis thaliana
gagccctgtcaatggctcgcttcgtcagatgtctgagaagaacactcttttctaattcgtctccttctattgctcaccggagccctaggattggtttgcccacgaatctaaatcctaaaattttaatcagccgcagatgtctgagctccgggagttacgtctcagaaatgcagaaatcagctttccagggcaacattttgcgactgatccgtaatgagattgagtacgaactcgatcactcgcctcctcttcagcctcctaacagttttggtccattcactgtggatgaacggcctggagagcagtggattagcttgaaaaggaattttggggataaagaagacatcaaaattgaagcaactatgtttgatagatcagttcccacgtcaaaatctaccaaaactgaacctgaatatattcttcacatcactttcattgtcaacatct

SEQ ID NO: 121728 - DNA, 512 bp, Arabidopsis thaliana
  unsure (1)..(512): unsure at all n locations
cannnnnnnnnnnnnnnnnnnnnnnnnnnnnnnnnnnnnnnnnnnnnnnnnnnnnnnnnnnnnnnnnnnccacgcgtccggtttcctcatcttcaaaacattgtactagtctcaatctccaactgttttaaatgggaatttcgaaaaaatctcaagttagcagagaattagacaccgatggaaaaaagtttatcttcgccaaaacatcgattcgggcttcactaaagccggtgaagacgaaactcattaagcctgagagagaatcagaagatggaatttgtatcactcccacggcgagaggagcaaagactccggagtgtccggcggctccaaggaaacgcccaccggtgttgaaatgtcagaacaatattcgtatagagtactttgtgcctccttcagatttcgagttggtgtttatacaacgccgttaatgtaaaaagatataaaaagagtttctgagtttggtttttacaaaaaaaaaaaaaagggcggccgctctagaggatccaagc

SEQ ID NO: 121729 - DNA, 906 bp, Arabidopsis thaliana
  unsure (1)..(906): unsure at all n locations
nnnnnnnnnnnnnnnnnnnnnnnnnnnnnnnnnnnnnnnnnnnnnnnnnnnnnnnnnnnnnnnnnnnnnnnnnnnnnnnnnnnccacgcgtccgatttccctctcttatcctcaatgaaaaaaataatctgagaaaacgcaaaagaagaacggagcaaaatcctcagaatcgtcgccggagaatctttacgtttcgacataatcggaattttggaattgataattccgatggaaggggttatcacatgtttccatacgaaatgcgtctctcttccaattcgttctttcccactttctagggtttcttcacttcctcggtggaggaacaataaattgatctcttcatcgcgatcggttcatctaagaagcttgtgcgtttcgagctcagatactttagtcgcgagcggttcaccaaaggaagacgagaggcagagcaaagtatcgagcaagaaggaaggagatgactccgaggatttgaagttttggatggataagaatgggttgccaccttgcaaggttattctcaaggagagaccagctcatgatcagaagcataaacctatacattatgttgctgctagtgaggatcttcagaagggtgatgtggcgttttcagttcctgattctctggtggtcactctggaaagagttttgggaaacgagactattgctgaactgttgacgacgaacaaattatccgaactggctttgtctagctttgtaatttgatgtattgagaagaaacaacgggaagaaatcccgttgggggccccccataagagaacttgatcgtcaaagaggaagaggtcagttagatgcggaatcccctttgctgtggtcagaggctgagttagattacctaactggtagtcctaccaaggccgaagttcttgagagggctgaagg

SEQ ID NO: 121730 - DNA, 605 bp, Arabidopsis thaliana
  unsure (1)..(605): unsure at all n locations
cgttcctntttcnccggtagtacgaagtggncgntagaccnagcccggagaatcttctcgtaagtcatgggaagtactatccgctgactctgacttcacctacagaagatccttgaagagttgccatcatcccacaagagactccgcaacaagattgctggaattctccacccacttgatgaaacgtatccagaagggaccagtccgtggaatctcactcaagcttcaagaagaagagcgtgaacgccgtatggactttgttcccgatgagtctgctatcaagactgatgagatcaaggtcgacaaagagactcttgagatgcttgcttctctaggaatgtctgacactctcggcatctctgcagtcgacccacaacaagcgctatatggcaccaatccctgctttcgggcggcggcagggcacccaggagatacctaagatgggacgattggctctcttttttcacagttagggacaagaaagacttgtgtggttgtttattgtttcttttgattatgtcttaaactcaatgtgagactctttcgtattaatggtttttgagttatgtgaaaaaaaaaaaaaaaaaaaaaaaagggcggccgct

SEQ ID NO: 121731 - DNA, 872 bp, Arabidopsis thaliana
  unsure (1)..(872): unsure at all n locations
ttttattccaattacttttagggaaggttgttccccttgcaggtaccggtccggatttccgggttcgacccacgcggcttctctgctctccagctccggtcaatccgtacaggtaagtcaaaaagttgtgaaagatgggtcgtgttcgtaccaaaacggttaagaagtcttcacgtcaggtgattgagaagtactactcacggatgacactagacttccacaccaacaagaagatcttggaagaagttgcaatcatcccatcgaaaaggctacgcaacaagattgctggattctccactcacttgatgaaacgtatccaaaagggtccagtccgtggaatctccctcaagctacaagaggaagagcgtgaaaggcgaatggactttgttcccgatgagtcagccattaaaatcgatgatgttaaggtggacaaagagacactagagatgcttgcttctttgggaatgtctgatattgctgggatttctcaagtggagacacaacaagctatggcacctgctgtgtttggacgtcccgcaggaagataccaacgctaagtttattgggtttcaatcaaagatttcggagacgagagtttggtttattggtctagtatggattcaacatcgtttcctttgatttaagattaatgtcgtttcctttgatttaagaattaatgtctggaatttatagcttttgctttgttttaacctttttttttggtccattttgaactatgatttggagttgcaatcaattgaaaacagcatgtaattcatctcttcaaaaaaaaaacaaaaagnnnnnnnnnnnnnnnnnnnnnnnnnnnnnnnnnnnnnnnnnnnnnnnnnnnnnnnnnnnnnnnnnnnacc

SEQ ID NO: 121732 - DNA, 959 bp, Arabidopsis thaliana
gctattttgggggttcccgggcgccccccccctcctagggtgtgtgcggtttttcgtttcaggctttcttctccattttccccgtcccgcggccttttttttgttttccgtttcccgtctcccttttccttttctttttccggttaggtccttaacatatggggcgtgttgggtccccgccgtgtgaagttttttttcccgtcatgtcattgagcagttctcctctcgcttggctcttgtctttcgcgctgccttgagtttccttgatgtggttgccatcctcccatcaaagagtctccgctgcatgatttctggtttctccccccacttgatgtttcgtatccagaagggtccagtccgtgggttctcactctagcttcatgaagtagagcgtgtgcgccgtatggtctttgttcccgatgagtctgctatcaagactgatgagatcaaggtcgccatagagtctcttgagctgcttgcttctctaggaatgtctgacacatccggcgtctctgcagtcgatcctcatcaagctatggcgcctttcgctgctttcggcggcagggctcccagtagatgctaagatggcctcagctaatcatcagcttcgattggctctcttttttctcagttaggggcaagaaagacttgtgtggttgtttattgtttcttctgattatgtcttaatctcaatgtgaggctctttcgtatttttggtttttgcgcgtccgcgtattcctgcagcccggggggtcccctgttcttgagcgtccgcccccgcggtggagctccagcttttgtttcggtttgtttgcatcgttctacgtgttccaatttgtttctcttccctgttttggtttttgcgcgtcgttctttggttgttccgcgctgctgcttttcgttcgcttttgtcttgttccctgttttgtgcgcgtttcttttctctttgtgttgttttt

SEQ ID NO: 121733 - DNA, 759 bp, Arabidopsis thaliana
  unsure (1)..(759): unsure at all n locations
cagatccacaaaaagggggatcagttccgtcgccgcttcttcgatttttgacgccgccgcttcttcttcttcctcgcagcaggtaagtcacacaggtaactgaaagatggggcgtgttagaaccaagactgtgaagaaatcttctcgtcaagtcatcgagaagtactactctcgcatgactcttgacttccacactaacaagaaaatccttgaagaggttgccatcatcccttcaaagagactccgcaacaagattgctggattctccacccacttgatgaaacgtatccagaagggaccagtccgtggaatctcactcaagcttcaggaagaggagcgtgaacgccgcatggactttgttcccgatgagtctgccatcaagactgatgagatcaaggtggacaaagagactcttgagatgcttgcttctctaggaatgtctgacacttccggcatctctgcagtcgagccacaacaagctatgggaccaatcgctgctttcgggtggtggcaggggacccagaagatacctgggatggctttgttatcatcagccaatcaaggcaaacggctggctctcttttttcacagttagggataggaaagacgtgtgtgttcttggaaagtttattgtttcttttgattcaagttnttatgtcttaaactcagagtgagactctttcgtattaatgggttttgagttatgtggaaccaaaattggagttaaaagtttcgatagtaaaaaaaaaaaaaaaaaac

SEQ ID NO: 121734 - DNA, 609 bp, Arabidopsis thaliana
  unsure (1)..(609): unsure at all n locations
cccacgcgtccgaccacgcgtcagcccacgcgtccgctctctcgcatctccaaatcgaaatcgctctctgcctctcttcgtctccgtctccgtctccgtctccatctctgtctccggtaagtcactgaaagatggggcgtgttagaaccaagacggtgaagaaatcttcacgtcaagtcattgagaagtactactctcgcatgactcttgactttcacactaacaagaagatccttgaagaggttgccatcatcccatcaaagagactccgcaacaagattgctggattctccacccacttgatgaaacgtatccagaagggaccagtccgtggaatctcactcaagcttcaagaagaagagcgtgaacgccgtatggactttgttcccgatgagtctgctatcaagactgatgagatcaaggtcgacaaagagactcttgagatgcttgcttctctaggaatgtttgacacatccggcatctttgcagtcgagcacaacaagctttcggaccaatccctgctttcggggggggagggaccagaagtacaagatggctcagtaananagcacgttgggcccttttccagtagggnaaaanattggggnt

SEQ ID NO: 121735 - DNA, 711 bp, Arabidopsis thaliana
  unsure (1)..(711): unsure at all n locations
acaaaacaaacgaagaagacgaatctctcagtttcgtcgttcgtttcgaagttgtgcgttggtgaaatttgaaatctgaatacactcattgcaaaccttagaagaagaagaagaagaagaagaagaagcttccatagattccgttgggcttttactgtgtttgattgatcggatcgattgcgattacggagaagatatggctcaggctgtagaagaatggtataaacagatgccgattatcactcgctcttatctcacggcggctgttatcaccaccgtcggatgttccctcgatatcatatctccatataacctttatttgaatccgacacttgtggtgaagcaataccaatattggcgtctcgttactaatttcttgtatttccggaagatggatttggacttcatgttccatatgttctttctcgcacgatactgcaaactccttgaagaaaactcattcaggggaaagactgctgatttcctatacatgctcctatttggagcatctgtttaacccggttttgtacttatcggtggaatgataccatacttgtcagcatcatttgctaaaatcatcttcctcagcaactcattaactntcatgatggtctatgtatggagcaaacaaaatccttatattcacatgagtttccttggtctgttcaccttcacagcagcttacctaccatgggtgcttcttggcttctc

SEQ ID NO: 121736 - DNA, 996 bp, Arabidopsis thaliana
  unsure (1)..(996): unsure at all n locations
aatactgactcactttagggaaagcacggacgcctgcaggtaccggtccggaattccggttcgcccacgcgtccgcttctctctctctctctaccacaaagcttgcatggcgtcagatcagagcacgaatccaccgatcatggaggcaaagacaagacatcctcttcaccagatcgcagatacaccaacacacaagcttctcctgaaacaatggttattataagaagagctaattctaagccgtgtctctcacaaagaatctcagatcgattctgttcgaagagaaatcactcagctctacatcttcttctttctcttgcactccatttctctgctacttctcttccacgcttcttcatactcatcttcctctgcttcttccagtgcttgtaaagatcatggatcccttcactctgcgctctgctatcttccttggggatcatttgggcgggtacggacatatctgaagtggaatcgcatcttgagatgttgttggagagggagaaagatgatgcgaagctgttgcgtaaatgtgttgaagagttgaagatgaaaggtatcgaattctgatttgcttagggaagtggatgcgcttcgtagagccaagagtttaagaagtgagtcgaagcctggtgagaaatggtctgctagggattttgtgacgctcttcttcttctctgtttcgtgtttggttcttgccatgattagactcattctctgcgattgattctttggctcttttgttgcatgcttagcagaattctctggtttctgcactttagtgtaataaagaaaacacatgttggatcatcctccttcaatccttttttgtaatgttaatttgttttgtcgacattttcaaagaattgagcaaaaacatatccattcnnnnnnnnnnnnnnnnnnnnnnnnnnnnnnnnnnnnnnnnnnnnnnnnnnnnnnnnnnnnnnnnnnnnnnnnnnnnnnnnnnnnnnnnnnnnnnnnnnnnnnnnnnnn

SEQ ID NO: 121737 - DNA, 913 bp, Arabidopsis thaliana
  unsure (1)..(913): unsure at all n locations
acgacttactatagggaacgctggtacgcctgcaggtaccggtccggaattcccgggtcgaccccgcggtcgcgctctctcgaagttccgtgcgactctctgctcgagcaagatctcctaccgatacaatgattatctcagaggctaaccgcaaagaaatctgcaagtacctcttcaaagaaggagtttgctttgcgaagaaggatttcaatcttgctaagcatccgttgatcgatgtccccaacctacaagtgattaagcttatgcagagtttcaaatccaaggagtatgttagggagacatttgcctggatgcattactattggtttttgaccaatgaagggatcgagttcttgagaacttatcttaatcttccatctgatgttgttcctgctactttgaagaagtcagctaagcctggtggtcgtccatttggtggcccacctggtgatcgctcaagaggacctcgccatgaaggaggagaccgtcccaggtttggtgaccgtgatgggtaccgtgcaggtcctcgagctggtggtgagtttggaggtgaaaagggtggagctcccgcagattaccagccatctttccaaggaagtggccgtggttttggccgtggtgctggtggctacagcgcagctgcaccatctggttcaggtttgccttgaaaaagaaatgtctttaggtgacagtaagaccatggaggagttttcagctttaaattttgcttttgtaattcagattccggaatccttcataatctctatctgagtttagttttgttgttgaatcaaacatccgatttaaagttnnnnnnnnnnnnnnnnnnnnnnnnnnnnnnnnnnnnnnnnnnnnnnnnnnnnnnnnnnnnnnnnnnnnnnnnnnnnnnnnnnnnnnnnnnnnnnnnnnnnnn

SEQ ID NO: 121738 - DNA, 637 bp, Arabidopsis thaliana
  unsure (1)..(637): unsure at all n locations
tnnnnnnnnnnnnnnnnnnnnnnnnnnnnnnnnnnnnnnnnnnnnnnnnnnnnnnnnnnnnnctaccacgcgtccgcgatcttgtgctgaagatatcgaaaagatgtcatctttgggtaggattttgtctgtttcctacccaccggatccgtacacttggcggttttcacagtataagctgtcttcttcactagggcgaaatcggagactcagatggcgattcacggcgttggatcctgaatcttcctcactcgactctgaatcctccgccgataaattcgcttccgggttttgtataatagaagggcctgaaacagtacaggactttgccaaaatgcaattacaagagattcaagataacattcgaagccgacgaaacaagatcttcttgcacatggaagaggtgcggaggctaagaatacaacaacggattaaaaacacagaacttggtatcattaacggagaacaagaacatgaattacctaatttcccatcttttatcccattcttacctccattgacttctgccaattttgaaaggcttttccggaacttggttctactcatcgcgggggtttcccattcggggggctctagtcctactttgggctaagttagggttggggncaacgattga

SEQ ID NO: 121739 - DNA, 711 bp, Arabidopsis thaliana
  unsure (1)..(711): unsure at all n locations
tacnnnnnnnnnnnnnnnnnnnnnnnnnnnnnnnnnnnnnnnnnnnnnnnnnnnnnnnnnnnnnnccacgcgtccggtccctcaatttctcaaaaccccaaacaagtgttcttttcttatagagagtagtctcccaagaagctgcagagacttgcaaaaatctcagattcaaacaatggcagaagaagctaaagctaaaggaaacgctgctttctcttccggtgacttcaccacggctataaaccacttcaccgaagccatagctcttgctccaaccaatcacgtcctcttctcaaaccgttccgctgctcacgcgtcgcttcatcaatacgccgaagctctctccgatgcgaaagagacgattaaactcaaaccgtattggcctaaaggttatagccgtctcggtgctgctcatttagggttaaaccagtttgagttagccgtcactgcttataagaaaggtttagatgtcgatccgactaacgaggcgttgaaatctggattggctgatgcggaggcgtctgttgctaggtcacgagctgcaccgaatccgtttggtgatgcttttcaaggaccgnagatgtggacgaagcttacgtctgatccttcgactagaggctttttncagnagccggntttttnttaacatnatgcaggngatttcagaagaatcctngcagtcttaattttgtaatttgaaggatcagagag

SEQ ID NO: 121740 - DNA, 946 bp, Arabidopsis thaliana
  unsure (1)..(946): unsure at all n locations
cannnnnnnnnnnnnnnnnnnnnnnnnnnnnnnnnnnnnnnnnnnnnnnnnggagaagaagaatttgtattctcaagttgtcgatatgagagagatgaagtcagaaacacgtttgtgagagaacagcttttagatgtgattgtggatcagattctcaaagacttttcgcgaagagtctctgatccttaaatcgcttctctctcgcttgacctcatttcgtcgtcgaaatcagatccttgtgaaaatgccgaaacaggatatggagaagatggagcttcgtaagaacttccgtaatgtttggcataccgatcttacccacagtatccagaacgatactccttattgttgcttcgcgttgtggtgtgccccttgtgcatcatacttgcttcgcaagcgtgcgctttacgatgatatgtcaaggtacgtctgctgtgccggttacatgccttgtagtggtaggtgtggagaagccaaatgtcctcaactttgtcttgccactgaggtcttctgctgctttgcaaactctgtggcctcaactcgctttcttctgcaagatgagttccaaattcaaacggcaaaatgtggcaactgcatcattgggttcatgggtttgcctcaagccaagtggcttgcatattccccataggttgccatgtattgtcgggaaatggatgagctttcagaagcttctcagatactcacatgttgctctgacatggtgtactgcacgggtttcgcatgtatgcaggcacaacacaaggttggaaatggccaagagggccggtaagntcgggcccaaccattggaggnccncgggttaaaaaatttacnggtttttaaaggccccccccccaggngggtttnccccaaaaaaggttnccccttgggttcnaaaaccccaaagggttccccttggntncnaaaccccccnggtttttaanccttc

SEQ ID NO: 121741 - DNA, 809 bp, Arabidopsis thaliana
ttttcgaggtaacgaaaggattaatcagaaacttggccttgttccaagttcgtcttcctcctctcgtagcagcagtaatggctccttcaagcgtcgttagggtttactctaccgctacctctccttctccttctgaaatttccgtcaagaaagttggtactcataatggaagctttcactgcgacgaagctctcggctgtttcatgattcgcctcgtcgataaattctccggcgctgatatcgtccgttctcgtgaccctaagatattggcagaacttgatgcagtgcttgatgttggaggtgtttatgatccggagcatgaccgttatgatcatcaccagacaggttttgaagaggtttttggacatggcttcaacactaagctcagtagtgctggtcttgtttacaagcattttggaaaggagatcatagctaaggaacttaatgtcgaacaagatcaccctgatgttcttcggttgtttttagctgtctacaagagcttcatggaggcaattgatgctgtggacaatggaataaaccggtatgatactgatcagcctccacgatatgtgaacaacacacatctgtctccaagggttggaagattaaatctggattggattgaccctgaccagtcacaagaaaaggagaatgaagctttccaacgtgcaatggctctagctggaaaagagttcctcgaaagtgttcagttccatgcaagatcgtggttaccggctcgatcaattgtgatgcagtgtcttgaagaaagattcaagacagaccccagcggtgagatcatgatattggat

SEQ ID NO: 121742 - DNA, 529 bp, Arabidopsis thaliana
  unsure (1)..(529): unsure at all n locations
nnnnnnnnnnncattgagtctgtgaagaagtggaggaaacagaggcagcagagtgggtttagtgatccacccggccggcctgaacttgatttcgaaagtggaaagagtttccagagaggaggaggtaagaaaagaccaggtgtgtctcccggagatcgatcaggaggtaaaggaaggcctacttcgaggatgggcaacaagaagagggagtttcgggattccaagtttggtcatggtggtaggaagggtttgagcaagcagaacacagcagagacgacaaacgatttcaaaggcggtttccgtggtggaaaagctagcggaaacaagaggcagaagaggtaaaaggtttgattatctaaacccacttcaaaactactataaactatttgtcttctttgttttttttaagaacatgtattttgttttggaaaccctgtggtaagggtcttagaaccaatacaattttgtactagtgattacttgaattaacaaagtcccttgtttgatgtctcatagttaacacttgaac

SEQ ID NO: 121743 - DNA, 796 bp, Arabidopsis thaliana
agctctaatacgactcactataggaaagctggtacgccttgcggtaccggtccggaatttccgggtcgaaccaagcgttcggccacgcgttcggccaagcgttcggccaagcgttccggaaaacccatatttttttggcttgagcttttttttaatttcttattagaaccaagaagaaggtgaaaggttcccttaaacttgattttcttggacttggaaagaaaccaacccaccacggttcttaagcttaggttccaaaattttttggatcgccgccgaagtttccgagatattcaaggggcgattccgaaaatcgatccggagattatcaaatcgttgttagcttccattggaaacatttccgattcatcggttaaatctcgttcggttccgtctactccgagggaagatcagcctcagatcccgatttctccggtccacgcgtctctcgccaggtctagtaccgaactcgtttcgggaactgttcctatgacgattttctacaatggaagtgtttcagttttccaagtgtctcgtaacaaagctggtgaaattatgaaggtcgctaatgaagcagcatctaagaaagacgagtcgtcgatggagacagatctttcggtaattcttccgaccactctaagaccaaagctctttggccagaatctagaaggagatcttcccatcgcaaggagaaagtcactgcaacgttttctcgagaagcgcaaggagagattagtatcaacatctccttactatccgacatcggcctaaacgatctctttttagattgggacat

SEQ ID NO: 121744 - DNA, 413 bp, Arabidopsis thaliana
cccacgcgtccgcccacgcgtccgcccacgcgtccgtcaaaacccatatctctctgtcttgatctctctctcactttctaataagatcaaagaagatgtcgaaagctaccatagaactcgatttcctcggacttgagaagaaacaaaccaacaacgctcctaagcctaagttccagaaatttctcgatcgccgtcgtagtttccgagatattcaaggtgcgatttcgaaaatcgatccggagattatcaaatcgctgttagcttccactggaaacaattccgattcatcggctaaatctcgttcggttccgtctactccgagggaagatcagcctcagatcccgatttctccggtccacgcgtctctcgccaggtctagtaccgaactcgtttcgggaactgttcctatgacg

SEQ ID NO: 121745 - DNA, 553 bp, Arabidopsis thaliana
  unsure (1)..(553): unsure at all n locations
atgatacttccnnnnnnnnnnnnnnnnnnnnnnnnnnnnnnnnnnnnnnnnnnnnnnnnnnnnnnnnnnnnnnnnnnnnnnnccacgcgtccgaacaggaccaaagatcctattgaactagcaaaatatgatgtggttatgacaacttacgccattgtttcaaatgaagttccaaagcaacccctggttgatgacgatgagaatgatgaaaaaaattctgaaaaatatggtctcgcttctggcttctccatcaataagaaacggaaaaatgtagtgggtactactaagaagagtaagaagaaaaaaggtaacaataatgctggcgattcatctgaccctgactctggtactctagcaaaagttgggtggttcagagttgtactagatgaagctcaaacaattaagaatcatagaacccaggtggcaagagcatgttgcggtcttcgagccaaaaggaggtggtgtttgtctggaacaccaatacaaaatacaatagatgatttatacagctatttcaggtttctaaaatatgatccatatgctgtgtacaagt

SEQ ID NO: 121746 - DNA, 361 bp, Arabidopsis thaliana
gtcggttcttccgtaacgcagagctagagaaaacattggatcaagacttgtctaggttatatccagagcattggagttactttcaagctcctggatgtcaaggcatgttaaggcgtattctactcttgtggtgccttaaacatcccgagtacggttatcgacaagggatgcatgagcttttggcgccactgctttatgtacttcatgttgatgttgatcgtctctctgaagtgcgtaaaagttatgaagatcatttcatagacagattcgatggtttatcttttgaagaaagagatattacttacaactttgaattcaaaaagtttctggaggatttcacggatgatgagattggtggtat

SEQ ID NO: 121747 - DNA, 803 bp, Arabidopsis thaliana
gcaatcgggagattcacagtacattaaatataagtcatcccagcaatcttctgccttcaattctggtgctaaagagaggatcattaggatggtggagatgcctgtagatccacttgatccaccaaagttcaagcacaagagagtcccaagggcttctggttctccgcctgttccggtcatgcattcaccgcccaggcctgttaccgtcaaggaccagcaagactggtaaatccctccttgtatctccaattggaagaatccgaaaggttacacaatccctcttgacaaacgtctagctgctgatggaaggggcctacaagacgttcagatcaatgataactttgccaagttatcagaggccctctatgtagctgagcagaaagctagagaggctgtttcaatgcgttccaaggtgcaaaaagagatggtgatgaaggacaaggaaaggaaagagcaggaattgagggctcttgcccaaaaagctcgctccgaaagaaccggtgctgctatgagtatgcctgtctcatctgacaggggtaggagtgaaagtgttgacccaagaggtgattatgacaactatgaccaggatagaggaagggaaagagaaagggaagagcctcaagagacgagggaggagagggaaaaaaggattcagagagaaaagatacgagaagagcgtcgcagggaaagagagagggagagaaggttggatgccaaagatgctgccatggggaagaagagcatatcaccagagacagagaccgtgacatcagtgagaaagttgctcttggaatggcatctac

SEQ ID NO: 121748 - DNA, 561 bp, Arabidopsis thaliana
tacaaatattaaaataaaaagtgtcggtgaattctcaatctttgtcttctgtcggcggctctttaaaactctctccggccctccttattatgtaaccgtctcgccctcgcgtccgcaaaatctctccctccgttcataaacccagatcgaaatttatggttttgtaatttttttaccggcggttatggagacggaagcggcggtgacagcgacggttacggcggcgacgatggggattgggacgaggaagagagatctgaaaccgtataaaggaatacgaatgaggaaatgggggaaatgggtggcggagatacgggaaccgaataagagatcaaggatctggttaggttcttatgcgacgcctgaagcggcggcgagagcttacgacactgctgttttttacctccgtggtccttcagcgaggcttaattttccggagcttttggctggacttactgtttctaacggcggaggaagaggtggtgatttatcggcggcgtatattaggagaaaagcggcggaggttggtgctcaggttgatgcgcttggagcgacggtggt

SEQ ID NO: 121749 - DNA, 688 bp, Arabidopsis thaliana
  unsure (1)..(688): unsure at all n locations
tgattctgnnnnnnnnnnnnnnnnnnnnnnnnnnnnnnnnnnnnnnnnnnnnnnnnnnnnnnnnnnnnnnnnnnnnnnnnnnccacgccgtccgctttcctacgaaaactcaaagaaacaatggccatcaaatccatatttatcatcatcatcatcagcatcatcacatcaatatctgaactttatgctttggatccttcgtttcttcgtctttcgacctctctccaaagaagtagctttcctcaagattttcggtttggtgcagcttcgagtgcttatcagagtgaaggagcagccaacgttgatggaagagaaccaagcatatgggatacgtttactaaacaatatccagaaaagatttcagatggtagcaatggcgacgttgcagacgaattttattaccgtttcaaggaggacgtggcacatatgaaagaaatagggctggactcatttaggttttcgatttcttggtccagaatactacctcgaggtacggttgctggaggagtaaatcaggcaggaattaacttctacaatcatctcatcaatgaactcatttcanatggtataaggcctctggttactctgtttcactgggatacacctcanngcacttgaagatgaatatggcgggttcttaaacccacaaatcgtgaaagatttcgtagaatatgtggatatatgtttc

SEQ ID NO: 121750 - DNA, 810 bp, Arabidopsis thaliana
  unsure (1)..(810): unsure at all n locations
nnnnnnnnnnnnnnnnnnnnnnnnnnnnnnnnnnnnnnnnnnnnnnnnnnnnnnnnnnnnnnnnnnnnnnnnnnnnnntttcgccacgcgtccggaagaaaccgtgatttgctcaaatcaccaaaataatactctcttcaatctccatcttcccgttatctccgccacgtgtttctctctttttgtctcctttcttcttctccctaatcttaatctcagaaaccaacaacatcagtagtcagtacccccacacacacagagagaccctttttcgattctccacttttctcataaaggaacgatttttcgagatgtgggtcagtgttgatttctctcctcttggcttatgagtttcgaattcgaatctcaaactaaaaagctttttgaaacaagcaacaaatgttactgacacctaagatgtttagttcttggcttcgacaagatgtgaagaagatcctcaaacgcaaagacagtgatgctggtgaacgaggaaagcattggaggacttgagagcatcgttattcaacagattccgttcaccggaaactccaaagagacagcaccaacaacaacatcgtatctgtggcccaactgttgctcttactttcaatttcgttgttgctattagcattatcttcatgaacaaatgggttcttaaaatataggctttgagttccagtgtcctcaattattcctacattgagctatctacatggctctctcaacctttcgtccttctgctcaccgcttcacgnatcatcgtgcttcgtctatactcttggattgaatgcactcttacangacagctat

SEQ ID NO: 121751 - DNA, 787 bp, Arabidopsis thaliana
  unsure (1)..(787): unsure at all n locations
nnnnnnnnnnnnnnnnnnnnnnnnnnnnnnnnnnnnnnnnnnnnnnnnnnnnnnnnnngaagagtctacgatccacgcgtccgggcagccacctcaagaagaagtgcctaaccacgtggctacaaggaagccgtacagagggatacggaggaggaagtggggcaagtgggtggctgagattcgtgagcctaacaaacgctcacggctttggcttggctcttacacaaccgatatcgccgccgctagagcctacgacgtggccgtcttctacctccgtggcccctccgcacgtctcaacttccctgatcttctcttgcaagaagaggaccatctctcagccgccaccaccgctgacatgcccgcagctcttataagggaaaaagcggcggaggtcggcgccagagtcgacgctcttctagcttctgccgctccttcgatggctcactccactccgccggtaataaaacccgacttgaatcaaatacccgaatccggagatatatagtcaatttatatacatgtagtttgttttgtttgattagaagattacatttacatacaagatacacatagatactggaaaatataggtatgtatacattcataaattatcttatgtatcaaagaattttatagattctgattagctttttgtttttgtttttgataagaactctgattagttgtccggagacaaaaccggctaagagcaatccatgagaagctagcgagtgttttttagttcaagttgtaatataaatgcatattaattctttagtaattttgt

SEQ ID NO: 121752 - DNA, 1207 bp, Arabidopsis thaliana
  unsure (1)..(1207): unsure at all n locations
ccnnnnnnnnnnnnnnnnnnnnnnnnnnnnnnnnnnnnnnnnnnnnnnnnnnnnnnnnnnnnnnnnnnnnnnnccacgcgtccgtcgagatcttggcttaaatccaagaaagactcaaaggtccatattttcttggctggtgatagctctggaggtaacatcgcgcataatgtggctttaagagcgggtgaatcgggaatcgatgttttggggaacattctgctgaatcctatgtttggtgggaatgagagaacggagtctgagaaaagtttggatgggaaatactttgtgacggttagagaccgcgattggtactggaaagcgtttttacccgagggagaagatagagagcatccagcgtgtaatccgtttagcccgagagggaaaagcttagaaggagtgagtttccccaagagtcttgtggttgtcgcgggtttggatttgattagagattggcagttggcatacgcggaagggctcaagaaagcgggtcaagaggttaagcttatgcatttagagaaagcaactgttgggttttacctcttgcctaataacaatcatttccataatgttatggatgagatttcggcgtttgtaaacgcggaatgttaacactgggttagagaaagaaggttgttttaacaaagccaagacatctttcaaactaacacacaggtgaatgtattgcctgtggattctctcgtttagttttgtttttgtgtttagtatctaagtgtgtggcggtctgcggcagcctttgtgatgactgtttaaacgctggattctgaaacgctaaagcttgtggaagaacagtgaggcgtttagagacttggaaaggaaccaagccctagtaaaaatttctcctttttttgtctgtaatatttggcatttagcttttacccttgagcctttttactaactaaaagctgattttttcagcatgagagtggtaattagatatctataaatatatatatttcaagaatgtaatgtttatacccaaattttagtgattttggtaaatgtatgtagggtctgcactctgcagttgtattgttgctcctctttttcattgtactctaatggattttccaaaatagcaaaaaaaaaaaaaaaaaaaaaaaaaaaaaaagaaaaaaaaaagggcgaacgctctagaggatccaagcttacgtacgcgtgcatgcgacgtcataatctctatagt

SEQ ID NO: 121753 - DNA, 525 bp, Arabidopsis thaliana
caatattgtagaaaactgcgaaagcgtgcagataagagagatctctctgaacagatattatagttgatagtttgcgtactaggagtctgtgaaagcttgcacaggaagaaagcaaatcgggaaagaaaggaatctgaatcggagaagcaatcgaggtttacgattaccaaattctgatctaatctgattaattgtggtgatttccgatggaagaagacggtggtggcggcggtgcgaaagttggaatgctggagaatttcatgaagacgcatcagagttctttgaaatcgttattccagagaaagaaatcatcctctggtcgtgatggagatgcttctccgtcgcctatcgcttccccgaaacctattccgcagctctctcttctcgccaattccgtcgtctcccgctgttcaaagatcctgaacattcaaacagaagatctgcagcatcattttgatgtagagttgcctgagagtggttagcatctattgacatatgcatagaactttttagagttctgctctt

SEQ ID NO: 121754 - DNA, 924 bp, Arabidopsis thaliana
gatgcgatcctctcgtcatcgctggttccatcagtttcagtgagaatcagatcgtcgcggtaccggaccggaattcccgggtcgacccacgcgtccgggagagttatctaagaacggagaggttactgatctgaattgttgaagatcggaaaatgacagaatcgagtctggatctgcaggaatctggttgggaagaacttaggcgggaagctcgtaaaattgaaggagatctagacgttaagctctcttcttacgctaagctaggcgccaggtttactcaaggcgggtatgttgacactgggtctccaaccgttggatcggggagatcatggaagtctatggagatggaaattcaatcgttgcttgagaagttgttggatattaatgattccatgagtagatgtgctgcatctgctgcacccacaacatcgggtactcaaaaactagcaaggcacagggatatacttcatgaatatacccaggagtttcgaagaataaaaggaaatataaactcgttgagagaacacgctgagcttttgagttctgtcagggatgacataagtgaatataaggcttctggtagtatgtcaccaggtgtgcaagtgttaagggagagagctttaatccatggaagtatatcccatattgatgatgtgattggtcaagcttcaacgacaagagcggttcttggctctcaacgatctctgttttcagatgttcaaggggaaagtaaaaaattttgggagacaaaatccccagcggattcgtgggtttaccttggctccaattaaaaaggaaacccgtctttggggaaccacactttatttcctctcccgttgtacatcccttggcttggaaccgttgctttcataatcaagctcgcggggctttccaaaaaaaaaaccaggagtgtttccctccccc

SEQ ID NO: 121755 - DNA, 774 bp, Arabidopsis thaliana
tggaaattcaatcgttgcttgagaagttgttggatattaatgattccatgagtagatgtgctgcatctgctgcacccacaacatcggttactcaaaaactagcaaggcacagggatatacttcatgaatatacccagaagtttcgaagaataaaaggaaatataaactcgttgagagaacacgctgagcttctgagttctgtcagggatgacataagtgaatataaggcttctggtagtatgtcaccaggtgtgcaagtgttaagggagagagcttcaatccatggaagtatatcccatattgatgatgtgattggtcaagctcaagcgacaagagcagttcttggctctcaacgatctctgttttcagatgttcaagggaaagtaaaaaatctcggagacaaattcccagtgattcgtggcttacttggctcaattaaaaggaaacgttctcgggacacacttatcctctccgctgtcatcgctgcttgtacgttgtttctaatcatctactggctctcaaaataaacagaatgttcatacacctaagctataaaacgagtttgccttgacatccctagatcgatttttttacaagttttttcttgcttttgtgtttttgccattatgttgggttatatgtttgtaggacaatattacaccctgaatcatatcgtaaaagtaaaattcgaaacatatatttcacaaaaaaaaaaaaaaagggcggccgctctagaggatccaagcttacgtacgcgtgcatgcgacgtgatag

SEQ ID NO: 121756 - DNA, 352 bp, Arabidopsis thaliana
ggaagagggatgcgatcctctcgtcatcgctggttccatcagtttcagtgagaatcagatcgtcgttgtactgagagctccggcattggttcacggcggagctggagagttatctaagaacggagaggttactgatctgaattgttgaagatcggaaaatgacagaatcgagtctggatctgcaggaatctggttgggaagaacttaggcgggaagctcgtaaaattgaaggagatctagacgttaagctctcttcttacgctaagctaggcgccaggtttactcaaggcgggtatgttgacactgggtctccaaccgttggatcggggagatcatggaagtctatggagat

SEQ ID NO: 121757 - DNA, 546 bp, Arabidopsis thaliana
atgatctgccagctacaaatacgactcactttagggaaagctcgtacgcctgcaggtaccggtccggaattcccgggtcgacccacgcgtccgaaattctcagcttctatacaaacctttctcaattcttcttgacattagggtttcctctttctttgagagggctaaaaccctaatatatccctctcattgactaaagagttaagcctactctatctactttggaagcgaaattcaaagggtaaggtaaaagcccttgaaagaggaagaaagatacaagatcctcaaagaacctaaagatctaaaggttgtaagaagaaaaacaaatggcgtcgtcatcaaactcatacaactcaccatgcgcggcgtgcaagtttcttcgccggaaatgcatgccgggatgcatattcgcgccatattttccaccggaggagccacacaaattcgccaacgtccacaaaatctttggagcaagcaacgtcacgaagctcctcaacgagctcctccctcaccaacgtgaagacgcagtcaactccttagcctatg

SEQ ID NO: 121758 - DNA, 409 bp, Arabidopsis thaliana
gaaaacaagttggaggaaaaagagagacacaactcacaacaacatcaaggttttaactaaatttaattttgtcataactattcatatatagtcaaatggctaacaaagctctcattcatctcctcgtcatcttcttcttggctctatcacacatcttcttcttcccttcccatgcttcgagacttgggagtttgatggagaagccaaaaattgttcgacctcaacaagatacactaatggatgtgaccaaggacgtcgaagaaaggatggtgatggagttaaacgactatccattttcgggtgcaaacaatcgccacttgccacgacaacgacgctgcatccttgagtgctgatagatatataacatgacgacaatcgacatactatgattatagccagtatcgaataa

SEQ ID NO: 121759 - DNA, 803 bp, Arabidopsis thaliana
  unsure (1)..(803): unsure at all n locations
nnnnnnnnnnnnnnnnnnnnnnnnnntcgctcctatagaaagtggacgctgcggtccggtcggaattccgggcgaccacgcgtccggggaaaagaaatgtgggcgattacgagagtgataagccggcgagttcatggaacaagttttattactattccaaaactctcaggtttctctattgtatctcccaaacaagttgaggtagagtatgcagatggaaccaagttcaatttttcatcagagtttctgagaattcatagtccagctgctgatggaaaagtcagatcaatcggtggtgaaaaggtgatatctggaaggcggtatgtaggaatcatgtctgcagaaccggttggaaactacggggtaaggttagtgtttgatgacttgcatagaacagggatatatccatgggattatttctacgagcttgggagcaataagtttggtcttatgaggaactatatcaagactcttcaaaagcataatctcagccgtgaacctcctccttcaagaaagagatgattctgatgatcaatgttagtatttaacattgttcaaaatgtttgatagattctctttttgcagagaaaccttgaatcttcttgtcttgtttcagagttaccggttgttgctttttggctgttgttgttgtctttattactattgttgttgatgttagtgttgattgatctataagttgtctttagagaacaaaaaaaaaaaaaaagggcggccgctctagaggatccaagcttacgtacgcgtgcatgcgacgtcatagtacttctatagttcgtcctaaa

SEQ ID NO: 121760 - DNA, 1109 bp, Arabidopsis thaliana
  unsure (1)..(1109): unsure at all n locations
nnnnnnnnnnnnnnnnnnnnnnnnnnnnnnnnnnnnnnnnnnnnnnnnnnnnnnnnnnnnnnnnnnnnnnnnnnnnnnnnnnnccacgcgtccgcggacgcgtgggcacgcttttaatcgagcccaagcctcaagaacccaccaagcaccagtatgactgggatgctgcaacagctgccaatttcttgaggaaatatggtcttattgatgagtttaagctcaacattgagtgtaaccatgccacgctctctggtcacacttgtcatcacgagcttgaaactgcaagaattaatggtttacttggcaacattgatgcaaacactggcgatgctcaaactggatgggatacagatcagtttcttacagatgttggagaagcaaccatggttatgatgagtgtcatcaaaaatggtgggattgctccaggcggcttcaactttgacgctaaactgcgaagagagagtacagacgtggaagacttattcattgctcatattagtggaatggatacaatggctcgtggactgagaaatgcagtcaaaatcttggaggttagttaagatatgaatagataagttttataaaagaaccaaagagtgtagctttaacttggtttcggtgtggtaaaggagggaagtctaagtgaattggtacgcaagcgatatgcaacttgggactctgagcttgggaagcaaatagaagaaggaaaagctgattttgagtatcttgagaagaaagctaaagagtttggagaaccaaaggtttcttctgctaaacaggaactcgctgagatgattttccaatctgcaatgtaagaagaagaacaagaaggctttttatgtttattaaaagtatcgtcttttttagtttccctcgcatctttgagaagtttgaaaaccaaaacattggaaaataagatgattagagaggttggtttcattatttcagttgatgtactatggtttcacactctaattactttaaattgaataacaaaaaactgtttaggcctttaaaaaaaaaaaaaaaaaagnnnnnnnnnnnnnnnnnnnnnnnnnnnnnnnnnnnnnnnnnnnnnnnnnnnnnnnnnnnnnnnnntgtcctannnn

SEQ ID NO: 121761 - DNA, 2057 bp, Arabidopsis thaliana
  unsure (1)..(2057): unsure at all n locations
cgcctgcaggtaccggtccggaattcccgggtctgacccacgcggtgcagctgcaaatcacacaaaaacaaacaaaactttgcttacgtcacatcattatctgtgactaattcttaatcatcatcatcatcatcacttacttaaatctaaaaaaatctctgtttgtatatatattatctttgcgatttttatccaaatcttccaaagcttagttttttttttttttcaatttctctcttgcgttttcgattttattacaagaactttgttttgggcttcatccatcgttcaaggttcgttgaaaactatgaagaaagttgagttttttatgctccttctctgcttcatcgcagcgtcatctctagtgtctgctgatccaccaacatgtcctgctgatttgggaggcaagtgtagtgattctgatgactggcaaggtgatttcttccctgaaatccccaagattaagtatgagggaccttcgagtaagaacccacttgcttacaggtggtataacgctgaagaagagattcttgggaagaaaatgaaggattggtttagattcagtgttgcgttttggcatactttccgtgggactggaggtgatccatttggtgctgctacctaagtattggccctgggaagatgggacctacccttgggctattggttaaaaaaaaatggaaacctacctttaagtcctggaaaaacctggaagtggaatggggggggtttcaatgacagagacatagcacctgatggcactacactttgaggaatctaacaaaaacttggatgaagttatcgaactcgccaaagaactccaaaaggggagcaaaatcaaaccattgtggggaacagctcagcttttcttgcatcctcgttatatgcacggaggagcgaccagctctgaagttggagtgtatgcttacgctgctgctcaggtgaagaaagccatggaggtaacacattacttaggtggtgaaaactacgttttttggggtggtcgtgaaggttatcagacactcttgaacactgatatgggaagagagcttgatcatctagccaggttctttgaagctgctgttgcttacaagaagaagattggattcaaaggcacgcttttaatcgagcccaagcctcaagaacccaccaagcaccagtatgactgggatgctgcaacagctgccaatttcttgaggaaatatggtcttattgatgagtttaagctcaacattgagtgtaaccatgccacgctctctggtcacacttgtcatcacgagcttgaaactgcaagaattaatggtttacttggcaacattgatgcaaacactggcgatgctcaaactggatgggatacagatcagtttcttacagatgttggagaagcaaccatggttatgatgagtgtcatcaaaaatggtgggattgctccaggcggcttcaactttgacgctaaactgcgaagagagagtacagacgtggaagacttattcattgctcatattagtggaatggatacaatggctcgtggactgagaaatgcagtcaaaatcttggaggagggaagtctaagtgaattggtacgcaagcgatatgcaacttgggactctgagcttgggaagcaaatagaagaaggaaaagctgattttgagtatcttgagaagaaagctaaagagtttggagaaccaaaggtttcttctgctaaacaggaactcgctgagatgattttccaatctgcaatgtaagaagaagaacaagaaggctttttatgtttattaaaagtatcgtcttttttagtttccctcgcatctttgagaagtttgaaaaccaaaacattggaaaataagatgattagagaggttggtttcattatttcagttgatgtacccatgggttcacaccccaaattacctttaaattgtgaaaacccanaaaaaaangggcgggcccggccctagangggtnccaagccttacggacgcgtgcatgcggcggcatagccccctccaanaggggccccnaaaatccattcaccnggcggccgnttncaaacgccg

SEQ ID NO: 121762 - DNA, 562 bp, Arabidopsis thaliana
  unsure (1)..(562): unsure at all n locations
caacatgtcctgctgatttgggaggcaagtgtagtgattctnatgactggcaaggtgatttnttccctgaaatccccaagattaagtatgagggaccttcgagtaagaacccacttgcttacaggtggtataacgctgaagaagagattcttgggaagaaaatgaaggattggtttagattcagtgttgcgttttggcatactttccgtgggactggaggtgatccctttggtgctgctactaagtattggccttgggaagatggtactaactctgtgtctatggctaagagaagaatgaagagctaactttgagttcttgaagaaacttggagttgattggtggtgttttcatgacagagaccatagcaccctgatggcactacacttcgaggagtctaacaaaaaacttgggatgaaagttatcgaactcgccaaagaactccaaagggggagcaaaatccaaaccattgtggggaacagctcagcttttcttgcatccccggtatatgcccgggggagcgaccagctctgaagttggagtgtatgcttacgctgctgct

SEQ ID NO: 121763 - DNA, 415 bp, Arabidopsis thaliana
aaaccaacagaacacaacaatacaacatctcagaaaaaaaaaaaccactcctcgatgtctgatcaacagcttgaaacacagatcaacttctggggagagacttcagaagacgattacttgaatctcaaaggcatcattcggctccaaatctttcttcacttcccctcgaggtctcaaccgcttcactcgttcagggcttccctcttcctcttctccgccacgtggtctcatcttcatggtccatggctacggcaatgacgtcagctggactttccagtccactcccagttttcttgctcagatgggtttcgcttgctttgctctcgacatcgaaggtcatggccgatctgacggtgtccgcgcctatgttccctccgtagatctagtcgtcgatgacatcatctctttctttaat

SEQ ID NO: 121764 - DNA, 675 bp, Arabidopsis thaliana
  unsure (1)..(675): unsure at all n locations
atgatacctccagcgtccatacngactcactatagggaaagctggtacgcctgcaggtaccggtccggaattcccgggtcgacccacgcgtccgcggacgcgtgggatcgagagatttctattctggctaaattttgtgttttctcaggtggataagaaattttctctttgtcgttttcctcgataattttcggattacggcgacgaatcagattgttttttggtttcaaattttctgatatttccaaaaaaacaaaaaaatctgatttttgagaaaaaagcaatgcaacggatcgtggacaacgctctcgctgtaaccaaagatgcagatcagtaaaaactgttacatatgagtctttgaataacattgcgaggtgcataaatggagtatcagctcttctgttgacccttctcccagggaaggctaatattcttgaaggcttacatggctgggaactcaggcctacgtttcggggaccacgtttaccacggtggatgcataatggggtctcttctttcaatgagttcattcatgagctttctgttgattctgatacttcaagcttggagtattcttctggagaagatagtgatggtcctttgcctccatcaccatcatctcaaagctcacgcctctcttgggctagcacttctgcaagttctgaaaaccactgg

SEQ ID NO: 121765 - DNA, 462 bp, Arabidopsis thaliana
ccttattttgtgttcggattaaatctcgatcgcgatttgggccaatatctcctagcatcgagagatttctattctggctaaattttgtgttttctcaggtggataagaaattttctctttgtcgttttcctcgataattttcggattacggcgacgaatcacattgttttttggtttcaaattttctgatatttccaaaaaaacaaaaaaatctgatttttgagaaaaaagcactgcaacggatcgtggacaacgctctcgctgtaaccaaagaatcagtaaaaactgttacatatgagtctttgaataacattgcgaggtgcataaatggagtatcagctcttctgttgacccttctcccagggaaggctaatattcttgaaggcttacatggctgggaactcaggcctacgtttcgtggaccacgtttaccacggtggatgcataatggggcctcttctt

SEQ ID NO: 121766 - DNA, 434 bp, Arabidopsis thaliana
aaccatctctttctctctttctcaaaatcttgtttattgttttaataaaacaaagaaattaaaaagatgatggttacattagtactaaagtacgtcctcgtgatagtcatgaccttgatattaagagtcctatacgactccatttgttgctacttcctcacaccaagacgaatcaagaagtttatggaacgtcaaggcatcacggggcctaaaccccgtctcctcaccggaaacatcattgatatctccaaaatgctctctcactccgcttctaacgactgctcttccatccaccacaacatcgtcccacgccttcttcctcattacgtctcttggtccaaacaatatgggaagagatttataatgtggaacgggacagaaccgagactatgcctaacggagaccgagatgattaaagaattgctaacgaagca

SEQ ID NO: 121767 - DNA, 1046 bp, Arabidopsis thaliana
  unsure (1)..(1046): unsure at all n locations
nnnnnnnnnnnnnnnnnnnnnnnnnnnnnnnnnnnnnnnnnnnnnnnnnnnnacgcgtcaacccacgcgccacgagaaaccctaaagtctctgtttttgagaatttttctaccgatagatccaagcgaattgatctagaggaattgatccaacatgggtaacacagataagctgatgaatcagatattcgatttgaaatttacgtcaaagtctctgcaaaggcaatcaaggaagtgtgagaaggaagagaaagcagagaaattgaaggtgaagaaggctatcgagaagggtaatatggatggtgctcggatctacgctgagaacgccattcgtaagcgtagcgagcagatgaactatctccgtctcgcttctcgccttgacgctgttgttgctcgtcttgatactcaggctaagatgaccaccatcaccaaatccatgaccaatatcgtcaaatcccttgagtcttctcttgccacagggaatctacagaagatgtcagagacaatggattcattcgagaagcagtttgtgaacatggaggtccaagctgagttcatggagaatgctatggctggttcaacttcattgtccactccagaaggcgaagtcaacagccttatgcagcaggtggcagatgactatggtttggaagtctctgtggggcttcctcagcctgctggtcatgccattcctactaagactgaggagaaagtcgatgaggatgatttgtcgaggaggcttgcggagcttaaagccagaggataaatgcgctaaccaacattcatgcttggattacctgccactttgcatgcgatccttatcgaattgttgcttctattatccgcaaacacgggcgtatttgtgtatattgctcactttgaaatatgctttgtttataactttatataaaaaaccttcgtgtgtttttagtttttaccatttgaatgatatgctttccttttgagttgttcattaaagagaaaaaaaaaaaaaaagggcggccgctctagaggatccaagcttacgtacgcgtgcatgcgacgtca

SEQ ID NO: 121768 - DNA, 555 bp, Arabidopsis thaliana
ggcgaagggttctttgtcttcttcccccaactgagcaagattgttttccttaagagcttcatcgtcatcatccgagaattggagcagagatacgaagatttggcgaaaaatggggagcgagccaacaaaagtgatggtggcggtgaacgcttcgacgatcaaagactatcctaacccttcgattagctgcaaaagagcattcgaatggactctggagaagatcgtaaggtccaacacttccgatttcaagattctcttgctccacgtacaagtcgtcgacgaagacggttttgatgacgtggatagcatttatgcttcccctgaggatttccgagacatgagacaatctaacaaggcaaaaggtcttcaccttctcgagtttttcgttaataaatgtcatgagattggggttggttgcgaggcctggattaagacaggtgatcccaaggatgtcatatgccaagaagtgaagcgagttcgaccagattttctggtcgtgggaaatcgtggacttggccggtttcaaaaggtctttgtggggactgtgagtgcgtt

SEQ ID NO: 121769 - DNA, 551 bp, Arabidopsis thaliana
  unsure (1)..(551): unsure at all n locations
caataatctcagcttgaatcacactgacgaaggcatcttcctgcgattatggcgtcgccggcaggtgaaacagcagcggttgttgagggcggagatgggcagcagcaacgacaagctggtgggtttgggcagacaattaccggaatcataagaatcgccgtcttctgttactttgcttctaagttcttttctcccaaacaaaaacctgcggatccttccaagcctactcatctcatgtccaatctatttcagaggggcgagcccatagatatgtggttttatctttcggagcatgagaaattcaatgacttcggcaatgaaggtgcgcttatttggcatgagacaaacataccttaatgctgtgtggaaaccagagagcactaggaccttgtcaatgacggacttccttccgnnggacttagnataattgaaggctgaatgctangccttctttgctcnanctggtaacccataggcttaaggnnccnnaancagcctttaantctttggaggcnnnccnttgaaattnttccaagggaaggggtagggnt

SEQ ID NO: 121770 - DNA, 393 bp, Arabidopsis thaliana
caaaaccccaaactctctctacgaaggcggatgcacgcttctctgtctccctccactctcgagtctcgtcccctctgtgtgtgattatcttctttggtgttgttgatgctggagatctcttattcagattgatcacgcctgaaaggtttattaggatttggcaaaaggatggatagaatcaacggtctatcagatctcttctgatttgaattctagggcgtttgtttggaagaatcattgcttctttggttgaggatctttgtgaaacgctgggattttgtgttctagacttctagggtttttgaagcaagctgtagcataaggaaaattttgagaatgaaaggtgaaagagaagttaagaatggtgtttctgaggaagagagagaagtgaag

SEQ ID NO: 121771 - DNA, 812 bp, Arabidopsis thaliana
  unsure (1)..(812): unsure at all n locations
nnnnnnnnnnnnnnnnnnnnnnnnnnnnnnnnnnnnnnnnnnnnnnnnnnnnnnnnnnnnnnnnnnnnnnnnnnnnnnnnnnnccacgcgtccggttcttttaagagaaccaaccaggacaactatggcatgaagttgagttgggaagagcagtttctgtcagaaattctagatcaaaaggacctaaagataagccaattaggtgtggtgaaacagaggctaaagcataagaaagtacttatcgttcttgatgatgtggataatctagagctattaaagactttagtgggacaaaccgggtggtttggacctggaagcagaattatcgtgaccactcaagataggatccttctcaagtctcacaagattgatcatatttatgaggtggggtacccatcgagaaaattggctcttcggattttatgtcgatctgctttcgacagaaactccccacctgatggtttcatgcagcttgcaaatgaagttacagagcttgttggtaatcttcctttggctctcaatatcatgggttcgtctttgaaagggagggacaaggaagagtggatagagatgatgcctagtctccgaaatagtttggtggatggagaaattctgaaacattaagagtcagctatgatcgattacatgggaattatcaagaaatattcctttatattggcgggttactaaattgctgtggagtcgatacattataagcatgnctnggagatatgctatcattgggttgaaaatactggctgagaagtccctcatacatatatcaccactggacaaaactggagagatgcaca

SEQ ID NO: 121772 - DNA, 493 bp, Arabidopsis thaliana
  unsure (1)..(493): unsure at all n locations
accaagcgtccgcgccactctctctcccccatcaccaccaacctccgtcaaaaccctaaaccactatctctctctctctcttcatatcgcaacaatggagtccgtcgctctatctcgcataggtctcgccggtctcgcagtcatgggacaaaacctcgccttaaacatcgccgataaaggattcccaatctccgtctacaatcgaaccacttccaaagtcgacgaaaccttagatcgtgcctccaacgaaggaaaactcccagtcgctggtcaatactcgcctcgcgatttcgttctctcgatccaacggcctagatccgttatcatccttgtcaaagccggtgctcccgttgaccaaaccatctctgctctctctgaatacatggagcctggtgattgtatcatcgacggtggaaatgagtggtatcagaacacagagcgacgaatcgttgaagctgagaagaaaggatngctttatttaggtatgggagtc

SEQ ID NO: 121773 - DNA, 397 bp, Arabidopsis thaliana
catttttctctctctacctaaccaatcctaagctcatctctctatctccaatggagtccgccgcactatcccgaatcggtctcgccggactcgccgtgatgggccaaaacctcgccttaaacatcgccgagaaaggtttcccaatctcagtctacaatcgaaccacttccaaagtcgacgaaaccctagatcgagccgccgtcgaaggaaacctcccagtctccggccaatactctccccgcgatttcgtcctctcgatccaacggcctagatctctcatcatcctcgtcaaagctggagctcccgttgaccaaacaatcgacgccttctccgaatacatggagccaggagattgcatcatcgacggtggaaacgaatggtatcagaacacagagcg

SEQ ID NO: 121774 - DNA, 705 bp, Arabidopsis thaliana
gggggggggggggggataggggagctccttggaattaaaagaaacctttttttttcttaactttgtccgtcgccgcctgaaaacggggtagctctctcacttcagctttccaattaaagggaacaaagctttgatttttgccgcagtcagaagcattactttgcaagaacaagtgtgtaaacaaagatgaggagctcccaaaacggcggcgcaatgggtggacgagctgccggaaccggcggaggaggaccgtcggctccagttgacaaagaagttgactacgctcagtacttctgtacttactccttcctataccaccagaaggatatgctctccgaccgtgtccgtatggatgcttacttcaacgccgtcttccagaacaaacatcactttgagggcaagactgttttagacgtgggcaccgggagtggaattcttgcaatttggtcagctcaagctggtgccaggaaggtttatgccgttgaagctactaagatggctgatcatgctcgtgcccttgtcaaagccaataaccttgaccatattgtagaagtcattgaaggatctgtcgaggatatttcattgcctgagaaagttgatgtaattatctcggagtggatgggatacttccttctgcgggagtccatgtttgattctgtgattagtgcgagaaagttgatgtaattatctcggagtggatgggat

SEQ ID NO: 121775 - DNA, 451 bp, Arabidopsis thaliana
ctgtgaggttgaggaagcagagtgaagagaaagatagagagataagaagaagccatgggttcgatttcgatgcacataactccctctactgctctccctatacgccatttcagagctagagtctcttgttgctcttctgggcatgtatcatttatcaaagatgttgctgccactgaacctccaatgcatcttcatcacttactcaaagtgcttcaaacaagaggtgagacaatcatatctcctggagctaagcagggactgatccctcttgctattccgctttcgaagaattcgtcaggctctgttactgcgcttttgagatggcctactgctccaccaggaatggatatgccggttgtggaagtttggaggagtggagtcaggcttatagctagaaatgtagatgaatacattcaccggattctagttgaagaagatgcacaagagttga

SEQ ID NO: 121776 - DNA, 521 bp, Arabidopsis thaliana
  unsure (1)..(521): unsure at all n locations
atgattttcgccggcannnnnnnnnnnnnnnnnnnnnnnnnnnnnnnnnnnnnnnnnnnnnnnnnnnnnnnnnnnnnnnnnnnccacgcgtccgcccacgcgtccgctcttctcattagatcctctctctctctctctcaaaaagagaaaatctcagagccagaagaagacaaatatatcttttctattcctcagatctctgaaatcgaagtttctcgaactgttttgttttgttttttttccgatgaggtgtaagagacacacagtagatttcagtagcagtatcggcgtttgtgcttcttgtctccgtgaacgactctttactctcgccgtttcaaccgccgcgtctgaaaacgacgataacgatcatcgtcattctcgtatttctccacctcctctgctttttcctcgttctgtttctccttacgttgctcctagaaaatccgacgccggaaccggaaccggagctggaggaagagactccgtagcttcttctaataaccgattcttcgcaacgccgc

SEQ ID NO: 121777 - DNA, 775 bp, Arabidopsis thaliana
  unsure (1)..(775): unsure at all n locations
atacgactcactanagggaaagacggtacgcctgcaggtaccggtccggaattcccgtgtcgacccacgcgtccgtcattttccgatagaagaacttttttcacggcggcgataacaaatcaccggctaataaaggaaggaaaagaagaagaagagaagctatgacaacaatcagtcttcgcaagagtaacaccagactcccaccggaggtgaatcgcgtgctctacgttcgtaaccttccctttaacataacgagcgaagagatgtacgatatcttcggcaagtacggcgcaattcgccagattcgaatcggttgcgacaaggcgacgaaaggtactgccttcgtcgtttacgaggatatctacgatgccaagaacgccgtcgaccatctctctggcttcaacgtcgcgaatcggtacctaatcgtgttatactaccagcacgcgaagatgagcaagaagtttgaccagaagaagagtgaagatgagatcaccaagttgcaggagaagtatggagtctctaccaaagataagtaattgtccttgaattcgatcttcttatggtcgttctgttactgcaacaatttagggttttgaaattctgggagatgtgaaactttcttttatctgtatgaatttagtggagttctttatgtaaggtttgctcttttgtcatttacatcgaccaagcaatgaaaaatacatcttttaatcccaaaaaaaagaaaaaaaaaagggcggaagctctagaggatccaagcttacgtacgcgtgca

SEQ ID NO: 121778 - DNA, 575 bp, Arabidopsis thaliana
atacgactcaccttagggaaagctcgtacgcctgcaggtaccggtccggaattcccgggtcgacccacgcgtccgggcttggtacgattgacttctcattcaccttcttcttcttcaagtgtgctcagaaggcaagagttcttggtacgaacgctttgtgggtcaccaatcatcagagcaatgagttccacatcagaggccgacgctgagagtgttcttagaaccgtgacgccatcgctcgatctcaaacgacacaaaggccaagctgggaagatagctgtgattggaggatgtcgtgaatacacaggagctccatacttcgctgccatttcagctttgaaaatcggtgctgatttgtctcatgtattctgcacgaaagatgcagctcctgttataaagagctatagtcctgagcttatagttcaccctgttcttgaggaatcatatagcatcagtcaactcagtgaagaagataaaagagaagttcaagataaagtgcttggagaagtcggtaaatggatggaaagatttgattgtcttgttattggtcctggtttgggaagagatccatttct

SEQ ID NO: 121779 - DNA, 971 bp, Arabidopsis thaliana
  unsure (1)..(971): unsure at all n locations
nnnnnnnnnnnnnnnnnnnnnnnnnnnnnnnnnnnnnnnnnnnnnnnnnnnnnnnnnnnnnnnnnnccacgcgtccgctaacttcttcttcttctcctttcagaaacccagcgaccatcttcttcaccggttatggtgacttcggagggattagcaagcgttgattcttggttatatcgccaaggtttcaacgttgattcatggttgctttctgataccttctctcacgacaacgatttgctcgcaagagctctccataccaccgtcacagcccctcatactctcactccttcctctgctttcttcgattcctccgctgtttctcacccttcttccactaacacactctcctctaccgtctccggtgcttctgatccagaaatcatcggcggaggagctaaacggaaacgtaactgccttcttaccgacggtaaagccgccaagcgccgcgctcgtgcttccaagaaatctcagactactttcataacggcggatccgtccaactttcgtcagatggttcagcaagtgactggcgccaagtacatcgatgactcttcttcctttggtattttcgatccgattgtcaagccggagccgcttaggttcgttaacaaactgccttgtggtccttcggatcgatccacggcggttccaatgctcgacacatcagcatttttgtctaatcatcaccaggagaatctcgcagtgggaaatgctttctccggtaacagcagcagtgtaggattaccgtcggggaagccaagtgcaacggccgaccccggtggttctgccgtggagtttgataattacccaacatttccaacgcttgaatcgtggaaggttatgtgatctgtttctttcagtcttagacgtaatctttaactttttaggtttgttttctttgcatcccttcatgaataatcttgttcatagtttttgtttatcgatgtaatggatcaaaaaaaaaaaaa

SEQ ID NO: 121780 - DNA, 504 bp, Arabidopsis thaliana
  unsure (1)..(504): unsure at all n locations
nnnnnnnnnnnnnnnnnnnnnnnnnnnnnnnnnnnnnnnnnnnnnnnnnnnnnnnnnnnnnnnnnnccacgcgtccgcggacgcgtgggtctcactaccacgagctcttcatctccacttccttctccgacaacgcttccgtcgctctaaacctccacaccctcacgcgccgccctcatgtagccggtacagtggccaacgctgaagcagcggaatatgttcgctctgttttcacctcctctgctctcaaatcacacgtcgttgcttaccaagtgtctctaacttacccagttcatcgctctttggtactaacgccgacagactctgcaaagccaatcactttcttgctggaacaagaaaaactcggagacaatccttatgctaatgaagtgatgcctacttttcatggatacgctaagtcaggtaacgtttcaggtccagtggtttatgcacactatggacgagtggaagatttcgtgagactcaagaaagatatgggcgtga

SEQ ID NO: 121781 - DNA, 449 bp, Arabidopsis thaliana
ttgcctaagctagatttgattccctctcttcgatttttaattccttgctcctctgctcgtttctctaccggcgacgtaacctctctgtctctgttctgttccttgcctgctcgaggtgtgcatcttcttggaatcagctgactttgcggtcaatcggatttcttgggattgtttggagaaactttggaggtgatggacaacaaaaatgatcaggatattgatgttagatcagtggttgaagctgtttccgccgatctttcctttggtgctcccctctatgtggttgagagcatgtgcatgcgctgccaagaaaatggaacaaccagatttctattgaccttaattcctcacttcagaaaggtcttaatatctgcatttgaatgtccgcattgcggggaaatgaataatgaagttcagttcgcatgcgagattcaaccccgtggatgctg

SEQ ID NO: 121782 - DNA, 707 bp, Arabidopsis thaliana
  unsure (1)..(707): unsure at all n locations
atgttctccnnnnnnnnnnnnnnnnnnnnntagggaaagctgcgacgcctgcaggtaccggtccggaatcccgggtctcccacgcgtccggtttaatacatgtcctcttcgatggaaaccaattcacgggcgaaattccagagaccctcagtctcgttaaaacgttgacggtgttacgccttgataggaacaaactcattggagatattccttcatatcttaacaatctcacaaatcttaacgaactgtacttggccaacaacagatttactggtactcttccaaatttaaccagcttgaccagtctctacacattggatgtgagcaataacactttggatttctcacccattccatcatggatctcttcattaccctccctatcaacattaaggatggaagggatccaacttaatggtccaataccaatctcatttttcagccctcctcagttgcagactgttatcttaaagcgaaatagtatagtggaaagcttagaactttggacagacgttagcagccagttggagttngtggatttacactacaatgnactaactgattataaaccatcagctaataaagtcctccaagtaatattggcaaataatccagtgtgtctagaggcgggaaacgggccgagttactgttcagcaatccaacacagtacctcatgttctacactcacaacaaactgttctccatgc

SEQ ID NO: 121783 - DNA, 816 bp, Arabidopsis thaliana
  unsure (1)..(816): unsure at all n locations
aaccaaactttatttaatgggcctttaccccgggggctctagggaaaataggattggttggtgggaaaaattgtgttggaaaccggggaattatacccatattttttcaaccaacaggggaaaccaagcttaatggccccatgtatttacgccaaagcttctaaatacgactcccctaatagggaaaagttggtacccttgcaggaaccggtccgaaattcccgggtcgacccacgcgtccaaaaaaaaaaagctgcagaggagagggaggctgttaaaaaggacaccaagaagcctaaagagagtggaaagtcttctgtgctcatggatgttaagccatgggatgatgaaaccgacatgaagaaactggaagaggctgttcgtggtgttgagatgcctggtcttttctggggagcctcaaaacttgtaccagttggttatgggatcaagaaactcacaattatgttcacgattgttgatgacctcgtgtccccggacaacctcattgaagacttcctcacctcagagcctaacaacgagtacatccagagttgtgacattgtcgctttcaacaagatttagagacttcaaatttctccttaccgaaacatatctgaatttcaagttttgttttcgtttgtgttgtttaccgaaatgtttctttcctagttgcaagaccgctttcatgttacaataacactaaattttcaatggttactattccgttgcatcaaaaaaaaaaaaaaagggcggccgctctagaggatccaagcttacgtacgcgtgcatgcgccgtcatagnnnnnnnnnnnnnnt

SEQ ID NO: 121784 - DNA, 911 bp, Arabidopsis thaliana
atagcagagctttgacgtcgcatgcacgcgtacgtaagcttggatcctctagagcggccgctcgcgatctagtctcacagctcaggatatactcttttaggtttcaacagcagcttagtctctctgatctctctacctccctcacaccctaaaactcagcaacaatggccgttaccttttcagatctacacacagaggagggtgtcaaatccgtggaggagcacctcgccggaaaaacctacatctccggagatcaattgtctgtggatgatgtcaaggtttacgctgccgttccagtgaaacccagcgatgccttccccaatgctagcaagtggtacgagtccgtggcttcccaacttgctaaaagtttccctggaaaggccgttggagtacaattcggtggctctgctgctgctgctccagctgttgaagctgaggcacctgcagctgcagctgatgatgatgatgacatggatctctttggtgacgagaccgaagaagaaaagaaagctgcagaggagagggaggctgctaagaaggacaccaagaagcctaaagagagtggaaagtcttctgtgctcatggatgttaagccatgggatgatgaaaccgacatgaagaaactggaagaggctgttcgtggtgttgagatgcctggtcttttctggggagcctcaaaacttgtaccagttggttatgggatcaagaaactcacaattatgttcacgattgttgatgacctcgtgtccccggacaacctcattgaagacttcctcacctcagagcctaacaacgagtacatccagagttgtgacattgtccgcacgcgtgggtcgacccgggaattccggaccggtacctgcaggcgtgccagctttcccaatagtgagtcgtagagagctggagtatca

SEQ ID NO: 121785 - DNA, 751 bp, Arabidopsis thaliana
attaacgaggggctaaaggagaaagaaacagaagaatcagcaattttagttaatctcgatgaagagacttgcctgaggatgcaaacctgcgtctttcagtgacattgactctttgtctctcccatacactgtccttgggaagtttgtgattaagctgtactcttctgtatctaagagtccaagtgaatccacgtagtcatacaatgtctggatcttggtttcgctcttaaacatcctcccttttctttctccattcgggaaccgaactaacacttgtgtaacatcagggcctttctcaggatatactcttttaggtttcaacagcagcttagtctctctgatctctctacctccctctctccctaaaactcagcaacaatggccgttaccttttcagatctacacacagaggagggtgtcaaatccgtggaggagcacctcgccggaaaaacctacatctccggagatcaattgtctgaggacgacgtcaagggctacgactggcgctccagtgaaacccaccgatgccttacacaatgctagcatgatggaactagtacgacgcttcccaacttgcttaaatgttccctggaaagggccgctgggtgcaacaatcaggagaatagggctatcagatcaggtgcttaaggatatgggcctatctggtaaaatcccagattctcttgaatactgtccgagtgttacaaaaacccgatctttatagaaatccgatgtggggaaatatccctac

SEQ ID NO: 121786 - DNA, 444 bp, Arabidopsis thaliana
gcagctgagtcgctctgatctctctacttccctcacaccctagaactcagcaacaatggccgttaccttttcagatctacacacagaggagggtgtcaaatccgaggaggagcacctagccggaaaaacctacatctccggagatcaaatggctgtggatgatgtcaaggattacgctgccggtccagtgaaacccagtgatgccttacccaatgctggcaagcggtactaggtacgaggcgtcccagcctgctaagggatcccctggagaggccagtgcagtacaagacgaggtctttgctgctgatgactccagctgaaggagcatgtgccgcctgcaacagtcttctgatgttaagcgaccacatgtatcattatggtgacctgtaccttcttcttacaagggatggaggaaagggctattgtgccttaagaggcaccatg

SEQ ID NO: 121787 - DNA, 528 bp, Arabidopsis thaliana
  unsure (1)..(528): unsure at all n locations
cggacgcaacaacacaacacacgcagaagagagagagagaacaaaaaaaagaaggagcggttacatattctctggtctgtcacaagaaaaatggatatctgtatggacaaggagccagatggtgtggtggtctatgcgaacggtgattcgtgtaatccaaaccaagaaaatgtttctgagcctctcttagattcagtatcacgcgatgatgctaatgtacatacagagcttcgatatggggaagagaacatcgaagtaaacgaatatgatgttaaagagtgtactagtgagatccccgttggtaagccgataggagatgattttgagtctaaagatgtcactaagtcaagtttacatgcaaagcatgcttcaaaatcaggtagagggattaacaaaacaagggacacccgttccacaaccgttttttttgcaaccttagaaacgtgcttcatctncancggtcgnttacttgtgattttcggataactggtttnaaagttccgntggcatagtagtcaagnagnacct

SEQ ID NO: 121788 - DNA, 1299 bp, Arabidopsis thaliana
  unsure (1)..(1299): unsure at all n locations
cctctncttcctcttctctcncctcacaactcaaaactctctccatctctcttctaaaatcagacaagaaagatggctcaagaggaagtacagaaatcggctgatgtcgctgctgctccggtggtgaaggagaaacctattaccgataaggaggttactattcctacccctgtggcagagaaagaggaagttgctgctcctgtctctgatgagaaggcggttccagagaaggaggtgactccggagaaggaagccccagcggcggaagcggagaaatctgtttcggtgaaggaggaagagacggttgttgtagctgagaaggttgttgttttaactgctgaggaagttcagaagaaggcacttgaggagtttaaggagcttgtaagggaggctttgaacaaacgtgaattcactgctccggtgacgccggttaaggaagagaaaacagaggagaagaaaacagaggaggaaactaaagaggaagagaaaacagaggagaagaaagaagagacaacgactgaggttaaggttgaagaagagaaaccggcggttccagcggcggaggaggagaaatcatcagaggctgctccggttgagaccaaatctgaggagaaacctgaagagaaagcagaggtaacaaccgagaaagcatccagtgccgaagaagatggaaccaagaccgtggaagcaatcgaagaatctatcgtctctggtttcaccacctgaatccgccgtagcacctgtcgtggtagagactgtcgccgttgctgaggcagagccagtggagccggaagaagtctcgatctggggagttccactactccaagacgagagatctgacgtgatcctcacgaaattcctccgtgcaagagactttaaggtcaaagaagctttaaccatgcttaaaaacaccgtccagtggcgtaaagaaaacaaaatcgacgaactcgttgaatccggagaagaagtgagtgagttcgagaagatggtgtttgctcacggtgttgacaaagaaggacacgtcgtgatctacagttcttacggtgagtttcagaacaaggagcttttctcccgacaaggagaagcttaacaagttcctcagcttggnggattcagctacaagagaagtgtgttagagctatttgatttcaagcaaacccttnaaggcgaagtcttcgnttttgtnttccgtcaagccgactttnaagggaaccnctccaagggncctttnggtnaaaaanaagcccttttttgggcaaattccattcanaaccgncgcttgnttanaanaaattttcg

SEQ ID NO: 121789 - DNA, 1593 bp, Arabidopsis thaliana
  unsure (1)..(1593): unsure at all n locations
taatacgactcatatagggaaagctggtacgcctgcaggtaccggtccggaattcccgtgtcgacccacgcgtccggagaaacctgaagagaaagcagaggtaacaaccgagaaagcatccagtgccgaagaagatggaaccaagaccgtggaagcaatcgaagaatctatcgtctctgtttcaccacctgaatccgccgtagcacctgtcgtggtttatactgtcgccgttgctgaggcagagccagtggagccggaagaagtctcgatctggggagttccactactccaagacgagagatctgacgtgatcctcacgaaattcctccgtgcaagagactttaaggtcaaagaagctttaaccatgcttaaaaacaccgtccagtggcgtaaagaaaacaaaatcgacgaactcgttgaatccggagaagaagtgagtgagttcgagaagatggtgtttgctcacggtgttgacaaagaaggacacgtcgtgatctacagttcttacggtgagtttcagaacaaggagcttttctccgacaaggagaagcttaacaagttcctcagctggaggattcagctacaagagaagtgtgtgagagctattgatttcagcaaccctgaagcgaagtcttcgtttgtgttcgtcagcgacttcaggaacgctccaggacttggtaaaagagccttgtggcaattcatcagacgcgctgttaaacaattcgaggacaattatcctgaattcgccgctaaaagagctattcatcaatgtcccatggtggtacattccatactacaaaacattcggatctatcatcacatccccaaggactaggagcaagatggtccttgctggtccatccaaatctgccgatactattttcaaatacatagctcctgaacaagttcccgttaaatacggtggacttagcaaagatactcctttgaccgaagaaaccataacggaagccatcgttaaaccggcagcaaactacactattgaattgcctgcttctgaggcttgcacgctttcatgggagcttagggttttgggtgctgatgtgagctacggagctcagtttgagccaaccaccgaaggaagctatgctgtgatcgtctctaagacacggaagattggatcaaccgatgaaccggtgataaccgattcttttaaggtgggtgaaccgggaaagattgtgatcacaatcgacaaccagacttccaagaagaagaaagtgctctacaggttcaaaactcaataaaaggtctgatctttgaaatccaaatccaaggaagaagcaaaaaaaatgttattttgttatttgggggaaacaaattttaattaattaatttagtttgttatttattatgtaattttgaaatctcaagatgtggttgtgtttttgctttgttttggtattgggggttgttttcgtgtgtggagaatatgtgattaaaattcaaaagaaactaaagaacactttgtttcatgatttcttacccaaaaaaaaaaaaaaaaaataaagnnnnnnnnnnnnnnnnnnnnnnnnnnncnnnttgggagctgaanngggcgtnnnnnnnnnnnnnnnn

SEQ ID NO: 121790 - DNA, 593 bp, Arabidopsis thaliana
  unsure (1)..(593): unsure at all n locations
aaacccaatttaacttaatctggagctccaccggggtggcggctcgctctagaactagtggatcccccgggctgttttatttttcggccgcggagaaacctattaccgatgaggtggctactattcctacccctgcggcagagaaagaggaagttgctgctcctgtctctgatgagaaggcggttccagacaaggaggtgactccggagaaggaagccccagcggcggaagcggagaaatctgtttcggtgaaggaggaacagacggttgttgccgctgacaaggctgctgctttaactgctgaggaagttcagaagaaggcacttgaggagtttaaggagcttgcaagggaggctttgaacaaacgtgaattcactgctccggtgacgccggttaaggaagagaaaacagagnngatgaaaacagnggaggaaactaaagagggangtgaaaacagaggagangaaagaagaggcaaccgccttaggttanggttnatgaagagaanccngccgttncaccgccgaggtggngaatnatcagaggctttccgtttannccaatcttngnggancnttagggaaacnngggtt

SEQ ID NO: 121791 - DNA, 693 bp, Arabidopsis thaliana
tggagctcaccagggtggcgggcgctctagactagtggatccccgggctagaagaattcgaggtcgcagatggtccttgctgggtcatccaaaatctgccgatactattttcaatacatagcccctgaacaagtccccgttaatccggtggccttagccaagatcccccttcgctagaccgaagaacccatcacggaagccatcgttaaacccggcagcaaactccactattgaattgcctgcttctgaggcttgccaccgctttcatgggagcttagggttttgggtgctgatgtgagctacggagctcagtttgagccacccaccgaaggaagctatgctgtgatcgtctctaagacacggaagattggatcaaccgatgaaccggtgataaccgattcttttaaggtgggtgaaccgggaaagattgtgatcacaatcgacaaccagacttccaagaagaagaaagtgctctacaggttcaaaactcaataaaaggtctgatctttgaaatccaaatccaaggaagaagcaaaaaaaatgttattttgttatttgggggaaacaaattttaattaattaatttagtttgttatttattatgtaattttgaaatctcaagatgtggttgtgttttgcgcggccgcgaattcgatatcaagcttatcgataccctcgacaacaagggggggc

SEQ ID NO: 121792 - DNA, 845 bp, Arabidopsis thaliana
  unsure (1)..(845): unsure at all n locations
atgatctccnnnnnnnnnnnnnnnnnnnnnnnnnnnnnnnnnnnnnnnnnnnnnnnnnnnnnnnnnnnnnnnnnnnnnnnnnnnnnnnnnnnnnnnnnnnnnnncggccgcagatggtccttgctggtccatccaaatctgccgatactattttcaaatacatagctcctgaacaagttcccgttaaatacggtggacttagcaaagatactcctttgaccgaagaaaccataacggaagccatcgttaaaccggcagcaaactacactattgaattgcctgcttctgaagcttgcacgctttcatgggagcttagggttttgggtgctgatgtgagctacagagctcagtttgagccaaccccccaaggaagctatgcttgtgatcgtctctaagacacggaagattggatcaacccatgaaccggtgataaccgatttccttttagggtgggtgaaccgggaaagattgtgatcacaatcgacaaccagtcttccaagaagaagaaagtgctctacaggttcaaaactcaataaaaggtctgatctttgaaatccaaatccaaggaagaagcaaaaaaaatgttattttgttatttgggggaaacaaattttaattaattaaaatagtttgttatttattatgtaattttgaaatctcaagatgtggttgtgtttttgctttgttttggtattgggggttgttttcgtgtgtggagaaatatgtgattaaaattccaaagaaagtaaagaacactttgtttcatgaaaaaaaaaaaaaagggcggccgctctagaggatccaagcttacgtacgcgtgcatgcgacgtcaagcatcttctata

SEQ ID NO: 121793 - DNA, 633 bp, Arabidopsis thaliana
  unsure (1)..(633): unsure at all n locations
cctcgaaccnatcccaaaaaaaacctcttgaccanttccgttaaaaggggagacttaacatacaaaaaccccctgtccccgagaacccanaccgggacccatccttaacccggcaaccaccccaaccctattgaattccctccttctggaggcctgcacgctttcatgggagcttagggttttgggtcctgatgtgacctaccgggagctcagtttgagccaaccacaccgaaggaagctatgctgtgaccgtcccctaagacacggaagattgggatccacccgatgaaccggtgataaccgattcttttaaggtgggtgaaccgggaaagattgtgatcacaatcgacaaccagacttccaagaagaagaaagtgctctacaggttcacaactcaataaaaggtctgatctttgaaatccaaatccaaggaagaaccaccaaaaatgttattttgttatttgggggaaacaaattttaattaattaatttagtttgttatttattatgtaattttgaaatctcaagatgtggttgtgtttttgctttgttttggtattgggggttgttttcgtgtgtggagaatatgtgattaaaattcaacagnaagtaaagaacacttngctgaggnnc

SEQ ID NO: 121794 - DNA, 585 bp, Arabidopsis thaliana
  unsure (1)..(585): unsure at all n locations
gcatacgttnttttttggcncccacagcnncctgaatgacggntgacacctggagaatggaagccccagcggcggaannggangaaatctgtttcaggtgaaggaggaagagacggttgttgtagctgagaaggttgttgttttaactgctgaggaagttcagaagaaggcacttgaggagtttaaggagcttgtaagggaggctttgaacaaacgtgaattcactgctccggtgacgccggttaaggaagagaaaacagaggagaagaaaacagaggaggaaactaaagaggaagagaaaacagaggagaagaaagaagagacaacgactgaggttaaggttgaagaagagaaaccggcggttccagcggcggaggaggagaaatcatcagaggctgctccggttgagaccaaatctnaggagaaacctgaagagaaagcagaggtaacaaccgngaaagcatccatttccggagnaggttggacccanaccnttgnangaatccgagnatctttcggnntcttttttaccaccttganttccnccnttcacctttcgttgtanaactttcccctttcntntgg

SEQ ID NO: 121795 - DNA, 698 bp, Arabidopsis thaliana
  unsure (1)..(698): unsure at all n locations
cccacgcgtccgcccacgcgtccgtgaggaggttgataagatggtgtgcttatctcacgtatgtggaagctagattaggggatagggttttatatgctgatgagatattgaaagatgggttttgcttgaatatgattgagactcctttgtgtcctttgaaagttgtgactaatcttcaagaagctgtttgggatgctgatattgtcatcaatggtttaccatcaactgagacgtttcaggtgttcaatgagattagtaagtattggaaagagagggttaatgctcctgttattatctctttggctaaaggtgtggaagcagagtttgagcctcatcctcggattgttactcctacgcaaatgatccatcgagcgactggtattcctcttgagaacattctctaccttgggggacctaatattgcttccgaggtatacaataaagagtacgccaatgcacggatttncgggtctnaaaaatggaggaagcctttgggaaagtttctaaggcagtctcatttcatagtctgggntaatagtgaccncattactcatgaaagtaatggggtggcttnaaggaatgttttatgnccattgggtgcaaggaattggtggntacacttgacctaagggaaaagtnnctaccccccaaatcaagtgtacttttcgcanttntaccttcannggatggtttttatt

SEQ ID NO: 121796 - DNA, 812 bp, Arabidopsis thaliana
cgaaccacgcatctgcccacgcgtccgcccacgcgtccgcttcttcttggtctcttctccatctcatcggagctgatctcgaattgttctccgttcatttgttacggtggagatgacatcggatcaccgcgacgctcttttctctctggaactggaatcgcctgatccggacgaaggaggtgtagcagacggaggagaatctgataccgacgaggatttgcgcgacaacgatgatgttgttatgccgggaacgaacgaagctgaagctgaagacgacgatcccgaagaggaagatctcaattctccgtctacatcatcactccccatggtttctacgatctcagcgactgctgttgtttccgggaccccgacggcgacttcctctacaggcgccgtgaccgttgcacttccggctggatccgccgtccctgtctccgtgattcccgttgattccgatccgaagtggcaccgtatgacggagatcgtccatcagagaccaccgatcgatgattctagacgccttttccagaggctgtggacagacgaagacgagatcgagcttcttcgtggttttctcgattacatgacgatgcaccgcggaagcagctcgcatccgccggatacggcgccgttttatgagcagataaagtcgaaacttcagctggatttcaacaagaaccagctggtggagaagcttcggagattgaagaagaagtacaggaatgtgatgagcaagatcagctctggttaagaggtattcttccagagccctcatgatcagtctacttttcgagatttctagaaaaatctgg

SEQ ID NO: 121797 - DNA, 1062 bp, Arabidopsis thaliana
  unsure (1)..(1062): unsure at all n locations
atgannnnnnnnnnnnnnnnnnnnnnnnnnnnnnnnnnnnnnnnnnnnnnnnnnnnnnnnnnnnnnnnnnnnnnnnnnnnnnccacgcgtccgaaattacgacgttgaagctccctcagtctaaaggattcggaggttgacgctgaactaaataatgggagaagagctgcaatatcagcagaatggttcatctgtgacatctaattatggttatggaagttcgcttgcttacgatcaatctcaagacattgaatctgccgcaaacactgctcttctccgagaacaagaaatagaaacgcagaagattatacaaggtcaaagagaagctgggacttcagtagccggagactctaagcataacactgatattcttcgagatcgtgctgaccccaatgctctaaaggaacatttgctaaagttcactgcacatcatagagcagaagcagcggcaaagcgtggtgggagtgtgagtacatgcggagaaggtaatgtggatgttggaaacggttatggtataccgggtggagttgcatacgcgggtcactccgagctcagtgggaagcctgaacctaccaatgcttcaaacaatttgcctgaatatctcaaacaaaaattaaaggccaggggaattctcagagatggtgcaggggctgttacatccaacccagaagatacatcagcggttagttggaatagacaggcaactttaccttttcaggctaatgcaagcaccttaccattaggatgggtagatgcaaaanatcctgccagtggtgctacctatnactataaccagcacactggaacatgccagtgggaaaggcctgttgagctttctttatgccacttcaagtgaccacctgtacttnctaaaagaagagtggattgaacatttgatgaagnatctggccataaggatttctcaatncaaaggcacatgtgntnaagtgggacctccagnttttttncaanagcccgttgcacaaactttacaacggtgtncccaagnccggtattnggngggggggatcccatttagntccaantnaggggttnggggnt

SEQ ID NO: 121798 - DNA, 639 bp, Arabidopsis thaliana
  unsure (1)..(639): unsure at all n locations
acgactcactatttggaaagctggtccgcctgcaggtaccggtccggaattcccgggtcgacccacgcgtgccaagcttcacttctcagaagaaagtaagatctgcgaatctctctcactctcacaaatggcaacgcttttaggtttctctcagactaagtttcaccattgcggcgtctggatttctacgccgccgtgctcatcttcttccacggtagtctcaatggtgggcttgaatcggactgattcgaaaaagctccgttcagatttcctcggccagattggttacgaagatcggagacaagtaagacacagttactgtagaagctcattagctgtgaaaatgtcgtgggacggtcctcttgcttccgtcaagttgatcatccaaggaaaaaacctcgagttatcagagccaattaagcagcatgttgaagagaaagtaggcaaatctgttcagaaacacagtcatcttgtgagagaagttgatgtaagactctctgttcgtggtgggagagtttggtaaaggccctaggattcgaagatgtgaggtgccattttttacaaagaagcaatggtttttttccggcctnngggaanttcctttggcagattacngtttttncgccttggnncancgnt

SEQ ID NO: 121799 - DNA, 833 bp, Arabidopsis thaliana
  unsure (1)..(833): unsure at all n locations
gagttatgataggattggcattttatttattagaactttatttcattatcatgtttttttcttctgaaacttatgataaaaaaatgtttaactcatgcaaaagacttttaactagtgggagataatggtgaaactcttttatttttgtccgtcttttcataattgccaatatatgtgatgtataattgcgggatatatgtgattgatatcatgacttaccactttatattattattttttttatcagaaaaatccgtacagaaaaggaatctctctcactctcacaaatggcaacgcttttaggtttctctcagactaagtttcaccattgcggcgtctggatttctacgccgccgtgctcatcttcttccacggtagtctcaatggtgggcttgaatcggactgattcgaaaaagctccgttcagatttcctcggccagattggttacgaagatcggagacaagtaagacacagttactgtagaagctcattagctgtgaaaatgtcgtgggacggtcctnttgcttccgtcaagttgatcatccaaggnaaaaacctcgagttatcagagccaattaagcagcatgttgaaagagaaagtaggcaaatcttttcagaaacacaagtcatcttgtnagagaaagttgatgtaaagactctctggttccggtgggttggagaagttttnggtaaaaggnccctngggatttcgaagattgttnaggtgncaattgttttaaaaaagaagccatggntgttttcccgtncttgaggaagattcttnagncnagtntncngctttntatncnctttggatnaaccgntaatacca

SEQ ID NO: 121800 - DNA, 859 bp, Arabidopsis thaliana
  unsure (1)..(859): unsure at all n locations
atgatatggccagcatctatacngactcactatagggaaagctggtacgcctgcaggtaccggtccggaattcccgtgtcgacccacgcgtccgcccacgcgtccgcggacgcgtgggctcacaaaaacctcacctttccaccataacattgtttctgttctacttcacagaagaacagagacaaaagaaagaacgggtctttggtcggaaagttcgactcttttagcatcttcagatgttctaatctcgaaaaaaatgcaactttactctgcaattttccgaggacatatcagacctaacgccgtcgtcggtgctgcctccatgtttattcaacataattccatccagcttcatcggagccctaaattgttgttgagaccttcctctgtagtaaggtctcttcattgccggaggtcaggtggattggttacgcattctcagaggtcaagggtcttgtgtgtgaaagcagctcgtggtgatgcttcttcttcgactcttggaatagagtggagagcagctaatttaccatattttcagaggcaaaactctggctatggacgtattgcttacaatgactatgaatcaagtgatgagtcggatagagatgttgggtcctctcagtctcagcaaatggcgggttcgactcttgataacattgatcaatggagatttaaactaactatgcttctccggaacaaagaagaccaagaangtgtttcaagggagagaaaagatcggcgtgattntgatcatatctctgctntggcactangatggganacacagccgtcagattcgaagattgtgtcattagaagctcctttgcaatatgacctgactgatgtaacgcccaagaga

SEQ ID NO: 121801 - DNA, 521 bp, Arabidopsis thaliana
aatacgactcacttagggaaagctcgtacgcctgcaggtaccggtccggaattcccggttcgacccagcggtgcgaaaacatcaaatcatgagtgggcaagagaatcatgatcatggccggatctcttctacgcccgccgccgcgtcggagccttccaaggctgctgctcactcctctgactacgctccttaccctaagctcgatcctaccgacgtcactcctcctcctcctcagcctattcccaccggtgccgccgcaaccaccatgccagcggaatccaatccttacgtttctccttcccctgccccaaggaatacgatggattcggtgaaggatacgttagggaaatgggggaaaatggctgccgacgccaccaagaaggcggaggatctcgccggaaatttttggcagcacttgaaaacaggcccaagtgtagcagatgctgctgtttcacgaattgctcaggggacaaaaatacttgcagagggtggatacgagaaggtcttcaagcaacatttga

SEQ ID NO: 121802 - DNA, 1184 bp, Arabidopsis thaliana
  unsure (1)..(1184): unsure at all n locations
nnnnnnnnnnnnnnnnnnnnnnnnnnnnnnnnnnnnnnnnnnnnnnnnnnnnnnnnnnnnnnnnnnnnnnnnnnnnnnnnnnccacgcgtccgccagattcgagcaaagcgaaggtcgcagctgcttcaatcttcgcgatcatcgatagaaaatcaaagatagactcgagcgatgagacagggacagtgttggagaacgttaagggagatattgagctgcgtcacttaagcttcacttatccagcaagaccagacattcagatctttcgtgatctttgcttaaccattcgcgcaggaaagactgttgctctggtaggagaaagcgggtcggggaaatcaacggtgatctcgctgttacaaagattttacgatccagattccggtcatataactttagatggagttgagctcaagaagctgcagttgaaatggttgagacaacaaatgggactagtgggacaagaacctgtcttgttcaacgacacgattcgagccaacattgcttatggcaaaggaagcgaagaggccgctaccgagtctgaaatcatagccgctgcagaacttgccaatgcacacaaattcatctctagcatacaacagggttatgacacagtggtgggagagagagggatccagttatccggaggacagaaacagcgggtggctatagcacgagccatcgtgatagagccgaagatattgcttttggacgaagcaacaagcgctcttgatgcggaatcagagcgagtggttacgatgctcttgaccgagtgatggaaaccgaaccccatggtggggcttaccggtatctaccattaaaacgctgactattgccgtagttagaacgggtgactcgctgagaaagggactcacgagacgttgatcaaaatcgaaggtggggtttatgcttcgcttgttcagcttcacatgactgcttctaattgatgtgatatatagttttggttttatgaaaagctaaaacttcagttttggcttgagtcaaaaactagccaatgtactaaaggttttgtatttatttttttgttgttgtttgtatacaagttaacgaagctgatatatatatcttgtctttcaagaaaaaaaaaaaaaaaaaaaaaagggcgcacgctctagaggatccaagcttacgtacgcgtgcaggcgacgtcataaatcttctatag

SEQ ID NO: 121803 - DNA, 714 bp, Arabidopsis thaliana
  unsure (1)..(714): unsure at all n locations
nnnnnnnnnnnnnnnnnnnnnnnnnnnnnnnnnnnnnnnnnnnnnnnnnnnnnnnnnnnnnnnnnnnnnnnnnnnnnnnnnnnccacgcgtccgcttctctttcttccttcctctccgatctccgttcacatctctctctcatctttatcttcttctttttttgccttgtgggttgaaagtttctatattttctctttctcttctgtttacataatccattttcagctcaagcagctgaagaataacgatcaagaaccaaaaaagaagaaaacgaatctgttcttagctttgatgggttcttgcttcagttctcgagtcaaagcagacatcttccacaatggtaagagcagcgatctttatggtctaagtctctcaagtcggaaatcgtcttcgactgtagcggcggctcagaagacggaaggggagatattgagttcgacccctgtcaaaagcttcacctttaacgaactcaaactcgccacaagaaacttcagaccagatagtgtgatcggagaaggtggctttggttgtgtcttttaaggctggttagatgagtccactctcactccgactaaccctggaaccggtttggtcatcgccgtttaaaagcttatccaagaaggttttcaaggtcaccgtgaatggctgacagagatcaattacttggggcaactgagtcacccaaatctagttaaactgatcggntattgctt

SEQ ID NO: 121804 - DNA, 1187 bp, Arabidopsis thaliana
ggcgacctatagattactatgacgtcgcatgcacgcgtacgtaagcttggatcctctagagcggccgcccttttttttttttttttacgcccttctccagatcttcgctttcgcttgtttcccttacaaaccttcagtgcatttttgttacatgcaatgatttcttcctcctcttcctcatctaatgagacatcttcatctgcggtaaaatcttcatcgccatcatcatcctcatcctcatcctcataatctccatcatcttccttttctgtctcgtgtgacacattgtcctgctcttccaatgccatcttcccgtcttcaccatcatgcaaagaatttgaatccacattttccacatccctctcttcctcttcatcaccatcctcctctggatagtctccatcttcatcctctatctcatagaaaactctccttcgctttcctaaacctatcctttggtgtttctctccatccaaagacccacttttcccaacagcattccttgaattccttatctcatcatcttcatcatccgcatcatcgagatccacatcctcgttgtcagacacaaccacctggttcgtctttcttgacttacatcccgtgatttttcgattaccacgaggaccagtcttcacttttgggcattcaacattcctcccccgcgccccttcctcttccacttcatctaattcctcatcctccaccgcatcagacccattaaaaccatcaaaggatggctcaccgtcaacagatgaggcatactcctccttgagatcagcctcagactcttcttcatcctcgtcggaaatcacataatcctcatctgactcatctgaacccttatccttagatctaacctttctattagaatttctagcccaagacgtgtttctctttcccatatgctcctcaaaataagatatagaaacaaaccactaaggcactaatctaaatctaaactcatcaaccaaaaacacaatgattccttcagctccgtcttgttctaaaaacttatatagcctagaccaaatcacccagaaatctcaaacctcaattctcgaattcagagcacgagatctccgatgaagaagacgaaacacttatgatttttccactaattttgtgaatcgtgatccttttccccgccttatttttctctctatttacaactattttttttggtt

SEQ ID NO: 121805 - DNA, 496 bp, Arabidopsis thaliana
cgcagtcgcacccagaaactaaaaaaaactgcttcctctctctctctctcttcccatcatcatcgtcgtctctttctcagatcgattttcggttatgccgatcaacggttaatctccgccgtttgatttcatcgccggagaggatctttctccgtctacgtatgccctttcgtatacgcgtttcgtgttttgattttccccgaaacctttcgttgttctgggttactgtgtgaggaaggacgtgcaaatttgtttggaagttgtgttaagttaaagcagagtattggagatcgtctgatagagaagagaatagttcttgtgtaaggttatgggttcagtttgttgtgtagctgtgaaagacagaaaggttcctcctagtggtggacctgcgagttcatctgttcatcggaattcagcatgttcgccacaatggagttctcgacgtgataataggaggcgagtggctgatgagattgagggttcaccttattacagt

SEQ ID NO: 121806 - DNA, 511 bp, Arabidopsis thaliana
cccccctcgattgccgccggtttccatagcctggatatcgaattcgcggccgccgaaaagggagagaggaaaaaaaaaccgtccgattcattctcttcgttgctcgacgaatttttcttaagctttccttattggagatttgaagattctgagtggttgttatgataatgtgggtttgattagttcttcacacacagcttctctacgctcatggattcttctctcgatggagctgcaggtgactcatcgaaatgcagtgaaatgagtgttgatgagaagagacagcttgtttatgaactgtcgaagcaatcacatctagctgctgaggtcttgcaggcatggagccgccaagagattctacagatcttatgcgcagaaatggggaaagaaaagggaagtatactggtttgacccaagtcaagttcatcgagacccttttgaaaatggtatcctgggaaaaactctggagagtgtgaagggaagaagagagattctgattgtttgcctattc

SEQ ID NO: 121807 - DNA, 519 bp, Arabidopsis thaliana
  unsure (1)..(519): unsure at all n locations
nnnnnnnnnnnnnnnnnnnnnnnnnnnnnnnnnnnnnnnnnnnnnnnnnnnnnnnnnnnnnnnnnnnnnnnnnnnccacgcgtccgctcttcctatctcacagcgacaatctctatctctctctatctcttctccgctcacagcgaatctctctctctctctctctctctctctcttctccggtgtattccgttctccgggaatttctccgaagagggagagaggaaaaaaaaaacgtccgattcaatctcttcgttgctcgacgaatttttcttaagctttccttattggagatttgaagattctgagtggttgttatgataatgtgggtttgattagttcttcacacacagcttctctacgctcatggattcttctctcgatggagctgcaggtgactcatcgaaatgcagtgaaatgagtgttgatgagaagagacagcttgtttatgaactgtcgaagcaatcacatctagctgctgaggtcttgcaggcatggagccgccaagagattctacag

SEQ ID NO: 121808 - DNA, 633 bp, Arabidopsis thaliana
  unsure (1)..(633): unsure at all n locations
cccccctctgggtcgacggtatcgataagcttgatatcgaattcgcggccgcaacaaaaacaaacagagtggtttctctatgaaatcaacgtttctgttgttgttgttgttacttagtctcaatcttctctttgtctttgtttcatgtgcttcttccatagagtttgtttaccctaatttcacagcttctaacctcagattcgtcgatagctccaaaggagctttcctcttgtctcgtaattccatcttcaaagccggtttattcagtcccggcggcgatgattcctctaccggtttctacttctccgtcgtccatgtcgattccggttcaacaatctggtcatcaaatcgagattcccctgtttcaagctctggtacaatgaatcttactcctcaaggaatctctgttaattgaagatggtaaaagtcagataccagtttggtcaacgccggctttagcttctccggttaagtccctcggtaaacgacgcgggtaatccccttcctcctgatcactgaacggttccctaggggaancttgntttccaacgggccgatggcctgngaangctaagctgggnggcctgccggnnggcnnggntantncacggggnaagctgggggaccgggtnt

SEQ ID NO: 121809 - DNA, 549 bp, Arabidopsis thaliana
  unsure (1)..(549): unsure at all n locations
atgatcttnnnnnnnnnnnnnnnnnnnnnnnnnnnnnnnnnnnnnnnnnnnnnnnnnnnnnnnnnnnnnnnnnnnnnnnnnnnccacgcgtccgcttaactctctctctttctctttcccctttcttcttctgagatacgcttctctactccactgccatggagctctaatgggtctctgcaattttcattcttttcctcttttcttctgagaatttcagctcaagaaccatggatgagtcttctcttgttcgttttgtgttccttctctgtttggtttcgtcgtctgtgttctgtttggctgagtctgaccaaaacgcaaccgtttcttctgctgtttacattgttactctcaaggaccgtccatctgttcatttctccggcagagaatcgagtgactctaaacacagccttaccgctacttcgtcccaaatttacagaacattgaaccgaagtgcttctattattagagttcacgattcattgctgagaaatgtattgagaaaggagaattaccttaagctttatagttaccactatcttatcaatg

SEQ ID NO: 121810 - DNA, 635 bp, Arabidopsis thaliana
tagggtttctaatctcttataacaacaccgcaaaagagtaaagggacgctagagagagctcgaagacgcaatggcgagaatcaaggttcatgagctgagggagaaatcaaaagctgatctttcgggtcagttgaaggaatttaaggcagagcttgctctccttcgtgtcgctaaggtcactggaggtgctcctaataagctctctaagatcaaggtggtgaggaagtcgattgctcaggtgttgacagtgatctcacagaaacaaaagtctgctttgagagaggcatacaagaacaagaagcttttgcctcttgatcttcgtcccaagaagactagagccatcaggaggagactcactaagcatcaggcatcgttgaagacagagagggagaagaagaaagaaatgtactttccaataaggaagtatgctattaaggtgtaagcttttatcttgatcacatcaatttttgtgtttgaatttgagctcgtgtgagtttttgctttgttttccttccttgttaaagatattaaaagctcatcttaatgaaagattgattcagaaaaacagtattgttatattattggggcagagcatcattaatgttataaaaaaaaaaaaaaaaaaaaagaagggc

SEQ ID NO: 121811 - DNA, 776 bp, Arabidopsis thaliana
cagctacattcgactcacattagggaaagctgcgccgcctgcaggtaccggtccggaattcccgggtcgacccgccagaaaagagcaaataggcggcacatcagttctcaacactcacgatggcgagaattaaggttcatgagcttagagataaatcaaagaccgatcttcagaatcagttgaaggaattcaaggctgaactcgctctcctccgtgtcgctaaagtcaccggaggcgctcccaacaagctctccaaaatcaaggttgtgaggaaatccattgctcaggtgttgacagtgatctcccagaagcagaaatctgctttaagagaggcatacaagaacaagaagctcttgcctcttgatctccgtcccaagaaaacacgagctatccgtagacgtctcaccaagcatcaggcttcgttgaagacagagcgtgagaagaagaaggagatgtatttcccagtgaggaagtacgctatcaaagtgtagtttcattctcccagctctagcttctagaaatgaattgattcagcctttgattatcggcttatgttatctcctctcttttttgtccaaccttattaattttagttgtactgaagttttgttatcacacaacctctctaaaatcattagtatttcataaatattgaatttattctgggttttgttgtctctttggtaaattttgatttttcggttgtttagagttaagggacgattgaatgaaggattgtaaacgaacatggttgatttatacggagaatttctgat

SEQ ID NO: 121812 - DNA, 536 bp, Arabidopsis thaliana
cttcttcatcgcaatctctctgatagagaaaccaacgcacaataagaaacgagatttactgtgaccatggatccaggagatccgacttcgatacttttcacaaagatcagaactttagaaccagatttcgcttccaaaatcattggctacttgcttttacaggacgtgggtaagacagatttgatgcgtttggctcttggaccagagactctcttgcagtccgtttgtctcaaagctaaatctgctttaggtctttcgtctaatggatcttcttctgcttcttcgccattgaaccctatctccagacccattaacatccaccgtcattctctctctcactctgcaccgggaaatgggttttcgaggaaccctttgtctccttcttttgctactcctggttcactcggaagtaaccctaacatgatttcgagtccgtttcaagcaagttcgtctctttttgcttctgacggtgctgctgctggtgattccactggaaacggcgatttcctcgatgagcagcaactagggaactactt

SEQ ID NO: 121813 - DNA, 472 bp, Arabidopsis thaliana
  unsure (1)..(472): unsure at all n locations
cacaagtcatctttgcattataactccatttgccctcctggttcatcttgttctctaccatggctgattcaaaatctggtgacacggaagtagcgcatcgctctagcgatccaagcgaaaagcgtggtggctggatcactttaccgttcatgctagttacattattaggcatgtccataacttctttcggatggggaatgaacttgatcgtcttcttgatcgaggaattccacatcaagaacatcgctgctgctcagatttcaaatgttgtcaatggagttgtcaacatgttacctgttgttgcagccatcctagctgattccttttttgggaacattcccgtcatctccacctccactttcatttctctggctggaacctctctcttgaccttaatcacatctttgaactacttgatgcctagaccgtgtgaaacggngtcaattctatgccagtcgccatcaaaactaca

SEQ ID NO: 121814 - DNA, 574 bp, Arabidopsis thaliana
  unsure (1)..(574): unsure at all n locations
nnnnnnnnnnnnnnnnnnnnnnnnnnnnnnnnnnnnnnnnnnnnnnnnnnnnnnnnnnnnnnnnccacgcgtccgccccaactctcttttctctgtctttctctccctgcagttaccggattcctccactccggctagatctccccgttcaccgccgatgacagaacgaatcagagcaagaggacccagatcatcctctgttaactctgttcctctgattcttgacattgaagacttcaagggtgatttttcatttgatgcattatttgggaacctggtaaacgacctcttgccgtctttcctagacgaagaagcagattctggggatggccatggcaacattgctggagttgatggtttgacaaatgggcatttacgtggacagtctgctcctttgtcctctgctcctttttttcctgaagtagatggtcttttgtctctgttcaaagatgcttgcaaggagttagttgatcttcggaagcaggttgatggaaggctcaatacactaaagaaggaaagtttcaacccaagattctaaacaccggaagacactgactgagatagagaagggtgt

SEQ ID NO: 121815 - DNA, 740 bp, Arabidopsis thaliana
aatacgactcactttagggaaagccggtacgcctgcaggtaccggtccggaattcccggttcgacccacgcgtccggaatccattgtttccatttgaagaaaactctaactttctcgttgaagctttgagctctctacctctttatctccggagatgtataataacatgggacctcaaccggggatgccaagacctccaggaaaccctgagcctggtccatttggtaatcctttcactggagctggctcgggttttatccgtggtggtttgggagcgtatggggagagaattttaggatcgagctctgagtatgttcagagcaatataagccggtacttctctgatccgcaatactatttccaagtgaatgatcaatatgtgaggaataaactgaaggttgttctgtttcctttcctacaccggggacactggaccagaatatctgaaccagttggtggtaggctctcatacaagcctccaatatatgatatcaatgctccagacttgtacattccctttatggcatttggtacctacgttgttcttgctggtctttcattgggacttaatggaaagtttacaccggaagctctgaattggctgtttgtgaaaggattggttggctggttttgcaagaatgctcctggaagtacacttctatcacttggtagtggagaggcaccattactagatattgtggcatacggaggggatgcttttgctggtctgggtcttgcgg

SEQ ID NO: 121816 - DNA, 466 bp, Arabidopsis thaliana
cacaaagccacgggttttctctcatgtcgttttccacatacattcgtcttttcataggatcaatctaaaatcacgatttatactttctctgtttacattcacgtttccgaggagaaaagtctcgatcttctggatccggggtttggtttggtttggggttgactcggttttgactcgggacaagtcgtctcgtgagatggatgtctctcgtttagtagtatcgctttgagagtctgtctttctgggttcaatagattcgtatagtttcgcttagaaacacgcacaaaaagatgtcgttgaagcatcatcacagaggattagagctctctgcttcgaagagttttgtctcaaagaaatggactttatttctctgtatcggtttcttctgcgcaggaattctcttctccgacagaatgtggccagagcctgaatccaatgttgtatcaagggacacagtagcatcaga

SEQ ID NO: 121817 - DNA, 987 bp, Arabidopsis thaliana
  unsure (1)..(987): unsure at all n locations
nnnnnnnnnnnnnnnnnnnnnnnnnnnnnnnnnnnnnnnnnnnnnnnnnnnnnnnnnnnnnnnnnnnnnnnnnnnnnnnnnnnccacgcgtccgattaggggataataaggaagtatttgaaacaagaaggtggcaagcaagcggttctttctagtactttggggtctttaatatgggagaagcctacatggaccgacttcaagcagcttgccaaagaaagcgaatttgcggcatggacgcttatccacggctacacaatgaatcatcttgcttttgcggttcatcgattcaaacatcgtttcagtgacatcaaattcgtcaaacagcgtcttgaggaaaagggattcaaactcaacagtgacggagaaatcctcaaagtgagtcaagatggtctactatttcaagtttcatcgatctcggaaaggcttccggtaacatttgcagatggagtaactgaaacaatcccagcttcatacattgaattcactcagcgtcaagttcttccagagttcaaagatgtgccgcttgatgagatcaaagaatttcatagacgtgaagcttttgaactcgataacgccaaccacgtaatggaaagcacccgtttcacaactaaattctagaaccagacttgtcttgctcgacttagtatatgccaaatttgtgcaactatatatgtgagtgtgtgtttgtgtgcaatctttccatatatatgcatgtgtgtatttgcgatatctttatgttgttattttactgtgaagggacaatgtaagcatatgttatctctcatgatggtaattgttgattagagtgaccaacttgtaaaatggatcacatgattgacgaatcatgggaaataaatgtattttgtgattgaatatgtatatttgtgaaaaaaaaaaaaaaaaaaaaaagnnnnnnnnnnnnnnnnnnnnnnnnnnnnnnnnnnnnnnnnnnnnnnnnnnnnnnnnnnnnnnnnntgtcctaaa

SEQ ID NO: 121818 - DNA, 982 bp, Arabidopsis thaliana
  unsure (1)..(982): unsure at all n locations
ccagctctatactactcacttagggaaagctggcacgcctgcaggtaccggtccggaattcccgggtcgacccacgcgtccgggctcatttctcagaaacaactcaaacatgggttccttcgacttgcctcacagttcatcgttcaagggagaaagtgaaatatttcttcggaatgtgttcgagaatatattgaaaacgtacctaaggaagaacccgacggcgaagacaatatgggaactggttcagtcgttggacaacgaaaagatctgctacgaccacttcactttcaggacactaaaggtcgatggttatggaatagactccttgtcgagttttttcatggcttatggatataaaattggtggtggacttgattttcccaagaagaaactacgagttctttggttttctccacctgatgttcacgttcctaatgatggtcacggtctaggcaacggccctttgccgcgacttgttatagctgaggttcttgtggacgaactaagccctgaatcacaggggataataaggaagtatttgaaacaagaaggtggcaagcaagcggttctttctagtactttggggtctttaatatgggagaagcctacatggaccgacttcaagcagcttgccaaagaaagcgaatttgcggcatggacgcttatccacggctacacaatgaatcatcttgcttttgcggttcatcgattcaaacatcgtttcagtgacatcaaattcgtcaaacagcggntttnaggnaaagggnttcaaactcaaccagtnacggngaaatcctcaaagtggggcaagnttggcttctatttcaagtttcatcgtnctcgaaaagngttccgggaacattttcaggtggggacctnnacaatcccaggttaancattnattccctagggnaggtttcngngtaaaggtgnccnttatggccaagttnttgcggaggtttactgatccncccggatntna

SEQ ID NO: 121819 - DNA, 563 bp, Arabidopsis thaliana
aatacgactcacttagggaaagctcgtacgcctgcaggtaccggtccggaattcccgggtcgacccacgcgtccgcttctctttctcttagcatactctgctcttcctctctctgttgttctctgttccaaaggctttgagaaaaaatggagttcgagaaccggtacggacttgcaacgtcgcagaagtacgactgtctcttgttcgatttggacgatactctttatcctcttagctccggaatcgcaagagaatgtgggaacaacatcaaagattacatgaccgagaaactcggtatacctaaggacaaaatcgtcgaattgtctgatcttctatacaagaactatggaacaacaatggctggtcttagggcgatcggatatgaatttgactacgatgagtaccacagcttcgtccacggtcgtttaccctatgacaacataaaacccgaccttgttcttcgcagcctcttgcttagcctccctctccgcaaagtcatctttaccaacgcggacagagttcacgcggccaaggcgttgaagaagttgggattagaggattgt

SEQ ID NO: 121820 - DNA, 422 bp, Arabidopsis thaliana
tagtttcaatagcaaagatagaaaaaagaaactttatttctcttagtaatacaataatccttatagaacgggtcaagcaagatatcttttttgtttgtttcccttgttaatcgttataaacttgtttctcaataaaacttgagtttttaaaaatccagtcttgcaaattcatcgacgatgttagatccttcttctgctaaatccttcaatacccatttgtgttttccgagtattcccaatgatgatcactcagattccggtgtctgttcgcctactttgtggagaaccagtcccccgaagagtcctcctccttttcaccggccggaagattactggagtctttcgccggattctaaagcacaggctattgctcgtggtcaacgggagcttatggaaatggttagtaagatgcctgagtcgtg

SEQ ID NO: 121821 - DNA, 535 bp, Arabidopsis thaliana
  unsure (1)..(535): unsure at all n locations
atgatctnnnnnnnnnnnnnnnnnnnnnnnnnnnnnnnnnnnnnnnnnnnnnnnnnnnnnnnnnnnnnnnnnnnnnnnnnnnnccacgcgtccggaaaatccattattttgtttgaccaaaaaaaaaaaaaatcatttttgtgtgcaataatggcgatgatcataggcttacttgaaatcttcatcgcattcattttcttctttgtctaccagtgtttctcgctccacaagaaaactccaaagcatatggtcatgaactggccggtccttgggatgcttccgggtgtgctcttccaaatccctcgtatctacgactttgttacggaggctcttgaggcagaaaatatgacgggttgtttcatagggccatggcttagtggaacagacatattgctcactgttgacccggtgaatatccagtatattctaagttcaaacttcgtgaattaccccaaagggaagaagtttaacaagatctttgaattcttgggagatgggattttcaacgttgactcgggcttgtgggaggatatga

SEQ ID NO: 121822 - DNA, 1607 bp, Arabidopsis thaliana
  unsure (1)..(1607): unsure at all n locations
tgatcctgccagcgtcnnnnnnnnnnnnnnnnnnnnnnnnnnnnnnnnnnnnnnnnnnnnnnnnnnnnnnnnnnnnnnnnnccacgcgtccgattcaaaattttacagagaggaagaagaagttcccgacacttgtgagagactataaaagtatacgatctcctcctctcgctctcttcagatcacaaagttttcgtttttagggttctctcatcgatctcggtttgtgatcttcttcttcatcaatggcgtctagtgataaacaaacaagcccaaagcctcctccttcaccgtctcctctccgtaattccaagttttgtcagtcaaatatgaggattttgatctcaggaggagctggattcattggttctcaccttgttgataagctgatggaaaacgaaaagaatgaggtgattgttgctgataactatttcactggttcaaaggacaaccttaagaagtggattggtcatccaagatttgagcttatccgtcacgatgtcacggagccacttttgatcgaggttgatcagatttaccatcttgcatgtcctgcttctcctatcttctacaagtacaaccctgtgaagacaatcaagaccaatgtgattggcacactgaacatgctaggtctcgccaagcgtgttggagcaaggattttgcttacctcaacctcggaggtatatggagatcctctcattcatccccagcctgagagctattggggaaatgtcaacccaattggtgttaggagctgttatgatgaaggcaagcgtgttgctgagaccttgatgtttgactaccacaggcaacatggaattgaaatccgcattgctagaatcttcaacacttatggtccacgcatgaacatcgatgatggccgtgttgtaagcaacttcattgcacaagcactccggggtgaggcattgactgttcagaaaccggggacacagacccgcagtttctgttatgtctccgacatggtggatggacttatccgtcttatggaaggcaatgatactggccctatcaacatcggtaacccaggtgagttcacaatggtggaactggctgagacggttaaagagcttattaacccaagcatagagataaagatggtggagaacacaccagatgatccaagacagaggaaaccagacattagtaaagccaaagaagtgttgggttgggagccaaaggtgaagctcagagaaggacttcctctcatggaagaagatttccgactaaggcttaacgtcccaagaaactaaaaccacaagaaaacacagacggttttgagttcacgagagttgtcagctgttgagttatatgatgatgctattatactacaaagtggtgggtttttgtttggtctcatgtgttattcatattgcttttgttcgtagaaaaataagttgggaatgggtctccttgtgaggaatggctcttctttgtttttcagtatattgtggtatggttcctatttgtgtggttttaatgaaatttgttcacttaatttgctcatggaattacagttttaaaatcgttttacagtaactaaaataaaaacaattttttttaaaaaaaaaaaaaaaagggcggccgct

SEQ ID NO: 121823 - DNA, 521 bp, Arabidopsis thaliana
ggaaagctggtacgcctgcaggtaccggtccggaattcccgggtcaggccacgcgtgcgaagaaaagagtctcagcagcatcagctcgtccttaaatctgatccatcatcgtcactttctcccggcgaattccgttttatcgatttaagtaacgagatttgtgcaaagatgactcaggacgtggagatgaaagataacaacaccccttctcaatcgattatctcttcttctacctctactatgcagaatttgaaggagattgcagcactcatcgatactgggtcttacacgaaggaggttcgtcgtattgctcgtgctgtgcgtctcactatagggcttaggcagaaactcaccggctctgtgctctcttccttcctggattttgctttggttccaggatccgaagctcactctcgcctctcttcctttgttcctaagggtgatgaacatgacatggaagttgatactgcctcatcggccacacaagctgctccatctaagcatttacctgcagagctcga

SEQ ID NO: 121824 - DNA, 501 bp, Arabidopsis thaliana
cggacgcgtgggaagaaaaccaacatgaatccaactcaaaatcgaagaccgtgaagagcttgaacaatcccgcaaatctcaaccatccaccaccacaaccaccgcaccatcttcctcctccgccgcctcctctctccaccacctcatagacccaaaacacaaaaacccttcctccaaatccgaccgaatcggtctctcttaaaacactccatggaagtcgaagtcaagctccgtctcctaaccgccgctgctcatctccgtctcaccactctcctcactccataccacctcaaaacccttcaccaacgcaacaccttcttcgacacacccaaaaacgacctctctctccgccgcgccgtcctccgtctccgcttccttcaaaacgccgccgtttccgcggcttctccttctccgccgcgttgtatcgtctctcttaaagcgaagccaactctagctaatgggattagtcgtgtggaggaagatgaagaggagattgagtat

SEQ ID NO: 121825 - DNA, 582 bp, Arabidopsis thaliana
  unsure (1)..(582): unsure at all n locations
gaacatagcaagaaaagctgaactcgaaagcgctgcggttgatggaacaatggtcactctcgacttaacatctggttcttcagtcgagataccggtaggggcaagatttatcgggataccgggaacagaaactgcagagaatccacgaggagtcatggtggaggtgtattggcaacaagacgagtcaggntcattgtgcatctcaggacactccacagagatgccaattcctgaaaacattcccgtgacagatccggtggcaccaggacatggcggagtaaacttgttgggacggagaggacgaagacaagttcagggaattgtgattgatcctgagtttgctacttttactacaagcggttccacttcttcgcgacgtttttctagaagcggttcttcccgacgtttttcatcgtgaattgaactataatccgcccgcatacacatacactcacagttcttaacttaacggcttgcactctacacgtttttctggttcgttgttgtaggtttatacgaagaaaatcataggcgtgtttatttgacattgtgttttacgtaattatgatgtaaattagactg

SEQ ID NO: 121826 - DNA, 503 bp, Arabidopsis thaliana
aatacgactcacttagggaaagccggtacgcctgcaggtaccggtccggaattcccgggtcgacccacgcgtccggtcgtacatacaaacaaagagtggtgcacctcgtcaactcgacttcggacgagtctttgttatgtcaaggtctggctttgaatgatgacttgcagcgtgtcttaaccaattatgaagcaattgcttctggattacctggaacttcttctcagatcgagaagcccaagtccgagacaggaaaatcccttgttgatgttgatggtccacttattgatacaggggacagcagtaatcaggcgaacggagctacatcgagctctggtaacggggttctaaatcagttggccctccctgcaccacctgtaactaatggttcagccaattccaaaatagacctcctcagtggcgatgatcttgcccttgttcctgttggacctcctcagcccagcaagtccggttgcatcagatcaaaatgcactcgcccttat

SEQ ID NO: 121827 - DNA, 562 bp, Arabidopsis thaliana
  unsure (1)..(562): unsure at all n locations
accacgcgtccgcaatttttatagctttcttcctctccaaaaccacaccaaaaaaaaaaaaaaaaaatttgattttcagatccaatcaaccagagatgagagataacaacaataacaacacaagagaagaagagagaagcagttcttcaaagcagcaacaaccacaagctcctatgtctttgaagatcatagattcatgtctcagactaagtgtggttcctctcagtgttgcaaccatctggttaactgtcactaaccacgaatccaacccggactacggcaatttagagtacaactccatcatgggtctcaagtatatggttggtgtgagtgccatatctgctatttatgctctgctctctactgtttcttcatgggtcacatgtttagtctccaaagcttggctcttctttattcctgaccaggttttagcttatgtgatgacaacatcagtagcaggagcaacagagatagtgtatctacttaacaaaggagacaaaatagtgacatggagtgaaatgtgttcttcttatccacattattgttcanaactcacaattgc

SEQ ID NO: 121828 - DNA, 1229 bp, Arabidopsis thaliana
  unsure (1)..(1229): unsure at all n locations
nnnnnnnnnnnnnnnnnnnnnnnnnnnnnnnnnnnnnnnnnnnnnnnnnnnnnnnnnnnnnnnnnnnnnccacgcgtccgcggacgcgtgggcggacgcgtgggcggacgcgtgggtttgcttccttagacttctccgtcgattaacccttgccgagggtcatttttttttttcttgaattttttcaccaagtgttcgttcacggcattgcttgtcctccagtatgagtatctccggtgctgcagttggttcaggcagaaatttaagaagagcggtagagtttgggaaaactcatgtggttaggcctaaagggaaacatcaagcaactattgtctggttacatgggcttggggacaatggctcgagctggtcccagcttttggagacccttccccttccaaatatcaaatggatttgcccgactgctccttctcaaccaataagtttatttggtggttttccctccacagcttggtttgatgttgtggacatcaatgaagatggacctgatgatatggaaggattggatgtggctgctgcacatgttgcaaatctgttgtcgaatgagcctgctgacattaaattaggtgttggaggattcagcatgggtgcggcgacatctctatattctgcaacttgttttgctctcggtaaatatggaaatggcaatccataccctatcaatttaagcgcaatcataggcttaagcggctggcttccttgtgcaaagacattggctggcaaactagaagaggaacagatcaagaaccgagctgcatcgttgcccattgttgtctgtcatggaaaagctgatgatgtggtaccgttcaagtttggggagaaatcttcccaggctttgctttcaaatgggtttaagaaggtgaccttcaaaccttacagtgcacttggtcaccacacaatcccacaggagttggatgagttgtgcgcatggttgacatccacgctcagcctcgaaggttgatacttcctatgatgtagctttctgatgaaaacccttcaactcttgagagtttgattgaattggatgtttcaggatttcacaatgttttcattggaatatttgtgtaagacacattcgtctagtagcaaatcttctcctttggcacgtccnnnnnnnnnnnnnnnnnnnnnnnnnnnnnnnnnnnnnnnnnnnnnnnnnnnnnnnnnnnnnnnnnnnnnnnnnnnnnnnnnnnnnnnnnnnnnnnnnn

SEQ ID NO: 121829 - DNA, 1452 bp, Arabidopsis thaliana
  unsure (1)..(1452): unsure at all n locations
atgatttnnnnnnnnnnnnnnnnnnnnnnnnnnnnnnnnnnnnnnnnnnnnnnnnnnnnnnnnnnnnnnnnnnnnnnnnnnccacgcgtccgcaaccagttactgtcaaaaaaaataaatgaaaacgtaatcgaagaaaaggtcgtgttttctagtgttgcagaaaatggcaactactagtactactacaaagctctccgttctctgctgctctttcatttcatctcctctcgttgactctcctccttctctcgccttcttctctccgattccacgattcctcactgtccgaatcgcgactagctttagatcgagctctaggtttccggccaccaaaatccgcaagtcttcactcgccgccgtgatgtttccggaaaattctgttttatcagatgtctgcgcgtttggagtcactagcatcgttgcgttctcgtgcctcggtttctggggagagattggcaaacgtggcatcttcgaccagaaactcatccggaagcttgtgcatataaatattgggctagtttttatgctttgctggcccgctgttcagttctggaatccaaggagcacttttcgcatctcttgtacctggactcaatatagtaaggatgctattgctggggcttggagtgaccacgacgaaggaacaatcaagtcaatgagcagacatggagatcgcagggaactacttaaggggccggtttactatgtactgtcaatcacatcagcctgcatctactattggatatcatccccaatcgcgattgcggtgatatgcaacctttgcgcaggagatggtatggctgacattgtgggccggcgggttgaacagagaggttcttacacaaaacaaatattttgctggtagcattgaatggccaccgccgggtttctagcatctgttgcgtatatgtactactttgcttcatttggttacatcgaggaaagcgggggaatgattcttcgtttcctcgtcatctctatagcatcagctcttgtggaatcactcccaataagcaccgacactgacgacaatctcaccatttccttaacctctgccttgcgcggattcttactcttctaataataccctctcgttgttatgtatcatcaaataaagggtcgagcttgattgctgatatggaggtaaaactgcattcattgttcccatcttcttctgtatgtacgtattagtgaaacatctcatattgttgttgtccacaaatcttatttttcagctgcaattgcagttgggtacaatgttgtaatgttctatccattagtgagacatatgatgacgaacagtgacgcttctacaatttgtaacagatactcttttgtaacagatattcaatacatgtttgtttgttaaaaaaaaaaaaaaagggcggccgctctagaggatccaagcttacgtacgcgtgcaggcgacgtcataagctcttctatagt

SEQ ID NO: 121830 - DNA, 531 bp, Arabidopsis thaliana
atggctcagtatgtcaatataaacagtggattgttgaagacatatgcgtttgatgataccaccattggatcatggatgattggcgtccaggcaacatatatagacgacaatcgcctttgctgcagcagcacaagacaagaaaaagtgtgttccatggcatgatcactgcatagatgatcctcttgtcccagagcaaagacggcggtttctcatcgcattcatggcgctccgatactcttttggggcagattcttggaccggatactgaacttatcattagttttgttagaatgggagtatgattaggccattcattacagtttatgattagaggcatgcgtatcccttgagctttggagtaagaaaatggggaaatggtatagatgtgaatgaagtataatttttcctttggtatcatatcaccatcatttgtccgtccattctagcccaatctctggcaggcgtttaatgttcgaaccttaagtttgcatttttggttgctggtttttaaaaatgtgttagttaagactt

SEQ ID NO: 121831 - DNA, 575 bp, Arabidopsis thaliana
aacaagcgtcgagagatgttactccatgagaataccaaacccacttcgctctaataattcaaaagatttcactttctcaaacaaaaaaacttctctctttcttttctaatttctaaaaccctaattgaagttccaacaagatcgatcaaggagaagatggatctcgaggattgggaattagtactccccaagaacagcttcaaggatcttgatcttgatcatgacgaggatcatcatggagccatggtgatggactacttcctctgcccatctactaaagatcctctccccaagacagagtctcctccaagatccaaagtggtccctaaaaagattcttcaagttcccatagcttgggaagccgtgttggatcaagacaacacgaagatacccaataaccctgatcttgaaccggatccgcatccggatccggattcaaaaccgaccctttcgacggactctgtttcgtcaccaagagtttccttcaagatcatgaaggacactgaatttgccgacatgaaaattgacccaccagcgaggatcacgagtcctctgcctcagatcgatgctgctgc

SEQ ID NO: 121832 - DNA, 511 bp, Arabidopsis thaliana
  unsure (1)..(511): unsure at all n locations
gcgagagatgttactccatgagaataccaaacccacttcgctctaataattcaaaagatttcactttctcaaacaaaaaaacttctctctttcttttctaatttctaaaaccctaattgaagttccaacaagatcgatcaaagagaagatggatctcgaggattgggaattagtactccccaagaacagcttcaaggatcttgatcttgatcatgacgaggatcatcatggagccatggtgatggactacttcctctgcccatctactaaagatcctctccccaagacagagtctcctccaagatccaaagtgggtccctaaaaaagattcttcaagttcccatagcttgggaagccgtgttgggtcaaggcaacaggggggtccccattacccggttctttacccggtccgatcgggtcgggtttaaaaccgncctttggggcgttttttggcacaagggtttcctaaggtatggggnatnttttcngaannaaatttcccccggggtta

SEQ ID NO: 121833 - DNA, 455 bp, Arabidopsis thaliana
  unsure (1)..(455): unsure at all n locations
tgaagttccaacaagatcgatcaaagagaagatggatctcgaggattgggaattagtactccccaagaacagcttcaaggatcttgatcttgatcatgacgaggatcatcatggagccatggtgatggactacttcctctgcccatctactaaagatcctctccccaagacagagtctcctccaagatccaaagtggtccctaaaaagattcttcaagttcccatagcttgggaagccgtgttggatcaagacaacacgaaggtaccccaataaccctgatcttgaaccgggatcccgcatccgggttccggatttaaaaaccggcccctttcggacgggacttctgggtttcggttcaccaaaggaggtttccttttaaaagttcaaggangggccacnngnaattttncccggccaattgaaatttngnccccaccnaggggnggtttcaang

SEQ ID NO: 121834 - DNA, 791 bp, Arabidopsis thaliana
  unsure (1)..(791): unsure at all n locations
gccggcannnnnnnnnnnnnnnnnnnnnnnnnnnnnnnnnnnnnnnnnnnnnnnnnnnnnnnnnnnnnnnnnnnnccacgcgtccgctggatcgttgcctctttaatcattggagactataagctttattgctaagttagagaatctgaagaacctaagcttagattgctgcccgaaaatcaaaacgattttcccggagatgcctgccagcctaccagtcctgaatttaaagcattgtgagaacctggagaaagttgttgtaggagttgaagtgtcaactcacactaatctggatttgaaagtggagaattgtccaaaattcggggactacgtaatggttgaccacagtgatgtacctccaccacatgaatgctgatcataaaagaggctggagcaagatctacttacacagtactaaacatctggatcgttgcctctttaatcattttcatacttttttcctacgtgtgcctgaagctttgcgtgttgaataacgaccggcattgaaacattatcttgcgggttttatttttactgtttcatgtttctgtttctgttttaagatattttctgctgtaaaatcccaggcatagtgttctgttcttgtctgggtgaataagaccattgttttgattgtttttcttttctcaaatattatttgaaatttctctgtttgaaagatcttataagacagtttaaggctttacgataaaaaaaaaaaaaaaagggcgaccgctctagaggatccaagcttacgtacgcgtgcgtgcgacgtcataatcttctatagt

SEQ ID NO: 121835 - DNA, 458 bp, Arabidopsis thaliana
aaatacaaatatttctgagaacctcaagtttaattttgcggcttagatttaaattcgtctctcaaactcaaatatctgaaaaaacctttctggggtatagaaataagttacacgagactttcaatttctctgtatattttccttttgattcccagaaaatgtcactagattccactttctagcttgcgttttctcgggaatctgaagtttccttttgtgttgaatcgctgggaaaaatctgatggaagcagcttcaagttttttgtgtagaagtattcggattccgtccactactacggcgaccgcggcgttcacgttcactcgaccgccgttaaactacgtttgtgttgtcggagttcgtgttttcccgacgcggaaggtcttttgcagcggcgttaatggcggctccagtgttactaagaagaagccacgaaggaaaagtaacgtttccgataaac

SEQ ID NO: 121836 - DNA, 1197 bp, Arabidopsis thaliana
  unsure (1)..(1197): unsure at all n locations
cccacgcgtccgcccacgcgtccgtgatcttcttcctcggctacatctctccgacgcctctctctcgttccgattttggtttaatatttgatgggaacatcatctggttcgaatcatcctcaccaaatgttaccaccacgtcaacaacaacgaagtggaggaggacttgaaacagctctttcactagtctcttcagatcaagagccgcgtcgcgagtctccagcggagagtgcgagttctcaagaaacatggccactaggagacactgttgctgggaagaagtcaatgagtcaaaagacagagcctgattctatggaacaaactgtgaatgtgatgcaccatgtttcgaatgcggacaaggtatcggtacgggatatcgctagggaaagagttgagttagttgcagagagaatgcatcgattaccggatgagtttcttgacgagttaaagaacggtcttaagtctatccttgaagggaatgtagcgcagagtgttgatgagttcatgttcttgcagaaggttgttcagagtagaactgatttgagctctgtaacacttgttagagctcatcgggtgcagcttgagatacttgtagcgataaataccgggattcaggcgtttttgcatccgaatattagtctgtctcagccgtctcttatcgagatttttgtatacaagagatgtagaaacatagcttgccaaaatcaactacctgctgatgattgctactgtgatatatgtactaataggaaagggttttgtaacctttgtatgtgtacgatctgtaacaagtttgatttttcggttaatacttgccgctggatcggatgtgacttgtgttcccactggactcatacggattgtgctattcgggatggacagatcaccactggatcctctgctaagaataatacttcaggtccaggagagatagtgtttaagtgtcgggcttgtaaccgcacgtctgacctgttgggatgggttaaagatgtgtttcagcactgtgcaccgaactgggatcgagaatctttgatgaaggaacttgattttgttagtaggattttccgcggaagcgaagatcaacgaggtaggaaactgtttttggaagtgtgaggagcttattgacaagattaaaggtggttttgctgaagcaacttctgccaattgntattaangtttttccaagggatcgnatca

SEQ ID NO: 121837 - DNA, 1505 bp, Arabidopsis thaliana
aaaaaatccgacctttttttgttttctctctctagaagtctctctgttttcatctttctctctctctctctagctcttcttcctcgtttctggcttttctgggaattttgatcctttggcccccattgctcgcttgaattacgaatcagatatcgccgatcgtcgtagatctgcgttgatactgtccggctgagtaaacagggtgaacaaaaaccaaaaacagagagggggtttaaaaatcctgaagaaaatcgcatgaatttgtttggaagcctgattttttcatcttcgatttcgagccacttcacgacttgtcttctcatctttattcttcatttctctccccagcttaatagtaataataataataataatagtaatcgtaattccaataatctcgagagtaatcgtttgatcaattgaaaaaaaaatcatggagtccaggaaaaactctgatcgtcaaatgcgtagagctggtgagaggatgaagacaaggtcgccctccgtgattgtgatcggaggtggtttcggtgggatttcagctgctcgcactcttcaagatgcttcctttcaggttatggtactggagtcccgtgacagaattggtggacgagttcacactgattactcatttggttttcctgttgatcttggtgcatcatggctgcatggagtatgcaaggagaatcctctcgcaccagttattggaagacttggactgcccttgtatcgtactagcgggtgacaattccgtcctgtatgaccatgatcctcgagagctatgctctgtttgatatggatggcaaccaagttcctcaagaattggtaactccaagattggcgtaacgtttgagcgtattttggaagagatcaataaagtcagggatgagcaggagttcctgcatttcaatttctcaggctttctcaattgtcttttctaggaaacccgagctgaggttagaggggcttgcacacaacgtacttcaatggtatgtatgccgcatggaaggatggtttgccgcagatgctgaaaccatctctgcaaagtgttgggaccaggaggaattgttgcctggtggacacggtcttatggttagagggtatcgtcctgtcatcaatactctggcgaaaggtcttgatatccgagtaggccacagggttactaagattgtcaggcggtacaatggagtgaaggtaacgacagaaaacgggcaaacttttgttgcggatgctgcagtcattgctgtccctcttggagttttaaaatcgggaaccataaagttcgaacctaagctacctgagtggaaacaagaagcaatcaacgacctaggagtaggtattgagaacaagatcatactacattttgagaaagtcgggggggcgaaagtagagtttctaggagtggtagctgaaacctcctacggttgcagttatgtgttgaacctgcacagggccacgggtcatccggttctgggttacatgccggctggtcagcttgccaaaga

SEQ ID NO: 121838 - DNA, 508 bp, Arabidopsis thaliana
  unsure (1)..(508): unsure at all n locations
gtttctcattgttttgcttcaaattacgcattcgaatctgatcttcgttgatctctgtggaagaaacagataagagaaaatcgcatgaatttttttagaaaactaggttttaatccttcgattgcaagctacttcactaatacgagtcttctgatctcaattcttagtttttctcctcaattgccgatttctctctttcttttcgagcagaaatcgttagatcctttatcgctgtgtaatagtagtactaattttaataatcttgagagtaattactccgttcattgttgaatcatggagtccggaggcaaaactaatcgtcagctgcgtaaagctatttgcgtctcaacagacgagaagatgaagaagaagagatcaccttcagtgatagtgattggaggtggtatggctggaatttcagctgctcgcactcttcaagatgcttnctttcacgttgttgtattggagtctcgtgacagaattggtggacgagttcacactgattact

SEQ ID NO: 121839 - DNA, 614 bp, Arabidopsis thaliana
atgatttgccagcactatacgactcacttagggaaagctggtacgcctgcaggtaccggtccggaattcccgggtcgacccacgcgtccgcccacgcgtccgaagagaatgaacttctttcagccgcaccgaaagcacccagtttcacctctgatccaaagagaatcctgactgacgttgaacaaacacaagcccttgtgcgtaagctagactctgagaaaaaaattgaggaaaatgttttacaaggttcagaaactgaaaaatcaggtagagaaaagttacacagtggttctactggtccagttgtaatcataagggggttgacatctgtgaaaggccttgagggtgttgaattacttgacacgcttgttacatatctatggcgtgttcatggtctggactattacggaaaggttgaaacaaatgaagctaagggtttgcggcatgtgagagctgaaggaaaagtttctgatgcaaaaggagatgagaatgaaagtaaattcgactctcattggcaagagaggttgaaaggtcaagatcccttggaagtgatggctgccaaagagaagatagatgctgccgctactgaagctttagatccacatgtccgaaag

SEQ ID NO: 121840 - DNA, 618 bp, Arabidopsis thaliana
  unsure (1)..(618): unsure at all n locations
nnnnnnnnnnnnnnnnnnnnnnnnnnnnnnnnnnnnnnnnnnnnnnnnnnnnnnnnnnnnnnnnnnnnnnnnnnnnnnnnnnccacgcgtccgcttgttcgcagactcggttttctggtatggcttgtgaagcttatatatattttgtcaaagctcaaatcgagatggctttaggaaggtttgaaaatgcagttatggctgctgagaaagctagccaaatcgatccaagatgcaacgaagttgctatgttacataatactgttacattggttgctagggctcgtgctcgtggcaatgatctttataaatcagaaagatacactgaagcaagttcagcttatgctgaaggccttaggcttgatccttgcaacgctattctatattgtaatcgagcagcttgttggtttaaacttggaatgtgggaacgctcgattgaagattgtaaccaagcgctgcgttatcaaccaagttacacaaagccacttcttcggagggctgcctcaaatagcaagatggaaagatggggagctgcagtgagtgattatgaggccttgataagagaacttcctcatgacaaggaagttgctgaatctttattccatgctcaagttgcattga

SEQ ID NO: 121841 - DNA, 649 bp, Arabidopsis thaliana
  unsure (1)..(649): unsure at all n locations
nnnnnnnnnnnnnnnnnnnnnnnnnnnnnnnnnnnnnnnnnnnnnnnnnnnnnnnnnnnnnnnnnnnnnnnnnnnnnnnnnnnccacgcgtccgctcactgcatcaacaatggccagagagaagattgtggtggctggtggtaccacaaagagctggaaactactcttggggctgagaatatttgcattcatggctactttagctgcagccattgtaatgtcactaaacaaagagacaaagaccttggttgtggccaccattggtactgttcctattaaagccactttaaccgctaagtttcagcacacaccggcttttgtgttctttgttatagctaatgtaatggtgagcttccacaacttgttgatgattgtggttcagattttcagccggaaactggagtacaaaggtcttcgtctcctctctatcgccattcttgacatgctaaacgcaacactagtatctgcggctgcaaacgcggcggtgttcgtggcagagctagggaagaacggaaacaagcacgccaagtggaacaaagtctgcgacaggttcaccacttactgtggtcagggggnggngaattatcgagatttgcgggggnatttaatgnnccngggncgcgtttttttcggcttnnanaatttaagc

SEQ ID NO: 121842 - DNA, 572 bp, Arabidopsis thaliana
  unsure (1)..(572): unsure at all n locations
tgattgtggttcagattttcagccggaaactggagtacaaaggtcttcgtctcctctctatcgccattcttgacatgctaaacgcaacactagtatctgcggctgcaaacgcggcggtgttcgtggcagagctagggaagaacggaaacaagcacgccaagtggaacaaagtctgcgacaggttcaccacttactgtgatcacggcgcaggagcaatcatcgcagcattcgccggagtcattctaatgctcctcgtgtccgccgtctctatttcccgcctcttaatcaattctaaaaccttctccgcctccgccaccacaacctccgtcgtctaaaacatcgtggccaaaaattcagcaacatgtgtgtgaccattttatagatgttgtggcctactttgtgtgtttgtctctcaagtcactagcaaattgtgtaatgcactcctttgttctatcactttcacatttgtgaaaaaaaaaaaaaaaaaaaagnnnnnnnnnnnnnnnnnnnnnnnnnnnnnnnnnnnnnnnnnnnnnnnnnnnnnnnnnnnnnnnnnnnnnnnnnntagtatc

SEQ ID NO: 121843 - DNA, 637 bp, Arabidopsis thaliana
aagaactaccttcagttcatgaagacgagcaagtgctgcatatgcgccaaaggctttgaagtgaatagtccgagagtggtagaggccattttctatgattgtgttccggtcatcatatctgataactttgtcccgccatttttcgaggttttgaattgggaatcatttgcgatttttataccggagaaagatatcccgaatttgaagaagattctgatgtcgataccggaaagccggtaccggtcaatgcagatgagagtgaagaaagttcaaaagcattttctgtggcatgctaagccagagaagtatgatatgtttcacatgattcttcattcaatttggtataaccgagttttccaaatttctgtttaaaaattttgttcaacaattcaatgtacattttttacagataaaatttctgagtaaactcaatttacaaaaaaaaaaaaaaaaggggcggccgctctagaggatccaggctttcgtacccgtgcatgcgacgtcattgttttgtataggtgcacctaaatcaatttcctgccccgtgttttacaaccttgtaactggaaaaccccgatgttacccaactaatcgccttgtagaaaatccccctttcgccagctggcgttattaacaa

SEQ ID NO: 121844 - DNA, 695 bp, Arabidopsis thaliana
  unsure (1)..(695): unsure at all n locations
atgttctccnnnnnnnnnnnnnnnnnnnnnnnnnnnnnnnnnnnnnnnnnnnnnnnnnnnnnnnnnnnnnnnnnnnnnnccacgcccgtccgaccactttcttcccctaaaagatttcatctaaattcagtaaactcatctacgagttcttgtttttctttaaattttctaagagagagcctaagctgtttaatatagtcatctaatatttagagagatggtgggagagagaatgtggtggtggtcatcatcgtcgacgaaactccgatcaaaccttgaaagatttctcagaggaatcactccaaaacctccttctttctctttatcacagagctgcaagagtgatttgaacagtttgtggatccatgagaacaaagatgagattgaatatttcaggcttagtgatctttgggactgttttgatgagccaagcgcgtatggacttggatcaaaggtcgacttaaacaatggtgaatccgttatgcagtactatgtcccgtatctatccgccattcaaatctatactaacaaatctacagccatttctaggattcatagtgatgtggttgattgtgagagtgaatgttggagtgatgatagtgagattgagaagttgtctaggtcaatgagcagtggttctagcanaatatgggattctgcttctgatgattcgggttatgagatcgatggtactt

SEQ ID NO: 121845 - DNA, 508 bp, Arabidopsis thaliana
atacgactcactttagggaaagctcgtacgcctgcaggtaccggtccggaattcccgggtcgacccacgcgtccgataaaaaagaggaaactgttgatgctttgattacgaacgtgcaagtgcaagatcagcccaaggaagattttgaggctgctgcaatagagaaagagatatcagaacaagaacacaagttgaatgatctcaccgatgtccaagaagatattggtacatatgttaaagtgcaagttcctgatgatgaaataaaaggtgatggccatgattcagttgcagcacaaaaggaagaaactagctcaatagaggagaagagagaggttgaacatgtcaaggcagagatggaagatgcaatcaaacatgaagtttccgtagaagagaagaacaacacatctgaaaatattgatcacgaagctgcaaaagagatagagcaagaggagggtaagcaaacaaatattgtcaaggaagagatcagagaagaagagaaggaaataaa

SEQ ID NO: 121846 - DNA, 1405 bp, Arabidopsis thaliana
tgcagatactttgagggtcagctagcttcaatatcagaaggtgatgatgaactggaagtggagccttcaccagtcagagttaccgaggctgctgcaaaggtttctttgcttgaggaacagataaagcctcgtgccaatcttccacctttcctggttcctcttcgtgatcgacgacctgagagactccactacattggtgtctcttttgggcttactttggacctcttccgtttctggagaaaacataaatttgctccattctacatcagtcaaataccaagtgctgtgactggtgagcacacatgtatgcttctgaaaccattaaccttaagcaacgatgaattcgaagttgatgagtcggatgaactgggcttctttgctcccttctataaagatttcaggataaggttctctaaactgttgagtgataaattcaagaagatggattataaacttgcaatgagtgttttgaaccctaagatcaacttcccagaggttgatttgactggaaattcaccagatggatttttgaagaaactcgacggagttctttcaccttatgatatggagagattcagagcatacactgccaatctcgttgacttcaatctggtttatgacatctgcaaaactctagctcatcattattttcaagagaagctcccagtctcgctgtcgtatgttcaagcttctgtactcctgcgtttgggcttgcaggagtcagatttctcgagcatcgagagacaaatgcagttggagaggggccaaatatactctcttctattgaaggttggaaagaagttatacaaatatttgaatggaatcgcaacaaaagagctcgaatccaccttacctcggttgaaagatagagtgcttgaacctcacaaagtatcagtagacgaagatctcagggagggagcaaaagaagttgaggaacaaatgagggcaaggatagaagaattgttggaccctgagctacttgaccaatttgctattggggacaaagaagctgaggctttgcaaaagtcgaagatctcttcaagtggtcttatcagtatagagtccaccaaaactgataacaagaaagagaagccaagtggttttgataaatcagccaaaaagagaggcaatgataagcattcctccacatccaacaaaaagagaagagcctgagatggaggttgatgtcaacaattgtttttttgtaacagtgaccagaaaattttgatctttggtctttttacgaatttttgtaaccaggttgaataatttattaaaattatggtttgatcatacaatttttttaaaaaaacttacagaaaaaaaaaacaaaagggcggccgctctagaggatccaagcttacgtacgcgtgcgtgcgacgtcataactcttctaagtgtcaca

SEQ ID NO: 121847 - DNA, 444 bp, Arabidopsis thaliana
acgactactttagggaaagcacgtacgcctgcaggtaccggtccggaattcccgggtcgacccacgcgtccggcgccagctacacaagtaatatcgttactaatgcttcaggtgacaatgaagtatcaagtgctgtgacttcatctccattggaggaatctagttccggggaaaagggagagactgaaggggacagtacttgtttaaaaccagagcaacacttggcttcttcgccgcactcatatcctgagtcaactgaagttcacagcaatagtggctcccctggggtaactagtagagaacacaaaccagttcaaagtgctaatggaggacatgatgttcagagtcctcaaccaaataaggagcttgagaagcagcaaagcagcagagtacatgtagatccagagattacagaaaattcacatgcggaaacagaacctgagg

SEQ ID NO: 121848 - DNA, 531 bp, Arabidopsis thaliana
  unsure (1)..(531): unsure at all n locations
ccagaaccctaactactacaatctccaaggtgtttgccacaggcatttgtctgatcacctatcagagctggttgagaacaccttgtctgatcttgaagccagtaaatgcattgaggtagaggatgagatggaactctctcctctcaaccttggtatgattgcatcctattattacatcagttataccaccattgagcgcttcagttcactgttgtcttctaaaaccaagatgaagggacttcttgaaatcttaacatcggcttcagagtatgacatgattcctatacggcctggcgaagaggacaccgttcgaagattaatcaatcaccagaggttctcttttgaaaacccaaaatgcacagaccctcatgtgaaggcaaacgcgcttcttcaggcgcatttctcaaggcaaaacatttggcgggaacttggcaatggatcagcggtgcatgtccttctatctgcaaccagacttcttcaagcggatgggcgattgtgatttcagcaaatggcttggtgaanttnnccttc

SEQ ID NO: 121849 - DNA, 841 bp, Arabidopsis thaliana
  unsure (1)..(841): unsure at all n locations
atgatactgccnnnnnnnnnnnnnnnnnnnnnnnnnnnnnnnnnnnnnnnnnnnnnnnnnnnnnnnnnnnnnnnnnnnnnnnnccacgcgtgcgaaggattatcgttcacttaccagctcttatatctgctggacgctactggattttattctcttgggctcaagctcttgggattcaagtttgtagagctacagggcaagaactgatggatacatcctcaaggattcaaagattcggatcatgagcgtgagagacttcgtggtcctccatggttaaaaacggtgcaaggggcacttcttagctgctcatatgctgtgcttgactatgcccaaaccggtctaattgcagcagtttttatcttcaaaatgatggaatggtggtatcaatccgctgaagagagattatcagctccaacagtgtaccctccacctccaccttctccagccccaaagatggccaaagaaggaatccctctacctcagacagatccctctgtgctttttgcagcatnnagccananggactgtctgaagtagaggatcctctgtgcttatgctagacatcgtcaaatactaggtgcactggcttggataggttttgcttggttggattatattggtcaaaggcgagcgaaggccgtgactcgtggcaccggagtgataatnnnnnnnnnnnnnnnnnnnnnnnnnnnnnnnnnnnnnnnnnnnnnnnnnnnnnnnnnnnnnnnnnnnnnnnnnnnnnnnnnnnnnnnnnnnnnnnnnnnnnnnnnnnnnnnnnnnnnnnnnnnnnnnnnnnnnnnnnnnnnnnnnnnnnnnnnnnnnnnnnnnnnnnnnnnnnnnn

SEQ ID NO: 121850 - DNA, 516 bp, Arabidopsis thaliana
atgatcccgacgagtcctctgttactcatttttacattgtaaaaaaaaacttcttatcttctctacgtgaataagaatctgaagagtcattttctcaagaatgacgtggctaaaacaaatgtggtcaagcattttagtgctagccgtggtggtgatcggagccagagctgtgcccatcacgtatcttgaatctgcagtggctaaaggagctgtgtgtttggatggtagcgcgccagcataccatttcgataagggatcgggctcaggagtgaacaattggatcgttcatatggaaggaggaggatggtgcactgatatagctacatgcgttcaacgtaaaagtacaatgaagggttcttctaagcttatgaacaaagactttggtttctccggtatcttgggtggcaagcaaagcaccaatccagacttttacaattggaatagaatcaaagttcggtattgcgatggttcatctttcaccggtgatatagaagctgttgatccgacgcacaagct

SEQ ID NO: 121851 - DNA, 608 bp, Arabidopsis thaliana
gatacgtccagctctaatacgacttactttaagggaaggtgggacccctggcaggacccggcccgaatttccgggtcgaaccaagccgtccgcccagccgtccgctcatctttcttgcgacgggccctgctacccggtgcgtgacaggttgaatcattctcctccgattcacggtgattccggcgactacagactcaacatttaataagccgatctcttacatggtacgagctcggacaaattgaagaatacaaaggtccgagaaataatttggaataatggcgtcttcatcggattcatggatgagagcatacaacgaggctttaaaactctctgaggagattaatggaatgatatcagaaagaagttcatcggctgtcacagggcctgatgctcagcgtcgtgcttcagctatacgaaggaagatcaccattttcggtaacaaattagatagtctgcagtctcttcttgctgaaattcatggaaaacctatttcagagaaagagatgaatcggcggaaaggatatggtagggaatctgaggtcaaaagcaaaccagattgcgaatgcttttaacatgtcaaactttgccaatagggacagcttgct

SEQ ID NO: 121852 - DNA, 409 bp, Arabidopsis thaliana
cccacgcgtccgctgtatgggaagttgctgttcagatcggagattctggagatattcagtggcatgcatttgagttcgtggttgtgtgtaccgggaaatacggcgacgttccaagaataccagcttttccggcaaagaaagggccggagatgtttcaaggaaaagtaatgcattcgatggattactgcaagttagagaaagaagaagcttctactctcctcagtggcaaaaaagtagccgtcatcggcttcaagaaatccgccattgatttggctttagagtctgctttagctaatcaaggggaaggaggaaaagcttgcacaatggtggtgagaacaactcattgggggatcccacattattgggtgtggggcttaccattcttcttgttctactcttcgagagcttc

SEQ ID NO: 121853 - DNA, 497 bp, Arabidopsis thaliana
  unsure (1)..(497): unsure at all n locations
cannnnnnnnnnnnnnnnnnnnnnnnnnnnnnnnnnnnnnnnnnnnnnnnnnnnnnnnnnnnnnnnnnnccacgcgtccgccaaaggcattggcgtgtagacatgatcactgctgttcttcacccttgttcttcggcgtctctctctcttcccaaccgtcctcctcttagagtttcttcttgttcctccaggtacgccatccttggtgcaggttttgctggaatctctgttgcctggcacctgcttaaggagagtccaaaagagctgagattaagtgttgacgtatatgatgaagttggcataggaggtggtgcttctggtgtttctggaggactcctccatccttattctcctaaaggaaagctactttggcatggtgctgagtgttggagagaatgtttagagctcttaaatgtggctgaaacagctgcttcttctagttaccaatctacggagaacagagactttagcgagagtttcggaaattntatggttcg

SEQ ID NO: 121854 - DNA, 588 bp, Arabidopsis thaliana
aaaaaagagagagagagagagagagagagagagagagagagagaccccacaaagagcactaatcttcacaaccctaactccgatttttctcacacctcccaatctctctttctttctctctgatgaaaagctaacggaaaatggggaaatacataagaaagagcaaaatcgacggagctggagctggagctggtggtggaggtggaggcggaggtggaggtgaatcctctattgctttaatggatgttgtttcaccttcttcctcttcttcacttggtgttttaactcgagctaaatctctagctcttcaacaacaacaacaacgctgtcttcttcaaaaaccctcttctccttcttcgttaccaccgacttctgcttctcctaatccaccgtcaaagcagaagatgaagaagaagcagcagcagatgaacgattgtggttcgtatcttcagctacggagtcgtcggcttcagaagaaaccaccaattgttgtgattcgttctactaaacggaggaaacagcaacggaggaatgagacatgcggaaaaaaccctaaccctaagagtaatttcgattcgattcgtggag

SEQ ID NO: 121855 - DNA, 953 bp, Arabidopsis thaliana
  unsure (1)..(953): unsure at all n locations
tatacgactcatatagggaaagctggtacgcctgcaggtaccggtccggaattcccgtgtcgacccacgcgtccgcttctgttcatcaaagaaaacgaaacccatttctcaaaatccaaaattttcaaaaactcaaaactcatcatgggtttcatttcttcttcatcaccagtagaagagtctcattaccatacacacaagatcttccttttctccaactacatccttctcggcgctgcttcaagttgtatcttcctcacactctctctccgtctaatcccttccatctgcggattcctcctcatcctcctccacgccaccacaatcgccgccgcagtctcaggctgcgctgctgcatcttgcggaagaaaccgttggtacgccgctcacatggttgcaactgtgctcactgctatattccaaggctctgtctctgttctcatcttcaccaacacgtctaaattcctcgggagtcttaagtcgtatgtgcgtgaggaagatgctgctgtgattttgaaactcggtggtggtctttgtattgtgatcttttgtcttgattggatcgttcttgtgtgtgctttcttcttgaagtactatgcttatgtcgatggtggtgatggcgttgcgatgaagagaactggtaaggttcagagtgaggagaatccgaaggactggccatggccgttccaagtttaaagtttgtgtccttttgttttgtggtgagaactgttgagttagatcaatatcaaatgttggttttatggttctgtttcggtgggtattattgtgatttgttcatttgttttttgagtgtttgatgtaattcgtcaatgatctgttacatatataaagtcttttcttataattaaaaaaaaaaaaaaagnnnnnnnnnnnnnnnnnnnnnnnnnnnnnnnnnnnnnnnnnnnnnnnnnnnnnnnnnnnnnnnnnncgcc

SEQ ID NO: 121856 - DNA, 541 bp, Arabidopsis thaliana
taggtccactatagaagagctatgacgtcgcatgcacgcgtacgtaagctcggaattcggctcgagcgaagacgaagatacaagcgtcgatcgatggggagaaaacgcagagttaaatcggagtcgtctccgttcgattcatttccggaagattgcatctcctacataatctcttttacaaatccacgcgatgcgtgcgtcgctgctacggtttcgaaaacgtttgaatcgacggtgaagtcagatattatatgggagaagtttcttccggcggattatgaatctctgattcctccatcgcgagttttctcatcgaagaaggagctctatttctctctctgtaacgatcctgttctattcgacgatgacaaaaagagcgtatggttagagaaagcgagtgggaagaggtgtctgatgttatctgcgatgaacctctcaatcatatggggagataatcctcagtattggcaatggattccaattcctgaatctaggtttgaaaaagtagcgaaacttcgcgatgtatgttggttcgagattc

SEQ ID NO: 121857 - DNA, 837 bp, Arabidopsis thaliana
  unsure (1)..(837): unsure at all n locations
ccgnnnnnnnnnnnnnnnnnnnnnnnnnnnnnnnnnnnnnnnnnnnnnnnnnnnnnnnnnnnnnnnnnnnnnnnccacgcgtccgcggacgcgtgggatccaaagatctgaagcttcagatccttctcggctaaggctaagtcacaaccttggtctgagtaaatggtggacgctgttgtaacagtgtttttagagaaaaccttgaacatcctcgaagaaaaaggccgaaccgtatcggactaccgaaaacagttggaagatttgcaaagcgaattgaaatatatgcagtcttttctcaaggatgcagagaggcagaagagaactaatgaaacgttgcgtactcttgttgcggatttacgagaactggtttacgaagctgaggatatacttgtggattgtcagctcgcggatggtgatgatgggaacgagcaaaggtcatcaaatgcgtggctttcgcggcttcatcctgcccgggttccgttgcagtacaagaaaagcaaacgtttgcaagagatcaatgagaggataaagaaaataaagagtcaagtagagccttatttcaaattcagnancgccgagtaatgttggaagagataatggaactgatcgttggagctctncgntgtatgatcatactcaggtggtttgttttngnaggagataaaaggaaaattcaagggagtggctcttttcggtncaaacggagagccagctttttggttaatgggccttttctttngatgggaggggctnaggtaaactacanttgntnaagnaagtgttcaaatncaaaggngntcggncatcgnttngaagganggttatgggttcctgttt

SEQ ID NO: 121858 - DNA, 588 bp, Arabidopsis thaliana
  unsure (1)..(588): unsure at all n locations
cccccgacttactatagggaacgctggtacgcctgcaggtaccggtccggaattcccgggtcgacccacgcgttcgcccacgcgtccggctcaccgtcgcacctccttcattttttctctctctctcaaactcgtctctaaaactcgtccgtcgattaattcctcgttagtctcaggtttgatagaatcattgcctgaggcatctaataatgggaacaccagagacatctcgggagccttgccctgatcgtatactcgatgatatcggtggtgcttttggtatgggagctgttggaggatctgcctttcatttcattaaagggacttacaattctcctaaaggtagtcgctttgttggaggaacacaatcggtgagcatgaacgcacctcgtactggaggcagttttgctgtttggggaggtttattctcgacatttgactgtaccatggtgtacctaaggcaaaaggaggatccttggaactctatcattgctggtgctgcaactggaggggtttctgtctttgcggcaaggggcttggtctgcttcgagatcaagctatttttggaggggttttcnttcctttntg

SEQ ID NO: 121859 - DNA, 540 bp, Arabidopsis thaliana
  unsure (1)..(540): unsure at all n locations
atgatcctgccagctannnnnnnnnnnnnnnnnnnnnnnnnnnnnnnnnnnnnnnnnnnnnnnnnnnnnnnnnnnnnnnnnnnccacagggtgcgctctctcctatatctctctctcgctctcctccccctttccgccgatcgtcctttccccaccgtcgagtttttccctatccatctccgggtacgactttttctctctgtttctaatcctacgccgcgatgttgtggatggtgattttctgtgttccgatctagtcttaggttttccttttgtaattcctgaaatgggttttgatctgatttgaaccttatcgattttccgattcatttttagggttcttcactttatctattgtagtttggtttcaagttggtcgtcgggtagttcaatttttcttcttttggtttgtttcaatgtctcattagcaggctttacgttgcacaccagatgtctgttgatctctgcaagaagaatccatcttttctttggtgtgactgtggttatatgagcagggggagggttggggggtttcagatt

SEQ ID NO: 121860 - DNA, 748 bp, Arabidopsis thaliana
tccacggtctggatgacggtgttaataaacttgatgtcgaattcgcggccgctaaagatcaactcttaaactgtaatatcaagcatatgacaaatagtttgctggaaatcaaaacagtatagttaaacaacatgcatcatcctgctaaatagaagaagcattttaaatccacagtttggttttgttctgtttgttttttcacctccaagaggaaccaccaagctttatcacttcttctgaacttgaatctttccttgttccaaatccttcatcccttttctgactacttgcgtctccatacaaatcttttagctttgcgagattgctgttcactgtcaccgccgatttctctttgctggctactatctctttttagggagtcgggttcacgcttcaatcttgcacacttcctgctccctacttctggcttctgctcctgcttctccggtcatggctacttatggcggccccataatcattgcgcctgcttctactatcatagtcacgccttgatctcctatcattaccataatccctttccctttctctgtatctatccctccccctctctctttcgcccgggctttacgttgcacaccagatgtctgttgatctctgcaagaagaatccatcttttttttggtgtgactgtggttatatgagcagggggaggttgtggtgattttcagattatcttcttcaggcactggacttgacttgtcttcaattcctcgacttatctctcttg

SEQ ID NO: 121861 - DNA, 384 bp, Arabidopsis thaliana
cgccactctctcctatatctctctctcgctctcctccccctttccgccgatcgtcctttccccaccgtcgagtttttccctatccatctccgggctttacgttgcacaccagatgtctgttgatctctgcaagaagaatccatcttttctttggtgtgactgtggttatatgagcagggggaggttgtggtgttttcagattatcctcttcaggcactggacttgacttgtcgtcaattcctcgacttctctctctttcttcttctcctctcttctttctcgtttctctgtttttttttatctgcttgatttgatcaaagggtattcgtttctgcggctcctcgttactgtgaacttgaagacttagttttctttgctaaactc

SEQ ID NO: 121862 - DNA, 980 bp, Arabidopsis thaliana
taatacgactcacttagggaaagccggtacgcctgcaggtaccggtccggaattcccgggtcgacccacgcgtccgctcagctcctcctccgctcgttcccgatcctcctcgacaccagggtcccaatgaccacgagaaaggggcctccaagcaggttggaaggcgggagcgtgctaaaccggatccatcgaagcaccaccacaggtctcatcttcctcattctaagaaaatcgagaccgaagaagagaggaggcttaggaagaagagggagttagagaaacaaaggcaagacgaaaaacatagacagcagatgaaaaattctcacaagtctcagatgcccaagggacacaccgaggagaagatgccgacgcccctactcaccaccgacagggtcgagaataggttaaagataccaaccaccttcatctgcaagctcaagttccggaatgagctccctgaccctagtgcactgcttaagcttatgaccattaaacgggataaagatcaatttacaaagtataccatcacatccctggagaaatattggataccaaaaatctttgtcgggcctgatcttggatacccttggatctgcttgaacttagtgtgacaacccctccaaagtcaggcacctcttgccctgaagataaaactcctgcggatgatacgctgtacacctataagaagatgcatccggaggaagaagacctactgttaaggcttggtgggtcgtaaacaatacatttttcttaataacatcggagaaatggtacggaaacagcaaggactgcagagtaaggaggtcacatttgacatctacataaaagaaaataagtttggacatcttaggtgcaggtggacctatgcacataaaactgggcggtaagtgtacctgtgcttttatgggcatgcactgtgggcaatttgggctcttgcgattgatctggaggggcctgatgggaacatagcgggctggaag

SEQ ID NO: 121863 - DNA, 540 bp, Arabidopsis thaliana
cagctccctacaactcatttagggaaagctggtccgcctgcaggtcccggtccggaattcccgggtcgacccacgcgtccgcggacgcgtgggcctcaattcaaccagctccaagctcctcctcctccgccacctccctcagctcctcctccgctcgttcccgatcctcctcgacaccagggtcccaatgaccacgagaaaggggcctccaagcaggttggaaggcgggagcgtgctaaaccggatccatcgaagcaccaccacaggtctcatcttcctcattctaagaaaatcgagaccgaagaagagaggaggcttaggaagaagagggagttagagaaacaaaggcaagacgaaaaacatagacagcagatgaaaaattctcacaagtctcagatgcccaagggacacaccgaggagaagaagccgacgcccctactcaccaccgacagggtcgagaataggttaaagaaaccaaccaccttcatctgcaagctcaagttccggaatgagctccctgaccctagtgcacagcttaag

SEQ ID NO: 121864 - DNA, 554 bp, Arabidopsis thaliana
ggtctctacgactcacatattgggaaagctggcacgcctgcaggtaccggtccggaattcccgggtcgacccacgcgtgcgcccaaattgtcttcccagaggcgaggacacacaacctcaatctgttcgtcgctgtcgcagatcggagagatgggtgtcgatttggaatcggtgtcggaagcaacctcgggagctattgggtcgcttctgagtacaacgatcttgtatcctcttgatacatgtaaatcaaagttccaagccgaggttcgagctcgtggtcagcaaaaatacagatatctttccgatgttatgtgggaggcaatttctaaaggacaagtcttttcactgtatcaaggccttggaactaagaattttcagtctttcatttctcagctcatctacttttatagctatagctatttcaagagagttcatagtgaaaggactggttctaaatcaattggaactaaggctaatttgctcattgctgctgctgctggggcttgcacttgtgtcttaattcagcctctagatacagcttcatcaaggatgca

SEQ ID NO: 121865 - DNA, 360 bp, Arabidopsis thaliana
  unsure (1)..(360): unsure at all n locations
aaagcatctacagagaaatctgaccgcaataatggcgaataacgaagattcaaactccaatggactagactcgtttgatgctgttaaacaacgtttcaaagatcgatcaaagaaagttgttcagacgagagagttgttgtctaaacaagcggtacaaacgcgtgagatcttatcgaaacaagccgttaagatcgctaaacaagccgaagaacatgagagattcatcaataaggtgacacatctcgttggtgtgcttggatttggaggtttttgtttcctacttggtgcaagacctcaggncattcctttagtttactgtttcttctatgtgatctttgttcctcttcgatggntatatta

SEQ ID NO: 121866 - DNA, 506 bp, Arabidopsis thaliana
cttcgccttcctgtctccaccagctccctccttctcaatcattagcttcttctcttctcttctctcacagagagagtaatcacaagccaagtgagaaaaagaaaacactaaacccagatcgaaaaccatgtctattaacaacaacaacaacaacaacaacaataacaacgatggtcttatgatctcatcaaacggagctttaatcgaacaacaaccatcagtcgttgtgaagaaaccaccggcgaaagatcgacatagcaaagtcgatggaagagggagaagaatccgtatgccgattatatgtgctgctcgtgtttttcagctaacgagagagcttggtcataagtcagatggccaaacaattgaatggttacttcgtcaagcagagccttctattatagctgcaacaggaactggtacaactccagcgagtttctcaactgcttctgtctctatccgtggagccaccaattctacttctttagatcataaacccacttctttac

SEQ ID NO: 121867 - DNA, 468 bp, Arabidopsis thaliana
aaatctgattgatatagaaatcgaaactcaaattggagaacattcgagaagctttggatttttgaatcacgaagacatggaaaaaacagaatctgtatcaggaaaggggaagagagtgattgttatcggcggcggaatcgccggctctctcgcttcgaaatttcttcaattcgattccgatctcaccctcattgatccgaaggagtattttgagattatttgggcaagtttaaggtcaatggtagagccagcttttgctgaaagatcggtgataaaccacaagaagtatttacaaaatggtcgtgttgtgacttctccagcggttaatatcacagacaccgatgttttgaccgcggatggtcttgtctttgggtatgattatcttgttattgctactggtcacaatgatgtgcttcctaaaactaggcaagagaagttttctcaataccaaacagaacatgagaagat

SEQ ID NO: 121868 - DNA, 492 bp, Arabidopsis thaliana
cgcctgcaggtaccggtccggaattcccggttcgacccacgcgtccgggcggctacaacgagctccggcgacgaaccaccggaaacaaaatcaccggcgcaattgattccgttgttatcagaagacgttgctctcagttgccttgctcgcgtccctagatgtcactatccaatcctctcactcgtctccaagactttccgatctctcccaacatcacctcttctctacgccacgagagctctcgtcggagccactgaaaacatcctctacgtagcaatccgtatacctcctgaatctggtgcgtgttggttcactctcctccatcgaaccttatcgaactcaacgaattcgaaaatgcttgttccaatcccatcttgtccttcaccgtctctagtcggatccgcttacgttgtggtagattcagagatttacgtgatcggtggatctattagagacgtgccttcttcgagcgtgggggttctcgattgcaga

SEQ ID NO: 121869 - DNA, 521 bp, Arabidopsis thaliana
  unsure (1)..(521): unsure at all n locations
nnnnatgaatcgccnnnnnnnnnnnnnnnnnnnnnnnnnnnaaaataccagagagcgagaaaagctcttatcttcttcatcttccccgcggccgagaggaccaggtcgtttaatacagaacgtgacacagttcgctgatgctcaattcaaacaattctctactcgttatggacaacaagttatagacattctcgattttccaatcaagctcgtcttgtctcctttcactctcgcctttgatatcgctggctctgcacctcgtggttttggcatccctgagttcatctccaaaatttcgtatctctctgtttttgcggttgctacgcttggaacttatgacattgcattggatttgggaaagaaagtcatatgccaaagggattgcaaaacttgtaatgggtggcaggcattacggtgcactatgtgcaaaggaacagggagtgttcattaccaaatcaaagattacaacttgagaagtggagagaaaccaacagcagattgtgtcgcagatgctatagttg

SEQ ID NO: 121870 - DNA, 754 bp, Arabidopsis thaliana
tccgcaattcccgggtcgacccccgcgcccgctcttctcttccgcaccgcttttgaaaaacggcgacgcattgtctccattcaatcgccggaaaattagaagagaagatggcggcgccggaagctccggttaagtacgtcggaatatgtaaggattccgccgctttcaagcttatgaaatcgatgggttgggaagaaggagaaggacttggtaaagataagcaaggtatcaaaggttatgtgagagttacgaacaaacaagatacatctggtgttggtcttgataagccaaatccatgggcatttgatacaactcagttcgataacattctcaagaaattgaaagtgcaagctgctcctaccaagactagcaagaatgatgatgattcagataaggaagatgaaagtgaagatgatgctgtcaaatctgagcctgccaagttgaagaccgttgctaaagtcactcgtccacaaggaaggtataaacgtagagagaaagggaagcttgtcaattcatactcgtctaaagatcttgaaggaatactggttaagcgaactgaggatccttctcctgcagtttgtgacatagccgattctatggatattgaaattatatctgggggcccaagatgcttgtattaaagccccaaaattggaggccccttcttccggaactgggcgggggatttaaatcccgggtttgctcgggtggtcttctgggggcccagtcgggccaaaagaaatttgaagctagc

SEQ ID NO: 121871 - DNA, 668 bp, Arabidopsis thaliana
agaggtcattagcttccttctttcaactgaaattattcctctgtgcctccgtaccatggaaatggggagtgagctgtcaaaaacagtggcaacatttattgttcaaaagatactgttggatgatgtggggatggattacatctgcacaacagcagagcggttttttgcagttggccgagtgttgggaaatatggttcagtcacttggggagcagccttccccgcgccttttgaagcatatcattcgttgctatctccgtttatcagacaacccaagggcttgtgctgcactcgcaagctgtctccctgactcgctacgagatggatcctttagcaattgtcttcgcgaggatccaactgcaagaaggtggctgcaacagttggtgcacaatgttggagttggtcgcgtcccaacacatcaaggtggaggatttgagcacatgctttgagctgaatccatctcaaacccatccatggagtgtgtttcttctgtttttgtttctaattatacatgtgctttttaatgccttaacttagatgatgggttataggctttttagtctgtttgaaattcttattgtaattatttttaagctctagaaccaatcccccagaatgcataagtcttgggataataaaagattggttacaaaagaaaaaaaagaaaaa

SEQ ID NO: 121872 - DNA, 511 bp, Arabidopsis thaliana
tatacgactcatatagggaaagctggtacgcctgcaggtaccggtccggaattcccgggtcgacccacgcgtgcgcccacgcgtccgcccacgcgtccgcccacgcgtccgcggacgcgtgggatcctcttaatcggcttatcggatccgaatccggacccgaaagcctgaaaacccgacgattaattgcacgatgtccgatgctccgtcgtcttccccggatgccacggcgtcgcactggtgctatcactgcaacaaacgcgtcgtcgttgaaaccttagatgactttgtcgtgtgctgcgaatgtaacaaaggtttcgtcgagtcaattcaaccgactcccgccgcttattcatcgccggcgccaccgcagccactttccccagatctgaatgtagaagactccagtattggctcgcatttcctccagatgctccgcttgttagcccacgcgccttctcagcgttcaccaccacgacaccttgatgttttatcttacgaagatgatttc

SEQ ID NO: 121873 - DNA, 517 bp, Arabidopsis thaliana
  unsure (1)..(517): unsure at all n locations
nnnnnnnnnnnnnnnnnnnnnnnnnnnnnnnnnnnnnnnnnnnnnnnnnnnnnnnnnnnnnnnnnnnnnnnnnnnccacgcgtccgtggagttctctacctcaaaacgtccggcgacgacagcgacggcggcggagtctgtacatttccgtcttctctgtccggcaacaagaactggtgcaataatcggaaaaggcggctcagtcattcgacacctccaatctgtaaccggttcaaaaatccgcgtcatcgatgatattcccgttccttcagaagagcgtgtagtgttgataatcgcacctagtggaaagaagaaggacgaatcgaatgtgtgtgattccgaaaaccctggctctgaagagcctaagcaagagaaagggagcgagtgtgcggggactagtggtggagatgacgaggaagcgccgtcgtcggcgcagatggctttacttagggttttcgaaagaatagtgtttggcgatgacgctgctacggttgatggtgatgaattggataaaggt

SEQ ID NO: 121874 - DNA, 627 bp, Arabidopsis thaliana
  unsure (1)..(627): unsure at all n locations
nnnnnnnnnnnnnnnnnnnnnnnnnnnnnnnnnnnnnnnnnnnnnnnnnnnnnnnnnnnnnnnnnnnnnnnnnnnnnnnnnnnccacgcgtccgcaatgtcatcgccggtgaagaagatgaagaagaagacgacgacgtcgccgatactctcaccgacgccgcattcgacccagattttatcacttcctgttgatttgctaataagtatcctcgcccgcgtctcgagattggactacccaattctctctctcgtctccaagagctttcgatctctcattgcttcaccggagctttacgagactcggtcactcttaggccgcacagagagctgtctctatctgtgcttagggatcccttctgactttaaccctcgctggttcactctctgccgaaaacctaagccaagtgggcatgttatggcggcaatctcaatccccaattctcgtcctgtacattgctctggtctcgttgctgttggttctgatatatacaacattggcggatccatcatcaatgaacacttctctagtgtctcgttattggactgccggtatcacacgtggcgtgatgctccaaacatgttgtggggggattaaannagcaatntattntgggaggnntttttc

SEQ ID NO: 121875 - DNA, 528 bp, Arabidopsis thaliana
  unsure (1)..(528): unsure at all n locations
nnnnnnnnnnnnnnnnnnnnnnnnnnnnnnnnnnnnnnnnnnnnnnnnnnnnnnnnnnnnnnnnnnnnnnnnnnnnccacgcgtccgcccaatcttaaagacaaagccattagaaagagaaagtgagtgagagagagagagaaactagctccatgttcgaaacagagcatcatactctcttacctcttcttcttctcccatcgcttttgtctcttcttctcttcttgattctcttgaagagaagaaatagaaaaaccagattcaatctacctccgggtaaatccggttggccatttcttggtgaaaccatcggttatcttaaaccgtacaccgccacaacactcggtgacttcatgcaacaacatgtctccaagtatggtaagatatatagatcgaacttgtttggagaaccaacgatcgtatcagctgatgctggacttaatagattcatattacaaaacgaaggaaggctctttgaatgtagttatcctagaagtataggtgggattcttgggaaatggtcgatgc

SEQ ID NO: 121876 - DNA, 416 bp, Arabidopsis thaliana
ataaaatcaaaactaacaaaaaggaaaagaagaaaagaaaaagtatctcaccggaaacgatttcttcgccgattccaagacttttcttcctaagctttttaacagatccggtgaaaatttcaaaatccgaagaattctctaaagctagggtttcttaattcacgagacggaggtgatataattcccccccgtcgtagctatgatgatttcgagaggtttgtttggttggtctccgccgcatatacaaccgttaactcctgtttctgaagtttccgagcctcctgagtctccatctccttaccttgatcctggtgctgagcacggtggtacaggaacagcggcgcaagcggatgatgaggaggaaatggaggagccggaggagatggagcctcctcctgctgctgttcctttctctc

SEQ ID NO: 121877 - DNA, 430 bp, Arabidopsis thaliana
acccagcgcgtccgcgactctctcaaacttcactttttgccttctccttagatcaaatcttcttcttcttccttctctgttctcgacgaccttctcaaattcgatctcaactcaaaacatttgtctgatccattaatcggattcagatttttgtgaagattcaacaacagatctgtgagtccattggagtatattactattcatagtgatacaatgacaagggttacacgcgattttcgggattcattacagagagatggtgttcctgcagtatcagcagatgtgaaatttgcttcaagtagatttcctaattatagaattggagctaatgatcaaatatttgatgttaaagacgatcctaaagtgatgtccatgaaagaggttgttgcgcgtgagacagcgcagcttatggaccagcagaaacgtttgt

SEQ ID NO: 121878 - DNA, 382 bp, Arabidopsis thaliana
ctcagaccaaatcttcttcttcttccttctctgtgcgcgacgaccttctcaaattcgatctcaactcaaaacatttgtctgatccattaatcggattcagatacaatgacaagggttacacgcgattttcgggattcattacagagagatggtgttcctgcagtatcagcagatgtgaaatttgcttcaagtagatttcctaattatagaattggagctaatgatcaaatatttgatgttaaagacgatcctaaagtgatgtccatgaaagaggttgttgcgcgtgagacagcgcagcttatggaccagcagaaacgtttgtctgttcgtgacctcgctcataaatttgagaagggtttggctgcagctgctaagctatctg

SEQ ID NO: 121879 - DNA, 382 bp, Arabidopsis thaliana
cccacgcgtccgaaattttcagggttgttgttgttatacctctcctccccggtttccagggaggtattgacgacagtggtgcagcatctgttagagccataatgcattggcagtatcgaaccatatacagaggacataactcaatattgactaatctttacaatactattggcgtaaaggctcatgattatatttccttctatggccttagggcatatggtaaactttctgaggatggacctgtcgccactagtcaggtgtatgttcacagtaaaatcatgatagttgatgaccgtgctgcattgattggatctgccaatattaacgaccggagtttgcttggctcaagagattctgagattggagtactaatcgaagacac

SEQ ID NO: 121880 - DNA, 772 bp, Arabidopsis thaliana
  unsure (1)..(772): unsure at all n locations
nnnnnnnnnnnnnnnnnnnnnnnnnnnnnnnnnnnnnnnnnnnnnnnnnnnnnnnnnnnnnnnnnnnnnnnntcgcccgataaccacgcgtccgaacaggtctctcacgtgtaatttagtgtttttaagactttagggaataagattagaacggttcttccccaaacacaacgaagaagtcttttgtttccgatatagatcgaggaacttcgatttatcagacattaacaccaatttttaagatatcgtgaaggagagatttgattgatggcttggaggcgcatcatcaccaaggtttcgagtcatgaaagggaattgagcagtttaagaagcttacttgttagagcttactcctcttttcctagagtgggagttactggagctgtgggtggtggtggagcttctttaccgcgaacgaggtttcaatcgagttatgttggtagctttgctcgcagagtccgtgatagagaagaagttaatgaggttgcacatctgagagaacttattcgaagaaatgatcctgaggctgttatcagaatgtttgaaagccaaccttcctttgcattncgaattncccctgcgttatcggaattcaattaagggatttggtaaaaggntgataggggttcgntcaaagtaacctgggtnngnaccatttcaaaagnngnaattncttnggtgtttcaaaggggggaaggggctttttgngggcctttggggntttttggaacggngggaaccccccaaaaaannggngncctttgncctcatt

SEQ ID NO: 121881 - DNA, 644 bp, Arabidopsis thaliana
  unsure (1)..(644): unsure at all n locations
ccttgggnnggnttttggcccctttaatggggcttttcccnaaggggggcccgggccnattctgggnggttccccccntaggggattntaaaccttttcccggattnggggggggggttaaaangcctcnccaaaagggtttggcctcgttatgcctgtgggattgggggttcaagcgttcaagttggcattcgagaagtttcaaaagattccccattgggacggctaagaggcagtgccaatatagtagagatatatagcccgttgctacaaggagcagcctttggtgattcaaggtgccggagccgggaacgacacaactgcagccggtgttcttgcagacatcatcgacttgcaggatctttttcactgagaggaggctgtggtatttagtttttatcaaaataataataacacaattcataattgatctcttctctgatcttgtcaaggcagaaaattagccaacaagaacgtggcctctccttaacattaccaaaaagagattttttttttttttgctggttgtttaaaagaaaaaaaaaaaaaaaaaaaaaaaaaaaaaaaaaaaaaaaaagggcggccgctctagaggatccaagcttacgtacgcgtgcatgcgacgtcaagactcttctatagtg

SEQ ID NO: 121882 - DNA, 897 bp, Arabidopsis thaliana
  unsure (1)..(897): unsure at all n locations
nnnnnnnnnnnnnnnnnnnnnnnnnnnnnnnnnnnnnnnnnnnnnnnnnnnnnnnnnnnnnnnnnnnnnnnnnnnnnnnnnnnccacgcgtccgcgcatccttgaaccgcataatttcgtctggagatcctgttcataggattgtcggtagtttgagcggtaccttgggatatgtaatgagtgagcttgaagatggcaagcctctaagccaagttgttcaagctgccaaaaagctggggtacactgaaccagatccacgtgacgacctcggtggcatggatgttgctagaaagggtttgattcttgctcgacttcttgggaagaggataattatggacagcattaagatagagagcttgtatccagaagagatgggacctggactcatgtctgtggatgatttcctccataatggaatagtaaaacttgatcagaatatagaggagagagttaaaaaagcttcatcaaaagggtgtgtgcttcgttatgtctgtgtgattgagggttcaagcgttcaagttggcattcgagaagtttcaaaagattcaccattgggacggctaagaggcagtggcaatatagtagagatatatagccgttgctacaaggagcagcctttggtgattcaaggtgccggagccgggaacgacacaactgcagccggtgttcttgcagacatcatcgacttgcaggatctttttcactgagaggaggctgtggtatttagtttttatcaaaataataataacacaattcataattgatctcttctctgatcttgtcaaggcagaaaattagccaacaaaaaaaaacaaaaagnnnnnnnnnnnnnnnnnnnnnnnnnnnnnnnnnnnnnnnnnnnnnnnnnnnnnnnnnnnnnnnnnngacctaatacaa

SEQ ID NO: 121883 - DNA, 1158 bp, Arabidopsis thaliana
  unsure (1)..(1158): unsure at all n locations
acgcgtccgctcggaagcagctgccggaaaagcttatcccaattgcgacgccattccttgtgaccagttcgacgttgcttttcaagcggtggagctttggatcgctgatcgagctgtgcttccggtagagaactcactcggtggttcgattcatcggaactatgatctcctcctccgtcaccgtcttcatatcgttggagaagttcagattccggtccaccattgcctcctcgcacttccgggagttcgaactgactgtgttttcgcgggtgatctctcacccgcaagccctagcgcagacggggacacttcccttgacgtccttacaccacatgcagcgcgtgaggcattccatgacactgctgctgctgcggagtacatctcagctaacgacctacatgacacggcagctgtagcgagcgcacgcgccgctgagctttacaacctccagatattagcggatgggattcaagacgacccggggaacgtcactcgcttcctaatgtgggcgcgtgaaccgataatcccacgcacggaccggccgttcaagactagcatcgtctttgctgcccaagagcacaaaggaactagcgtcctctttaaagtcctctcggctttcgcttttagagacattagcctgaccaagatcgagtcccggcctcaccataaccgcccgcttagggttgttggtgacgggagctttgggacgtcgaagaacttcgagtacatgttttacgtggattttgaggcatcgatggctgagccgcgtgcacagaacgcgcttgcggaggttcaagagtacacgtcgttcctaagggtgctgggaagttaccccatggatatgacaccatggtccatgacatccacagaagacgcatgaccccatcgccaaaaacaaactcaccaataaatttattaaattattctgttctttctttttttgtgaaaattgtagtatacatcgaaattaaaccgtaaatgtagagctcattattcacgtggtgattaggagaaaacaaaattttatttgtctgtaactagctaccagatatatcttacattcttacttaaaaaaaaaaaaaaaaaagnnnnnnnnnnnnnnnnnnnnnnnnnnnnnnnnnnnnnnnnnnnnnnnnnnnnnnnnnnnnnnnnnnnaac

SEQ ID NO: 121884 - DNA, 573 bp, Arabidopsis thaliana
  unsure (1)..(573): unsure at all n locations
cccacgcgaccaaaagttgtgtttctcataaagatctcaaagatattcctactacacatgggttctcttgacttgccttacgcttcatcgttcaagggaggaagtgaaacctttctccagaatgtatttgaaagtatactgaaaacgtatttgaggaagaacccgatggcgaagacgatatgggaactagttaagtcggtggacaacgaaaagatctcttacgaccacttctttttcaggacatttaaggtcgatggttatggaattgattccctggcgagttttttcatggattatggatataaagttggaggcagacttgattttccaaagaagaaagtacaagttctctggctttctcctccggatgttcacttccccgataatggttacggtattggcaatggccctttgccaagacttgttatagctgagcttcttgtgggggaactaagccctgagtcacagggggttataagggaggnttttaaaccggaagggggnagaaanttttctttaagactttggggnttaantttgggnggcannncccccgtttaataacttccaaaa

SEQ ID NO: 121885 - DNA, 533 bp, Arabidopsis thaliana
ccacagagcttgtaccctataagcttcagagattagtcaaggaattcaaatccttgacagagccaattgatcgactcaaatgggttctccattacgctagtctccttcctcaaatgcccgagtcgtccaagactgaatcaaacagagttatgggctgcacagctcgtgtttggctagatgctgagttaggtcaagatgggaagatgaggttttgtgcagatagtgattcagatgtgtcgaaagggatgtgttcttgtttgattcaagttcttgatgaggcttctcctgtagaagttatggagttgaagactgaggatttagctgagcttaatgttggtttgttgggtggagagagatcgagagttaacacttggtataatgttcttgtgagtatgcagaagaagactcgacgattagtagcggagagggaaggtaaagttccttcctttgagccatttccttcacttgtgttaacggctcatggcattgaagctaaaggaagctttgctcaagctcaagcgaaatatttgttt

SEQ ID NO: 121886 - DNA, 555 bp, Arabidopsis thaliana
caagatccttcacttctctcaaactacgaaaactatggcttcaaaatccgtcgtcgttttgctcttcctcgctctcatagcttcatcagccatagctcaagctccaggaccagctccaacaagatctcctcttccatctcctgctcaacctccaagaaccgccgcaccaactccttcaatcacaccaactccaactccaacaccatccgctactcccacggcggctccagtttctcctccggctggttcaccacttccctcctccgcttcaccacccgctcctccaacttctctcactcctgatggtgcacctgtcgctggtccgactggatccactcccgtcgataacaacaacgccgccactctcgctgctggatctttagccggatttgtattcgtcgcttctttgttactgtaatttggttatattagagaatcatctattgagatagtgtttttctatttaaggatttttttgctcgtgaaaattaaaatctgtggttttatgttgtattaagaattgagttagcgtttgggcgatagaattaaatcatt

SEQ ID NO: 121887 - DNA, 896 bp, Arabidopsis thaliana
  unsure (1)..(896): unsure at all n locations
atgatctnnnnnnnnnnnnnnnnnnnnnnnnnnnnnnnnnnnnnnnnnnnnnnnnnnnnnnnnnnnnnnnnnnnnnnnnnnnccacgcgtccgttcaagaacgtgatcataaccatcgccgagcccacttcggtggaacagggggtgtgaagagctgcacaaattattctccagttgtaaaatcgttgatcgaagcaaagtcttcgggtttctctgatgtcttgttcctggatgcggctactggtaaaaacatcgaagaggtttctacttgtaacatcttcattctaaagggaaacattgtatccactcccccaacttcaggaaccattttaccaggaatcacaaggaagagcatatgtgagctagcccgtgacattggctatgaggttcaagatcgtgatctttctgtggatgagctattagaggcagaggaagttttttgcacggtgacggcagtggtcattaaagctgttgaaaccgtgacattccatgacaaaaggggtaaatatagaacaggagaagatgcattctctacgaagcttcacttgatattaactaatattcaaatgggagttgtcgaagataagatgggttggatgatggagatcgatcatttggttggacagattcgtttcctgatgaaacataagaagaaataaatttctaagcaaaaactaagaacaatgaaaagcgagataaagaagaataaaattgtatcctttaaacaaaaaaaaaaaattgtatcttttgttaagaacattactcatactatagttcttgtttcactttaagcaccataaatctacaccaataaatagtggttagaacgaaaaaaaaaaaaaaaagggcgaacgctctagaggatccaagcttacgtacgcgtgcaggcgacgtca

SEQ ID NO: 121888 - DNA, 1103 bp, Arabidopsis thaliana
aaacgttggtcacgaggcctcatcaatgcttttgataccttccttcaccgcaaattctaacgaaccaccaccgtcgaagctttctctttccgatctttcaatggcgattctcaaatctcacttcttcttactcttccctcttcttcttctccactttcacactgtctcctttgctcagacgctctttgtgttcggagatggtctttacgacgccggaaacaaacagtttctctctcagaaccgagttgacgcaagctttcctccttatggagtcactgtaggacaagccaccggacggtggtccgatggttctatcgttcctgattatcttgctaaattcatgggaattcctaaaatctctccgattctcctaaccacggcggatttttctcacggagctaatttcgccatcgccgacgctaccgttcttggctctcctccggagacgatgactttgtcacaacaagtgaagaaattctcggaaaacaagaataagtggacaaatcaaacacgttctgaagctatctacttgatctacattggttctgatgattacttgagctatgctaagagtaatccaagtccatcagatactcagaaacaagcttttgttgatcaagtcatcactaccataaaagcagaaataaaggtggtttacgggtctggcggaaggaaattcgcattccagaacttggcaccgttaggttgcttaccggccgtgaaacaagcaagcggaaatgttcaagaatgtgtgaaattgccttcggaaatggctgctttgcataacaagaaacttttgcagctcttgggttgaactatcaagagaactaaatggtttccagtactcgttttacgacttctttagctcgatccaaaacagaggtatcaaggtctaaggcttatacattcgagaccaggaaacgcttgcttgttgttcggacctggctctttccaacgggggtaaattccccagctaaaattgtttccgccaaccctgaagagtatatcttctttgatggtaagcatttgacgcaagaagccaaccttcaggtcgggcatttgatgtggggagcagatccggaagtgattggaccgaacaatat

SEQ ID NO: 121889 - DNA, 528 bp, Arabidopsis thaliana
  unsure (1)..(528): unsure at all n locations
nnnnnnnnnnnnnnnnnnnnnnnnnnnnnnnnnnnnnnnnnnnnnnnnnnnnnnnnnnnnnnnnnnnnnnnnnnnnnnnnnnccacgcgtccgcgcttttaaagcgagtatgtccggttacgcctccggtgtagccaaaggtgttgctccaaaagctcgtatcgccgcctacaaagtctgttggaaagattccggttgtctcgattccgatattctcgccgcctttgatgccgctgttagagacggtgtcgacgttatatcgatctcaatcggtggtggagacgggattacttcgccgtattacctcgatccaatcgctataggctcgtacggcgccgcgtcgaaaggaatcttcgtctcttcctctgccggaaacgaaggacctaacggtatgtcagttacgaacctcgcgccgtgggtaaccaccgttggtgctagtacaatcgatcggaatttcccagcggatgctattctcggcgacggacatcgtctcagaggagtgtctctttacgctggagtacctttaaa

SEQ ID NO: 121890 - DNA, 584 bp, Arabidopsis thaliana
  unsure (1)..(584): unsure at all n locations
attgagctggaggatcaaccntggggcaccccattctgcgggcctttgggaaccccgcccccaaaacccttgggttcataccccccaggtggggtttccctacaataatggccctattcagaaaacactgaccgcagatgaagttgggaatgcagcagccttcttggcatctccattggcctctgccataaccggtgcaaccatatatgtggacaatggtttgaatgcaatgggcgttgcactggacagccccgtgttcaaagaccttaacagcaagaattagagtcttgatcgacgactggactcgagaaattccgtgttttcgtgagcttgcttgtttctttatgagttagtatgtacggcatatgttccccatcggctgtctttttttttctttctttaagagaataaattatggttctaggttgggtcatttagcaactatatatgtagtgatggattattattcctcttatgattgaaaatttgcaagtgagaaaaaaaaaaaaaaaaaaaagnnnnnnnnnnnnnnnnnnnnnnnnnnnnnnnnnnnnnnnnnnnnnnnnnnnnnnnnnnnnnnnnnn

SEQ ID NO: 121891 - DNA, 672 bp, Arabidopsis thaliana
  unsure (1)..(672): unsure at all n locations
nnnnnnnnnnnnnnnnnnnnnnnnnnnnnnnnnnnnnngcgtccactcttacatatcatcacttcacatcaaccaaacctacttctgtctctctctctcgctctctatctctcacgctctcacagtagaagaaaaaattagaaaggttgtgagaatggcggctacagcagcttcaagcttacaaattgctacacgaaggccgagcatgtcttcgcctagcaaaattcttaaagcaggaacctacattgttggtgccaatcctggaaacgcttcatgggataaactttcatgcactcgccaattatcaaaccttggatgtttgagaaaccacagtgctgttccaacttgtaagagacccttttctttttccacaagggcaatgtctgaatccagtgaaaacaaggctccttcagggcttccaattgatttgagagggaaaagagctttcattgctggtatagctgatgataatggctatggttgggccatagcaaaatctcttgctgctgctggagctgaaatattggttgggacttgggttcctgcacttaatatatttgggacaagcttgagccgtggaaaatcggccaagacgggttttccttcgggcattnttgggtaagaggttntcttgntctgtgttanaaccnaagntnctaaggnttnaacgtc

SEQ ID NO: 121892 - DNA, 898 bp, Arabidopsis thaliana
  unsure (1)..(898): unsure at all n locations
gcctgcaggtccgggtccggatttccgggtcgacccaagccttccggaaaatttcaacagttactaatgtttgcctgacgggtaattgatggagattaaaagggttattgttttggatgctgggttgacaatctggaattttgctggagattgtgagaccaattaaccgatttgcgggatcttaaaactggaccgtccaggatgctgctgatggtgtgaaaaaggatttgggaggcttggactttcttggccattcccttgcaaatggcccagaggttacctaccctcttctggagacatcaaggaagggctatctcgctgctatctctgcttcgagttactcctttgtttccttgctgaggcattttctgccaattatgaacccaggaggtgcttcaatatctcttacttacattgcctctgaaagaatcattcctgggtatggtggaggtatgagttctgccaaagctgcactagagagtgacacacgggtgcttgcatatgaagctggaaggaaatcaaacattagggtcaacaccatctctgcgggtcctttgggaagccgagcagcaaaagccattgggttcatagacaccatgattgagtattcctacaataatgggcctattcagaaaacactgaccgcagatgaagttgggaatgcagcagccttcttggcatctccattggcctctgccataaccggtgcaccatatatgtgnccaatggnttgaatgcaatgggcgttcactgacagccggtgtcaaaaccttacagcagattagagcttgatcacgatgncncggaatccgggttcggncttctgtccttatnggaaatacggaatgtccacggngctttttctccttaannaaaantgggcaggtggnattcgngc

SEQ ID NO: 121893 - DNA, 730 bp, Arabidopsis thaliana
  unsure (1)..(730): unsure at all n locations
tctgaatccagtgaaaacaaggctccttcagggcttccaattgatttgagagggaaaagagctttcattgctggtatagctgatgataatggctatggttgggccatagcaaaatctcttgctgctgctggagctgaaatattggttgggacttgggttcctgcacttaatatatttgagacaagcttgagacgtggaaaattcgaccagtcacgagtgttgcctgacgggtcattgatggagattaagaaggtttatgctttggatgctgtgtttgacaatcctgaagatgtgcctgaagatgtgaaaacgaataagcgatatgcaggatcgtcaaactggaccgtacaggaagctgctgaatgtgtgaaaaaagattttggaagcattgacattcttgtccattcccttgcaaatggcccagaggttagcaaacctcttctggagacatcaaggaaaggctatctcgctgctatctctgcttcgagttactnctttgtttccttgctgaggcattttccttgccaatttatgnacccaggggggtgctttcaataactngttnacttacattggcccccttgaaagaatcaattccntgggnattggtggnggttttaagtttttccaaaagtttnaactaggggggttccaaacggggggncttcatntanagnttggangggaattaannntttngggcaannccnatttttgggggccttnggga

SEQ ID NO: 121894 - DNA, 845 bp, Arabidopsis thaliana
  unsure (1)..(845): unsure at all n locations
nnnnnnnnnnnnnnnnnnnnnnnnnnnnnnnnnnnnncacgcgtacgtaagcttggatcctctagagttgccgcccttttttttttgttttggtgtaacttatgtcaaataaaatgtcgaatgattgtgtaacaaaatttaaaatagataaaaaaaaacagagcataaaagcagagtattaatgaagaaaacaaaaacaaactatagttggtcaataactgtattgataagcgaattcgttgacaccaatcatggcagaaacaacttgagagacgatatagaagctaccacctaagatgagtagaatgagaatggcggagattgggttcttgaggagctcaaagatgggctcaaagacagcagagagagctccagtgctaaccgtgagagcgtaaagaccgtaccttctaacgttgtcccaaaactcttccattaaaggaccttctggtccaagcgccatagctttctctgcatccattcccaataccaaaaccatcatcaaccctacagagactccaccaaccacagcatatctccagtgccgttccaaacccagaggaggaggttgtgctctttcaagcttgctgtttctgctacttttcgtagtcaatcttcttctggctgagccacaccgaacaagacatgatgttctgttccttatgcttgagcttggaaaagctagagctgctgctattgatctgctactggtaaaatggaggtgtggttgcagacaagatagtctcattttggggagagacatcaccgcgcacgcgtgggtannnnnnnnnnnnnnnnnnnnnnnnnnnnnnnnnnnnnnnnnnnnnnnnnnnnnnnnnnnnnnnnnn

SEQ ID NO: 121895 - DNA, 439 bp, Arabidopsis thaliana
cacgcgtccgatcctctctctcataccaagttcaatcacaaggaaatggagatccaggcaaagctcatggaatacagattccatttcatggtgacaatcatggtgagcgtgattgtggcgtctctcgtgtatgcagcaccaaggattctgaacattttagcctatttctggcctctgtttgcgtcaacagccgccttcttagcgatggcaatcacctttggtggctttcaacagctttcagaagaagccaccggcgagagactgatggattacgtcgccggacggcctgaggattctcacaagtacgactgacaaagatttgcacacaaaaacaacttgagagacgatatagaagctaccacctaagatgagtagaatgagaatggcggagattgggttcttgaggagctcaaagatgggctcaaagacagcagagaga

SEQ ID NO: 121896 - DNA, 705 bp, Arabidopsis thaliana
  unsure (1)..(705): unsure at all n locations
cagctacnnnnnnnnnnnnnnnnnnnnnnnnnnnnnnnnnnnnnnnnnnnnnnnnnnnnnnnnnnnnnnnnnccacgcgtccgcccacgcgtccgcggacgcgtgggaacgaaaggtcttttctagtctagtcacttcacttctacggctactgccatggcggcttctttctcttccactgctcccacgacaccggttcttcgattcagagccaactactccaagcctctcctctctctcccagattcgtgtttgaggataatctcttcggcgatatctccctctacacgcttaattgcgtgttcgttcaagacagacaagcttccgctcggtgccggcgtcaatctctccggtggccccgttgtcaagcgctctctacagaagagattggtgataaggtctgctactattgaagaaatagaagcagagaagtctgctattgagactgatgttaaatcaaagatggagaagactattgaaacgcttcggacgagtttcaactccataaggactgggagatccaatgcagcgatgcttgacaagatttaggtggaatactattgaagttcattaagtttgtaaagcataacccaaatcagtactccggatggaagttctcttttgctgtaaccatattacaaatccaacttgaattctatatatatagccattgttaatctttatctttttgttacctctaattac

SEQ ID NO: 121897 - DNA, 422 bp, Arabidopsis thaliana
cgtgttttttttagaataacaataaaaaatttgtacacacatggtttattattgtagataatattaatatatatcaaacgaaattttaaaagtagatgatttatgaaaataatttttgcttattttaattagttcttgagtaaaattatttatacattctagatattaaataatgttgaatttttaattgaataaacactttattatatataaaaattgaaaaacaaagcaagccgaggaatctctctctaatctatctccaagacggaccaaaccagttttagttctatctctcaatctctctgatcagctccatttccaattttgttggaaagtagatacctttgagaatctaaaggatctccctttatggcggataaggacgttccttttggggttgaagatattgttcagacgccttt

SEQ ID NO: 121898 - DNA, 913 bp, Arabidopsis thaliana
  unsure (1)..(913): unsure at all n locations
nnnnnnnnnnnnnnnnnnnnnnnnnnnnnnnnnnnnnnnnnnnnnnnnnnnnnnnnnnnnnnnnnnccacgcgtccgcaaagattaaaatatttagcaaaaatttccaggaaaagaggagtatccgccctactttttcagctgagaagatctttggaggaaccttgttagctatgtgttcaagtgatttcatctgcttttatgattgggctgaatgtaggctgattcaacgtattgacgtcactgtaaagaatctatattgggctgacagtggtgatttagtagccattgctagtgacacatcattctacatcttgaaattcaaccgcgacttagttacctcacattttgatagcggaagacctactgaggaagaaggtgttgaggatgcttttgaggttctccatgaaaatgatgaacgtgttaggacaggtatatgggttggtgactgtttcatttacaacaactctttctggaagcttaactacntgtgtggaggcgaggtaaccacaatgtatcatttggaccgcccaatgtatttgttgggatatcttgcaatcaaagtcgggttttcttggtagacaaagaattcaatggtatagggtacaccttgttgctaagcctgattgagtacaagactcttgtgatgcggggtgatttagacaaagccagtgaaatcttacctacaattcctaaagatcagcataacagtgttgctcatttcttggagtcacggggaatgattgaagatgctctggaaaattgcacagatcctgactacagatttgagttggcctacaactgggtagacttgaaattgacaggaaatcgctgtggaagacagagcgatctagtggaaacattggagagtagtatgtcctccgaagctgcaatggctgagatgcatgagatca

SEQ ID NO: 121899 - DNA, 537 bp, Arabidopsis thaliana
  unsure (1)..(537): unsure at all n locations
atgatcctgccagctannnnnnnnnnnnnnnnnnnnnnnnnnnnnnnnnnnnnnnnnnnnnnnnnnnnnnnnnnnnnnnnnnnccacgcgtccgctttgattctgttttcagggttttctttgctttgacaatggcggctgtagctatttctcagtcaagttcattgtctcctgattccagcaaagctagcaatgcggctgcatcgatcttcgcggttatagacagagaatcgaagattgatccaagtgatgagtctgggagagttcttgataatgttaaaggagatatcgaacttcgtcatattagtttcaaatatccttcaagaccagatgttcagatcttccaagatctctgtctgtctattcgcgctggcaagacaatagctttggttggagagagcgggagcgggaaatcgacagtgattgcgttgctacagaggttttacgaccctgattctggtcagatcactcttgatggagttgagataaagacattgcagctgaaatggttaaggcagcaaaccgggcttgtgagcc

SEQ ID NO: 121900 - DNA, 529 bp, Arabidopsis thaliana
  unsure (1)..(529): unsure at all n locations
atgatcctnnnnnnnnnnnnnnnnnnnnnnnnnnnnnnnnnnnnnnnnnnnnnnnnnnnnnnnnnnnnnnnnnnnnnnnnnnnnccacgcgtccgcatgatcaaagttgcctttcttttggtcatcgagcttggggtctttcctctgatgtgtggttggtggctagatgtttgcactgttaggatgttcggtaaaacaatgtcccacagggtacagtttttatcaatttctcctctggcaagctcacttgttcattgggttgttggaatcatgtacatgttgcaaataagcatcttcgtcagccttcttcgaggggttcttcgtcctggagttctgtatttccttcgtgatccagcagatcctaattacaatccattccgagatttgattgatgatccagtgcacaagcatgctcggagggtactgttatcagttgcagtgtatggaagtttgattgtgatgctggtatttttaccagtcaaacttgcgagccggatggctccttcaatctttccacttgacatatcta

SEQ ID NO: 121901 - DNA, 1901 bp, Arabidopsis thaliana
  unsure (1)..(1901): unsure at all n locations
acttgtgcgcggctttcgcggggcggggggggngtagtattctccgggctactatacgactcatatagggaaagccggtacgcctgcaggtaccggtccggaattcccgggtcgacccacgcgtgcgcccacgcgtccgtcttcatcattttctcttcttcttctccaagaaaacactgaagaagaaatggggttccttaagccaaccatggcgattctttttctagcgatggtcgccgtttcatcagccgtggacatgtcaatcatctcctacgacgagaaacatggcgtctccaccaccggtggccgtagcgaagccgaggttatgagtatctacgaggcatggttggtgaaacacggcaaggctcagagccagaactctcttgttgagaaagatcgacggttcgagatctttaaagacaatcttcgtttcgtcgatgaacataacgagaagaatcttagttatagattgggtttgactcgttttgcggatcttactaacgatgagtatagatccaagtatcttggagctaagatggagaagaaaggtgagagaaggactagcctacggtacgaggctcgtgtcggtgatgagctaccggagtctattgactggaggaagaaaggagccgtggctgaggtcaaagatcagggtggttgcgggagttgttgggcgttttcaaccattggagcagtggagggaataaaccagatcgtaaccggagacctaataaccttgtctgaacaagagttggtcgattgtaacacttcatacaacgaaggttgtaacggaggtcttatggactatgcttttaagttcattatcaagaatggtggaatcgatacagacaaagattatccttacaagggtgttgatggaacttgtgaccagatcaggaaaaacgctaaagttgtcactatcgattcatatgaggatgttccaacttacagcgaggaatcgttgaagaaagcagttgctcatcaacccattagcattgccattgaggctggtggtcgtgcgttccagctctatgattcgggtatatttgatggaagttgtggaacacaactagaccacggagttgtggcggttggatacggaactgagaacggcaaagattactggattgtgagaaactcatggggtaaaagctggggagagagtggatacctaaggatggcgcgtaacattgcgtcttcatcaggaaaatgtggaatcgcgattgaaccttcatacccgataaagaatggcgaaaacccgccaaacccgggaccttcacctccatctcccatcaagcctccaacccaatgtgacagttactacacttgtcctgagagcaacacttgttgttgtctgtttgagtatggcaagtattgctttgcttggggatgttgcccactagaagcagccacttgctgtgatgacaactatagttgctgccctcacgagtacccggtttgtgaccttgatcaaggaacctgtttattgagcaagaacagtccatttagtgttaaggccttaaagcgtaaacccgcaacgccattctggtcacaaggcagaaagaacattgcctaaacattgcttcttcaagaggactctggctcatgagagaagagatctctctgaagggatttatcagatgctttttaatgttgttgtttatgccataactagatacataaaaaatgcagctgttgggtttcgtgtatataaaaaaaggaccctatgtttcattcagtttcatagttgggtttcattgatacagtacatttattgttaattcaagaaaattgaatatttatggctatgttatggtcctatggaagttttacacctttgcttctatgaggcctaacgaaatcatctttgctttaaannnnnnnnnnnnnnnnnnnnnnnn

SEQ ID NO: 121902 - DNA, 549 bp, Arabidopsis thaliana
  unsure (1)..(549): unsure at all n locations
accggaacccagggccgacccagtcgtacgcgtccgctcctatagttctccatgaatccactgcagagcaaagggggtcccgtaagccaaccatggcgattctttttctagcgatggtcgccgtttcatcagccgtggacatgtcaatcatctcctacgacgagaaacatggcgtctccaccaccggtggccgtagcgaagccgaggttatgagtatctacgaggcatggttggtgaaacacggcaaggctcagagccagaactctcttgttgagaaagatcgacggttcgagatctttaaagacaatcttcgtttcgtcgatgaacataacgagaagaatcttagttatagattgggtttgactcgttttgcggatcttactaacgatgagtatagatccaagtatcttggagctaagatggngaagaaaggtgagagaggactagcctacggtcgaggctcgtntcggtgatgantaccgagntattacttgnggagaaagagccntgcttaggcaaatcaggtgtcggattttggcgttaacctgc

SEQ ID NO: 121903 - DNA, 727 bp, Arabidopsis thaliana
atacgactcaccttagggaaagctcgtacgcctgcaggtaccggtccggaattcccgggtcgacccacagctgcgggggatgttgcccactagaagcaatacttgccatactcaaacagacaacatcaagcctccaacccaatgtgacagttactacacttgtcctgagagcaacacttgttgttgtctgtttgagtatggcaagtattgctttgcttggggatgttgcccactagaagcagccacttgctgtgatgacaactatagttgctgccctcacgagtacccggtttgtgaccttgatcaaggaacctgtttattgagcaagaacagtccatttagtgttaaggccttaaagcgtaaacccgcaacgccattctggtcacaaggcagaaagaacattgcctaaacattgcttcttcaagaggactctggctcatgagagaagagatctctctgaagggatttatcagatgctttttaatgttggtggctcccccctaactaaaaacataaaaaatcccgctgttgggtttcgtgtatataaaaaaaggaccctatgtttcattcagtttcatagttgggtttcattgatacagtacatttattgttaattcaagaaatttgtataaaaaaaaaaaaaaaaaaaaacaaaccccaagggcggccgctctagaggatccaagcttacgtacgcgtgcaggtgacgtcatagatcttctatagt

SEQ ID NO: 121904 - DNA, 877 bp, Arabidopsis thaliana
  unsure (1)..(877): unsure at all n locations
atgatcctgccnnnnnnnnnnnnnnnnnnnnnnnnnnnnnnnnacccacgcgtccggtgcaacatcaaaagtgcctaatgtacctcgcgtccgattgaaaccaaggccgataaaaaaagttgcagttattggtggcggtctgatgggttcaggcatcgctacggctctacttctaagcaatataagagttgtgctcaaagaaataaactcagaattccttatgaagggaataaaatcagttgaagcaaatatgaaaagcttggtatctagggggaaactgacacaagataaagcaggaaaggccctctctttgttcaagggagtacttgattacacagaattcaatgatgtggacatggtcatagaggcagtgattgaaaacattcaattgaaacaaaacatattcaaagaaatcgaaaaggtttgttcaccccactgcattttggcgagtaatacatctactatcgacctcgatgtaattggtgaaaagactaactcaaaagatcgcattgttggcgcacatttcttcagtccggcccatctgatgccccttctcgagattgttcgttcaaagaatacttctgctcaggtgattctggatctcatggcggttggaaaggccataaagaaagttcccgtggtggttggaaactgcataggctttgcagtgaataggacattctttccttattcacaagctgcacatatgttggccaatctaggtgttgacttgttcagaattgacagcgttattacctctttcggcttgccattgggccctttccagcttggtgatttggctggacacgggattggattatcagttgggccgatatatgccaatgtctatggtgaccgcatgttcagatctccaatg

SEQ ID NO: 121905 - DNA, 433 bp, Arabidopsis thaliana
attcttatacccatagagagacgcacaacacagtgtagatacattgcttgagcttttaggaagttacaggaatctaacacttcaaatcctactatctctcttcttaacgttagtcctttcattcgtcaaaatctcaatcatcttcctccacggtctctgtacctatatccaacctgaaaatctcaaccaaaacaacaccggaaatggactccgacctgcgattagacgaccatctagtaccgacgatccaaaatctaatgttgaagtcagaagaagaaacagatccaaagataaatccgaattcgacgaaagcaatgctcagatctttcgaattaagctcgatgaagatcatctcagatctcgaatgtatttcactgagtacaattcgctattcgtgatatcgttcttagctgtttcttgctttcttctagat

SEQ ID NO: 121906 - DNA, 395 bp, Arabidopsis thaliana
tccgatttttgactcgtcccgggactcagtgattctcctcttccaatcctttccggaagaactaaacaaaaacacgatctttctcagatttagagagagtaagagtgagagagtgtcagagacacgaatcaaagaaatgatttttaaaagcttctgttaattctaatttgcatagatttgtttactcgagcttgagcttgagcttcttctaatggagttaaggaaggacaagcttcttatgttttactcagaggggaaagaaagcaaagaagctaaatgggcagtgaatgatccaatgagcaaatcttataagctctctttaccttcagcactaagacctgataatctcttacctggaaatagacttagatacactgatgcttctaagtccaaat

SEQ ID NO: 121907 - DNA, 840 bp, Arabidopsis thaliana
  unsure (1)..(840): unsure at all n locations
nnnnnnnnnnnnnnnnnnnnnnnnnnnnnnnnnnnnnnnnnnnnnnnnnnnnnnnnnnnnnnnnnngaccacgcgtccggcgaaactcgtcgattttcaaaaccggagctcagagactgatctcggaaagtaaatcgcagccatggcggaaaaagctgtcactatcaggaccagaaacttcatgaccaacaggcttctcgccagaaagcaattcgttattgatgttcttcatcctggaagagccaatgtttcaaaggctgagcttaaggagaaattggcgaggatgtatgaggttaaggacccaaatgctatcttctgtttcaagttcagaactcactttggaggtggtaaatcttctggatatggtttgatctatgatactgtcgagaacgctaagaagtttgagcctaagtacagacttatcaggaatggacttgacaccaagattgagaaatcaaggaaacagatcaaggagaggaagaacagggcgaagaagatccgtggtgttaagaagaccaaggctggtgataccaagaagaagtaagacgtttgaagaggacaaaagcagcaatatggtttttgttctgcatcactccttctttgaagccatgtttgctattagacatcttctaattatttctcgattttgtgcttctttttgtcacacttgctctattttggtttggatcttgttttagagaaacatgtggttaagattttgtttgaatacattgattttaaacttcataaaacaaaaaaaaaaaaaaaagnnnnnnnnnnnnnnnnnnnnnnnnnnnnnnnnnnnnnnnnnnnnnnnnnnnnnnnnnnnnnnnnnnnaac

SEQ ID NO: 121908 - DNA, 789 bp, Arabidopsis thaliana
  unsure (1)..(789): unsure at all n locations
nnnnnnnnnnnnnnnnnnnnnnnnnnnnnnnnnnnnnnnnnnnnnnnnnnnnnnnnnnnnnntccaggccacgcgtccgcccacgcgtcggcgaaaacactcaagcttgcagagatctttcactttaatccttgagaagtagcaaaaatggctgaaaaggcggtcaccatccgaaccaggaaattcatgaccaacagacttctctccaggaagcagttcgttattgatgttcttcaccctggaagagccaatgtttcaaaggctgagctgaaggagaagctagcaaggatgtacgaggtcaaggatccaaatgcaatcttcgtattcaaattcagaacccactttggaggtggtaaatcatccgggtttggtttgatctatgatactgttgagagcgctaagaagtttgaacccaaatacagacttatcaggaatggacttgacactaagattgagaagtcaaggaaacaaattaaggaaaggaagaacagggcgaagaaaatccgtggtgttaagaagacaaaggctggtgatgccaagaagaagtgagatcctgaagagagaatctttatcttgtgggttcttgttctccataatcaatcaccttttatgttatttgtccgctgttagatcgtttctccaactagacatgtttactgaaatctgagattttcgtttatttttgttttggtcagtttatgttttgagtttagagaaacatatgatccaaggtttttgttcaatacaactatttaatctcaaaaaaaaaaaaaaaaaaaccggcacgag

SEQ ID NO: 121909 - DNA, 606 bp, Arabidopsis thaliana
  unsure (1)..(606): unsure at all n locations
cacaggttcccccgaaccatccgtatggtgtcntccncctggaggccccattttccaaggctncctnaggagaattgccgagattatgaggttaaggaccccaatgctatcttctgttccaagttccggactcactttggaggtggtaaatcttctggatatggtttgatctatgatactgtcgagaacgctaagaagtttgagccctaagtacagacttatcaggaatgggacttgaccaccaagattgagaaatccaaggcaacagatccaaggagaggaagaacagggcgaagaagatcccgtggtgttaagaagaccaaggctggtgatgccaagaagaagtaagacgtttgaagaggacagaagcagcaatatggtttttgttctgcatcactccttctttgaagccatgtttgctattagacatcttctaattatttctcgattttgtgcttctttttgtcacactcgctctattttggtttggatcttgttttagagaaacatgtggttaagattttgtttgaatacattaaaaaaaaaaaaaaagggcggccgctctagaggatccaagcttacgtacgcgtgcatgcggcgtcatag

SEQ ID NO: 121910 - DNA, 579 bp, Arabidopsis thaliana
atacgactcaccttagggaaagctggtacgcctgcaggtaccggtccggaattcccgggtcgacccacgcggtccgaaaaaaaaaaaaacacacacacacatcaagttcaccttggacatggtatatttacctttagatgcagcatctaagaagtgtagactcgttttgcatactcagacaaaagctgtcctaaagcgtctgtgtgaggtggcaccgcagctcctactccagccatccagccatccataattgctgtggaaagaagctctaattggccagtggttactcctgaaacatcatctgctgtaacagagagaaactcaaaactttctgcaagccatgacctaatctgtctttgcagttcaccagccggagtgtgaacaaataaagcagctaagggtttgtttccaatggcaaaacttttggcttcatcttgtatctccctcagctttcctccagtcacttgctgcctcccagtatcctaagaaaaattcagaaacaagagaagcacgtttgtttgtatctcggattctcagttattaggttaaagaaaagcatctctgggagtcatagctata

SEQ ID NO: 121911 - DNA, 393 bp, Arabidopsis thaliana
cccacgcgtccgggtttcttcatcttcacaacaatggcgtcctcactcactaggaattgctctcgcttctcaaaagccatctctgtccgtttcatgagtaacctaccggaaaacaccgtctacggaggaccaaagccacaaaacccaaaccaaagagtgacgctaacgcatctcagacaaaaacaccggagaggagaaccgatcaccgtcgtaactgcctacgattacccatccgccgttcatttagacacagctggtatcgatgtttgtcttgtcggtgactcagcttccatggttgttcatggtcacgacacaacacttcctatctccttagacgagatgcttgttcattgtcgtgccgttgctcgaggcgctaaacgacctctcctagtt

SEQ ID NO: 121912 - DNA, 656 bp, Arabidopsis thaliana
  unsure (1)..(656): unsure at all n locations
tttttgacagaagaacgtcccgggacaaacaacgctactgttactgctctcatttcactgaaatggaaggaattgagtgaagaagagaagcaagtttacaacggaaaggccgcaaaactgatggaagcatacaaaaaggaagtggaagcttacaacaagaagtctgcggctactaccagtagctagataaatctctcttagtattgaaatcatgttcaagtcctgttgaacattccttattatgcatcgttagattactctaagtacttttatgttttaactctcgctgatcattacttactagttactatctatttctctgttacaaattttaattaataataaatcgactcgtgtaaaaacgcggggaaagttgtgtcaatctcgaccgttggattgaaccagtcaacaacgtcggagatcggagaactctccacgtggccgaacttcgccgttgatagttccgtaattgtaaaacggcggcgtttcaggggacgggaaaccgtctttaccatattaagcccttggttcgaccgggtnaagttggtttaagccttcgggattnctttgggttttggggaattgctggtttnccttggggnttttnggtttccggggggtatggggggnnttttnnccctggcaagtnttttntc

SEQ ID NO: 121913 - DNA, 552 bp, Arabidopsis thaliana
  unsure (1)..(552): unsure at all n locations
cagctannnnnnnnnnnnnnnnnnnnnnnnnnnnnnnnnnngcaaagttgatactgaagagctagacaagagccccctcgcggcggctagagtgaaaagtgagccaacagctttgagctcagggttaaaaggaaagttggataactttcctggttcaggaacagagaagagcaaactggtaagcaaggtgacaagaaatatcccacgtcccaaaccgcggccgaagaagaagatattgcttaaaaagaagctaaaaatcgttgtaaattctgctacaaaaatggttgaggaagtcgatacttccttagagcctagtgcaagtcaacttctgtgccagaagtgccactgtgcggtaaagagcaccagcactgaaaaccacccgccctcgaatactagtcatactactgataaaaatgtcagtatagaagcagatcaagaatcactcgcaagcccgcgtctcattcgcattgtgaagtgtaataaagaggccagcaagggttcctcggattcttgtgaggttagtgatagcggtgaagctgtcattgtcatgaa

SEQ ID NO: 121914 - DNA, 470 bp, Arabidopsis thaliana
cggtcgcgtgggctcagaacgacgacctatctatgaagattgaaacagcatactattctgttggaactcttgtcctttcagattcatcgccacctgctatgtcttctcttcttgttgttagcagagattcaagcgtgcactctcaggctggcagcagttcagggccaagttcaaggagttctcgggctttacgagaagttgtgtcttcccttcctattgaaggccgtatgctttttgtagcagatgtgctcccctctcctgatactgctgctactattcaatcattatattcagaactagaatactgtggtgtcgaagtctccggagaatcttatgaaaaggcatgtggaaaactctgggcgagaagtgatctttcaacccagcatattttgccaaggagaaagattgttgtttttaccaccatgggtatgatggaacttgttttcaataggcctgttgatatcttgaga

SEQ ID NO: 121915 - DNA, 724 bp, Arabidopsis thaliana
ggaaggaagccagcatgttgatttgattagaaagggcccgagtgctagaggggataaaaccaagaaggggtagctttccaaggtaaaggggttttgggttttattaaaacccttaataaattccccgacgtgggtagttaggaaacatgatacgaacaaacaaaaaccccacttggaaacagaagcgcttcaagatatataggtttggtttgtaccaaccttattggtcacccccttccacttcgaaacatggttggtccccagagacaagaccctgcaaatgactctatgaaattatcgacataaccgggtcacaaagtccaggactagttagtgtctccctccacttggtgtgattcttcttcaccagattcccgatctcgctgtcccttttcatcacactattgatagcatcgaacaagctctctttcgagaaccatcctgtttcctctcttgccacttcaaccgaaaccttgagttcgtcactcagcaatcttgtgttgaggacctgatcacccaactgtggtgccaagactatctgacaatcactcagcaaagactcccacattgatccaaacccacaatggctcgcaaagcacccgactgatggatgagacaatagcaatggttgttgagcccattctccccaatacaactcctcttcctttaaccctctcctcgaatccttcaggaagtgcttctcggacgcgtgggtcgaacctga

SEQ ID NO: 121916 - DNA, 529 bp, Arabidopsis thaliana
  unsure (1)..(529): unsure at all n locations
accacgcgtccggaaaatagtttcttaagagattttattgtcttgcccttacaactacgaaacacattattataaagccaactagggaaaacagaggtacttcaagtaaggtttggtttataaaaccttataaatcccctactgctacttagaaacatgatacaaacaaacaaaaacacacttggaaacagaagcacttcaagatatatagtttggtttgtaccaaccttattgatcactcccttctacttcgaaacatggttggtcccagagacaagatcctgcaatgactctatgaaattatcgacataaccggtcacaagtccaggactagttagtgtctccctccacttgggggtgattcttcttcaccagattcccgatctcactggcccctttcatcacactattgatagcatcgaacagctctctttcgggaccaccnggttcncncttgcacttaaccgaaccttgggtcggcaccagnatctgngtggggcnggtaccaatggggnaaggattggaacnt

SEQ ID NO: 121917 - DNA, 506 bp, Arabidopsis thaliana
gaagaggtgaactggtagatgatgctaaggcaatagccttaaagtatctctcttcttacttcatcattgatctactctctatccttcctctcccacagatagtagttttagccgttattccaagcgtcaaccagccagtctctttgctaacaaaagactaccttaaattttccataattgctcaatatgttcctcggattctccgtatgtatccgctttacactgaagtgacaagaacatctggcattgttactgaaacagcatgggctggagctgcttggaacctctctctctatatgttagccagtcatgtgtttggagctttatggtacttaatctcagtagaacgagaagacagatgctggcaagaggcatgcgagaagacaaaaggttgtaatatgaaattcctctactgtgaaaacgatcgtaacgttagcaacaatttcctgaccacttcttgcccatttctcgaccctggtgatataacaaactcaaccatcttcaac

SEQ ID NO: 121918 - DNA, 562 bp, Arabidopsis thaliana
  unsure (1)..(562): unsure at all n locations
tgatatnnnnnnnnnnnnnnnnnnnnnnnnnnnnnnnnnnnnnnnnnnnnnnnnnnnnnnnnnnnnnnnnnnncgggacaaaacataaatactaatggagcaccaccaccagcatcaccgtcaccaccaacgcgacgacggagaagacgatcgtcaatcctttggagtaccaccgccacacgtcgatgctccgccacaacctcatggtctttaccagtcacagcctcattttgatccttacgcgcctactcctcaagctccggcgccttaccgatcagaaactcaattcgaaccccacgcgcctccgccttaccgatcagagccttactttgaaactccggcaccaccgccttcatttggtcatgtgagtcatgttggtcaccaatcacccaacgaatcttacccaccggaacaccaccgttacggaggttatcaacagccgtctaattccttactggaaagtcatggagatcacagtggagtcacgcacgtggctcaccatagctcaaatcagccccaatcgtcttctggtgtctaccacaagcctgatgagaatcgtcta

SEQ ID NO: 121919 - DNA, 742 bp, Arabidopsis thaliana
  unsure (1)..(742): unsure at all n locations
nnnnnnnnnnnnnnnnnnnnnnnnnnnnnnnnnnnnnnnnnnnnnnnnnnnnnnnnnnnnnnnnnnncggccgctgctaacataattaacatgaaaacgacacaaacgtaaaaaattgacacgaaatataagagagaaacataaaaagcgttacatgtaatacaaagcaaaccccacgctccgctcttagattattcatccaaaagatgaacacacagaaactgtcttcaagctttaacgaaaacgaaaaatcttcaacggattaaaacctcaagaagctctctatccctttttgtcaatcgatctccacaatctgaggccttctctctgcagctttcttgcgtataaagataccccatctcaaagcagctttaagctttagccatccaacaacagctttccccgagcctctattacgttctcttcggtacgtgttatcgatctgagcttggtacgggatgctataaccgtaacaagactcatcagtctgaccaaaccctccttgtgttcccacagtgttcacaccgataccaaacgtcttcaacagtctctgcatatcgtcagtctcaagcatttcagaactccttagtctgatttcttcgctgaaaatgtcttcaagaccttgtcctgcagctcttggtggacaccaatcttctccattgtatgagctngaatcattggagctntccatcgacctggtgtagtctggtaccgtgcaagggaatganggtaataaatgggt

SEQ ID NO: 121920 - DNA, 531 bp, Arabidopsis thaliana
  unsure (1)..(531): unsure at all n locations
nnnnnnnnnnntatagggacagctggtacgcctgcagataccggtccggatttcccgggtgggcccacgcgtccgcccacgcgtccgcaagaatttacagtatttgaaaaaatacaaaatggcgaaaatctaccggaagttgacaggctacggtggtgaaggagggcgtgaatgggacgatgatgtatatgagggtgtaagaaaagtgtatgtaggacaagatatcaatcgtatcacttacgtcaaattcgagtatgtgaaggaagacggccaagtcgtaacaactgaatatgggaaaatcattcaacaacccaaagagtttgtacttcaatatccggacgaacatatcatagcggtggaaggaaactatcgcggagtggctctatgtgccacagaggtgatcacaaacctcgtcttcaagacctcaaagggtagaaagtcaccactgtttggtccaaacttgcttggaattacgaccggtacaaagttcgttattgaggatggaggaaagaagatcgtacggtttcatgg

SEQ ID NO: 121921 - DNA, 475 bp, Arabidopsis thaliana
cccacgcgtccgattcagagctcaataattaactgattcgaaatggcgaagatgtaccggaagttggcactctgcggtggtgagggaggacaagaatgggacgacgatgtatatgagggtgtaagaaaagtgtatgtagggcaagatctcaaccgtatcacttacatcaagtttgagtacgtgcaggaagacggcgaagtagtaacaactgaatatgggacaacaaatcagcaccctaaagagtttgtaattcaatacccggacgaacacatcatagcagtggagggaagttaccaccaagtggctctcattgccacagaggtgattacgtccctcgtcttcaagacctcaaagggtagaaagtctccattgtttggtccaaacttacttggaattacgaccggtacaaagtttgtttttgaggatgagggaaagaagatcgtaaggtttcatggacgggcaggtgatgctgtcg

SEQ ID NO: 121922 - DNA, 525 bp, Arabidopsis thaliana
ttaggtgacactatagaaagactatgacgtcgcatgcacgcgtacgtaagctcggaattcggctcccgaccagatctgctttcgaagacgaatctagctattagccatggacaaaccgtacggatacgcgagcgtgagcatgagcggcatagatcgttccgccggaaaggatattgatcttgagatgggagtcggagaagcgacgctttatcctgggctaagttacggcgagaatcagctccgatggggatttattcgtaaggtctatgggattctctcagctcagcttcttcttacgacgcttatctccgccgtcgttgttcttaatcctcctgttaacgatctcttgaccggatctcctgggattcttctcttcctctgcatcgttcccttcatcttaatctggcctctgcacatttaccaccagaagcatcctgttaacctgatcctccttgccctcttcactgtttcattgagtttcactgttggtgtcagttgtgctatgacagaaggacgaattgtgct

SEQ ID NO: 121923 - DNA, 458 bp, Arabidopsis thaliana
aaaagagagaaatgggtaactctttgatctctcttctctcaatcttccacttgctggtgttatggggatcctcagtgaatgcctattggccaccatcacctggttattggccaagctccaaggttggttccctcaacttctacaaaggttttaggaatctttggggtcctcagcatcagagaatggaccaaaatgccctcaccatctggcttgatagaacctcaggaagtggattcaagtcagtgaagccattcagatcaggctactttggagcaaacatcaaactccaacctggctacactgctggagtcatcacatctctctatctatcaaataatgaggcacatccagggttccatgatgaggtagacatagaatttttggggacaacatttgggaagccttacacacttcagacaaatgtgtatattagaggaagtggtgatgggaaaatcatt

SEQ ID NO: 121924 - DNA, 482 bp, Arabidopsis thaliana
ggcacactttggcatatgataaatgttggacggttcggaccgacttcaagcagtaccaagtccttaaacaaaatccattctggtggacacaccacagacatgatgggaagttgtggaacttgaacaattaccgcactgatgtcatccaagctcttggaggtgttgagggtattcttgagcacacattattcaaggggacatatttcccgacatgggagggacttttctgggagaaggcgtctggttttgaggccccgatgaaacataagaagctgactaatgctcagaggtctggtctgaaccagattccgaatacaagattcacgctctggtggtcgccaacaattaatcgagcgaatgtgtatgtgggtttccaagtgcagttggatttgacaggaatatatatgcacggaaagattcctactcttaaaatatctttgattcagatattccgtgctcatttgtggcaaaaaatccatgag

SEQ ID NO: 121925 - DNA, 481 bp, Arabidopsis thaliana
cttaaatgttcttccgcctttgacgccttaatctcatctccacaacccttgcagtcaagttgatgctgttgggatcaaagagtagcaaacaatacgagagcagaagaacttacttatagaaaaaaatgggaatttcaaaaccactccctctattttcgattttagtcctctatttttcactctacaccattacaccaacttcttcattagcctccctccaagatcaattcatcaactgtgtccaaagaaacacacatgtttacttcccacttgagaaaacgttctttgctcctacaaaaaatgtctctatgttcagccaagttcttgaatcgacggctcaaaatctccggttcttgaaaaaatccatgcctaaaccgggattcatattcagccctattcacgagtctcacgtacaagcttccatcatttgttccaagaaactccaaatgcatctccgtgtcagaagcggcggtcacgacta

SEQ ID NO: 121926 - DNA, 411 bp, Arabidopsis thaliana
cggacgcgtgggtttttgaatcattcatgatttcttagctctctcaaaaaaatggcgtacaaatccctaaattcaatcaccaaatctgatatcgaagctctaggaatctccggtgatgtctccgagaagcttctcagagatctcgaagacattattcacggttcatccacgccgccggagacgtggattcagatttctcggcggatccttcaccctaatctccctttctcttttcaccagatgatgtattacggttgctacaaggatttcggacccgacctacccgcttggatacccgacccgaaggttgcttctttaactaacgtaggcaagttattagaaaagcgaggcaaagagtttttaggtggaaattacaagaatccagtttcgagtttctccagttttcaagag

SEQ ID NO: 121927 - DNA, 771 bp, Arabidopsis thaliana
aatacgactcactatttggaaagctggtacgcctgcaggtaccggtccggaattcccgggtcgacccacgcgttcggcaaaatccttgtcgaagctcgctgctgcaaccatgtccgacgaggagcatcactttgagtccagtgacgccggagcgtccaaaacctaccctcaacaagctggaaccatccgtaagaatggttacatcgtcatcaaaaatcgtccctgcaaggttgttgaggtttcaacctcgaagactggcaagcatggtcatgctaaatggcattttggagctattgatatcttcaccagcaagaaactcgaagatattgttccttcttcccacaattgtgatgttcctcatgtcaaccgtactgattatcagctgattgacatttctgaagatggatatgtcagtttgttgactgataacggtagtaccaaggatgaccttaagctccctaatgatgacactctgctccaacagatcaagagtgggtttgatgatggaaaagatctagtggtgagtgtgatgtcagctatgggagaggaacagatcaatgctcttaaggacatcggtcccaagtgagactaacaaagcctcccctttgttatgagattcttcttcttcttctgtaggcttccattactcatcggagattatcttgtttttgggtgactcctattttggatatttaaacttttgttaataatgccatcttcttcaaccttttccttctagatggtttttatacttcttctaattgattgatt

SEQ ID NO: 121928 - DNA, 571 bp, Arabidopsis thaliana
  unsure (1)..(571): unsure at all n locations
atgatcctgccagctacnnnnnnnnnnnnnnnnnnngtaaaaccctaaaatctcaacgaaagggacgaccaattgttcgacgccacgcgtccgggaaaaccggaatccaattgttcgacgattcgaggaatgggtttttctccgtttccgatttaggattcgattcgagcctaaacagctctaattaccacccaattggtgggttattcgccagcgttaatcagactaatccattcgcatccctctcgtcctcggatctttccaacagaggcaacaacagcttctctacccagctcaatgatctctacaccaagtatatgccgggaaaagaggaggaggaagaagtagttaatggcgagaagaggaagaggaagaagaaaggtgggctcacactgaagattaagatcgctaatccttcgttgcggcggctattaagcggagcagtagctggagcggtgtcgagaacggtggttgcgccgttggagacaatcaggacgcatctaatggtgggaagtggaggaaactccagcactgaagtgttcagtgatatcatgaagcatgaaggttggac

SEQ ID NO: 121929 - DNA, 1268 bp, Arabidopsis thaliana
  unsure (1)..(1268): unsure at all n locations
nnnnnnnnnnnnnnnnnnnnnnnnnnnnnnnnnnnnnnnnnnnnnnnnnnnnnnnnnnnnnnnnnnnnnnnnnacactgcacgccacgcgtccgctcaaaagcacgaggaaggatcaaatcggaaacttaacagaatttagctaccaattactgtctccggcgagatctcaatttgatccttcacggtggcgtcgacgtccgggcaacaacaagctctctcgagaagaaagccattatcatcatcatcatcatcttcatcatctcctcctccgtcttcctcacctgttcgagctcctgcggcgaagaaaccgagtccggaatacccattttggcagcagaactggtttatcggtctgctattcgtgatggctttaggattcttctgtctcgctatcttcctttacctaagtctcgatcctgattccggttacacgtctgcctccgccgctgcttctggtaaagaaggtgtcgagattacttatggaagtgcgatcaagttgatgcaccgagaaactaaatttcgattacattctcacgatgtgccgtatggatccggcagtggtcagcaatcagtcactggttttccaggcgtcgttgattccaacagctattggattgttaaacctgtgcctgggacaacagaaaagcaaggtgatgctgtcaagagtggagcaaccttaggttgcagcatatgaagaccagaaaatggctcacagtcacttgcatgcatcttctatatcagggaacttagagggtagctgctttggagatgatacaaattccgatactggggatcactggaagcttataattgaaggaagtgggaagacatggaaacaggaccaaagagtccgtcttcaacacatagacactagtggctacctccatagccatgacaagaagtaccaacgtatagctggtggtcagcaagaggtgtgtggaattcgggagaagaaggcggataacatttggttggcagcagaaggagtctaccttccccttaatgagagcagcaagtaaggttaagagtgaaaaaacttctctggaggactttgaatcttatctcttactctctaaactcacaatcaagaaaatagagatatatatttcttaattttcgattggtaatacttttagtggcacgaatatatcttgttttggtagatattctgcatttatctcttttttaggtcacccttaagagacactatcttattatcctgatagtaaatccaacaatcctctaaaaatatcgtcttgtctttct

SEQ ID NO: 121930 - DNA, 706 bp, Arabidopsis thaliana
  unsure (1)..(706): unsure at all n locations
catggtggaggatacggtggtggacaaggtgctggtgctggaggaggatatggaggtggaggtgccgggggacatggaggtggtggaggcggtggaaatggtgggggtggaggaggaggttctggcgaaggaggagctcatggtggtggttacggagcaggaggtggagctggagagggatacggtggtggtgctggagctggtggacatggtggtggaggaggaggcggtggtggttccggaggtggaggaggaggaggtggaggttatgctgctgcttctggatacggtcacggtgggggtgctggtggtggagaaggaagcggtggctatgtaccatgaaaaattatctatatggagtgtaacggcaattgagtgaagtgtcatatctcgtaagggactatatagtttcacgatttatatgtggcaataaatagagtaatccttcgtataataagccgtagaaaggcggctattgttgaagtttttaaattgtaccacgaccaatattgttgtaagctactactacgtgtgtatcaagtttttataaatggaaatcatagttgttcctaaaaaaaaaaaaaaaaaaataaaaaaaaaaaaaaaaaaaaaaaaaaaaaaaaaaaaaaaaaaanaaaaaaaanaaanaannaannaaaaaaaaaangggggngncccccctaggggccccngttttgngtccggg

SEQ ID NO: 121931 - DNA, 539 bp, Arabidopsis thaliana
  unsure (1)..(539): unsure at all n locations
tcnnnnnnnnngactcactattgggagagctgacacgcctgcaggtaccggtccggaattcccgggtcgtacccacgcgtccggaaacatggctaatcacaaaaatctcttctttctatgtttcttaataggtttagggttatgttctgctagacgagcactactctcctcctctgaatccgaggctgaagtcgctgcctatggcgtgaatagtgggttaagtgctggtcttggtgttggtattgctggtggtggagaaggaagcggtggctatgtaccatgaaaaattatctatatggagtgtaacggcaattgagtgaagtgtcatatctcgtaagggactatatagtttcacgatttatatgtggcaataaatagagtaatccttcgtataataagccgtagaaaggcggctattgttgaagtttttaaattgtaccacgaccaatattgttgtaagctactactacgtgtgtatcaagtttttataaatggaaatcatagttgttcctacgcgtgacgtagaatctatattaaat

SEQ ID NO: 121932 - DNA, 444 bp, Arabidopsis thaliana
atcttaagtagaaagagtgaaacatggctaatcacaaaaatctcttctttctatgtttcttaataggtttagggttatgtcctgctagacgagcactactctcctcctctgaatccgaggctgaagtcgctgcctatggcgtgaatagtggtttaagtgctggtcttggtgttggtattggtggtggtcctggaggaggatctggcgtggagaaggaagcggtggctatgtaccatgaaaaattatctatatggcagtgtaacggcaattgagtgaagtgtcatatctcgtaagggactatatagtttcacgatttatatgtggcaataaatagagtaatccttcgtataataagccgtagaaaggcggctattggtgaagtttttaaattgtaccacgaccaatattgttgtaagctactactacgtgtgtatcaagttttta

SEQ ID NO: 121933 - DNA, 930 bp, Arabidopsis thaliana
  unsure (1)..(930): unsure at all n locations
actcactttagggaaagctcgtacgcctgcaggtaccggtccggaattccgggtcgcccacgcgtccggttttgcttttgaattttcaaccgactctgttcactcacatatctctcttagtgtctactggattcggaatgagatcgatgagatctgggagatgacaacaacatctgcttcctgggttttctctcctttgcccttatctcccttccctccttgtcacttgctcttaccaatcctgacgatgttgcggctattaacagtctcttccttgcactggagtctcctcttctccccggttgggttgcatctggaggtgacccatgtggtgagagctggcaaggtgttctatgtaatgcttcccaagtagaaacaataattctcatcagtgccaatcttggaggagagcttggtgttggctaaacatgtttacctctcttaaagcaatggattttagcaacaatcaccattggaggaagtatcccatccacgttgcctgtttcattgcagaacttgtttctttcaggtaacaactttacaggaaccatcccagaatctctttcctccttaaaatctttgtctgtcatgtccttgaacaataaccttttgtctggcaagatacccgatgtctttcaagaccttggccttatgatcaatatagatntgtctagcaacaatctgagtggaccattacctccttccatgcagaatctttcgactcttacatccttgcttttgcagaacaatcatctttcaggagagcttgatgttcttcaagatctccnctcaggacttgacgttgagacacctcntcatgaccatacagaaagttgtgagataccaattatanaggcgtatctgttacgtactatgtcatcgcttactgaacacctcagtcacatactagcggcattttgacacttccat

SEQ ID NO: 121934 - DNA, 534 bp, Arabidopsis thaliana
gaaaaatagtgggaaagactcctctgagctactctcattcgattttcctcaggcgattttggtgtatggtcgtccctttcactgtatttcttagtcaatagcatcttctccgatcatcgacgtccggagatttcttcggccctctcatacttgagttgttgtaggatttgttgctctggctctggtggtaggtctatgaaatcaacccatatcgtgaatggactgcaacatggtatcttcgtcccagtgggattgggagcatttgatcatgtccaatccgtcaaggactgaagatgacagcaaacagctacctactgagtgggaaattgaaaaaggtgaaggaattgaatctatagttccacatttctcaggccttgagagagtcagtagtggctctgccaccagcttctggcacactgctgtatcgaaaagctcacagtcgacctctatcaactcatcatctcccgaagccaaacgatgcaagcttgcatcagaaagttcccctggagattcttgcagcaacatagactttgt

SEQ ID NO: 121935 - DNA, 682 bp, Arabidopsis thaliana
  unsure (1)..(682): unsure at all n locations
atgcnnnnnnnnnnnnnnnnnnnnnnnnnnnnnnnnnnnnnnnnnnnnnnnnnnnnnnnnnnnnnnnnnnnnnnnnnnnntcccacgcgtccgcgtctctctctctcgggtcaaaattagggtttcgtttcactatccagagtgtatacaaaggttgttgtggagcttttatcagatcacaggaataagatggaggtatttggaaaatctcccatggttgttacatctgccaatgttatttacttgtctgcaattctgggtcgcgattgcgatggacacaaatgtgattggaaatgtgagaatgaaaatgtttgtgggaatatgtatcgctgcaaactaactggactaactcatgtctgcgacaagaactgtaaccagcggattctctatgataaccatagctctttgtgccgagccagtgggaggattttccctctctcgtccgtcgaggagcaggcggttaaaggtgttcggaggaagcttgacgccgctgagagtcatccttttgagagctgttcgtttaagcgtcgtcgttcggatgctcaattccatcgctttcctttcaagaagacttatactgcttggaggcctatctggagccccgctggagacagaangaagatggttaagattacatgttgatctccngaaattctgagactgagaggccttttatcttacg

SEQ ID NO: 121936 - DNA, 515 bp, Arabidopsis thaliana
  unsure (1)..(515): unsure at all n locations
nnnnnnnnnnnnnnnnnnnnnnnnnnnnnnnnnnnnnnnnnnnnnnnnnnnnnnnnnnnnggctcgagcgtcatcgtcttcttcttctgattctgattaattccagatgtcttcctgagtcttacggagattaggtcattttcgcctcgactcgaactctgtctcgcagcttccgtgagagagtcatggacacgccaccgacttctcgtatcgcatcttttggtcagacggagattaactgggacaaacttgacaaaaggaggttctacattaatggagctggcctcttcactggtgttacagtagctctgtatcctgtatccgttgtgaaaacaaggcttcaagttgcttctaaagagattgctgagagaagtgccttttctgtagttaaaggaattttaaagaatgatggtgttcctggtctgtaccgaggttttggtactgtcattacaggtgctgtacctgcaagaatcatatttctaactgctcttgagaccactaagatttctgctttt

SEQ ID NO: 121937 - DNA, 457 bp, Arabidopsis thaliana
agtttttcttcggcattgactttaccaatcacaactttctccgggatcgccgatttatcttcgtttcaaccatgactcgtggaagtcagagagagcgtgaccgtgaaagagctgccgctcgtgctggtggaaagggtaagaatggtgacgatggtttgacgccggagcaacgccgtgaaagagatgggaaagcattgcaagagaaagcggctaagaaagctgctcaagctgcaggtgcgagttctggtggtgcagctggaggaaaaggagctgctgctaagaagtgatgatgatcatttggtttgtcttttgagcatattgtagactttatgtttgaaattgggttgtttagacctgaagctttgactcttgtctgaaatcccattataatgtccttgtgttgaatttgctatttgatgcctttggtgaaatcttatttggtctttctttgatcaat

SEQ ID NO: 121938 - DNA, 451 bp, Arabidopsis thaliana
tttttactctgtttttgttttcttcgacgactgagataaaagattcatacaagaaaaaagcaaatttcgccactgatggatcctatggagtcgtctagtgaacaggacattgttgaagagagtcaaaagctggttgactcattggacaagcttcgtgttagtgctgcgagttcatcttctaatttcaagaagaagcctatcattattatcgttgttggaatggcaggtagtggaaaaactagctttcttcatcgcttggtctgtcatacttttgattcaaagagccatggttatgtggtgaaccttgaccctgctgttatgtctctaccatttggtgccaacatcgatataagagacactgtcaagtacaaggaagttatgaagcagtataatctgggtcctaatggtggaattctcacttcactcaacttgtttgctactaaattcgacg

SEQ ID NO: 121939 - DNA, 515 bp, Arabidopsis thaliana
atacgactcactttagggaaagctgcgtacgcctgcaggtaccggtccggaattcccgggtcgacccacgcgtccgacttattacaaagtgaagtgattccaaaggcatatcttccgttctgtctaatcttattctttgttttaaacccctccatgcactcctcttgtttatatatttattgcttcttctctaagtttgttgagtcctaatcatctctctatctagcaacgtataaatataaagagagagagcagagaaatgggtttcggctccttcatatctaccatcacttactgtttgttctttcgctatccacataagaagccaaagttcaaaagtgtgagccacctcaaccattaccacaccatgccaatggctcgtccactttctttacagacgatagacctgaaagtaaggatgtgttgcagtggatgtgagagggttgtcaagcatgccatttacaagctgagaggggtggactcggtggaggtgaacctagagatggagagagtaa

SEQ ID NO: 121940 - DNA, 563 bp, Arabidopsis thaliana
aatacgactcaccttagggaaagctcgtacgcctgcaggtaccggtccggaattcccgggtcgacccacgcgtccgcccacgcgtccgcacaaagatcacaaaaatggaggtcgaaggcaaaggaggagaagctggaaccaccaccacaaccgcacctcggaggttcgcacttccggtggacgcggagaacaaagcaacaactttccgactattctcagtcgctaaacctcacatgagagctttccatctctcatggtttcaattcttttgctgcttcgtctccactttcgcagctccgcctctcctccctgttatccgtgaaaatcttaacctcaccgccaccgacatcggaaacgccggaatagcctctgtctccggcgctgttttcgctcgtatcgtcatgggcacggcatgtgatcttttcggtccacgtctagcctccgccgctttgacgctctccaccgctcccgccgtctatttcaccgccgggataaagtctccgatcgggtttatcatggtgagattcttcgccggattctctctcgccactttcgtctcgact

SEQ ID NO: 121941 - DNA, 881 bp, Arabidopsis thaliana
  unsure (1)..(881): unsure at all n locations
nnnnnnnnnnnnnnnnnnnnnnnnnnnnnnnnnnnnnnnnnnnnnnnnnnnnnnnnnnnnnnnnnnnnnnnnnnnnnnnnnnnccacgcgtccggcttacagacaactaagaaaaaaaataaaaatgaagatgtttatctctcctcaaaccctagtactattggcattagctcttgtcctagcttttgcagttccactgaaagcccaagaccggcgacaagactaccttgatgtacacaaccatgctcgagacgacgttagtgtgcctcatataaaatggcatgcgggagcagcccgatacgcctggaactatgctcaaagaagaaagcgggactgtcgtctcattcactcaaactcacgcggacgttacggtgaaaacttggcatggagcagtggtgatatgtccggagctgccgcagtgagattgtgggtcagggagaagtctgactacttccacaaatcgaacacatgccgtgctggaaaacaatgtggtcattatactcaagttgtgtggaaaaactcagagtgggttggatgtgccaaagtcaagtgtgacaatggtggaacctttgtgacttgcaactattctcatcctggtaatgttaggggacgtaggccttactaactatatgtgtacgcagacgaaagaaacttgtccatagaggacgtgtgtgttttctataatttggaataaatgatcaccatctatcaggatgtggtggttcctttgtacgtttatagtttgtataatattttgtcatggaataatacttttttcttgtgtgtgcttnnnnnnnnnnnnnnnnnnnnnnnnnnnnnnnnnnnnnnnnnnnnnnnnnnnnnnnnnnnnnnnnnnnnnnnnnnnnnnnnnnnnnnnnnnn

SEQ ID NO: 121942 - DNA, 838 bp, Arabidopsis thaliana
catggaaattcttacatgagtgccctctttttcgccctcattatacttcttgttgacggattcccagagttgtctatgacggctcaacgtctagccgtgttttataagcagaagcagttgtgtttctatcctgcatgggcgtatgcaatccctgcaacagtgttaaaggtccctctctcgttctttgaatctctcgtttggacctgcctctcatactatgtcattggatacacccctgaagcatccaggttcttcaagcagttcattctactctttgctgttcacttcacctcgatatccatgttccgccgcccggccgcaatcttccagacagtagttgcttcaatcacagctggcagttttggtatattattcacatttgtctttgccggtttcgtcattccaccaccttctatgccagcatggctcaagtggggtttctgggcaaatcctttgagttacggtgagattgggttatcagtaaacgagtttcttgctccaaggtggaatcagatgcaacccaataattttaccttaggacgaaccatactccaaacccgtggaatggactacaacggttacatgtactgggtatcattatgtgccttgttgggtttcactgtgctcttcaacatcattttcactctggctctaacgttcttgaaatcacccacatcatctcgagccatgatttcgcaagacaaactctctgagctgcaaggaacagaaaagtcaacagaagattcttctgtcaggaaaaagaccacagactcccctgtaaagaccgaagaagaagacaaaatggtcttaccattcaagcctctcactgtaacatttc

SEQ ID NO: 121943 - DNA, 422 bp, Arabidopsis thaliana
tccctaattctccaaattttggggttttacattttccttatcaagagaacacctgaatctgaaaatgatcactacagtgctacgacgatctctccttgatgcgtcgaagaggaatctctccgcttcgttgacctcaatcaatactgttctgtttcacaacctggccccagccgccactagagtctccgacctagccttaattggatcttccgatgtcaaagctgggtttccgtttggtgttgaagcgaaaggaattcattttcaatctgggccgttggattttagagcttcgatggtttctcaagctggatttgcgatctctgagagtagcgagagaagggttggtgattcggagagtgttggtggtgatgggcttgcgatatctgagcttgggatatctccggagattgttaaagctttga

SEQ ID NO: 121944 - DNA, 893 bp, Arabidopsis thaliana
gcagtaccgcaccggaattcccgggtcgacccacgcgtccgcagaaaaaaaaaaataaacacaaaatttcaataaccatggagggtgttagtgcaactatgcataagttaaggccttatttgttaatgatctttttgcaatttggagcagcaggaacatatattgttattatggccactcttaaccaaggccagaaccgttacgtcgtaattgtgtatcgtaatcttgtggctgctcttgtccttgcaccttttgcactcatctttgaaaggaaagtgaggccgaagatgacactatcggttttgtggaaaataatggcacttggtttcttagagccagtcttggatcagggttttggttacttggggatgaacatgacatcagcaacatatacatctgcgatcatgaacattcttccttctgtcacatttataatagcttggattttaagaatggagaaagttaacatagcggaggtacgaagcaaagcaaagatcattgggacattggtgggtcttggaggggcactagtaatgacattgtacaaaggtccgcttattccttttaccgggtctaacccgaatatggatcaacaaaacggacctccaaatagttcacaagaccataacaattgggtttggtggaaccctggtggattctcctcgggttggggtgcttggccctggtttttatggttttaccaggccgataaccaaataaaagaccgtccccttgcccaatcttttcattttttaagccccttaaatattgccttagccccggggggctgttccccaaaagccttttccgcggtaaccgcctttgttgggtgggaaaaagaacaccccttataccggaatggggccgggtttggtttggggaaagccaaaggc

SEQ ID NO: 121945 - DNA, 730 bp, Arabidopsis thaliana
aatgactcgtgcccctgaaaattacttctacaggcttctcatgcttaattcaccggaatggccttactcaatcatgggagcagcaggctcaattctttctggtttcattggtcctacctttgcttttgtgatgagcaacatgatcgaagtcttctactacacagactatgattcaatggaaaggaaaacaaaagagtatgtcttcatctacattggtgctggcctctatgctgcgggtgcttattcgatccaacattacttctctagcatcatgggagaaaacctcacaacaagagtaagaagaatgatgctctcagctatcttgagaaacgaagttggttggttcgatgaggatgaacacaactcaagcctgatcgctgcacgtttagctactgatgcagcagatgttaaatccgttatagccgagagaatctcagtaattctacaaaacatgacttcacttctcacatccttcatagtcgccttcatagtagaatggagagtctcacttctcatcttaggcacattcccacttctagtcctcgctaactttgctcagcaactatctctgaagggttttgctggagacacagttaaggctcatgcaaagacttcaatgattgctggtgaaggagtcagtaacattagaaccgtagcagctttcaatgcacagagcaagattctctctttgttctgtcatgagcttcgggtacctcaaaaaagaagctta

SEQ ID NO: 121946 - DNA, 743 bp, Arabidopsis thaliana
  unsure (1)..(743): unsure at all n locations
cnnnnnnnnnnnnnnnnnnnnnnnnnnnnnnnccgctggacgcctgcggtaccgggccgctctcccagggcgccatgcgtccgcttctctcgaatttacgcaggaagatcattagcagagaattctcatctgattcagtccatggctgccacggctcttttccgatcgattcgccgacgcgacgtcgtctccgcgcctctttccgtttacaaatcccttgctggtaatgctcaaccttcctggggtagttcatacattggtcagaactatgcaagtttctccagagctttcgggtcaaaacctgttgtgaatgacattcttggtactggtttgggcactaacaatgccattagagaggagagagagaagtcaaaatctactgaagctgcaattgttggtgctcaattgactcgatctttccgtgctcttgatgtgggaacatcgaaacgattgttttctacaatctcaggggatataaagacaacacaggaggaaccaaaaatcaaaagctttcgccctttatctcctcacctttctgtttaccagcctcagatgaactccatgctatcgattttcaacagaatctcaggggtttacttgaccggtgtcactttcgctggctaccttctctacctgaagatggggatgacctgcctaaacttccccggggtttttcccagggccctttcccttaaaaaagggaattttccngtcataaccgcgggttacttgnannnggcngc

SEQ ID NO: 121947 - DNA, 438 bp, Arabidopsis thaliana
ttttattttttttttttttttgaacaacacgtgacatgttacgaacatccaaaatatagttggtgaataagaaactctgcaacaaatccgataaacatagaaaataagactgcaaattgagaaattttgtcacttcattcgacctacgatgaccatcgccatctctcatccgcttactctggcttccgggccaagaagaaatacattggcgtgaaaatctctctccttccaccgtcgactaatccttccgcagcctgctccaggaaatttgagaccctttggcttccttgaggtgcaagtcttatgtattcaaggatcttgaccatgtttttggttatgaatcgtccaacagctgtaaggcggaagctactgagtgagaaatacattggcgtgaaaatctctctccttccaccgtcgactaatccttccgcagcctgc

SEQ ID NO: 121948 - DNA, 623 bp, Arabidopsis thaliana
cagactactaaagagtaaagactagtaacaacaaacctgaactcatgccaagttagaattgagatttggagtttcgacaaagcttgagagagatcgatgtcgtcaaagatggtgaagtcttcagaaatcgtcggaaaacttaatctcagggcacaccaagaaggaggctttttcgctgaaactttcagagattcttctgttttcctctccacctctcagctccctccaacctttaaggtggacagagctgtgagcacaagtatctacttcttgcttccatctgggagcgtttctcgtcttcatcgcataccaatggctgaaacctggcacttttatttgggtgaaccccttactgtagtggaactctacgatgatgggaagttgaaattcacatgtcttggtcctgacttgtttgaaggtgatcagaagcctcagtacacggtccctccaaacgtctggtttgggtcggtttcccacaaagggggttcctttttctcaagacggggctctgcttaaagctgaggctagagactctgagaaccatttctctcttgttggctgcacctgcgctcctgctttccagttcgaggactttgagctcgcgaaacgctctgatctcttat

SEQ ID NO: 121949 - DNA, 360 bp, Arabidopsis thaliana
cccacgcgtccgtggagtttcgacaaagcttgagagagatcgatgtcgtcaaagatggtgaagtcttcagaaatcgtcggaaaacttaatctcagggcacaccaagaaggaggctggttcgctgaaactttcagagattcttctggtttcctctccacctctcagctccctccaacccggagctctcttccccggttatttgcatctatctatggcttcccttggtttggaatcttggtgatataggggcctcattaggttcccgttttgcattttgagatttcagcggtatgatcctccgaaatctgatcagacataagtcacggcttccgtagaattcttgtctttcctgttaccaag

SEQ ID NO: 121950 - DNA, 385 bp, Arabidopsis thaliana
cctttgttctcaaacaccaaaagcaaaacatcacaaaagaaaagagactaatcaagaagagatatcatcaattgaagctgttttcttgagtagagatggcgaaccatagaatgagcgaagctacaaaccataaccacaatcatcatcttccttattcacttattcatggtctcaacaacaatcatccatcttctggtttcattaaccaagatggatcgtccagtttcgattttggagagctagaagaagcaattgttctgcaaggtgtcaagtataggaacgaggaagccaagccacctttattaggaggaggaggaggagctacgactctggagatgttcccttcgtggccaatcagaactcaccaaactcttcctactgagag

SEQ ID NO: 121951 - DNA, 484 bp, Arabidopsis thaliana
cgactagcacatcagctggattggatcagattctaccatggatgttctaccataaggttctaggcgtctcaacattcttccttttcgttgaagggaaagctgctactccgagtatttctaaagtgctcgagtctattcctggtgttaaagtaatatacaggacgaaagagcttgaggagaagcaagcgaagagccggatttggaatgagacctggctttcgtctttcttttataagccctgcaattatgagttatttgtcaaacaatctctcaacatggaaatggctattgtcatggctagggatgcgggcatggattggatacttcatcttgacactgatgagctgatatacccagcaggtgctcgtgagtactcactaagacggttgctgcttgatgttcctccaaatgtggatatggttatatttccaaattacgaaagcagcgtagaaagagatgatatcaaggatccttttacagaggt

SEQ ID NO: 121952 - DNA, 896 bp, Arabidopsis thaliana
tccggaaagaatcctatgaattcttcattattggctgaggtgtatgtcgatatttttgctgcaataatcctaatcactggaggaggaatctgcttctatggcctgcgtctgctctttaatctaagaaaggtgcggtctgaacaagtttcatcagagatgcgaaaggtatcgggtctagcaggagtctcagttgtttgcttcactgttagctctttaatcgctcttctcacacacattccactcttttatcattggaacccaagcaaattacacggcatcaaagcattggttcttctgatcatatactatttcataggttccaccgtcccattggctttcgttttatgggttttgcgggagttaccccctcaaaacattgtgagtaggcaagaagacaccagaaggattacttatgtcaactatgaaactgttccaaggcaacctcaaggtcctcaacaagactgggcctccgccacagtgtcgaaaaatcaggtgtctaaagcaagtcctatatgaaccaaacaatcatcataatcattgacctgaagcaaacatccgccaatcttcttttgtagttaccgggaaaaagcctcgtgggattgcagaatggttcttaggcccaatgtggtgtgttgtggtggagtgaatgaaagtggaaacaagctcgttttcttctctctgagtcgccttggaatacaaaaatttgtttataagatagaaatggaggtttgaatctgagaaagctgtctgtaaatattaacttttgattgcaatttatagtttagcatcatgtgttggggggacttgtggatggatataaaatgtgttccaaggaagatataattttgtcttccatactaaaaaaaaaaaaaaaaaaaaaaaaaaagggcggccgc

SEQ ID NO: 121953 - DNA, 636 bp, Arabidopsis thaliana
  unsure (1)..(636): unsure at all n locations
ctatagtgttccttacttaattctcatacctctctctctctctctctcctttgcctaaccatttcttcatcatcttctttctgcagatttctccgtttttccttgaatatgccttcaaaaaatctacaacaggcagtcctcacaaacgaattcacaaccaacttcattacgacctgtaaggactggctcgacgtaaatggtcttgctaaaggaaacttggagaagaagagagatgataatgaagaagaagagcgtctgaaaaccgagtctaaacttccgggccatgacatccacggtttcgataacgagatcaagtcattgcaacacttcttgttggatcagaaggttaggagggagttcaagagtcttgtgattgtcggagaatatggtgttgggaagacagcattatgccagaagatcttcaatgatgaagctgtgaagagtgtttatcctcccagggtttggntgtctatggaaaacaaagaatctaaggagggacttnatgggaagatatgtgtnttgaagaagatcttgaagggtcttggagttgaagagttaatcctcgaaactatcagtactgatgccaaacaagattttaaggacaatgaggaagttgcaagcaatcaggaagctgga

SEQ ID NO: 121954 - DNA, 506 bp, Arabidopsis thaliana
cggcactatacgactcctatagggaaagccggtacgcctgcaggtaccggtccggaattcccgggtcgacccacgcgtccgagcaaactcaagatttcaagtaaggcaaaacctaaagaatcaaagggtgaatctgagagacgttcacattcattgatgcctacatttagcagagagagaggggagagcgaatcacacaagccttccgtctctggacaacccttgtctagtacagagagaaatcaggcagcctcaagcaggcacactatttctatcccgcggccatcattaagtatggacacagatcaagctgaatcgcgtaggcctcatcttgtgatacgaccaccgacagaaagagaacagcctcagaagaaacttgttataaaacgttcgaaagagatgaatgatcatgacatgagtagtcttgaagagagtccacggtttgagtcccggaaaacaaaaagaatggcagaactggcgggttttcagaggcagcagagctttag

SEQ ID NO: 121955 - DNA, 806 bp, Arabidopsis thaliana
  unsure (1)..(806): unsure at all n locations
atcgactcatatagggaaagacggtacgcctgcaggtaccggtccggaattcccggttcgacccacgcgtccgcccacgcgtccgggataataaaacctacgaactcgtcaccaaagaaatctttggaccatttcagattgtaacggaatacaaaaaggatcaacttcctctagtgttggaagcattggagaggatgcacgctcatctaactgcagctgttgtttcaaacgatcccatctttcttcaggaagtaatagggaactcagtgaatgggactacatatgctggactaagaggaagaacaactggagctcctcagaatcactggtttggacctgcgggggacccgagaggggccgggatagggacaccagaggctataaagctggtttggtcatgccacagagaagtcatctacgattatggtccggttccacaaggttgggaacttcctccatctacttagaagtggtgtgtccactaataattaataaactaagatcttagtgtgctgttgcatcaaataaatatgagttttgtagttttatctctacgagtagtttccgtgtgagggaataagagcttgaaacatgaagttttcaacgacgtggacttagtcaaggggttgagggattaagacagagagagaactattgtaaaactcagtccaccagaaattttcttcagctcaaagccagacaataatacaaatgtttttgaaaaaaaaaaaaaaaaaaaaaagggcggcagctctagaggatccaagcttacgtacgcgtgcaggtgacgccaangatcttctata

SEQ ID NO: 121956 - DNA, 756 bp, Arabidopsis thaliana
  unsure (1)..(756): unsure at all n locations
tggacatgggggtccnccactactcnctttttcaacgcccctcttctcnggagtattgggacncgtgatggnctnctttgctggactnagnggaagaccactggagctcctcagaatcactggtttggacctgcggggncccgagaggggccgggatagggccnccagaggctataaagctggtttggtcatgccacagagaagtcatctacgattatggtccggttccacaaggttgggaacttcctccatctacttagaagtggtgtgtccactaataattaataaactaagatcttagtgtgctgttgcatcaaataaatatgagttttgtagttttatctctacgagtagtttccgtgtgagggaataagagcttgaaacatgaagttttcaacgacgttgacttagtcaaggggtagagggattaagacagagagagaactattgtaaaactcagtccaccagaaattttcttcagctcaaagccagacaataatacaaatgtttttgaaagaagaagagtgaaaagaaaaacaagatgataacttgttaatgttctcttcattaataatgttgctaagaccctaatctaatcgatcttaaataatctaatgaacagttttttttcatcactatcatgggaaaacaatagaaagggactctaccagtcctgatcattttggagttggtaaacagacaaatacaaccatggtgattgtgtccttgaaacaaaaacgccaaagtgatctgcaa

SEQ ID NO: 121957 - DNA, 1226 bp, Arabidopsis thaliana
  unsure (1)..(1226): unsure at all n locations
atgatttgccggcannnnnnnnnnnnnnnnnnnnnnnnnnnnnnnnnnnnnnnnnnnnnnnnnnnnnnnnnnnnnnnnnnnccacgcgtccgattttcttccactttctcgatctttgagatttctttcaaaggaagaaaaaaaaaaaaactcgcgatgtccgccgaatcagctagccaaattcctaagggacaggttgatctactagattttattgactggtctggtgttgaatgtcttaaccaaagctcaagtcactctttgcccaatgctctcaagcagggatatagagaagatgaaggtttaaacttagagagtgatgctgatgaacaacttctcatctatattccttttaaccaagttatcaaactacattcctttgctatcaaaggccctgaagaggaaggtcctaaaactgtaaagtttttctcaaacaaagagcacatgtgcttcagcaatgtcaatgattttcctccaagcgacaccgctgaactaactgaagaaaaccttaagggaaaaccggtggtcctaaagtacgtaaagcttcagaatgttcgtagcttgacgatcttcatcgaagccaaccaatcaggttctgaggtcaccaaggttcagaagattgctctctatggctcaacggtggagacgactgatatgaagggattgaaaaagattgaagatccctgagcctacaaaagggtttaaatcatatgatcggatatccaggttgatttctagggttcctattgcgtttcatccggttgttttttacctaacctttttcttgaaatnaaaaaagaacacgaacttggggattgcccaaaaaaaaaataaaaaggggcggcccgctctagaaggaatccaagcttaacgtacccggggcctgcgaatgtattaactttttttatagggcgcccctaattcaaattccctcggccggggttttaacaaggcggagactgtggaaaccctgtgggtcacccaacttaatggcttggaaaacatccccttttgccagtttgggtattaacagaaaggccccccccgacccgcctctcccaacattgcccctccttaatgggaaatgggacccgccctttatcgggccattaaccgcggcggtgggtgggtgttaccccaagggaaccgttcatttgcaaggccttaaccccttcttttttttttcctttttttcaccagttgcggttttcccgaagattaatggg

SEQ ID NO: 121958 - DNA, 894 bp, Arabidopsis thaliana
aggtgacactatagaagagctatgacgtcgcatgcacgcgtacgtaagctcggaattcggctcgagctttctcgatctttgagatttctttcaaaggaagaaaaaaaaaaaaactcgcgatgtccgccgaatcagctagccaaattcctaagggacaggttgatctactagattttattgactggtctggtgttgaatgtcttaaccaaagctcaagtcactctttgcccaatgctctcaagcagggatatagagaagatgaaggtttaaacttatagagtgatgctgatgaacaacttctcatctatattccttttaaccaagttatcaaactacattcctttgctatcaaaggccctgaagaggaaggtcctaaaactgtaaagtttttctcaaacaaagagcacatgtgcttcagcaatgtcaatgattttcctccaagcgacaccgctgaactaactgaagaaaaccttaagggaaaaccgggggtcctaaagtacgtaaagtttcagaatgttcgtagcttgacgatcttcatcgaagccacccaatcaggttctgaggtcaccaaggttcagaagattgctctctatggctcaacggtggagacgactgatatgaagggattgaaaaagattgaagatcactgagcatacaaaagtgttttaatcatatgatcgtatatcagtttgatttctagtgttctattgcgtttcatcgtttgttttttacttacttttttttgaattaaaatagaccagaacttgtgattgcctattcgcaggaattcgaaacgaaggataagtcaatttgaaaaaaaaaaaaaaagggcggccgctctagaggatccaagcttacgtacgcgtgcaggcgacgtcatagatcttctatagt

SEQ ID NO: 121959 - DNA, 430 bp, Arabidopsis thaliana
tctgtacaatccaccattggtgacgtgccatcttcatcctctgagatggggaggtcctccttcttcttatcgttatctattctttgatgttagcgcggtgcaatctgcagaatcgatcttcctcccaagtcaaatcggagttgaagattcccgcgtctttgaatctcttaggcttagtcctgtatgctccgcggctgatccaaacctcaactacaagccggtcatcgggattctgacccaccctggcgaaggtccacgggacgctcgccttcactctctgaaaaactacgcctacgcgacgaacatatcgtacatcgcagcttcgtatgtgaagttagctgagactggtggagctcgtgtgattcctcttatctacaacgagcctgaagaaatcttgtttcagaagctagaattggtaaatggtgtgata

SEQ ID NO: 121960 - DNA, 486 bp, Arabidopsis thaliana
tcttattcgtgtccgcagaagaaacgagagaagagagagaagcaaaagaccttaccaagaatatttataacacacaaacatctagagacagagatagacatagagagagagcttgtggttgtggttgtgcgagataatatctagagatggggaagaagaagtgcgagttatgttgtggtgtagcgagaatgtattgtgagtcagatcaagcgagtttatgttgggattgtgacggtaaagttcacggagctaattttctggtggcgaaacacatgcgttgtcttctatgtagcgcgtgtcagtcacacacgccttggaaagcttctgggctgaatcttggcccaactgtttctatctgtgagtcttgtttagctcgtaagaagaataacaacagctccctcgccgggagggatcagaatcttaaccaagaagaagagatcattggttgtaacgacggagctgagtcttatgatgaggaaagcgatg

SEQ ID NO: 121961 - DNA, 762 bp, Arabidopsis thaliana
  unsure (1)..(762): unsure at all n locations
nnnnnnnnnnnnnnnnnnnnnnnnnnnnnnnnnnnnnnnnnnnnnnnnnnnnnnnnnnnnnnnnnnnnnnnnnnnnnnnnnnccacgcgtccgcccacgcgtccgcggaccttttctctctcccctgaagctcccctcactcactcttctccgaggaagaacaacagagacaatggcggttcccaaagccattattctacctatcttgctactcatctgtggtgctgctctcggagctcctgcttctgaaggttatcttcgtaatggaaacttcgaagagtcaccaaagaaaaccgacatgaagaaaacagttctactaggcaaaaacgccttgcccgaatgggaaaccaccggtttcgtcgagtacatcgccggcggtcctcagccaggaggcatgtacttcccagtggctcatggagtccacgccgtgaggctcggaaacgaagctacaatctctcagaagttagaagtgaagccaggttctctctacgcactcacgtttggtgcgtcgagaacttgtgcacaagacgaagttcttagagtctctgtaccttctcagtccggtgacttgccacttcaaacactttacaacagtttcggaggtgacgtgtacgcttgggccttcgtcgccaagacttctcaagttactgtgactttccacaatcctggagttcaagaagatcctgcttgtggtcctttgttggacgctgtcgccattaaagagcttgttcaatccaatctacaccagagggaacttggtga

SEQ ID NO: 121962 - DNA, 679 bp, Arabidopsis thaliana
  unsure (1)..(679): unsure at all n locations
tatacgactactatagggaagccggacgcctgcaggtaccggtccggaattcccggtcaccacgcgtcgacaaatattccaggtcatagcttggtgttgagttctcttctatctttctcatggagacgagctctaacttgtcttccatggttcgtcttaacatttggtggatagaaatttttgtacgaccattgatactttgactattcgtgagccagactcaatgctcgcagcgatgtttagtggtcgacatgcaatgtgccaggaatccaaaaagggatatgtattcatagatagggatgggaagcacttccgtcatattttaaattggttgcgtgatggcgttattcctagtctgtcagatcctgattgttctgaacttttgcgggaagcagactactatcagcttcttggactgaaagatggaataaaagattcgagataagatgttggtgaagtagaagctgaattaacgcgtatagatatcatcaaatgtatacaaaccgaaagagtcaggttccgaggagttaatctttctggaatcgatctttctaaactggatctatcccttgtggatttcagctatgcttgtctcaggaatggtgttttctctcgtacanatcttcaatgtgccaaaattcggaatgctgatgcagaaggctncatctttcacaatgct

SEQ ID NO: 121963 - DNA, 791 bp, Arabidopsis thaliana
cccactcgtccgctcctgcctcctctgaacttctagagcttgctgcagctcgggactcggtatctgcaaaaaacagaaagccccaatgattttgccatcgatgctgacccgtttgttcaaagtcaggagagcctgaatgaattcccctttgcgatcaaagaacgggaatgggaatttatcagtatcttggccacggaggtcaaatccatggctgtctacggtgaccagataaggctccaacaggttctcgcagaatttctgctaagtattgtccgttatgcacccatggaaggctcggtagagctccatctatgcccgactctgaaccaaatggctgacggattctccgctgtacgtttggagttcagaatggcgtgtgcaggggaaggtgtgccgccagagaaagtgcaagacatgttccatagtagccgatggacaagtccagaaggattaggactaagcgtttgcagaaagattttgaagctgatgaacggaggggttcagtacataagagaattcgaacgctcttatttcctaatcgttatcgaactcccggttcctctaatgatgatgatgccctcttcatgagtggcattgaatgttttgattttggtccgggtaggtttagaaggaagtacttttgctacggggtacatgtaagagtagtagttatagttgggaacttttttggttgattcccttacgctgtgtatattattatagtctcagactctcagtcatagaatgtgagagtagttgtttgtgataatgtaatatctttcctctacagg

SEQ ID NO: 121964 - DNA, 703 bp, Arabidopsis thaliana
gcactctgtgcgttaggtttcattttagcggcagacgagagagctaaagcaaggagcaaccctaaccatggcgactcaaccagctactgaatctgtgcaatgcttcggaaggaagaagaccgcagtggccgtcactcactgcaagcgtggatctggtttgatcaagctcaacggttgcccaatcgagcttttccagcctgagatcctccgattcaagatcttcgagccggttcttctcctcggaaagcaccgtttcgctggtgtgaacatgaggatccgtgtcaacggtggtggtcacacatcccaggtttacgccatccgtcagagtatcgcgaaggctcttgttgcgtactaccagaagtatgtggatgagcagtcgaagaaggagattaaggatatcttggtgaggtatgataggactctgcttgtggcggatccgaggaggtgtgagccgaagaagtttggtggtcgtggtgctcgttctcgttaccagaagagttaccgttaaacaaagctggtttgtgttttgtttttcaatttggaatcatcgtaaggtttttttgggagtatggacttgtgagactctttagattttataatttctgctttattatgcttgttggattatggtgattctccaagaaacttatgttttgttatgtctactattttcttatttttatttcattgtcttgttggtatt

SEQ ID NO: 121965 - DNA, 1035 bp, Arabidopsis thaliana
  unsure (1)..(1035): unsure at all n locations
caccaccatgtcagagcgcgaccgccgcgaacgagagagggataaggaccgtgaaccagaccgtgatagacgccgaggtagagacgaccgtgaccgtgaccgtgatcgagaccgggaaagagatagagagcgcgaccgtgaccgagggcttagaaacaaaaaatcccgatctcgtactccagaccaccacgctcgtgctcgccacgtgcgctctccggagaggtatcgctctcgttcccgctcgattgaccgtgaccgggaccgggaccgtcaacgacaccacaggcgcaggtctccttctccagatgctccgtcgcgaaaacggcctcgccagggttcagtagacgatgagaaagaaaggaatcgcaaaagagtagtgactgattccgttgacgagaatgcgtctactattactaagaagaaggataaacaaccaagtgatgctgctgataatggcggaggcgaagatgaagaaggaatggatgtgaatgagattgagatgatgaagatgttagggattcctactggatttgattccacaaaaggcaaaccagttgctggtgctgatgttagtggtattagagctgtaactaagcgtcagccaagacagtacatgaaccgtcgcggtggatttaaccgtcctctaccggccgagcgtaatcgctagtcttctcaaggtccctctaacgctgtcttgaacactagtcaaaaagatgagggctagagctgcatttcccagatagtagttactagttactccaattcttccccagactctgttctgatgtcttatagagaacaaacttgtactctctgaatttggttggaaacaactcgtgagttatttctttttcgagatttaaaaatgttaatgtttgtgtgtaatctcccggctctaactgtcagactatggttcatttgaaatcaggcttattcaaaaaaaaanaaaaaaaaaaggaatancacaagggcggacgctctagaggatcccagcttacgtacgcgtgcagtcgaccgtcataactctnctatagt

SEQ ID NO: 121966 - DNA, 671 bp, Arabidopsis thaliana
cccacgcgtccgcggacgcgtgggcttaagttgagcatctccaattcctcttgacacagctaaagatccctggattctccaaacaccgtgaaacgtatcaacaggaattggagatgctcaacttaagaaatgggttatagctgaaccagagacaaagatttcgagaatcgagcatgaccatgagtttttgatcttggcatctgatggtttatgggataaaagtgagtaaccaagaagcagtagccattgctcgtcctctctgcttaggaaccgagaagccattgttgttagctgcctgtaagaagcttgtcgatttatctgcttcacgaggctcgtctgatgatatcagtgtgatgttgatcccttttacgccagttcatatagaaaagagaggcatcttagaagattttaaatatatgataaacgttagaaatttggaggttttatatgatttagttcttttgtttaacttgatccattcatttatttattctttctaacttagtgaacaaagctaaactcattgtggctcaaaaaaaaaaaaaaaaaaaaaaaaaaaaaaaaaaaaaaaaaaaaaaaaaaaaaaaaaaaaaaaagggcggccgctctagaggatccaagcttacgtacgcgtgcatgcgacgtcatagaattctatagtgtcgcctcaa

SEQ ID NO: 121967 - DNA, 531 bp, Arabidopsis thaliana
aaagaaacaagaaaacgaaaggaaaaaatacagaaatgggtggtttgaagtttcatgtacttatgtatccatggttcgcaacaggccatatgaccccgttcctttttcttgccaacaaattggctgagaaaggtcatacggtcacttttttgattcccaagaaagctctgaaacagttggaaaatctcaatctgtttccacacaacattgtctttcgctctgtcaccgtccctcatgtggatggtctccccgttggcacagagacagtctctgagatccccgtgacatcagctgatctcttgatgtctgctatggatctcacacgtgatcaagttgaaggtgtggtccgagccgtggaaccggacctgatcttctttgacttcgctcattggattccagaggtagctagagactttggccttaagactgtaaagtacgtcgtggtatctgcatcgactatagctagtatgcttgttccaggtggtgagttaggtgttcctccgccgggatatccttcatcgaaggtgctgc

SEQ ID NO: 121968 - DNA, 682 bp, Arabidopsis thaliana
  unsure (1)..(682): unsure at all n locations
nnnnnnnnnnnnnnnnnnnnnnnnnnnnnnnnnnnnnnnnnnnnnnnnnnnnnnnnnnnnnnnnnnnnnnnnnnnnnnnnnnnccacgcgtccgcaaaacaaaaagaaagaacaatggccaaagctcttagccttacaatctttctctttctcttgatagcttccaatgtccaatccgctcgacttctcgatgaggttcaaactcagccacaattagtcccccaggtaccggaagaggaagatgatagtccacaagccgtaacaacaactccaacaccaattcctctcccaggacccgccacgggaggacccgagccaatcctagagttctttatgcatgacgtgctaggcgggtcacacccatcagcacgtgtggttacagggatagtagcacaaacagaggtgaatggaataccgttttctaaatccagcaacaacattttcccagtagataacgcagtgccgcttgtgaacgcaaacagcatcaacaacttaatcaatccaaacacaggtccactcctaacaggacttagtggctttaagccaacaccgtaattcaaaacagtaccggtacttttaaggtcccttggttcaaaaacttccctttttaccaggggtagttcctccanggtgcctcaaagtttnttggttttccgggtnngtggtccgggcttgttngggc

SEQ ID NO: 121969 - DNA, 1052 bp, Arabidopsis thaliana
tgcaggtaccggtccggaattcccggttcgacccacgcgtgcgccgacgcgtgggtcgaggcatcggacgttgatgaatgtgtttgataaatcaccattggtggataaagatgtgtttgtggctccgagtgcttctgttattggtgatgttcagatcggaaaaggctcgtcgatttggtatggctgcctccttcgaggggatgtgaataacatcagtgttggatctgggacgaatatccaagataatacgcttgtacatgttgcaaagaccaacataagtggcaaggttctacctactctgattggggacaatgtaacagtaggtcacagtgctgtcattcatgggtgtactgttgaggatgatgcttttgttggtatgggagcaacactacttgatggtgtggtggttgagaaacatgccatggttgctgctggttctcttgtgaaacagaacacgcgaatcccttctggagaggtgtggggaggaaatccagcaaagttcatgagaaagttaacagatgaagagatagtatacatctcacagtcagcaaagaattacatcaatctcgcacagattcacgcctcagagaattcaaagtcatttgagcagatcgaggttgagagagcgcttaggaagaagtatgcacgcaaggacgaggattacgattcaatgcttgggattacccgtgaaactccaccggagttgattcttcccgacaatgtcttaccaggtggtaaacccgtcgccaaggttccgtctactcagtacttctaattccaatctcaggttgtttttgtgtgttgaaatcatttcaagacaggattgattctctggaaggtcaagagagatattattttggttttaacttttcttccgagcaagcaggagatttatcatccttgctcaataatgtatggttgcattatgaagtcatttcttcgaggaacaatttgcagaaagagaaacaaagttggaataaaaaaaaaaaaaaaaaataaagggcggccgctctagaggatccaagcttacgtacgcgtgcatgcgacagtca

SEQ ID NO: 121970 - DNA, 614 bp, Arabidopsis thaliana
  unsure (1)..(614): unsure at all n locations
cataaacctctctctatctggtggagcgacaccaaaaacaacaaagccttctcattttcacactttgggtaatcggagaatcacaaaaaaatgggaaccctaggacgagcaatttacactgtgggtaactggattcgtggaactggtcaagctcttgatcgcgttggttctcttcttcaaggaagtcaccgtatcgaggaacatctgtcgaggcatcggacgttgatgaatgtgtttgataaatcaccattggtggataaagatgtgtttgtggctccgagtgcttctgttattggtgatgttcagatcggaaaaggctcgtcgatttggtatggctgtgttcttcgaggtgatgtgaataacatcagtgttggatctgggacgaatatccaagataatacgcttgtacatgttgcaaagaccaacataagtggcaaggttctacctactctgattggggccaatgtaccagtaggtcacacgtgctgcaatcatnggngaccttttgggggtatcctttttttgnatggggcaacctacttnatgggtggggttaaaaaaatccatggtcctntgnccttttnaaaacncggntcctttgggggttggggacc

SEQ ID NO: 121971 - DNA, 1203 bp, Arabidopsis thaliana
  unsure (1)..(1203): unsure at all n locations
atgatacttcagctctctacgactcactatatggaaagctggtccgcctgcaggtaccggtccgctctctgtctctctctttgggtaatcggaaaaatcagaaaaatgggaaccctaggacgagcgattcacactgtgggtaatcggattcgtggaactgcccaagcccaagctcgcgttggttctcttcttcaaggaagccaccacatcgagaaacatctgtcgaggcatcggacgttgattactgtggctccgaacgcttctgtgattggtgatgttcagatcaataaaggctcgttcatttcgtatgcaagtgtttctcgtgatttgcagtatcctcgtgcaatgggaatgggacaggtccggagatttagcgaagatgtttctcacatgcctgaaatggaagactctgatgttctgaatgcattcaaagacttgatggctgcagattgggctgagcttccttctgctgttgttaaagatgctaaaaccgcgatatcgaaaaacacagatgacaaggcagggcaagaggctttgaaaaatgtgttccgagcagctgaagctgtagaggaatttggtgggattctcacttcgattaagatggaaatcgatgatagcattggaatgagtggggagggtgtgaagcctttaccaaatgatataaccgatgcgctgcgtactgcttatcagaggtatgctgagtatctagactcctttgaacctgaagaagtctacttgaagaagaaggttgagatggagttggggactaagatgatccacttgaagatgagatgcagcgggcttggttctgaatggggaaaggttactgttcttggaacctcaggactctcgggatcttacgtggagcaaagggcctaaaacaaaaagagaagatctagaattacgtgcgaagcttgttatgttgttattgcgttattttgtcttagcacataataaaggtcaatctgaccaaaagacatatcaggtgagtctgttcattgtttcctccaaatgaagctttaaaatttagagcttaaccccacattgaaaaataaactcacatgaatttgtcgttcatttgttactgtttccttttatgagagatcttttgtttatnnnnnnnnnnnnnnnnnnnnnnnnnnnnnnnnnnnnnnnnnnnnnnnnnnnnnnnnnnnnnnnnnnnnnnnnnnnnnnnnnnnnnnn

SEQ ID NO: 121972 - DNA, 627 bp, Arabidopsis thaliana
  unsure (1)..(627): unsure at all n locations
atgatcctnnnnnnnnnnnnnnnnnnnnnnnnnnnnnnnnnnnnnnnnnnnnnnnnnnnnnnnnnnnnnnnnnnnnnnnnnnnnccacaggtgcgcccacgcgtccgcccacgcgtccgtctctctctctggcttgctgtttactctcatcgtctcctttacttcattcgtcttcttcctctctttcccacaagctcccattgatatagagagagagatttaaggaaggaatcatggcagggggtggagctccagcacccaaagcagacgaaccacaaccacatcctcctaaagatcaacttcccaacatttcttattgcatcaccagtcctcctccttggcctgaagctattcttcttggattccaacattaccttgtgatgcttgggacaacggtgctcatacctactgctcttgttccccagatgggaggtggatatgaagagaaggcaaaggtgatccagactattctctttgttgctggcatcaacacattgctccaaacactgttcggtactagattgcctgctgttgttggagcttcctacacattcgtgccaacaacgatatccataatcctctctggcagattcagtgatacctctaaccctatagatcgctttgaga

SEQ ID NO: 121973 - DNA, 478 bp, Arabidopsis thaliana
catttatttgataaatagatttaagctaagagttaaaaaaagatggcaacactaggagatattggagtagcagcagcaatcaacatactcactgcaatcatcttccttttggcatttgcaatcttgaggattcaaccattcaacgatagggtttatttccctaaatggtatctcaaaggtataagaagcagccctttgcattcaggtgctcttgtcagcaagtttgtcaatgttaacttaggctcatacctccggttcttgaactggatgcccgcggctctaaagatgcctgagcctgagcttattgatcatgctggattggattctgctgtctacttgaggatttacttgatagggcttaagatctttgtaccgatagcgttacttgcttggtcgattcttgtacctgtcaattggactagtcatggtctgcaactagctaagcttcgtaatgtgacatctagtgatattgataagt

SEQ ID NO: 121974 - DNA, 1187 bp, Arabidopsis thaliana
  unsure (1)..(1187): unsure at all n locations
atgatctnnnnnnnnnnnnnnnnnnnnnnnnnnnnnnnnnnnnnnnnnnnnnnnnnnnnnnnnnnnnnnnnnnnnnnnnnnnnccacgcgtccgcgttcatatggagtttcgttccctggttcgaaacagcagctagacgaaaactgtgtaatggctatatcactgaagaggaaccgtttcttcattccttatacgaatctcgtcttcttcttcttcttgtgtgtctctctgctcgataaaactgtatccatcaggatttcgaatcagatctcggatactgtcgttgattctcccgatcgtcctttgaaatctgcggttttcgctcttggaagcttctggagatcggaggcggcgtttggttgtatcaatggcgtcgtacgaacctccgccggttacgccggtggaacgaagacgaatccggagtataggaacttaggtgatcacgccgagtccgtacaggttgaatatgatccaaggataattggttatcgtcagctcttagatgtattttggtctagtcatgattctagacaagtgtttggacaaggtcctgatgtgggtaatcaaataccagatcctgtaattttcactaattctacagaaggattgagactcggcttctaccagcaaagaaagggggcaactttattacaagaagcagtatcgtgaccactcaaattcaacagctaggaacgttttatcgcgcagagcctgatcaccagaagttcgagctgaaacaacatccatttcttattcagctaattggaaacatggtagaagaagagcttgagagatcagctctagccacaaaactaaacggttacgcagccgagctctgcccgcctagaatccagaaacatatcgactctagagttaatgagatcattagaaaaggttggcccgtcttgagagacatctaatatataagccttgtgagatcttcgcgttcttggatttgattgcttagtctcagatgtaagttttggttcattcttttggccaggaatttggtcacaacaatgtttatgtcttactcttgccccttgagtggtgattgttcagcgttttgtcttgtttcttttaagatctctcaaatagtatatgctttttgttttaaaaaaaaaaaaaaaaagggcggccgctctagaggatccaagcttacgtacgcgtgcatgcgacgtcatag

SEQ ID NO: 121975 - DNA, 623 bp, Arabidopsis thaliana
  unsure (1)..(623): unsure at all n locations
cagctctatacgactcactattagggaaagctggtacgcctgcaggtaccggtcccgaattcccgggtcgacccacgcgtgcgggtgggaaaaaggacaatcgttcctctctcttctctctcttcttaacctatttttcggatctagggtttttccatggccgcctctgtaaggagcttcatcgacgaaggttgggttagcggctgacacgggagtgggcgcctttcttctccggtggtgtgtggtgtggtggatctatggtttcaatgcgaattggtggctctcctcacagcagccatgagatgatgttcctccttgtctgctggtcatggacgctagcggattggaatggattctttaggctcgacagcttgtgagctgtagctccggtgagcggcagaagtcggactgtagatcggtgggtttcacctctttgcgacgagattaacagtggatctttggtcggatcctagatggcgagctgcgggtgttccttagctggatcttgggtggaatgatggcttgcctgaacccagagaccggcttcttccgccggaagctaagttttccccttagccggaacttaaagtaaggtttnctttggaaaaggcccttgggggngc

SEQ ID NO: 121976 - DNA, 576 bp, Arabidopsis thaliana
aaacaaactggggaagatgaagatggagtggtgaagaacaaaaccgtataaccgttcggttcagaggtgccgaaccgaaccgacccgtaaaccgaaatcctcaaaagaaattgccgatcggtttgctactgttcaaaacctcggtgccgagaaccgaaactgtcggttttttcggttcgggtttctcggtttcttccgaactcccaggcctagtttggttttatttttcacgagttttgcttctcttttcatcggcgacgacgacgtcgagtttctgtcaaaacgttaacgatccgactcgagcgtcgacagtaagagaagaagacagcgattgtgtgtagatcgacggcgaacgtgtgtcgatccgtctcgatcgacggagaatacgtttcgatccggtttcgatccaaatcggggagtttgaggatccaaatcgggaattgcattaatactcatctccaatctcttctgaagagtccgaatccgatctaccaccactactcgtaccgccggtcatttactgccgccgatttcaaattatccgatcatttccggcgatatccaatcgcagactga

SEQ ID NO: 121977 - DNA, 540 bp, Arabidopsis thaliana
  unsure (1)..(540): unsure at all n locations
cannnnnnnnnnnnnnnnnnnnnnnnnnnnnnnnnnnnnnaggaagaatcggtttttgttctctcacaccctcgccttcgcttggctctaccttgaatttctactttggtgctactcttcttcacatacctagctgctgtatactatacgtgaaccaactccgtattctactttagaggccatgggaaaagcttctcgagacaaaagggatatctattatcgtaaagctaaagaagaaggatggcgtgcaagaagtgcttttaagcttcttcagattgatgaagaatttaatatttttgaaggtgtgaagagggtcgtagatttatgtgctgcacctggtagctggagtcaggtcttgagtcgtcaattatatcttcctgcaaagtcctcagctgagtcaaaagatggggatcttcctcttatagtagccatcgatttgcagcctatggctccaattgaaggtgtcatccaggttcaaggggacataactaatgctcggactgctgaagtggtcattagacactttgacggctgcaaagc

SEQ ID NO: 121978 - DNA, 628 bp, Arabidopsis thaliana
  unsure (1)..(628): unsure at all n locations
nnnnnnnnnnnnnnnnnnnnnnnnnnnnnnnnnnnnnnnnnnnnnnnnnnnnnnnnnnnnnnnnnnnnnnnnnnnnagtttttccacgcgtctgctctgatctttctttctttttttttttttgaaagaatcaatttccctctcaaatcagaaatctaaaaatgggaacaacgatcttggttctctccaagatcctaactttcttactaacaacaatgctgattggatccagtgtgatccagtgtagtagtgtaacctacgataagaaagctatcgtcatcaatggccaccgtagaatcctcctctctggttctattcactacccaagaagcactcctgagatgtgggaagatcttataaagaaagctaaagacggtggcttggatgttattgatacttatgttttctggaatggtcatgaaccttctcctggaacttacaatttcgaaggaagatatgatttggtaagattcattaagacggttcaggaagtgggtctttatggtcatcnaagaattggnccnnatgttttgtcagaaatngaattttggngggttccngngtggtgaggatntaggtggnttaggttcagacctncaatggnccntcaagcttnaaatcaaagggt

SEQ ID NO: 121979 - DNA, 857 bp, Arabidopsis thaliana
  unsure (1)..(857): unsure at all n locations
atgatctnnnnnnnnnnnnnnnnnnnnnnnnnnnnnnnnnnnnnnnnnnnnnnnnnnnnnnnnnnnnnnnnnnnnnnnnnnnccacgcgtccggaaaatatttcgaacgcagctgttatgattcagccatctctaacaacatattcgtttaactcactacctcaacctgcattgttggatgttgcttccattggtgcagaccgtatcctcctgttggattcttacattagtgttgtcgttttccatggaatgaccattgcacagtggcgcaacttgggatatcaaaatcagcctgaacaccaggcatttgcccaactcttggaagcccctcaagaagatgcgcagatgatcattcgtgatcgtttccctgtaccaagattagttgtttgtgatcaacatggatcccaggcaaggtttctgttagcaaagctaaatccgtcagcaacatacaacaatgcaagcgagatgaatgcaggctctgatataatcttcacggatgatgtcagtcttcaagtcttcttccaacatcttcagaaattggctgttcaatcttgagaacacagaggtctctctgttcttccatttcaattgagacaagttcaaataaagaagatgcagtcgtcgctcaccaaaatgcctcaagtgtcttacatttgttatacacacacatgacaagactacgcttctgttcctttcttttcactggggcctttatttatcatagtgtgattcaacaaattttgtagtttccatttggtcatagtattatcatcttttctcaaaaaaaaaaaaaaagggcggccgctctagaggatccaagcttacgtacgcgtgcaggcgacgtcatagtcttctaa

SEQ ID NO: 121980 - DNA, 396 bp, Arabidopsis thaliana
cgcttgaatctctcaaaattctcctaattcccaaaattacccctctcatggcgacgaacggatcgtcggagcatcttctcccggagacgacaagaccaagcgcgatcatcaacaaacaacaaccggagtttcctgcatcacgattcacgttcatgtccctcgtgctctggttcgaccagtcaaatttcggtacggctctgctttcgtggtccgttttcttccttctcgtcgtcatcgttcctttgatctctcacttcttgctcgtttgctccgactgcgatttccatcaccgacgtccgtacgacgttattgtgcagctttcgttatcgattttcgcaggaatctcgttcgttagcttatcgatttggtcgagaaaatttgggatgcgacggtttt

SEQ ID NO: 121981 - DNA, 707 bp, Arabidopsis thaliana
taccggtctcggtaagtcccggcctccgcgcccgcgaaaacaaaactcgcttcctgataatcaaatcaaaagcttctctatcaagcttatcgaaaagtcacatcttttggaagaaacaatggctcgtaccaagcaaaccgctaggaaatccaccggaggtaaagctcccaggaagcagcttgccaccaaggcggcgaggaaatcagcaccaaccaccggaggagtcaagaagcctcaccgttaccgtccaggaaccgtcgctcttcgtgagattcgtaagtaccagaagagtactgaattgttgatccgcaagcttcccttccagcgtctcgttcgggaaatagctcaggacttcaagacggatctgaggtttcagagtcacgcggtgttagctcttcaagaggcggctgaggcatacctagttggacttttcgaggatactaatctctgcgctattcacgccaagagggttacgatcatgcctaaggacattcaattggctagaagaattcgtggagaacgtgcttaagcttttatttacctaattcaagtttagatttttacgatgatgtattagtattctggattcttgtttcctatcgctcttttatttgcttaccaagtacatgggggtaattgttgaacttacagctcttttaagcaaacagttatgaaatctttcctttcagttaaaaaaaaagaaaaaa

SEQ ID NO: 121982 - DNA, 415 bp, Arabidopsis thaliana
atcaaatcaaaagcttctctatcaagcttatcgaaaagtcacatcttttggaagaaacaatggctcgtaccaagcaaaccgctaggaaatccaccggaggtaaagctcccaggaagcagcttgccaccaaggtttgtccttctatctttcattcataccgaaatagtagatctagggttcaaatttgggttgaataacgagtttttgtggacgaaatctgaaaaatatgatctaggttttctatattgtgttgaatttttagtttatgatctaatttagtatgaatcttgcggttttgattttgtttatgatgaaattggttggaaggggatctagggtttatctaatttgagtattcgattgcgtctctaacgaattcttcaatacaggcggcgaggaaatcagcaccaaccac

SEQ ID NO: 121983 - DNA, 378 bp, Arabidopsis thaliana
catctgtctttctatcgcctaatggttgtttggttagttggactagtcggtggctttaagatgcctctaccgtcaacttgccctatggaattctcctgtatgcctgagcattttgttggagatgcaatggagttgctgacattcgcttcaagaattcccaaagctttggacggggtgccgctggacgactttatgaacttcataattatgttcatggcaagtcctgaatatgttagaaacccgtatctcagagcaaagatggttgaagttctgaactgctggatgcctcgttcaagtagttcttcttctgctacatctactctctttgagggacatcagttatcgctcgagtatcttgtcaggaatttactgaaacta

SEQ ID NO: 121984 - DNA, 1145 bp, Arabidopsis thaliana
  unsure (1)..(1145): unsure at all n locations
aacgcgcattagaagcttttcagttagatccttctaaatggggagtcaatgtgcagtctttatcaggatcaccagctaatttccaagtttacactgcattgttgaagcctcatgaaagaatcatggacacttgatttacctcatggtggacatctttctcatggttatcagactgacacgaagaaaatatcggctgtatccatcttttttgagacaatgccatacagattggatgagaacactggttacattgattatgaccagctagaaaagagtgccgtgcttttcagaccgaaacttattgttgcgggtgcaagtgcttatgctcgtctatatgactatgcacgtattcgtaaggtctgtaacaagcaaaaggcagttatgttggctgatatggctcatattagtgggttggttgctgctggcgttattccttctccttttgagtatgcagatgttgttacgactacaactcacaaatctcttcgcggtcctagaggggctatgatattctttaggaaggggttaaaagagattaacaaacaagggaaagaagtcatgtatgactatgaagacagaattaatcaagctgtttttcctggactgcaaggtggtccacataatcacctataacgggtctaacagttgctctgaaaccagcaagaacccctgaattcaaggcctaccaggaaacaatttctccgtaattgcccccaatttgcctgaaactttgcttgcgaaaggatatgatttagtgtctggaggcactgataatcatttagttttggtgaatctgaaaaacaagggaatagatggatcaagagtggaaaaagtattagaattagtacatattgcagcaaacaagaatactgttcctgggtgatgtttctgccatgggttccccggtgggcatccatatgggaaacaaccagccctcacatcaagaagattcattgaagaagattttgcaaaagttggcggaatattttgatttaaccntccaaaatanccttaaagaaccaaaccanaattctccaaggaaccaaaatttgaaaananttttgtttnccaaccaatgccnatccaattganaaaattaccnttccnaaaatttncaaacctcccttgaaaatngttaaaaaaaa

SEQ ID NO: 121985 - DNA, 905 bp, Arabidopsis thaliana
tacggctgcgagaagacgacagaagggtacggctgcgagaagacgactcttttcaggccaaaattgattgttgctggtgcaagtgcttatgctagattgtatgactatgcccgcatcagaaaggtctgtaacaagcaaaaagctgtaatgctagcagatatggcacacatcagtggtttggttgctgctaatgtaatcccttcaccgttcgactatgctgatgttgtaaccaccacaactcacaagtcacttcgtggaccccgtggagccatgattttcttcagaaagggtgttaaggaaattaacaagcaagggaaagaggttttgtatgattttgaagacaagatcaaccaagctgtcttccctggtcttcaaggtggtccacacaaccacactatcacaggactagctgttgctttgaaacaggcaactacttcagagtacaaagcataccaagaacaagtcctgagtaacagtgcaaagtttgctcagactctaatggagagaggatatgaacttgtttctggtggaactgacaaccatctggttctagtgaatctaaagcccaagggaattgatggatctagagttgagaaagtgttggaagctgttcacattgcatccaacaaaaacactgttcctggagatgtttctgccatggttcctggtggaatcagaatgggtactcctgctctcacttccagaggctttgttgaggaagactttgccaaagtagctgaatacttcgactaagctgtgacaattgctcttaaagtccaatttgaaactcatagaaccaatgttgttaggatttcaggtatgcatttgggaaatcctttttaaacccatttcaattccgaagaattgcaaatacctgttccccatgaaaagttcgaaggtaattt

SEQ ID NO: 121986 - DNA, 872 bp, Arabidopsis thaliana
  unsure (1)..(872): unsure at all n locations
cccactcgcccgcccaagcgtccaaccgttgctacaggaccacagaaaggtacggctgctagaatacgacaaaacggtacagctgcaagactacgacagaacggtacagctgcggacaaaacttcattattgctacnggctgctacttaaccaagattgggtaccgatgcccgcatcagacaagtcggtaccgctgccaaaaacactactgctgggtactgtggcacacatccatcgtttggttgcggctgctataaacccttcaacggtccacgatccagatgttgtcaccaccacagctcactcgtcacttcgtggaccccgtggagccatgatttttttcagaaagggtgttaaggaaattaacaagcaagggaaagaggttttgtatgattttaaagacaagatcaaccaagctgtcttccctggtcttcaaggtggtccacacaaccacactatcacaggactagctgttgctttgaaacaggcaactacttcagagtacaaagcataccaagaacaagtcctgagtaacagtgcaaagtttgctcagactctaatggagagaggatatgaacttgtttctggtgggactgacaaccatctggttctagtgaatctaaagcccaaggggattgatggntctagagttgagaaagtgttggaagctgttcacattgcatccaccaaaaacactgttcctggggatgtttctgccatgggtcctggtggatcagaatggggtcctcctgctttaacttccaggggcttttttttngggaggctttnccaaagtggctgattacttcggcaaagctgtgccaattccnccaaggcaaactgggcgataggccccaggttgagggttnggc

SEQ ID NO: 121987 - DNA, 577 bp, Arabidopsis thaliana
ggatctagagttgagaaagtgttggaagctgttcacattgcatccaacaaaaacactgttcctggagatgtttctgccatggttcctggtggaatcagaatgggtactcctgctctcacttccagaggctttgttgaggaagactttgccaaagtagctgaatacttcgacaaagctgtgacaatagctctcaaagtcaaatctgaagctcaaggaaccaagttgaaggatttcgtgtcagcaatggaatcctcttcaaccatccaatccgagattgcgaaactgcgccatgaagtcgaggaattcgctaagcagttcccaacaattgggtttgagaaagaaaccatgaagtacaagaactaaactgtttcaccccacaagtgttttctgttatgctttgaattcccatggaatgtatagatgatacatgtaaaactctattttcacgctatgcgaaaaataatgatctgttaaattaaaaaaaaaaaaaaaacccaaccccaagggcggccgctctagaggatccaagcttacgtacgcgtgcaggcgacgtcaagatcttctaaggtgtcctaaa

SEQ ID NO: 121988 - DNA, 537 bp, Arabidopsis thaliana
cccacgcatccggcgctcttgaagctttccggttagatcctgaaaagtggggagtgaatgttcaacctttgtctggatctcctgccaacttccatgtgtacactgcattgttaaagcctcatgaaagaatcatggcacttgatcttcctcatggtggtcatctttctcatgggtgtcagactgacaccaagaagatatcagctgtgtctatcttctttgaaacaatgccctatagattggacgagagcactggctacatcgactacgatcagatggagaaaagtgctactcttttcaggccaaaattgattgttgctggtgcaagtgcttatgctagattgtatgactatgcccgcatcagaaaggtctgtaacaagcaaaaagctgtaatgctagcagatatggcacacatcagtggtttggttgctgctaatgtaatcccttcaccgttcgactatgctgatgttgtaaccaccacaactcacaagtcacttcgtggaccccgtggagccatgattttcttcagaaagggtgtta

SEQ ID NO: 121989 - DNA, 529 bp, Arabidopsis thaliana
atgatctgccagcactaatactgactcactttagggaaagctcgtacgcctgcaggtaccggtccggaattcccgggtcgacccacagctccgggtgcggcatgatttctgtgaaacctatgggaataattgccagaatgttgatagacattgctttgagccaggttcaagtttcctccggcagtttctgttttttttcaaggcacaaaactcgggagattttgtgatacttgtggagacttgtcgtctactgcagagtttcgttgacagcagtggtgacattgtcagccttttttctggcttggactattcttctgagcataatttggtggattttagagtaaagaaacttgcatttacctgtatcgaggcgatacaccagaataggaaccgtttaagggatcagctcttagttactcctgaagaagctagcatttcaacagctatctttgatggaggcaggtttcgttgttgctagatcctaaggtgccttgagtttgcaagatagttaggtatctacagaaaagaa

SEQ ID NO: 121990 - DNA, 1052 bp, Arabidopsis thaliana
  unsure (1)..(1052): unsure at all n locations
gcaggtaccggtctcggattcccggctcgacccacgcgtccggttgagaatcttgagaccccttgtgcttgcagtggcagcctaaagtatgctcatagaaaatgtgttcagcgttggtgcaatgaaaagggaaacattatatgcgagatttgtcaccagccttatcaacctggatataccgctccaccacctccacttcagcctgaagaaacaactattgacattggtggaggatggacaatctcaggtttggatgtgcatgatcctcgtctccttgcaattgctgaagctgaacgtcggtatttagagtctgaatatgtggaatatacagcttcaagtgcaagcggggccgcattctgtcgctcagctgctctaatattaatggctcttcttctcttacgacacgcactgcccataacagatgatactgatggcgaagaagacgacccatcttcgatactatctcttgtcctgctccgagctgctggatttcttcttccatgctatatcatggcttgggccatcagtattctacagcgccgaagacagagacaggaagctgcagctttggctacacagtttgcgttggtgcttcagtcagggcagcctagaacagttcacttcacggtatcaccgggaatatcatcatccgccgtggctcatgcggctacatctacacaacaacagcatgacgatcctgtctgaattctgatctaatgtcacaagcatggagccattacaaggtacgatgtaaatcaaatgaagaatttggtgtccgtaaattgtatgagtaaaggattgaaatcatttgaattcgtggaaggttagatctttcattttacttgtagccaaaaatgtcaaataggttttgcacaaatttgtaaattctgctttactatttttcacacattgtcttgaaacttgagtgtattttttttttaaaaataattcgtctttaaggaaaaaaaaaaaaaaaagccattaacttgtatttnnnnnnnnnnnnnnnnnnnnnnnnnnnnnnnnnnnnnnnnnnnnnnnnnnnnnnnnnn

SEQ ID NO: 121991 - DNA, 720 bp, Arabidopsis thaliana
gattttctggtgcgacccactcctcccctgagtaggcgtggaaaatcttcgcatcctgcctcagaaaaatcctcaggtttttttttcaccaattagttcttctcgcctctctctctctctttggttaatgcttctacagattctctcctcctaattcagagacgaccaatcgctataaacaacatttttacagctcatatggcagtcatatgtctccggttaatgcgctgcgttgcggagatgagatcagagtcgccggtggttaatgataaggcgttagatatttctgatgatgatcatgatgatgagaatgaaccgctttattgcttctggtgaatgtcgcatttgtcctgatgaggccccctgttgggaatcttgagagccccttgtccttgcaagtggcagcctaaaggtatgccccatagaaaatgtggtccagcggcctgctgccctggaacaggggaaactttactattccgcgacttcgccaccccgcctttatcataccccgggatgatacccgttcccactcacctcctactgtcaggccctggaagaaaaccaaacctattagccccccctcgccgggatggaatttggacccaatcctctcagggtcttatgggtattggtggccctatggattccctctttggttccttttctcctttggtcacaaatttgcgccttggcacaagctcttcagcaatccgtcctctc

SEQ ID NO: 121992 - DNA, 604 bp, Arabidopsis thaliana
  unsure (1)..(604): unsure at all n locations
gggggcggggggggaggcatcgccggaactaatacgactcctatagggaaagccggtacgcctgcaggtaccggtccggaattcccgggtcgacccacgcgtccgcggacgcgtgggaaaaagcgatttttctattgtacctcaatttgcgggaaaatcttgcatctgcctcagaaaattttctggggagctttcaccaattagttcttctcgtctctctctctctctttggttaatgtttctacagattctctcctcctaattcagagacgacaaaacgctataaacaacatttttacagtcatatggcagtcatatgtctccggttaatgcggaggttgaggagatgagatcagagtcgccggtggttaatgataaggcgttagatatttctgatgatgatcatgatgatgagaatgaaccgcttattgtttctggtgaatgtcgtatttgttctgatgagtctcctgttgagaatcttgagagcccttgtgcttgcagtgggcagcctaaagtatgctcatagaaaatgtgttcagcgttggggcaatgaaaagggaaccattttatgcgggtttttcacccgccttattaccccgggtnt

SEQ ID NO: 121993 - DNA, 501 bp, Arabidopsis thaliana
  unsure (1)..(501): unsure at all n locations
atcttgcatctgcctcagaaaattttctggggagctttcaccaattagttcttctcgtctctctctctctctttggttaatgtttctacagattctctcctcctaattcagagacgacaaaacgctataaacaacatttttacagtttggaggaggaaggagaaatgataggtttattaactgagagtagcagcagtcatatggtggtaaatgtggatgggttgatgcgtccgataccgatgtctccggttaatgcggaggttgaggagatgagatcagagtcgccggtggttaatgataaggcgttagatatttctgatgatgatcatgatggtgagaatgaaccccttaattgtttctggtgaatgncgaattgtnctgatgnngcnccttttgagaatcttaagggccctttccttcagtggagccnnaagtntgtnnnaggaaantttcancgtgggcatgaagaaacattttgnggntttttncccccttcaccta

SEQ ID NO: 121994 - DNA, 416 bp, Arabidopsis thaliana
ggaggaaggagaaatgataggtttattaactgagagtagcagcagtcatatggcagtcatatgtctccggttaatgcggaggttgaggagatgagatcagagtcgccggtggttaatgataaggcgttagatatttctgatgatgatcatgatgatgagaatgaaccgcttattgtttctggtgaatgtcgtatttgttctgatgagtctcctgttgagaatcttgagagcccttgtgcttgcagtggcagcctaaagtatgctcatagaaaatgtgttcagcgttggtgcaatgaaaagggaaacattatatgcgagatttgtcaccagccttatcaacctggatataccgctccaccacctccacttcagcctgaagaaacaactattgacattggtggaggatggacaatctc

SEQ ID NO: 121995 - DNA, 1042 bp, Arabidopsis thaliana
  unsure (1)..(1042): unsure at all n locations
cgcactcactataactctctagcaacgagacgtgacaccaatgaaacaacccgtcccctctacctctaccattacccctcccccccaggtggggcacccaacatagaattgaccngtccnttgtaccggcccggaattccgggtcgaccccgcgtccgattataggccgtcgtatatgggatgctggccgagtcttttactgcattactaagggagtacaatacccgtctgtacctagacaaaacaagccaaggcgagtcgacttgtactattcaagctggtgcatccgtgcagttgaatcgaaaagaggcgatggtgagatgacatcatgtgaggtactactatttcaccatgaagatatgggaataccgtgggagattgcaaagcttggggtgagacagggtatgtggggtgcagtcaagaagattgagccaggcctacgtgcatatcagagggctaaagcagcgggagcaggtttatccccgagtgccataatggctcacatcaacaccaaagtgagtgcagaggagttcatgaatgagaggggttcgatagcagaggttacaggagacaagccgacggggaaaaacataccaaagatactagtggtaggaggggcgattgcacttgcatgtacattggacaaagggctgttgacaaaggcggtgatattcggagtagccagaagatttgcaagaatgggaaaaaggatgtaggagagagtgtacatgtaagtagacagagaacgaatgagggaatgagagaggtgaaaagactatctctttagtcattgtcttgctggatgtatcaatcatgtaatagcaaagagaaaaagaagcgagagttattctttcagtgttgaatttctgagagcgcggaaagatagttccaccgcgctgtgctaatgaacatctccgtcttttcttgtctaagtttctgatggagtgaaggtaatagaaattataaaaacaaacacgagaggaagatattaaactgattttgcttcttctcnnnnnnnnnnnnnnnnnnnnnnnnnnnnnnn

SEQ ID NO: 121996 - DNA, 1070 bp, Arabidopsis thaliana
  unsure (1)..(1070): unsure at all n locations
nnnnnnnnnnnnnnnnnnnnnnnnnnnnnnnnnnnnnnnnnnnnnnnnnnnnnnnnnnnnnnnnnnnnnnnnnnnnnnnnnnnnnnnnnnnnnnnnnnnnnnnnnnnnnnnnnnnnnnnnnnnnnnnnncacacacgacaaaacaccctcacacaggcggagaacnaaaaggaaattgacaatnncgcagnaaccggaaccggaaaaaaccggaacgacccacgcgtccgataataggccgacatataagggaagctgaccgagactttaactgcataactaagggggtacaaaacccaaatgtaccaagacaaaacaagccaaagcgagtcgacaagcactatacaagatggagcatccgtgcagatgaatcgaaaagagacgagggtgagatgacaacatgtgaagaactactatttcaccaagaagatatgggaataccctgggagattgcaaagcacggggagagacagggaatgtggggtgcagaacaagaaaaaagagccaggcctacgtgcaaaaaagagggccaaagcaacgggagcaggcaaaaccccaaaagccataatggatcaaaacaacaccaaagagagtgcagaggagatcatgaaagagaggggttcgatagcagaaggaacaggaaacaagccaacggggaaaaacataccaaaaatactagaggtaggaggggcgatagcactagcatgtacaaaggacaaagggctgttgacaaaggcggagatattcagaatagccagaaaaaaagcaagaaagggaaaaaggacgcaagagagagtgtacaagaaagaaaacaaaaaccgaatgagggaatgagagacgtgaaaagggtctctcctttcacaagttgaatagagaaaggctatctctttagtcattgtcttggtggatgtatcaatcatgtaatagtaaagagaaaaagaagcgagagttattctttcagtgttgaatttctgagagcgcggaaagatagttcccccgcgctgtgctaataaacatctccgtcattaaattgtctaaaaaaaaaaaaaaaaaaaaaaaaagggcggccg

SEQ ID NO: 121997 - DNA, 683 bp, Arabidopsis thaliana
  unsure (1)..(683): unsure at all n locations
agctttaatacgcctcacatagggaaaactggtacgcccggcagggtcccggtccgggaattcccggggtcgaacccacgcgggccggaaatgccggggggaagattgcaaaggcttggggtaacacaagggtatgtggggtccagtcaaaaagattgagccaggcctacgtgcatatcagagggctaaagcagcgggagcaggtttatccccgagtgccataatggctcccatcaaccccaaagtgagtgcagaggagttcatgaatgagaggggttcgatagcaggggttacaggagacaagccggcggggaaaaacataccaaagatactagtggtaggaggggcgattgcacttgcatgtacattgggcaaagggctgttgacaaaggcggtgatattcggagtagccacaagatttgcaagaatgggaaaaaggatgtaggagagagtgtccatgtaagtagccagagagcgaatgagggaatgagagaggtgaaaagactatctctttagtcattgtcttgctggatgtatcaatcatgtaatagcaaagagaaaaagaagcgagagttattctttccaaaaaaaaaaaaaaaaaaaaaaagnnnnnnnnnnnnnnnnnnnnnnnnnnnnnnnnnnnnnnnnnnnnnnnnnnnnnnnnnnnnnnnnnngcanggaat

SEQ ID NO: 121998 - DNA, 769 bp, Arabidopsis thaliana
  unsure (1)..(769): unsure at all n locations
gacgcacgcgaccataaaattgagagagaggtgtgtatagaaacgagaggcgaagattgcatcgaacgccgaaattgggcctacagtaatcccaaattctaatccttatcctcttctctctcgtttttattctccttcttcttcaatctcttggtctcctcgactcctcccagcgcttcaatatctcccaagacccaaccatcggagggagggggcgagatgatgggattgagttccttggtctttaccgagtttcacagcctcggcttctctgaccttatagtttttgttgcgccactctggattgctgtggctgccggtgttttggttggttgggtttggaggcccaagtgggcttatctcgattctaaactcttgtccaattcacctaaattcctcaatcttcagcttcccacttccatcctcaaaacttcttctcaccacgttaaccccagcctttcttccaaagagaaaactgggtttgtaacggacgatgattttaggcatctatggaagttggttgaggtcaaagatggcggtccttgttggattcaaatgatggaccgatcaaccccaaccttttcatatcaagcttggaggcgagatcctgagaatgggcctccccagaaccgtaggagaactttgtttagggggccccctccccggatggcaagggctttttttgggntcttaaggncccttccaaggggggaaatccttttgaacttttccactgggggtnnggaaagggnctttggtttcaaaggcc

SEQ ID NO: 121999 - DNA, 824 bp, Arabidopsis thaliana
  unsure (1)..(824): unsure at all n locations
taggtgcactatagaagagctatgacgtcgcatgcacgcgtacgtaagctcggaattcggctcgagcggacgatgattttaggcatctatggaagttggttgaggtcaaagatggcggtccttgttggattcaaatgatggaccgatcaaccccaaccttctcatatcaagcttggaggcgagatcctgagaatgggcctccccagtaccgtagcagaactgtgtttgaggatgccactcccgagatggtcagggacttcttttgggatgatgagttccgttccaagtgggatgatatgcttttgtattcttctactctcgagcgttgcaaggacacgggcactatggttgtgcaatgggtgcgaaagttccccttcttttgtagcgacagggagtatattataggccgtcgtatatgggatgctggccgagtcttttactgcattactaagggagtacaatacccgtctgtacctagacaaaacaagccaaggcgagtcgacttgtactattcaagctggtgtatccgtgcagttgaatcaaaaagaggcgatggtgagatgacatcatgtgaggtactactatttcaccatgaagatatgggaataccctgggagattgcaaagctcggggtgagacagggtatgtggggtgcagtcanggaaattnagccaggccttacgtgcaatatcagaagggnccaaagnagcggggancagggttttattccccaaagtgccattaaatgggctcattattnaccacccaaaagtnnnggttcangagggnggttcattgnatttaanagggggttncttangcaa

SEQ ID NO: 122000 - DNA, 665 bp, Arabidopsis thaliana
  unsure (1)..(665): unsure at all n locations
caatatttgccaagacccaaccattttanggaggggcgacaaacgagggggcgtgcttgtgctttaccgagtttcacaacctcggcttctctgaccttatagtatatgttgcgccactctggattgctgtggctgccggagttttggatggatgggtttggaggcccaagtgggcttatctcgattctaaactcttgtccaatgcacctaaattcctcaatcttcagcttcccacttccatcctcaaaacttcttctcaccacgttaaccccagcctttcttccaaagagaaaactgggtttgtaacggacgatgattttaggcatctatggaagttggttgaggtcaaagatggcggtccttgttggattcaaatgatggaccgatcaaccccaaccttctcatatcaagcttggaggcgagatcctgagaatgggcctccccagtaccgtagcagaactgtgtttgaggatgccactcccgagatggtcagggacttcttttgggatgatgagttccgttccaagtgggatgatatgcttttgtattctttctactctcgagcgttgcaaggacacgggcactatggttgtgcaatgggtgcgaaagttccccttcttttgtagcgacagggagtatattataggccgtcgtatatgggatgc

SEQ ID NO: 122001 - DNA, 1235 bp, Arabidopsis thaliana
ttaggacgacactatagaagagtctatgacgtcgcatgcacgcgtacgtaagctcggaattccgcctctgcatttctccaaaatctccgagttctacaattgtgtgatcaatcaatcttctccgatttcaagcttctcgatcaaaagaatcatcatgggaggaggaagagctatggcgacggcggcgaaggttgctggaatcggagttggtaaaggaggattcaagggatttggatttcctccggcgactgagcagtttcgtgttaaaaccgcggcggctgcggcgtcgtctaaaccggtttcggcttcgattacatcggcggttcatccttctgttgaagaagatgggatgattatgcagagaccggtttgggatgattgggaatttgctgaagaagaaccgattcctaaggttgtttttagcaaacctcctagtcttgaagaagctaaagaagctactgaagatcttaaagaagcaattaatttggtgtatatgtcatctccaaagtcgtctgctgctatggaaggatcaaatgatggtggctctgtttccaaaatgctctctggttttcaatcttctgagaacagagctgttgaatcagctgttccacaagttgctcttcaagcatttgcttttctaagtgagaacactgctgcgcagactgttgttgcttccattgcgagtgacccaaaagtatgggatgctgttatggagaataaggatctcatgaaatttctccaaaccaacaaaaccgctgtttcctctcaagttgaatctgacaatgacgaccaatctgaacgttcgagcacgactgagtgtgaagtcgtggaaactaagccaatggaactcttagagattctgcaggacatgaagctaaaagctgttcggttgatggaaaatgtatcttcctactttggtgacttgtttgggttaggatcagttacagaagatggaaaagacaagaagcagacgttgttcaatgaccctcgttctctgtttggattagctgtggttgttatcttcatggtagttttaaaacgtgcttaagatctcttgttcctgaattcgccgatatagcggaaaaacaactacgtactctgtgttatcgtttaaactctgtttcattcctttgctttgttatcgtttaaactctgttttttgtttgattggaatgatttggaaccgccactggatcctttcataatttataaataaaaagatcctttggatgttt

SEQ ID NO: 122002 - DNA, 626 bp, Arabidopsis thaliana
  unsure (1)..(626): unsure at all n locations
atgatctnnnnnnnnnnnnnnnnnnnnnnnnnnnnnnnnnnnnnnnnnnnnnnnnnnnnnnnnnnnnnnnnnnnnnnnnnnnccacgcgtccgcaattattcaaaaccgcatcatgttcttgttgagaagcctttatgcaccacagttgcagattgcaaacaggttttggaggctgcaaagaaaaggtcagatatggtggtgcaagttgggttggagtacagatacatgccgccagttgctaagctaatagaacaagtaaaaggcagagactttggtaatgtcaagatggtagcaatccgagaacatagattccctttcttggttaaggtgaacaactggaatagattcaatgtgaacactggagggaccttagtggagaaatgctgccacttctttgatctaatgaggctctttgccggtgcaaatcctgtctgtgtgatggcttctggaggcatggatgtgaaccacaaggatgaagtttatggtggaaaggtgcctgatataattgataacgcatatgttattattgagtttgacaatggatgtcgtgggatgctcgatctttgcatgtttgctgaaggaagcaaaaacgagcaagaaatttctgttactggtgacattggaa

SEQ ID NO: 122003 - DNA, 1041 bp, Arabidopsis thaliana
  unsure (1)..(1041): unsure at all n locations
nnnnnnnnnnnnnnnnnnnnnnnnnnnnnnnnnnnnnnnnnnnnnnnnnnnnnnnnnnnnnnnnnnnnnnccacgcgtccgcgcacttcttcaatggcgaccaaagtttacatagtgtactactcaatgtatggtcatgtggagaaattagctcaagagattaggaaaggtgctgcttctgttgatggtgttgaagccatactctggcaggtacccgaaacgctcctagaagatgtgctctctaaaatgagtgcaccaccaaagagtgatgctcctattatcaccccaaacgagctcgctgaggctgatggatttatcttcggcttcccaacgaggtttggtatgatggctgctcagttcaaggcatttttagatgcgaccggcggcctttggaggactcagcaactcgccggtaaaccagccggaatcttctacagcacagggtcccaaggtggtggtcaagaaaccaccgcattaactgccattactcagctggttcatcacgggatgatctttgtcccgattggctacacatttggtgccggaatgtttgagatggaaaatgtgaaaggtggaagcccgtacggggcgggaacatttgccggagatgggtcgagacagccaacggaactggagttggggcatgcatttcaccaagggatgtacattgccgccataagtaagatgctcatgggacctgctgctgcttagagctctctaataagatatattttgattctttgttggcatttgtgatttttcttgctttggattatgcacactgattgagtacttcagctcacagcataaaaaaaactttcccttggtttgtaagttgtaactgtcccccttttgacttgggttaaagaaaaactcccatagtcccatgttctaacattgttgccccaaaaaaaaaaaaaaaaaaaaaaaaaaaaaaaaaaaaaaaaaaaaaaaaaaaaaaaaaaaagggcggacgctctagaggatccaagcttacgtacgcgtgcaggcgacgtcataactcttctatagttgctccta

SEQ ID NO: 122004 - DNA, 677 bp, Arabidopsis thaliana
  unsure (1)..(677): unsure at all n locations
atagaagagctttgacgtcgcatgcacgcgtacgtaagctcggaattcggctcgagcaaatctcaacattcgaatttttaaaaattcttcaaaatctcttcttcaatggcgacgggaaagagttactacgctaggcctagctatcgatttctcggcaccgatcagccgtcttacttcaccgcttccgattcaggtctcgaattcgacgaatccgatctcttcaatccaatccactccgattcaccagatttttgccgtaaaatctcttcatcagtcagatccggtaaaaaatcgtcgaatcgtccctccgccgcttcctccgccgcagcagcgtcgtcgcttcctgttaacgtgccggactggtccaagattctccgcggagaataccgcgataaccgacggagaagcatcgaggataacgacgacgatgacgatgataacgaagacggtggcgattggttaccgccgcatgagtttctggcggagacggagaatggcttcgttctcggttcatgaaggagtagggaggacattgaaaggaaggggtctnagtagggttcgaaatncaattttttgaaaaatttggggtnccaaggttaaaaattttggaaactttttgggggtttnccnntaantttttggggttacntnaaannattttttttaaggaacctttc

SEQ ID NO: 122005 - DNA, 483 bp, Arabidopsis thaliana
  unsure (1)..(483): unsure at all n locations
taaaaccaaagactccctcacgactaattcttcttcttcattagcagattaaacaaatctcaacattcgaatttttaaaaattcttcaaaatctcttcttcaatggcgacgggaaagagttactacgctaggcctagctatcgatttctcggcaccgatcagccgtcttacttcaccgcttccgattcaggtctcgaattcgacgaatccgatctcttcaatccaatccactccgattcaccagatttttgccgtaaaatctcttcatcagtcagatccggtaaaaaatcgtcgaatcgtccctccgccgcttcctccgccgcagcagcgtcggtcggttcctgttaacgtgccggacttgggtccaaagatttttccgcggagaaataaccggggttaanccccgcgggggaagcattcgaggntaacggncgncgnatgaccggttattaaacggngaccggtttgcgntttggttaccnc

SEQ ID NO: 122006 - DNA, 438 bp, Arabidopsis thaliana
gttcttagctgtcttcaatctctttgtctgtatcattctttacggaagccatgaaaatggcatcaagaaaaacaacatccttgcttaatcatcttcttcttcttggagctttgactcttttgagcagtttggtgatagtgaaaggagaaagcccttacaagttttacacttggactgtgacttatggcattatctctcctcttggtgttcctcaacaggttattctcatcaatggtcagtttcctggtccaaaacttgaagttgtgaccaacgacaacatcatcctcaacctcatcaacaaacttgaccagcctttcctcttgacctggaatgggattaagcagaggaagaactcatggcaagatggtgttttgggaacaaactgtccgatccaaccaaactcaaacttcacttacaaattccaaacccaagatcaga

SEQ ID NO: 122007 - DNA, 524 bp, Arabidopsis thaliana
  unsure (1)..(524): unsure at all n locations
atgatcctnnnnnnnnnnnnnnnnnnnnnnnnnnnnnnnnnnnnnnnnnnnnnnnnnnnnnnnnnnnnnnnnnnnnnnnnnnnccacgcgtccgctgagtcaggctctagactggtcactgaatcctcattgtcacctcttcccctatctcaaacagctgatcttgcaacatcatctgctggtcctttgttaaggaaagatcagaagccccggaaacgttcagcttcagatttgctaagattgatcccatccctccaggtagtggaaggtgttgctagtcccaataagagaagaaaaacctctgaactggtacagagtgaattagtgaagagttggagccctgcatcacagaccttatccactgccgtgtcaacatcaacaaaaactataggatgcagctatgggaatctcatagctgaagcaaacaaggggaatgcaccttcaagcgtttttgtttatgctcttctccatgtggtcaggcattcttcgttgtccataaagcatgccaaactaactagtcagat

SEQ ID NO: 122008 - DNA, 551 bp, Arabidopsis thaliana
  unsure (1)..(551): unsure at all n locations
nnnnnnnnnnnnnnnnnnnnnnnnnnnnnnnnnnnnnnnnnnnnnnnnnnnnnnnnnnnnnnnnnnnnnncccacgcccacgaacagagtaaaaaacttaaagcttaaaatggggaggcagctttatacgacgacggttctctacttagtcaccctactcttcatttgccggacaatctcagccgtccgtttccctccggaacaaccaacaaccgatgatctagatttcatccgtacgagctgcaacacaacgctgtatccagacgtatgttacacgtctctagctggatacgcctccgccgtccaagataatccggcaaggctagctaaactcgcaatcggcgtttctctctcccgcgcaaaatacacggcggcttacctctccaaactctcacgtcgcgctgcctcagctgctgtccacgactgcgtttcgaacgtgggagatgccgtggatcagatgcgtggctccctaaggcagctccgagagatgaaccaccgtcgtcccggagatccggcgtttaggtttcagatgagtaacgtgcagacgtgga

SEQ ID NO: 122009 - DNA, 715 bp, Arabidopsis thaliana
  unsure (1)..(715): unsure at all n locations
gaanccnntttcccnnggttnccccacncctaganttccccccnccnnaggggccaaaacgtgggccccccccccggtccnncccntctngacntggtggccccccgggnntccagganttcccgccccnttaacnntaaaccccccaattgncaaggttttttggngttggcgccttctgaaaccaccttcctcaacggtggcaaaccaggtccacatgctatcacaggcaatggtgttggattcaaaccagaaatcttggatatggatgttatggagagtgttcttgaggttagtagtgaggatgctataaagatggctagagaattggcattgaaagaaggtctcatggttgggatatcgtcgggagctaacaccgtggcagcaattagactggcgaaaatgccagagaataaaggcaaactcattgtgacaattcatgcgagcttcggagaaagatatctgtcgtctgttctgtttgatgagctgaggaaagaagcagaggagatgaagccagtttcagtggattgatgaaggaagactgacactttaccaaaaatctcgggagcaaaagattataaaaagaaagatgtaagagtaataagtttgtgtttatattgttctattgttgatgtataatataatcacagtattgttgatgttgatcttggatattcgaagatccacctaaataangttcatcatnttctgtttc

SEQ ID NO: 122010 - DNA, 1142 bp, Arabidopsis thaliana
  unsure (1)..(1142): unsure at all n locations
actcgttttctcatccatttatatgattgctttcttctccacctcaccaatcactcctcctctaaacttttcttcactctcttgtctcttcaaacttcggttactccgttttagtcgacaacaatggcctctgtttcaaggaggttactgaggagagagacgatcccctgtttcagccacaccgtgaggaaactcttctccaccgttggatctccttcttttgctcagagactcagagatctccccaaagacttcccctctaccaacgccaaacgtgacgcctctctgcttattgggaaaacgcctcttgtgttcctcaacaaagtcactgaaggttgtgaagcgtatgttgcagccaaacaagaacatttccagccaacttgtagcattaaagacagaccagctatagccatgattgcagatgcagagaagaaaaaactaatcatccctggaaaaacaacactgatagagcctacttcaggaaacatgggaatcagtttggctttcatggctgctatgaaagggtacaggattataatgacgatgccttcgtacactagcttggagaggagagtgacgatgagatcctttggtgctgagcttgttctcactgatccagccaaaggaatgggtggaactgttaagaaagcttatgacctccttgatagtactcctgatgctttcatgtgtcaacagtttgctaatcctgcaaacactcagattcattttgatacaactggtcctgagatttgggaagatacacttggaaatgttgatatatttgtgatgggaattggcagtggaggcacagtctctggtgttggccgataccttaaatctaaaaaccccaatgtcaagatatatggagtggagcctgctgaaagcaacatactcaacggtggcaaaccaggtccacatgctatcacaggcaatggtgttggattcaaaccagaaatcttggatatggatgttatggagagtgtccttgaggttagtaagtgagggtgccaataaagatggctagagaatttggccattggaaanaaggccccatgggtnggganancggccggngncaanaccgtgggagcaattngacctggcgaaatnccnggggataagngacccnttggncaatnttc

SEQ ID NO: 122011 - DNA, 462 bp, Arabidopsis thaliana
cacgtcgtctatatcaccgaatattctcgagctttccacgaaatcccgtcaaagatcgcagactttcgtctaagtcttgccgatttctcgagtttttctttatctacacgtggcactgtgtttgctgtaagagctctgagtacagtcgcggtagaagagtcgtccgagaagaagatggtgaaagggattagggtttatgagcatggcggtcctgaggttctgaaatgggaagatgtggaagtaggggaaccaaaggagggtgagatacgtgtgaagaacaaggctatcgggcttaactttattgatgtttacttcaggaaaggtgtttacaagccagcttctatgcccttcacaccaggtatggaggctgttggagaggtggtagctgttgggtcgggattgactggcagaatgatcggtgatctcgttgcttatgctggaaatccgatgggtgcgtatgct

SEQ ID NO: 122012 - DNA, 679 bp, Arabidopsis thaliana
  unsure (1)..(679): unsure at all n locations
aatacgactcacttagggaaagcacggtacgcctgcaggtaccggtccggaattcccgggtcgacccacgcgtccgaatgagaccataaactcatcgagggaagcaaatgagtcaaatctctcggattctgcagttacaagtatggattactttctaagttcgtcggcttattctcctggtggcatggtcatgcctatcaagtggaatgcagcagcaatggatattggctgctgcaaacttaatatatgatcagcagataggggacaagacatgatttggttcaccagtcttttgtcttgtcccttatctttcagccaaacggaaagagaacttgtgtcttggaaaaaagacattgagtttccttggtttataagattggtccttttaccatccgtttggctgtaaacaggcaaatcatctttggctcatgcttcatcaagttcttatcttcgtctgttttcttctacgcatcttcataagatctctgaactagtgaataacatttcctagcatcatgtttcaactagtgtgtgttggaagaaactctgccttatttccagatgatgtattgtgtgtaacgtgttatgaacaaacgtaagactntcaagttaaaaanaaaanaaaaaaaaanaaanaaaaaaaaaaaaaaaaggggcggcggtcataaagaccaagcta

SEQ ID NO: 122013 - DNA, 664 bp, Arabidopsis thaliana
cccaagcgtccgctcttggctccacagctgtgttactgtggatctcctcctcctctcgccctggatctcgtacctttgagcaccggtgaagatggccaaatctagtaccatgcttgttcattatgacacagggactccagcagttgctaatgagattaaagaagctctcgaaggaaatgatgttgaagctaaagttgatgccatgaagaatgcaattatgcttttgctgaatggtgaaaccattcctcagcttttcataaccattataagatatgtgctaccttctgaggaccacacaatccacaagcttctgttgctgtacctggagctgattgagaagactgactctaaggggaaggtgttacctgaaatgattttgatatgccagaatcttcgtaataaccttcagcatcctaatgagtacatccgtggagtgacactgaggtttctctgccggatgaaggagactgaaattgtggagcctttaactccatcagtgttacaaaatctggagcatcgccatccatttgttcgcaggaatgccattctggccatcatgtcgatatataagcttccacaaggcgaccaactctttgtggatgcgcctgaaatgatcgagaaagttctatcaaccgaacaagatccttctgccaagagaaatgca

SEQ ID NO: 122014 - DNA, 458 bp, Arabidopsis thaliana
aggacgcgtgagatgaaacataaagtttctgcatcagctaatatgttagatcagagctctaactgtatcgaagaccaggaagatgggatcgtgtctgctgatcgagccaaacagttgaagtcaggttgttctaataacgagattggcagtaaggatttagctgatggttcagctctcaattctgatccaattccgggtggatctacgaaagatgaagtgaaattacaatctttgcagaatccatcatccaaccatgatgacagagtcagttctgagaagggaaatttcaaggaaaaatcaagacccgggggtaacaaagagagacaggaaccttcagttgaaggatctacgcgttcaagagagaacaagaaggatggtaagtcaagtaagagctcttcgtccaactcatcagctgtgtctgagagcgagagtgatgattctgaaatggtcgaacatga

SEQ ID NO: 122015 - DNA, 559 bp, Arabidopsis thaliana
tgtctccagcaacatacgactcactttagggaaagctcgtacgcctgcaggtaccggtccggaattcccgggtcgacccacgcgtccgcacagtcgctttacgtcaccggagagaaaaacactcagaagaataaggttttcttcgatggcttctaatggcgtggacgagcagattaagttggtggaaggacctgctggttatgtactcgaagatgttcctcatttgagcgattacattctcgatctccccacttatccaaacccgttgcaatcaaatgctgcttattcagtagtaaggcagtattttgttgatgaggatgatacagtccaggaaaagattgttgttcacaaggattctcctagagggacacattttagacgtgcaggcccgcgccaaaaggtgtacttcaagccatctgatgtgcgtgcctgtattgtcacttgtggtggcctatgccccgggcttaatacagttatcagggagatcgtgtgtggtcttcattttatgtatggtgttacagaagtgattggtgtggattgcgggtttcgcgggttctat

SEQ ID NO: 122016 - DNA, 408 bp, Arabidopsis thaliana
cggacgcttccgcccacgcgtccggagactcataggatcataaccaggacgtgcaatttcagcagcgataatacttggagcaacgatgagtgcaatgaggccgtagcagaagttctcaagcagtatcacgagatagatatctatagcatctatacctcagtttgcataggagattctgcgcgatcgtcttactttgattcagcgcaattcaaaacaaattctcgcattagctccaagaggatgccaccgaggctcatgggtggatatgatccatgcttagatgattacgcgagagtattttacaacagagcagatgttcagaagtctcttcatgcgagtgatggagttaatctcaagaactggagcatttgcaacatggagatctttaataattggactggttcaaac

SEQ ID NO: 122017 - DNA, 1887 bp, Arabidopsis thaliana
acccacgcgaccacttagctttaaagggcacacacacacagtcgcgagtttctctctggtgcgctctttgtggcggctcgtcttcttcttcttcttccacgggactctctctgaatcggtgattttcgatcttcctagggtttcgatctgaaaccttgcgatctacttgaaagagagattcagaaatttccaagtaataataatgtttgcgcctgcgactcaaccgcaacagcaacatgagcagaagaagcaatcagagactgtttcatctgctgaagaagatgctttgaagtggaacaccgattgcgtttactttctcgcttctcctttaacctgcaagaagggacctgaatgcgagtatcgccacagtgagtatgcgcgtatgaacccgagggattgctattattggttgaatggaaactgtttgaatcccaaatgtggatttcggcatcctcctttggagggattgttgggaaatcaaggaggtgctcctgctgtttctgtacagccaatacatgcaaccgcgcagcatactagtgttgcaaaacagcctgttccatgtctgttctttcaaaaaggcatgtgtatgaaccgcgcgttctgttcgttcttgcacacgccgaatcctgctgcgtataaaaaacagcatcctgtagaagctaagcctgctactgatcctcagtgttctaaaaagccaattgaaaataacactgaggagaagaaacttcctgatgttaatctctcaaaggtggttaaaggacatactgacatatcggctgcaccaagagtcgcttctactggactaagggatagtagaagtgtagagggatacattccaaaccatgtgggatatgagcctgttgtgcagagaaagggtccaggattcccttcttttactgaaggaggccattctactcagttgcttcagaaatatggatctgatgataataacagtttccacaatggtaaggatgcagatgacgttttaagagagtcgtctcctgggtttgatgttcttgtggataatgaggctggagattctgagtattatcatgttgaagatcgatatggacgtagaagtcaggagagagggaactcagagtatgaccctgatttcagtgcaattgctgatggtgataaagaagcattacgtgaacaacgttttgattcatatgatcggagggaagacaggggatggggccatcgtcgagtttcttctgagagagaggatcgtttggacagaagggtttacgcagaagatgagagatcagagaacatactggaatcggatctgagatatcgtttggctaagcagagaaaaggcaatggtatgagattatcagtaggaggccatgactatgctgctcctgactcttcgatggacagaggatatagagagtctcgtagggatacaccgagggaaaactccattagcagtagtcgtcttcagggtagaattaagcttcgtgagagaagcaatggcgaagagggtcaccactttgacaggagaagtgagaggggaagggacagaagcgagttaccttctcagggtagactccgagatagaattaagggtaggttagaggaaaaccatagtggtaatcaggaaagaggtttcggggctccatgggcgagaagaagagaaatggaagacgaaagaaaatcagctcctaaaagcagcagagaggaaagtaagccagagccatctcttgggaagaggaaaagctttgaagaggatcatcatagtcataagcgatcaagggattcatttgcagctccattgcctttcagtgagattctcaagagaaaaagagcggccgctctagaggatccaagcttacgtacgcgtgcatgcggcgtcatagctcatctataggtcgtctcaat

SEQ ID NO: 122018 - DNA, 614 bp, Arabidopsis thaliana
  unsure (1)..(614): unsure at all n locations
ctcctcatctctcttgtccgtgcgcatcggattttggaaaccattgatgcagacctcaatccatctctaacaccactgatctatctacttaggtcttctctaacaatacttgtaattttctttctttttgcttcttccgtcactacatctatggccgctgagtcttctaaccctcgcaccgtcgaagagatcttcaaggattttagcggtcgtcgctccggttttcttcgagctctctccgtagatgttgacaagttctactctttatgcgatccggaaatggagaatctgtgtttgtacggacacccgaatgggacatgggaagtgaatcttccagctgaggaagtgcctccggagctacctgagccagctcttggaatcaatttcgctagagatggtatgcagcgtaaagattggctctctttagttgctgtccacagtgattggtggttactctctgtttcttcttacttcggcgctcgtcttaatcgcaatgagaggaaacgtctatttagtctgatcaacgatctccccacctctcntttnaaggnagtgacgggaggaaacccntccaaaagacgggaaaaccaagcannggttctcggangnaaaaa

SEQ ID NO: 122019 - DNA, 559 bp, Arabidopsis thaliana
  unsure (1)..(559): unsure at all n locations
nnnnnnnnnnnnnnnnnnnnnnnnnnnnnnnnnnnnnnnnnnnnnnnnnnnnnnnnnnnnnnnnnnnnnccacgcgtccgcggacgcgtgggcggacgcgtgggctattgttctctctctcttcatgcccgaacgcatcgggtctcaaaaaccattgatacagacatcgatccttgtcaactagtactgatctataaatcttataaaaatctgtagagatatggccgccgcagccgtttcctctaaccctcgcaccgttgaagagatcttcaaagattattccgctcgtcgtgccgctcttcttcgtgctctcactaaagatgttgatgatttttactctcaatgcgatccggaaaaggagaatttgtgtttgtacggacaccctaatgagtcatgggaagtgaatctaccagcagaggaagtgcctccggagctacctgagcctgctctgggtatcaatttcgctagagatggtatgcagaggaaagattggctttctcttgttgctgttcacaggggttgtgggttgctctctgatgctttctactttggagcccgt

SEQ ID NO: 122020 - DNA, 488 bp, Arabidopsis thaliana
gtgatctaagaaccgaccttttgcttagtttctttcaagtctccaatcaaacaaccatgagagaaattgtgacgattcaagttggagaattcgcaaactttgttggctctcacttttggaatttccaggatgaattgctcggattggctagtgaccctgaaagcgatccaatctttagaaaccataatctcgacatggatgttctctaccgctccggtgagacccagcagggggttgctacatacactcctcgtttggtttcagtcaacttaaaaggggcactagggaccatgagctcacgcggtacactttacaacgaaggttcttcatcaagatcagattcttcagcaacctggtttgcagatgttgatactcagagatctgaacctcgaaagaggaacttgtttctgcaaagtttgtacgaggaagaacatgtagtggggaaagaaaaggcgaaagagattgaggacaaagatattgttggatgc

SEQ ID NO: 122021 - DNA, 507 bp, Arabidopsis thaliana
gcgaaaatcccaaacaaaaaaaataaaagaatggcgtctctgtgcctttctctccaccaaaccctaactaatcccctgtcggctcccagatgcagaccactcagcctctccttccccggatcctcaaccttctcgatccgcccctctagcagacgcgcaaccgccttgacgacccgcgcctcctacaccccgacgccggcgactgagcgcgtgatttcgatagcgtcgtacgcgctgccgttcttcaattctctgcagtacgggcggttcctgttcgcgcagtacccaaggctgggattgctgttcgagccaatcttcccaatcctgaacctgtacagatcggtgccgtacgcgagcttcctggcattcttcgggctgtacctgggagtggtgaggaacacgagtttcagtaggtacgtgaggttcaacgcgatgcatgcggtgacgctggatgtgctcctggcggttccggtgctgctgacccgaatactggatccgggtcaagga

SEQ ID NO: 122022 - DNA, 692 bp, Arabidopsis thaliana
ggtacagcttcacgaacaatctctctctcgatagattcttcttacctctgaatttctcgttgttggaacaatggcgtcgaatctcctgaaagccctaatccgatctcagattcttccatcttccaggaggaatttcagtgtggcgaccacacagcttggcattccaacagacgatctagtcggcaatcacaccgccaaatggatgcaggatagaagcaagaaatcacctatggaactgattagtgaggttccacctatcaaagttgatggaaggattgttgcttgtgaaggagacaccaatccggccctaggtcatccaatcgagttcatatgcctcgacctaaatgagcctgcgatctgcaagtactgcggccttcgttatgttcaagatcatcaccattgaggcaaattctgaaagtgaactgctggtctctctcccctttttattgcatttttaagtttgtgtattgtttttttctggtgtgcctactacatcttcagctatattatctaataaaggattcgatcaaagtcgggtaagtttgatttttgtttgacctcacttcagcacttgtcatggtgtacctttcaatctctgtatacactgtcttttacatgccattgagctcaaaaaacagcaaggcctttttctgctaccaagatcatatgaaagttaaattttaaacaaaaaa

SEQ ID NO: 122023 - DNA, 754 bp, Arabidopsis thaliana
  unsure (1)..(754): unsure at all n locations
gtcctcccatatctctttaggaatcggtgaaacagaagggacgaagcatgatctgcatcaggcgatcctaagggacgaagctgtagcaagattacacgagcttggacaggtgagtgatgcagctacccacttagagaggacttttatgagtccagcatccataagagcaatacctcttatccgtggatggatggaagatgccggtttatcaacatgggttgattacatgggaaatgtacatggtcgagtggaacctaagaatggaagttcacaggctcttctaattggttcccatatggacactgtgattgatgctggtaaatatgatggctcattaggcatcatttctgcaatctctgcattgaaggttctgaaaatagatgggagattgggagaactaaagcggcctgttgaggtgattgcntttagtgatgaggaaggagtgaggtttcagtctactttcctaggcagtgctgctttggctggaatcatnccagtttctcggttggaggttactgataaaagtggtatttctgtgcaagatgctcttaaagagaactctatagacataacagntgaaaacttgatgcagttgaagtatgatcctncatctgtttggggatatgtagaggttcacattgngcaagggccggtgcntnantnggttggttatncctttnagnngtagtaaaaggaatttcagggcagncaaggctcaaaggttacctgtaaaaagggntctcaacggacatnc

SEQ ID NO: 122024 - DNA, 870 bp, Arabidopsis thaliana
ctcttgttctttctcgtatcaaagctctcaagaagatggatgaattattggaagtggtggaagaagctgaatttagaatgcaattccctgaacctgataagattgatggagcaatcatcacttgtgataaagtgaaattcggttatgataaagataatattctattacaagatgttacacttaatattgatatggattcacgtgttggtgtgttgggggccaatggggttggtaaatctacattacttcatcttttgattggtaagattcaaccattagaaggtacagtgatacgaaattctagtgcacggattgcaacttttgcacaacatcatatggaacaattaaatttacaacaatctgcccttgatctcttcattgaactctttcctaaaaatcaccctcaacttctgcgtcgtcatttaggtcaatttggtattactggagatctagcattacaaaatattggaacattatcaggaggtcaaaaatctcgtgttgcattcgccatcgtaacattcaagaaaccacatttgattattatggatgaacctacaaaccatttggatctggaaaccatcgatgctctgatcttggctgtccaaaattggggtggaggtgtgttacttgtatctcacgatcaacatttcttatctgctgtcgggaatgagttttggggtgtttcagctggaaaggtgaaacgtttcgacaactttgaagcctccagaaaattctcttacagtatgtagatttccatagcccatcatgattggatgagatgtactaagtgatatcgttgtcatcccatcatttcgttcatgtacatagcttgtatgccaatataaaacaacaacatcattattgcggagg

SEQ ID NO: 122025 - DNA, 608 bp, Arabidopsis thaliana
  unsure (1)..(608): unsure at all n locations
atgatctnnnnnnnnnnnnatcgactcaccttagggaaagctcgtacgcctgcaggtaccggtccggaattcccgggtcgacccacgcgtccggctcactaaccctaaaaaaagtaactctctcactcactcttcttcatcataccgaaaaaaatccaatggcttctttggaaaatccagcaatcgattcttcaagcgaatttgagagttcttctgaagagatctcttcttctaaagaaagcaaacccaaagaagctcccgtcactgttccgtcaacaaaaaccctaaactctccttccgccgccgtggcagtttctgatgactcagagtcagagaagcagtcattcgtcttaaccaggcggaagaagaaagaaggtgctgctgaatcaccggcagtgaagtcagggaagaaagaaggtgctgctgaatcaccggcagtgaagtcagggaataacgaaggtgctactgaatcaccggcggtgaagtcagggaagaagcgagctagcgaaggaaccacgtcaagggacatgcatgtcaaaagaattaagaaagagggcgataacaaaaaggggcatgctcagagagtatggagtgaagaagacgagatc

SEQ ID NO: 122026 - DNA, 745 bp, Arabidopsis thaliana
  unsure (1)..(745): unsure at all n locations
aggtttggcactctacgcagatccaaatttcaaagtactagctgcttcatacccatattntgcaaaaaggcttctcactgatccaaacccgtatctaagagatgcccttatcgagctactattcaaagacggaaaatttaggtggaatagactcgagaaccttctacaacagggaagtaaagatagagacttctcagcaaaggatgctctacaaccagttttgaagcttttgctgggtccaaatggcgaagaccttcgattgttaggtatttaaagaagctgtacgagtcagtgaagcaattgcgctgggcactgttgttgatacatacaattcccttcctgagtttctgagatctcttgtcttcaatggaaatgggaatggccctcttacaatgagtaccgcggaacttcaaagtacgcttgagcttcgggatcaggtctccagaatctggggccttcttcaatcttcagaaagctttgatcctgctattttgcaaccaatactacaggtgttacaacaaccagaggcacgaagacttggaggacgtgttgcaggcggtgtaggccaacgtcttgcagctcggtttctgcaacaacttcttcgagccacaacaccatcttctgcaccatccccataggtcctcttttcttctcagtgaaatggtaaattgtatattaaggcgagacactcgcggccgcgaattcgatatcaagcttatcgatacagtcgacctcgagggggggc

SEQ ID NO: 122027 - DNA, 670 bp, Arabidopsis thaliana
  unsure (1)..(670): unsure at all n locations
atacgactcaccttagggagaagcacgtacgcctgcaggtaccggtccggaattcccgggtcgacccacgcgtccgagaagctgtacgagtcagtgaagcaattgcgctgggcactgttgttgatacatacaattcccttcctgagtttctgagatctcttgtcttcaatggaaatgggaatggccctcttacaatgagtaccgcggaacttcaaagtacgcttgagcttcgggatcaggtctccagaatctggggccttcttcaatcttcagaaagctttgatcctgctattttgcaaccaatactacaggtgttacaacaaccagaggcacgaagacttggaggacgtgttgcaggcggtgtaggccaacgtcttgcagctcggtttctgcaacaacttcttcgagccacaacaccatcttctgcaccatccccataggtcctcttttcttctcagtgaaatggtaaattgtatattaaggcgagacactcgcaaaccacagaattgtttcatgttacagtaatatagtatcattctttctctttgtaaaaaaaaaaaaaaagggcgaccgctctagaggatccaagctnnnnnnnnnnnnnnnnnnnnnnnnnnnnnnnnnnnnnnnnnnnnnnnnnnnnnnnnnnnnnnnnngtagctggatatca

SEQ ID NO: 122028 - DNA, 607 bp, Arabidopsis thaliana
gccggacctaatacgacttacttagggaaagctggtacgcctgcaggtaccggtccggaattcccgggtcgacccacgcgtccgcccacgcgtccgcccacgcgtccgcggacgcgtggggaatcctccaatataaagctccaccctttctctttctatctctctctctccattgttgactgtctctcttccctcgtaaacatcgctgtctctaaagatggcctctctctcaggcctatactcttcttctccatctctcaaacctgccaaaaaccattcctttaaagcattgccggcgcaatctcgagattccttctctttcccacatacctccaaacccaccaatctaccgttgactctctcctcggctcgttctgtggcacgcgacatttctcatgcggattcgaagaaagagcttcttaaggatccggatgcgttgtggaagcgatacctcgattggttttatcagcagaaagagcttgggttgtatctggatattagtcgggtcggatttaccgatgagtttgtggctgaaatggagccaaggtttcaagctgcgtttaaggctatggaggatcttgaaaaagggtctatagcgaatcctgat

SEQ ID NO: 122029 - DNA, 403 bp, Arabidopsis thaliana
agcctacctaatctaagcagggccgtccgctcccaccaaaggacaaatctctctcccgcactcatctctgttcattggttcctcccaaaaaatatcaatcaaatcggaataaactatacgaatcctccaatataaagctccaccctttctctttctatctctctctctccattgttgactgtctctcttccctcgtaaacatcgctgtctctaaagatggcctctctctcaggcctatactcttcttctccatctctcaaacctgccaaaaaccattcctttaaagcattgccggcgcaatctcgagattccttctctttcccacatacctccaaacccaccaatctaccggtgactctctcctcggctcgttctgtggcacgcgacatttctcatgcggatt

SEQ ID NO: 122030 - DNA, 683 bp, Arabidopsis thaliana
tgatactccagctccctacgactcactatagggaaagctggcacgcctgcaggtaccggtccggaattcccgggtccggagatatgaatctcttctttctctggatttgaaagttcgataaaaatctactgatacatcgacttctggaagcgatctcgatctctctagaattgtttcgacgacgaagatgaagaagattcaaattggtgcggtggcgctattggtgtttctatctgtggcctctctctttgaaatcggattggcttctccgaacacagttcctgctttcctctggtctccgcatctccagtctgctaatggtgaattggatgaggctgtaaattatcaggtcatgtctgcaaaggatctagttggttctgttttcactcaaggaggttggtcaaactttctgtgctcagagaagaagcttgagcaacctgttgatgttgcacttgtgttcataggcagagagttactgtcttctgatgtttcttcaaaaaggaacctcagatcctgcccttgttaacacattgaataatctttttacaggttccaacttctcattggcattcccatatattgctgctccagaggaagaaaggatggagaatttgctactttcaaggcttaaagaagcttgtcccaacaattgaggagtcagcaatatcgtgttctcagattcg

SEQ ID NO: 122031 - DNA, 530 bp, Arabidopsis thaliana
  unsure (1)..(530): unsure at all n locations
cagctannnnnnnnnnnnnnnnnnnnnnnnnnnnnnnnnnnnnnnnnnnnnnnnnnnnnnnnnnnnnnnnnnnccacgcgtgcgcgaatcttcaagaacaaagagagagagagagagaaaatttaatggcgttagcgaataacttaacggcgatactcaacttactagcgttactctgttccataccaataacggcgtcaggtatatggctagcttcaaagccagacaacgagtgtgtcaatctcctccgttggcccgttgtcgtcctcggcgttctcatcctcgtcgtctccgccacaggcttcatcggcgcctacaagtacaaggaaactctactggcggtttacttgtgctgtatggcgatattgatcggacttttgctggtggttcttatatttgcattcgtcgtgacccggcccgatggatcgtatcgggttccgggtagaggttataaagagtataggcttgaagggttctcgaattggcttaaggagaacgttgtggattccaagaactggggaaggctaagg

SEQ ID NO: 122032 - DNA, 424 bp, Arabidopsis thaliana
ctttctctttcattttatatacccttttcctctctttctccaaatctctgaaaattttcaccagaatctctgttctttttttcaccagaatctctctgtttaaaataataggtgatgatgatggatgagtttatggatcttagaccagtgaagtacacagagcacaagactgttatcagaaagtacactaaaaagtcgtctatggagaggaagaccagtgttcgtgactcggccaggttggttcgggtctcaatgacggatcgtgacgccactgattcatcaagcgacgaggaagagtttctgttccctcgaagacgtgtcaagagattgattaacgagatcagagtcgagcctagcagctcttccaccggcgacgtctcggcttctccgacgaaggaccggaaaagaatcaacgttgattcta

SEQ ID NO: 122033 - DNA, 700 bp, Arabidopsis thaliana
cgacagaaggggggggaagacaattccgagaaaatagagagtagagagatcctaaagagtcaaaagaggtcaggtgattgattaacccgttgaataatctccttctcccgttgaatcgggtcgaaatagttgaactttaagccaaaccctagcttgaggaggaagaggaatggtcggcgtgatgaacagattgaggaatctggacgcttaccctaaaatcaatgaagatttctacaggcgtactctttctggtggtgttatcaccctcgcctcttctattgtcatgctaattctcttcttctccgagcttcagctgtacattcacccggttactgagactcagcttcgtgttgatacatcaagaggagagaagctacggattaattttgatgttacattccctgcgcttcaatgttcgattattagtcttgattccatggatatcagtggggagaggcaccttgatgtgcgacatgacattattaaaaggagattagactcttctggcaatgtcatcgaggcaaaacaagacggaattggtcatactaagattgataaacctttacaaaaacatggtggaaggttggaacacaatgaaacatactgtggttcctgttttggagcagaagcgtcagatgatgcttgttgtaattcatgtgacgaagttcgcgaagcttaccgaaagaaaggttgggccctc

SEQ ID NO: 122034 - DNA, 396 bp, Arabidopsis thaliana
ctccattcggcacaccaccaaacccgaatatgttctttactccaccaggttctgatagaggagggcctcctaactttcctgggtccaatatttctggacaaatgggacgtggaaatgccttctgataagacttcagggggatgggttcctcctcgaggtggtggacctcctggtaaagctccttctaggggagagcaaaatgactattcccagaactttgtggatactggaatgcggccccagaatttcattcgggagctggagcttaccaatgtggaagactaccccaagcttagagagctcatacagaagaaggatgagattgtatctaattctgcttctgcaccaatgtatctgaaaggcgacttgcatgaagttgagttatctcccgagtta

SEQ ID NO: 122035 - DNA, 464 bp, Arabidopsis thaliana
gcccatctataaagaaaatacaaaccatggcaattccaaaagctcactactctttagcagttcttgtccttctctttgtcgtcgtttcgagtagccaaaaagtctgcaatccagaatgcaaggccaaagaacccttccactgcgataatactcatgcattcaaccgtagtggatttcccaaaaatttcacttttggtgcagctacttcggcttatcaaattgaaggtgcagcacatagagcacttaatggatgggactatttcacgcatagatatccagaaaaagtaccggatcgtagttcagcagatcttgcttgtgattcgtatgatctttataaggatgatgtcaaactgctaaaaagaatgaatgttcaagcataccgtctctcgatagcatggtcaagggtcttaccaaagggaagactgactgggggagtggacgagaatgggataacatactacaac

SEQ ID NO: 122036 - DNA, 873 bp, Arabidopsis thaliana
  unsure (1)..(873): unsure at all n locations
atgatcctgccagcaacaatacgactcactttagggaaagctcgtacgcctgcaggtaccggtccggaattcccgggtcgacccacgcgtccgccctgattctcttggtaaatgtgagtctttgacccggatccgaatgggtgagaatttcctgaacgggtcaatcccaaaaggactattcggattacccaaattaactcaagtggagctccaagataattatctctccggagagttaccagtcgccggaggtgtctctgttaatcttggtcagatcagtttatcaaacaaccagctctcaggtccattacctccggcgatcgggaacttcaccggcgttcagaaacttcttcttgatggaaacaagttccaaggtcctattccttcagaggtagggaagcttcagcagctctcgaagattgatttcagccacaacttgttctccggtcgaatcgcgccggagattagtcgttgcaagctcttaacgtttgttgatctgagcagaaacgagctctccggtgaaatcccaaatgagatcactgctatgaagatattgaattacttgaacctgtcgagaaaccatctggttggatcaatccctggttcattctcgtcaatgcagagcttaacatctcttgatttctcttacaacaacctctncggtttagttccgggacaggacaattcagttacttcaactacacatcgttcttgggtaacctgatctctgtggccttatcttggtccttganagacggtgttgctaaaggaggcaccagaatcatagtanaggaccttatcnagctctatgaagtattgcttggtcttgactacttgtttgtcgattgcgttcgnggagtagccatatcaagc

SEQ ID NO: 122037 - DNA, 1230 bp, Arabidopsis thaliana
atcgactcacttagggaaagctggtacgcctgcaggtaccggtccggaattcccgggtcgacccacgcgtccggcctttcctatttacatttcgttaacacctaggttcttgtttcctaacaaaggctctactttttctttagttaactactatggctcatttcctcgagacacaggagcccctcgtattctccgggaagaaacgaaacgatcgcgatgacgaagacggtgacgccttggttgcgaagaaatcagcactggcggtgtgtgatgccgaccctgcagcggccatagcgaatatccgacatgagtttggggagcacgggggagtaaacatgtccatcgaagcctccgccaccttcaccgtcatggaaccggataccatgaggcggatgttcaccggagaactgggaccggacaacgacttctacgtatacagccgacacttcaaccccaccgtgctcaacctcagccgccagatggctgctctcgaaggcacccaagctgcctactgtacctctagcggtatgtcggcgatatcgtcagtgatgctgcaactgtgcagcagcggaggacacgtggtttcggcaagcacgctctacggagggacacacgctttgctctctcatttcttgccacggacatgtaacataaccacctccttcgttgacataacggaccatggcgccgtggcaaacgcgatcgttgagggtaggacacaggttctctactttgagtcggtggcaaacccgacgctgactgtggctgacatacctgagctgagccgtatggcacacgagaagggcgtgacggtggtggtggacaacacattcgcccccatggtgctgtctccggccaagcttggagcagatgtggtggttcacagtatctccaagttcatcagtggtggggctgacatcatcgcaggggccgtgtgtgggagtgagaatttggtgaaagagatgatggatcttcgtggcggatctctgatgcttctaggtcccaccatgaacgccaaggtggcttttcgagctctccccgcgaatattccccctcacttggggcctacgcatggagagagcacagccacagagcccaagtgtatgcggagagaatgagggatttgggcatgaaagtcatatatccagggctcgagacccacccgcagcacaagctattcaaagggatggtgaatagagactatggatacggaggattgctgtcgataga

SEQ ID NO: 122038 - DNA, 408 bp, Arabidopsis thaliana
accgtgcgataacctaaatttcaacgttgattccactttggcaagtttgtatctttcccactttgattccgatttgttaaagatttgcagattaaaagttttctttttgaagaaatccatgagtgcccaaatggaagaaccagagactctcggcaaaagaaaagaatctgaaagttcaaaacttcgttctgatgaaactccgacgccagaaccaagaacgaagcgtagaagtcttaaacgtgcttgtgtacatgaagttgctgttcctaatgattacacaccaacgaaagaagagacgattcatgggacgcttgataatcctgtcttcaatggagacatggccaagacttatccttttaagcttgacccttttcaaagtgtatctgtagcttgtttagagagaaaaga

SEQ ID NO: 122039 - DNA, 1004 bp, Arabidopsis thaliana
  unsure (1)..(1004): unsure at all n locations
gattgtttaggacacactatagaagagtctatgacgtcgcctgcacgcgtacgtaagctcggaattcggctcgagcggctcgagcggctcgagcggctcgagcttctccaagaacctctctctctttctgcttctctatattttaacactttcttccgaatttgcccctcaagttttattttaattgctaaaatggctggaaccctagttaactccgccgggagattctcaccgggaaattgtattcttcctcaacagagaacagccagattctacagcggaaccgcgagatttcccaccggagctccgtcgtttaaggcttcagctcagacgcttaacgccgagccagctgtaacggaatccgttcgtcggagagtttctagcctctacgaattactgaaagtgaatgaaacggcgtccttgacggagatcaagacggcgtaccggagcttagctaaagtatatcatccagatgcgtcggaatcggacggtcgagattttatggagattcacaaagcttacgcgacacttgcggatccgactacaagagcgatttacgactcgacgcttagagtaccacggagacgggtacacgccggagcgatgggtcggtcggggcgggtttacgctacgacccggagatgggagacggatcagtgttggtgattttaggcttcctatgattttgcagcagcgaaagggcactttttgacttactttcccctttgattacgtttttttttttccttgtcatatctttggaaaattaaggggaaattaagtttaatccgctcctttttttttgtttttcttttaacttaagcagttaacaatgtataaagaagttatgagtagagaaatgtatatgattttagttttctcctttataatttttcttctaaacaaaaaaaaaaaaaaaagnnnnnnnnnnnnnnnnnnnnnnnnnnnnnnnnnnnnnnnnnnnnnnnnnnnnnnnnnnnnnnnnnnnnnnnnnnnnnaaattc

SEQ ID NO: 122040 - DNA, 801 bp, Arabidopsis thaliana
  unsure (1)..(801): unsure at all n locations
ggtttcggaanttcccgggtgcgacccgcacgcgnntccggtctcattcnntccctcttcaatcccaatccagagtgtaagatagagacaannnctccatanntcttccgtcagagaggtgctcaaaaaaccgcaccaggtgtgtgtctccctttcttctgtccctcatcctcacataggtggcatgagacattgtattccaccagagggaaaatgcatatgatcacatactctgcttttgatttcaagttgtatatgatccgcaaagccgaatctgtaaatgcggctctcgacgtttctgtaccgctccgagaacccctcactgtccaggaagccgtgcggtactcattgctagcgggcggaaaacctgtgaggcctctgctctgcattgctgtctgcgagcttgtgggaggcgacgaggctactgccatgtcagctgcttgcgcggtcgagatgatccacacaagctctctcattcatgacgatcttccgtgcatggacaatgccgacctccgtagaggcaagcccaccaatcacaaggtatttggagaagacatggcggttttggccggtgatgcgcttcttgctttggcgtttgagcacatgacggttgtgtcgagtgggttggtcgcttccgagaggatgatccgggcagtggttgagctggcaagggccatagggacaaaagggttagtggcagggcaagtggttgacctaagcagcgaaagattgaatccacacgacgttggattggagcgtctagagttcatccacctccacaaaacggcggcgttgttggag

SEQ ID NO: 122041 - DNA, 678 bp, Arabidopsis thaliana
  unsure (1)..(678): unsure at all n locations
ccggcannnnnnnnnnnnnnnnnnnnnnnnnnnnnnnnnnnnnnnnnnnnnnnnnnnnnnnnnnnnnnnnnnnccacgcgtccgagagattcttccggagggcgatctgccacaccaaatgctgtggaccagacgtctactcccttggcatcttcacaaccagcagcgattccagattcgttgacaaccttatctgaatatctgaatcatctcagacaagagtttgctgctaatggtagcaatgctaataacttgcaagattctgaaaattcagtgggcaatgtgcaagattctgcttctactactggagagagtcggattccaagaccatctcatttggcagaagtgctgcaatcaacaaggcaattgttgatcggtgaagtagcagattgcttatctaatctttcgaggcagctcgtggatcatgtaaatgtgaccgatccgccaacccgaaggttgtgccagtcaaacatgcttcaatcaggatccctcttggagagtttaggcatttcactcctggagcttggccgtgccaccatgatgcttcgtttgggacaaacacctgatgatgctgttgttgatgctggacctgcagtgttcatatccnctacagggcgaaatcccttgccggtctatctatntgttactttctttcaccattaccagtgtgtccacttg

SEQ ID NO: 122042 - DNA, 740 bp, Arabidopsis thaliana
  unsure (1)..(740): unsure at all n locations
atacgactcaccttagggaaagctcgtacgcctgcaggtaccggtccggaattcccgggtcgacccacgcgtccggaccgatccgccaacccgaaggttgtgccagtcaaacatgcttcaatcaggatccctcttggagagtttaggcatttcactcctggagcttggccgtgccaccatgatgcttcgtttgggacaaacacctgatgatgctgttgttgatgctggacctgcagtgttcatatcccctacagggcgaaatcccttgccgtcacactcctctcggctgggcacgagtattggaagcttacaagcaggaaccgcacattctaacccctttgcgggacaatcacttgcctctgccccaagaaatattgagataagaatacgtacaggatcttgggtgcccgccagtgggaccaaccagagagaggaaagtactacacaacaaacccctgggcagacaatcccttctacacccagcagcactactgatcctgccccctcaacgagaggtccatctgaacctnttcgaaatcctgtggccttagttatacctgtngtngctcgatatcagcagatatctnttggtggacgtagctctactggattggatggtgtacatcagcctgtnactgaatcttctaggcagccacagagcgtcgggtacttncaggaagaggagggtgatagcagtgcttntccctngggggtcgggnttttntttgnatttngggaaa

SEQ ID NO: 122043 - DNA, 827 bp, Arabidopsis thaliana
atagaagagctttgacgtcgcatgcacgcgtacgtaagctcggaattcggctcgaggaaacagcgcacgccataaggaagctaccattgaacaaggccaaaaggtacttggaagatgtcatagctcacaagcaagctatccccttcacccgtttctgtcgtggtgttggtcgtaccgctcaggcaaagaacaggcattcgaacggacaaggtcgctggcctgctaaatctgctcaattcgttcttgatcttctcaagaatgctgagagcaatgctgaggtcaaaggtttggatgtcgatgcccttttcatttctcacatccaagtgaaccaagcagcaaaacagaggagaaggacatatcgtgctcatggaagaatcaatccttacatgtcaaacccatgccacattgagttgattttgtcagagaaagaagagcctgtgaagaaagagccggagacacagttggcagcaaagtcaaagaaaggagcctcatcttaagctataacatagacagtctatttgtgctcacttgtgttacccttaatactttttgttagcttctctctataagaccaatactcaatttttaagtatgatgattatcggtttttggattgctgaaagaatctctctttatccaaaaaaaaaaaaaaaaaaaaaaaaaaaaaaaaaaaaaaaaaaaaaaaaaaaaaaaaaaaaaaaaaaaaaaaaaaaaaaaaaaaaaaaaaaaaaaaaaaaaagggggggccgttttaaaggatccaagtttacttccccgggcttgcaaggaaaaagtttttttttggggccccctaaattaaattaatg

SEQ ID NO: 122044 - DNA, 560 bp, Arabidopsis thaliana
  unsure (1)..(560): unsure at all n locations
ggccgattagggtttcttctgtttcactatatattaagtgtctccaactactgagatctctatcctctccgccctctgttcttctcattggccgccatggtgaagtactctcaagagcccgataatatcaccaaatcttgcaaggcgagaggagccgatctcagggtccacttcaagaacactagagaaacagcgcacgccataaggaagctaccattgaacaaggccaaaaggtacttggaagatgtcatagctcacaagcaagctatccccttcacccgtttctgtcgtggtgttggtcgtaccgctcaggcaaagaacaggcattcgaacggacaaggtcgctggcctgctaaatctgctcaattcgttcttgatcttctcaagaatgctgagagcaatgctgaggtcaaaggtttggatgtcgatgcccttttcatttctcacatccaagtgaaccaagcagcaaaacagaggagaaggacatatcgtgctcatggaagaatcaatccttacatgtcaaacccatgccacattgagtngattttgtcagagaaaga

SEQ ID NO: 122045 - DNA, 416 bp, Arabidopsis thaliana
tttttaaagggtacgagattcagtcatctccaatcccaaaattccacttctgtccacaaaacacaaagcgattctcgatctttgatcgtcccaccagatggccgggaacgattgggtaaacagttacttagaggcgattctcgacgtcggtcagggtcttgacgatgctcgctcttctccatcacttcttcttagggagagaggtcgattcactcccagccgttactttgttgaggaagttatcactggttacgatgagactgatcttcatagatcctgggttaaggctgttgctacgaggagtccacaagagaggaacacgaggttagagaatatgtgttggaggatctggaatcttgctcgtcaaaagaagcagcatgaggaaaaagaagcacagaggctggctaagcgcaggc

SEQ ID NO: 122046 - DNA, 583 bp, Arabidopsis thaliana
gctaaagctggatgtcagtttataacagttctttttgttgatttcatgtccgaaaatgttcgtgccatcctagatcaagctgggtttgaaaaggttggtgtgtacaggatgtcagatgagaccattggttgttcacttgctgacgctgcttctgctcctgcttacttgaattatcttgaagctgcttctcgttctcctccttcactgcatgttgtttatataaatacatctttggagacaaaagcttttgctcatgagcttgtacctaccattacttgcacttcatctaatgttgtacagacgattctgcaggcgtttgctcaaatgccagagttaactgtttggtatggtcctgattcttacatgggagcgaatattgtaaagttattccagcagatgacattgatgactaatgaagaaatcgccaatattcaccctaaacacaagcttagattccattaaatcattgcttccccgtcttcactatttccaggaaggaacctgcattgtacatcatctattcggtcacgaggtagtggagagaataaagtacatgtactgtgacgcctttcttacagcacat

SEQ ID NO: 122047 - DNA, 1062 bp, Arabidopsis thaliana
cccgtgtatgtatatttggaaaggaaagaagtatcagtggaatacggaactgagatacgtcaacgttaaagcaacggggatggactaagagattgcaaaagtgaacatctgtgatcgtgccaccgtcatgtatgaagaagacatagtgcctctgttagtatagaaagagtaggtagccagtaagaggctgagaagatagtgtaaaagagtatactttgctacagaaagtagatcatatggtcgcgatatttaatgattcaatagtatgccaatagcctgagtacgtgtacgagagcatctatagaagcgtgttacttatatgaatgcaagaagggactgtcgatgggtacttgtttctatatatcctgggtgtagcttgatatatgaccgtactgcatagattccgctttgaagagcttgtaaccagtggactagctagcgctgaattaatataaagaagacagaagactaacaagatagtgatctttatgtttaccgcatgtaatactagtgaacgagagttgtattaacgaggttctcgtaaggaggtagtttagccgatccccggacacaagaagccaatccaatcctccccaacaccattgacagaacttcctattgctagaagagcttcacttcaccggttcttggagaagagaaaggacagagttacgtcaaaggcaccataccaattatgcgatccagccaaagcgtcttcaaaccctcaaaccacaggcaacatgtcgtggctcggtttagcagctgaaatatgaatgctaaccaccctcaagccgtaccaagaaattcttttgacgacgttgcttcaagacaagatataaaagctcctatcttcatgctttttgatttaagatacaaactactcaatgattaggaaacttcatatatttgtatgtattgattagtgatcaattattgttagtattcgttatagtctgtttttctactagttattgtcgcctgtctaaatccccttgctatgggttatctcaaaattagtttcgtatgtaactaattttgtaagaacaataatttttgttgtcg

SEQ ID NO: 122048 - DNA, 1409 bp, Arabidopsis thaliana
  unsure (1)..(1409): unsure at all n locations
atacgactcatatagggaaagacggtacgcctgcaggtaccggtccggaattccctgttgtcgacccacgcaaccccaaagccaaacaaagttttatagagaccttccatttctccctctcgtgacaaacgcaatttgcagagaagcaacagcaacaacaagaagaagaagaaaaagatttgagattactttgtatcgatttagctattcgagaaactcttgccgtttgaaagttttaattgttaaagatgtcgagttctatggaatgttctgagttcgtcggtagccggagatttactgggaagaagcctagcttctcacagacgtgtagtcgattgagtcagtatctaaaagagaacggtagctttggagatctgagcttaggaatggcatgcaagcctgatgtcaatggaactttaggcaactcacgtcagccgacaacaaccatgagtttattcccttgtgaagcttctaacatggattccatggttcaagatgttaaaccgacgaatctgtttcctaggcaaccaagcttttcttcctcatcttcctctcttccaaaggaagatgttttgaaaatgacacagactaccagatctgtgaaaccagagtctcaaactgcaccattgactatattctacgccgggcaagtgattgtattcaatgacttttctgctgagaaagccaaagaagtgatcaacttggcgagcaaaggcaccgctaatagcttagccaagaatcaaaccgatatcagaagcaacatcgctactatcgcaaaccaagttcctcatccaagaaaaaccacaacacaagagccaatccaatcctccccaacaccattgacagaacttcctttgctaaaaaagctttccttccccggtctgtgagaaaaaaaaggacagagttacgtcaaaggccccaatcccattattcgatccagccaaagcgtcttctaaccctctaaccccaggccaacatgtggtggctcggtttagcagctgaaatatgaatgctacccccctcaaaccgtaccaagaaattcttttggcgacgttgcttcaagacaagatataaaagctcctatcttcatgctttttgatttaagatacaaactactcaatgattaggaaacctcacaaatttgtatgtattgattagtgatcaactattgttagtattcgccacagtctgtttttctactaggtattgtcgcctgtctaaatccccctgctatgggttatctcaaaattagttttgtatgtaactaattttgtaagaacaataatttttgttgncgnnnnnnnnnnnnnnnnnnnnnnnnnnnnnnnnnnnnnnnnnnnnnnnnnnnnnnnnnnnnnnnnnnnnnnnnnnnnnnnnnnnnnnnnnnnnnnnnnnnnnnnnnnnnnnnn

SEQ ID NO: 122049 - DNA, 511 bp, Arabidopsis thaliana
atacgactcaccttagggaaagctcgtacgcctgcaggtaccggtccggaattcccgggtcgacccacgcgtgcggatactactctcttttcctccccattttagaggggttgacttggacgaggacgaaggacaagaagtggtaaacagaataatgttatgccaaacacttgggatcttgaggaatcttgactagatggatctgaaactcttgagtcggccggattgggatcaagaatcttacccagattcttctgatttcttggtcctcatcttctttgctccattcttcctttttcttcgcttaatcctcgacagatgcatattcgagagggtcgctagaagactggtagttcctaaaggactatgtgctgattcaaacgagagaagaaagaaggtagtgaaattcaaagaatccgcttggaaatgtttgtgctctttctcggtggaagcttttgctctctacgttacttataaggggccctggcttaaaaccccacactctcatgtt

SEQ ID NO: 122050 - DNA, 518 bp, Arabidopsis thaliana
atcgttgagttggtgagatcatcttcttctcaacttcatcgatcttatcgtctcgaaaattgtcaccttttcttctcagctacttcaggcggagaaacactttccgtggtttagtgttgaggacgatcactgtttgtaattcgatggcgaggaagaagatcagagaatatgactccaagagacttctcaaggagcatttgaagcgtcttgctaatattgacctgcagattcgctctgctcaggtgacagaatctacggatttcactgagttaaccaaccaggagtcatggctatcgtccacaaagctagttgtgaaaccggatatgctatttgggaaacgcgggaaaagtggtttggtagctctaaagctggatcttgctgaagttgcagactttgtcaaagcccgcctcggcactgaggtcgagatggagggatgtaaagcacctatcactacattcattgtggagccttttgtgcctcatgatcaagaatactacctctctatagtatctgataga

SEQ ID NO: 122051 - DNA, 677 bp, Arabidopsis thaliana
aatacgactcactaagggaaagctcggtacgcctgcaggtaccggtccggaattcccggttcgacccacgcgtccgcggacgcgtgggcggacgcgtgggctcaagcttcctggacaagcaccatcatctcgatgtggtcatacagttacatctggaggacattatcttctgttatttgggggacatggaactggtggatggctgagtcgttatgatgtttactataatgatactataattttggacagagtaactgctcagtggaagcgcttaccaataggcaatgagcctcctcctcctcgagcttaccataccatgacttgtattggagctcgtcatctcttaattcgtggttttgatggaaaattgaccttcggtgatctctggtggttagttcccgaagatgatccgatagccaagaggtcttctgtgcctcaagttgtaaaccctcctgaaattaaagagtcagagagagagttggacaaggaaaggggacaagatggattcagtattgttgacttgcaacagaaaatgggaatatctggttgcatcagggttgcgccttcaaattcccgaggaggcagaagatcaagagtttgttcgatgaggaacagaataatctgagggagatgtttgtatgaacgggcccgtatgattgaaaatgggcggtgaggcc

SEQ ID NO: 122052 - DNA, 484 bp, Arabidopsis thaliana
cagtattcttgcctctcttcatcttccattgacgtttccttctatcctcgttgccttcatttttcactcgcacgctaatcttcgcctactttgttagattttcggttttgggtttttgtcttttgggccgatttcccctgttcccagaatctccgattaagctgcttccttaatctcttgtctgaataaactttttccggcgtgtaatttagataggtggttaaaattacgagtagtgagaggagtgttgttgctgttttgcttattcggtaaaacgaaatcggaagttctttgctgtcgtttgattccttttgagaaaaagagatgttgggagctggatttaacttcactcagcttcagagagctcaaattgacgtctcttatggctgcagatcgagtcacactaaggatcgtgagaacggctctgcattgttgaaacaccatgtttctgaggcattcgctagtaatgtgggacggtttttgg

SEQ ID NO: 122053 - DNA, 439 bp, Arabidopsis thaliana
  unsure (1)..(439): unsure at all n locations
tcgcggacgcgtccgcccacgcgtccgcccacgcgtccgattattttcttctgcaagatccttcatcaccacaaaacctcttccgattgattcatttattcctaaaccaaagctagagaatgcggctgcgtgttcttacacggtgatcattaagacaagctgttcctctgtgtcttacactagagataagatcagtatatcgtttggtgatgtctacggcaacgaggtgtatgtgaagagactagacgatccatcgtcgaggacgttcgaaaagtgttcatcagacacatacaagatatcgggaccgtgtatgcgcgacgtttgttatctctacctcctcaggcaaggatccgacggctggaaaccagagaatgttaagatctacggctcatncattcagatcagtcacnttttntacttacaaaccttttttttgcct

SEQ ID NO: 122054 - DNA, 433 bp, Arabidopsis thaliana
cccacgcgtccggaccattttgttcatcgactttctcaactctaaaacaaaatgctcagattagcgattcctttgtttctttttgcattatgctctttcacattattttcttctgcaagatccttcatcaccacaaaacctcttccgattgattcatttattcctaaaccaaagctagagaatgcggctgcgtgttcttacacggtgatcattaagacaagctgttcctctgtgtcttacactagagataagatcagtatatcgtttggtgatgtctacggcaacgaggtgtatgtgaagagactagacgatccatcgtcgaggacgttcgaaaagtgttcatcagacacatacaagatatcgggaccgtgtatgcgcgacgtttgttatctctacctcctcaggcaaggatccgactgctggaaaccagaga

SEQ ID NO: 122055 - DNA, 1102 bp, Arabidopsis thaliana
  unsure (1)..(1102): unsure at all n locations
atgatctnnnnnnnnnnnnnnnnnnnnnnnnnnnnnnnnnnnnnnnnnnnnnnnnnnnnnnnnnnnnnnnnnnnnnnnnnnnccacgcgtccgcggacgcgtccgcccacgcgtccggtcgattcgttggtcatacgaaagatgtgctctctgttgcattctctactgataaccggcagatcgtgtctgcttctcgtgatcgtacgattaagctttggaacacacttggtgagtgtaagtataccatctctgaaggtgatggtcacaaggaatgggttagttgtgttaggtttagtcctaatactcttgtaccaactattgtatctgcttcttgggataaaactgtgaaagtttggaatctccagaactgtaagctgaggaactctcttgttggtcactctggttacctcaacactgttgctgtctcgcctgatggttcgctatgcgccagtggtgggaaagatggtgttatcttgttgtgggatttggctgaaggaaagaagctttactcgcttgaggcgggttcgattattcactcgctttgcttcagtcctaacagatactggttgtgtgctgctactgagaatagcattaggatttgggatcttgaagagcaagtctgttgttgaggacttgaaggttgatctcaagtctgaggcagagaagaatgaaggtggtgttggaactggtaaccagaagaaggttatctactgcacaagcttgaactggagtgcagatggaagcacattgttcagtggttacactgatggagttgtcagggtctggggtattggtcgttactagagaccacaacaagatgaagaagaagtcccgaaatctccggaaaaaagtttagctgcttttaatttttccagactgcgtcagtattgtattagtctctcgcaaacctctattttggcaatttttgtttaatttccagaagagaaaaaaacaatccattgattatcatatccctatatatcaaaaggtcacgattttgattacaaaaaaaaaaaaaaaaaaaaaaaaaaaaaaagggcggccgctctagaggatccaagcttacgtacgcgtgcaggcgacgtcatagactcttctatag

SEQ ID NO: 122056 - DNA, 1240 bp, Arabidopsis thaliana
tgttacgccattttcgtgagtaagaagaagaaacccgaaaacctcaaaccatggccgagggactcgtattgaagggcattatgcgcgcccacaccgacattgtcacggccatcgctacgccgatcgacaattccgacatcatcgtcacagcgtcgcgtgacaaatccatcatcctctggaaactcacaaaggacgataagtcttacggtgttgctcagcgtaggctcacaggtcactctcacttcgtggaagatgttgttctctcatcggacggtcagtttgcactctccggaagctgggacggtgagctccgtctctgggatcttgccacgggagaaacaactcgtcgattcgttggtcatacgaaagatgtgctctctgttgcattctctactgataaccggcagatcgtgtctgcttctcgtgatcgtacgattaagctttggaacacacttggtgagtgtaagtataccatctctgaaggtgatggtcacaaggaatgggttagttgtgttaggtttagtcctaatactcttgtaccaactattgtatctgcttcttgggataaaactgtgaaagtttggaatcttcagaactgtaagctgaggaactctcttgctggtcactctggttacctcaacactgtggctgtgtcacctgatggttcgttgtgtgccagtggtggcaaagatggtgtgatcttgctttgggatttggctgaagggaagaagttgtattctcttgaagctggctctattattcattcactttgcttcagtcccaataggtacctggttgtgtgcagcaacaagagaatagcattaggatttgggatctcgagagtaagtctgttgttgaggatttgaaggttgatcttaaggctgaggctgaaaagactgatggttctactggaatcggaaacaagaccaaggtgatctactgcacaagcttgaactggagtgcagatggaaacactttgttcagtggatacactgatggagttatcagggtttggggtattggtcgttactagagagacaagaagtttctttattctctccaaatttttccatcgactctaaagtcttctcttctgaattagtgttttgaggatttattttttgttcttttctattttcagaatccacaaatgtgatattttgatacattgattttgtttcatatttgttttcttaccctgagtctgagtacacggcgtacaatctgatttgaagttgtt

SEQ ID NO: 122057 - DNA, 520 bp, Arabidopsis thaliana
  unsure (1)..(520): unsure at all n locations
ccgnnnnnnnnnnnnnnnnnnnnnnnnnnnnnnnnnnnnnnnnnnnnnnnnnnnnnnnnnnnnnnnnnnnnnnnccacgcgtccgcagtaaaatggccaaaaactctgtcgaattcgatcgttacatcgagcgcaaagctttcgacaatacaaaagaaggtgttaaagggctcatcgatgctaaaatcaccgagatccctcgaattttccacgtccctcaagataccttaccagacaagaaacgctctgtttcagacctagagatccctaccatcgactttgcaagcgtcaacgtggacacaccctcacgtgaagccatcgtggagaaagtcaaatatgcggtggagaattggggattcttccaggtgattaatcatggtgttcctttaaacgttcttgaagagattaaagatggggttcgtaggtttcacgaggaagaagatcctgaggtcaagaaatcatactactcgcttgatttcaccaagaacaaatttgcatacagtagtaatttcgatctata

SEQ ID NO: 122058 - DNA, 955 bp, Arabidopsis thaliana
  unsure (1)..(955): unsure at all n locations
acgactcactttagggaaagctcggtacgcctgcaggtaccggtccggaattcccgggtcgacccacgcgtccggagattttatggcggtggagctcatgactcggaattacatctccggcgtcggagctgatagcttcgccgttcaagaagcagctgcttcaggactcaaaagtatcgaaaatttcatcggtttaatgtctcgtgatagctttaactctgatcagccatcttcttcttccgcctccgcctccgcctccgccgccgcagatcttgaatcagctcgtaacacaacggcggacgcggctgtttcaaagtttaaaagagtcatatctctcttagatcgaactcgaaccggacacgcccggtttagacgtgctccggttcatgttatttctccggttcttttacaagaagaaccaaaaacgacgccgtttcagtctcctcttcctcctccgccgcaaatgatccgaaaaggttcgttttcttcatcgatgaaaacgattgatttctcatctctctcctctgtacccacggaatcagacaaccagaagaagattcatcatcatcaacgtccctctgaaacggcgccgtttgcgtctaaactcaagcctctcacgacggctcgtcttttcaaatcacaaagagaaatgtactctgaaatctttaccggaaatgccttcgctcttcctcggcgtgtattgtcaagaaagaaataacagagagataatagggtccggcatagtcaaaatgccgtgtacaccgacatattctggaggatcngacaaaccattaaggtctccatcagagattatatgggtacgtagagtgccccataactgtatagacgcggatcgcattngtgtctataaggaataacatcttcccgtaccgcggcccgtgtgacttttagctctgaagacaatttaggtttgaattactttagaggcaccccg

SEQ ID NO: 122059 - DNA, 633 bp, Arabidopsis thaliana
ataaagtccacaactctctccttgtagagagagagattttatggcggtggagctcatgactcggaattacatctccggcgtcggagctgatagcttcgccgttcaagaagcagctgcttcaggactcaaaagtatcgaaaatttcatcggtttaatgtctcgtgatagctttaactctgatcagccatcttcttcttccgcctccgcctccgcctccgcctccgcctccgcctccgccgccgcagatcttgaatcagctcgtaacacaacggcggacgcggctgtttcaaagtttaaaagagtcatatctctcttagatcgaactcgaaccggacacgcccggtttagacgtgctccggttcatgttatttctccgggtcttttacaagaagaaccaaaaacgacgccgtttcagtctcctcttcctcctccgccgcaaatgatccgaaaaggttcgttttcttcatcgatgaaaacgattgatttctcatctctctcctctgtaacaaacgggatcaaggcaaaccagaagaagattcatcatcatcaacgtccctctgaaacggcgccgtttgcgtctcaaactcaaagcctctccacgacggtctcgtctttctcaaaatcaacaaagag

SEQ ID NO: 122060 - DNA, 729 bp, Arabidopsis thaliana
  unsure (1)..(729): unsure at all n locations
nnnnnnnnnnnnnnnnnnnnnnnnnnnnnnnnnnnnnnnnnnnnnnnnnnnnnnnnnnnnnnnnnnnnccacgcgtccgcggacgcgtgggctttctctttctctcagcactctctgcctatctccgccgcggagatccatcgtgttttctacttctgttggtatccatggattctctcgttgaatccggttggaagtaccttgttacgcatttcagtgactttcaactggcgtgtattgggagttttatacttcatgaaagcgtgtttttcttgtctggactcccttacattttcctagaaaggactggttttctgagcaactacaaaattcagaccaaaagtaatactcctgaagcccagggaaaatgcattgctcgactattactttaccattgctgcgtaaacttgcccctcatgatggcgtcgtatcctgtattcagattcatgggcatggaaagcagttttcctctgccgtcctggaaagtggtgtctgcccagatcttattctacttcatcattgaggattttgtattctattggggtcacagggatcttgcatactaaatggctctacaagaacgtgcacagtgtgcatcatgagtacgcgacaccgtttggtttgacatcagaatatgctcatcccgctgaaattctgttccttggttttgctaccattgttgggccggctctcaccgggcctaacctgatcaccctttggttttggatg

SEQ ID NO: 122061 - DNA, 644 bp, Arabidopsis thaliana
aaatccttgggcagaggaaaaagtttatagcgactcttttcctctaaaagggtctgtctcttccttcttctctcttcagatctccatttcacggatcaatcctgtgtttgaaacaatgggtgttgaagttgtaaactctggtggatttgaggttgctccggctcctttcgaggggaaacctgagaagaacgggaagctggaccaaggaaaaggagatgatgcccccatcaattttggttcagtcggtgagctaccaaagaatgccgaagagaataataacaaagtggtcaactctgatgcacccaaaaatgcagcagaagagtggcctgtggctaagcagatccactctttctaccttgttaaataccgttcttacgctgaccccaaaattaaagctaagcttgatctagctgataaagagcttgaaaagttgaacaaagctcggactggagttttggacaagttgagagctaagagggccgagagatcagagttatttgatctgctggacccggtgaagtcagagcgtaagggattcaacacaatgtttgatgagaaaagaaaggaaatggaaccattgcagcaagcactgggaaagataaggagcaatgatggtgggagtgctcgtggccctgctatctgtt

SEQ ID NO: 122062 - DNA, 809 bp, Arabidopsis thaliana
  unsure (1)..(809): unsure at all n locations
ccnnnnnnnnnnnnnnnnnnnnnnnnnnnnnnnnnnnnnnnnnnnnnnnnnnnnnnnnnnnnnnnnnnnnnnnccacgcgtccgaaaaatgaaacatttctctctacttttcatttttctggtcatcctcttggcaacaagctacagtgatgcctttaccagaaacagttttccaaaggatttcctcttcggagccgccacttctgcttatcagtgggaaggagctgctaatgaagacggaagaactcctagcgtctgggatacaacctcccactgttataatggaagtaatggagatatagcatgtgatgggtatcacaaatacaaggaagatgttaagttgatggcagaaatgggcttagaatcattcagattctctatctcctggtcaagacttatacctaatggaagaggacgcattaacccaaaaggtttattgttttacaagaatctcatcaaagagctacgaagccatggaatcgaacctcacgttacactttaccactacgatcttcctcagtctcttgaagatgagtatggaggatggatcaaccacaaaaatcatagaagcctttacaagcttttgcagatgtatgcttcagagagttttggggaggatgtgaagttatgggctccaaatcaacggggctcaaatnttnggcctttgcttttttntgcaaagccgtnggtttggaaattntccccaggnanttttttnttgnacaantttttnaggcntacatgttntngccatnccctntcaaattgtnaccaggcnaggtgaaanggccctgcctggtttttctttt

SEQ ID NO: 122063 - DNA, 903 bp, Arabidopsis thaliana
acagaagggggagccggtacttctgcttatcagtgggaaggagctgctaatgaagacggaagaactcctagcgtctgggatacaacctcccactgttataatggaagtaatggagatatagcatgtgatgggtatcacaaatacaagatgttaagttgatggcagaaatgggcttagaatcattcagattctctatctcctggtcaagacttatacctaatggaagaggacgcattaacccaaaaggtttattgttttacaagaatctcatcaaagagctacgaagccatgtctcttgaagatgagtatggaggatggatcaaccacaaaatcatagaagacttcactgcttttgcagatgtatgcttcagagagtttggggaggatgtgaagttatggactaaaatcaacgaagctactttattcgccattggttcttatggcgacggaatgaggtatggacattgtcctcctatgaattactctaccgcaaatgtttgtacggaaacatatattgcaggccataacatgttgctagctcactcctctgcttcaaatttgtataaactgaagtacaagactaagcaaagaggatccgtaggccttagtatatatgcttatgggctatctccttatacggactccaaggacgatgaaaccgcaactgaaagagctgaagctttcctctttggctggatgttaaagcctttggtagttggggattatccggatataatgaagagaaccttggggtcgagattaccggttttctcagaagaagagtcaaaacaagtgaaaggatcatctgactttgtaggagttgtacactacaacacattctatgtcacaaaccgacccgcaccttctctcgttaccagcattaacaaactcttctttgcagac

SEQ ID NO: 122064 - DNA, 516 bp, Arabidopsis thaliana
  unsure (1)..(516): unsure at all n locations
ggctggatcaaccgcaaaatcatagaagacttcactgcttatgcagatgtatgtttcagagagtttggggaggatgtgaagttatggactacaataaacgaagctacaattttcgccattggttcttatgaccaaggaatctcgccccctggacattgttctcctaacaaattcatcaattgtactagtggaaattcttctacagaaccatatcttgcaggccataacatattgctagctcatgcctctgcttcaaagttgtataaactaaagtacaagagtacgcagaaaggatccatagggcttagtatatttgcattcgggttaactccttatacaaactccaaggacgatgaaaatcgcaactcaaagagctaaatgcatttcctctatggatggtgagaaacaaaactttatttcttaacttgaggacaaaatctaaagactaaattgataataaaggatgttgaagcctttggtannnggggactatccggatgaaatgaagagaacctt

SEQ ID NO: 122065 - DNA, 554 bp, Arabidopsis thaliana
  unsure (1)..(554): unsure at all n locations
accacgcgtccgcttccttcttaaacaaacccaattcgatttcaacgaacgcctcttctctctcactctctttcgatttgttctttgccggagctcgtagtgtaagcgtgatccgcggcggagagatggctcctaatgatcctaaaaaagccgttggtggcggcggaagtggtttcttcgcctctcttgcttcgtcgatctccaatttgggatctgctatgaccaaatcagttaatggtttggttccctatgagggacttgaagttatcaatcctgaaggaagtacagatgatgctgaggaggaagcaagcagaggaagatggaagcaagaggatcgagatggctattggaagatgatgcagaagtacataggatctgatgttacatcaatggtgacccttcctgtgattatttttgaaccaatgacaatgcttcagaaaattggcggagtttgatgggatactcgcatcttgctaggacatggcaggcaaaaaccggggacccttatttccgcatggtgttttcatcaaccgggggntatntccngggtttat

SEQ ID NO: 122066 - DNA, 1410 bp, Arabidopsis thaliana
  unsure (1)..(1410): unsure at all n locations
nnnnnnnnnnnnnnnnnnnnnnnnnnnnnntctatcttctccacgttactaccacctaacctctcatccaccttttctcctttaagcatatttcatttcatctccgaaaggaattgtatcgttcctcacacacgcctctcatctcttatccattcttgtccttttttcagctcaacaagaatggataattgtactggagaaaatcccatggcttctcagttgaacattctccgatgcccgttcttgaggaacatcaatgagcccactaacctctctttctcttcatccttgccttttcccatccctgcaagagctgggaaaggacctatatttgaagatggtcccaattttgatacggcgtttaggcttttccatggccaagatggagttgtccctctctctgacaccgctcgaactgaagcccagaagcctgtgcctgtattccatccacttgctgctaaggcggccactattagtctctcatcctttggatctggagggccttttggatttgatgcattttctgacatgtttaaaaatcaaaagaagaagtcagattcatccaaaaataagggaggaaaccacgaagccatgggcgacgaatggcttaaaacaggaaactgcccaatagcaaaatcatatcgagctgtaagtggtgtggcaccacttgtggcaaagatcctgcaaccccctccaggcatgaaatttaaatgccctcaagcaatagtcacagctcgagcagcgatatcaaaaacacctttcgccaagaacctccgtccacaacctttaccagctaaagtactagtgatcgggatgctgggcatggcgttaaatgtgcctttaggggtctggagagagcacactgaaaagttttcggcatcttggtttatagctcttcacgcagcggttccattcataggaatactgagaaagtcaagtgttgatgcctaaaaacagctatggtattcaccatagcagcatcagttgttgggacaggtggattgggttcaagaggcagagagggcggagactccaagtctgtacctgagaagaagttgacattggaggtaccaaatccgtcttctgttgaagcagatcagatgcaatttgccggagtttcatcagatggaagatgccggtgataaagtggtgatgaagtggaatcccatgatgcttgatgttgcaagccctgtgtcttccggagcagctactgttgtctgctaaaaggattttgtaattctcttcgaggatttatatatataattgtttttcttgtatttttttcggctgattgtatttaaaaagtttcttaatgtttgagaaaaacaagaataaagccattttttaaactgttaattgtattttaatgtaaaagacttgtttgattgaataaaaggaaagagaagttgg

SEQ ID NO: 122067 - DNA, 645 bp, Arabidopsis thaliana
cggcactatacgactcacttagggaaagctggtacgcctgcaggtaccggtccggaattcccgggtcgacccacgcgtccgcattcctctgactaggacgacccctttagaacttaatacattcagcctgtggttcacagttctccactctcttatatttagatgttatttttctgttctaccttctcttcataggaactaaagtgaattgagtcagagaaaaagagaaagagagaaggtaacatggatgcttgttttcttacctcaagatcaatctctggtgttaaagagcttgtcccgttcatcaaagcgagaatctttacttgccccaagagaaattctggccaatttgttaccaggaaggttgcttctccgatctctgtaaattgttctctttcggattcatggaagccactggaagatgatgctgatctcttcaaggattgtgtcaacaattctacatcagatgctgattggagggagttcagggcaaggcttgttgcaggggaacaagctgcaacttccgagaaggatcagccctcgtggtctaacccggacatggtggtggactatcagccatcatcgtcctcactgatcacaattggaagcaaatgggcacacaagatccatgagccagagacaggc

SEQ ID NO: 122068 - DNA, 673 bp, Arabidopsis thaliana
atgatctgccagcactaatcgactcactatagggaaagctggtacgcctgcaggtaccggccggaattccgggtcgacccacgcgtcgatctggtggaaattttatcttttgaccccaccactggatctctctatatacacattcatctgagtaatagagtaaaaacgaaacacaagaagcaattatgaagaattgtgagagatttgctaatctcgctctcgcaggtttgacattggcaccactcgttgtgagagtaaatccaaatttgaatgttattctcacagcatgtatcactgtttatgtgggttgctttcgttcggtcaaggatactcctccaacggagacgatgtcaaaagaacatgccatgcgtttcccattggttgggagtgctatgcttctctcacttttcttattgttcaagtttctctcaaaggacttggttaatgctgtgctaacagcttacttctttgttcttgggattgtcgctctttcagcgacattgttaccagccatcagaagatttttaccaaatccttggaatgacaatcttatcgtctggcgttttccttatttcaagtctttggaggtagagttcacaaagtcccaagttgttgcgggaatccctgaacattcttctgtgcgtggtatgcgtggaaaaacattggctggcta

SEQ ID NO: 122069 - DNA, 542 bp, Arabidopsis thaliana
cgattgaattaggtgaactatagaagagctatgacgtcgcatgcccgccgtccgtaagctcggaattcggcttcgaggcattatgaagaattgtgagcgatttgctaatctcgctctcgcaggtttgacattggctccactcgttgtgagagtaaatccaaatttgaatgttattctcacagcatgtatcactgtttatgtgggttgctttcgttcggtcaaggatactcctccaacggagtcgtatgccgggtgaacatgccatgcgtttcccattggttgggagtgctatgcttctctcacttttcttattgttcaagttttctctcaaaggacttggtttatgctgtgctaacagcttacttctttggtcttgggattgtcgcttctttcagcgacattgttcccacccttcagaagatttattaccaattccttgggatgacaatcttattcctctggcgttgtccttatttcaaagttctttggaggtggaggtcccaaaggccccagttcgtatccggaaatccttgtaacctgat

SEQ ID NO: 122070 - DNA, 431 bp, Arabidopsis thaliana
cagctacaggttccttcagtttgattttaaggcaattgaggcagcaacgaattgctttttgccaattaacaagctaggtcaaggtggtttcggcgaagtttacaagggtacattgagtagtggactacaagttgcggtgaagagactatcgaagacatcaggacaaggtgaaaaagagtttgaaaacgaagttgttgttgttgcaaagctccaacatagaaatttggtaaagctgcttggttattgtttggaaggagaagaaaaaatacttgtctacgagtttgtgcccaacaagagccttgatcacttcctctttgactctacgatgaaaatgaagctagactggacaagaaggtacaagatcataggaggaattgctagaggaattctttatcttcatcaagattcacgactcacaattatacatcgag

SEQ ID NO: 122071 - DNA, 523 bp, Arabidopsis thaliana
  unsure (1)..(523): unsure at all n locations
nnnnnnnnnnnnnnnnnnnnnnnnnnnnnnnnnnnnnnnnnnnnnnnnnnnnnnnnnnnnnnnnnnnnnnnnnnnnnnnnnnnccacgcgtccgagcattcacatgagaccttggattggatttcagtcatggcgtgctgctggtaggaaggtctcgttatcatctaaagctgaagagtctctggaaaacattataaagcaagaaacaaagggggagattatttacttctggacaagattagacatcgatggtgatgcgtatggaagtaaaaatgctcttacattctggtctatgtgcgatatccttaaccaaggaaactgcagaaccacttttgaagatgcattccggcatatgtatgggttaccagaacacattgaagcgcttcctcccatgcctgaagatggtcatcactggtcttctctccacaattgggtgatgccaactccgtctttcctcgagtttgtcatgttctcaaggatgttctcagagtctctagatgcactgcacaacaatcttaacgac

SEQ ID NO: 122072 - DNA, 381 bp, Arabidopsis thaliana
tcttcctcttcatcggccattataaagctctgttttttattaccctgttttataaacagaggaagccctaaatttggattctctattctaaagttttctcatttcgctaattttggagaaaaacgattgttttttttaatcgtttcttcatttctgattcatttttcttggtttatgatctgttcaagtaaaggaacaatcttaatcgctagaggtaaaaattcaaatacaatccctagattacccctaaaagggtcatccacaaattacgcgaatcgaattcaaattcgaaacccaatcagtgtcaaaactttccggcgatcatcttcatcgtcaatggcggtggaaacaatgtcgatgggatcagattcatcaactttg

SEQ ID NO: 122073 - DNA, 871 bp, Arabidopsis thaliana
aagcttccgtacgcagcaagcctatggtttgtgaggttagcccacttaaccatagtgtgctgccaaaactagaagctggcagtcacctgtggcgaggaacggtgtaaaacgcaaaatcacaacgcccagcaagagccctgatgatcttacccaagactctccgagccatatcaccagggaatctcgagccaatctctgacgtatagtcaattggtcaacgctatttcacaggcaagcagagaggtctcagactctcagaggaacgtgtgcttttggatggttccccagagagcccattggagacaataactgttcagctaagcaatgtggagtccaaattcgccagttccctgtctgaatcaggagaggttaaagtggaaggaaaggttaaagacggagtcccgcatttgacaaaggttggatcttttgaggtcgatgtaactcttgaaggtagtatcatactgtgcaggcaggtggatcaacctggtatgatcgggactgtcggaagcatccttggagagtctaatgtcaatgttaacttcatgagcgttgggagaattgcaccgaggaagcaagcgattatggcgattggagtagatgacataccaagcaaagagacactgaagaagattggggaaattccagcggttgaggagttcgttttcctcaagctctagtttggtgtgttgttgattcttgaatcttaaatctcaccggtgaagatttgatgttgtttgttggtttaggcaataatgttattttggctttcatacaaaaaaaaaaaaaaaaaaaagggcggcacgctctagaggatccaagcttacgtacgcgtgcaggcgacgtcatagaatcttctatagtgtgttcctaa

SEQ ID NO: 122074 - DNA, 1344 bp, Arabidopsis thaliana
  unsure (1)..(1344): unsure at all n locations
cannnnnnnnnnnnnnnnnnnnnnnnnnnnnnnnnnnnnnnnnnnnnnnnnnnnnnnnnnnnnnnnnnnccacgcgtccgcccacgcgtccgaacgacgaaacctttgccaaaatgaagaagggagttcgaattgttaatgttgctcgtggaggtgtcatagacgaagatgcgttagtgagagctctggatgctggtattgttgcgcaggctgcacttgatgttttcaccaaagagcctccggctaaagatagcaagctcgtgcagcacgagagggtcactgtgacacctcatcttggagctagtaccatggaggctcaggaaggagttgccatcgaaattgctgaagctgttgttggagctctgaatggagagcttgctgctactgcagtcaatgcacctatggtttctgctgaggttctgaccgagctgaaaccatatgtggtgctagccgagaaactaggaagactggcagtgcaactggtggccggaggaagcggtgtgaaaaacgcgaaaatcacatacgcctcagcaagagccactgatgatcttgacaccagacttctccgagccatgatcaccaagggaatcatcgagccaatctctgacgtatatgtcaatttggtcaacgctgatttcacagccaagcagagaggtctcagactctcagaggaacgtgtgcttttggatggttcaccagagagcccattggagacaataactgttcagctaagcaatgtggagtccaaattcgccagttccctgtctgaatcaggagaggttaaagtggaaggaaaggttaaagccggagtcccgcatttgacaaaggttggatcttttgaggtcgatgtaactcttgaaggtagtatcatactgtgcaggcaggtggatcaacctggtatgatcgggactgtcggaagcatccttggagagtctaatgtcaatgttaacttcatgagcgttgggagaattgcaccgaggaagcaagcgattatggcgattggagtagatgacataccaagcaaagagacactgaagaagattggggaaattccagcggttgaggagttcgttttcctcaagctctagtttggtgtgttgttgattcttgaatcttaaatctcaccggtgaagatttgatgttgtttgttggtttaggcaataatgttattttggctttcatacagttttggtaacgttgagagtagtgtctctttgatgtttcaactttatggtttctattacttgagtgcttaaaaaaaaaaaaaaaaaaaaaaagggcggccgctctagaggatccaagcttacgtacgcgtgcaggcgacgtcatagactcttctatagt

SEQ ID NO: 122075 - DNA, 642 bp, Arabidopsis thaliana
aatacgactcactttagggaaagctcgtacgcctgcaggtaccggtccggaattcccgggtcgacccacgcgtccgcccacgcgtccgagactctcagaggaacgtgtgcttttggatggttcaccagagagcccattggagacaataactgttcagctaagcaatgtggagtccaaattcgccagttccctgtctgaatcaggagaggttaaagtggaaggaaaggttaaagacggagtcccgcatttgacaaaggttggatcttttgaggtcgatgtaactcttgaaggtagtatcatactgtgcaggcaggtggatcaacctggtatgatcgggactgtcggaagcatccttggagagtctaatgtcaatgttaacttcatgagcgttgggagaattgcaccgaggaagcaagcgattatggcgattggagtagatgacataccaagcaaagagacactgaagaagattggggaaattccagcggttgaggagttcgttttcctcaagctctagtttggtgtgttgttgattcttgaatcttaaatctcaccggtgaagatttgatgttgtttgttggtttaggcgcggccgcgaattcgatatcaagcttagcgataccgtcgacatcgagggggggc

SEQ ID NO: 122076 - DNA, 837 bp, Arabidopsis thaliana
  unsure (1)..(837): unsure at all n locations
nnnnnnnnnnnnnnnnnnnnnnnnnnnnnnnnnnnnnnnnnnnnnnnnnnnnnnnnnnnnnnnnnnnnnnnccacgcgtccgctgccttcttcttcactttaccaaaatcatcgaatccatttttagggtttttgttttctctctaaatttttattgttatcttcttcgcgataccttggaatcgcatctctgagatagataaataattctgattcgtatctttaaatcttgggttcttcttcttctcgcgattcgtttaaaagagcagcatcaatgaatcagaatcttcatgtattatcaatggattcgttaccagttggattaagattccgtccaacagacgaggagctaatccgttactatctccgtaggaaaatcaacggtcacgatgacgacgtcaaagctatccgtgagatcgatatttgcaaatgggaaccttgggatttacctgatttttctgtgatcaaaactaaagactcagagtggctctacttctgtccattggatcggaagtatccgagtggaagtagacagaaccgggcaacagttgcagggtactggaaagccacaggaaaaagaccggaagataaaatcccgtaagactaacattattggtgtgaagagaactctagttttccacgcgggtagagctcctagggngacacgaaccaattggattattcatgagtatcgngccacggaggatgatcttagtggtaccattcctgccagagtccgtttgtatatgcanatgntcaagatagagaactggtttaggggaagagattcgagtcgatgaggtgaagacctgctgctcgtctcactggcaaggacta

SEQ ID NO: 122077 - DNA, 463 bp, Arabidopsis thaliana
caattttcttctccactacgaaaacggatttgagagcagcagcgacgagcttcatcggccggcgtctccgacctcactcgcgatctccgattacaaaaattagatcctcgattaagaattcgaaacatcaaaatttcatcaacaaaaaaaaatcagttactggatttacgtttcgtttgcgtcacagatcagatctccatgatcccttatccgctttcgttgcggttccttaaaccttgatgcaacggtctaatgctcgttccaggtcgaatatcaattcagatatggtagatcctcccgaggttcagacttcacctggcaaccaccgatcatcgccgtccaccgccgccaaacccaagtcgaaacgaacaaaatcgattatcttcgtaatcgtcgcttgtgtaactattgccttgggtttattattcattggctattcaattttacgcttcggaaggaatcg

SEQ ID NO: 122078 - DNA, 440 bp, Arabidopsis thaliana
aaaagttgaaacagaaatcatctagagacgattaagagaaaactaagaacgataactctcgccttcgattctttttgttgattgaggcgcaagctacctgcacacaatggagaacaatcgagagggaccatactctgttctaacgagagatcaacttaaaggaaatatgaagaagcagatcgccgaaatctctgagatcttctcgttatcaaaacccgatgcgaccgtactcctcatgtttctccgatgggactctcatgaagtttctgagtttttggttgaaaacaacgaaaaagtcttgtcggaatcaggtttgaaaccagtggtagttgatccgaatcaagacttatataagatttcttcttgtgggatttgctttaagacttgtgatgatggtgattacttaatctccacgccctttttgctctcacatgttctgc

SEQ ID NO: 122079 - DNA, 456 bp, Arabidopsis thaliana
cggacgcgtgggcggacgcgtgggcggacgcgtgggcggacgcgtggggcgtctttctctgttgaaatcgaaaaaattttcaaaacaaaatctaaggaaaaaagagcaacaagtttcaaatctcatttgggtttttcattttgaaaagaaaggacccatttttatctctctctttgttttgttttctcgaatctgaaggagtaaagttaaaagctttgaaggagagaatcaatggcgggttacagagcagatgatgaatacgattacctattcaaggttgttctgataggtgattcaggtgtgggcaaatccaatttgctttcacgattcacgaagaacgagtttagtctcgagtcaaaatccacgatcggggtcgagttcgcgactcggagtttgaatgttgatgataaagtcatcaaagctcagatttgggatactgctggtcaagaaaggtac

SEQ ID NO: 122080 - DNA, 520 bp, Arabidopsis thaliana
  unsure (1)..(520): unsure at all n locations
tgtttgccggcannnnnnnnnnnnnnnnnnnnnnnnnnnnnnnnnnnnnnnnnnnnnnnnnnnnnnncggttctcttctccacgcgtctcaaagcgattacctcccatgggaaaaatctctgaagtgattatttagcactactttttctttgtctccttctgaatccattttttatggatcttggagttcgtgtttctggtcatgaaaccgtttcttctccgggtcaaactgaactcggatctggtttcagtaacaagcaagaaagatccggtttcgatggtgaagattgctggagaagttcaaagctctcacgaacatcaactgatggattctcttcttcccctgcctctgctaaaacgctgtcgtttcatcaaggcatccctttactgagatctaccactattaatgatcctcgtaaaggacaagaacacatgcttagcttctcttctgcttcaggcaaatcagatgtctcaccttatcttcagtactgtagaaactcaggatatggtttaggaggaa

SEQ ID NO: 122081 - DNA, 622 bp, Arabidopsis thaliana
cggacacgtggggaaagataaacaagaaccctaagtttttttataagattcgagaaaattcaacaactcaggaaggaagatccttttgctccaatttctcaatcgaaacgatttcaatttcggtttcaacgatgtcgagtttttctgccgagtgttgggacttctctggtcgtaaaccgagcttttcacaaacatgtactcgattgagtcgttacctgaaggagaagggtagttttggagatctgagcttagggatgacatgcaagcccgacgttaatggaggttcacgtcagcctacaatgatgaatctgttcccttgtgaagcttcaggaatggattcttctgctggtcaagaagacattaaaccgaagactatgtttccgagacaatcaagcttttcttcttcctcttcctctgggaccaaagaagatgtacagatgatcaaagagactactaaatctgtgaagccagagtctcaatctgctccgttgactatattctacggtggtcgagttatggtgtttgatgatttttctgctgagaaagctaaagaagtcattgatttggctaacaaaggaagtgccaaaagcttcacatgtttcacagctgaagtaaacaataa

SEQ ID NO: 122082 - DNA, 1124 bp, Arabidopsis thaliana
aattcttgcaacaaatctatctaaccttaggaagagccatgggtgaagaagctatagttctgtatcctgcaccaccaataggtcacttagtgtccatggttgagttaggtaaaaccatcctctccaaaaacccatctctctccatccacattatcttagttccaccgccttatcagccggaatcaacagccacttacatctcctccgtttcctcctccttcccctcaataaccttccaccatcttcccgccgtcacaccgtactcctcctcctccacctctcgccaccaccacgaatctctcctcctagagatcctctgttttagcaacccaagtggtccaccgaactcttttctcactctctcggaatttcaatgtccgagcaatgatcatcgatttcttctgcaccgccgttttagacatcaccgctgacttcacgttcccggtttacttcttctacacctctggagccgcatgtctcgccttttccttctatctcccgaccatcgacgaaacaacccccggaaaaaacctcaaagacattcctacagttcatatccccggcgttcctccgatgaagggctccgatatgcctaaggcggtgctcgaacgagacgatgaggtctacgatgtttttataatgttcggtaaacagctctcgaagtcgtcagggattattatcaatacgtttgatgctttagagaacagagccatcaaggccataacagaggagctctgttttcgcaatatttatccaattggaccgctcattgtaaacggaagaatcgaagatagaaacgacaacaaggcagtttcttgtctcaattggctggattcgcagccggaaaagagtgttgtgtttctctgttttggaagcttaggtttgttctcaaaagaacaggtgatagagattgctgttggtttagagaaaagtgggcagagattcttgtgggtggtccgtaatccacccgagttagaaaagacagaactggatttgaaatcactcttaccagaaggattcttaagccgaaccgaagacaaagggatggtcgtgaaatcatgggctccgcaagttccggttctgaatcataaagcagtccggggattcgtcactcattgcggttg

SEQ ID NO: 122083 - DNA, 391 bp, Arabidopsis thaliana
attctaatcttaattcttcataaaccctaactttattaatcccttttttagtttcatctttaaaaacatttgttttcttgaaaatgtcggaagaattcgacgaatctgagatcattttctctgacaattactttccgattcgccggcgagaagacggtaacgagaaagagaataaccgtccggtggatttccgggaaaattctgagagagtgtggaacaagtcatctagacggagtaaaacgacgccgttgccttcagcggtgacggcgttttctagttcgcttccggttaacataccgatgaggaggtattcgacggaggaggaatattccgatgacgacggaggaaggaaaatgattccgccgcatttgatagttggacggaggatgga

SEQ ID NO: 122084 - DNA, 503 bp, Arabidopsis thaliana
  unsure (1)..(503): unsure at all n locations
ccggcannnnnnnnnnnnnnnnnnnnnnnnnnnnnnnnnnnnnnnnnnnnnnnnnnnnnnnnnnnnnnnnnnccacgcgtccgaaaaatccctaaatctcaacaaaaccctaatttcaaggaagacgaagaaagaatgagttacagagtcgctaaagcatcgcagtatcttgcgatcaccggtggtgggatcacagacatcaagcttgcaaagaagtcttgggtgtttccatggcagtcttgcaccgtcttcgacgtttctccggtgaactacacgttcgaggttcaagctatgagttccgagaaacttccctttgttattcctgctgttttcacaatcggtcctcgcgttgatgatcctcacgctctcttgttgtatgccatgcttatgtctcaacacgataagcactcgaatcacgtcaatgagcttgttcagggtgttatcgaaggagagactcgtgttcttgttgcttccatgactatggaagaggtcttcaaaggaac

SEQ ID NO: 122085 - DNA, 887 bp, Arabidopsis thaliana
atctccaggtctcatcgactcacttagggaaagctggtacgcctgcaggtaccggtccggaattcccgggtcgacccacgcgtccgcccacgcgtgcgctcacttggcaccgttgcagagagagaaccaaacatggtaaacaaagacgaccggattagaccggttcatgaagccgacggtgaaccgctttttgagactaggagaagaaccggtagagtgattgcgtaccggtttttctcagcctcggttttcgtgtgtatctgtttgatttggttctacagaattggtgagattggtgataaccgtaccgttttagatcgattaatctggtttgttatgtttattgtggagatttggttcggtttatattgggtagtcacacaatcttcccggtggaatccggtttggcgatttcccttctccgatagactctctcggagatacggaagcgaccttccgaggctcgacgtcttcgtttgcacggcggatccggtgattgagccgccgttgttggtggtaaacacagtcttatctgtgacggctcttgactacccaccggagaaactcgccgtttatctctcagatgacggtggttctgagctgacgttctatgctctcacggaggcagctgagtttgctaaaacttgggttcccttctgcaagaagttcaacgttgagccaacatctcccgctgcttacttgtcttccaaggcaaactgtcttgattctgcggctgaggaggtggctaagctgtatagagaaatggcggcgaggattgaaacggcggcgagactgggacgaataccggaggaggcgcgggtgaagtacggtgacgggttttcacagtgggatgctgacgctactcgaagaaaccatggaaccattct

SEQ ID NO: 122086 - DNA, 482 bp, Arabidopsis thaliana
tctcttcaattgaaaaaaaaaaaaaaattcaacccaaagctctgcttcgttgagctaaaacaatggcggaaacaactcccaaagtgaaaggccacgtcgtaatcttaccatacccagttcaaggccacctaaacccaatggttcaattcgctaaacgtctagtctccaaaaacgtcaaagtcacaatcgccaccactacctacaccgcctcctcaatcacaacaccatcactctccgtcgaaccaatctccgatggattcgatttcatccccataggtatccccggtttcagcgtcgatacttactcagaatccttcaagctcaacggatccgaaaccctaactctcctaatcgagaaattcaaatccacagattcaccaatcgattgcttaatctacgaattcgttcttccttggggacttgaagttgctagatctatggaactttcagctgcttctttcttactaataatctcactgttt

SEQ ID NO: 122087 - DNA, 591 bp, Arabidopsis thaliana
tctttttcataagctgaagattgaattataccacattgctctatatcatctcgagaaattaaaggaagctcgtgacaaggctgcggattctgatgaagttcaaaaatgcgacagtgaaatcgaggatctgcaaaacttgctgaacaatgatgttttgatcagtggagtcaacctagaaagtcttcaaccaggatcttctggcatgactgaactttataaggctctccaggagccaaagtttcgagaacttgattcagaagatctcctgacagagagattgttatcagcagagaaggactggaaatcaacaatcgaactactcaaacacgccacactgaccctgaagatcataaacttgggttctcttgagcaacagtcgaaatacgcttcaacttggtttgaaatttcttcgacctgtgctcaagaattgcgacatgctgcatccatttggaagcaggtgattaaaaatgatgtccaagaagaaatcctatctaaacctcaagggaagagctatgctctctcagtgggagaaatttacagagtagtaaaaattctgagagcatcaaccagattatataaaccgtggatttt

SEQ ID NO: 122088 - DNA, 375 bp, Arabidopsis thaliana
tttcacgcgtccggaagaaacgaagcatcagtgatcttatcctctcatagctaccaccgaactaactctctccatcaccaccataaccattgattctactgtggaaaaaatagaaagttccaagctttttctcaaatggttctgatttaagtaagagtgaagaaaagtaaaaatagagtcagaaatggagaaacagaggagagaagaaagcagctttcaacaacctccatggattcctcagacacccatgaagccattttcaccgatctgcccatacacgggggaggatcaatatcatagcagtcaattggaggaaaggagatttgttgggaacaaggatatgagtggacttgatcacttgtcttttggggattt

SEQ ID NO: 122089 - DNA, 907 bp, Arabidopsis thaliana
  unsure (1)..(907): unsure at all n locations
nnnnnnnnnnnnnnnnnnnnnnnnnnnnnnnnnnnnnnnnnnnnnnnnnnnnnnnnnnnnnnnnnnnnnnnnnnnnccacgcgtccgctccatcacacacaacaacaagaacaaggacaagcttctacatttctcttaacataacagacagtttttgatctgggttttcaagtccggtgttgatcccattgagtttcggatctaaaagatccgaatattcagacggatcaacaagagaacaagaaaaaaaaaatgaatcttgagaatgttttggaattcaccagctttgattactggtttaattggagagtgttactatgtgctatatgggtaatagttccaatgattgtttctttattagtcttatggaagtatgaagatagttcagttcaaactcaaccatcacttaatggtaatgatgttttgtgcattgatgatgtttggagaccttgttttgaacgaatccatccgggttggttgttgggttttcgggttctcgggttttgtttccttcttgctaacaatattgcccggtttgctaatcgtggatggcgtatttactactattatactcagtggacattcactttgatagcaatctacttcgggatgggatcattgctttcaatttatggatgtttacaatacaagaagcaagggaacactggacttatcgctgatcaagtaggaatcgatgcagagaacgggtttcgttcgcctcttatagatggtgacaacatggtttcgttcgagaagagaaaaacttctggttcggaagcactaaagtcatatgttcatctcttccagattatatatcagatgggtgctggagcagctgtgcttacagacagtatatattggaccgtgattttcccgtttctgtatatacaggcctattggacgagga

SEQ ID NO: 122090 - DNA, 553 bp, Arabidopsis thaliana
  unsure (1)..(553): unsure at all n locations
nnnnnnnnnnnnnnnnnnnnnnnnnnnnnnnnnnnnnnnnnnnnnnnnnnnnnnnnnnnnnnnnnnccacgcgtccgctttttccggtgtggctggggctggtctttgcactgactactggtttttgttcaagcagggaccattttttcacgacggaatgaaagagtggagctgctgcaagcaaagaagtcatgatttcagtttgttcttggaaattccaggatgtaaaacaggtaaacacacaactgagaaaccagttctggccaaatcggttccaaaacatcctgttgcggctcctacttcatctccagatgccaatgcagcaacaaaagactcttgctccagatgccggcaaggcttcttctgctcagaccatggatcccaacccaaagaacagatcaagcagaccctgaacacaccgggacaagcagaagaagaaaaaattgaacccttagcgcctccagtacaaaaggctgtgatagacattaatcaaccgcaagtctgcaaaaacaaaggatgtggccaaacattcaaagagagagacaatcatgag

SEQ ID NO: 122091 - DNA, 1265 bp, Arabidopsis thaliana
  unsure (1)..(1265): unsure at all n locations
tgatcctgccagctannnnnnnnnnnnnnnnnnnnnnnnnnnnnnnnnnnnnnnnnnnnnnnnnnnnnnnnnnnnnnnnnnnccacgcgtccgcccacgcgtccgagctccaatcaatctttcggatcgtctccatcaagttcttcgatgggcgcttgggtcggttgagattttcttgagtaggcattgtcctatttggtatggttatggaggtgggttgaaatggcttgagcggttgtcctacattaactctgtggtttacccgtggacctctctaccgctcatcgtttactgttctctccctgccatctgtcttctcactggaaaattcatcgttcccgagattagcaactatgcgagtatcctcttcatggcgctcttctcgtcgattgcaataacgggtattctcgagatgcaatggggcaaagttgggatcgatgattggtggagaaacgaacagttttgggtcattggaggtgtttctgcgcatctgtttgctctcttccaaggtctcctcaaggttcttgctggtgtcgacactaacttcacagtcacatcaaaagcagctgatgatggagagttctctgacctttacctcttcaaatggacttcacttctcatccctccaatgactctactcatcataaacgtcattggagtcatagtcggagtctctgatgccatcagcaatggatacgactcgtggggaccgcttttcggaagactgttctttgcactttgggtcatcattcatctttacccgttccttaaaggtttgcttgggaaacaagatagaatgccaaccattattgtcgtctggtccatcctcctggcctcgattcttacacttctttgggtccgggttaatccgtttgtggcgaaaggcggtcctattctcgagatctgtggtttagactgcttgtgattcgattgaccggtggatgggttggtgaaaaaggtttaattcccacggatcaaagagaggtaagagagatattgttttacctctaaaagactccttcattgtgttcattagatgatgaaaaatgaaaagaaaaagaaggtttaattttgtttcgagaattgttatttttgcaagaatgtgttgtagatatagagatgaagaagaaaggtgttgtcaatttgttttgttctttggtggggagagaaaaaagatttgtcaaattattctttaattgaaaatttctggtctcttttgaatattacagaagagcattttcaatcggggatcttttatgattaaa

SEQ ID NO: 122092 - DNA, 717 bp, Arabidopsis thaliana
  unsure (1)..(717): unsure at all n locations
tacggctgcgagaagacgacagaagggaggtttccaccgcattgtctctctccagacgaaaaatgggtgctttcaggtttcaccagtaccaggttgtgggaagagctctcccgacagagaaggatgtgcagcctaagatttacaggatgaagctctgggctacgaacgaggttcgtgccaagtccaagttctggtatttcttgaggaagctcaagaaggtgaagaagagtaatggacagatgctcgccatcaacgagatctatgagaagaacccaacaacgatcaagaacttcggtatttggttgaggtaccagagtagaactgggtaccacaacatgtacaaggagtaccgtgacaccactcttaacggagctgttgagcagatgtacactgagatggcatcccgtcaccgtgtcagattcccttgcattcagatcatcaagacagccactgtcccagccaagctgtgcaagagagagagcactaaacagttccacaacagcaagatcaagttcccattggtgttccgcaaggttatgaccaccaaggcaggaagctgaagacggcttacaaggccaacaagcccaacttgttcatgtaaaacgtctctgattgactcttttttggggggtggaatcgatgttgaagctgtgctctctcggtttttgggatttggttcaaatnttggggcccgatgggnccgctttccnggtttgc

SEQ ID NO: 122093 - DNA, 919 bp, Arabidopsis thaliana
aatacgactcactttagggaaagctcggtacgcctgcaggtaccggtccggaattcccgggtcgacccacgcgtccggttttgctcttggctgattcgttggagcttgatctctccgtggaaatgggtggtttccggtttcaccagtatcaggtggttgggagagccctcccgacagagaacgatgagcaccctaagatctacaggatgaagctttggggtagaaatgaagtatgcgccaagtccaagttctggtacttcatgaggaaactgaagaaggtgaagaaaagcaacggacagatgcttgccatcaatgagattttcgagaagaacccaacgaccatcaagaactacgggatctggttgcgttatcagagccgaactgggtaccacaacatgtacaaggagtaccgtgacacaacactcaatggtggagtggagcagatgtacactgagatggcttctcgtcatagagtgaggttcccttgcattcagatcatcaagactgcgactgtccctgcaaagctttgcaagagagagatcaccaagcagttccataactcgaagatcaagttccctcttgttttcaggaaggtcagaccaccaagcaggaagcttaagactacatacaaggcatcaaaacctaaccttttcatgtagaagcaaccgacatgattctcatcagaataggcttcatgttcctagtctgaacaaaacactggagttatcttcttttgaacatttttcaactttttttttgttctagatatgatacaatattaaggtgactcatctccaattttcgtcagtttccaaagttttgctgctttagtgtaaaaaaaaaaaaaaaaagggcgaacgctctagaggatccaagcttacgtacgcgtgcaggcgacgtcataactcttctatagtgt

SEQ ID NO: 122094 - DNA, 756 bp, Arabidopsis thaliana
  unsure (1)..(756): unsure at all n locations
ccgcattgtctctctccagacgaaaaatgggtgctttcaggtttcaccagtaccaggttgtgggaagagctctcccgacagagaaggatgtgcagcctaagatttacaggatgaagctctgggctacgaacgaggttcgtgccaagtccaagttctggtatttcttgaggaagctcaagaaggtgaagaagagtaatggacagatgctcgccatcaacgagatctatgagaagaacccaacaacgatcaanaacttcggtatttggttgaagtaccaaaattaaaactgggtaccacnacatgttacaaggagttccgtgacaccactcctttaacggagcttctgcgaaccaaatgttcccttggagatggcttccccgtcccccgggtcaagaatccccttgcaattcagatcatcaagacagccactgtcccagccaagctgtgcaagagagagagcactaaacagttccacaacagcaagatcaagttcccattggtgttccgcaaggttagaccaccaagcaggaagctgaagacgacttacaaggccaacaagcccaacttgttcatgtaaaacgtctctgattgactcttttttggggtggaatcgatgttgaagctgtgctctctcccgttttggattttatcggttatttttgtttttcaatatgttaggcgtactcatgaatgtgaactcgactttgtctggattttatgcttcttgtttcctacttatgaaaaaacctttccctt

SEQ ID NO: 122095 - DNA, 967 bp, Arabidopsis thaliana
  unsure (1)..(967): unsure at all n locations
cgaaaaaaaattgtttgaagagggtggagactgggatttgaatttaccggctaaaggtctatgaagggttgggctgcatgtccaccagagattgtaagaacgctgccagcttattcctggattctatatcaaccttcacaacatatgaaatttttccatatgagaccttcatattctacaccgtcctgacaagcatcataactttggacagagcttcccttaagcaaaaggtcgttgatgcacctgagatcttaaccgagcttgggaagattccattcctttctgagtttctgaactccttgtatgagtgccagtacaaggcgtttttctcagcatttgctggaatgccggtgcacataaagtatgaccgttacttgtacccgcatttccggttctacatgagggaagtcagaacagtggtgtactctcagtttttggaatcttacaaaagtgtgacagttgaagcaatggcaaaggcctttggcgtttctgtcgatttcatagaccaggagttgtcgcgcttcattgctgctgggaagcttcactgtaagatagacaaggttgcaggtgttttggagacaaaccgtcctgatgcaaagaatgcactttaccaggcaacaatcaagcaaggggatttcttgctaaaccgaatccagaagctgtctcgtgtgatcgatctgtgagcatgctacatgtttctgtttcactctttcgtcaagctttgcaacttggaaactccgaacggtagaatcttaaggtctgagaaacgatatgaactttggattttgagatgaatggctgtagtttctttcatcaactctagttggtttgtcagtggtgaatttcccaagaacaaagagcaagtttaatctcaatgtcatttaaaaaaaaaaaaaaannnnnnnnnnnnnnnnnnnnnnnnnnnnnnnnnnnnnnnnnnnnnnnnnnnnnnnnnnnnnnnnnnnnn

SEQ ID NO: 122096 - DNA, 757 bp, Arabidopsis thaliana
  unsure (1)..(757): unsure at all n locations
cagcttcactacttagggaagctggtaccctgcgccggtccggattcccggtgacccgtcgtgaagccatcatggtttactatggtaccagcctctttataccttggatttgcagcttcaataatatgggttggtcagggaacataccttacatcaattgcgagaagccatgctacagatcatggcctgcatgaaggttcggtaataggtgtcttcaatggggaattttgggctatgtttgcctgccaccagctgtttgggaatctcatcacacttgcattactgaaagatggaaaggaaggaagcaccagtggcactaccttattgatgttggtgtttctcttcagtatgacattaggaacaatacttatgttcttcattcggaaaattgatggagaagatggaaaaggacctgtgggttctcctgtgggcttagttgattccttggcatctcttccaaggatgataattactcctttgctcgacatacggatgctactgattgtcccactccttgcatattcaggattgcaacaagcatttgtttgggctgagtttacaaaggaaattgttacgccggcgattgggtctcaagtgttggtggngcgatggcagtctacggagctctggatgcagttngttcaatgactggctggaagtttacctctggtttgtcatcgatcacctcatagtttctggtggagctgttgctaagcttctgngtttctctgcttcttctcgggacaagcaaacagcg

SEQ ID NO: 122097 - DNA, 571 bp, Arabidopsis thaliana
atgatacttcagctctctacgactcactattgggaaagctggtccgcctgcaggtaccggtccggaattcccgggtcgatccacgcgtccgctttcactctctccgtggagcaccgctcatctttcccggagctgtagtcagtgaggtgaccggactaaatctccgccatggaatctcgaaacgacgaggaggcgccgttgatctctgcctctggtgaggatcggaaagtcagagctggaaagtgctacacaagggatgttcatatcctcagcatctcctttctgctaatcttcctcgcttacggtgctgctcagaacctcgaaactaccgtaaataaggatttgggaacaatctctctggggatattgtatgtgtccttcatgttttgctccatggttgcatctttggttgtccggttaatgggatcaaagaatgctctggttttaggaactactgggtattggctctttgttgctgctaatctgaagccatcatggtttactatggtaccagcctctttataccttggatttgcagcttcaataatatgggttggtcagggaacatacc

SEQ ID NO: 122098 - DNA, 557 bp, Arabidopsis thaliana
cgtgggtcgacgcaagaccctatagtgagtcgtattaacgacagaaggggaccatagaaatgaatctgatcatggatctaaacatgaaaagagtaatgttacacgagcttgtgagtatttttgaagaagaaggagctcaagtaatgagtgctaatcttcagaacttgaatgataggaccacttacacaatcatagcccaggctatcattagtcggattggcattgatccatcaaggatagaagagagagtacggaaaatcatctatggatatatatattttgaagcatgaaatcccaaatgataagtctacgctaacgctagtgtgttttttcacacatgtgttagttctttaaatatgagatgagtaattgcttttgagttcgattatgataaatatgttgaccgtcaacataagaaaccttaaaacgttgtcgtttcgtttttattcatccgggtttaattcaagaaaaaaaaaaacaaaacgaacccatagagcgaccgctctagaggatccaagcttacgtacgcggcgatgcgacgtcataatcttctaagt

SEQ ID NO: 122099 - DNA, 1057 bp, Arabidopsis thaliana
  unsure (1)..(1057): unsure at all n locations
aaaaatcagagattccattttctcttatctctctctctctctttctctttttccgattctgattctattttttcttcaccaaccacacaaaacaattctacgtttgatctcttcttctttctccgtccaaattaatctctacgtttaatttctcttgttcaatcatgggacacgaaacaatgacgccggcaacaacaacgctcgtgttcacgtacggaactctaaagagaggattctcaaatcatgtcctgatgcaagatctgatccgatctggtgacgcttctttcaaaggtgtttaccaaactctagacaaatatcctctcgtctgtggaccttaccgagtccctttcctcctcaacaaacctggatcgggctatcacgtcaacggcgagctttacgcggtttctcctcgcgggtctctctcgtctcgacgagctcgaaggaatcagtcgcgggcattacatccggcaaccggtacgtttcgcggcggcggaggaggaggagaaggaggggggagatctggaaacaaaggcgccgtcgtcgtgcgtggtggaggcgtattacgctcataagagttatgaggaagagctgtggaggaggaatagaggaagatcattcggcgcgtacacggaaaacgaagcgcgtggatatgtgaaacgcaatgataggcctcagcatcttagcttcttggatcatatccggattttcgtatcttctccatgtgattgatttttatttctttcgtggtctctcccgctcgtcgcttttctaaggttgtttgtttttttctcggggccaaagaaacaaaaaaaaaaaccccaaccccaactagttttacaacttgtaagggtccccccagtccgtccgtccgttgtttccgtatcgatttgattaaaaagattgttgggtgtaaaacttatgattcccctcttaaataagttttaggttgtttttgnnnnnnnnnnnnnnnnnnnnnnnnnnnnnnnnnnnnnnnnnnnnnnnnnnnnnnnnnnnnnnnnnnnnnnnnnnnnnnnnnnnnnnnnnnnnnnnnnnnnnn

SEQ ID NO: 122100 - DNA, 382 bp, Arabidopsis thaliana
  unsure (1)..(382): unsure at all n locations
cggtattctncggaccatcgttccgncngcggggaaaagagagagagggatgtgaaacaggccccgtcgtcgtgcgtggtggaggcgtattaccctcataagagttatgaggaagacctgtggaggaggaatagaggaagatcattcggcgcgtacacggaaaacgaagcgcgtggatatgtgaaacgcaatgataggcctcagcatcttagcttcttggatcatatccgtattttcgtatcttctccatgtgattgatttttatttctttcgtggtctctcccgctcgtcgcttttctatgtttgtttgttttttctcgggacaaagaacaaaaaacacaacacaactagtttacactgtaggtcactgtgctgctgcgtc

SEQ ID NO: 122101 - DNA, 691 bp, Arabidopsis thaliana
ctcaattcttccttccatttctatctctctcactctctttctctctcgatcttcttcttcttcaactcttctgtcgataggctcagtatcggatttttcgtcaacactataaaacccatttttctatctctctgtctaaaagtctttactttaaaacaaacagtgacatgaaaaatcaaagcttcgatacaatctcaggatggatttgagtatcgcttaatgaagttttgatctttgggtttagttctacaacagagtatttcgaggattgtatatattgagggtttttgttggttaggtgataatgataccggaaccggggagaagaccgatgcatagagggaacgaagattcatcttttggggatgattatgagaaagagattggagtattacttggtgagcagcagagaaggcaagtagaagctgatgagcttgagagagagcttaatttgtataggagtggctctgctccaccgactgttgatggttctgttagtgctgctggagggctttttagcggcggaggtggggctccttttttggagtttggtggaggcaacaagggtaatgggtttggtggcgatgatgaggagtttaggaaagatccggcttacttgtcttattactatgctaatatgaagttgaatccgaggttgccaccgcctttgatgtctatggaggatttgagg

SEQ ID NO: 122102 - DNA, 623 bp, Arabidopsis thaliana
  unsure (1)..(623): unsure at all n locations
ttgggtaccgcgccccccctctgagtcgacggtatcgataagcttgatatcgaattcgcggccgctcagttttcacgatggtaacatcttcaatctcctccacacaaggtcccaggacccaagtcatgaggttgatcaaagaatgcagtttcactcttccttggttcggagactttctcaggagcaagaattggagggacatcaaggctgtgttaatgctttagcgtggaactctaatggttcacttttgatatctggatcagatgatttaaggatcaatatttgggattactccagtcggaagcttttgcattctatagatacagggcatactgccaacatcttctgtacgaagtttgtccctgaaacctctgacgagcttgtggtatctggtgctggagatgctgaggttaggctattcaatacatcccggttaagcggtagagcagaagatgacaatgctattattccatcagcattggaccaatgtcacacacgaagagtgaaaaacctagctggcgaacctggtaaccccaatggtggatggggtncnngtgaantngggctttaanggagcatgnttccgggatcacccctggccccggtgnacggccncaaatggc

SEQ ID NO: 122103 - DNA, 600 bp, Arabidopsis thaliana
  unsure (1)..(600): unsure at all n locations
nnnnnnnnnnnnnnnnnnnnnnnnnnnnnnnnnnnnnnnnnnnnnnnnnnnnnnnnnnnnnnnnnnnnnnnnnnnnnnnnnnnccacgcgtccgcgagaaatagcgtcagattacaaagagccaaagaaggagggcttcttcttccaatttgtgatcggtgctgatcgatttctccatggataatctcagttttcacgatggtaacatcttcaatctcctccacacaaggtcccaggacccaagtcatgaggttgatcaaagaatgcagtttcactcttccttggttcggagactttctcaggagcaagaattggagggacatcaaggctgtgttaatgctttagcgtggaactctaatggttcacttttgatatctggatcagatgatttaaggatcaatatttggaattactccagtcggaagcttttgcattctatagatacagggcatactgccaacatcttctgtacgaagtttgtccctgaaacctctgacgagcttgtggtatctggtgctggagatgctgaggttaggctatttaatacatcccggntaaagcgtagagcagaagatgacaatgctattattccatcagcat

SEQ ID NO: 122104 - DNA, 448 bp, Arabidopsis thaliana
cggacgcgtgggacatcagatcagaagattttggtttcaagctcttcttctacgattccccgaagcttctggattgagatctctctctcaagcaatggcagctacaagtgagaaacagaacaccacaaagcctcctccttctccttctcctctccgcaattccaagttttgtcagcccaatatgaggatcttgatctctggaggagctggcttcattggttctcacttggttgataagcttatggaaaatgagaagaatgaggtggttgttgctgataactatttcactggctcaaaagaaaacctcaagaagtggatcggtcaccccaggtttgaacttattcgtcacgatgttaccgagcctttgttgatcgaggttgatcggatttaccatcttgcttgtcctgcctctcctatcttctacaaatacaaccctgttaagacaatc

SEQ ID NO: 122105 - DNA, 539 bp, Arabidopsis thaliana
  unsure (1)..(539): unsure at all n locations
gattctgccagctannnnnnnnnnnnnnnnnnnnnnnnnnnnnnnnnnnnnnnnnnnnnnnnnnnnnnnnnnnnnnnnnnnccacgggtgcgagaagtaaaagaaacatcaaagccaaagattttgcttgtggaagataataagatcaacatcatggttgcaaagtcgatgatgaagcagttaggccataccatggatattgctaataatggagttgaagccataaccgcgattaatagctctagctacgatctggtactcatggatgtgtgcatgccggtgctcgatggtttaaaagctacaagactgatccgttcgtatgaagaaactgggaactggaatgctgcaatagaagccggagtagatatatcgacatcggagaatgaacaagtttgtatgcgtcccacaaaccggctgcctataatcgcgatgacggcaaatactttagcagagagttcagaagaatgttatgcaaatggtatggactcgtttatttcgaaacctggaacggtgcaaaaactgagagagtgtttgcaaca

SEQ ID NO: 122106 - DNA, 569 bp, Arabidopsis thaliana
aaaagactcatcaataatctgtaaaaaacttatgttttaaatcccataaacacatcaattcaaattcctgaagaagaaaaagcctgaggttaaacactgcacctgggaatcaatttccttaaatctttactcaaaagatgaggctcctcttcagcttctgcttcttcttcttcatgatcatctttaccgcaactgcttatgatccattagatcctagtggtaacattacaatcaaatgggatattatgtcctggacggcagatggctatgtggctacggtaactatgaacaacttccaaatctaccggcacatacaaaaccctggttggacattaggttggacatgggcaaagaaagaggtgatttggtcaatggttggtgcacaaacaacagaacaaggagactgttccaagtttaagggaaatgtacctcattgctgtaagaaaacccctacagttgttgatctcttgccaggtgtgccttataatcaacagttctcaaactgttgcaaaggaggtgtaattggagcttggggtcaagatccatcagccgctgtatcccagtttcag

SEQ ID NO: 122107 - DNA, 518 bp, Arabidopsis thaliana
  unsure (1)..(518): unsure at all n locations
nnnnnnnnnnnnnnnnnnnnnnnnnnnnnnnnnnnnnnnnnnnnnnnnnnnnnnnnnnnnnnnnnnnnnnnnnnnnnnnnnnnccacgcgtccgacaagacaaaggatcaagaacactacttgttctttgtctgagacttcaaacacaagaaaccaaaaatagaaaaagatatgagagagctttttatgtatctatttcttcttttcttagttctatgtgtcaaatctgtttattctactccgacaagagaacaattccaaaattgcttgtccacaaaacaattcaattctaccctcaaaaaccctataaatctcaccactcatacactagattcccgagttcacaccgacttttccgagtcttcatctccaaattctagtttcctcaacttgaatttcacaagcttgaagccgattctcatcgttaagccaaaatccgaatccgaaataaaacaatcgattttatgcagcaggaaacttggagtgcaagtaagaacaatgagtggtggtcatgacta

SEQ ID NO: 122108 - DNA, 501 bp, Arabidopsis thaliana
cccacgcgtcagcagagatttttatagtttggtttctttgaccggagaatctcgattaggttacgatggtgtttctctcgattccaaacgggaagactttatcgatcgacgtgaaccctaattcaaccaccatctccgccttcgaacaattggcccaccaacgtagtgatgttccacaatctttccttcgttactctctccgtatgcgaaaccctagccgcgtgtttgtagattcaaaggattccgattcgatcttattgtccgatctcggtgtttctcgtttctctactgtgattatccatgtcctgcttttgggtggtatgcaagcggctccgccgaagcctcgtcttgatttcctcaattctaagcctccgtcaaattatgtagcgggtttgggtcgtggtgctactgggtttactactcgatctgatattggtcctgctcgtgctgctccggatcttcctgatcggtctgctttggctacagcggctgctccaggag

SEQ ID NO: 122109 - DNA, 666 bp, Arabidopsis thaliana
tatcactacccaaaaaccagtctcttcaacttatccccatttctctgaaaaccctaacaaatcctcctcttgttccgccactgccgccgccgctactcaacggtggtgaattttctatacggtcagttcgatcctctttttatcgacaatcctacacaaatccataatcatggccgccactgcttcctccgaagcttctgaaggaccagtgatgggtctcatcaacaagcgtctccgtgctctccgtaagaaatacaaccgaatcactcaaatggaagaatcgatttctcaaggcaaaaccctaaacaaggagcaagaagaagtcctccgctctaaacctgccgtcgtcatcctaatcgacgagcttgaaaagatccgtgctcctctctccgccgctgtgacagaggaaatcagcctcgctactcagcttaaccgtgcttcatccgatcaaaccaccgcatctgagcaaaaggaagtcactgatatcccgcaggaagttagcggcggcgatgatggcgctaagttggaggatctggtgaatttcctctactttggttcactcttcgacgtcaagtcacagaacgagttcacttcgataatgttgaccaggactcatgagagaagttgctgcttgtcttacgattacgttaccgatgatgccactga

SEQ ID NO: 122110 - DNA, 401 bp, Arabidopsis thaliana
gggtcgggccacgcgtccgagcgcacaatggctatggatcatctctgtttcgtactaccgacagaatccggcgagttaaagccaccggtgatggtcgaggagaccacagaagaagaagaggagaagaagagtcgtgattgtggacgtcaagttgtgagtttaatcggagatttattccggcgattacacggctctaagttggtgaagagcttgaatctctgtagtatcaacgagagtaaagattcgatttcaatggagatcaataaatcattcactgacatggaaggtgttcagctttccagcaaagtcggttgcgagaatccaagaatctttggatactctgagctttatatcggaactaatggtttcagcgacgaactgatcctcggaagcggcggttt

SEQ ID NO: 122111 - DNA, 1250 bp, Arabidopsis thaliana
  unsure (1)..(1250): unsure at all n locations
gttctaatccaattcattatagggaagagctggtccgcctgcaggtaccggtccggaattcccgggtcgacccacgcgtccgatcgcttactgaaaccagaaacaagtttagggtttttgcggaggtttcaaagttaacaatggcggaagagcacaagcacgaggaatcgatcatggagaagatctctgagaagatccatggtcacgatgactcttcttcttcttcttccgattcggatgacgataagaactctgcgtctctcaaaaccaagatttatcgtcttttcggaagagaacagcctcttcacaagcttttcggtggcggaaaacctgccgacattttcctgtggaggaacaagaaggtatcaggaggagtattgggtgctgcaactgtttcctggatcttattcgagttacttgagtacaatcttctcacactcttcggccacatttcaattcttgctctcgcagtattgttcttgtggtctagtgctagtaccttcattcacaagtcacctcttcatatccctgaagttcacatccccgaggatgttgttcttcagcttgcttctggattaaggattgaaatcaatcgtggatttactgttcttagggacattgcatcaggaagagatcttaagaagtttctgttggtgattgctggtttatgggttttgtccaaagttggtagctcctgcaacttcttgaccttaatctacatcgcaactgtacttctcttcacgattcccgtgctttacgagaagtatgaagataaagtagatgactttggtgaaaaggcgatgagggagatcaagaagcaatacgtggagttcgacgtgaaggttttgagtaaggtgatgagcaaaattcctaaaggagcctttgcctttatcaagaagaaagattagagagtgtgtaagtttctctcatcatcattatccgagattattcaagattgatatataaatctcgaagcattgtttttttggctgttggttaataaccctttattctctcaaatatctgctatatggattttattcgggttttaaccaaattttatagcaatattgaatctgattgaaatttgaattgatccttttttcggataccatggtcgtcatgaatgttattatgataaatctttaaatattccgaacttaatttaatgtttacagaagttgattgttttgctcaagaaattgattgtttctgccnnnnnnnnnnnnnnnnnnnnnnnnnnnnnnnnn

SEQ ID NO: 122112 - DNA, 552 bp, Arabidopsis thaliana
  unsure (1)..(552): unsure at all n locations
ttnctttcttgggacctcccccgggagngccttaagaggttcctgtgggcgatncccggttcaggggtttcgcccaaggtcggtcgcccctgccacgcctcccccttaatctacatcgcaactgtacttctcttccacgattcccgtgctttacgagaagtatgaagataaagtagatgactttggtgaaaaggccgatgagggagatccaggaagcaatacgtggagttcgacgtgaaggttttgagtaaggtgatgagcaaaattcctaaaggagcctttgcctttatcaagaagaaagattagagagtgtgtaagtttctctcatcatcattatccgagattattcaagattgatatataaatctcgaagcattgtttttttggctgttggttaataaccctttattctctcaaatatctgctatatggattttattcggggtttaaccaaattttatagcaatattgaatctgattgaaaaaaaaaacagtattaccaggggcgggcgctctagaggatccaagcttacgtacgcgtggctgcgacgt

SEQ ID NO: 122113 - DNA, 726 bp, Arabidopsis thaliana
  unsure (1)..(726): unsure at all n locations
nnnnnnnnnnnnnnnnnnnnnnnnnnnnnnnnnnnnnnnnnnnnnnnnnnnnnnnnnnnnnnnnnnnnnnnnnnnnnnnnnnnccacgcgtccgatctgattttcttgattcgattctcaagagcccagacgaggatccagagaagcacaagtatgttttgcaaagtggttttgatgttgtagcaccagatcagattgcgcaagtgtgtcaacagggctcagcagttgacatgagcaatgatgtttcagtgacgggtatccagattaagagtcgccaggcacaaccctcaggttataccaatgactatatagcgcagggaaatggtccaagaaggctgcgtctgcaaagtaactttaatggcattaacacgaagaatcctgagcttcaagctataaagagagaggctgaggacacggttggagaaagtataaagaaaaggtgtggaaagctaatgagatcaaagaacgtgaccggttttgtgttaaaaagattacgtcggtgaaatgttcatatggaggactctttagggcggcagtagttgcagttgtgttcttgatgtcagtctgcagtctaaccgtcgacttcagagcatctgcagtgtcctgaaaactgaaactttntgaaatatagtgcttcaaccggcccgtgtttttgcttctgttattgggttcaggctttcgccaagttataagatatatttgtttggangttttaacatgaagtag

SEQ ID NO: 122114 - DNA, 793 bp, Arabidopsis thaliana
  unsure (1)..(793): unsure at all n locations
nnnnnnnnnnnnnnnnnnnnnnnnnnnnnnnnnnnnnnnnnnnnnnnnnnnnnnnnnnnnnnnnnnnnnnnnnnnnnnnnnnnccacgcgtccgcccacgcgtccgcctaaacgcaagtttcaaatcgctaaaaccaacgtttgaacacgcaacgattactctctcagccgcgtgactttttttccaagtagcgtctgcgtttggcaaagtcctccacttacaaagctttcctccttcaatctccgccgcaacaatctctccgccgttctccgccgcaccatgtacataaaccatatctcccaccgcgttcaacactatcgacgttaacggccaatcagaattaatccctcttagtttctccaaatacgtctcaggcatagatccgatcgactcgaatttcaaatgcgattcgtcagaatctataacttcccacagttcgattcccgtcggattatattcatctccgatgatcccagccataattaaacgattaacggagaatccaatcgaacgtgagtataagctacactcgccgggacagagatcgagaagcttcgtccacgatctagttactggattgaaactacacgtaacgcctgatctcttctccgtcacgtacatcttctccgaactcaccgctacggaaagccacgtggacgacgcggattcgtagagataatctggcatcgattcgcatctctcccacgctccgtctccggattcgatgtcgaacagcntcacggcgaatctatcctnctccgaatcgcacacacctccgggtataatcaggct

SEQ ID NO: 122115 - DNA, 493 bp, Arabidopsis thaliana
tccacgtcaaactatcaaattagtacatcctgtaaaatccatctcacagtagctttacattaaagtttcgttgaaaagagctaacacgaaattgccaaagtgactagaagctttgaatttaacggacacgattaagttcaatattttgacgttgagagaaaactcaaattattcctaaacgcaagtttcaaatcgctaaaaccaacgtttgaacacgcaacgattactctctcagccgcgtgactttttttccaagtagcgtctgcgtttggcaaagtcctccacttacaaagctttcctcccccaatcgccgccgcaacaatctctccgccgttctccgccgcaccatgtacataaaccatatctcccaccgcgttcaacactatcgacgttaacggccaatcagaattaatccctcttagtttctccaaatacgtctcaggcatagatccgatcgactcgaatttcaaatgcgattcgtcagaatctataa

SEQ ID NO: 122116 - DNA, 668 bp, Arabidopsis thaliana
taggtacacactatagaagatctatgacgtcgcatgcacgcgtacgtaagctcggaattcggctcgatgatttttgtgataagaagattgattgagatgggtactagagctcagcagattcctttacttgaaggtgagactgataattacgatggtgttactgtaaccatggtggaacctatggattctgaggtttttactgaaagtcttagggcttctctttcgcattggagagaagaggggaagaagggaatttggataaagctgcctcttggattggctaatcttgtggaggctgcagttagtgaaggatttagatatcaccacgcggagcctgagtacttgatgcttgtatcttggatctctgaaactcctgatacaatcccagccaatgcttctcatgttgtaggtgctggtgctttggtcatcaacaaaaatactaaagaggtcctcgttgtccaggagaggagtgggtttttcaaagataaaaatgtgtggaaagcttgcctactggtggttatcaacgaaggcgaggatatatggcctggtgtggctacggaagtggaagaagaaactggaattattgcagattttgtccaagtactggctttcaggcaaagccacaaagccatcttaaaaaagaaaacagatatgtttttcctgtgtgt

SEQ ID NO: 122117 - DNA, 572 bp, Arabidopsis thaliana
  unsure (1)..(572): unsure at all n locations
nnnnnnnnnnnnnnnnnnnnnnnnnnnnnnnnnnnnnnnnnnnnnnnnnnnnnnnnnnnnnnnnnnnnnnnnnnnnnnnnnnnccacgcgtccgcaaggtacacacagctgatttttgtgataagaagattgattgagatgggtactagagctcagcagattcctttacttgaaggtgagactgataattacgatggtgttactgtaaccatggtggaacctatggattctgaggtttttactgaaagtcttagggcttctctttcgcattggagagaagaggggaagaagggaatttggataaagctgcctcttggattggctaatcttgtggaggctgcagttagtgtaagttttatatgaggatttggattgacgttagttattgtgatgattagttgaatatcttcttgtgtttggtgattttttcaggaaggatttagatatcaccacgcggagcctgagtacttgatgcttgtatcttggatctctgaaactcctgatacaatcccagccaatgcttctcatgttgtaggtgctggtgctttggtcatcaacaaaaatactaaaga

SEQ ID NO: 122118 - DNA, 440 bp, Arabidopsis thaliana
  unsure (1)..(440): unsure at all n locations
tgaagtcttcgttacagtttctctctctcaccttctctgtataaagtcttcttgagatcgaaggataacttcaattcaattctctccaaggtacacacagctgatttttgtgataagaagattgattgaaatgggtactagagctcagcagattcctttacttgaaggtgagactgataattacgatggtgttactgtaaccatggtggaacctatggattctaaggtttttactgaaagtcttagggcttctctttcgcattggagagaagaggggaagaagggaatttggntaaagctgcctcttngattggctaatcttgtggnaggctgcagttagtgnagggntttagatatcaccccgcggaccntgagtnctttnaatgccttgtnanctnnggaccncttgaaacccctgatncnaaccccagccaattntt

SEQ ID NO: 122119 - DNA, 462 bp, Arabidopsis thaliana
tttttgtctgactccataatcacaccatcaccaagaagaagaagatctaggttttgcatctctcgtcattacaatggagcgagcacgaaccgaaagccctagctacttccgtcaatggagcggcgattcaggtaccaccaatgccgccgccgtagctccttcttctccggcgcgtcatcaccacgctcgatcttcttccgtcactaatatgtctaacgtcaaacgagctcaaaacgttgctgctaaagccgctgctcagagacttgctaaagtcatggcttctcagaccaacaatgatgacgacgatgacgatgatgatgatgaagtcggtggtgatgatttaggtttccgatatggtgctcctcctcctctttccttcactagaaatccttcttccacaattgctaaacctaaacctgttgcttcttctgctgttgttcctcctcctaagatctctagatc

SEQ ID NO: 122120 - DNA, 544 bp, Arabidopsis thaliana
  unsure (1)..(544): unsure at all n locations
actggctctgctatcattgggttgattcttttccttgttggaacaccgagataccgatatttcaagcccacggggaatcctctttcgaggttttgccaagttttggtcgctgcaacgaagaaatcatcggtggaggcaccattaagagggagagaggagatgtatgacggagacagcgaagggaaaaatgcttcagttaacacagggagaaggatagtgcataccgatgaattcaagttcttggacaaagcagcgtacatcacagctagagatctagatgacaagaaacaagactcagtgaacccatggaggctctgtccagtgacacaagtcgaggaagtcaagtgtattcttagactgatgccaatttggctctgcactataatctactcagtcgtcttcactcaaatggcctctctctttgtggagcaaggcgctgcaatgaatacctctgtntcagatttcaaaatncccccggcaagtatgtccagcttcgncatccttngcgtngntttgttcatattcctgtncgagcgttctnntg

SEQ ID NO: 122121 - DNA, 716 bp, Arabidopsis thaliana
aaagggaggaggatggtgtgacaacattaggatctgtgtataccgaaagaagtcgcgtcgcggatcttctaactatatggagaaacaaatacagtttacaggaatacttagcaataaagctcaagaaaatccagactttttcaactggaatcgagttaagcttcgttactgcgatggtggttccttcagtggagatagtcagaacaaggctgcacggcttcagtttagaggagagaagatatggagagccgcaatggacgatttgaaggcaaagggaatgcgaaatgcgaaacaggcacttctatctggttgctctgcaggtggtctagcagttattttacgctgtgacgaattcagaaacttgttttctggatggaccagagttaaatgcttaagtgatgcaggcttgttcttggacacgcctgatgtatccggtggacacactataaggaatttatataacggcgttgtgcagttgcagggagtgaagaacaatttgccacatttatgcactaaccatctcaatccaacctcttgtttcttccctcaaaacttgatcagtcagatgaaaactcctcttttcattgtcaatgcagcatatgatatttggcagattcaaagcagtatcgctccgccgagtgcagatcctagtggttattggcatgaatgcagattaaaccacggtagatgcactccggcgcagatacggttcttgc

SEQ ID NO: 122122 - DNA, 953 bp, Arabidopsis thaliana
  unsure (1)..(953): unsure at all n locations
cttttagtggcatacaaggatcaacttgctgaagcggcaaaggcagaagaggaagaagaagatgaagatggtgatgatgacgacatggatgaattccaaacagatgatgaagatgaggacggcgatgacgagaatccagatgaaactgatggaagtacactccgcaagttagcagcacaggcaaaggacttccgctcttacagcgatgatgatgacttttcagacgatgattttagcgatgacgaggaattagaatctccaattgatgaagtggatcctttcgtactcttcatgggatgcagtcacagcaatgcaagttatcagactcgccaaggttccaaagccttacccagacactagacccgcactaccatggactcgcaagcacaatagctcaacacacggagctgagaagagcagagattctaaaggagaaacttgagaagcaatcttctgcaacggttgcttcctgattttatccacggctcagtccttgaaaaaccaatcgttggcgctctcaattggctgcattttttcataagcctctttatattcctcaaaagtagagaggcttgtagaggtgagtctggtcgactctcattagtcagttcatgtcttaagagagaccaatctctgccatctccagttttgcatttcatcatcatcatcatcattctttttttttgttttaatcatccataagaccaacaagacaaaagactaaacccatttcgggttttctttattttatttcatttcagacagaacacagaaaccctttggggggttttatgttctccgattgggattttggaggcatatataaaaaaaaagcgacatagtttttttttattactaaaaaaaaaaaaaaaaaagaagggcggccgctttagaggatcccagcttacggacgggtgcatgcgacgtcannnnnnnnnnnnnnngtcctaaan

SEQ ID NO: 122123 - DNA, 495 bp, Arabidopsis thaliana
accagcctgtccgaaaacccaaacctgttttgatacacaaacaacacagaccacccgcaaaactcacatctatctctatctctcttctctgtctctcactctccactttccgatcaccgacgattcaacaaaacatagtaaaaaacaaagcaaattctttttttctccttagttacttcttctacagattatctcaatcttacagagcaccatggatcgttgtatctatggttgctccgtcattactatcttcttctccttcttcttcctcctcaatgcatccgctttagaatcgggtcaccacaacataactgggtcgggtcaaataaactcaaactccgtcctcgtagctctcctcgattctcgttacactgaactcgccgagctagttgagaaggctcttcttctccaaaccctcgaagacgccgttggtcgtcacaatattactattttcgccccacgcaatgaagcactcgagcgtgaccttgacccgga

SEQ ID NO: 122124 - DNA, 532 bp, Arabidopsis thaliana
atgatcctgcaagcatcaatacgactcactttagggaaagctcgtacgcctgcaggtaccggtccggaattcccgggtcgacccacgcgtccgatttttattcacatacattaaaagagaaaataacccttaataatgcatttgccaatttacactagcaaagtcgtgtaactcgtgttgtatccaatagattactttaatattgatggtggatttgatagatgaaagttacatgtctaaggagcatctagacacggttatagattggataccatcaatgaagaatcttaggctaaaagacatccctagcttcatacgtaccactaatcctgacgacataatgctcaatttcatcattcaagaggtggagcaatccaaacgcgccagtgatcattctcaatacgttcgatgatcttgatcatgatcttatacaatctatgcaatctattttattacctccggcttatacgattggaccgctccatctcctagcaaaccaggaaattgacgaggttagtgaaataggacggat

SEQ ID NO: 122125 - DNA, 1258 bp, Arabidopsis thaliana
  unsure (1)..(1258): unsure at all n locations
nnnnnnnnnnnnnnnnnnnnnnnnnnnnnnnnnnnnnnnnnnnnnnnnnnnnnnnnnnnnnnnnnnnnccacgcgtccgctcaagtctctctcgttgtctcaggttgggttgcaacattttgtagagaaaatgggttcatatgcatcagattctgcaatgttgaagacttggagaaagactcctccttcgtcttgttctcttgtcagactttcacatctttcttcactacaagcatatataactaagaaatgttgccttttttgtaaaaatcaggagattggttgtttacccaaaaggaaacgaagaggacaatggaaagggctttgtgtctatgtatgtggaatgtctctcatccacaacaccacccattgatgtgtttgattatctctctttctttgtctttaacaagaaagacaacaagtacctctcaatccaagatgttgaagttaagcgtttcagttcttctaaaacggtttggggattgccaaaagctatgtcgcttgaaacattcactgaccctgcaaagggatttatcggggaaggagaaccatgtgagtttggtgctcatgtgaagattgcttcatcacccgtccctgttgatgagaatctcccttttcacaaattctcttggagcattcgtgatttctctgttctgaaacagaatgattgcatatctaaaacctttgcaatgggaggaaagaattggactctaactgtgtatccaaagggagactctgaggcagataacgagttctgcaagtacttgcatttagctgacggtgaagtcttatcgcctggtgagatgatttccgtgcgagcacaactaagggctttagacccgcgtggatccaaacacaaaacagtctggcttcaacaatggatcatggcagcgaccaaagcgaggggtattcctcaatccttgtctttagctgatcttcaggaggcttacttggatgaagatactttgaatgtggagatcgaatgtgaagttgtgaactctaggaaaatgtttttagcgtagaagagaatgtgaagttgtttccaccaacccactctatctatatctatttagctatcatgccatgtctactactctaggactatttgtgttaagcgtagaactgaatgtgaagttgtttccaccaaacgctccctctatatttaggaatatctctttgtccatcatgcaaaaaaaaaaaaaaagggcggccgctatagaggatccaagcttacgtacgcgtgcatgcgacgtcatag

SEQ ID NO: 122126 - DNA, 831 bp, Arabidopsis thaliana
  unsure (1)..(831): unsure at all n locations
atgatattnnnnnnnnnnnnnnnnnnnnnnnnnnnnnnnnnnnnnnnnnnnnnnnnnnnnnnnnnnnnnnnnnnnnnnnnnnnnccacgcgtccgttattcttctcttccccgtttcgatctcctctttaatgcatctgcgtatctgattttaaagattaacggttctttaaatgatgggtattggtcaaagaagctcttttcaatctgggaaggttactgggtaaatgttggtacattggctcaggttttataaagtttggtgatcattctcagtttcaagtttgatcaaaatgtggggctttgcgtcgaatgtcattggaagtatggggttaaagaagtcccctaaagattcagctcaagcatcctctcaatgctcagatgatgaggtttcaaatattagcagggatgaagagggattagaatgtcccatatgttgggaatctttcaacattgttgagaatgttccttactgtgttatggtgtggcatactctttgccagaattgtgtctctggtctccaatctgctgtcttgagactctcaagccaagatattcggattccgtttttcgtctcgtgcccgtggtgtcagttgctttcgttcaggattgtttaccagggtattctaaaagtccctcggaagatttcttcctctctgatggttgnagtctaatgggacggacagtcatgggacggacagtcatggttcttggcactgatacagcatcggctcgactcgagtggncatgctctggaaccacagacacacatctggtgcaggcttaatggtacagctcagactttgccatatgacacgtacaccaacaacac

SEQ ID NO: 122127 - DNA, 750 bp, Arabidopsis thaliana
  unsure (1)..(750): unsure at all n locations
agccgccgngggtaggctgtgtctccnccgcgcagaggtgggcttttaacggaaaccacactaacggcgtcnccattgacggaaccctagacaacaacaaccgtcgcgtcggagatacaaacactcacatggatatatctgctaagaaaactgacaacggctacgccaatggtgtcggaggaggaggatggagaagcaaagcgtcgttcacgacgtggacggcgcgtgatatcgtctacgtggtgagataccattggataccgtgcatgttcgctgccggacttctgttcttcatgggcgtggagtacacgcttcagatgattcccgcgagatctgagccgttcgatcttgggtttgtggtcacgcgctctttgaatcgcgtattagcatcttcaccggatcttaacactgttttagccgcactaaacacggtgttcgtagggatgcaaacaacgtatattgtatggacatggttagtggaaggacgagcacgagccaccatcgcggctttattcatgttcacttgtcgcggcattctcggctactctactcagcttcctctccctcaggactttctaggatcaggggttgattttccggtgggnaatgtctctttcttcctcttcttctctgggccatgttgccggctcgatgatncgaatcaattggacantnaggnggattcaanagggttnanncctttnnaaagggcttttganaaccccaatgntttacaagcngtcaannntt

SEQ ID NO: 122128 - DNA, 597 bp, Arabidopsis thaliana
cacaaacaattttccttggaaatctccgccttgtatctcttatataactcagctctctatactccgaacatgtccctctccgttaaccctaacggccatgtcagccgccgcagctgaaaccgacgtctctctccgtcgcagatctaactcgcttaacggaaaccacactaacggcgtcgccattgacggaaccctagacaacaacaaccgtcgcgtcggagatacaaacactcacatggatatatctgctaagaaaactgacaacggctacgccaatggtgtcggaggaggaggatggagaagcaaagcgtcgttcacgacgtggacggcgcgtgatatcgtctacgtggtgagataccattggataccgtgcatgttcgctgccggacttctgttcttcatgggcgtggagtacacgcttcagatgattcccgcgagatctgagccgttcgatcttgggtttgtggtcacgcgctctttgaatcgcgtattagcatcttcaccggatcttaacactgttttagccgcactaaacacggtatgtcgtgtgagttaatttaggtaaaatatatatttaatgattatcttcaaattctt

SEQ ID NO: 122129 - DNA, 774 bp, Arabidopsis thaliana
tcgggccccccctcgaggtcgacggtatcgataagcttgatatcgaattcgcggtgtccattttttgacagatatggcgatctggtttgctagatccaaaacccttgtttctagcttgagacataatctaaatttgtcgacaattctcataaaacgtgattactctcatcgtcccatcttctatacaacttctcagttatcttcaacggcgtatttgagtcccttcggtagcctccgtcatgagtctacggccgtggagacacaggctgatcatttggttcagcagattgatgaagtcgatgcccaggaactggatttcccaggaggcaaagtcggttacacatcggagatgaaattcataccggaatcatcttcaaggaggattccatgttaccgggttcttgacgaagacggacgaatcatccccgatagcgattttattccggtgagtgagaaactcgctgttagaatgtacgaacaaatggcgacgctacaagtaatggatcacatcttctacgaagctcaacgtcaaggaagaatatctttttatcttacttccgtcggagaagaagccattaacatcgcttcagcagctgctctcagtcctgacgacgtcgttttacctcagtaccgagaacctggagttcttttgtggcgtggcttcacgttggaggagtttgctaatcagtgttttgggaacaaagctgattatggcaaaggcagacaaatgccaattcattacggttccaatcgtcttaattacttcactatctc

SEQ ID NO: 122130 - DNA, 713 bp, Arabidopsis thaliana
  unsure (1)..(713): unsure at all n locations
cccacgcgtccgcccacgcgtccggtcaagtccgacaaggaaatacatgcacttgtcgtccttctaatcctttgcccttaaacatcgttaaaaacgacaacttctctcttcttcttctctactcttctccattttcttctcttcttctcttctttgtccattttttgacagatatggcgatctggtttgctagatccaaaacccttgtttctagcttgagacataatctaaatttgtcgacaattctcataaaacgtgattactctcatcgtcccatcttctatacaacttctcagttatcttcaacggcgtatttgagtcccttcggtagcctccgtcatgagtctacggccgtggagacacaggctgatcatttggttcagcagattgatgaagtcgatgcccaggaactggatttcccaggaggcaaagtcggttacacatcggagatgaaattcataccggaatcatcttcaaggaggnttccatgttaccgggttctttacggagacggacggatnatncccgatagcgattttattccggtnggtgggaaantcgctgttagaattttcggccaaattgggggcgtacaagaatggtcanaatttttnnggggttaccgtaaggnaggatntnttttntttnttccnccgggggagncttaaancgttaaagtgnttagccttaggggggtttcnaacccgaccggt

SEQ ID NO: 122131 - DNA, 411 bp, Arabidopsis thaliana
gttgagattcctccccaacaacaacaatgaagcgtagcttgggttcaaattcttcaaacaatagtggcagtggaagtaacaagaagtctaagaagaataataatccgagcaatcagaaaaccctaggcgcggcatggggcgctgcttcttctcgttcttctttccggtcttctcctttctccgatttcggaagttacatggaagtgaaaaataggaaacttcagaaccaatttgagactgaggcttctgctgcttctcgtggtgtttcgggttctgagaaacttattttccaaggggtttcaatctttgtggatgggttcactattccttctcatcaggagttgaaaggatacatgatgaagtttggtggaagatttgagaactacttttttaggcgttttgttacacata

SEQ ID NO: 122132 - DNA, 617 bp, Arabidopsis thaliana
  unsure (1)..(617): unsure at all n locations
nnnnnnnnnnnnnnnnnnnnnnnnnnnnnnnnnnnnnnnnnnnnnnnnnnnnnnnnnnnnnnnnnnnnnnnnnnnnnnnnnnnccacgcgtccgcccaacttttcgcaagtcgctgtaaagtttgatttgcttctttttatatacacacatacttctcctccatacactttcctcttcaatcctcagttttttttctaagccctaataccatctcaaagaagagatcaagatttgaaatcaagaagacaccattactcagatcaacatgcttgccgttcaccgtccttcttccgccgtatcagacggagattccgttcagattccgatgatgatcgcgtcgtttcaaaaacgttttccttctctctcacgcgactccacggccgctcgttttcacacacacgaggttggtcctaatcagtgttgctccgccgttattcaagagatctccgctccaatctccaccgtttggtccgtcgtacgccgctttgataacccacaagcttacaaacactttctcaaaagctgtagcgtcatcggcggagacggcgataacgttggtagcctccgtcaagtccacgtcgtctctggtctcccgccgctagctcaaccgagagac

SEQ ID NO: 122133 - DNA, 527 bp, Arabidopsis thaliana
  unsure (1)..(527): unsure at all n locations
nnnnnnnnnnnnnnnnnnnnnnnnnnnnnnnnnnnnnnnnnnnnnnnnnnnnnnnnnnnnnnnnnccacgcgtccggtctgcttgagtttggtgctgatgtcaatgctcaggataggtggaagaacacgccactggctgatgcagaaggagctaggaagcagaaaatgattgaactgctgaaatctcatggtggtttgtcttatggtcaaaacggaagtcactttgaaccaaagcctgtgccaccaccaattccaaagaaatgtgactgggaaattgaacctgctgagctggatttttcaaatgctgcaatgattggaaagggttcatttggtgagattgtgaaagcctattggagaggaacaccggtagctgtgaaacgtattcttccttctctttcagatgatagactggttattcaggacttcaggcatgaggttgatttgctagttaagcttcgccatccaaatataggccaattcttgggagcgggaaccgaaagaaagcccttatggtaatcactgggtac

SEQ ID NO: 122134 - DNA, 498 bp, Arabidopsis thaliana
  unsure (1)..(498): unsure at all n locations
nnnnnnnnnnnnnnnnnnnnnnnnnnnnnnnnnnnnnnnnnnnnnnnnnnnnnnnnnnnnnnnnnnnnnnnnnnnnnnnnnnnccacgcgtccggaaagaatcaaaaacatctgtcgcggagagagagagaaagagagaaagagaaaaatgtcgatggctttgcttttgacatcgccggctatgaagcagaagccggcggtgataacttctcctcgccgtggttcttctccttctcgtcgtcttcgagtttcttgtgttaccacaaaccctgctaggaagaaaaacgaaacatgcaatcattttcgacctatcaaagaagtaaataaccaattaacacacacaataccacaggagaagcttgagatcttcaaatcaatggaaaattgggcagaacaaaaactactaccttatctcaaaccggtagaagattcatggcaaccacaagacttcttacctgcgccagagaacgacgacgaattctacgaccgagtaaaaga

SEQ ID NO: 122135 - DNA, 823 bp, Arabidopsis thaliana
  unsure (1)..(823): unsure at all n locations
nnnnnnnnnnnnnnnnnnnnnnnnnnnnnnnnnnnnnnnnnnnnnnnnnnnnnnnnnnnnnnnnnnnnnnnnnnnnnnnnnnccacgcgtccggtagcctggtccggattcggttggcatctttgccatttcgcaaagatgcaatggagtggcagctcgagcctgtggtcttgttagcttagaacctatgaagattgcagagatcctcaaagatcggccatcttggttccgtgactgtaggagccttgaagttttcactatgttcccggctggtaatggtggcacaatcgagcttgtttatatgcagacgtatgcaccaacgactctggctcctgcccgcgatttctggaccctgagatacacaacgagcctcgacaatgggagttttgtggtttgtgagaggtcgctatctggctctggagctgggcctaatgctgcttcagcttctcagtttgtgagagcagaaatgctttctagtgggtatttaataaggccttgtgatggtggtggttctattattcacattgtcgatcaccttaatcttgaggcttggagtgttccggatgtgcttcgacccctttatgagtcatccaaagtcgttgcacaaaaaatgaccatttccgcgttgcggtatatcaggcaattagcccaagagtctaatggtgaagtagtgtatggattaggaaggcagcctgctgttcttagaacctttagccaaagattaagcaggggcttcaatgatgcggttaatgggtttggtgacgacgggtggtctacgatgcattgtgatggagcggaagatattatcgttgctattaactct

SEQ ID NO: 122136 - DNA, 2073 bp, Arabidopsis thaliana
  unsure (1)..(2073): unsure at all n locations
cnnnnnnnnnnnnnnnnnnnnnnnnnnnnnnnnnnnnnnnnnnnnnnnnnnnnnnnntgggcccccccttgaggacgccggtttcaataagctcgggtgatttcatctccttcgatcactcccaagattcgcattacctttcttataatcgccgagattgttcgagcctgaataatcaaaatggttgtgcttgctgctgccattgtggtcaagtctgggaaagtgattgtttccagacactatgtggatatgtcccgtatcagaatcgaaggtctacttgcagcttttcctaagctggttggaatgggaaagcagcatacctatatcgagacggagaatgtgcgatatgtttatcagcctattgaagctctgttcctgcttcttgttacaactaagcagagtaacattctagaagacctggccacccttactttgctctccaaacttgtacctgagtattccatgtctttagatgaagaagggatttccagggcatcttttgagctcatatttgcatttgatgaagtcatatctcttgggcacaaggaaagtgtgacagttgcccaggtgaagcagtattgtgaaatggaaagtcatgaggagaagttgcataaactggttatgcagagcaagatcaatgacactaaggacgtgatgaagcgtaaggctaatgagattgacaaaagcaagattgaaaagaataagccaggaggattttcgtccatgggttcaatgggatctggaagacttgaaagtggtttcaatgaattgagcatatccagtggtggcggcggtggttatggaagtggttctgggtttggcatgatttcagatgtcgaccctatcaataccaaaccaaaagatcgatcacggtcttctgttactgctcctcctaagagttctggcatgaaacttggcaagtcgggaaagaaccagttaatggagtcccttaaagcagaaggtgaagacgtcattgaagatgttaagcctactggccaatccaaagcagctgccccacctccaactgatcctttcacattaactgttgaagagaagctcaatgttgcattgagacgagatggtggacttagtagctttgatatgcagggaaccctgtcacttcaaattcttaaccaagaagatggatttgtccaagtccagattgcaaccggtgaaaatcccgaaattcttttcaagacccatcccaacatcaaccgagatatgttcaataatgagaatattctagggctgaagagacctgatcagccatttcccactggtcaaggtggagatggtgttggtcttctcaggtggagaatgcaaagagcagacgagtctatggtgccactaacaataaactgctggccttcagtctctggaaacgagacatatgtcagcctcgagtacgaagcctcgtccatgtttgatctgactaatgtcatcatctccgtaccacttcctgctctgagagaggcaccaagcgttagacaatgcgatggggagtggaggtacgacccaagaaattctgttctggaatggtctatactacttattgacaactacaaccgcagtggctcaatggaagtttgttgtgcctccagtggattcatcggtgttcttccccatctctgttcagtttgcagcgacaagtacctacagtggcttgaaggtgactggaatgattcctctgagaggaggtggtggtgcgactcctaggtttgtgcagaggacgcagctgattgcccagaactatcaagtcatatgaaacactcctttgggggcatcggttgtttttaatttcttctatactatctggtgttggatttcgctcttttttttggatgccaaaagtacaatcttaattttctcggattttgctaggatatttctttctcaacttaattctaagacattatacatattcatatcttctttttttaccaacttctttttcaatgttttaaggatacaagtacgatttacaatcgttttaaaaaaaaaaaaaaagggcggccgctctagaggatccaagcttacgtacgcgtgcatgcgacgtcatagctggtatagagt

SEQ ID NO: 122137 - DNA, 707 bp, Arabidopsis thaliana
  unsure (1)..(707): unsure at all n locations
tcgagtacgaagcctcgtccatgtttgatctgactaatgtcatcatctccggaccacttcctgctctgagagaggcaccaagcgttagacaatgcgatggggagtggaggtaccacccaagaaattctgttctggaatggtctatactacttattggcaactcccaccccagtggctcaaagggagtttgttgtgcctccagtggattcaacggtgttcttccccatctctgttcagtttgcagcgacaagtacctacagtggcttgaaggtgactggaatgattcctctgagaggaggtggtggtgcgactcctaggtttgtgcagaggacgcagctgattgcccagaactatcaagtcatatgaaaccctcctttgggggcatcggttgtttttaatttcttctaaactatctggtgttggatttcgctcttttttttggatgccaaaagtacaatcttaattttctcggattttgctaggatatttctttctcaacttaattttaagccattaaacatattcatatcttctttttttaccaacttctttttcaatgttttaaggaaacaagtacgatttacaatcgttttttttcttctaaaaaaaaaaaaaaaaaaaaaaaaagaaaaaaaaagggcggccgctctagaggatccaagcttacgtacgcgtgcatgcgacgtcatagnnntgtcctaannnnn

SEQ ID NO: 122138 - DNA, 449 bp, Arabidopsis thaliana
catttctcttccgtaatcgttaaattatgacataacgtctttgttttggtcgtatcgttcacgcaaaacttcacgattcagatctgtgtgtggcagaatttgaatcgaagcataggatcaatccggtaagcagccgtaacttgcaatcgatcgccgatctggatccgttaaaggatccctcgcagtccttgaagatatcggcgtcctccgccaccgggaacaggatccgttaccgttcaccttccgcttctgagctattggagtctggactagccaccggattatccggtaaccattctcctacttccgactctcatcagggacttgtgtctatcgacggaggaaaaatgacggcgaagcgagcgatcggacggcacgaatcccttgctgacaaggtccatcgacatcgtggtcttctacttgtgatttcgatccccattgtgttgata

SEQ ID NO: 122139 - DNA, 528 bp, Arabidopsis thaliana
ctttctctaaaccaatctttataataacttattcgtcttcaagatttctccaacaagtcctaccatgtccggcgaaggagacacgaccctcaaagctatctgttacaagcctggctctctccagttactcgatcagaggaagcttcctttagagactatttacttagagattcgtgatgcttcagatggatggagtgctattcaggaaatggttgtacgtggtgctcctgctatagctattgctgctgctctttctttggctgttgaagttttcaactttcatggttttgatggatcagcttcagatgctgttgcttttcttgagaacaagttggattatttagtgtcaagccgtccaacagcagttaatcttgcagatgctgctttgaaacttaaacatgttatagcaaaggccttggctactgccaccgaagccaaatccattttcaaggcatatattgaagctagtgaggatatgcttgaagatgatgttgtttcaaacaaagctataggaaactttggtttaag

SEQ ID NO: 122140 - DNA, 804 bp, Arabidopsis thaliana
  unsure (1)..(804): unsure at all n locations
caccgcttcccccaaaaatccaggggcttcttacacgcacacaatcctttaaagctatcgtctttcttatataatcagtgaatcttcattaacacctcccacaaaatctcagaaataactttcacaacagagtcaaagagttccaaatcgtttgtttgtattttgtacgatcaaagttgttggtacttgtaagataatcgaaaccaaagatgcggatgagctgtaatggatgcagagttcttcggaaagggtgtagtgaggattgtagtataaggccgtgtttggcttggatcaaatcgcctgaagcgcaagctaacgcaactgtctttctcgccaagttctatggccgtgctggactcatgaacctcatcaacgccggtcccaatcaccttcgtcctgggattttccgatcgttgttgcacgaagcttgtgggaggattgtgaatccgatctatggttcggtgggtttgttgtggtcggggaattggcagctttgtcaagacgccgtggaggctgtgatgaaaggagaaccggtcaaagagatcgccacagacgctgcgacgatcggccaaggtccgcctcttaagatctacggcaatccgacatatctncaaggatgataactnttgccgccgcggctaactggctcaanccgatttgaaactttcgaaaactcgccgtgntaagcggggtttcancgtcggcntacaggcgggattcgnagggnaagtttacggggcnagtancggttcgccgttnggannagctttaanagtggctccnattanggggggcaangaatcc

SEQ ID NO: 122141 - DNA, 529 bp, Arabidopsis thaliana
ccggacgcgtgggaaaaatggaagccaaatttggatctcaaatttctcttcattttcgtaccaattcatttcctttaaggaaactctatggctttccccttaccacattttccggtacgtctttaaatcatcttcgtttaaaggccactaatactttaaagggtgatgatcaagagagtattcgcaagttcaagaagttaccaacttccgaatggactcactacttccactcgtttgtcgtcgatgtctcggaaatggatgcgcttaggaatgagatcgatgcactaaagccgaaagtgaaaaacacaatcatgtcttcccaaggcattgactcgacaaagaagagaatccttatgatatatatgttggtgagccttggccttgcacatcattttgaggaagagatctatgagactctaagagatggtttcggaaagatagaggagatgatggaggatgaagatgatttgtgcacagtttccatcatcttctgggctttaggagatacggtcactacatatcttccgat

SEQ ID NO: 122142 - DNA, 365 bp, Arabidopsis thaliana
gtaaagtcactcgctttcgccggacattatttcccagtaaccatgcaaaggtttttcgtttgaaggctctgacttgtgataatcaagaaagcaatcatatgttcaaggaactgtcaacttctgaatggactcatcacttccactctattcaagtcgatgtctcggaaatggatgccatcatgatagagattgatgcactaaagccgaaagtgaagaacatacttatgtctttccaaggcaattgactcgacaaagaagagaatccttatgatatatatgctgataagccttggccttgcatgtcaatttgaggaagagatctatgagactttaaaagagggtttcggaaaaatagaggagatgat

SEQ ID NO: 122143 - DNA, 408 bp, Arabidopsis thaliana
ttattttgtcccttgaactatcagatagagaacttagatcctcttgtgcaacgtgcaatagcttctgcctcaagagttccggatctacggcgtaagtcaggcatcctgtttatcacttcataagcattagcgacgtgattttacctaaagatatgttcatttttggaccacttttaagggattttcatgtcttactatctcttgttttctgatttccctagatctgtatgaaaagataccaagccatattgagccaaagcttcttccttttcagcgagaaggcatagagtatgtcagccatatgtagtacctgtggtttttctttattaccaaatgagtagtaacttgctctggctgcctgatgacttttgcctcattattggtctccacctttctcgcaaggtttat

SEQ ID NO: 122144 - DNA, 453 bp, Arabidopsis thaliana
cccacgcgtccgctcttctcttctcatcttccctttttatgattttcttttcccattttcctctgcgtttgattatctgagagagagagagaagaaacttgttgaaacaaaatcaacaacaacttatagaagaccaaaaaaagattcataggatcttttgcttgacaatgaaagaaggaaaggatgggtttgttcgagcagatcagattgatctaaaaagcttagacgagcaactagagagacacttaagcagagctttgactttagagaagaacaagaagaaagatgaagaagacacaaccgccgtcgccatcggtggctctgcttcttcttcccctgtcactctaaacggcggcggatttgttggcaagaggaaacagagacttgagtgggagatcgatccttctaaacttatcatcaagactgttcttgctcgtggcacttttggtaccg

SEQ ID NO: 122145 - DNA, 722 bp, Arabidopsis thaliana
  unsure (1)..(722): unsure at all n locations
ttcctctcgtccggaaaggagccgcctagagagaagaaggcgatccatggcggaatctgtcttctcttgtataccagaagacgtagtcttcaacatcttcttcaagctccaagatgatccaagaaactgggctcgtctcgcttgcgtctgcaccaaattctcctcaattgttcgaaacgtttgttgtaaaactcagtgctactccgctatccccaccgtcatctccgatctcctccctcttcctccctccgccgccgcatccgcttcttcatccaccgcggcggattcgtctcttactcctcccggtggttgggcttctttatacaaactcgctgtttgttgtcctggtctcttccacgctggaattctcctcgaaaactccgatttcggtttagaacgtgagctaggtcccgatcaaaacctcgatccgaaacctactacgacggatctagctcttaacgacggagaagtttcgaaaccagttggatctggtttagaaacgacttcggtttgggctctatatgatgatctctacacaggtactattcccgctcctcctcccgaagattaattcgccggtcaaagaggagaatcgaaacgngtaggnaancctggcggntttccggnaggaacgaggaggtttcggcttnggccnattatggtccggggtgaccttnccgncnaggaaaaggtnttggnaaggtccgggggttcnttnaatt

SEQ ID NO: 122146 - DNA, 499 bp, Arabidopsis thaliana
tatacgactcactttgggaagctgggacgcctgcaggacccggcccggatttccggggtcgaccacccgtcccggccccttggccgccccttggggcgtggaagagaccaggacacctccgatttcggtttagaccgtgacctaggtcccgatcaaaacctcgatccgaaccctactacgacggatctagctcttaacgacgaagaagtttcgaaacctgttggatctggtttagaaacgacttcgttttggtctctatatgatgatctctacacagatactattcccgctcctcctcccgaagattcaatcgacgatcaagatgaagaaatcgaaacgagtgagatcagacctggacgagatcttccggtaaggaaacgaaggaagatttgtcgatctctaggatctcatttagcttccggtggctggaaccttagccgtgaacaaggcaacaagcttctcgcgagtagattccgaggtgattgtctctacatttgca

SEQ ID NO: 122147 - DNA, 519 bp, Arabidopsis thaliana
aatacgactcaccttagggaaagctcgtacgcctgcaggtaccggtccggaattcccgggtcgacccacgcgtccgcccacgcgtccgcggacgcgtgggattctgaattcaagatgtatgttacaaggcatctctccgaataccagagaaactcgtcggacttgacacgatcgttgccggaaggtccaaactccggcgtacttgtgattcaagacgaagagtcaaaaccgacttgttgctttggaaattgctacgatggtgaactcaaaggcttaccgttcccacagaacgcaaagctgactgtgacttacagaaccggaactggtaatgacaggcgcagttaccatgaccaggttctgttcattccggttcttgatcagccttattattcgaaccgttattatgtcattaaacgacgtgggaagcaatcaggaggagcttcggcgagtgcaaaggaagaagacagagtcccctgctgcttttgcttcaactatgttcctgaagttaagccacacgaa

SEQ ID NO: 122148 - DNA, 875 bp, Arabidopsis thaliana
gatactccagcactaatcgactcacttagggaaagctggtacgcctgcaggtaccggtccggaatcccgggtcgacccacgcgtcggggtgccccaagaagctctctcttcgcccataacctctgcatcttactcatgcaacagccaactggtttacgcgtcattcgctgatggaaacattgcagtctttgatgctgaatccttgagactcagatgccgcattgccccatcagcctacatgcctcaacctacaccaaacagtgcaccgattttcccacaggtgatcacagctcatccacaagaaccgaatcaattagcggttggactgtctgatggttcggttaaagtgattgagccatcagaactttctagaagatggggtgttggcgtcgcagctggttcagataaagcagggactgaaaatggacggccgtctagttcatcagcggctaacaactcaagttcggatcagattcaaaggtaaaaatagtttatgtcagttaagttagttgacatatctcttgttattttggattgtaaagttgtgatagcttgtgctgtttttgtaaatgagattctcaaattaaatcagtaggcgcaataacagtttattttatatttttcggcgttttaacagtttaagatggctatactcttgaatgtagtagctcttaatctatggatttgcacaaaaaaaaaaaaaaaaaaaaaaaaaaaaagggcggcgtctgaggatcagctacgacgcggctgcgacgatagttttataggcactaatcatcactgccgcgttacacgtgtactggaaccctgcgtaccactatcgctgagaatcccttcgcgtgcgtatacagagccgacgtcgctccacgtgc

SEQ ID NO: 122149 - DNA, 515 bp, Arabidopsis thaliana
taagactcagaagccgcattgccccatcagcctacatgcctcaacctacaccaaacagtgcaccgattttcccacaggtgatcacagctcatccacaagaaccgaatcaattagcggttggactgtctgatggttcggttaaagtgattgagccatcagaactttctagaagatggggtgttggcgtcgcagctggttcagataaagcagggactgaaaatggacggccgtttagttcatcagcggctaacaactcaagttcggatcagattcaaaggtaaaaatagtttatgtcagttaagttagttgccatatctcttgttattttggattgtaaagttgtgatagcttgtgctgtttttgtaaatgagattctcaaattaaatcagtaggcgcaataacagtttattttataaaaaaaaaaaaaaaaaaaaagaaaaaaaaaaaaaagggcgaccgctctagaggatccaagcttacgtacgcgtgcgtgcgacgtcataactcttctatag

SEQ ID NO: 122150 - DNA, 480 bp, Arabidopsis thaliana
cccacgcgtccgcccacgcgtccgcccacgcgtccgcccttgaacttgtggagagagaaaagggttagatacagagagatagcgaaagagaagaagaagaagaggtctatcgacagagcaaacttcgtcaagagatccgttaaaaggatccatttggagctccgattcgagctagagtcaataatgagcggaagacagagatctgttgcagcggcggtgcatcaccagaggcagctctccgataaccctctcgatatgtcttcatccaatggcagatggcttcaatccactggtcttcagcattttcagtcatccgccaatgattatggatactatgctggtgggcaaggaggtggtggtcaagcatcaagaggataccagaatgctcagagaggaaacgagttctttggggaaccaactactcctcaatacggagctcgtcctaccaaccaaaggaagaacaatgttgaatctgagttt

SEQ ID NO: 122151 - DNA, 522 bp, Arabidopsis thaliana
atacgactcactttagggaaagctcgtacgcctgcaggtaccggtccggaattcccgggtcgacccacgcgtccgggtagatgcgagtgagcttgcgaattccatcaaacatccattcagaaacatcttgcagaaacgacacaggcctcagctagttatggctatttgcatgccaatgtttcagatactcacagggataaactccattctcttctacgcacctgttctgttccagacaatggggtttggaggaaacgcatctctctattcatcagctttaacaggagctgttcttgtcctatcaacatttatttccataggattagtagacagattgggacgaagagctcttctcataactggaggaatacaaatgataatctgtcaagtcatagtagcagtgatcttaggagtgaaatttggagacaaccaagagctatcaaaagggtactcagtgatcgtagtcatcttcatctgcctctttgttgtagcggtcggatggtcatggggtcctctaggttg

SEQ ID NO: 122152 - DNA, 537 bp, Arabidopsis thaliana
agatactccattggatgcaaaacactcctcgaccatgtgtatatataccatcgctaacttaagacatacgccacgcgtccccacaaacctaaattgaaaacaaatatatttccacctgaaacaacataaacagaatggaaccttcaaaacaagaagttccaaagctcatggagacaccaccgaacatatcaaacgattcatcagcaaccgagaaaggagaagcaacaaggcaacaacagctaccaaacaataggtacgcactcacagttgacgaggtgatcgagcaacacattggagcacttgggtttgctcagatcttgcatgctctcttggtctctatcgcttggatcttcgatgctcagaccactcttatatccattttctccgatgctcagcccgcggcgaggcttcttgcaaccggtgccatcgtggagggtgcctccttgtgtggattggccagtggagaatgggaatggattggaccaaagagtgacactgttgtttctgagtggaatctcatatgtcaacataaatttc

SEQ ID NO: 122153 - DNA, 674 bp, Arabidopsis thaliana
  unsure (1)..(674): unsure at all n locations
atgattcttccnnnnnnnnnnnnnnnnnnnnnnnnnnnnnnnnnnnnnnnnnnnnnnnnnnnnnnnnnnnnnnnnnnnnnnnccacgcgtccgagcagatcaagataagaaagaagaaagaatcatcaaaaaatgggaataatggaggcagagaggaaaacaacaggctgggctgccagagacccatctgggatcctctctccttacacttacactcttagagagactggaccagaggatgtgaacataagaatcatttgctgtggaatctgccacaccgatcttcatcaaactaaaaatgatcttggcatgtctaattaccccatggttcctgggcatgaagtggtaggggaagtagtggaggtgggatcagatgtgagcaagttcaccgtaggggacatagttggagttggttgcctcgttggatgttgcggaggttgtagcccctgcgagagagatctggaacagtattgtccaaagaagatttggagctacaatgatgtttacatcaaatggtcaaaccttccacaaagggggcttccggttaaagccacccgtcgttcaccaaaagtttttggtcaagattccagaaggaattggcggtttancaagnttcgncgctnactnttccnctggtgtnncttttttaangccanttgggccacttttngttt

SEQ ID NO: 122154 - DNA, 453 bp, Arabidopsis thaliana
gatagcttctctagcagctcaaatccgtcccttcacatgtttggccgcgtctctgccgtcacggttggcgcctcatccaccagacctcatccggtggatcaagcgagaaggcggcttcgttcaccacgcggttaagctctctcaggagactcaatttggtatcggactcatttccaccgagcaaatctctccaggcaccgacctaatctctctccctcctcacgttcccttacgcttcgaatcagatgattcgtcatcttcatcgtcctctctcctctccgcattggcccgtcgtgttcctgaagaactgtgggcaatgaaattgggattgaggatgttacaagaaagagccaatgcagattctatctggtggccatacattagcaatctcccggaaacttatactgttcccatattcttttccggagaagatatcaaaaacttgcaatatgc

SEQ ID NO: 122155 - DNA, 798 bp, Arabidopsis thaliana
  unsure (1)..(798): unsure at all n locations
ggaacttcgatcgtagaaaccttgaaaatccgagacatccacaatgccgccaaagttggatccgagtcagatcgttgacgtgtacgtccgagtaaccgggggagaagtcggagcagcgagttctctagctcccaaaatcggtccgctaggtctcgcaccaaagaagatcggagaagatatcgcgaaagaaaccgcaaaggaatggaaaggattacgtgtaaccgtcaagctcacagtgcagaatcgtcaggcgaaagtgacggtggttccatcagcagcagcactcgtcatcaaggcgttgaaagagccggagagagataggaagaaggtgaagaacattaagcataacgggaacatctcgtttgatgatgtgactgagattgctaggatcatgagacctagatctattgctaaggaattgagtggcacagtgagggagattctgggaacttgtgtgtctgttggttgtactgtggatgggaaagatcctaaagatattcaacaggagattcaagatggtgaagttgagattcctgagaactgaagaatttggaaatgatggtgtgtttgttatcctttgccttttgagattttagtttcttcttcttatgttttgtttagaacaacgacaagtcagttttggattgttattgctgcttttttatctaatctcaattttatgcttatgcttagtttctttcaattttataaaaaaaaaaaaaaaaaaaaagnnnnnnnnnnnnnnnnnnnnnnnnnnnnnnnnnnnnnnnnnnnnnnnnnnnnnnnnnnnnnnnnnnn

SEQ ID NO: 122156 - DNA, 610 bp, Arabidopsis thaliana
  unsure (1)..(610): unsure at all n locations
nnnnnnnnnnnnnnnnnnnnnnnnnnnnnnnnnnnnnnnnnnnnnnnnngaaagaagacgacagaagggggctaactcccaaaaaaaaaaatggcggcgtttttgcaaacgaacatcagtctgaatgcgatcaagatcgtcccggggaaatacagttctctcaccgatcatcagtttcgtgcgccgtatcgaattaggtgcgccgccgcttcacctgggaaaaaacggtataacatcgctctgcttcccggagacggtatcggtccagaagttatctctgttgctaagaatgtgcttcagaaagctggatctctcgaaggactggagtttgatttcaaggagatgcctgtcggaggagcagccttggatttggttggagttccattgccggaggaaactttcacggctgcaaaactatctgatgccattcttcttggagctattggagggtacaaatgggacaagaatgagaaacatctgagacctgagatggctctgttttaccttagaagagatctcaaagtctttgctaatttgagacctgctacagttttgccacagctagttgatgcttccacactgaagaaagaagtagcagaaggtgttgata

SEQ ID NO: 122157 - DNA, 412 bp, Arabidopsis thaliana
gttctattgataaattttatatcaaaaaccttaaaaagtttcattggtttacaaattttaccttttttcgttgtgtgttgcgtgtgttactaaatcactgaagagggtaaagagaaaaacataacaaaaagttcttagctttggatgaatctggaagtgatccaaaacactggcttattccactcctcttctctagggttgaattgttagttaatagatggcgacacttcaggatattggtgtatcagctgggataaacattctcagtgcctttgttttcttcataatctttgcggttttgaggcttcagcctttcaatgatagagtttacttctcaaaatggtatctcaaggggttaagaagcagccctgctcgtggtggcgcctttgcgcagaggtttgtgaacctggac

SEQ ID NO: 122158 - DNA, 430 bp, Arabidopsis thaliana
aaaacctcaaatcggaaaatccgacattcgaaagacgccctaagtttcacaacatgggcatcgctcgtttcgctacgcggtcactcaacaacgtaacgttccttcgaccatgtcgtcccatcgtctctagaagcctcgccaccaacgccaacgaagatccaaaccagaatcgatcttcttttgactcatcggacaatttggattcgttgtttggcgattacactggcaacgatgagaaaagcaatgatttcttccagcatcttagtaaagcggagaaagataagcgcgatttcaatggctataatagatcaggagggtcgagatactccggtggtggttcaatgagcaaagacgagaccttcgatccttcatctgatggtgttgatggaaaattgaaagaagctgcactagcttacaatatggatgaagg

SEQ ID NO: 122159 - DNA, 607 bp, Arabidopsis thaliana
  unsure (1)..(607): unsure at all n locations
atgatcctgccagcatcnnnnnnnnnnnnnnnnnnnnnnnnnnnnnnnnnnnnnnnnnnnnnnnnnnnnnnnnnnnnnnnnnccacgcgtccggagatgtacctcaagcattgatgaacagaaagttgatatctcttgatatgggtgctctcattgctggagcaaagtatcggggagaattcgaagacagactaaaagctgtgcttaaggaagtcacagactcagaaggccaaatcattttgttcatcgatgagatccatacagttgttggtgcaggtgcgactaatggggccatggatgctggtaatctgctgaaaccgatgctgggccgaggcgagttacgttgtatcggtgcaaccacgcttgatgaatataggaaatacatagagaaagatccagccttggagcgtaggtttcaacaggtttatgttgatcaacctacggttgaagacacgatttctattctccgtggtttgcgggaaaggtatgaactacatcatggagttcgcatctcagatagtgctctagtggaagctgctatcctctcagaccgttacatcagtggccggtttctacccgataaagcaattgacttggtcgatgaagc

SEQ ID NO: 122160 - DNA, 971 bp, Arabidopsis thaliana
  unsure (1)..(971): unsure at all n locations
gaggctcttcgtgtcttcctctctattctccaaaccatcccattggtggtagttgagtcaagaagagaagtagatgaggttaaggaactggtcatcattgttaaagaatatgacctcggtcttcaattggagctcaagaggagagagatgaccgcgcgtccgcccacgcgtccggagctcgctgcttacttcactcactgtaaacttcaaacacctcacctacggctcgcgtacttcagtgcaatgaccgtctgctacaagtcaaagaacatggctactgctgctcacttcgccagaagtttgttggatacaaacccaactattgagagccaggccaggacggctagacaagttatgcaagcagctgaacgcaacatgacagatgcaacaacactcaactacgactttagaaacccgtttgtgatatgcgggtccacttatgtgccaatctacaaaggacagaaagacgttgcatgtccttactgcactgcccggtttgtaccaagccaggaaggtaacatttgctcggtctgtgatcttgcagtcattggcgcagacgcatctggcttgctatgctctgcctctcaagtccggtgaacaagtcagaatgattatgtgcttcaatcgtgaggtaagcacgagatgctcttttatggaagaagagtgttgagcttttggtgtttgtgaattttccgctgcaacttctattactctttaaagtctttatgttgtttcttatcttagtaacaaacgcatgagaactttatcttcttgctttatctctttttgtttgattttatttttacagtctcaggacatttcatttaggcttatcggattttaaactcgattgagaaatatagacgtaatattttataaattttcaaaaaaagaaaaaaagnnnnnnnnnnnnnnnnnnnnnnnnnnnnnnnnnnnnnnnnnnnnnnnnnnnnnnnnnntgtcctaaaaac

SEQ ID NO: 122161 - DNA, 737 bp, Arabidopsis thaliana
tgatacttcagctctctacgactcactattgggaaagctggcacgcctgcaggtaccggtccggaattcccgggtcgacccacgcgtgcgcccacgcgtccgcaaatcttccagacattcttcttctcgcttttttccccatttcaacttttttttttcctctccagtgcactaggaaacaaaaaaaacccaagatctatagttcgatcggatcgagagaagctcgaaaatggcgctggcgttcgatgagttcgggcgtccgttcattatactgagagagcaagatcaaaagactcgtcttagaggaatcgatgctcagaaagccaatatcgccgctggtaaagccgtggctcggatccttcgatcctctcttggacccaaaggaatggataagatgcttcaaggacctgacggagacatcaccatcacaaacgatggtgctacgatattggagcaaatggatgttgacaaccagattgcgaaactaatggtggaactgtcgcggagtcaggattatgaaattggtgatggaacaacaggtgttgttgttatggctggtgcacttcttgagcaagctgaacgtcagttagatagaggaattcatcccattcgtattgctgaaggatatgagatcgcttctagggtggctgttgagcatttggagcgtttttcccaaaagtttgaattcgatgttaataattatgagcctctggttcaaacttgcatgactactctgt

SEQ ID NO: 122162 - DNA, 1238 bp, Arabidopsis thaliana
ccacgcgtccgttggatcaaatttaaaaagatcgaacctatgctcaccgaagaatctatcgatttagaagacccctccagtttcccaatggtccttattcagatcccaatgtgcaacgaacgagaggtgtatgaacaatcaataggagcagcttcacaacttgattggccaaaagataggatcttaattcaagtattagatgattcagacgatccaaatttacagcttttgatcaaagaagaagtatcggtttgggccgaaaaaggcgtaaacataatttacaggcataggttgatcagaactggttacaaagctggcaatttgaaatcagccatgacttgtgattacgttaaagattacgagtttgtgaccttcttcgacgcagatttcacaccaaatcctgatttcctcaagaagactgttcctcatttcaagggtaatccagagctagggttggtccaagcaaggtggtcatttgtgaacaaagatgagaatctcctcacgaggctacaaaacataaacttatgtttccacttcgaagtagaacaacaagtgaacggtgtgtttctcaatttcttcggattcaatggaaccgctggagtatggaggatcaaggcattggaagaatccggcggatggctcgagagaaccaccgtggaagatatggatatcgcggttagagcgcatctcaacggctggaagtttatttaccttaatgatgttgaagtcacttgcgagttgccagagtcttatgaagcttacaagaagcaacaacatcgttggcattccggtcctatgcagctgttccggttatgccttccttcaattatcaaatcaaagatatcggtttggaagaaggcgaatttgatcttccttttctttcttctaaggaagcttattctaccattttactcattcacactcttttgcattatacttccattgacaatgttcatacccgaagccgagcttccgttgtggatcatctgctatgttcctatcttcatttcgcttctcaacattctcccgtcacctaaatctttccctttcttagtcccttaccttcttttcgaaaacacaatgtcaataaccaagttcaacgccatgatctccgggctgtttcagtttggatcggcttacgagtgggttgtgacgaagaaaaccgggagatcatcggagtccgatttgctagcgtttgctgaaaaggaagagaagttgcataggagaaacctcgagtc

SEQ ID NO: 122163 - DNA, 907 bp, Arabidopsis thaliana
cgaggacggcataacaacacctgcgagctcccatccatcaccggaacagcagcataccagcacggcccacataaacaacacaccaagccgcctcattcctccccagccagccgccatcaggtgtattccgagcaaccccactctcctggcaatccagcaatattggcaagaagatgtgaatctcaatcctgataaagtaaaagtcagacgtgtcctcaacccaaagaaatggacttctttagcgcttcggattgatacaatctcgttctatctgctcccacaaggtgtatgaggaaaagctgaatctcaaattaggcaagtttcccaagaatgaagacaaaagaagtctgccatcttctgaagaacgagctcgaatcaagggcaaagcttctttattagctgcacttgactactacgttagtatgcacagcgacattttcatctccgcatcacctggaaacatgcacaacgctcttgttggtcatcgaacattcgagaatctcaagacgatcagaccaaacatggcgttaataggacagcttttcctcaacaaaagcatcacttgggtagattttcagcaagcgcttggtgaaggacatgtgaatagacaaggacagatccggttaaggaaaccaaaacagtcgatttatacttatcctgctcctgattgtatgtgccatgtttgattagtttttaaagtcttgatctttagatatttcttataagaataaaaataaaaactctgattcttgatgaggctagtttgtgtttagatttgtgttcttgaggcttaataaaaagagtatagtttgattagaaaaaaaaaaaaaaagggcggccgctctagaggatccaagcttacgtacgcgtgcagtcgacgtcatagagcttctatagtgtgacctaa

SEQ ID NO: 122164 - DNA, 1035 bp, Arabidopsis thaliana
  unsure (1)..(1035): unsure at all n locations
gtgaatttccacgctttacgttttgtccctcacattacatcactcggtgatgctcttgtcagccgccttagaaacccgtcatggagaagcaataaggaacagaaaaatgttgatcatttaggagacatgaccaacccacacagaagacaagaacccgggaagtttgctgtgcttcatcttcgcttcgacaaggacatggctgcgcattcagcgtgtgattttggcggaggcaaagccgagaaactctccttggcgaaatacagacaaatgatttggcaaggaagagtgttgaattctcaattcactgatgaagagttaagaagtcaaggacggtgtcctctaacaccagaagaaatgggacttcttttagctgctttcggattcgataacaatactcgtctctatcttgcatcccacaaggtgtatggaggagaagctagaatctcaacattaagacaagtattcccaagaatggaagacaaaagaagtcttgcatcttctgaagaacgagctcgaatcaagggcaaagcttctttattagctgcacttgactactacgttagtatgcacagcgacattttcatctccgcatcacctggaaacatgcacaacgctcttgttggtcatcgaacattcgagaatctcaagacgatcagaccaaacatggcgttaataggacagcttttcctcaacaaaagcatcacttgggtagattttcagcaagcgcttggtgaaggacatgtgaatagacaaggacagatccggttaaggaaaccaaaacagtcgatttatacttatcctgctcctgattgtatgtgccatgtttgattagtttttaaagtcttgatctttagatatttcttataagaataaaaataaaaactctgattcttgatgaggctagtttgtgtttagatttgtgttcttgaggcttaataaaaagcggccgnnnnnnnnnnnnnnnnnnnnnnnnnnnnnnnnnnnnnnnnnnnnnnnnnnnnnnnnnnnnnnnnnnnnnnnnnnnnnnnnnnnnnn

SEQ ID NO: 122165 - DNA, 1325 bp, Arabidopsis thaliana
gattaaaacatatttatcacattttctcccagggtgcttagcaaataacaactgggctctcgtgacttctccttgcaccctataatactctacacgcgtgacatctacgcgctggtgtgaacgcgtgtaagctctagtcccgcgttgagctgtcactctctgtgccgggcctcttcgcttcccctctctccttctccactaatcttacactaattattaaactaatcacccattaactctaaatctcagcaaatcataatctcttataaagaagacacacatctcctaaatctgacccttattattattcattctctctaatcaaatcctcttctctctcaaatctcaatctccgattatgacagacgacagagtttaccctgcatcaaaacctcccgccatcgtcggtggcggtgccccaaccaccaatccaactttcccggcgaacaaagctcagctctacaacgcaaatcgtcccgcttaccgtccaccagctggtcgtcgtcgtactagccatacccgtggatgttgctgccgttgctgttgctggacgatattcgtaatcatcctcttactcctcatcgtcgccgccgcatcagccgtcgtatacctaatctaccgtcctcaacgacctagcttcaccgtctctgaactcaaaatctccactctcaacttcacatccgccgttcgcctcaccaccgccatttccctctccgtcatcgccagaaaccctaacaaaaacgttggattcatctacgacgtcaccgacatcacactctacaaagcatccaccggaggagatgatgacgtagtcattggtaaaggaacgatcgcggcgttttctcacgggaagaagaacacgactacgcttagaagtacgatcggaagtcctccggatgaactcgatgagatctcggcgggtaagctgaaaggagatctgaaggcgaagaaagcagtggcgattaagattgttttgaactcgaaggtgaaagtgaagatgggagctctaaaaactcctaaatcaggaattagggttacttgtgaagggattaaagtggtggctccgacgggaaagaaggcgacgacggctacgacttccgccgctaagtgtaaggttgatccaagatttaagatctggaaaattactttctaaatatagtaaacaaaataatggaatcacattcttagttttttcttcattttctttttattactccattgtttcaattttcatttctttttaaatttgatttcatatacagttctttgattcctgtaagactttatttttttggtttatgtaaatggagatataaatatttgtg

SEQ ID NO: 122166 - DNA, 529 bp, Arabidopsis thaliana
  unsure (1)..(529): unsure at all n locations
gtnttctgctgtcgagtcgaatccaatcgaaatcgaatcgaaattgagtcgagtcatcatctcctccgccattatcgtcttctctctctctctctccgccacctctcttcaattctgacgcttctcagatcctccgatccggcggcgttacttttgctgatacacttctctccatttcttctttttgttcgccgagaagctaaggagaattcttcctgaaaacgcgttgatggatctgatgtatagctacggattagaattgtgtaattctctctaaaatctgttcgttgaccagctcgaacgaggtttgattgggtttctctgtttatgctcatcaggggttttgttttgtgtatgccttccgatcactgtttgtcgtctgtttcgtccgcggaactcaagagcagagagattgttagtgtacggatatgcagaagagtggtgttaatcggaaccctccttgaaagaagcattcccaggananagngntagacgtaaggtttgnccaaaagaagggggtcagagcttc

SEQ ID NO: 122167 - DNA, 518 bp, Arabidopsis thaliana
atacgactcaccttaggggaagcacgtacgcctgcaggtaccggtccggaattcccgggtcgacccacgcgtccgctctttctcttctctctgtgttaccctcttgaaattttccgcgaaaaatctcaacttttccatctgaaaaccccccaaaatcaaacaattggatcttgatttttagctgtgatttagtgattaagaggcttagggtttgtggcgaaatgttggtacagagaagagtaatgagttggagaagagtctggaagtcgtttcaagcggcttctgcgcattgtttactcttctccttcacgcttcttctcgctttgaagcttgatcatgttggttctcattcatggtggtttgtatttgcacccttgtggttgtttcatgctgtgattgctcgtggtagattttcattgcctgctccatcaatgcctcatgatcgacattgggctccttttcactcggttatggcaacaccccttcttggtgcttctgagaccctcctcctggcacat

SEQ ID NO: 122168 - DNA, 459 bp, Arabidopsis thaliana
gagggagactgagaatcatctgagatcggaaacgacaaacctaattttcccgaagaatcgagaccattatgtggaggagaatcgtttcatcgcatcttaaatccatctccgccgtcgggtcctgcgcggctccgtcgtgcaggcacgccgtcgtagagtccactcacctttctctctcgactcgtgcatcctccattcccgcatattcctccatattctctcgtttaatcggctccgctgcagcggatactgctgtgaagaagcgtgttgaagatgtgatgcctattgcaaccggtcacgagaaagaggaactacaagccgaattggaggggaggaagctggacgatatagactttcctgaagggccttttggaacaaaggaagctcctgctgtagtcaaatcctactacgacatgagaatagttggttgccctggaggtgaaggagaggatgagcatg

SEQ ID NO: 122169 - DNA, 695 bp, Arabidopsis thaliana
  unsure (1)..(695): unsure at all n locations
nnnnnnnnnnnnnnnnnnnnnnnnnnnnnnnnnnnnnnnnnnnnnnnnnnnnnnnnnnnnnnnnnnnnnnnnnnnnccacgcgtccgctacactgtaatgtcatagctaatgctactaactggcggcttaaacctggaggtggaggtgtgaatgcagcaatattcaaagctgctggtccagatcttgagactgcgacaagagtacgagcaaacactcttcttcctggaaaagccgtggtagttcctcttccttctacttgtccattacacaatgcagaaggaattacacatgtcatacatgttctaggaccaaacatgaacccaaaccgaccagacaaccttaacaacgactacaccaaggggtgcaaaactctccgggaagcttacacatctctatttgaaggttttctatcagtagtacaggatcaatcgaagttgcccaaacgaagcagtcaaacagctgtgtcagattctggtgaggatattaaggaagactctgagagaaacaaaaagtacaaaggatcacaagataaggccgtaactaataatttggaatcagagtctctggaggacacaagaggcagtggaaagaagatgagtaaaggatggaacacatgggcattggctctccacagcattgcgatgcacccagagagacacgagaatgtcgtgcttgaatatttagacaacatcgt

SEQ ID NO: 122170 - DNA, 928 bp, Arabidopsis thaliana
  unsure (1)..(928): unsure at all n locations
cgccagctctattctacttacattagggaaagctggtcacgcctgcaggtaccggtccggaattccacgggtcgacccacgcgttcgtggacgcgtgggcggacgcgtgggcggacgcgcgcgcgcacgcgtgggttttaattcctcgttcgtctcttaaacttagctatagggagtgatggagataacgccgaagaggtactggaggaggtggagaggatacgagaagcttgatgggtcatcggagacgacttcgggtcgaaggaaaggcaaaagggtcaaaatggatccgactcgcaagaaacgtttttggaggatcaagattgtgccgaaactgaggatccttaaaacggcgtcgccgaagaagttcttggtgtggctacgtgattcatatgttaagatgatgatgcggttggctaactcacgggttgttggatcttctggatacggtggatccggattcgggtcaggtcagatgaaggagtacgatgagaaaatgcttgtggagatttacaagtcgatactgatggtgcaggcgcaggggaatctcgtgcaccgcgacacacctaataataatcttaagcttccttcagaaccagcggttgtctctgtcgtatcttctgttgttacttgttaggtaataaagaacaaacaattatcctttcttctttacgataaatttccaatgttgagaatcaaaattgttgacttgcttgatactatttcgagattgatgataggcaaagtttgtgattttgatttgtatcaaatttatatatatataaaaatagtacaagaaaaaaaaaaaaaaaaaaaggatggtggattgtgggtccaattaaaaaaaaaaaaaaaaaaaagnnnnnnnnnnnnnnnnnnnnnnnnnnnnnnnnnnnnnnnnnnnnnnnnnnnnnnnnnnnnnnnnnnn

SEQ ID NO: 122171 - DNA, 1362 bp, Arabidopsis thaliana
  unsure (1)..(1362): unsure at all n locations
nnnnnnnnnnnnnnnnnnnnnnnnnnnnnnnnnnnnnnnnnnnnnnnnnnnaattttcgctctgacccacgcgttctctttctctctctctttttctccgcggaaggaatctcttcttctggttgcgtttgagtccgtacgaaaacaaaagaaaagagagagatggcggaagagaagaaagctccaatcagtgtctggactaccgtgaagcccttcgtcaatggcggtgcctctggtatgctcgctacttgcgttatccagccgatcgacatgattaaggtgaggattcaacttggtcagggatctgcagccagtataaccaccaacatgcttaagaatgagggcgttggtgccttctacaagggattatctgctgggttgctgaggcaagcaacttacacgacagcccgtcttggatcattcaagttgctgactgcaaaggcaattgagtctaatgatggaaagcctctaccgctgtatcagaaggcactatgtggtctgacagctggtgctattggtgcttgcgtcggtagtccagccgatctagcacttatcagaatgcaggccgataatactttgccgctagctcagcgcaggaattataccaatgctttccatgcgcttacccgtattagcgctgatgagggagttttagcacctttggaaagggtgtgggcccactgtggtcagagctatggctttgaacatgggaatgcttgcatcttatgatcaaagtgctgaatacatgagagataatcttggtttcggggagatgtctacggtcgtaggagcaagtgctgtttctgggttctgcgctgcggccttccagtctgccatttgactttgtcaaaactcagattcagaaaatgcaaccggatgctcaaggaaagtatccatacacaggttcgctcgattgtgcgatgaaaaccttaaaagaaggaggacctctgaaattttactcaggtttcccagtttactgtgtcaggattgcccctcacgtcatgatgacatggatcttcctaaaccagattacgaaatttcaaaagaagattggtatgtgaggaacgaagacagcagcaaaaaaataagatgagaagaacggaaacacaattggaattgtgttcatttgctttttaaatcatatacataacctgccttaaaagcatattatttgtagctgtttgaactttaattttttgtttcggtcggtgattggtccggtgaattttaaattttcttctttggtggaagtttcagccacaaaaaaaaaaaaaaaaaaaaaaaaagggcggccgctctagaggatccaagcttacgtacgcgtgcatgcgacgtcatagctctgtaaatgggtaacgacct

SEQ ID NO: 122172 - DNA, 640 bp, Arabidopsis thaliana
  unsure (1)..(640): unsure at all n locations
antgtcccacctatcncccttggaactgtccctcagtcggncggatccggncgcccccgccgatatctggttcgggaatnctcggtcntggngcagtcttttctggttctnnctgcggctgcagctnccattgctttgtcaaaactcaggttcaggaaatgcacccggatgctcaaggaaagtatcccatacacaggttcgctccgattgtgcgatgaaacccttaaaagaaggaggncctctgaaattttactcgggtttcccagtttactgtgtcaggattgcccctcacgtcatgatgacatggatcttcctaaaccagattacgaaatttcaaaagaagattggtatgtgaggaacaaatacagcagcaaaaaaataagatgagaagaacgaaaacacaattggaattgtgttcatttgctttttaatcatatacataacctgccttaaaagcatattattgtagctgtttgaactttaattttttgtttcggtcggtgattggtccggtgaattttaaattttcttctttggtggaagtttaagacacatagccagagatttcaaaattttcatacgaactaaaaaaattctctgaatgaggaaacaataaatatatgaaacattgatgatgggg

SEQ ID NO: 122173 - DNA, 706 bp, Arabidopsis thaliana
ctaatacgacttactatgggggacgctggtacgcctgcaggtaccggtccggaattcccgggtcgacccacgcgtccgcaatctctgactctctgagtaattaggttttttttttatctcatggccggcgccggaatccacccataccaccagcagtggccgccggcaggtgcgccgcctcctccagccgcagtatcatcagctgctccaccacatccgccgcccattcatcaccatcctcctcctcctcctgttttagttgacaaccataatcgtcctccttatgacgagctgcggacaatcttcatcgcagggcttcccgatgatgtaaaagagagagagcttttgaatctcttgagatggttgcctggttacgaggcttctcaggtgaacttcaagggagaaaagcccatggggtttgctcttttctccacagctcagtttgcaatggcagccaaagatacccttcagcatatggtgtttgatgctgagtcaaagtctgtgatacatacagagatggccaagaagaatctttttgttaaaagaggtattgttggggattcaaatgcttatgatcaaagtaagcgcctacgaactggtggtgactgcacacactctgtgtatagtccatctcctttccatcctccacctcctcctgtgtggggacctcctcatggatatatggcacctgcacctccaccatatg

SEQ ID NO: 122174 - DNA, 877 bp, Arabidopsis thaliana
  unsure (1)..(877): unsure at all n locations
nnnnnnnnnnnnnnnnnnaatacgactcactttagggaaagctcgtacgcctgcaggtaccggtccggaattcccgggtcgacccacgcgtccggtctaggttaatcgaatatttcactatttgctttctatctttctgctgcgaatcaatggcgctatggatggacgctggagcgacgccgaccacggagaaggaaaaggctgatcttgaagctatttctgctctcaaagaatccaccgccatcgaattcaaagaagagggcaatgaatgtgtaaggaaagggaaaaagcattactctgaggcgattgattgttacacgaaagccattagtcagggagttctaagtgattcagagacctctattttgttctcgaatcgatcccatgttaatctactcttaggcaactatcggcgtgccctcaccgatgctgaggaatcaatgaggttatctcctcataacgttaaggcggtgtatcgagctgctaaggcatccatgtcattggatttgctgaacgaggcaaagtcttattgtgaaaagggaatcgagaatgatccgagtaatgaggacatgaagaagctttaaaacttgtgaattcaaagaagcaagagaaagacaacatgaggctcaagcctcacagggcggtggtggagccaaggcttgtctctctgcgatcgagaacagatgagtgaagattggcannagcatgtaccgagaactcactggtttgaagaagccattgtagataaaaacacatncttcattggcctgnctgctttttacgctgaggcatgacagtgacttgttgagactttgtgaacagaatgttgcactatcttgattgatgttcaaggacagccgcgtgcagggataaacac

SEQ ID NO: 122175 - DNA, 590 bp, Arabidopsis thaliana
  unsure (1)..(590): unsure at all n locations
nnnnnnnnnnnnnnnnnnnnnnnnnnnnnnnnnnnnnnnnnnnnnnnnnnnnnnnnnnnnnnnnnnnnnnnnnnnnnnnnnnccacgcgtccgcgcgaacatttcgaccggagttttgagagagctcagagtgtttcgagtgtgttatttggatctgcgatctgatcgtctcgcatcgacgtgaaaggttttctaatccaattggttctgtggaaatttggattcggaggtttttgtttggaagatctttctgcggttttcaccgccatggctgctccgtttttctctactccatttcagccttatgtctatcagagtcaagaagatacgatcacacctttccaaattttgggtggtgaagcacaggttgttcagataatgttaaaaccacaagagaaggtcattgctaagcctggttcaatgtgctacatgtctgggtccattgagatggataatacttatacccctgaacaagaagttggagttgtacaatggattttaggaaagagtgttagtagtatagttcttcgtaacactgggcaaaacgatggatttgttggtatcgctgcaccttctttggcaaggattct

SEQ ID NO: 122176 - DNA, 544 bp, Arabidopsis thaliana
gacaaatctttctttctctttattttatcctaaaatttcctatctgatttcttcctcttgagctaaatttgttaccttctgggtattcaaaaagatctcattttttcttctagctctaaattttcagggagtttctttcttcttcttttgaagaccctttgtcatgagctaatttttatcctctgtgtgttgagaaagatctcattttttagctttaggattgagggagtttcgatttttacttagcacttttccttggaagtgatttggtggaactcatggtgattggtttcttcctaaggttattagagattgagttctggatttttcacgcgccttggatttgatctaatgtactctcttttttcatgtcttaatctggtttagatttttattttgagatcttttgttatataggttgcaagttctgtattttgttaggctttttagtttctgtgttgattatgattctcttggtctaggagagatttgggtgttgttaactgtttgagtttgagaattgtgaaattaggttttttttttt

SEQ ID NO: 122177 - DNA, 462 bp, Arabidopsis thaliana
accacgcgtccgcggacgcgtgggcaacaattcgaatctgaaatctgcaattcacgagaagatgtttttttttgtaacaatggcgaatccaattcaagagattattgagaaacaagttctaacggtagcgaaagctatggaggataagatagacgacgagatagcgtctctggaaaagcttgatgaagatgatttggaagttttgagagagaggagattgaagcagatgaagaaaatggcggagaagaagaaacggtggatgagtattggacatggtgaatactctgagattcattctgagaaagatttcttctccgttgttaaatctagtgaacgcgtcgtttgtcacttctaccgtgagaattggccctgtaaagtgatggataaacacatgagcatattggccaagccacacatttggacacgtttttgggagatccaagctgagaaaagtccattctt

SEQ ID NO: 122178 - DNA, 432 bp, Arabidopsis thaliana
gtttttgtttctgtgagtgctgtgtgtgttctcggtttgtaatatctaagtcgcacaaagatcagacaaagtctgtttgcgtttgatagcattagagtctgatcgaatttggaagacctgtgagattagggtttctttttgtttgtttttttttattccgaaggagagctgcggagcaattggaattacctcggttaaagcaatcacgtagctttggatcgtttagggttttctcattgggtttgggggatttgtattctagcttcctcaaactcaatctgatggtgatgtgagacaaggcttaatcctgttaattggcgattctagggtttttcaatggcgagcacaggcgagcctgaccgtaaaaggcgtcactttagctccatatcaccttctgaagctgcagccgccgtaaagaaacagcctttcttt

SEQ ID NO: 122179 - DNA, 943 bp, Arabidopsis thaliana
tttccttcgcagtaccggtccggaattcccgggtcgacccacgcgtccggtcgcctgaagatgtacacaagctcgagctaatatccggttttaagagtcgaccggacccgaaatccgataccggaagcccggaaaacccgaatagcagcagtccgatttttactaccgacgtttctgtaccggccaaagctagaagcaaacgctcacgcgccgctgcgtgtaattgggcctcacgtgggcttctcaaggaaacgttttacgacagtcctttcaccggagaaaccattctctctagccaacaacacttgtctccgccaacctcgccgcctttgttgatggctccgctagggaaaaagcaagccgttgatggaggacaccgacgggaagaaggatgtttcttcaccggagtctggtggcgcagaggagagacggtgtctccactgcgccacggataagactccgcaatggcggacaggcccaatgggcccgaagacgttgtgcaacgcttgcggtgttaggtacaaatcgggacgtttagtgccggagtatcggcccgcggcgagtccgacgtttgtgctggcgaaacactcaaattctcatcggaaagttatggagctccggcgacagaaggagatgagtagggcccatcatgagttcatacatcaccatcacggtacggacactgccatgattttcgacgtttcatcggacggtgatgattacttgatccaccacaacgttggcccagatttcagacagcttatttgatttgatccctttttatttttccaataatttaattagggattatcttcttagatcaaattttgctaatctaaattttgatgatgacaatttacttatttcttccttttaatcttatgttttgggcgttgctagacagcttttgtcccattccccatgggatgaaatgaattttttt

SEQ ID NO: 122180 - DNA, 600 bp, Arabidopsis thaliana
  unsure (1)..(600): unsure at all n locations
gacccggcgnccgtgagagtttaccgaaaaaaaaaaaaaaaaaaacacctctttagttttaatcaacgaaacttatggaacgtgaagcacatgaattcttccgcgcatctgattttgccgttgatgaccttttagttgatttctctaacgatgatgacgaagaaaacgatgttgttgctgattccaccactaccaccaccataaccgacagctctaacttctccgctgctgatcttcccagtttccacggtgatgttcaagacggcactagcttctccggtgacctttgtataccttctgatgatttggctgatgagttagagtggctttcgaacattgtggatgaatcattgtcgcctgaaggatgtacacaagctcgagctaatatccggttttaagagtcggccggccccgaaatccggtaccggaaggcccggaaaacccgaatagcagaagtcccgtttttaactaccgncggtttntgtaccggccaaaggttgngnaaacggtnanggggccgttgggtgaaattngggcctacggggggttnntaaggaacgtttttgggagcccttaaccgggnaccntttttttggaaaa

SEQ ID NO: 122181 - DNA, 538 bp, Arabidopsis thaliana
acgactcactattgggaaagctggtccgcctgcaggtaccggtccggaattcccgggtcgacccacgcgtgcgcggacgcgtgggatcagaaacagaaacgagacaagaattaattctctcgtccaaatttcttctgggcagaaaccaacatttatccttatccgattcttctagggtttcggaagatctaaccagaaccttcgcaacaagatggataagtatcagagagttgagaagccgaaggcggatacgccgattgctgagaatgagattcgtatcaccagtatgggtagggcacggaactacatcacctatgcgatggctcttcttcaggaaaacaaatcgaatgaagttatcttcaaggctatgggaagagctatcaacaagagtgtgaccatagttgagctgattaagagaaggattcctggtcttcatcagatcacatctattggatcaacggacattacagatacctgggaacctacagaggaaggccttcaaacaattgagaccacgaggcatgtgtcgatgataacc

SEQ ID NO: 122182 - DNA, 1060 bp, Arabidopsis thaliana
  unsure (1)..(1060): unsure at all n locations
atgatcctgccagctacnnnnnnnnnnnnnnnnnnnnnnnnnnnnnnnnnnnnnnnnnnnnnnnnnnnnnnnnnnnnnnnnnccacgcgtccgcaaaagcatctctctgtttcttctcctctcttcaagctttttgtttcgtctcagtcgtcgtcatcatctctgacagcaaggttattcacataggcaaagaagtcattcttttgcatgctgttttccaataaagttaattctctaacagaacaagtttcgagattggatattgacgacaacgatatgggacttggaggtagtgaaacaatggaatgcaagtgtggtatgcctctgtgtatctgtgtagctcctcccaaatcaactgataaaccaaacccacctgctaccattgctcctgtggttcttcctcagttgaagtcagaggcttcagcaaaaagtaaaggttccacttccagcagcaatgctagatcagctctaaatgctggactagacaccccccaaagagactatgaagccagtggggagggattaagagaagcgattaagaatggtgacagtgctggtgcgaaaaagcttctaaaagagggcgtagatgcaaattaccgagacaagcaaggaatgtcggtgcttcatctggctgtcctgttcaaccaaactgatattgcgttgatgttgatggatcatggagcaagccttgagtacaagaatgcacaaggagaaacaccgctagattgtgccccggcaacactgcaatacaagatgcgggaaaagatgaagtccacttaacagcatgcctcagacagagctacaaatcattcctcaaatctttttcagataagggaaagatttgtaatggaaaaaaatcaagggatcatgaatttgcttgtaactttagttgcattctgtgtgcaattttccatgttatgtgatctttgaaccatgtcttcttccgctatgacataaaaactcccttttgttttaaaaaaaaaaaaaaaaaaaaaagggcggccgctctagaggatccaagcttacgtacgcgtgcatgcgacgtcaagactcttctata

SEQ ID NO: 122183 - DNA, 1263 bp, Arabidopsis thaliana
  unsure (1)..(1263): unsure at all n locations
nnnnnnnnnnnnnnnnnnnnnnnnnnnnnnnnnnnnnnnnnnnnnnnnnnnnnnnnnnnnnnnnnnnnnnnnnnnnnnnnnnnccacgcgtccgcccacgcgtccgatatttttttaaaaagaaaaaccaaaaaatcctttgaaacttttttagcctgtcgcttctctttccatcgtcttcctcgtgaacgaaacttctcgatcttcttttcttttttttcacctgtttttcggtatcacgagaatactacacttcccactccactttatcggatatatttccttgattttctccgattgtggtcaatctggaaaattattgagaatctctccctcacttaaccaaaagcgtttttaatcagatagagagagaggaaaaagcatcaaccaaaccatggctgcgagaaatttggagaagatggcttctattgatgctcagctcaggcttcttgctcctggcaaggtttctgaagacgacaagcttatcgagtacgatgctctgttactggatcgatttctcgatattcttcaggatttgcatggcgaggatgtcagagaattcgttcaagaatgctacgaagttgcagctgattacgatggaaaccgcaacactgagaagcttgaggagcttggaaatatgctgacgagtttggatccaggggattcaattgttgtcactaaatcattctccaacatgcttagcttggctaatctggctgaggaagtccagattgcttaccggcgtaggattaagaaactcaagaaaggtgatttcgctgatgaggcctctgcaacaacggaatctgacattgaagagactctcaagaggcttttgcagcttaacaagactcctgaagaggtctttgatgctcttaagaatcagactgttgacttggttttaactgctcatcccactcaatctgttcgtcggtctttgctccaaaagtttggaaggattcgtgattgtttgacgcagttatatgcaaaggacattactcctgatgacaaacaagaactcgatgaagctctgcaacgagagattcaagctgcttttcgcacagatgaaatccgaagaactcctcctacaccgcaagatgaaatgagagcagggatgagctacttccatgagacaatctggaaggngtccaaagtcctaagacgngtgaccagctttaangacattggatcaacggngngtccttanatgggctccatnagtccctctgntggggancgtgtggaacccggggaaccccgaagttc

SEQ ID NO: 122184 - DNA, 526 bp, Arabidopsis thaliana
  unsure (1)..(526): unsure at all n locations
ccnnnnnnnnnnnnnnnnnnnnnnnnnnnnnnnnnnnnnnnnnnnnnnnnnnnnnnnnnnnnnnnnnnnnnccacgcgtgcgaaggattcgtgattgtttgacgcagttatatgcaaaggacattactcctgatgacaaacaagaactcgatgaagctctgcaacgagagattcaagctgcttttcgcacagatgagatccgagagaactcctcctacaccgcaagatgaagtgagagcagggatgagctacttccatgagacaatctggaaaggagttccaaagttcttaagacgtgttgacacagctttaaagaacattgggatcaacgagcgtgttccttacaatgcgcctctcattcagttctcttcttggatgggcggagaccgtgatggaaacccgcgagtaactcctgaagttacaagagatgtatgcttattagctagaatgatggctgctaatctctacttctcccagatagaagatcttatgtctgagatgtctatgtggcgttgcaatgaggaac

SEQ ID NO: 122185 - DNA, 873 bp, Arabidopsis thaliana
  unsure (1)..(873): unsure at all n locations
nnnnnnnnnnnnnnnnnnnnnnnnnnnnnnnnnnnnnnnnnnnnnnnnnnnnnnnnnnnnnnnnnnnnnnnnnnnnnnnnnnnccacgcgtccgctgagcttgagcaggtgcgagtagtgaggaaggtgcatcgcttcgattcttcttcttcttcttcttcttcgttgaatccgtcatcctccgatcactgaagaggtttccgattacctttctctctctctcattctcattctcaccatgcgattgcttcttctctcccttcgccgtgtaactctattctcgaggcatcaacgatacgctttcgctcccattcataattgtttgatctctatcaatcccagcacatcttcttcatctctattctcggcttcttccttctgttcgtctccacattccaatggagatggaaagattgcagggccgttagtggagtatgaacgcagaatcgtagctggagagttattggatggagatttatgtcagctaggtacactaagagaacttcagagactctacgacgagcttgttcaatctgctgatgcttgtcgattggatcgttattctgcatctgcaaagtccactangagtaattggttctggaacaaatntgtgtctcactcttctgtctctcctgtcaaaggcttatacttatatggaggagtangaactggaaagacaatgctcatggacttngtttttatcaattgccagctagctggagatcacanaggattcactttcacaatttcatgttgagtgtgcatagcccgcctgcaaagcacaagggtcttgaagatccactngaagtcgttggcctggaatagctgacgaggcatattactatgcttagatgagtccatgggcattgatgt

SEQ ID NO: 122186 - DNA, 854 bp, Arabidopsis thaliana
cctgcaaccatgattggtacagaagacagaatcttgaacccctggtcaatgttcgttaaaaaatatggtttcctcccgctcataggtggtggaaccaccaaattccagcctgtttatgtggttgatgttgctgctgcgattgttgctgctctaaaggatgatggctccagcatggggaaaacatacgaattgggtggtccagatgtctttaccactcacgagttggcagagatcatgtatgatatgattcgtgaatggcctcggtatgtgaagcttccgtttccaattgccaaggcaatggcggctcctcgagacttcatggtgaacaaagtcccgttccccttaccctctcctcagatcttcaacctggatcaaatcaatgcacttacaaccgatacacttgtatctgacaacgccttgaagtttcaggatctggaccttgtcccccataaattgaagggatatccggtcgagtttcttatccaatatcgcaagggtggtcctaacttcggttctactgtcagtgaaaagataccaacagacttctacccttgatgctgcttctctgctcaaaggtcatttcctggactaattttttcatgcaagtgtcacaatgagattgcggaaaccagatttgctatgttgatgactttcatttacttctgtcaataataaacgggtcctcctctttgttgtgttcttgaaaaaattataacacatcaacatcattataagttagagaggggacaatatatttcttgatgtggttggtcccttaggatttatgcaatgtctggttcgtttcgaactccatgtacttcttcccctgagtaaaactaaagccatatgccttc

SEQ ID NO: 122187 - DNA, 521 bp, Arabidopsis thaliana
  unsure (1)..(521): unsure at all n locations
nnnnnnnnnnnnnnnnnnnnnnnnnnnnnnnnnnnnnnnnnnnnnnnnnnnnnnnnnnnnnnnnnnnnnnnnnnnnnnnnnnnnccacgcgtccgggttcaacaccgggttatccttacggtggttatcataacggtttccgtggagttcctcctcgtggacaagagcgtcctatggctcgtggaggaaaccaaagtgatgcatttctgaagaatatcctcttttttgttggaatctgtgtggtgatatttctcatctggtgaaaacgaatcacatttggtgtatttccaggtatgatcaaacttacttacttggtgcaagttgtgtatgtaaatatggtaatagctgagtgtacttgtctgctatttcgacgttgttattgtatttttgttttgaagatgaaccgtgagtctacaagcttttttacacaactcttttgttgcttttgtgttttgtctaagcatcttgtgaaaactagttgtgacataaatggtgcgtgttatgacataagaagtattatg

SEQ ID NO: 122188 - DNA, 517 bp, Arabidopsis thaliana
  unsure (1)..(517): unsure at all n locations
ccctctcgtccgctctctcttcttcttctctctattccatggctttagtacgtgaacgtcgtcagctaaatctccgtcttcctcttcctccaatctccgaccgccgcttctccacctcttcctcctcagccaccaccaccaccgtcgctggctgtaacggaatctccgcttgtgatctcgagaaactcaacgttctcggatgcggaaacggcgggattgtttacaaagtccgtcataaaaccacatcggagatctacgctttgaaaacagttaacggcgacatggatccgattttcacaagacagttgatgcgagagatggagattctccgccgtacagattcaccgtacgtcgttaagtgtcacggaatcttcgagaaacctgtcgtcggtgaagtatcgattctaattggggtttttggnncggngggacccctnggatcatttngggggggtntacgggggcaaaaattngccggnttcgttaaaaagttttaaaagggttagntttttncang

SEQ ID NO: 122189 - DNA, 1275 bp, Arabidopsis thaliana
  unsure (1)..(1275): unsure at all n locations
tggggaagctgacctctgcctttcctcctccattaatcaaggaatataaatcagctttaaactcagtcctcttatggaagacaaaaaagcaaatatttattcgtaaatataacttcagaaccctttcaacaaaactctctctgttctttctccgtggagaagttaaagatgacgatgtcggagaactcaagaaacttggaagctggtttgctactgaggaagaaccaaaacgacatcaacgaatgtcgtatcactgctgttgtacttttcagtactttcgtttctgtttgtggctctttctgcttcggttgtgcggcaggttattcatcagttgctcaaacagggatcataaatgatttaggtctctctgttgcacaatactccatgtttggttcaatcatgacttttggaggaatgattggtgccatcttcagcgggaaagttgcagatctcatgggtcgaaaagggactatgtggtttgctcaaattttctgcatcttcggttgggttgcagtagcattagcaaaagactccatgtggcttgatattggaagactatccacaggatttgcagttggtttattaagctatgtgataccagtttacattgcagaaataacaccaaaacatgttcgaggagcgtttgtatttgctaatcagctgatgcagagttgtggattgtctttattctacgtcattggaaattttgttcattggcgtaacttggccttaatcggtctcattccatgtgcgttgcaagttgtgactttgttctttattccagagtcccctagactactgggaaaatggggacatgaaaaagaatgtagagcttcattgcaaagtcttcgcggagatgatgcagatatctctgaagaagccaacactatcaaagaaaccatgatcttgtttgatgaaggaccaaaatcgcgggttatggatttctttcagagaagatatgctccatctgttgttattggtgtgggactaatgcttctacaacaactctctggaagctcaggacttatgtnctatgtcggtagcgtatttnataaaggagggtttccaagcagcattggctcaatgattcttgcagtgatcatgntaccaaaagctctattggggctgattttggttgagaaaatgggccgagnccacttntattggtgatgaccttaatttacaggctttaccggtggaatgncntttccngntgntcctnagtttncctntgctttgggnaaatggatcttntnggnnncccggtttcaaaga

SEQ ID NO: 122190 - DNA, 604 bp, Arabidopsis thaliana
aagctacaatacgactcaccttagggaaagcagctacgcctgcaggtaccggtccggaattcccgggtcgacccacgcgtgcgcccacgcgtccgctctactgggtcgaatactctcaaggcccaccaaaaccaaagaccgatcttgccagcttcctcctggcccaccaggatggcccatcctcggcaatctacccgaactattcatgactcgtcctaggtccaaatatttccgccttgccatgaaagagctaaaaacagatatagcatgtttcaactttgccggcatccgtgccatcaccataaactccgacgagatcgctagagaagcgtttagagagcgagacgcagatttggcagaccggcctcaacttttcatcatggagacaatcggagacaattacaaatcaatgggaatttcaccgtacggtgaacaattcatgaagatgaaaagagtgatcacaacggaaattatgtccgttaagacgttgaaaatgttggaggctgcaagaaccatcgaagcggataatctcatagcttacgttcactccatgtatcaacggtccgagacggtcgatgttagagagctctcgagggtttatggt

SEQ ID NO: 122191 - DNA, 471 bp, Arabidopsis thaliana
cccacgcgtccgcggacgcgtgggtttctaacaaatgcacacctcactacacgcatacatacatcatgatgagctttaccacatcattaccatacccttttcacatcctactagtctttatcctctccatggcatcaatcactctactgggtcgaatactctcaaggcccaccaaaaccaaagaccgatcttgccagcttcctcctggcccaccaggatggcccatcctcggcaatctacccgaactattcatgactcgtcctaggtccaaatatttccgccttgccatgaaagagctaaaaacagatatagcatgtttcaactttgccggcatccgtgccatcaccataaactccgacgggattcgctagagaaagcgttttggggagcgagacgcgagatttggcagaccggcctcaacttttcatcatggagacaatcggagacaattacaaatcaatgggaatttca

SEQ ID NO: 122192 - DNA, 641 bp, Arabidopsis thaliana
  unsure (1)..(641): unsure at all n locations
tgatactctcnnnnnnnnnnnnnnnnnnnnnnnnnnnnnnnnnnnnnnnnnnnnnnnnnnnnnnnnnnnnnnnnnnnnnnnccacgcgtccgcggacgcgtgggcaaatttcccgatgtgaaaaaacaagtttccgatcaactcaaaccaccgtcaccacttcttctctccgacatggctccgtcgttaaggaatttcaacttcctcccccccgtctccaccttcctcgtcttctctctattctccgtcgtttcttccgacgatctccaagtcttactcaagctcaaatcatcattcgccgattccaatctcgccgtgttcgattcctggaaactgaactccggtatcggtccttgtagcttcatcggagtaacctgtaattctagaggcaacgttacagagattgatctctctcgtcgaggtttatctgggaattttccattcgattcggtttgtgagattcagagtctcgagaaactctctctcggattcaattcactatctggaataatccccagcgatttgaaaaactgcacgagtttgaagtatttggatctcggcaccatttttttctccggtgctttccctgagttctcatctttanatcagttacaggttctgtatctcaacaacagcgcttt

SEQ ID NO: 122193 - DNA, 308 bp, Arabidopsis thaliana
ctctctctctctctctctctctctctctctctctctctctctcttctcctctaaccaaatttcccgatgtgaaaaaacaagtttccgatcaactcaaaccaccgtcaccacttcttctctccgacatggctccgtcgttaaggaatttcaacttctttcaccgcttctccaccttcctcgtcttctctctattctccgtcgtttcttccgacgatctccaagtcttactcaagctcaaatcatcattcgccgattccaatctcgccgtgttcgattcctggaaactgaactccggtatcggtccttgt

SEQ ID NO: 122194 - DNA, 489 bp, Arabidopsis thaliana
cagtccgagagagagaaaaaaataaaaaataatctgtcggtgatttataacctcctctctaataaaccaccacatcctctgaaaccctagcctgaacaactcgccgtcttctcgagaaacatctttcttacttcgcttcattacaagatctgatgaaaccagatcggatcttgctctagatccagatgctccttaacttatttactcgaattcatcatcatcgttatcatcaccatgtcactgtttctaaaagacgattcgattcaaatccgtgaagtatggaacgacaatctcgaatcagagatggctctgattcgagaagtcgtagacgatttcccattcgtagcgatggacacagagttcccaggaatcgtgtgtagaccagtgggaacattcaaaaccaacacagagtaccactacgaaactctcaaaacaaacgtcaacatactcaagatgattcagcttggactcactttctctgatgagaaa

SEQ ID NO: 122195 - DNA, 560 bp, Arabidopsis thaliana
  unsure (1)..(560): unsure at all n locations
nnnnnnnnnnnnnnnnnnnnnnnnnnnnnnnnnnnnnnnnnnnnnnnnnnnnnnnnnnnnnnnnnnnnnnnnnnnnnnnnnnccacgcgtccgtcttgatcttcttcttaacttatacctcaaataatggataattatcagaccaagaatatatctaatctattaacttctttgtgttttaccactctcttaatattagctccggtggttatatgcactagacaacaccggttcgatagcccgaaaagaagcttgttggccaacgagcaagatttagtgacaggtttgcctggacagcctgatgtgagtttcagacattatgccggatatgtccctgtcgatgaatccaacggaagagctatgttttactggttctttgaggccatggatctcccgaaagagaaacctctagtcctctggcttaatggaggtccaggttgttcttctgtgggatatggggcaacacaagaaattggtccttttctcgtggacaccaacggaaacggacttaactttaatccatacgcatggaataaagaggccaacatgctgtttttaga

SEQ ID NO: 122196 - DNA, 818 bp, Arabidopsis thaliana
atgatcctgccagctactaatacgactcccttagggaaagctcgtacgcctgcaggtaccggtccggaattcccgggtcgacccacgcctccgtcgccttctccgtctttgccgttctcttcttcacctcctctgcttcttcccaataccaaactcttgtcgtcaacactcttccttcttccgcaacactctcatggcccgagtccgaatctttaactgatgaatctttatccgagtccacaacttcactctctgtccatttatcacacgtggatgctctgtcttccttctccgacgcatctccggcggacctcttcaacctccgtctccaacgagactctctccgcgtcaaatctattaccagcctcgccgccgtatcaaccggacgaaatgctacgaaaagaactccacgtaccgccggtggatttagcggcgcagttatctctggcctctcacaaggaagcggagagtattttatgaggttaggtgttggaactccggcgactaacgtttacatggtgctcgacacaggaagcgacgtcgtttggctccaatgctctccttgcaaagcctgttacaaccagaccgacgccatttttgacccgaagaaatccaaaactttcgccaccgtaccatgtggatctcgcctttgccggagactagacgactcgtcggaatgtgtcactcgtcgaagcaagacttgtctctaccaagtatcgtacggtgacggatcattcaccgaaggagatttctcaactgaaacgctgaccgttcatggagcgcgtgctgatcacgcgccgttaggatgccggaacgtt

SEQ ID NO: 122197 - DNA, 855 bp, Arabidopsis thaliana
  unsure (1)..(855): unsure at all n locations
tgcttcgccggccctatacgacttacttagggaaagctggtacgcctgcaggtaccggtccggaattcccgggtcgacccacgcgtccgctcagctagaagcatttgataaagcttggtgctcttaccttgagggttttgtagtctggaaaattaatgatgctaagcttctagaaaaagatttagccagaactcaagagtctgagctgtctgaggtatcaaaacatacttcctctcccaaaataatagacagtggcttgaatcagaagacggtaaaggcatcttctccaactaatcgggctttattctctgaaactgatggagcacgagaatcaaaagcacctgcagattcgcatcttccatcttcatcttcaccttcaccgggctcatcgaatttgtcaccctctttgaactctgcagggagcgaggccatttctactccaaacgtggtagctaatagctttgatgcagcgttggctagtgagaacgaagtaattgtaaatgaaattgtccatgacaatagcagtagttttgctgatagcctcgaccctaacactggggatacaagcaaccttcaggtgagggttaaggagacaatggaaaaggctttctgggatggtgtcatggaatccatgaaacagtcgcagccagacttcagctgggttattaaactcatgaaagaagtcagggatgaactctgtgagatatctcccaaagactggagacaagagattgttcanactatcgatacggatgtgctgtcacagttactggcttctggtatggcgacatagggtatcttggaaatatccttgagtttcccttggcatttgctgaactcttgctccgctatgag

SEQ ID NO: 122198 - DNA, 334 bp, Arabidopsis thaliana
aggaggcgcttctttatgtcatcactctcttctctctctcagccctaaccgttacattaggagaaagtataagcatcgactgtggatcaaccggatcttacgtggactccaacaatgtaacatgggtcggagataaaggcttcgtcaccaacggcgagcccatgaagattccggacgttgtcaaaaagccaatcaacactctccggtacttcccaactggtcaaaccaactgctacaccaacattccggtgacaaaaggccagaaaaccctcgtgaggacgaagttttactatgagaactacgacgcgaagttctcgccgccatcttttgatgt

SEQ ID NO: 122199 - DNA, 408 bp, Arabidopsis thaliana
actcagtctctttcttcttcttcttcttcttctcattaaaagctgaacacaaagatctattctttcactaacacattaccagtttctgcatttgtattatatccttttctaaaacttttaaccattctttctccattcccagttcttagaaagagtcaagagcaatgaggaagcttttcttgttagggtttatagttgcaggactggttcttgggaatgaggcaaatgggtatttagagttcaatgtcactgaattagatcgcattgaggatttagagtttggtttcgccaaatttagttccaatttcaatccattaatggttggtctcacacgtatcagaggagctggttctaaaggagctgtttgtttggatggtacattgcctggatatcacttacatcgtggac

SEQ ID NO: 122200 - DNA, 450 bp, Arabidopsis thaliana
tccgttggccttgtttcgtccacccaacaaactttttaaaaaaaactcgatcggctgatacttaatcgcccacttgattttggaggtgggtacctttttttgttgtaatttttccatacacccaatttcccgtggaagaaaaggagtcagctttttcgtttgctttaaagcttgaatctttacatagttccagttactttctatagagcttcataatccctagttgcccaaaaggattctgggttttgtgagaatgatgacgtcatgtcggaatatagatttaggtacgatgatgatggcatgtggttgtggccgtcgtcagtttccttcattagcgaagactgtttgtaagtttactagcagcaatagaagctattgcggtctggtggggagttgcaaagcggtgccaacgaaatcaaaagagatctctttgctcaatggtattggtca

SEQ ID NO: 122201 - DNA, 740 bp, Arabidopsis thaliana
ggccccccctcgaggtcgacggtatcgataagcttgatatcgaattcgcggccgcgggaacgccgactgcgatgaggaatgctttcggcaacgttttatcagtcctgatcctcgtcctcattggtgtcctcgctttctcgatccgactcttctctgttataaagtatgaaagtgtgattcatgagtttgatccttacttcaattatagagtcactcagttcttatcgaagaatggaatatacgagttctggaattggtttgatgataggacctggtatcctcttggccgtgtgattggaggaactgtttaccctgggttaactttgactgctggaaccatctggtggggattaaattcattaaacattcctctgtcagtagagactgtctgtgtcttcactgcacctgtattttcagcttttgcatcctgggcaacttaccttttgacaaaaggaagttaagggcttccggttgctggacttgccagctgctgctcttttggccatggttccctcatatatatcccgatctgtagctggtagctatgacaatgaagctgttgccatctttgctttgatcttcactttttatctttacataaagacattaaatacaggttccttattttatgccaccctgaatgctcttgcatacttttacatggtatgttcatggcgaggttacaccttcattatcaatctgataccactgcacgtgcctttgtgcattgaaaccgggcg

SEQ ID NO: 122202 - DNA, 403 bp, Arabidopsis thaliana
gttttgccggagatagtagttttcgcgtctccaaaaacccttctacctttgccggagatagtagttcctcactctctttaatccgattcatcgagccggagagctcaccttccgccgcgtaaaatggcggctctagaaagcccactgccgggaacgccgactgcgatgaggaatgctttcggcaacgttttatcagtcctgatcctcgtcctcattggtgtcctcgctttctcgatccgactcttctctgttataaagtatgaaagtgtgattcatgagtttgatccttacttcaattatagagtcactcagttcttatcgaagaatggaatatacgagttctggaattggtttgatgataggacctggtatcctcttggccgtgtgattggaggaactgttt

SEQ ID NO: 122203 - DNA, 638 bp, Arabidopsis thaliana
  unsure (1)..(638): unsure at all n locations
ccnnnnnnnnnnnnnnnnnnnnnnnnnnnnnnnnnnnnnnnnnnnnnnnnnnnnnnnnnnnnnnnnnnnnnnnccacgcgtccgatcaagataacaaatttatcaaaaataaatacatcatactggtttatgagcaagaaacattgctcagaattattaccaaataagatgtttagaaaccaagactcgaaatacttgatcccggtgcagaaagaagcgccaccggtgacaactttaccgatgaaagcttcaacggtgaaatctccacacaactgtgaggccattctcagagacgcagatcctccgatctctctctcctctgttaatctctctgaacagctacggtctggtgttttcttgaaacccaagaaacagatcaaatattgggtggacgagagaaacagcaactgcttcatgctctttgcaaagaacctctctataacttggtctgatgacgtcaactattggacttggtttaccgaaaaagagtcaccaaacgagaatgtggaagctgtgggattgaaaaacgtttgttggctcgacatcacgggaaaattcgacacgacgggggggcccttaggttcggggggnttntttcggnggntgggcttcaagggnaagntttgnggtncccgccn

SEQ ID NO: 122204 - DNA, 500 bp, Arabidopsis thaliana
  unsure (1)..(500): unsure at all n locations
gtactgatcaagataacaaatttatcaaaaataaatacatcatactggtttatgagcaagaaacattgctcagaattattaccaaataagatgtttagaaaccaagactcgaaatacttgatcccggtgcagaaagaagcgccaccggtgacaactttaccgatgaaagcttcaacggtgaaatctccacacaactgtgaggccattctcagagacgcagatcctccgatctctctctcctctgttaatctctctgaacagctacggtctggtgttttcttgaaacccaagaaacagatcaaatattgggtggacggggagaaacagcaacccgctttcatgcctctttgccaaagaaccccctctataaccttggcctgatggcggcaacctatttggccttgggtttcccgaaaaagggtcacccaaagcggggttcggtgcaattaaaatccctttctntttgattttnnccccaaaaantggnnntttttttgttc

SEQ ID NO: 122205 - DNA, 742 bp, Arabidopsis thaliana
ggcccacgacataaaaagtaattagtgagaaaattaagaaaaacaaagtctattccatacgaataagagcctcaggttaattttttaaaagatgggttattggaagtcgaaggttgttccaaggatgaagaaattgttcgagaagagtccagcaaaaaaggaagtttgttgaggaggagaagccacgagaggtggaagtcgtggaggaggtcgtcgtgaaaaccgaagaaccggccaaggaaggagaaactaaaccggaggaaataattgcaaccggcgagaaagagatagaaatagttgaagagaagaaagaagaggctaaaccggtggaggttccggtcctcgcagctgcggaggagaagaagccagccgtagaagaggagaagaagacggcgccggtggaagagaagaagccagctgtggaagaggagaagaagcctgccgtggaagagaagaaacctgtggaggaggagaaaaaagaagttgttgccgctgttccggtggctgaaactccttcgactaaggctcccgaaactccggtggttgaaactccggccaaggctccggaaactccggcggctgcgccacaaaaggcttgaattttcttcatggtacatttttctaaaaaaatattgattgtctttgtgtggataatttattttctttgtttatttgtcttattatccatgtgaatttcctctataaattaatttgcttgcttgaattatatattcttatgatc

SEQ ID NO: 122206 - DNA, 552 bp, Arabidopsis thaliana
  unsure (1)..(552): unsure at all n locations
nnatgattctgccagcgtcnnnnnnnnnnnnnnnnnnnnnnnnnnnnnnnnnnnnnnnnnnnnnnnnnnnnnnnnnnnnnnnnnccacgcgtccggaaaactgtctgaaaaaaaagagtccaagtgagattgtctccgtcaacgatggccttaaacgtgatcaagatctctcgagtcagccttgtaactaactcagtcgaaccactcgttctcccactcactttctttgatttactatggctaaaactcaatcccatagagcgagttaccttctacaaactcaccgagtcatctcgtgactccttcttctcttccatcctccccaaactcgaacaatccctctccctcgtcctctcccacttcctcccactctccggtcacctcaaatggaacccccaagatcctaaaccacacatagtcatcttccccaaagacactgtctctctcacagtggtcgagtccgaagctgacttctcttatatctctagcaaagaacttcgtctggagactgaattacgttctcttgtccccgagttacaagtttcctctgac

SEQ ID NO: 122207 - DNA, 534 bp, Arabidopsis thaliana
  unsure (1)..(534): unsure at all n locations
gttgctagtactccccagctactnnnnnnnnnnnnnnnnnnnnnnnnnnnnnnnnnnnnnnnnnnnnnnnnnnnnnnnnnnnnnnnnccacgcgtccgtaaacatagtagtaatacaatatgtattgtcgtgacgagtacaaaccaaaatgtgtttagtattataaaaacggcttgttcgtattctcttctctcgctcaacacatgaagctcaagtgatccaccgtggttagcaaaaggacggttcacatcatgactatattcgcgagagatctcatctataggatcgaaacgaaggttttgttgccgctcttccttgtccatttgttaccttatgtaacatgccagcaagagtcagaatccgtagaccgcaatagaaaaaccaatttcccaacggaaacggtaatcgcaatcattgtgcttgcaatatttatctcattaagcatggtcgcttgtttcttgcacaaaacattctatagagcagaggttgaggcggcaagccaagaagtgtttcacagtagagcgaggcgtgggc

SEQ ID NO: 122208 - DNA, 504 bp, Arabidopsis thaliana
  unsure (1)..(504): unsure at all n locations
nnnnnnnnnnnnnnnnnnnnnnnnnnnnnnnnnnnnnnnnnnnnnnnnnnnnnnnnnnnnnnnnnnnnnnnnnnnnnnnnnnnccacgcgtccgcttctccggccctaataatggcttgcagagcaaaagaacttgtgtcgttaatcttgtataagatctgtaatcccaaaaggtctgattccaaaattgaggaacatgtggaagaagtagaggatttgaaagcagaggcagaactctttaggtctggttccaaaattgagaagcatgttgaagaactagaggatttgaaagcagaggcagaactctttaggttgaaagcaatctcaggaacagaggaactgaaagcagtggcagatgtcaagaggttgagaacaatcttagaaaacaatagtggaacctcagaggagtgtaagggtgagatgttgaaagaagatctttttcttccctcggatcttgtacgtctcatattgtctcgtctttctttcaaagacaacatacgctct

SEQ ID NO: 122209 - DNA, 868 bp, Arabidopsis thaliana
  unsure (1)..(868): unsure at all n locations
ccacgcgtgcgcagaggcatttttggtcataaaatccacacagaggtggttcgacatccaggtgaatccaagtaataaattgcaggattctctctctataatatatatagatatagcttgcaatcatttcctgcgtttggatcggtctgggttttgtcgagggttttttggggaagacgaaattagggtttagttggggcaaagtaagtagtaaagaagaagaagatgcagcagcagcagtctccgcaaatgtttccgatggttccgtcgattccccctgctaacaacatcactaccgaacagatccaaaagtaccttgatgagaacaagaagctgattatggccatcatggaaaaccagaatctcggtaaacttgctgagtgcgcccagtaccaagctcttctccagaagaacttgatgtatcttgctgcaattgctgatgctcaacccccaccacctacgccaggaccttcaccatctacagctgtcgctgcccagatggcaacaccgcattctgggatgcaaccacctagctacttcatgcaacacccacaagcatcccctgcagggattttngctccaaggggtcctttacagtttggtagcccactncagtttcagggtccgcaacagcagcagcaggtacatcagcaagctatgcaaggccacatggggggttagncccattgggtatgnccaacaacggggntncaagcatgnggtngaacaaccnggaanccggtttttggnggnaacgttgggggtttaggggggggaaancaagtttggnccattttggccaagggaaaaatttttngaaatttaaaaggttcccaaaggggtttttttttntaaatttttngncttt

SEQ ID NO: 122210 - DNA, 1250 bp, Arabidopsis thaliana
  unsure (1)..(1250): unsure at all n locations
gaacgcaacttctgtaaatgttgaagtctactataacaaagctgtgaactatacactgatggtcacttttgtctctttcctccaggttcttctgttgccacgcgtccgggagcacggtaacacacaatctggtgctgctaaggtatccattgtaatgattgggcaacaagcgatcatggatgcttatttgtgcctcttacatctaacagccggtatattagtcgaatctctatttaatgcatttgcaaccgctgcgttcttcaagttcgtagtcttttcgatttttgagatgagatatcttctggctatatggaaagcaacccgtccttccaatagcggagagggttgggaaacaatgaggagagaactgtcctttctgtacagtcgtttctatgggatccttcttggaggcattttgataatgtaccagttccacaactacatgcagccgattctccttctcatgtactcattttggataccacaaatagtcgccaatgttgtccgggattcaagatagcctctgcacccatattacatcttgggcatgacagctacacggttagctataccgttatatgtttttggatgcccacacaacttcatgcgtgtagagcccaacaaggtttggtgtatatgcttgtgcacattcatggggttgcaaggccgtcattcttcttcttcagcattattttggttcacgctgctttgttccccgtcagatgctaccagagaaatacaactaccaccgaagatttaatcgggatgtaagccgcaccactgattgtgttatctgcatgaccgctattgatctcagacagcataccagtgattgcatggtaactccatgtgaacatttctttcactcgggatgcttacagagatggatggatataaaaatggagtgtccaacttgtcggcggtctcttcctccagcatagaggatgttttcggtttgttaggatgtacagacttcactcagattattgcgggtggggctggttctttaatttcaggtccttgcagaggtttagaagatttttagatgaaaacagagcaaaggtggaatctgtaactgcggctagataccgcagatagacaattgtgttctgtataaactgtattacgttataatcttagtgcatattcttcaccccaaaaaaaaaaaaaaagaagaagcgaaaannnnnnnnnnnnnnnnnnnnnnnnnnnnnnnnnnnnnnnnnnnnnnnnnnnnnnnnnngacctaa

SEQ ID NO: 122211 - DNA, 617 bp, Arabidopsis thaliana
  unsure (1)..(617): unsure at all n locations
atgatacgcgcagannnnnnnnnnnnnnnnnnnnnnnnnnnnnnnnnnnnnnnnnnnnnnnnnnnnnnnnnnnnnnnnnnaccccacgcgtccgggagagaactgtcctcattgtttcccaaccctctccgctattggaaggacgggttgggaaacaatgaggagagaactgtcctttctgtacagtcgtttctatgggatccttcttggaggcattttgataatgtaccagttccacaactacatgcagccgattctccttctcatgtactcattttggataccacaaatagtcgccaatgttgtccgggattcaagaaagcctctgcacccatattacatcttgggcatgacagctacacggttagctataccgttatatgtttttggatgcccacacaacttcatgcgtgtagagcccaacaaggtttggtgtatatgcttgtgcacattcatggggttgcaagccgtcattcttcttcttcagcattattttggttcacgctgctttgttccccgtcagatgctaccagagaaatacaactaccaccgaagatttaatcgggatgtaagccgcaccactgattgtgttatctgcatgaccgctattgatctca

SEQ ID NO: 122212 - DNA, 873 bp, Arabidopsis thaliana
atgatatgccagcactatacgactcacttagggaaagctggtacgcctgcaggtaccggtccggaattcccgggtcgacccacgcgtccgatttgattaacaggcttcttgtccatgagccggaaaagcgactgggggcgaacggtgctgcagaggtaaagtcgcatcccttttttcaaggagttgactgggagaatcttgctttgcaaaaggctgcttttgttccgcaacctgagagtataaatgacacaagctatttcgtatcacgctttagtgaaagcagttgcagcgatactgaaactggtaacaacagtgggtcaaatccagattcaggagacgagttggatgaatgcaccaacctggagaagtttgattctccgccttattatctctcgctcattaacttttctttcaagaatttgtcacaattggcttcaatcaatcatgatgtgctattgcaaaaggatccagctaaaggaggaggagactcaccctttaaaagccatggaacgtagagctctcctacaaccgtcaaaggtggccttagtccgctgttttctctggtttgcgccctgctttgaccgttgtagctgctgctgctactatgctgaaattgttacctcaaggtctttgggtaattattttcagttttgtcataaattgatttggaaccatttcaaatgcaaatccaagtatttattgcgtggcaacaacacacatatacatgtgtataagcttgtgtgtattgaggctgatggaaataagagagcgctttggttactgaattaaaaaaaaaaaaaaagggcggacgctctagaggatccaagcttacgtacgcgtgcaggcgacgtcataatcttctatagttgtcct

SEQ ID NO: 122213 - DNA, 1022 bp, Arabidopsis thaliana
  unsure (1)..(1022): unsure at all n locations
atgatcctgccagctacnnnnnnnnnnnnnnnnnnnnnnnnnnnnnnnnnnnnnnnnnnnnnnnnnnnnnnnnnnnnnnnnnccacgcgtccgctttattcttccatatctcttccatttcgctctctatttcacatccccatataacataatatacaatcacacatatcatttctatatagtatttaatggggagacagccatgctgtgacaagctaggggtgaagaaagggccgtggacggtggaggaagataagaagcttataaacttcatactaaccaatggccattgttgctggcgtgctttgccgaagctggccggtctccgtcgctgtggaaagagctgccgcctccggtggactaactatctccggcctgacttaaaacgaggccttctctcgcatgatgaagaacaacttgtcatagatcttcatgctaatctcggcaataagtaagcctaataatcatatattaattccacattttttttgaattcttacttaatgatttgtgtcatataatatcaacggaggcttaaaattttcaaatttatattaaaaattcaaattttacgttgtaacaaaaactagagacttaagataaacattggtttgatcatcataaaatataaagtcaattgcatgtgatccaacatgtttagtgtattaatgtgtgttgtgtaaattatgccaaatggttccaaataagttggtcaaataagtagaataagttttgatttgcattgatttttcgttgaaatcaacttcaagctacttcaagacaaagtaacgtccttctcttccaaagataatgttaacttattttgtcaatcttcttgtttttttataccaagattgtaacatatatatcccccaaccctttataaaatattatttatttttgtnnnnnnnnnnnnnnnnnnnnnnnnnnnnnnnnnnnnnnnnnnnnnnnnnnnnnnnnnnnnnnnnnnnnnnnnnnnnnnnnnnnnnnnnnnnnnnnnnnnnnnnnnnnnnnnnnnnnnn

SEQ ID NO: 122214 - DNA, 411 bp, Arabidopsis thaliana
tgagaaagcaggtggttaccgtctcttctttgtgctaatgccaataagatcgctataaacgcggctttaggttttgacagctacatggtaatgcgccatggtgctggccccacctctctgtctgatgatatgcagaatcttgacataaacaagacacatacacagagacttggttgttacttctgcaacgacgtggttgcacctcaggattcaatgactgatcgaactctagaccaacaatgcactgttacacgcccgggtctagctcctattgcaggagctctcgccgttgaactcttagtcggagtcctacaacacccacttggtatcaatgcaaaaggcgacaattcgagcttgagtaatacaggaaacaatgatgattcgcctctcgggatattacctcatcagata

SEQ ID NO: 122215 - DNA, 671 bp, Arabidopsis thaliana
  unsure (1)..(671): unsure at all n locations
nnnnnnnnnnnnnnnnnnnnnnnnnnnnnnnnnnnnnnnnnnnnnnnnnnnnnnnnnnnnnnnnnnnnnnnnnnnnnnnnnnnccacgcgtccgcaacaactttgagtgagttttttttttttgtcatttacctttgtcgcttcgacgtgagacgagccgtggaagaagacgaaagggctcttaagctctctttactcttttcttctcctcctctttttgagatgggaagccctaacgccgccgccgagacggatctaacaaccgatgatttcatcggagacacacgacgggactctggttctgatacagagaccaacaccgattgtgacggagaagatttgcctcttcttctgctacctgctcctcccggccacttcgaagaaggagagagagttttagccaaacacagtgattgcttctacgaagccaaggttcttaaagttgaatttaaagacaatgaatggaaatattttgtgcattacattggttggaacaaaaattttggggcggaatggnntaagggcttggnncttgtcctgtttgaaaaccattcaggattggtgnaatatttgnggaancaggaaaggancaagggtttnnaaacagccaagggnttaagaagtncctntgggctttggaaaaagtgnncaaaagatggaaaccttggaag

SEQ ID NO: 122216 - DNA, 2040 bp, Arabidopsis thaliana
  unsure (1)..(2040): unsure at all n locations
nnnnnnnnnnnnnnnnnnnnnnnnnnnnnnnnnnnnnnnnnnnnnnnnnnnnnnnnnnnnnnnnnnnnnnnnnnnnnnnnnnnccacgcgtccgcggacgcgtgggcggacgcgtgggcggacgcgtgggcggacgcgtgggcgaagtcatggaggaatcaaaacctggaccactccttacaactcagtcagctcgttgcatggattgtggaactccattctgccaccaggagaactctgggtgtcctctcggtaataagatccctgaattcaatgaacttgtctaccagaacagatggcaagaagccttgaatcgtctacttgagacaaacaactttccagaatttactgggcgagtatgccctgcaccatgtgaaggttcttgtgttcttggaataattgagaaccctgtttctatcaaaagcattgaatgtgctattatcgataaagcctttgaggaagggtggatggtaccaaggcctcctctcaagagaacagggaaaaaggttgctattatcggaagtggaccggctgggttagctgcggctgaccagctgaacaaaatgggccatttagtaaccgtgtatgagcgctcggacagaattggtgggctgatgatgtatggagtaccaaacatgaagactgacaaaattgacgtcgttcaacggcgggttgatcttatgaccaaagaaggtatcaactttgtggtcaatgccaatattggaaaggacccatcttactcccttgatggacttaaggaagagaatgatgcaatcgttcttgctgttggttccacaaaaccaagagatcttccagtgcctggtcgtgatctatctggtgttcactttgccatggagtttcttcatgcaaacaccaaaagtttacttgacagcaatcatgaggatggcaattacatttctgcaaaagggaaaaaggttgttgttattggtggaggtgataccggcacagattgcatcggaacatctatccgccatggatgtaccaacattgtaaacctagaacttcttcctcagccaccctcaacaagagctcctggaaacccttggccacagtggcctcgtgtattccgtattgactacggacatcaagaagctaccaccaaattcggaaaagaccctaggacctatgaggtcttaacgaagaggttcataggagatgacaatggaaacgtgaaggggcttgaacttgtgcgtgtgagttgggagaaggatgaaaccgggaggttccagttcaaggagatcgaaggctctgaggaaatcattgaagcagacctcgtttttttggccatgggtttccttggacctgagccaacacttgctgagaagctaggtctcgaatgtgacaacaggtcaaactttaaggccgagtatggccggttttccacaaccgtggaaggtgttttcgcagcaggtgattgtcggagaggccagtctttggttgtctgggctatctcagaaggacgtcaagctgcagatcaggtagacaaattcctcaccaaaacggatgatgacgaagacgccaagctacaacaagaccttaaccagatgaaacacaacactatcacaaactgaggtaaaagaaagccttactcatctgaagcaaaagtcgagagagaaagacaactgatgttactcttttagaggacacacaggcgtaaaggaccgacttatggcagagatgaaggaagagagttgcagaggaaaagtaccgaacttgatgatttagtagagagaagtaaaagtttaggtttgtttttgtttattatcgtccataaagtaataatgattcataagtacattctctttgtaggatttcagtagctttcttttgttaaagctttctgaaattgaaagccttttgttttttctctatggctgtttctaagtttgaattttaaggaattgtaatccagttcctgcttcttgttaaaaaaaaaaaaaaaaagggcgggcgctctataggatacaagcttacgtgcgggtgcatagcgacctnatagctctctatagtnnnnnnnnn

SEQ ID NO: 122217 - DNA, 554 bp, Arabidopsis thaliana
  unsure (1)..(554): unsure at all n locations
ccgcgccccccctcgaggtcgacggtatcgataagcttgatatcgaattcgcggccgcctgaggaagctgacgagactgaagagaaagaactcgaggagaaagatgcatttgcagaactgaagaacatggcagctgcttcgtcaaaagaggagatgtcaggaaacggagtgtcagctgaagctagaccttctaaggtagataatgctgttaaaaacggtggtttcattgcttatgagcgtgagggagttaagtacagggatcccaatgttcgtcttaatgactggaacgaagtcatggaggaatcaaaacctggaccactccttacaactcagtcagctcgttgcatggattgtggaactccattctgccaccaggagaactctgggtgtcctctcggtaataagatccctgaattcaatgaacttgtctaccagaacagatggcaagaagcctttgaatcgtctactttagacaaacaactttccagaatttactgggcggggatgccctgcaccactgtgagggtctcttgtgttttggataatttngaccc

SEQ ID NO: 122218 - DNA, 528 bp, Arabidopsis thaliana
  unsure (1)..(528): unsure at all n locations
nnnnnnnnnnnnnnnnnnnnnnnnnnnnnnnnnnnnnnnnnnnnnnnnnnnnnnnnnnnnnnnnnnnnnnnnnnnnnnnnnnnccacgcgtccgcttttacctttttcttctgttcaggtttcatttcctctcagagtttgatgatggcaaaagaagttgcagaaggcgattagccggtcacaatgaacgaagaaggaaacctgcattctatttcctaccgggtaagcgccataagcttcttcgcacctctcaagatgtagtaggcaacaagtttctggagaattcatcattggtattgccagagtcatttcctggtagtctcttatacagagtaatagatgaagacgaccaccgtacaagtagactcgtgagtttcaaagatgaacctacttgttccatgtttcctactaatgagcaaaacagcagcagaacttatgaatctaaaccagcaatttattccacggaagtatcctccatttgggacttacatgagacggcggcatcacgctctactcgtgctctctctc

SEQ ID NO: 122219 - DNA, 1042 bp, Arabidopsis thaliana
  unsure (1)..(1042): unsure at all n locations
taatacgactcatatagggaaagctggtacgcctgcaggtaccggtccggaattcccttgtcgacccacgcgtccgcggacgcgtgggaagaatctttcggaggcgactactgacgatgagttgaagactacttttggtcagtatggtagtatctcgagcgctgtagttatgagggatggagatgggaaatccaggtgttttggatttgtcaactttgagaatcctgaagatgcagctcgtgctgttgaagctctcaatggaaagaagtttgatgataaggagtggtatgtgggtaaagctcagaagaaatctgagagggaacttgagttgagccggagatatgaacaaggctcaagtgatggtggaaacaaatttgatgggttgaatttatatgttaagaaccttgatgataccgtcaccgatgagaagttgcgcgagttgtttgccgaatttggtacaatcacctcttgcaaggttatgcgggaccctagtggtactagcaaaggatcaggatttgttgccttctctgctgccagtgaagcttcaagagtgctgaatgaaatgaatggtaaaatggttggtggcaaaccgttgtatgttgctcttgcacagaggaaagaagaaaggagggctaagctgcaggcacagttttctcaaatgagacctgcttttatccccggtgtgggtcctcgaatgccaatatttacaggtggtgctccaggtcttggacaacagattttttacggtcaaggacctccaccaatcatccctcaccagcctggatttggatatcagcctcagctggttcctggaatgaggccggccttttttggtggaccgatgatgcagccaggtcagcaaggtccacgaccaggtggcagacggtcaggtgatggacccatgcgncatcagcatcagcagccaatgccttacatgcagccacagatggttgccaagaggncggagggtaccgnttancctttnctggntggtnagnaaacatgcccttaacgggtccaaattnncagggngggaantgtt

SEQ ID NO: 122220 - DNA, 500 bp, Arabidopsis thaliana
aaaactctgcacgaggcgttttccggttgtgttactatggtgtcctgtaaggttgctacggtccacatgggtcagcctagaggatatgggtttgtgcagtttgacactgaggtttcagctaagaatgctattgagaagctgaatgggaaagtgttgaatgacaaacagatttttgttggaccttttcttcgtaaggaggaaagagagtctgctgctgataagatgaagtttactaatgtttatgtgaagaatctttcggaggcgactactgacgatgagttgaagactacttttggtcagtatggtagtatctcgagcgctgtagttatgagggatggagatgggaaatccaggtgttttggatttgtcaactttgagaatcctgaagatgcagctcgtgctgttgaagctctcaatggaaagaagtttgatgataaggagtggtatgtgggtaaagctcagaagaaatctgagagggaacttgagttgagccggagata

SEQ ID NO: 122221 - DNA, 681 bp, Arabidopsis thaliana
  unsure (1)..(681): unsure at all n locations
ctctcttatccatttcctctctagacttccttaaatcgattctcccgaattcgagaacagagcctttttttctttaattccaactctttctctcttgttctgaattcgtggttcgtcggtattataaaaaaaaacatgacagggttctctgtgtctctttttgtgtcaaacttgtcaaatgtggcctcgtatttgtcgcccatcttcgagaacatcccctccaccaaggttgttcccgcacagatcgagaaagttgtctctttggtctctcgtaccggtcgcgatttgcagcgttacgatcacgctggctatcgtcaagtcgtcggatgtgtaccgtatagatacaagaaacaagaagtcaatggagttgaaacccaagtaatccaagttcttcttgtcagtgctcaaaagggcaaaggaatgttatttccaaaaggaggttgggagacggatgaatcaatggaggagctgctttnagagagcgntcgaaggagcgggtgtaacaggngncttgaagnaaaagctttgggaatgnaattcaaaannaaaangcattgnataattcccggtgggatttgttcttcttgcagcaagngttgccgtgcctnggggaattggcaccgagtgggnagtttgtacnaagaagtttcnaaattggggtaanncnctttcggttttncc

SEQ ID NO: 122222 - DNA, 894 bp, Arabidopsis thaliana
gaattgtattaggtcacactatagaagagtctatgacgtcgcatgcacgcgtacgtaagctcggaattcggctcgagggatcaaacgggggatcaggatctactgtctcatcttctaaagagccttgtaagccaagctggtgaacatatagggaggaatttagttgggcttctacagggtggaggaggactccaggcttctcaaaatattggaaacttatccgctttgctctcactcgagcaagcccctcgagaggatataaaacatcattcagtgtctgaaacgccttggcaagaagtgtatgccaatagtgctcaagagagagttgccccggataggtccgagaaacaagtcaaagtgaatgattttgatttgaatgacatctacatagactcagatgataccacagatatagagagatcatcacctcctccgacaaatccagctactagttctcttgattatcatcaagactcgcgtcagtctagtccacctcaaactagtaggaggaattcagattcagcttctgaccaatcaccttcaagttccaggtggagatgcacagagccgtactgatcggattgtgttcaaactctttgggaaagagccgaatgattttccagttgccttacgaggacagattcttaactggttagcgcatactccaactgatatggagagctacattagacctggttgtatcgttttgaccatttatcttcgtcaagatgaagcttcttgggaagaactttgttgtgatctgagtttcagcttgaggaggcttctagatctttcagatgatcctttatggactgatgggtggctttatcttagggtgcaaaaccaactcgcatttgcgtttaatggtcaggttgttcttgacacatctttacc

SEQ ID NO: 122223 - DNA, 481 bp, Arabidopsis thaliana
cccacgcgtccgcttcactctcttcttccccatcgaagactcgtcttcttctgcttcaatggccgaatttccagaaccgggcactgtaaaccctgactcggatctatcgaatggtcgagctgagaagcctgagatagacacttcggctccgttcgagtcagtgagagaagcagccactcgtttcggcggttttggtttctggagaccttctctcaataaactcccagatgcttctcaggaaaatatccaagaacctgatatcatgggactcaaagcacaagctttcgagctacaaagagaactaattgttaaagaacgcgaaacgctagaggtgttgaaggagcttgaggcgactaaagccacagtcttaaagctgcagcagaggaatgaagcttatgaggaggacacgttgagagaagaagttgacagtcatatcaagccagcgggtgtggttctaaaggatttaagccaggcgaagatg

SEQ ID NO: 122224 - DNA, 526 bp, Arabidopsis thaliana
  unsure (1)..(526): unsure at all n locations
aaccggaaaggttgcccccagttttcctctngngttgnngtttgccttcccattgccccatcgggggggcncagggttccccaatgcggnatcgtttggtccnagaagnggcgntgaccngggggcttccgcttcatttctccncggctntggccgccatgggaagcgtaaccngnggngtntggaagccattaagtatgttggtcgtggtccttctggctgcagctgccacgggtttctagactttccatgtcaaagagcaagccgggcttgtccagaaagccctcggaaaggaacccatcaattaaaaactcttcctttttagatgacttctcagactgataagagacaaaggagaaatctttgaaataagcactttgggtgatgcaaaagtgctacacaacactgtcaagatccgctgtccctttgtcactgttgtggtcccattgtttttgagcctggctcgccttgccagtcttaacattaacccaatatcttatattgatatacagttttgttattgctc

SEQ ID NO: 122225 - DNA, 841 bp, Arabidopsis thaliana
  unsure (1)..(841): unsure at all n locations
nnnnnnnnnnnnnnnnnnnnnnnnnnnnnnnnnnnnnnnnnnnnnnnnnnnnnnnnnnnnnnnnnnnnnnnnnnnnnnnnnnnccacgcgtgcgggtatgatggtcagggacctgaacattcaagtgcgaggttggaacgttaccttcagatgagtgatgataatccctatgtcataccagacatggaaccaacaatgcgaaagcaaattcaagaatgtaattggcagattgtcaatgccacaactcccgccaactatttccatgttctgcggcgacagatacacagagacttccgtaagcctctgattgtaatggcaccaaagaacttgctccgtcacaaggactgcaaatcaaatctctcagagtttgatgatgtccaaggccacccaggttttgacaagcaaggaactagatttaagcgattaatcaaggatcagaatgatcactctgatcttgaagaaggcatcagaagattggtactttgctccggaaaggtctattatgagcttgatgatgaacggaagaaggttggcgcaacagatgttgctatctgtagagttgaacagctttgtcctttcccatatgatctcattcagcgtgagctcaagagatatccaaatgcggagatcgtttggtgccaagaagaggcgatgaacatgggagcattcagctacatatctccacggctatggacagcaatgagaagcgtaaacagaggagatatggaagacattaagtatgttggtcgtggtccttctgctgcaactgccacgggtttctatactttccatgtcaaagagcaagccgggcttgtccagaaagccatcggaaaggaaccca

SEQ ID NO: 122226 - DNA, 873 bp, Arabidopsis thaliana
  unsure (1)..(873): unsure at all n locations
nnnnnnnnnnnnnnnnnnnnnnnnnnnnnnnnnnnnnnnnnnnnnnnnnnnnnnnnnnnnnnnnnnnnnnnnnnnnnnnnnnnccacgcgtccgagattgtagagcatggaactccaattcccgtgtctaaaactgaagtccggaagaatgatcttaaccctatttggaagccagtctttcttagtgttcaacaagtgggaagtaaggacagtccagtgataatagaatgctcagactttaactccaatggcaaacacagtctgattgggaaagttcagaaatcgctttcagacttagaaaaacttcatttggcgggccaaggaatcaatttttctttgcctactggtgctggacaaaacaaggtgttaaagagccaactttttgtggacaagtttaccgagactgtccaccacacattcctagagtacttggcatctggatttgagttaaactttatggtagcaatcgatttcacagcttcaaatggaaatccccgcctccctgattctttgcactacattgatccttctggacgattaaatgcctaccagagagcaataatggatgttggagaagtgttgcagttntatgactcagacaaacgtttccctgcctggggattcggagctcgtccaatcgacgctccagtttcacattgctttaatctaaatggaagcagttcatactctgaggtggatgggattcaaggaatcatgacttcatacaccagtgcccttttcaacgtctctcttgcanggcctaccctttntggtccagtgatcaacgcttgctgcatgatcgccagcgcgtcgctagctcaaggttcacgganatattacgtcttactgatcataacagatgggtgtataact

SEQ ID NO: 122227 - DNA, 967 bp, Arabidopsis thaliana
  unsure (1)..(967): unsure at all n locations
atacgactcacattagggaaagctgctacgcctgcaggtaccggtccggaattcccgggtcgacccccgcgcccgactacgattgttctgcccatatgatttgggtcggtgagcgaaccagacagctagatggtgcccatgtcgagttcttaagaggtgttgctaatcctcttggaatcaaggtgagtgataaaatggatccaaaggagctagtgaagttgattgagatcttgaatgctgacaataagcctggaaggattacaataatcacaagaatgggagctgagaatatgagagtgaagcttcctcatttgatcagagaagtgcgacgtgctggacagattgtgacttgggtcagtgatccaatgcacgggaacaccattaaggctccttgtggtctcaagactcgtccctttgacgccatcttggctgaagtgagagctttcttcgacgtgcacgagcaagaaggtagccaccccggaggaattcacctagaaatgactggtcagaacgtgaccgagtgcatcggtggttcacgcacagtcacattcgacgacttgggttcacgttaccacacgcactgtgatcctcgccttaatgcttcacagtctcttgagctctccttcatcatcgccgaacgtcttagaaagagacgcatcaagtctcaaaaggcttttgccctctaatcaaataaacattgcttataataatatctatctatataaatgtgtgtgtgtgtgaacttaatacaatctcatttatctttgattcaaatcttgagtcaaaagaacgcttaaggtttctgttttaatgttgttagtgagtattatttccattttggatttaatataatcatggatggttgggtttttgaaaaaaaaaataannnnnnnnnnnnnnnnnnnnnnnnnnnnnnnnnnnnnnnnnnnnnnnnnnnnnnnnnnnnnnnnnnnnnnnnnnnnnnnnn

SEQ ID NO: 122228 - DNA, 431 bp, Arabidopsis thaliana
  unsure (1)..(431): unsure at all n locations
agacaggtaccgtgaactagctaaccgtgttgatgaagcgcttggtttcatgcacgctgctggattaacgctcgatcatcccataatgcaaacaaccgacttctggacttctcatgaatgtttgctcttgccttatgaacaatcactaacaacgcttgactcaacctctggtctctactacgattgttctgcccatatgatttgggtcggtgagcgaaccagacagctagatggtgcccatgtcgagttcttaagaggtgttgctaatcctcttggaatcaaggtgagtgataaaatgggatccaaaggagctagtgaagttgattgaggatcttgaatgctgacaataagcctgggaggatttacaataatcacaggatggggagctgaggaatatgagggtgagcttcctcnttttgatcagagaggtn

SEQ ID NO: 122229 - DNA, 1556 bp, Arabidopsis thaliana
  unsure (1)..(1556): unsure at all n locations
atgtctnnnnnnnnnnnnnnnnnnnnnnnnnnnnnnnnnnnnnnnnnnnnnnnnnnnnnnnnnnnnnnnnnnnnnnnnnnnnccacgcgtccgattccggatccgttgtcgggtatgcccaaaaccgcctttttaggcaatttgctctgtgggaagccgttagatgcttgccctgtcaatggcactggaaacggtactgtgacgcctggaggaaaagggaaaagcgacaagttatctgccggagctattgtcggaatagtgatcggctgtttcgtcttgcttctcgtgcttttcttgatcgtgttctgtctctgtagaaagaagaagaaagagcaagtcgtccaatcgagaagcatcgaagcagctcctgttccgacctcatcagcagccgtggctaaggaatcgaatggtcctcctgcggtggtggctaatggtgcatctgaaaatggtgtatcaaagaaccctgctgcagtgagtaaagatctgacatttttcgtgaaatctttcggcgagtttgatcttgatggattgctgaaagcttctgcggaagtacttggtaaaggaacgttcggatcttcgtacaaggccagtttcgatcacggattagtggtggctgtgaaacgattgagagatgtcgtggttcctgagaaagagttcagagagaaattgcagggttcttggatccataagccatgccaatcttgtgacattgattgcatattacttcagccgcgacgaaaagctcggtgttttcgaatacatgtctagaggaagcttgtctgcgctgttacacgggaacaaaggaagtggcagaagtccattgaattgggatacgagagccaatatagcattaggagccgcaagagcaattagctacctccatttcgcgtgacgcgacaacatctcatggccacattaaatcatctaacattctattgtcagaatcctttgaagctaaggtctctgactactgtcttgcacctatgatcagccctacttctacacctaaccgcattgatggttaccgagctcctgaagtaaccgatgctcgtaaaatctcccaaaaggctgatgtttacagcttcggtgttctcattcttgaattactcacagggaaatctccaacgcatcagcagttacacgaagaaggagtagatttaccgagatgggtttcatcgatcactgaacaacaatcaccatcagatgtgtttgatccagagctcacaaggtatcaatcggacagcaatgagaacatgatcaggcttttaaacatcggtataagttgtacgactcagtatccagatagtcgtcctacaatgcctgaagtcacaagactcatcgaggaggtttctcgttcacctgcttcaccaggtcctttgtccgattgattgtatttttctttttcaatatatggggtctaaattgatcatttcaaaattgtttggtctaaatttgaatttctttaaaaaaaaaaaaaaagnnnnnnnnnnnnnnnnnnnnnnnnnnnnnnnnnnnnnnnnnnnnnnnnnnnnnnnnnnnnnnnnnnnnnnnnnnnn

SEQ ID NO: 122230 - DNA, 693 bp, Arabidopsis thaliana
  unsure (1)..(693): unsure at all n locations
gagggttttgaagagtctctctcgtcgccgtttgttattcctctgtgagcaaatcgacgaaatgggtcactctaatgtatggaactctcatccgaagaagtacggtcctggatctcgtttatgccgtgtgtgcgggaactcgcacggtctgatccggaagtatggtttgaactgctgcagacagtgtttccgtagcaacgctaaggagattggattcattaagtaccgttaatcaagcaccaacttcatgattgatgcttaatgatataaacatgaaggcgtcgatgggtatggcttttaagcttttgtagtttttgaaatttttacttttgagaaccattgttattttgggagttaattaagttgttgaacctcattaagcatgtcttattttggattaatgatgttttggctattcccgtatttttgttttatcagtcaaatttgactaaagaagaatttgcttgttatcagcctaaaaaaaaaannnnnaaaaaaaaggggggccgcnccagaggggnccaagcttacggaacgcgggcatgcgacggcaaagccctccnanagggcncccaaaatccaatcncnggccggcggttaaaacgccggaccngggaanccnggnggncccactaancgcttgagaaacccccttcccaccggggaancgaangcccnccgtncctccaagtg

SEQ ID NO: 122231 - DNA, 404 bp, Arabidopsis thaliana
gagtctctcgtcgccgtttgtaattcctctgtgagcaaatcgacaaaatgggtcactctaatgtctggaactctcatccgaagaagtacggtcctggatctcgtttatgccgtgtgtgcgggaactcacacgggcttatcaggaagtatggtttgaattgctgcagacagtgtttccgcagtaacgccaaggagatcggattcattaagtaccgttaaagaggcctttgactgatgcttataatacacaaacatgttggtgttgatgaattggcccttcgaatcttttaagttgttgttgcattcttcttttaaaagtttaaccccttatttgggacaatgatctttttgggtttttggattaataattttgcttgttaaattataggcccatttttgggcatt

SEQ ID NO: 122232 - DNA, 807 bp, Arabidopsis thaliana
  unsure (1)..(807): unsure at all n locations
nnnnnnnnnnnnnnnnnnnnnnnnnnnnnnnnnnnnnnnnnnnnnnnnnnnnnnnnnnnnnnnnnnnnnnnccacgcgtccgtgactctgaagaactctacggtggtggtcgccgccgtcgatacccattccctgttcctcggtttccaatgggagcttcgaagttcgacgtttggacctctgaacctgcttctgtctctgagaggcgttccaagcttttaaacgaaatgggtcttagccgtgacccggttctctcccggttaaaacccgtttcagattcttccagctccaaagataccggagccgccggcttcgagatttctcgatcgatctcgtgtaatcaattggctcggcgagatcatggagagtgttctgaaagtgtcggcggttgtgcttcttgtatcgtgagatcgaaatccgacattaccactagccaatgtggtgatcgtgaccgtcgatatacgtctnctggtaatccttgttcttgttccgtctctaaactctctgttcatcattcttcacattcagagatcagtagaaccagctcgccatttgtgaattgcagtgtaggatcagttagtgctgattcattgcggttaaatggagattctgattgtgtactgagagagagtgtagtgaatgaggaagtggaagtgtgtactattaagaaatcttgatatgggaaagagtttgtggtgaatgagattcaagatgatggtacatggaagaaggtgaaggaagtggaactggaaccagatgacatggaggagttgagatgtggttgacttctccattgtcaggagctat

SEQ ID NO: 122233 - DNA, 929 bp, Arabidopsis thaliana
  unsure (1)..(929): unsure at all n locations
atgatcctgnnnnnnnnnnnnnnnnnnnnnnnnnnnnnnnnnnnnnnnnnnnnnnnnnnnnnnnnnnnnnnnnnnnnnnnnnnccacgcgtccgcccacgcgtccgaatttgtgggatttccaagctccagtttttcgaatatggcggaagtaagtcttggtatgcttatagacattgtggacgaagagtggatgagggacactttgcctgatgatgatcttccattgcctccagtgcttgctgttaaaactgatgatactgaagaaaccagtatggctctttgtttttttctttgctttgctttacagtttacatagctttatgattcttaaggtctaaattctttggaatatagtcttttcttaaaactgctagctgtgaatccacactggtgatgcatttctgatccaagatgttaaacacccatattgagaccttgaaatgtcataaggaaagtaatggagacacatacgtcactttttgtgtatgtttcaaacatagtaaagctcaaatttgagctttgtttcagagggtttctgagatttaacaactttcacttccaagatacctatgaatcttcatataagcagcttgactaatataatccctcacattgtgattgtttcagatcaggaaactcagcaagcagatgctgaaacttggcgtgatctagctcttgatacccagtaatagcctcttaagtacaatggaaaattcttacaagtcttgtttctcgttgtgtatgatcaaaaccaaaactgttcctggctttgtatttttttttggtaaaaaaggggggcgaaccccccttttttttaaaaaaaaaaaaaaaaaaaaaaaaaaaaaaaaaaaaaagggcggccgctctagaggatccaagcttacgtacgcgtgcatgcgacgtcaagactcttcntatagtgtcacc

SEQ ID NO: 122234 - DNA, 479 bp, Arabidopsis thaliana
ctcttctcaagtctcttcttcttctccgtccttcccaattcttccgttcaaacaaatttctccaaacccaaaccctaatttcctccgtctgtgaaatcaagggttttctctgatctgggttttgatcagaaatcagatctaggtttaattttcgaaatcaaattatgaggaagagagaaagagagaacccttgttcgatttgtgggcattaccataagtacgaggaaggagaagtatgtggagtctgtggtcactgtatgcctgtttcttccgatacggtggcgccgcaacaagtccacgtcagtgcttttccgtcggagattctccctgagtttctttacctcggtagttacgacaacgcttctcgctctgagcttcttaagactcaaggaatctttcgtgttcttaatacggttcctatgtgccagaatctctacaggaattcattcacttatcatggtcttgataatgaaaaagtt

SEQ ID NO: 122235 - DNA, 542 bp, Arabidopsis thaliana
aatttaaagaaaatttttccattttttttttttactctatctctgggagggattctcttcaagctcaggcctttaggctttaggtttcttttgggagtcttcttgagctctgtaatcactctctagaagcttattttgcctcctaatgttattagggtgttgtactggaatctttaggatgaaccaaggaagatgagtctctcggtctttcaaaaaccaagtcttgtaatgaggagctgtccactgttgtaaagtaagtcattaagatggaatcctttgcaggttcttgtgaaattgttgaggagaaggatgcggtaaggttagccaaacattctagcagatattgtatgtcacctttgggatcaagtaaagatatggagcagcgtcctgcattgaagtcagggtaccaaggttctatggagtatgacattgatcagcttttccagtctataactataaaaccatcacctagaagagtgatgggctcttctttcatcatcttgagacgagcgcaagtgctggtacgagcaggagcacaagcc

SEQ ID NO: 122236 - DNA, 820 bp, Arabidopsis thaliana
  unsure (1)..(820): unsure at all n locations
nnnnnnnnnnnnnnnnnnnnnnnnnnnnnnnnnnnnnnnnnnnnnnnnnnnnnnnnnnnnnnnnnnnnnnnnnnnnnnnnnnaccacgcgtccgcggacgcgtgggcggacgcgtgggcggacgcgtggggcagcgacaagcttcaagtcttttgtgatcttcctatttctgacgctaattcgaatccttcactcttcaaattgattctttcacggatcaaacaaattatctgagagtaccgattggtaagatctgagctttacgctatgaatttcttcaaatccgtcttcacggaagacctagatcctccagaaaccgaatccgaatccgattcaccgaaacacagcgaagagcatgaacatccagagcaagaacatccagagcaatctgaatctaacgacgacggtggatggagcttcggtggtctgatgaaaactctagccaccagatccgaatccgtgattgaaacctaccgacgagatctcgaagaatttggcacaggtttgaagaaagagatcgaggtggctcagggatcgcttggtacggtgggacatgcgattgatgagcttgggaacacggtgctaaaaggtacggctgagattattgctcaaggtaaggaagcgattttagccgctggtaatgaatctgattcttctgataacaatagtngtcagagttttggtcgtcgtgatagcttcagttcgnaancatataggccgtttcgattctcaagattccgtgcttgttccaaggaggtctcaacactttnctttttnnagagncttaagggnttcanattnnttncaaaaatntggggaa

SEQ ID NO: 122237 - DNA, 490 bp, Arabidopsis thaliana
taatacgactcatttagggaaagccggtacgcctgcaggtaccggtccggaattcccgggtcgacccacgcgtccgaaaacactctctcaacaaccatggcttcgcttccggtgaagcctctaccttccggccacttacagcttcatagccggaatcttattattccgccatcaatggtaaccgttggtttcaaaaggcatcacttcttaggagtctcttcttatggtttatgtattgatgaatctgtaaggcatatgagaagcctaaggtcgtcgagcaatcgtcggcgagtaagtaaaagcgccggcgtgtctatgccggtggcttcctctgatgattttccagcggtttcttgggagtcttggaagccggaaaagaccaccggtggctccgtcgctgagtgacgtcatctggcctgcagcaggagccttttgcggcgatggcgataatgggaagattaaatcaaatgctaacccctaaagggatctc

SEQ ID NO: 122238 - DNA, 753 bp, Arabidopsis thaliana
  unsure (1)..(753): unsure at all n locations
agctccctacgactcactatagggaaagctggcacgcctgcaggtaccggtccggaattcccgggtcgacccacgcgtgcgaaacaattactacattttacaaaacaaatggcgaatctagctgcgtccacttgcctatactcatggctccttgttttgttattgagttcagtctcagcaatcatagatgaagatacacaggtgtatatagtctacatgggttcactttcgtctcgcgcggactacataccaacgtccgatcacatgagtattcttcaacaggtcacaggagaaagttcgatcgaaggtcgcttggtgagaagttacaagaggagtttcaacggcttcgcagccaggctcactgagtcagaacgtacattaattgccgaaatagagggagttgtgtctgtgttcccaaacaagatattacaactccatacgacgacgtcttgggacttcatgggggtgaaggaaggaaagaatacaaagagaaacttggccatagaaagtgatactatcatcggcgtcatcgcacttgggattttgcccgaatccaggagcttctccgctaaaggctttggcccccctcctaagcaatggaaaggtgtttgttcccgtggcaaaaacttcacctgcaaccaacaagttgattttggggcaagagncttcacangcgnaggtncaanggggccacttagttngccncgggtacaacanaacggnttcnccagcagcttggaantnnagtcaang

SEQ ID NO: 122239 - DNA, 440 bp, Arabidopsis thaliana
caaacatacaaaaaaaaaacatttctttttataactcttctctagtcttctccaaatggaatggactagaggaagaatcctaggccgaggctctacagccaccgtatacgccgccgcaggtcacaattcagatgaaatcctcgccgttaaatcatctgaggttcaccgctcagagttcttgcaaagagaagccaagattctctcgtcgttaagttctccttacgtgatcggatacagaggatcagaaaccaagagagagtcaaacggtgtcgttatgtataatcttttgatggagtacgcaccgtatggaacgttgaccgatgcggcggcgaaagacgggggaagagtcgacgagactcgggtagtgaagtacacgcgcgatatactaaaaggattggagtatatacactcgaaaggaatcgtgcattgtgatgtaaagg

SEQ ID NO: 122240 - DNA, 396 bp, Arabidopsis thaliana
  unsure (1)..(396): unsure at all n locations
ttntccaanggccccttncctcattggctcccataagttctataatgaccctttacgaaggagatgtcatcttgacaggcacaccagaaggtgttggacctgtaaagataggtcagaagataacggccggaatcaccggtctatctgaagttcaattcgatgtggagaggcgtgtaaagcccttgagctaataagtggttttatttatctttcatacaaaaatgtcaattttataaaagcatctctaaaattttcatcacttactgtgtttcctaaggaagggagaaataaaactcgttactcattttatttgtaatctctataacaatggctctaagaccggtttaaattgtttatatgggagagtatttgtaaagttgtgatatttactgttgg

SEQ ID NO: 122241 - DNA, 806 bp, Arabidopsis thaliana
  unsure (1)..(806): unsure at all n locations
atgatctnnnnnnnnnnnnnnnnnnnnnnnnnnnnnnnnnnnnnnnnnnnnnnnnnnnnnnnnnnnnnnnnnnnnnnnnnnnccacgcgtccgcccacgcgtccgctaccagacaatcatctcaaaagcaggaagggagaacccaatcccgtggaacgaagtgaaatgcgtgctgtggttccttaacccagacagctatgctgatactcctgagaagcagaaaactattctgcagaatttcttcgagcacatggcaatcagattactcggcgataagctttacaaaatccgagtagttctcacaatgaacaacgtcagattctcactcttacaggttgagaagctagccagagaaagcttcttcttccttggagagtctttcccacacgattcagaaagctttggtgcattccaagacacattaacaatccagaagcctatgctagtctccagaccaatctcctatgtctttaatctccatccgccttctgacatccagtttggtaactacacctctcttcttcgcaaatctcttcacaacaaatgatctcttggtgagaaagaaaagacaaaaaaaaactcttaccttttgatacttttgtcgtctctgttcctaagtcatcatatgttttgtgtttcatggcgatcaagtgaatggccataaccatgtaattcatgtgacgatctcttacttttctatctgatgctatctttaattaaaaaaaaaaaaaaaaagnnnnnnnnnnnnnnnnnnnnnnnnnnnnnnnnnnnnnnnnnnnnnnnnnnnnnnnnnnnnnnnnnncacc

SEQ ID NO: 122242 - DNA, 525 bp, Arabidopsis thaliana
  unsure (1)..(525): unsure at all n locations
nnnnnnnnnnnnnnnnnnnnnnnnnnnnnnnnnnnnnnnnnnnnnnnnnnnnnnnnnnnnnnnnnnnnnnnnnnnnnnnnnnnnccacgcgtccgaaaaaaactagaaactctctgaatctcacaagaacattgcaaggtaaagaaaccacaagatcatcactcgaagtaaaaatggtgagcccatttagatctccatgttcttcacccaaaaaatcaagaaaagcaagcaagaacccttattcaaatcgtggacttgataaattctctgagcttctctccgagctagacgagaagaggcaaagcatctactcgaagaagctcgattccggtggcccgcctcttgttcgatttgtgttcacaagctccggtgagtgtgtccccgttgtgatcagatcatcttatcttcacaagaagaacaagaagacgaaagatgttgtagctgataaagtcaaaacagaagtcacggaagcataggcagaggaaatcaagatcacagagcctgaaacagagcaaaaacagagct

SEQ ID NO: 122243 - DNA, 622 bp, Arabidopsis thaliana
  unsure (1)..(622): unsure at all n locations
gagacttttaacactcagacctaaaccaacactcttcctctttctatctctctctcgccgatcggaagcagatttttctcaaaaggatggattcaacgaagcttagtgagctaaaggtcttcatcgatcaatgcaagtctgacccttcccttctcactactccttcactctccttcttccgtgactatctcgagagtcttggtgctaagatacctactggtgtccatgaagaagacaaagacactaagccgaggagtttcgtagtggaagagagtgatgatgatatggatgaaactgaagaagtaaaaccgaaagtggaggaagaagaagaagaggatgagattgttgaatctgatgtagagcttgaaggagacactgttgagcctgataatgatcctcctcagaagatgggggattcatcagtggaggtgactgatgagaatcgtgaagctgctcaagaagctaagggcaaagccatggaggccctttctgaaggaaactttgatgaagcaattgagcatttaactcgggcaataacgttgancccgacttcagctatttatgtattggaancagagctagtggtctncantnaaggtnnaggaggccaanngngctnatt

SEQ ID NO: 122244 - DNA, 560 bp, Arabidopsis thaliana
  unsure (1)..(560): unsure at all n locations
nnnnnnnnnnnnnnnnnnnnnnnnnnnnnnnnnnnnnnnnnnnnnnnnnnnnnnnnnnnnnnnnnnnnnnnnnnnccacgcgtccgagtgacattagtttgttgttgactactgtaagggttgggtttcgaaaagagacatggaggagtgttattaggttgattgttctcaagtacctccagtgtcaaacaaacattgacgattgattctcttcccataatttattgttatgcattacatatcacagtaaacggactttcagtcaacaccgcatttatttgccctcttcattgtttcacgtacgtaatcaaggaccaagggattttcttcttttggctaccatggccacaagatgcttttggtgttggaccactttgctcttctgctctcagctgcttaccggctttgcccgagcttcctctgcaggcggcgccaaagagaaaggactctcccaaactcccacctgggccgttgccctcgtctgtaccttcttcattcttgtctccgtcctcctcgagaaggctcttcacagagttgccacgtggttgtgggagaaacat

SEQ ID NO: 122245 - DNA, 790 bp, Arabidopsis thaliana
attatatatataactcaacaaaatctctctgtccaatttccaaagtcaactcctttttggtttttgttttactttctgttttcctcttctctactctggaacaacaactacacacacacacaaaaaaaaacaattttctgtctatatatatattaaggatccaaattagggagagaccaaagaggaaattaataacaatcaatccaacaacgaatggagattgaagaagcgagtcgtgaaagtggacatgttgtgtgcggatcatggattcgtcgcccgaagaaagtaaactgggttcttatcgctaaagcttccaaacgccgtggctcatctgtttcttctcctgctctcctcaacatcttctcttttgaccccattactgcttctctttcctcctctcctttggcaacacacacgcttaaggatagtgatggtgatcctgtggctgtttcagtgcaccctggtggggattactttgtttgctcaacctccaaaggtggttgcaagttatttgagcttgtcggaggagcaacaggtattacgatcttagccaaagaactccttcctctccaaaatgctggactacaaaagtgtatggccttcagctttgatgggtctaaattagctgttgggggagtggatggatgtcttagaattatggagtggccaaacctaagtgtaattttggatgagccaaaggcacacaaatccatccgggacatggattttagtcttgactcagagttcttagctaccacatcaactgatggatcagctagaatatgggaag

SEQ ID NO: 122246 - DNA, 593 bp, Arabidopsis thaliana
  unsure (1)..(593): unsure at all n locations
atgattttcgccagctacaatacgactcacctaagggaaagctcgtacgcctgcaggtaccggtccggaattcccgggtcgacccacgcgtccgctaaaaccttaactttttgctcttctccctccgcctcaatcgcacgaagacgataatcgaatatggcggaactaaagctatcagagagtcgggacttaaccagagtcgagcgaatcggcgcacactcacacatcagaggactaggtctcgactctgccctcgagccgcgagctgtttccgaaggtatggtcggtcaagtgaaggcgcgtaaagccgccggtgtaatccttcagatgattagagaagggaaaatcgcgggtcgggctattctaatagcgggtcaacccggaacgggtaagacagcgattgcaatgggtatggcgaaatctcttggcttggaaactccttttgcgatgattgcaggaagtgaaattttctcattagagatgtcaaagacagaagctttgactcagtcttttcgtaaaagcgatttggtgttgaggctcaaaggaaggggccagtggttntttaaaggngaanttttttnggttcaaatttt

SEQ ID NO: 122247 - DNA, 426 bp, Arabidopsis thaliana
ctttcatctccagatctgctgctgaagataaattagtcagcaatcgtcatagctatggcgattagggtttttcttacccttctcctcttcgtatcatctgcaattctatctttctctctttatgaagatcaagccggcctcactgattggcaccaaaggtacattgggaaagtgaagcatgcagtattccacactcaaaagactggaagaaagcgtgttatcgtctcaaccgaggagaatgttgttgcttcacttgatctcagacatggggagatattttggcgacatgttctcgggacaaaggacgctatcgatggggttggtattgccttgggaaaatatgttatcactctttcatcagaaggaagtactttaagagcctggaaccttcctgatggtcaaatggtgtgggaaacatctctgcat

SEQ ID NO: 122248 - DNA, 384 bp, Arabidopsis thaliana
ctcttccctcctccgcttccaaaatcagcgagagagggagacacatagagagacagagagattgctcctaatcagaagcaatctcaccattgaatcatctattttctaccaaaaggaagcttcttttgcttttcattttgccaagtttccgtctaaatctctctactttaaaactccggcggccaacgtttccaccgatcctccgacttctttccgagtttcatcttctaacaaaggaacgaagaagctctcttcaccgtttgagtaacgtgatccggtctacaaagaaatcagtctgcgggagaaagtggaagaagactgaagatgaagagagctagagaagatgttcacactgacactcaaaagcgaaagcctgaagtttcg

SEQ ID NO: 122249 - DNA, 593 bp, Arabidopsis thaliana
  unsure (1)..(593): unsure at all n locations
acgaatccttgtccttccttcctcaatcaaacaacaccttctttaatccagaacaaaaaaaaaacaaacagaagaaaaaaaaaaaaaaaaaactacaaaaaaaaaatctctgcccgcttctccgttctcggggttgcgtcaaaattgcaccaaattaatcaaaacctacccagaaatcatttttggtcacaggggataggcgggcagatttaaattttcttcttttgttcttctgtttgaatttgtattgattcgtgaaattgtgtttgtttgatggggtttttggtggatacgcaaaaggaaggaggtggacattcatggggttacgttagaagtttggttagaaggaaacaagtcgactctgctaatggccaatctcatggtcaccaacttgctagagccctcactgttcctcatctcgttgcaattggtgttggagcaacaataggagctggagtttatattccttgtaggacagttgcgagagagcattcaggaccttcncttgctttgnctttnctaattnctgnaattgcttcnnggctttctgcgnttttgttatgntnanctntctnagnggtgncccttnanct

SEQ ID NO: 122250 - DNA, 482 bp, Arabidopsis thaliana
cacattttcacttgttaaaattttgttactttgctctatctgaaaccaaagctgccatctttctccttttgggttttgattagatctccgattttgggtttctatatattatgcgagctcacttttgttcgttctgattatctgacaatgatattctccaagcttggttcttccctcgctcgatcctcacgttctaagggatttgtgtacggcggtggtgtgagatcggcggtatttaaccaagggaggttacgagcgccgcagaatctcgaggcggccgtcaatcaggtggatggtggattagggtttttgaggcggcactttgcttcttttgctgctcgaaggggactagaagccggtgatttaagccgtgctttcgctaaccctagattgcgtgggttcttttctagtctaaccccatagaagaagaattatgagaactactatccaaaagacagtaaggaagcccccatgaatgagca

SEQ ID NO: 122251 - DNA, 496 bp, Arabidopsis thaliana
atttagcagcgaagcgcacacaaagtttgcttgccttctgggcttcacgattctcacgacatctgtttatcttctccgatttccacgtccatggatctcagtcaatgttccttaatctctcttttcgattagtccaatctccactaatctctgacctcagatcgcttccgacgccgctgaactgtgtccgtcttgatctgtgtttaggagaaagcttctagggtttttgttttggttgctgagtagaatttgttggatctgaaacggaaatcaaaatgggctttttcagtacgatactaggattttgtggatttggagttgggatttcattgggacttgttattggttacgttctcttcgtctacttgctccccaacgacgtcaaggatcctgaaattcgttcaatagctgaccaagatcccaaagctatgctacggatgcttccagagatacctctatgggtcaaaaatccggatttcgatccgttttgacctgg

SEQ ID NO: 122252 - DNA, 428 bp, Arabidopsis thaliana
accacgcgtccgcccacgcgtccgaaaagagaatctctcagaaggtgagcctccaacaaagcgtgaatctctctttctctctctatctctctatctccgagatcgcatcaccggaaatctccttctacggtggtggtggtgacagttgaccagagatggcggcggagaatgagagaaaatctccttcagcagtctccgatatgggagcttgggcaatgaatgtgataagctccgttggaatcatcatggcgaataaacaacttatgtcctcttctggattcgcatttagtttcgctacaactctcaccggtttccacttcgctttaaccgcattggtcggtatggtatcaaacgctaccggattctctgcttcgaagcatgtacctatgtgggagcttatttggttctccattgtcgctaatgtctct

SEQ ID NO: 122253 - DNA, 569 bp, Arabidopsis thaliana
  unsure (1)..(569): unsure at all n locations
cgcgtccgcaagacgcgtgggcggacgcgtgggatttcaaacacaaaagtttcgtctccgatttaatctttctacgtcttggtttatgagctcaaaggagaagcccactctcggaggtacgcggattaagacccgcaaaaggaatattgctgctcctctcgaccctgctgctttttctgatgcactagttcagatttatctggataatgctggtgatctggaacttgttgccagaagtttagagtcatctgatcttaatttctcaagatacggtgatattttctttgaggttgttttcattggaggacgtactcaaactggttcagtgaaatctgatgaaggggaacgccacccttactctataatcgactgtgaaccaaagcgtgaagctattttaccatcagttgtatacatacagaaaattttccggaggaaagccttccttattaagaaccttgagaatgttacacggggattcttacagtcaccttgggggcttttttnaggaggaattagaggaaggaagcttcaatattcacagcacttcatttttcacaagaggtcccagg

SEQ ID NO: 122254 - DNA, 1228 bp, Arabidopsis thaliana
  unsure (1)..(1228): unsure at all n locations
cggacgcgtgggcgttcttggtgagctaactacccaacctgtgaagctacccccattctctctcaacgttttcgttttgaaatggcgaggaagaagatcagagagtatgactcaaagaggttggtgaaggaacatttcaaaaggctttctggcaaagagcttcctatcagatccgttcagattaatgaaacaactgatctaaatgagctagttgaaaaggaaccttggctctcgtctgagaagctggtggtgaaacctgacatgttgtttggaaagcgtggcaagagtggtttggttgccttgaaattagattttgctgatgttgccacttttgttaaagaacgtttgggaaaagaggtagagatgagtggatgcaaaggacccataacaacattcatagttgaaccatttgttccacacaatgaggagtattatctcaatgttgtctcggatcggcttggttgcagcataagcttttctgagtgtggaggaattgagatcgaggagaactgggacaaggtcaagacaatatttttaccaacaggtgcttccctgacacctgaaatatgtgcacctcttgtcgcaactcttccctttagagatcaaagctgaaattgaagaatttatcaaagtcattttcaccctattccaagatcttgatttcactttcttggagatgaatcctttcactctagttgatggaagtccttatcctctggatatgaggggtgagcttgatgatactgctgccttcaaaaactttaaaaaatggggcgacattgaatttcctctgccatttggaagagtaatgagtcctacagaaagctttatccacggactggatgagaagacaagtgcgtctttgaagtttaccgttctgaaccccaagggacggatttggacaatggtagctggtggaggagcaagtgtcatctatgcggatacggttggagatctcgggtatgcatctgaacttggcaactatgctgaatacagtggagcacccaaatgaagatgaggtttttcaagtaccgccagagtcgttacttgtttgtccttcagcaaaccccggatggaaaaancagagcccttttnaancggaggggganttccaacttaactacggttcttctnncttcaatngnaaaatcgggctttaaagnaaaggaggaanctgaacngcaaaggttcantntttttggggggggccacnccaaggcttntaatc

SEQ ID NO: 122255 - DNA, 680 bp, Arabidopsis thaliana
  unsure (1)..(680): unsure at all n locations
cgncgtccggtttaccgttnctgtaaccccaagggacggatttggacaatggtagctggtggaggagcaagggtcatccatgcggatacggttggagatctcgggtatgcatctgaacttggcaactatgctgaatccaggggagcccccaaagaagatgaggttttgcagtaccccagagccgttattgattgtcctacagcaaacccggatggaaaaagcagacccttgtcatcggaggcggaattgccaacttcactgacgttgctgctactttcaatggcataatccgcgctcttaaagaaaaggaagcaaagctgaaagcagcaaggatgcatatatttgtgaggagaggaggaccaaactaccaaaagggacttgctaaaatgcgagcccttggagatgatatcggtgtccccatcgaggtctatggcccagaagcaaccatgacaggtatctgcaaggaggcaatccagtacatcacagcagcagcataagcttctctcagtaccttctatgaccaaaactttgtctgtgttttagagcctttatttactgtggttaagattactcaagctataagatacttgcaatttcttgaaaacttctgttgttcgattctctttcccctaacgttttcttcagattcaataaataatcgttactttttaaaaaaaaaa

SEQ ID NO: 122256 - DNA, 805 bp, Arabidopsis thaliana
atacgactcactctagggaaagctcgtacgcctgcaggtaccggtccggaattcccgggtcgacccacgcgtccgatccttttctctctctctctctcgattctagcttcatcgctgttccaaatttaggaagtttctgaggtgggtttctctttctttctttcctttctcgtcttttggctgcgtctgtttctaggttttgttctgagtcttgacaaaacccaaattccaagttcacatcttttctagttgttttcatgtttaagatttttggtcccttctgacttggacatagattctattgaggaattgagtagtaattgaaatggatctatgcctgctttactagttagttacaagtcaaatctctgaattgcttctgattaattgcagaaacaggtcacaggtctgtcttacatagttacattgatgggttgctcctggttatcgtgtcacaggagagaagctacagaagttgatggagaaatcgcagcgatagacaatgtaaagatatacaaatatagagagatacgtcaggccactgatgatttcagtgctgaaaataaaattggagaaggagggtttggttctgtgtacaagggctgtcttaaagatggaaaactcgcggctatcaaagtcctctcggctgagtcaagacaaggtgtaaaagaattcttgactgagatcaatgtgatatcagaaatacagcatgagaatttggttaagttgtatggatgctgcgtggaggggaatcataggattcttgtttacaatttccttgagaacaatagtcttgataagacgc

SEQ ID NO: 122257 - DNA, 588 bp, Arabidopsis thaliana
  unsure (1)..(588): unsure at all n locations
nnnnnnnnnnnnnnnnnnnnnnnnnnnnnnnnnnnnnnnnnnnnnnnnnnnnnnnnnnnnnnnnnnaagattcttttttncncccacgcgtccccccacgcgtccgagttagtgtgtctctctcgccggccgatatggccgcctccgtagcaaactgctgcttctccgtcctcaatgcctccgttaaaattcaatcttcgtccatctcctcaccgtggtgtttcgtgtccgcatcgtcgttgactccccgagcttcctccaatattaagaggaaatcgtcgaggtctgattcaccatctcctatattaaacccagagaagaattacccaggtagagttcgagatgaaagttccaatcctcctcaaaaaatggctttcaaggcttttgggtcacccaaaaaggagaaaaaagagtctctttctgattttagtcgagaccaacagactgatcctgccaagattcacgatgcatcctttctcaacgctgttgtcaaggtttattgcactcatactgctcctgattactccctcccatggcagaagcaaaggcaatttactagtactggaagtgcttttatgattggagatg

SEQ ID NO: 122258 - DNA, 515 bp, Arabidopsis thaliana
ctatacgactcacttagggaaagccggtacgcctgcaggtaccggtccggaattcccgggtcgacccacgcgtccggaaaaaaaaaccttcaccgtctctgctccgcgacgccgccttcgctttctcaaactccgatataatccttctcagagatatgtcagtaatggatgaatcaggcatgtttaacgttcaacaaaccattggaagtgtattgtgttgcaagtgtggtgttcccatggcaccaaacgcagccaacatgtgtgtgaattgtcttcgttccgaagtcgatatcaccgaaggtttacagaagagtattcagatcttctattgccctgaatgcacttgttacttacagccaccaaagacttggatcaaatgtcaatgggaatctaaagagcttttgacattttgtatcaagaggttgaagaatctcaataaggttaagctgaagaacgctgaattcgtttggactgagcctcattccaagaggattaaggttaagttgactgttcaa

SEQ ID NO: 122259 - DNA, 615 bp, Arabidopsis thaliana
cgctaaccctaggtcatggctgggatgtacaatcaagacggcggcggaggtgcgcctattccgtcgtacggtggtgatggatacggcggagggggaggttatggaggtggtgatgctggatatggtggacgcggtgcctctggcggaggtagttacggcggacgcggtggttacggtggaggcggtggtagaggaaatcgaggcggtggaggtggtggatatcaaggaggtgatcgcggtggaagaggaagtggcggcggaggcagagatggagattggcgttgtcccaaccccagttgtgggaacgtgaactttgcaaggagagttgaatgtaacaagtgtggtgcacttgctccttctggtactagttctggtgctaatgatcgtggaggtggtggatatagccgaggtggaggtgacagtgatcgtgggggtggtcgtggtggtagaaacgatagtggtaggagctatgagagtagtagatatgatggtggaagtaggagtggtggtagctatggtagtggtagtcagagggaaaatggttcgtatggtcaggctcctcctcctgctgcagctattccatcctacgatggttctggaagttatcctccaacc

SEQ ID NO: 122260 - DNA, 626 bp, Arabidopsis thaliana
caattctcaaacaaaacaaaaaggatgaaaatgcaaacactaaacttcacttcttctctcttgttcttgtcttttatcttcctctcatgtgctctgcttatctcatcacaacaatctccatcacagccacattctgagcctccgtcacagctaccttttgagcctccggtagagtcaccattcttccctccgtcacagccaccaatattcgtgccaccgtcacagccaccttctttgcctccgtcacagtctcagtcaccttctctcgcttgcaagtcaactccataccctaagctttgccgtacgatcctcaacgctgtcaaatcctcaccgtcagatccttaccgttacggcaaattcactataaagcaatgcctcaagcaagcaagccgtctatccaaagtcatcaccagttacgcgcggcgcgtggaaagcaaaccaggctcggccacggccgaggaaataggggcggtggcggactgcggcgagttatcggagctgagtgtgaactaccttgaaaccgtcacgacggagcttaagacggcgcatgtgatgacggcagctctcgtctagcatgtgaacagtcttctcagtggtgtagtgacgaatcatcagacgtttcttga

SEQ ID NO: 122261 - DNA, 727 bp, Arabidopsis thaliana
  unsure (1)..(727): unsure at all n locations
gccaccagaggcatgggcgtgaaatcgcgattcacctccactctcttggtgcaagagtcaccatcaattatgtctcgagctcatcaaaagctgaactcttggtttcagaactaaacgactcatctcaattaaagtcagcgatcgcagttaaagcagatgtgtcagacccggaccagatcaacancttgtttgatcaaacagaacaagagttcggatctaaagttcacatcgtcgtgaattgtgcaggtgttttggatccaaagtatccatctttatccgagacgacactagaagatttcgataacacattcacaataaacacaagagggtctttcttgtgttgcaaggaagcagctaaaagggttatgagaggaggtggtggaagaatcattatgatgtctacatcaatggttggtggtctcgccccgggttatggagtttacgcagcatcaaaggccgccgttgagacaatggtgaaagtgttggcgaaggagcttaagggaagccggataaccgcgaattgcgtggcgccagggccggttgcgacggagatgttttatgctggaaagagtgatgaaacggtgaaaatgcttgcaggggcttgtcctatggggaggatcggtgagtcaaaggatataacccgcgattgtagggttttttggccggttaatngtcggtnaaatngntttancggncaaggttttttngtgcccaattggngnctttt

SEQ ID NO: 122262 - DNA, 1008 bp, Arabidopsis thaliana
  unsure (1)..(1008): unsure at all n locations
gacaattagaaatttagaaccaaaacaaacgaaacttctctgcaatagccttctccaaatttcctcactttcacgcgtttcagtcttctctatataaacttgtttcatcaacccatcaaaatcccactcaaattctgtttcagtgttcttcaaattctcaatctttctctcaattcatctaaagggttcctcaaagtttcaatctttctctctgaatctaaaccatggctcgttgtagcaacaatctcgtagggatactcaatttcctagtatttcttctctcgatcccaatcttagctggtggaatctggctaagccaaaaagggtcaacagagtgtgaaagattcctagacaaaccagtgattgctcttggtgttttccttatggttgtagcaatagctggtctaataggttcatgttgtagagtcacatggcttcgttgggtttatctctttgtcatgttccttttgattctccttgtgttctgtataacagtttttgcctttgttgttactaacaaaggagctggtgaagctattgaagggaaaggttataaagagtataaacttggtgattactctacttggttacagaaacgtgttgagtatggtaaaaattggaataagattaggagttgtcttgtggagagcaaagtttgttctaagcttgaagccaagtttgttaatgttcctgtcaatagtttctacaaggnacatcttactgctcttcagtctggttgctgcaaaccttcagatgaatgtggtttcgagtacgtaaacccaacaacctgggccaaggnccacaaacgggggaccacacactaatccagactgccaaaacctggggcaaacgcaaaagnaaaagctctncttcgntttgtcaaatcttgtaaagcggggntactcggcaacgncaaaaancgctttggaggaaagttgcaattcgttaacancggcttccccttgcttcccaanantgcnncctnnttggtcntgnnttnaggacana

SEQ ID NO: 122263 - DNA, 1085 bp, Arabidopsis thaliana
  unsure (1)..(1085): unsure at all n locations
ctcatcagtgtgaggacacagcagcgagactgctcgaggtactgctcaacaacgtgaagattagagattcaaaagccaccaagactgcaatcttgccattgtctcagtacctcttggatccacaaactcaagctcagcaggcgcggttactagcaactttggcccttggtgatcttttccagaatgaagctcttgctagaagcaccgatgcagcttctgcttgccgtgctttagtcaatgtccttgaagaacaacccacagaagaaatgaaagtagttgctatatgtgctctgcaaaatctcgtcatgtatagccgatctaacaaaagagcagttgccgaggcaggtggtgtgcaggtcgtcttggatctgatcagttccagtgatcctgaaacgtctgttcaggctgcaatgttcgtaaaactactcttctctaatcacaccgttcaagagtacgcatctagcgaaaccgtcagagcaataactgctgccattgagaaagacttatgggccactggaaccgtgaatgatgaatacctaaaagccttaaactctttgtttaacaacttcccgcgtctaagagctacagagcctgcaacactaagtataccacatctagttacatccctcaagacaggatcagaagcaacacaagaagctgccttggatgcattgtttcttctcagacaagcttggtcagcctgtcctgccgaagtttccagggcccaatcagttgctgctgcagacgncatccccctacttcagtacctaatccaatcaggtccaccacggttccaggagaaagctgaattcctcttgcagtgtttgccaggtactctggtagtcactatcaaacgtggtaacaacatgaagcaatccgttggtaacccgagtgtgttctgcaagataacactcgggcaacaatcctcctaggcagnccaaggtgatatcgncaggtcctaatccagagtnggacgggnaggttnttnatggtcattttgagagcctcccaaaggtcaaaaacttcccatttnatgaagggcaaaggaaaattnggaaaggntccttttgggaagtaacggtngc

SEQ ID NO: 122264 - DNA, 511 bp, Arabidopsis thaliana
cccacgcgtccgcacaattaacatttcctagcaaaaaccttaattgtgtttccatctcaggagtgattcgaagaaggaagtatctactagaagtcttcaactggtatatctcagagcaatggaaacacaattaaggtttttgctaggaaatgttaaattgggaagtcataagcggcatcagatatggttcttgaagaagtttcttttgggtccggagaaagaaacacttttgatagatatagtgagattcgtttgctgtgttattcatccaactaacgaaatcatcagatcagagatcatgccaagatgggctattataggttggcttttggaactgtgtaggcaaaatcatcacatcgagcgaagcgttatgctggctctgttttacgactggctcttctttgacgaaagaatcgataatattatgaatgttgaacctgctgctctcttgatggtatggtcaataccgcagtatccacacatcactcactccttacttgaattcttactt

SEQ ID NO: 122265 - DNA, 382 bp, Arabidopsis thaliana
tttctcgtgtaaggtgtattcaagagatttacaggggatgatgggaagtttcagcaatctcttacggaagatgctaaaggaatcctcagcttgtatgaagcggcacacttgggaacaacgacagattatatattggacgaagcgttcaagtgcacatcgagccacttgaagtctttattgccaggagggacgtgccggcctcatatcttaaggcttataagaaacacactttatctacctcaacgttggaatatggaagcagtaattgcaagggaatacatttcgttctatgaacaagaagaagatcacgataagatgctactcagattagccaagctcaatttcaagttattgcagctgcattacattaaagaactgaaat

SEQ ID NO: 122266 - DNA, 511 bp, Arabidopsis thaliana
  unsure (1)..(511): unsure at all n locations
nnnnnnnnnnnnnnnnnnnnnnnnnnnnnnnnnnnnnnnnnnnnnnnnnnnnnnnnnnnnnnnnnnnccacgcgtccgcggacgcgtgggcggacgcgtgggcactatctatcctccataatatagtattcttcttttctctcctactttctctatagtaatggcttcgttacttctcacatcgtcgagtatgataaccactagctgtcgctccatggttctccggtcagggttacccatcggatcttcttttccctctcttcgcctgacccgtccatacgacaaggcgactctgttcgtctcatgttgctccgctgagtccaaaaaggtggcaactagtgctactgatctcaaacctatcatggaacggaggccggagtacattccgaacaagcttccccacaagaactatgtgcgtgtattagacacgacgcttcgtgacggtgaacaaatctcccggggcagcactctctcctcccaaccgggagaagattggngnnttgccaaggga

SEQ ID NO: 122267 - DNA, 954 bp, Arabidopsis thaliana
acccacgcgtccgcttaaaaagccttctctctcttatctctctcaaatcttctagagagagaagggcttagtttttcttccgccatccggtgaatccggcaaagccatctggttgttaaaccagcttcagtccaacagcctccggctattatagaggaggttggttggcttttcactggcggtgttggctccctcagcaacgtcggccagttttctctccggcaacgatggctccgtagcaccgtttggctggctcctcttgtatgcggcatgttttcggctttctatgcgatggtgtccgcttttgtctctggtcattccaccgtcatctttccggtggttttggccagttatgtaccggtgttagatccggtttatttgtttctgttttacttttaataattctcattgagatgtgttggtgataatagtgatagcaatctcgatttctattgcttcttatccaatccactctcttttgagattcaatttgcaggaatattacagagatttgagttttaagatgaagaaaagaagttgattccttcgcttattatcattgccttaagctgttggtttaattggagtttcgattactttataccggcgaaaaatcagaagaatctatgtcgattgttatcggttgtgattccttcttcaccggaatcggtgctcggacgacaaaggaagaagtcggttcacttttaggcttctcatctcacacgtataggtctttctcctattgacgacacgtgatctgagatagagacaaattccagtttcttcttctgtaggaaatctctttgggccttgttgggtctaaataatttctgtaatcttgcattttgaataggcttttcttaggccttgtatgagttggatatgtttaatacaaaatttctcttgtgaaaaaaaaaaacttcactcaggttcatgtaacaagaaacaactttt

SEQ ID NO: 122268 - DNA, 378 bp, Arabidopsis thaliana
accacgcgtccgaaaagtttcgactcgtccaggggacttgatcggtctgagatcgtagtttcttcgcactccactagaatgggctcttctgcagaacaggtggagcgtacgaatgatatactcaatggtgattttataagccattggcataatttgcagtatggccgctcttgccagaattctcaacatccgcctgtgctgtatcctgctcctgttgtagtgccacctgcttatctccaggggcgtttaccatgggatggtcctggaagacctctggcttacaccaatgctgtgaatcaactcatgacctacggacctcgtcgtgtactcggttgctcctgtacaacctgttgcaaccaggccacccaccatttaccc

SEQ ID NO: 122269 - DNA, 552 bp, Arabidopsis thaliana
gctctacacgactcactatatggaaagctggtacgcctgcaggtaccggtccggaattcccgggtcgacccacgcgtccggcattatttgaaaaaccagcgtttaaaaatctgatttgcaatggtcttgtacttgctgaggatgggaaaaagatggctaagaaattacggaattatccaccacctttggaagtcatagatgagtatggggctgatgctgtgcgattgtacctgataaattctccggttgtacgtgctgagccactacgcttcaaaaaagaaggagtactcggtgttgtcaaagatgtattccttccatggtacaatgcatatcggttcctcgttcagaatgcaaagagacttgagactgaaggtggtgtgccctttgttcctactgatctggcaactatacagtcagcagacattcttgatcagtggattcactcagctacgcagagtcttgttcgttttgtccgcgaggagatggatgcctatcggctgtacactgtggttcctcgtctcttgaagttcctcgacaatctcactaacatat

SEQ ID NO: 122270 - DNA, 815 bp, Arabidopsis thaliana
  unsure (1)..(815): unsure at all n locations
nnnnnnnnnnnnnnnnnnnnnnnnnnnnnnnnnnnnnnnnnnnnnnnnnnnnnnnnnnnnnnnnnnnnnnnnnnnnnnnnnnccacgcgtgcgcggacgcgtggggcctgagtttcaatccagatggaaagactgtgctttgtggattgcaagaaagtctcaagattttctcatgggagccaattagatgtcatgatggagtggatgttggatggtcaagattgtcagatatgaatgttcacgagggaaagcttcttggttgctcatacaatcagagttgtgtaggcgtgtgggttgtagatctctcgcgtactgagccatgtatggctggagacactgcgcaatcaaatggtcatccagagaaacgatcttgctcaggaagagatccagtagttctcaatgataataactcaaagacagttctcgggaagctgtccgtttcccaaaatgtagatcctttattgaaggaaacaaagtctctaggaagattatctgtttctcagaactctgatccttcgacaaaagaaacaaagtccattggaaggtcatcaacatcacaaaattcagagtcctcgatgaaggaatcaaagcctctcgggaggttgtcagtttctcaaaattcagacgtttctaaagagtcaaggacgttttcatccacaggaagtttaccaggcactcctcatagggtcagttcgaccaatgtatcaaaagccacttcgggtgtttcaacagccgtctctaatgctgcaacgtcaaggaggaattttacaaaagctaacccataggcgaatcctgtcaataaggcagcagatttt

SEQ ID NO: 122271 - DNA, 630 bp, Arabidopsis thaliana
ggataaacaaacaaccaggcatttgtccacctttcattttaagcattaaccatcttatctttgcgccttggaacttccccataattacaccacagactagtcttgattatcggttatttttcttattacacgagggtaaattagggaaaaacacttctggagcctttatcctcatgtccaaccaaaatctttacacaattcctagttcttaagaaaaaagtggaaattttcctttaaatttagtttaaaactcatacaaatccttctactcgaccactggtactctccgtaagctacttgctgaattcgattattgattttgggcgtagaagaagatgaaggcatcgatgaagtttcgtgaagagcaaaagcctctttttagggctaaagttcctttaagcatcttaggtttaccctttcaatctggaatcgtcgccggagaatccaaggagctcagtctcaatctctccactttcttcgaatctggcccttctctcaaagtcgcttaccgtccaaacgattcgtggaatcctttctctctaatcgtcaaaaccggatcgggatcgttcggttctccgatttcaagctctatgctcatgagcgctgaattcaatctcctaggtcaaggaa

SEQ ID NO: 122272 - DNA, 1037 bp, Arabidopsis thaliana
  unsure (1)..(1037): unsure at all n locations
cttcacttctctctccttcaacaaaattttctacctttgtttcttctctcagatttcataaagaaaagatttaatctttcattggaatctgtgagtaacagaggataagcgaatatgggttcaatctctttatccaattctatgcccataactcgacttccactacttacatcactctatcatcaaagcttccttccgatttcttcttcatctttctctcttcttcctctctctaatcgtcgtcgctcctccactttttcaccgtcaatcaccgtctctgccttcttcgctgctcctgccagcgttaataataataactctgttccggcaaaaaatggaggttacacagttggggatttcatgactccgagacagaatttgcacgttgttaagccctctacgtcggtcgatgatgcgttggaacttctggttgagaagaaagtcacgggattgcctgtaattgacgataattggacactggttggtgttgtttctgattacgatttgcttgcattggactccatctctggtcgcagtcaaaatgatacaaacttgttccctgatgtcgacagtacctggaaaacgtttaacgaactacagaaactgatcagtaagacatatggaaaagttgttggagacttgatgacaccgtctcctctcgttgtccgtgattctgccaatttagaagatgcagccaggttgcttctggaaacaaagttccgaagattacccgttgttgatgctgatggaaaactgattgggatccttacaaggggaaacgttgtaaggggctgcgctgcagatcaaacgggaaaccgagaactctacatagctaggaagcagcagtgatggagcagatctgaatctgccatagttaatagcgaaatctatttattccattgatataagtatatatgtaaccattctctgtcaattttcggttttcagaagcaatttttgttactttaggagtaacatttctcagactcggaactgnagccaaatggtatatttgatacatatatgtttattgtagc

SEQ ID NO: 122273 - DNA, 682 bp, Arabidopsis thaliana
  unsure (1)..(682): unsure at all n locations
cctgaaattatattcaaagccatcaggagaattctttggttttgattggcacgatccaaagacacacattttgtcaaatcattttcgacgactgttattaataattaattcgttaatgacgcaccgttagtcaactccgcttcgtattaattactcctccgatctctttcttattcttctccggcgacacttcccttgcttctccctcttaggactctctctacgaatctgtaagcttcaaattcttacgccacactccgagattcgcttctgattattgtatgaatttttgagctccaaggatccactgccatgtatttatgctgctaaagcttgaaggcagtagtggaatcaccattaagttctttgctttgtaatttagcttgatttgagaataaacaaatgggaaaagcatcaggcttgcttctgtttctcttgggttttgggttctttgttgtcacatataaatctttctgacactttataggtcacaataggtcctgggtggtgagnaaattcagatgggaagncccactttctgggttcccggttggttcaagaatggccncctaaaataattnaggggaaagnccaagngggttnttccagnaaccctttttcaanggttgnccttaanaaagtttcaaggtngcaccnttttaatnaaggnggncangttncg

SEQ ID NO: 122274 - DNA, 511 bp, Arabidopsis thaliana
atcaactatttccttcttcctttgctcttagggttagggtttattttgttctttctctatatccttcaatcaatgtgaaaaaaaagctctcccttttggcagtttccgatgtttggtcgccattcgattatcccaaataaccagattggtaccgcctctgcttccgctggtgaagaccatgtctctgcctccgctacgtctggtcacattccttacgacgatatggaagaaatccctcatcctgactctatctatggtgctgcctccgatttgattcccgatggctctcaattggttgctcaccgatccgatggctctgaattacttgtttctcggccaccggaaggggcgaatcagcttacgatctcgttccgtggacaagtttacgtttttgatgccgttggtgctgacaaggtggatgctgtgttgtcgctggtgggtggttctactgagcttgctcctggtccgcaggtgatggaactagctcaacagctgaatcatatgccttgtg

SEQ ID NO: 122275 - DNA, 503 bp, Arabidopsis thaliana
cgcctgcaggtcccggtccggaattcccggtttgacccacgcgtccgctctttctgaagctttatctaataaatctcttcgttgatccttcctttccattaacgagatttcgaatcgagaccagatctgcgtgaagatgatagagaagtgtataggagcgcatcggtttcggagattacagagattcatgcgtcaagggaaagtgacgattctttgtctcgttctcaccgtcatcgtcttacgtggcacaatcggagccggtaagtttggtacgccggagaaagatatcgaggagatccgtgagcatttcttctacacgcgtaaacgcggcgagcctcaccgtgtcctcgtcgaggtctcttccaaaacgacgtcgtccgaagacggaggaaatggtggtaacagctacgagaccttcgatatcaacaagctattcgttgatgaaggagacgaagagaaatctcgagaccggactaataaaccttattctcttggtcccaaga

SEQ ID NO: 122276 - DNA, 690 bp, Arabidopsis thaliana
  unsure (1)..(690): unsure at all n locations
atttatataacgttttgaatttcataaacctagtggctagtgatatgatactctcaagaaacctacccacctaaaaagagagaaaaacaaaacaaaagaatagtaaggcactaaacactaaaactaccacttctcttgtatcgccgacaaagctttgttcagtggcaaagatgatgaatcatttgcttttggctcttttccttgttggaaccatcgccttaccagatagaggaactcaacaattgaccaacgatggcctcaccggcgcgaggcgagagatactctctttcttagaccaaagacttgcagtggtgtacccagtgatccagagattcaagtcactcatcactctcgacccttataacgtgaccaagacatggattggttcagacatctgcagttatagaggcttncactgtgacaatccctcccccacaacaaaacccgcagttaactgttgctttccatcgggttttcaattggctttcaggctcttctggtcccatccatcgggagggttttatcggttcaatttgggtggcccttggttcttgtttcaaggttaaccnaaaacaatttttggggggncgggngccttcccaagntagnnaacncccgggnttttttttgaccttggcatttggaacaattggttacccggnaagttncgcnagtntttttgnantccgg

SEQ ID NO: 122277 - DNA, 974 bp, Arabidopsis thaliana
  unsure (1)..(974): unsure at all n locations
gacgtcgcatgcacgcgtacgtaagctcggaattcggctcgagcttttgatagcgggagaaggcatatgataagctcatgtatgcccagttgatgaataggaaaaagggtgtgacttttggttcgtttaaggtttccaaggacattaaatatgctgataagcagcccattataccatggggtccaaggttttccaggtcctccaagaatgatatgttgatcaacctagcaatatcagttgtgtttagtgcatggattgcgataaaacgtaatgttgaatacaaaccgctgcagttcatgtcttttgtatttgtttacagaatttttgagaaattaaaatcctttgaagcaccttcatctccaatatataacgaggaaggcgaagaaagtggccggggattgagaatgggaaagaggcttcttcgttctctttccttagtttttggctctatactcttagcatctttggcatacactgggttcttaaatggcatcgagtacatgggctactccatacccatggttctttacaacaaccaggaacttatagtgacggcgtcatcggctttcatgctctatgttatagcgtcgttttacagataatgcgagagtccacaggagaattggtcagttagaagcttttggagaagttatgctgtattataggatgttgctgggagatgaaaagtttattttctacagagagatggggttatctttataacctttcttttgtgtggaaaatcaagtaaattttgcaagagagaaatcccttagaatctaagtcttgtctatttacgtttaatgctgaggatcgcatgtggaaggttttttaatttttgtattggagcaataatatgcgtgaagtgaaaaatcttgagataaaaaaaaaaaaaaagnnnnnnnnnnnnnnnnnnnnnnnnnnnnnnnnnnnnnnnnnnnnnnnnnnnnnnnnnnnnnnnnnnnngtacctaa

SEQ ID NO: 122278 - DNA, 442 bp, Arabidopsis thaliana
ctgctctgccatggctcccgcactatctacttcttgctcctccgtcatggctttctcaacatcaatcgcgcttcgttaccatcatcctcaaatgtctctcaggaactctcttcgcgctcccaaatcgccttcttttgtcaggcttcccctcggaaaggtgttacagagcaggattgtgatacgtgctgcttcgtctgcggctggtaatccacagtctgatgctgactttaatccgtatgaggttcttggtgttaaccctatagagggatttgacaagatcaagcaaacttatggaaggaaacttaaagatgctcagaggagcggtgatgaagccactgctgctctaccttgagaaggcatatttgagaaggcatatgataagctcatgtatgcccagttgatgaataggaaaaagggggtgacttttggtttcgtttaaggt

SEQ ID NO: 122279 - DNA, 461 bp, Arabidopsis thaliana
cccacgcgtccgcggacgcgtgggttcgtcctcccccagaaaatagagaggaaaaaaggaaaaaaagtaatcatcgattcgctttcacaacctggaaagctcgaaaagaggaaaaaaattctaaagagcttatcaagctcacttcatacacctagatcgatttagggttcgtttgatttttttttttctgtgattgcgacagctagagatctatctctggtggattttgggtttatgttccatggcggatcgcggatctttcggatttgctcctcgattagatatcaagcaattgctgtcagaagcacaacacaggtggctgagacctgctgagatttgtgaaattcttcggaatcatcagaagtttcatattgcgtcagagcctcccaaccgaccacccagtggttcactctttctcttcgataggaaggtgctcagatatttccgaaaagacgggcaca

SEQ ID NO: 122280 - DNA, 421 bp, Arabidopsis thaliana
acccacgcgtccgcccacgcgtccgcaaaaaccaaacaaacaaacaacaaaccagaagttttatttttgttaaagagtaaccaaaaaaaaaaaaacagagtaccttcttcttcacacacataaaaagagacggtaccaaaaaataaaaacagagcaaaccacaaaaatggggaagcatttattccgatcatctcctccaccggagaaaccaacagctcatctctctctcgcggaatcagctgttcaagaatgtatgagcaacatcaacaccgtcatatcaaaatggacttctccggctgcttcttcctccgacgacttcctcttctccaccaacagtcgtcgtgaagcagaggagtttgttacagccgttagacatctacaaagcacgatgcatcgtttggtttccgttaacccttcctcg

SEQ ID NO: 122281 - DNA, 409 bp, Arabidopsis thaliana
  unsure (1)..(409): unsure at all n locations
tacacagtgatggcttcgtctctcaccactagattatcggcggtaatcggatctcgacggagttttccgatcgtcggagcgttttgcgttctgtcaactctctcaatctcttctctttcttcttcatctcccttcaaatcgggttgtgcacagtctttctctgttgttcctctcttaaggtctaagtttagcagtaaggctttttcttcgtcgatcagaatggaggagagcagcaaaactgtgcccagcattgttgtctatgtcactgttcctaacagagaagcagggaagaagttggctaacagcattgtccaggaaaaagctttccagcgtgtgttacattgtgcctggnatttgaatcggtgttcgattgggngggnanggttcanagtgttcaaaggagnnnctg

SEQ ID NO: 122282 - DNA, 526 bp, Arabidopsis thaliana
  unsure (1)..(526): unsure at all n locations
nnnnnnnnnnnnnnnnnnnnnnnnnnnnnnnnnnnnnnnnnnnnnnnnnnnnnnnnnnnnnnnnnnnnnnnnnnnnnnnnnccacgcgtccgcggatttgttggctttgacgatgttgaaaccgccgggtgagtttggggcggatattgttgttgggtcgggtcagaggtttggtgttccgatgggttatggtggtcctcatgctgctttcttggctacttcacaagagtataagagaatgatgcctgcgaggattattggtgttagtgttgattcttccgggaagcaagctttgcgtatggctatgcagactagggaacagcatatccgcagggataaagctaccagcaacatctgtaccgctcaggccttgcttgcaaatatgactgctatgtatgctgtttaccatggaccagaaggcttaaaatctattgcacaacgggttcatggtctcgctggtgtatttgccttaggattgaagaaactgggaactgcacaagtccaagatcttcccttctttgacact

SEQ ID NO: 122283 - DNA, 528 bp, Arabidopsis thaliana
  unsure (1)..(528): unsure at all n locations
atgatcctnnnnnnnnnnnnnnnnnnnnnnnnnnnnnnnnnnnnnnnnnnnnnnnnnnnnnnnnnnnnnnnnnnnnnnnnnnnccacgcgtccgcggacgcgtgggaaaaaagcaaaagactcagctaaaaagcgacctactagagaggaacgggagagaaacaaaagcaatgggaagaagagttcttatgctgatcaacctgtatcatttgtgtcaagtggcataatcgattctgagatagctgttgcaaaaacctcagttgaaaaagttgcaaaagaggtagctgaaactactccgggaacctctaatggagcagacattggagcatttgaggtacataccagaggttttggatccaaaatgatggctaaaatgggattcatagatggaggtggtctaggaaaggatggtaaggggatagcacagccaatagaagctgttcagcgtccgaaatcacttgggttaggtctggatttctccattgacactgaagacccgagtccgtcaagtaataacaataacaacgc

SEQ ID NO: 122284 - DNA, 1013 bp, Arabidopsis thaliana
  unsure (1)..(1013): unsure at all n locations
nnnnnnnnnnnnnnnnnnnnnnnnnnnnnnnnnnnnnnnnnnnnngacgtgtttctgtttttctctccacgcgtccgtgttgttctcgattaacgaaaaagacttgtcgttctcaattcttatcgatttaagaacaaatcatctaacgaagattacttccgaagatcagaaacaaacacaaactgtgaatcgttgtttgttaattctctttaaaatcgccagaagaaagagatctccgttttctacagaagaaaagcaagagagtaagaatgggatcggaacaaaacgatagcacaagcttcacgcaatcgcaagcttcagagccaaagctatgtgttaaaggatgtggtttctttggatcaccatcaaacatggatctctgttctaaatgttacagaggcatttgtgctgaggaagctcaaacagcagttgctaaagctgctgttgaaaaatctttcaagccttctcctcctcgtagtctcttcatagcagaacctcctgctgttgttgtggaacccaaacccgaaaaggcggcagttgttgttgtctcggccgagccatcttcctcggcggttcctgaggcgaacgagccatcgagacctgcacgaaccaaccggtgtttgtgttgtaacaagaaggttgggatcatggggtttaagtgcaaatgcgggagcactttctgcggcgaacatcggtacccggagactcatgattgcagctttgatttcaaagaagttggacgtggagagattgccaaagctaatcctgtggttaaggctgataaaattcaaaggttctgaaatatggaagttttttctaagtattttggtggtaattactcatttgtatttgaaccgatttgggggttgtcttggatggttttaatggattgtttccaaagggatagaggatgatgaatttggttccgtaataaagtgaatcgaaaagggcggccgctctagaggatccaagcttacgtacgcgtgcaggcgacgtcaagactcttctatagt

SEQ ID NO: 122285 - DNA, 1001 bp, Arabidopsis thaliana
atgatacttcagctctctacgactcactattgggaaagctggcacgcctgcaggtaccggtccggaattcccgggtcgacccacgcgtgcgcccacgcccacgcgtccgaataattctccagaacattttgcacattccgtttcactccgtgttgttggatcccccaaagaaaatgagttgctttgggtgttgtggggaggatgatgatatgcataaaactgctgattatggaggtcgtcataaccaagccaaacactttcctccaggaaatgatgcaaggcaccaccaagcctctgaaactgcacagaagggtcctccagttgtgaagttgcagcctattgaagtacctattatcccttttagtgaactcaaagaagcaactgatgattttggatcgaattctctcatcggtgaaggctcttatggaagagtatactacggggtattaaacaatgatctgccttcagcgattaaaaagttggattctaacatacagcctgacaatgaattccttgctcaggtttccatggtttctaggcttaaacatgataactttgttcaacttcttggctactgtgttgatgggaattcacggatactttcttatgaatttgccataagtggatctcttcatgatattcttcatgggagaaagggtgtgaaagagcacagccaggtcctgtcttgtcgtggtatcaacgagtcaaaattgcagttggagcttgcagaggccttgagtacttgcatgataaagctaatcctcacatcattcaccgtgacattaaatccagcaatgtcctcctctttgaggagatgttgccaaattgctgactttgatctctctatcaagctcctgatatggagctcgcctcatccacccgagtcttgggactttggtaccatgcctgatatcatgaccggcagtaatgcttaaatgccaagagtgatgtctacagctttggagttgtcttactcgaacttcttacaggtcgaaagcctg

SEQ ID NO: 122286 - DNA, 737 bp, Arabidopsis thaliana
  unsure (1)..(737): unsure at all n locations
gtgacattanatccagcaatgtcctcctctttgaagatgatgttgccaacattgctgactttgatctctctaatcaagctcctgatatggcagctcgccttcattccaccggggttcttgggacttttggttaccatgcccctgaatatgcaatgaccgggcagtttaaatgccaagagtgatgtctacagctttggagttgtcttactcgaacttcttacaggccgaaagcctgttgatcatagactacccagagggccagcaaagtttagtcacatgggctacacctaaactgagtgaagacaaggttaaacaatgcgttgatgcaagactcggtggcgattaccctccaaaagctgttgctaagttagccgcggttgctgcgttgtgtgtgcaatatgaagcagattttaggccgaatatgagtatcgttgtcaaagctcttcaacctttgttgaatgctcgagccgtagctccaggggaaggagtacattagccacctctgtctcggcgtttctcttcttaccagaaaatttgatttttacatatacacgatataccagtcaaaacttaatttatgtgcatagaaatctctgtaatgttttttaaaaaactaatatttttacattaaatccgttacccttattattaaaaaaaaaaaaaagggcggccgctctagaggatccaagcttacgtacgcgtgcatgcgacgtcaagactcttctatagtgctccta

SEQ ID NO: 122287 - DNA, 402 bp, Arabidopsis thaliana
ctctaataattctccagaacattttgcacattccgtttcactccgtgttgttggatcccccaaaggtaaaacctttttccccagattatttctatttcgttcctctcttctcgatttcgactgattttccgtttttatgctcttctcttttccattttgaactccaattttgattctttaaagaaaatgagttgctttgggtgttgtggggaggatgatgatatgcataaaactgctgattatggaggtcgtcataaccaagccaaacactttcctccaggaaatgatgcaaggcaccaccaagcctctgaaactgcacagaagggtcctccagttgtgaagttgcagcctattgaagtacctattatcccttttagtgaactcaaagaagcaactgatgat

SEQ ID NO: 122288 - DNA, 529 bp, Arabidopsis thaliana
  unsure (1)..(529): unsure at all n locations
atgatcctgccagctannnnnnnnnnnnnnnnnnnnnnnnnnnnnnnnnnnnnnnnnnnnnnnnnnnnnnnnnnnnnnnnnnnccacgcgtccgcagctccgtacgatcacaaggattcactgatttctaagcttttcatagaaagaagaagaaaaaggcggaattcgatggtggatgcgattcaagtagctgagctgagaagattcgtcgagcagttgaaattgaatccttcgattctccacgatcctagtctggttttcttcaaagaatatctccgaagtttaggagctcaagttccgaagattgagaaaactgaaagagattatgaagataaggctgagacaaaacccagtttctctcctaaacatgatgatgatgatgatgatattatggagtctgatgttgaactcgacaactctgatgtagttgaaccagacaatgagcctcctcagccgatgggagaccctactgctgaagtgaccgatgaaaatagggatgatgctcagtcagagaagagcaaagctatgg

SEQ ID NO: 122289 - DNA, 1310 bp, Arabidopsis thaliana
  unsure (1)..(1310): unsure at all n locations
nnnnnnnnnnnnnnnnnnnnnnnnnnnnnnnnnnnnnnnnnnnnnnnnnnnnnnnnnnnnnnnnnnccacgcgtccgcggacgcgtgggcggacgcgttcttctatcttctccgtcatcgttctctctctctcctctcccggagatttttactcaggcgttcttctgtggatcagaggtgaaaaagatgaatcattgcaaccttcagcagaacgccttcatgtctcgtgaggagatgatgggatttgaccgtaaggatcttgttgtttgtcctaagcctcgacgtgttggtttactcgccaacaacgttattcgtcctcttagattacatatgagtcaagctgcagccgacttgtgtgattctaaagctggtgctgagcttttggaaatcattcgtagaaaggaggataatggaacaatagggcagttactatcatcatccccaccgtattttcccggttcaccaccgagtagagcggcgaacccattagcccaagatgctcgttttcgagatgagaaactcaatccaatctcaccaaactctcctttccttcagccatattcggcaaccgggtttccatctccatcttcttcctcatcatcgtcgtcttcccgtggttgtgttagaatgaaatttggactcaactcgcctgcagttagagtagaaggatttgattgcttgaaccgtgaccgtcaaaactcgagcatccctgccatggcttagtagacaaacaacaaaaaaacaagtgtacatagagattccggaatcgttcgttcgccaatgcctaacagaggaggatttgattactactgctgcaactattactactaccatttttgaaagtaaatgaatatgtttttgtttttcatcttctcctaagagagagagagagggaagaggaaggaggaagatgaagatcagttaccgtcgccggtcaccgtttaactgttttattcaggttagtgtttgtatataaagatgcagtatttaaaagaagagtcgaatctatgtattcgtttggtgtttttctgggtcgggcggatctttagtactgtttcatatataactaagagggaagattagaagatgaagaagctgtaaaattttcttgggaagaaaactctggtttctatcttctcgttgtaatatagataatcaacttggatttatcttctttcagattcaccattgtatatagtaatgtttatttttcttggggtctagaggaaccaaacttaagtacgcgtgcatgcgnnnnnnnnnnnnnnnnnnnnnnnnnnnnnnnnnnnnnnnnnnnnnnnnnnnnnnnn

SEQ ID NO: 122290 - DNA, 535 bp, Arabidopsis thaliana
cgactcactatttggaaagctggtccgcctgcaggtaccggtccggaattcccgggtcgacccacgcgtgcgctgtacgacagttcttggaagtatgttattccaaggatgatttacgacgacgtcgttcacgtcctgcatttgtttcattattacgtacattatgttttaaattacgtgatgatactggattatcgggaatcttttttgatgaacatccagagaataaaaatcgtcctcctgattttcttcttttcacagcacttacaacacttatcaatagtgacacggatgaaggacgacatgcattagaaggtttactttgtatcatacaattaccacatcctaaaattgccaattttattgtagatcaaacaacattttgtatgcgattggtaaaaggattagaagaacgatataaacgtgtaccattgacatttgataccaatgtgactgaattaccaatatcacatccacatattgcctctatgcttgatcgatggacatatattgatacagtatgtcgttcagcatt

SEQ ID NO: 122291 - DNA, 783 bp, Arabidopsis thaliana
gagaaaataaagaagacgaagacgaaacctgaaaccaaagccaaattctctcgattaacagaaattcctttggatctatcgtcaatggacctaatacctcagcagctcaaggccgtaactcttacacacgtccggtaccgtcccggagatcagctcggacatttcctcgcctggatctctctcgtcccagtcttcattagcctcggtggattcgtctctcatttccttttccggcgtgagcttcaagggatcttcttcggtataggtctcgtgatctcacaattcatcaacgagtttatcaaaacatctgtagagcaagcgcgtcccgagacatgtacgttgctcgaagcttgcgattcacatggatggccatcaagccactcgcaattcatgttcttcttcgctacgtatttcagtttgatgggatgtaaaggaattggattctggtttggtttaagaagcagatggattatgaatcttcttcattggtctttagctgttgttaccatgtattctagggtttatttaggttaccacacggtggcgcaggtttttgctggtgcggctcttgggggtattgttggtgcgagttggttctgggtggtgaattctgtgttgtatccattttttccggtgattgaggagagtgtattggggagatggctatatgttaaggatacttcgcatattcctgatgtgttgaagtttgaatatgacaatgccagagctgctaggaaggatatggattctgctaaatctgattaatttggctaatttgatttg

SEQ ID NO: 122292 - DNA, 2097 bp, Arabidopsis thaliana
  unsure (1)..(2097): unsure at all n locations
gnnnnnnnnnnnnnnnnnnnnnnnnnnnnnnnnnnnnnnnnnnnnnnnnnnnnnnnnnnnnnnngtaacaattacatctgctgattcagaagatgaagcagaggattctgatgatgaaagcatggagaccattatcctgggcgacaaaagaatagggatcaaaacaagtgttctagaggaaaaggccacggcttgtaacatgctttgttgctatgctgatgagttaaaagaaggattttttccttggattgatcaggttgcacctacattggttcctttactgaaattctattttcacgaagaagttagaagagcagctgtttcagccatgccggaactaatgcgctcagccaagctggcaatagagaaaggggaatctcaagggcgagatctatcatatttgaagcagctttctgactacattattccagccatgctggaagctttgcataaagaacctgatacagagatctgtgtgagtatgttggaagctatcaatgaatgcttgcagatctctggaaatcttttggatgaagggaaaattagatccatagttgatgagataaagcaagttatgaccgcaagctctagtaggaagcgagagaggggagagagggcccatgctgaagactttgacgctgaagagggagagcttattaaagaggaaaatgagcaagaggaagaaatttttgatcaagtcggtgaaatattgggaacattggttaagacattcaaggcctcatttctacctttcttcgatgaactgtcctcttacttaactcctatgtggggaagagataaaacagcggaagagagaaggattgctatatgcatttttgatgatgtagcagaacaatgccgtgaagctgcctttaaatattatgatacctatcttccatttgtactggaagcttgcaatgacgagagcccagaggttcgacaggctgctgtttatgggcttggcgtttgtcctgagtttggcggctctgtattcaagcctcttattggagaggctctgtcaagattaaatgttgtgatacagctgccaaatgctcggcaatctgaaaatgccatggcatatgataatgctgtatcagccgtgggaaagatctgccaatttcaccgtgatagtattgattcttctcaggtacttcctgcgtggttgaactgtttgcctataagcaatgatgtccttgaagccaaagtggttcatgatcagctctgctcaatggttgaaaggcaagatgtagaccttttaggccccaataaccagcatcttccgaaaatcttaatagtttttgccgaggtacttacaggggaagatgtggtgacacaagagacagcaggtcgtatgattaaatatattaaggcaccttcaacagacactgccaccatcgggcgttggcctcaacatggtcaacgctgaaacccgaacagcagctcgctctccaatccatgctttcctcctaaattcaatccaatccgatctctctgtttatttttacagttttgtgagctctgttttcaccacaaagcgtcgtcagttttgcatttatgtgtttacaaaagtgtttcttcttcttttgcatttttcatctaattcttttgggagggatgatgatgggtcggtccatccttcagaagttacaaaatgaaaatttctatctttatggtaggaagtgtatattaggagggaaggatgaaattgttagtgaaatgtgtcattgggtatggttccccaaatacacaggtctgctgttggtgtcggtgttggtttgggtttgagagtgggatgaagttttggtgctttatacgagaaggaacaaaacagaaagatttgattttgaatttttgtttttgtatgcaattgggaattttggaagaatgattcttttctctcattgcctttgttgatttgtactcttttggacactcttctttggccttttcttaataaaagaaatgtcttttttaaaaaaaaaaaaaaagggcgaacgctctagaggatccaagcttacgagcgcgtgnnnnnnnnnnnnnnnnnnnnnnnnnnntgtcctaaaaannnnnnnnnnnnnnnnnnnnnnnnnnnnnnnn

SEQ ID NO: 122293 - DNA, 760 bp, Arabidopsis thaliana
gacgcctgcaggtaccggtccggaattcccgtgtcgacccacgcgtccgcagaaatagagaaaaagtttcaatctttcttcatcttcttcctccaaaatccttgatttctaaaaaggagaagaagagaagagaacgcgattaccttgattcaccctcctccttcaggtttgggaggctcgaatactcaggaaatgaaaggggcaagtggtgctgttaagaagaaaccccaggtgttgaacgaagctggtgaggcggagacggcggtggaaacagtcggagaaagccggaaaattagtggagacggtgggtttggcagtgacgacggcggagggggaggtggaggtggaagtggagagtcgattcttcgcgagattggtgatgataggcctacggaggatggagatgaagaagaagaagaggacgaggatgaagatgatggaggtgatgaggaagatgaagaaggagaaggagaaggtgggcaagaggaaaggccaaagcttgatgaagggttttatgaaattgaagctattcgtcgtaagagagttcgaaaaggcaaggttcagtatctaattaaatggcgcggatggcctgaaactgccaacacatgggagcctttagagaatctccagtctattgctgatgttatagatgcctttgagggaagtttgaagccaggaaagcctggtaggaaacggaagcgcaaatatgcaggtcctcattctcagatgaagaagaagcaacgtttaacatttacattac

SEQ ID NO: 122294 - DNA, 456 bp, Arabidopsis thaliana
acgcgtccgcacacaattgggaatggacattgtccacagatcacaaaccgtctctacaacttcaccggaaaaggagatagtgacccgaacttagacacggaatacgcagtcaaactcagaggaaaatgcaagccaactgataccacaacggctctagaaatggatccaggaagctttaaaacgttcgatgaaagttacttcaagcttgtgtctcaaagaagaggattgtttcaatctgatgcagctcttttagacaatcaagaaactaagtcttatgttctcaagagtttgaatagtgatgggtctactttctttaaagactttggtgtctccatggtaaaaatgggtcggattggagttttaacgggtcaagttggggaagttcgcaagaagtgcagaatggttaattatgtatattttatatagatatgtctgtgagattgtttatgattatgt

SEQ ID NO: 122295 - DNA, 448 bp, Arabidopsis thaliana
accacgcgtccgctttctcttgctaaactccatcatcttctctttcttttttttcacttgtcccatttttttatattttcatctttctcttttggagtttcttcttctactgactctactggtaggtgtatggatttgtgagagaagaaaaaaaagcacaatctttgaatggactggaatttcaaacttagctctggttatttatctggattcgatcaagaaccagatttatcaccaatggatggttcgatctcgtttggtgggtcgtcacagtcaaaagcggatttttcatttgatctaaaacttggaagaaacattggaaactcttcctctgtttttggtgatacagagcaagtgattagtcttagtaagtggaaagatagtgctttagctaaaccagaaggttcaagaagctcgagttcaaagagaacaagagggaatggtgttg

SEQ ID NO: 122296 - DNA, 833 bp, Arabidopsis thaliana
  unsure (1)..(833): unsure at all n locations
cccacgcgtccgcccaccttctctctccctctctataacaaacattaatacacacaccaaaaaaaaacctgtttatgtctcaaagatctctgattcctcattcttcttctatagcttttggtctccattctcatctcttaatctccagtgagatcagctccaattctaactggtctctctaaataaaaaacagaaataaaaatccaacctttttcaattttcgttcaattttcccggaaaaaaaagcgatccttttgatttttcgatttctccaagtaacaattcaaaatgggtctaaagggttttgctgaaggaggaatagcttcgattgttgcgggttgttcgacccacccgcttgatctaatcaaggtccgaatgcaacttcaaggcgaatcagctccgattcaaaccaatctccgaccagctcttgcttttcagacttcgaccaccgtcaacgcgcctcctctacgtgttggtgtaatccggagtcggacctcgtttcaattaggggagaaggcactgcgtgctctgttttccggcggctccgcccccgttcttcgtcaaactctgtattcaacggctcgtatgggtttatacggcatcatcaaaggnggattggaccgacccgggaacaaaaaacggtgcctttaaattgaaaaaaattcggtgccggagccatttgccgggnnaaatcggagccgccgtttgggatncttctnacggggcgnttgttaaggttaaaacngttngtcnntttcccttaccttttngagaactcaaaaacgtttttncnggtnncgaaatattcgggnaagngttngccttttggnggc

SEQ ID NO: 122297 - DNA, 619 bp, Arabidopsis thaliana
  unsure (1)..(619): unsure at all n locations
ttcttttgtctcttcttctctaaaattctcttgctcccaaaaactaaaaaaccaaaaaaaccaaaaaatgtacgcaatgaaagaagaagactgtcttcaaacatttcacaacttacaagactatcaagaccagtttcatcttcatcatcatccacaaattctcccctggtcgtcgacatctttaccttcttttgacccactccatttcccatctaacccgacccgttattctgacccggttcactacttcaacagaagagcttcttcttcctcttcttcttttgactataacgacggttttgtctctcctcctccttccatggatcatcctcagaaccatctaaggattttatccgaagctcttggacccatcatgcgtcgtggctcgtcctttgggttcgatggtgagatcatgggaaaattgagtgcacaagaagtcatggatgctaagggttttagctggcttcaaaagagtcatagtgaagcttgtgagaagaaggcggggggggtttcaccacttttttttgtgcggggttgtttccaacacaaccaaannggcaaaggtttttttgttagngggggnttccacaaatnnngggggnaacggnnaaatttcagt

SEQ ID NO: 122298 - DNA, 752 bp, Arabidopsis thaliana
  unsure (1)..(752): unsure at all n locations
aacaattgaccgcagatttgggaacgatgggtatggacttgagagttgttccggcggaggaatggttgaatcgagggatagattcgagtcacgacggtgaacatgacctaggcctaatggttacagattttctggaaacgggaggtggtagcggtggtgctggttcctggtgcagcagcgacagcgattctggattcccagatccttcttacctttccgataagattcagtatctcaagtactctatggctcaacacgaaaccgaggttctctcggtggttcgtacattgatgcttactattaaggagaaagatctacactctgtgaaatccggtacatgtaacgctagttgcatcaggttttatctcgctaagcttttgagactttctggatatgatgcagctgtatgttcagctagatggcaaggtggtggcaaagttcctggtggagataatgagtatatagatatcatattgagtgatactgaagttggtcaagatgatcgtttgattgttgatattgatttcagaagtcattttgagatcgctagagctgtggattcttaccaacgggttaatggatccacttcctgtgggttatgtagggacctgttgcaaagntttaaanccagttccctcaaggaaattggtttatgccagcggaattcctccttaaggcaggttcaataccgtcacccccntgggggntttnacccncctgggncccaanggnttncccnccaaanggnatct

SEQ ID NO: 122299 - DNA, 554 bp, Arabidopsis thaliana
  unsure (1)..(554): unsure at all n locations
atcattctctctttagatcttcttcttcttctcctctgtaacaacaaaacaaaaaaaccactctttcgaatttgatcagattcttctaaagctttagtttttacgcatcaccgattcatttgatccaaagggtttttgatttcttctacgagtttgtgagaagaggaacggtatttaatacacttacaaatttgatattggaagaaccaaagatgccctggacagcattcttcatgtttttcaacagaacttgcactcgtctggttgtctttttcctcgttattctgtaattttgttcctttcaggtgttgtttccggaattcggaataagttctttgttgttgtgcttattatactgggtaagtttgtgagaatgtgcattgttgggaacaagaaggggaaccggtcattgaaggaaataggaacttttatgatggccacatggtcattggcaaataccaatccgtcaagttgcaggcggatattcagcaggtgctaanccgaacgagcngcgctgnggttcgaatggggtncgnanccttgatcnaaatagc

SEQ ID NO: 122300 - DNA, 535 bp, Arabidopsis thaliana
agaagaggaacggtatttaatacacttacaaatttgatattggaagaaccaaagatgccctggacagcattcttcatgtttttcaacagaacttgcactcgtctggttgtctttttcctcgttattctgtaattttgttcctttcaggtgttgtttccggaattcggaatagttctttgttgttgtgcttattatactggttagtttgtgagaatgtgcattgttggaaacaagaagggaaaccgatcattgaaggaaataggaacttttttgatgactacatgtttcattgctaattaccaatccgttcaagtttgccaggctgaatatggcagacagttgcttaagcctgtaacgtagtctagcgtctggagttttcggaaattggggttttgagcggctatctacttttgatttcgaaaaaatttactgtgagttgttaaagagtctggtattctgaagagctgtctgtgggggagcttctggtttggggggtaagggctctggtggaaactcgtgatatctttagtatgat

SEQ ID NO: 122301 - DNA, 377 bp, Arabidopsis thaliana
tctatttaaaaaagaaaaaaaaaaagcaaattaaaaaggaaatccctaaaaacaaacgagcgtattgttatgaaggaggacgaagaagaagaagcagtgatatcgaacggcatgaacgacgacgacgatactaacaatattaacaacagttccactgaatttgataacaatcgtatcggagacggagacgataacagtaatctgaatcagatcaaacaagtatggggaacgtgggaggagttggtgttaacatgcgccgttaaacgtcatgctttttccgattgggactccgtcgctaaggaggttcaagctcgttcccggagttctctcatcgtttccgccgtcaattgcaggcttaagtatcaagatctcaaacg

SEQ ID NO: 122302 - DNA, 505 bp, Arabidopsis thaliana
  unsure (1)..(505): unsure at all n locations
gcannnaatacgactcactaagggaaagacggtacgcctgcaggtaccggtccggaattcccgggtcgacccacgcgtccgctttgaccgttcctcttctttttattcatcaacatcatcgagctttctactacttggattcctacttcttcttcttcttcctctgattctctcccattccaatcaatctctagggttcttcttcagcaatacttcagaagctggttttggccatggaacccaatgggtacaggaaagaaagaagaaaggaacaacatttggggagaatgaatggtggtggtggtgatgttgagactgatcttgatccatggactgcatgggcttacaagcctcgcactatctctcttctccttattggcgcttgttttctcatttgggctagtggagctcttgatcctgacagcactacatctgatgatcttgtcacttctgtcaaaaggggagtgtgggctatgatcgctgtctttcttgcttactctttgct

SEQ ID NO: 122303 - DNA, 1557 bp, Arabidopsis thaliana
cgtccccgatctctttcgtcttaaaatcggatgccgagtagcgtttttcggaacactttgtgacggcgaggaagaaggagttggagaatctccggtcaaagattccggcggcgttggttgattgtgtagatccggcgatgttagtgcttgaagcgatatctgagggtttttccggtggatacaagaggagataaagttagcaatgattatggatgggcttgtgttgtgattcttgagagtttaacacctgtaattgttgatccagtgattgggaaatcgaggttgcttgttactccgagtgttaaggagaaagctaaggagattgctgagacgtggaagaagagtttggaagagagaggaaggatagagaatgtgaagactcctgatgttcatacgcttttccagcatcttgttacatttggaattgttaaaagtgaagatcttgctttgtatagaaagcttgttgttggatctgcgtggcgtaaacagatgcctaagcttgcggtttctgttggtttgggtgatcaaatgcctgacatgattgaagaattaatcagcaggggacaacagcttgatgctgttcattttacttatgaagttgggcttgtggataagttccctcctgttcctttgctcaaagcttatctaagggacgcaaagaagtcagcagcttctatcatggaggactctagcaatactggccgagctacgcatctcgtggcgcgcaaggagcaatcagcacttaaggcggttttaaaatgcatagaagagtacaaactcgaggaagagttccctccagagaacctcaagaaacggttggatcagctagagaagaccaaaaccgagaagagaaagccagcagctgttcctgccaacaaaagaacccgagccagctacaacggtccaatgccaccagccaaagccgggcgtatcacaaacgcatacgtctcttccttcccgttcatcagatcaccctctcactctcctcaatacgcttcaccagcagcttacccatccccacctacaacagtctacagcaacagaagcccaccttatccatactctccggagatcatcccaggctcataccaaggctctcctatcggttacccagcgtacaacggttattgtaatggtccagttcctgctccagctcctccagtttaccacccacaccatcatcaacaccaccaattccaccatcagcaacattactactgaattagaagacagtgtgacaacaaaacaaggaagaagattggtaataaccaacaaatcactgatactgtgacaactgctactactctggtgttctctctctctgggtctattgtcttcctacgtcgtcgtttttgtctgtaatatctctttctcagcctaactctcttagtaacttagcttatatcctctggtgtgtttattattaatcgcatataaaacaaaactcaagcttttgtaatgtctaatattcagtcaacaaacttatattagggcggccgctatagaggatccaagcttacgtacgcgtgcatgcgacgtcaagctaatctatagtgt

SEQ ID NO: 122304 - DNA, 772 bp, Arabidopsis thaliana
  unsure (1)..(772): unsure at all n locations
cagcttatacactattaggaagctgtccctgcagtaccggccgattccggtcgacagcgtcgccacctcgccaccgtcgccacctcggatttgtcattggattgtaaggaaatttgcttgttagaaagcttgttgttgatctgcgtggcgtanacaganntgcctaagcttgcggttttctggttggtttgggtgatcaaatgcctgacatgattgaagaattaatcagcagggggccaacagcttgatgctgttcattttacttatgaagttgggcttgtggataagttccttctgttcctttgctcanagcttatctaagggacgcaaagaagtcagcagcttctatcatggaggactctagcaatactggccgagctacgcatctcgtggcgcgcaaggagcaatcagcacttaaggcggttttaaaatgcatagtagtagtacaaactcgaggaagagttccctccagagaacctcaagaaacggttggatcagctagagaagaccaaaaccgagaagagaaagccagcagctgttcctgccaacaaaagaacccgagccagctacaacggtccaatgccaccagccaaagccgggcgtatcacaaacgcatacgtctcttccttcccgttcatcagatcaccctcattgtttctttgcttttagtataagtagtttacttttatatgatcaaaatgcgaaagaatagttgctttctcaaacttttccacatgaaaaagggttccaaaagagaaccgtatttcaaaaa

SEQ ID NO: 122305 - DNA, 619 bp, Arabidopsis thaliana
  unsure (1)..(619): unsure at all n locations
angntncaaacngatcgnttttccttcccggtaatcagntcnccttttaatttcctcaattacggttcancangcngttnccccatcccccacctacaacagtcttcngcaacangaggccccccttatcccatactctcccggngatcatcccaggctcatcccaaggctctcctatcgggttaccccagcgtacaacggttattgtaatggtccagttcctgctccagctcctccagtttaccacccacaccatcatcaacaccaccaattccaccatcagcaacattactactgaattagaagacagtgtgacaacaaaacaaggaagaagattggtaataaccaacaaatccctgatactgtgacaactgctactactctggtgttctccctctctgggtctattgtcttcctacgtcgtcgtttttgtctgtaatatctctttctcagcctaactctcttagtaacttagcttatatcctctggtgtgtttattattaatcgcatataaaacaaaacccaagcttttgtaatgtttaatatcccgtcccccaaaaaaaaaaaaaaaaaaacaaaaacagatcaaaaaaaaaaaaaaaaaaaaaagggcggccgc

SEQ ID NO: 122306 - DNA, 597 bp, Arabidopsis thaliana
ggtgggggggggtagaaatacgccgaggcactcattctgactcattattgggaaagccggcacgcctgcaggtaccggtccggaattcccgggtcgacccacgcgtccgcggacgcgtgggcgcgaaacagagtaaggctcactttgttttagctttctcctctacttcgataatgccgtttgctccttccttgttgtcatcgtcttcctcagtctctcaatttcttcccagattccccaacgcgactagattcaatgtaactccacggagcagagccgccaccgtcgtcgcggcatccgtcaccgacctagccggggtcgacagtacaacaatcgccgtactcggtggaggatccgtagcagcactcgcggcgatggtttccttaacggatccggagaggaggcggaaattgcaggcggaggaagttggcggaggcgataaggaggttgtgagggagtatttcaatagcacggggttcgagaggtggaggaagatctacggtgagactgatgaagtgaatcgagtacagaaggatattcgactcggtcatgctaagacggtggagaacacgatgcttatgctgactgaagatagat

SEQ ID NO: 122307 - DNA, 827 bp, Arabidopsis thaliana
gcccttcgttgttcatcggaatccctagaacactcgatttcagcaaaatcaaatcggattcagtgatcaaaagtcaatttggtcgagaagaaattgagcgttgaagatgacggaggcgatgataagaaataagccaggaatggcgagtgtgaaggatatgccgctgcttcaggatggtccgccaccgggtgggttcgcaccggtccgatatgcccgccggatatccaatacgggtcctagtgcaatggccatgttccttgccgtttctggtgcctttgcttggggaatgtaccaggtcggccagggaaacaaaatccgcagggcattgaaggaagagaaatatgctgctcgtagaacaatacttcccattcttcaagcagaagaagatgaaaggtttgtgtctgagtggaaaaagtatctggaatatgaggctgatgtaatgaaagatgttccgggatggaaagttggcgagaatgtgtacaattctggtcgctggatgcctccggctactggggaactccgtcctgatgtgtggtgatttcctagtttctctcaaatgcatatgatgatgatgaatgatgtttcgctgaggattgatatgttcttgttatatctttttttcttcgggtaataagagaatgattcaacagacagtattcttcttgtattggttttctcttaagtgtttcaatcgtaatatgaggcaaaaacagtttcatgattccaaaaaaaaaaaaaaaaaaaaaaaaagggcggccgctctagaggatccaagcttacggacgcgtgcatgcgacgtcatagctcgtctagagtgtaacgaaagt

SEQ ID NO: 122308 - DNA, 708 bp, Arabidopsis thaliana
  unsure (1)..(708): unsure at all n locations
ccggtccggaattcccgggtcgacccacgcgtccgatcgatttgggattgtgatcgatcgaggaagaagatgacggaggcgatgataaggaagaagccaggaatggcgagtgtgaaggatatgccgttgcttcaggatggtccaccaccgggtggattcgcaccggtccgatatgctcgccggatctccaacacgggtccaagcgccatggctattttccttaccgtttcaggtgcttttgcttgggggatgtaccaagtcggtcagggcaacaaaatccgcagggcgttgaaggaagagaaatacgctgctcgtagagcgattctaccaattcttcaagctgaagaagatgaaaggtttgtgtctgagtggaagaagtatctagaatacgaggcggatgtgatgaaggatgttcctggatggaaagtcggtgaaaacgtgtacaattctggtcgttggatgcctccagctactggagagcttcgtcctgatgtctggtaaattatcaatggctccttttgatgatgatgaatgaatgtttgtttaagcattttagaaccttgatgtttcttgtctctctttttccatcgtataataagagaattgatacatacacagttcatgtattgctggtacggtactgaagtaccttttctgtttttttccctcnnnnnnnnnnnnnnnnnnnnnnnnnnnnnnnnnngagaa

SEQ ID NO: 122309 - DNA, 622 bp, Arabidopsis thaliana
tctcagaatccctagaacacactctgattaacgaatcaaagatcgatttgggattgcgatcgatcgaggaagaagatgacggaggcgatgataaggaagaagccaggaatggcgagtgtgaaggatatgccgttgcttcaggatggtccaccaccgggtggattcgcaccggtccgatatgctcgccggatctccaacacgggtccaagcgccatggctattttccttaccgtttcaggtgcttttgcttgggggatgtaccaagtcggtcagggcaacaaaatccgcagggcgttgaaaggaagagaagtacgctgctcgtagagcaattctacccattcttccagctgaagaagatgaaaggtttgtgtctgagtggaagaagtatctggaatacgaggcggatgtaaatgaaggatgttccgggatggaaagtcggcttagaacgtgtacaattctggtcgctttatgcctttctcttacctgcgatatcttctgtcctctttattcacccttcctccctctcttttattttactttcccccttcttttcttttcttatccttctctttcttttcccatcttcctctcctcttcttctttctctcctttctctctctct

SEQ ID NO: 122310 - DNA, 924 bp, Arabidopsis thaliana
  unsure (1)..(924): unsure at all n locations
atgatacgtcnnnnnnnnnnnnnnnnnnnnnnnnnnnnnnnnnnnnnnnnnnnnnnnnnnnnnnnnnnnnnnnnnnnnnnccacgcgtccggtttgtcttaacgtacaagataatttgaaaggtagacgtagacgttggatacttatttggtaggctcttaagaatcttaggtgtatctctttagtttgaaggttagattcagaatctctgtagattcattagtagctttttctgtgtgatctttgtgttgtatatatatagatcgaattgattttagctggtgaaaggtgaagttgtggtatgaatatgaagaaacagattatggatgagtctgtaaagtcattgatgctgcctcctcctccaccgcttcttcctccatctcagggatatggatcaagaaagatcgatggagacagcataaccaataaacagatcaagaagttctggagacagaagcagatcattgaagaggatcatctctattctgctattaaggctgcagctcgtgtcagagctcgtaatctctctgatgaggactacaaacgctttgaagaaagcttggacatggaggacctggaaaccgaagatcatcagggattgaaagactggtggacaaagagcaaatacgcgtacttgaaccagccggctcttggatctgcagattcactgaagagaaagaggttttcgacttatacaccaaactgtttctcgttcaagccttgcaatcctctttacgcaacttcgctcaatgtcttttgaaccatgagcagcaaactctgcaagatcaatcgtcttgcatatatgtatatatttgttcgtgtgtgtctctgtacatgtcatgtgttattgcttctatattaatggatctggactttggtgtggttgttgatttgtaactgttgaataaaatctttctatggacc

SEQ ID NO: 122311 - DNA, 487 bp, Arabidopsis thaliana
  unsure (1)..(487): unsure at all n locations
nnnnnnnnnnnnnnnnnnnnnnnnnnnnnnnnnnnnnnnnnnnnnnnnnnnnnnnnnnnnnnnnccacgcgtccgggatcatctaaacccttaaagcttctctttttcttcttcaagtcatctgtcttttggtgacttactctgttctgtggagaaacactagttttacattcgagagtttggaaaagttattattatggtaagtcaatcagctggtcaaacaagatttcgaacattcaagtacgagaacaacggagactctagcagaccaacaattgtagtgagagttattgcttgcttccaaccgatggataattgtcaggctgaatactttagacatatactcaaaccagtgacgtagttggtttgtgagcttgtgtttgtatttttggagctggcacctttttttctttttgcctctactttcttatacgattgtttcaagaaaaatcaacaagtgttgcgttccacacatttgagcaacagc

SEQ ID NO: 122312 - DNA, 584 bp, Arabidopsis thaliana
  unsure (1)..(584): unsure at all n locations
nnnnnnnnnnnnnnnnnnnnnnnnnnnnnnnnnnnnnnnnnnnnnnnnnnnnnnnnnnnnnnnnnnnnnnnnnnnnnnccacgcgtccgcaactatcttcttctcactctgttttcgtttagagagattttgcagagatgtcgagacgagcaatggtgataaagatgccaatacttatgatactgatttcatcaatggtgatgacgatggtcgagtcttcgagatcagttaataatggtcatgacgattctgagatcttacgaagacacttgctcactaatggcctcggagtcactcctcccatggggtggaatagctggaaccattttagctgcaacatagatgaaaaaatgatcaaagaaactgctgatgctttggttaccactggcctctctaagcttggctacaactatgttaacatcgatgattgctgggctgaaatttctcgtgacagcaagggaagtctggtgccaaagaagtcaactttcccttctggaattaaagcggttgcggattatgttcacagtaaaggccttaagcttgnngattactcagatgccgggtatttcacttgcagtaaaacc

SEQ ID NO: 122313 - DNA, 426 bp, Arabidopsis thaliana
aaaaaaactaacctttgtctaaaacccagaatctggtaaaccttcacactcaaaaatgttttactcgcattgtctagtatcgagaaaaggacctttaggagctatttgggtcgctgcctatttcttcaaaaagcttaagaaatctcaagtcaaagctactcatattccttcttccgttgatcaaatcttgcaaaaagagttagatgcgttgacatacagagttttggcgtatcttcttcttggtgttgtaaggatatattccaagaaggttgactttttgttcgatgattgcaataaagcgttgatcggtgtaaaggagtttgtggctaaggaaaggaacagagaattgacaggtgtatcattgcctgcatctatcgagtgtttttccattgctttacctgagagatttgaactagatgcttttga

SEQ ID NO: 122314 - DNA, 516 bp, Arabidopsis thaliana
cagctctctacgactcactatttggaaagctggcacgcctgcaggtaccggtccggaattcccgggtcgacccacgcgtgcgcccacgcgtccggtgatctagcagagagaatcaatgaacacgtcttgccattagaggagaccaaccatttctctcctctctcttgaaaaatctataaccgatttctgcaatggcgacttcagattcgaggtcttctccttcatcatccgacaccgaattcgccgatccaaatcctagctccgatccagagacgaattcggagcgtgttcaaagtcaattagagtcaatgaatttatctcaacctagcgaagtctctgatggtagccacaccgaatttagcggtggcggcgatgataatgatgatgaggttgcatcggctaacgggaacgaaggcggagttagcaatggaggtttattgcgtgaaggtgtggcgggaactagcggaggagaggttttgttaagggcggaaaatccggtggaaatggaagcaggtg

SEQ ID NO: 122315 - DNA, 601 bp, Arabidopsis thaliana
  unsure (1)..(601): unsure at all n locations
agctctctacgactcactatagggaaagctggcacgcctgcaggtaccggtccggaattcccgggtcgacccacgcgtccgatcgaatcaaaatctcaaacctttttcttcatttcttcccccctctctctctctcactctgtttctgatgggtctccgattcccacctaaggtgttggaacatatcctctccttcattgattccaacgaggaccggaactctgtttctctggtctgcaagtcatggtttgagacagaacggaagactaggaagcgagtctttgtcggaaactgttacgcggtcagtcctgctgcggttacacgacggttcccggagatgagatctttgactttgaaggggaagccacacttcgctgactataatctcgttcctgatggttggggtggttatgcttggccgtggattgaagctatggcggcgaaaagttcgtctcttgaagagatcagaatgaagaggatggtggtgactgatgagtgcttagagaaaattgctgcttcgtttaaggattttaaaaggcctgtggtggtttcctttttaaagggttcgttactgatgggancnctgcntttcangtacctt

SEQ ID NO: 122316 - DNA, 424 bp, Arabidopsis thaliana
gatcatgcaaagagtgttttgattttcaagtgtaagcacatcatttctcactttaccatcttttgttctaaatgtctcgcatactagtagaagatgataatgcaacaccgtttcattccatggagattattagctcatctttgactttaggccaacttctcaagaacgttagcgacgttcgtaaggttgaagttggtgacgaaactcctgttcatgaattctttgacagggatggttcttcacttgacggagataatgatcatcttatgcgtcctgttcctttcgttctatctttcaacaaccttacttacaacgtctctgttcgccggaaacttgactttcacgacctggttccatggaggaggacatctttctccaagaccaagactcttctagacaatatctccggtgagactcgtgacgg

SEQ ID NO: 122317 - DNA, 566 bp, Arabidopsis thaliana
cccacgcgtccgcaatgtctctgctttctccagaagatgatacttacgttgtgtgtcaattagctgtacaacgtcttcttcacatgttacacgaacactccacttacgaaacgaaatagttatctcttcctgaagagtggaattctttctcgaatcttagaaaattccatttagaactaaagacgagagagagatccagtttctcgtcccagttaagctatggccatgttcaaaaccttatcttttttgttccttttgtgctttcagatacatggaacggtggctgcagatgaaaattccttgttttcattcaatggttttgtaaaatctccgagctttgacaagagggttgctctgtttggagattcgaagctggtcaatgacagttctttgattcagctgactgactcagtgactcgaagcgttggtcgagtcgtttacaagaaacccatcaatcttttcaaaggtaaacagaggaattcgagatctttctctactcacttctcgttttcttccatgtccaacgagattggtgatgatgtaatggcttttgtaatggttccatc

SEQ ID NO: 122318 - DNA, 897 bp, Arabidopsis thaliana
  unsure (1)..(897): unsure at all n locations
atgatctnnnnnnnnnnnnnnnnnnnnnnnnnnnnnnnnnnnnnnnnnnnnnnnnnnnnnnnnnnnnnnnnnnnnnnnnnnnccacgccgtccagctttgacaacattcttaaagagaaggatttttggactgacacagagaatgctataaggaatgcctacagatcaacagatgccgtgatattgcagcagtcccttaagcttggtaaaggcggatcaacagctgtaacgggaattctaattgatggtaaaaagctagttgttgctaatgttggagactccagagcagtgatgtctaagaatggtgttgcgcatcagctatctgtcgatcatgaaccaagcaaggagaaaaaagaaatagagagccgaggtggctttgtgtcaaatattccaggggatgttccacgagtggatggacagttagcggttgcaagagcatttggagataagagcttaaagttacatctgagctcagaaccggacataacacaccagacaattgatgatcacactgaattcatccttttcgcaagcgatggtatttggaaagtattatcaaaccaagaagcggttgatgctatcaagagtatcaaagatcctcatgcagctgcaaagcacttgatagaggaagctatatctaggaagagcaaagatgacatctcatgtatcgttgtaaagttccactaatcttctcttcttcttatcaaaagctattttgtctataagttaccatcaagttgcaagatagagaaatatatgctcaagctgtgtctgtaaaaacccagtaatgaggtttcccagaagatgtaatatattatcgaaaaaaaaaaaaaaaggggcggccgctctagaggatccaagcttacgtacgcgtgcaacgacgtcatgctgttttat

SEQ ID NO: 122319 - DNA, 647 bp, Arabidopsis thaliana
  unsure (1)..(647): unsure at all n locations
tntttctatntggncccnggcnggttctagatgnttcccntcgctnttgcggtctgncccagccagggnaaaggaatggggccccgggtgcttgtgtcaattttccnggggnntcccccgggtggtggacagttaccggttgcaagagcatttggagataagagcttaaagttacatctgagctcagaaccggacataacacaccagacaattgatgatcacactgaattcatccttttcgcaagcgatggtatttggaaagtattatcaaaccaagaagcggttgatgctatcaagagtatcaaagatcctcatgcagctgcaaagcacttgatagaggaagctatatctaggaagagcaaagatgacatctcatgtatcgttgtaaagttccactaatcttctcttcttcttatcaaaagctattttgtctataagttaccatcaagttgcaagatagagaaatatatgctcaagctgtgtctgtaaaaacccagtaatgaggtttcccagaagatgtaatatattatcgaaatcgcaacagccttaagataaaagaaaaaaaaaaaaaagnnnnnnnnnnnnnnnnnnnnnnnnnnnnnnnnnnnnnnnnnnnnnnnnnnnnnnnnnnnnngaatcgnnnnnnn

SEQ ID NO: 122320 - DNA, 662 bp, Arabidopsis thaliana
  unsure (1)..(662): unsure at all n locations
cccacgcgtccgcggacgcgtgggctgacattggcaaacccggctggatccctcgtgttctcgggtatgatcgcgagtagcatatacgaccgggaagcagaaaggcaagctcacggctccgtgtttgatccagatgacgcccttagatgcaatggttctatctgtttcttcttgacatcactcataatgtctggattctgcatcatcgcttgcatgttgagtatgattcttgtgcgtcgtaccaagtctgtctacactcatctctatggcaagacccgcacctaagatctctgttcccttttatatatgatcgtgctcagcttcttattctttggtttttgtcttcaattctacgatccagatgttttcgtctctgtatcgatttttttgtttgtttctgtatcgattttgttgttggtagtcaattttgtaattgatttgtatgttttttgtattcatatccacggcaacatctaccatgagtagacttacacaaagatctttagacagtcgcatatatgaaataaatttctgcttgttttccaaaaaaaaaaaaaaaaaaaaaagnnnnnnnnnnnnnnnnnnnnnnnnnnnnnnnnnnnnnnnnnnnnnnnnnnnnnnnnnnnnnnnnnnnnnnnnnnacattcnnnnnnnnnnnnnnn

SEQ ID NO: 122321 - DNA, 742 bp, Arabidopsis thaliana
catatagagaagagcaaaaccctaaagcccactcatcttctcaattcccagatcatctacaatagtcatttctcttcgatttcttcaaactctcatcaaatcgtttatctgttctaaatttcgaagaagacgatgagtacaggcgcaggaagcggaacaaccaaaggtggcagaggaaagccaaaggccaccaaatccgtctctcgatcatctaaagccggtcttcaattccccgtcggaagaatcgctagattcctcaaatccggtaaatacgccgagcgtgtcggtgccggagctccggtctatctctccgctgttctcgagtacctcgccgccgaggtgttggagctggcgggaaacgcagcaagggataacaagaagacacgtatagtaccaagacacattcagcttgcagtgaggaacgatgaagagttaagcaaacttctgggaagtgtgacgattgcgaatggaggagttttgccaaatattcatcagactcttttgccatccaaggttggcaagaacaaaggagatattggatctgcttctcaggagttctgaggttcttagacttcttagttcagttctcttgtttggattcggaacttgtaaaatagaccctgatggtgttttttggggatcaaattaggttttaaagctaagtatatttggcttttgcctaagtatgtttaattagtgaatgatatgatatttcggaacgaatcatgtatcaatggaactg

SEQ ID NO: 122322 - DNA, 520 bp, Arabidopsis thaliana
cgcgtccgcatatccacttgtttttagccttctcaatcattctctcttctctctccctctctgttctcaaactccattttagtagcaagcttagatctcctccttccacagtcactttctcttctttctctgcttttgtttcttcaatcgatttgcttcagatttccccagattatatagaattcgatgtcaagacacagaattcacatgggttttgtctaaaaatcataaaaatcatatctttttacggatttgaagatgaatcagaattcctctgttgcggaggcgacgcttcagcttaattccggtgaaaaaccatcgccgggatcgattccgtttatctcctctggtcaacacggaaacataagcacttcagcgacgagttcgacaagcacaagctcaggtagtgctcttgccgtagttaaatccgccgtgaaaaaaccaactaaagatcggcatactaaagtcgatggtcgtggacggcgaattcgtatgccggcgatgtgcgccgctagagttt

SEQ ID NO: 122323 - DNA, 409 bp, Arabidopsis thaliana
cggacgcgtgggcggacgcgtgggatttagggtttttctctcccccgagcttgcttttccgttgggtgaacgactaccgttgattttcttcgtttttttggataccgattcgattctctctcaccgatttttgaggttctctatttttcgtggataagaagataaagttattgtttattgataagttttctgctgggaagttgcaactttttctagatttaggacgttacaaatttcaatcatgagtgcatcatgggcagatgtggctgattcagagaaggccgtttctcagtcaaagcctccttatgttcccccacacctacggaacaggccatcagagcctgttgctgctcctttgccacaaaatgatcatgcagggtatggtggtcaaccagctgggtctcgttgg

SEQ ID NO: 122324 - DNA, 550 bp, Arabidopsis thaliana
  unsure (1)..(550): unsure at all n locations
agctcnnnnnnnnnnnnnnnnnnnnnnnnnnnnnnnnnnnnnnnnnnnnnnnnnnnnnnnnnnnnnnnnnnnccacgcgtccggcagagcatagagaaaaacataacaatggaggttgagaagacagagaagaacattgcagaggatgatgagtctaagatcatctacagaggatggaaagtcatgcccttcatcattggaaatgagacatttgaaaaattggggattgttggaagttcatcgaatctggttatatacttaacgacggttttcaacatgaagagcatcacggctgcgaaagtcgtcaacatctacggtggcacaagcaactttggcaccatcgtcgctgctttcctctgtgactcctactttggccgctacaagaccctatctttcgccatgatcgcttgctttctcggttcggtggcaatggatctaacggctgtgattcatcccctgcatccagctcaatgcgctaaggaaataggaagcgtgtgcaatgggccatccattggacaaatcatgtttctcgccggagcaatggttttgc

SEQ ID NO: 122325 - DNA, 672 bp, Arabidopsis thaliana
aagacgatgttgcgggtttacaagaggcagctggagccagatttagccagattgagttgattggaagaggctcttttggtgatgtctataaagcgtttgataaggacctcaataaagaagttgccattaaagtaatcgacctggaagaatcagaagatgagatcgaagatattcagaaggaaatttcagtattgtcacaatgtcgttgcccatatatcaccgaatactatggttcttaccttcatcagaccaagttgtggatcatcatggaatatatggccggtggctctgttgctgatcttcttcaatctaataatccgttggatgaaacatcaatcgcttgtatcacacgcgatttgcttcatgctgttgaatatctgcataatgagggaaggatccacagagacattaaagctgcgaatattttgttgagcgagaatggcgatgttaaggtggcggactttggtgtgtctgctcagctaacgcggacaatatcaagaaggaagacttttgtaggaaccccattttggatggcaccagaagttattcagaactcagaagggtataatgagaaggcagatatttggtcgctcggaataacagttattgagatgccaaaaggagaacctcccctagctgaccttcatcccatgagagtgctttttatcattc

SEQ ID NO: 122326 - DNA, 361 bp, Arabidopsis thaliana
ctcgagccgaatcggctcgaggtttttagggttttagcggttgctctctcggaagccagagagaagagggaagaggaagtctaattcctctgcgttttttgcaattagggttttctcaattggaatcgaaaatggtgacagacaagagcaagaaggcgaaaaccgaagaagaaaacgtcgagcaaatcgatgcagagcttgtcctctcaatcgaaaagcttcaagagatccaagacgacctcgagaagataaatgaaaaggctagtgatgaagtgttggaagtggagcagaaatataatgtgataaggaaacctgtttatgacaagcgtaacgagatcatcaaaaccatccctgatttctg

SEQ ID NO: 122327 - DNA, 824 bp, Arabidopsis thaliana
actcactatagggaaagctgctacgcctgcaggtaccggtccggaattcccgggtcgacccacgcgtccggttggttctctagtaatgctatggtctccgaatgtttatgtgttgctcttaggaaggttgttagatggatttggggttggtcttgtggtcacacttgttcctatttatatatctgagactgcaccacctgagattaggggactgttgaatacgctaccgcagttcactggctctggagggatgttcttatcttactgtatggttttcggaatgtcgttgatgccatcacctagctggagattgatgcttggtgtccttttcatcccttcccttgtctttttcttcctcacggtcttcttcttgcccgagtccccaaggtggctcgtgagcaaaggtcgaatgcttgaagcaaagcgggttcttcagagactgcgtggtcgcgaagatgtgtctggtgagatggctttgttggttgagggtcttggaattggaggtgaaacaaccatagaggaatatataattggtcccgcggatgaagttactgatgatcatgatatagctgtggataaggatcaaattaagttatatggtgcagaagaagggctgagttgggttgctaggccagtcaaaggaggaagcactatgagtgttttgtctcgccatggaagtacaatgagcaggaggcaaggctcattgattgatcctcttgtcacactgtttgggagcgttcacgagaagatgccggacactggaagcatgaggagtgccttgttcccacattctgggagtatgttcagtgttggagggaatcaac

SEQ ID NO: 122328 - DNA, 390 bp, Arabidopsis thaliana
aaaattacagacagagaagagagagatcactatggctgtcggagatgatgatctggagaacagaatgtcggcgaaagatcgaggaatcggaagcagaggcggtgatcggaatcgaatcggaccaccgcctctgccggtagccttgtcgtcggcctcctgaatttggcgataacgcgttgtccgccgcggtggacgtcgtggcttgttccgatgttcgttgtggctaacgttgcggttttcgtcgtggcgatgttcgttaataactgtccgaatcatttcgagtctcaccgtctcagaggtcactgtgtcgccaagtttctcggtagactctcctttgagcctctccgaactaatcctctctttggtcgatcttctcacacattggagaag

SEQ ID NO: 122329 - DNA, 614 bp, Arabidopsis thaliana
  unsure (1)..(614): unsure at all n locations
cggcannnnnnnnnnnnnnnnnnnnnnnnnnnnnnnnnnnnnnnnnnnnnnnnnnnnnnnnnnnnnnnnnnnnccacnngcgtccgcttttaaccatcaccctataagtggttataactagtaacttgaaatagaaacactctatctctaaaagaggcaaccaaacaaacaaggtctagctttttataaccaaactctgcttctgaacagagttagtcaaagagagagaagccatggaagctatgaaggagactgtggaggagagcttgagagagatgagagagacgtttgcgagtgggaggacgaggagtctgaagtggaggaaggcacagatcggagctatatacgagatggttaaagacaacgaagacaagatctgcaatgctctgtttcaagatttgggcaaacacagtactgaagcttttagagatgagcttggtgttgtcttgcgaacagctactgttgcaatcaactgtcttgataaatgggccgtccccaaacatagcaaacttcctctgttgttctacccagcaaaagggaaagtcatatcggaaccctatgggacgggtcttgttctgtctaactggaatttttctatatctttgtctctggat

SEQ ID NO: 122330 - DNA, 1032 bp, Arabidopsis thaliana
  unsure (1)..(1032): unsure at all n locations
nnnnnnnnnnnnnnnnnnnnnnnnnnnnnnnnnnnncacacgcgtccgcggacgcgtgggcggacgcgtggggccaagctaaaaatctcatagatcagagtcgtcgtcgtcaacttcatcatcacaaaaatctcagctttgtctctcttattcctcctttttctgctccttccgattcttcatcgcgccacttgtcttcttcttcttcttccgatatgtctgcttctgattcctcttcctctcttcccgttactcttgacaccatcaaccccaaggttatcaaatgtgagtatgctgtccgtggagaaattgtcaacattgctcagaaattgcaagaagatttgaagactaacaaggacgcttatccctttgatgagattatctactgtaatatcgggaatcctcaatctcttggtcaacagcctataacattcttcagagaggttcttgctttatgttcctacacagccctgttggatgagagtgcaacacacggtttgttcagttctgattcgattgagcgtgcttggaagattctggaccaaattcccgggagagcgactggtgcttacagccacagccagggtatcaaggggttacgtgatgcaattgctgatggaatcgaagcccgtgatggtttccctgctgatcctaatgatatattcatgacagatggtgcaagtccaggggttcatatgatgatgcaacttctcataacttcagagaaagatggaatcctttgtcctattcctcagtatccattgtactcagcttcaattgcccttcacggtggaactttggttccatactaccttgatgaagcatcaggatggggtcttgaaatatctgagctgaagaaacaacttgaagatgctaggtcaaagggcatcactgtgagagctttggctgtcattaaccctggaaacccgacagggcaggttctttcggaagaaaaccagcgtgacgttgttaagttctgcaagcaagagggtttagttcttttagcagacgaggtttatcaagagaatgtct

SEQ ID NO: 122331 - DNA, 581 bp, Arabidopsis thaliana
  unsure (1)..(581): unsure at all n locations
atcgacttacttagggaaagctggtacgcctgcaggtaccggtccggaattcccgggtcgacccacgcgtccgaaaaagcaatttctgagcgtggaggacaaggcaaaattcggtgtgcaaggcactggatattgggacccttgtttcctcgtgagagaattttcaatcctagggcttaaagagcacgttcctagtataaagctgattcacagatgcggagattcttgattaaccaagctaaaggtctcgtcgaccattctcgtcgtcaacatcaccacaaaagtccaagctttctctctcctcaacctcgtccccttgcttcttctcctcctgctctgtctcgtttcttctcttctacttcggagatgtctgcttctgattccacttcttctcttcccgttactcttgactccatcaatcccaaggttctgaaatgtgagtatgctgttcgaggagaaattgtcaacattgctcagaagttacaagaagacttgaagactaataaggatgcttatccctttgatgagataatctattgcaacattgngaatcctcaatctcttggtcagctgcctataaa

SEQ ID NO: 122332 - DNA, 636 bp, Arabidopsis thaliana
actttctcacatctactcgatttctgaatcgcgaacgcagcgagcgatccggaatcgagagagagagctaccaatttttccaacttgttcggttccttataaagctgtttactttcccttgcgaattctctctctctctactataaagcaatacccttttctttcttttttggtaacccccaaaccctactttgtccagcgagaaaggaagaggggtttcgtctgattccgctaaatctctagtctttatctaaagatcatggattccgatgatgatatgcacgatatggactcggtagattatgattattacagcggcggcacctatgatgacaacgatagtgatgaaactgatttcgggtttggtgaggctgacaccgacgatgccgccatcatcgcctcctatcgctctaagagtaattatgttgttctcaaggaagaagatattcgcaggcatcagaacgatgatgttgggcgagtttccgcggtcctctccataaccgatgtcgaagcaagtactttgcttcttcactatcactggagtgtcaggaaagttaatgatgaatggtttgcggatgaggagagagttcgcagaactgttggcatattagagggacctgttgttacaacacctga

SEQ ID NO: 122333 - DNA, 632 bp, Arabidopsis thaliana
  unsure (1)..(632): unsure at all n locations
ccggnccggaancccgggataccaggcggctaacacccgnccgcccacgcggccggaaaatttctctctaaatatctgattcaaacgcatttggtaggctgagagaaagaaagaaaaagataaagatggatcacgcagcagatgctcaccgtacggatttgatgaccattacaagattcgtgttgaatgaacaatcaaagtatccagaatctcgtggtgatttcaccattttgcttagtcacatcgttttgggttgcaaattcgtttgcagtgctgttaataaggctggtttggctaagttaattggacttgcaggggaaacaaacattcagggtgaagagcaaaagaaacttgatgtgctctctaatgatgtctttgtcaacgctttggttagcagtggtagaacttctgttcttgtctcggaggaagatgaggaagctacgtttgtggagccatccaagcgtggaaagtactgtgttgtttttgatccgcttgatggatcttcaaacattgactgtggtgtttccattggcacaatttttgggatttacacgttggaccacactgatgagcccaccactccagatgttctgaaccctgggattgaaatggttgctccaggttttttttta

SEQ ID NO: 122334 - DNA, 658 bp, Arabidopsis thaliana
tttaacgcctcctcctccatttttcaaaaccctaatccgaccggagccatggcggaggtcgacatctcacactcgaagaagaagaagcaagacaaaacggagaacgatgccgccgacaccggagactacatgatcaagccacagagtttcactccagccatcgacacttctcagtggcccatcctcctcaagaactacgaccgcctcaacgtccgtaccggtcactacactccaatcagcgccggtcactctcctctgaaacgtcctcttcaagagtatatcaggtacggtgtcatcaatctcgataaacccgcgaacccttcttctcacgaggtcgttgcttggattaagcgtatcctccgtgttgagaaaaccggtcacagtggtactcttgacccaaaagtcactggaaacctcattgtctgtattgaccgagccacacggcttgtgaaatcgcagcaaggtgcgggtaaagagtacgtttgtgttgctcggcttcactcagctgtccctgatgttgctaaagtagctagagctcttgaatcgctcactggagctgtgtttcagaggcctcctttgatctctgctgttaaaagacagcttaggattaggacaatctatgaaagcaagctgcttgtgtatgatgctgataggcatt

SEQ ID NO: 122335 - DNA, 1010 bp, Arabidopsis thaliana
  unsure (1)..(1010): unsure at all n locations
caattttcggttctaaacgtttgattgggagacgttttgatgatccacagactcagaaggagatgaaaatggttccttacaagattgttaaggcacctaacggtgatgcttgggtcgaagccaatggacaaaagttttctcccagtcagattggtgctaatgtcctcactataatgaaggaaacagctgaagcttacctcgggaaatctatcagcaaagctgttgttaccgttccagcttatttcaatgatgcacagtcacaagccactaaggatgctgggaaaatcgctggtcttgatgtccagaggatcatcaacgaacctacagctgctgcactatcatatggtatggacaacaaggaaggtgtcattgcagtgtttgatcttggaggtggaacctttgatgtttctatcttggaaatctcaagtggtgtttttgaggttaaagcaacaaatggagatacctttttgggaggagaagactttgacaacaccttgttggagtacttggttaatgagttcaaaagatcagataatattgatctgactaaagacaaccttgccctccagaggctgagagaagctgcagagaaggccaagattgagctctcatcgacaactcagaccgaaatcaacctgcctttcattacagcggatgcttcaggagctaagcacttgaacatcaccttaactaggtcaaagtttgaaggtttggtgggcaagttgattgagagaacaagatccccgtgccaaaactgcctgaaggatgctggagtcacaattaaggaagttgatgaggttcttcttgttggtggaatgacccgtgttcccaaagtgcaagagatagtttctggatctttgggatgaannnnnnnnnnnnnnnnnnnnnnnnnnnnnnnnnnnnnnnnnnnnnnnnnnnnnnnnnnnnnnnnnnnnnnnnnnnnnnnnnnnnnnnnnnnnnnnnnnnnnnnnnnnnnnnnnnnnnnnnnnnnnnnnnnnnnnnnnnnnnnn

SEQ ID NO: 122336 - DNA, 459 bp, Arabidopsis thaliana
atctgcaatcgcttccatggaaaccaaattcagtgactttacctgaaattaatcttttgaatcccaagcaattgactgcctcgagttctcagtatcgtagaactcgaaactggagaattagaagttcgtcggaagataatgtagcaatttcgagtgacggcggagatttgaagaattctctgtccggtattgtgggaaatcaagtggaggagctattgagcagagaagagaacaaaggtttgcttgatggtctggaaaaagcttcgttgagagtggagattgcgaagagagagctcgaagatatagagagacaagaaattgaggcgaaattgctacaggattatattaatcagctcgaatcaagagccgcagagattgcagaatgccagcaggagattgacgcagcaagatcaatggttgaggaagcagaacgctccttgtcattagcagataactcga

SEQ ID NO: 122337 - DNA, 363 bp, Arabidopsis thaliana
aagaaaacacagagagagagagattcacttccccatttcagaaaatcaaaatgggtggtggtggtgatacaacagataccaatatgatgcagagagttaattcttcttctggtacatcgtcttcttcgatccctaaacacaatcttcacttgaatcctgctcttatccgctctcaccatcacttccgtcaccctttcaccggagctcctccaccgccgattccacccatttctccttactctcagatcccggcgactttacaacctagacattctcgctctatgtcgcaaccgtcatctttcttctcctttgattcattgccgccgttaaatccttctgctccgtcggtttcggtgtcggtgg

SEQ ID NO: 122338 - DNA, 376 bp, Arabidopsis thaliana
ctctctctctctctctctctgacagttctttctgtctctctctctgctcgatgcgaagaatcgagcatttgtgtcgctctctggaacgtgtgtcttcatcgggaatataaccataatctccacgagctgcttgaatgcgtacccttcgttccctaatgttggcggcggctctagcagtggctttggccgtgactggttttgcagcatcgccgttaccttcggcctatgcgaaatacgcagctggtccgaccaagattcttcctttacaaatggcttttcctctagacgagctaatggagctgagtgaacttatagcgcgtgatcgtgtcagacacgcgcgaatcttactcggcggtggtcgtcatagctctgttgg

SEQ ID NO: 122339 - DNA, 550 bp, Arabidopsis thaliana
  unsure (1)..(550): unsure at all n locations
nnnnnnnnnnnnnnnnnnnnnnnnnnnnnnnnnnnnnnnnnnnnnnnnnnnnnnnnnnnnnnnnnnnnnnnccacgcgtccgttatcatctctccataattgcttcgatttctctgcaaagacacaacacaaaaagtgctttttttaatcagatattttctgggcttcactttaactctcttcgtgcttggttttccgatcttagtcgttactaattgagtcggagactgttcatttcctgattctgaagaaagttttggagaaggagaagatgtcaactctgcgagtgagctagggtttagtgtgttttccgatttttgagctcttggggattgttgttttctcttaaagagtcgattttgaatggcggtggagtatgtatgttgcagcccaaacttctttatacatatagctgtgattgtgtttcttgtcttgttcgctggactcatgtctggcttaacattgggtcttatgtctttgagtctcgttgatctgaagttctcgctaaatccggtacacctgaacatcgttaatatgcagcaaagatatt

SEQ ID NO: 122340 - DNA, 526 bp, Arabidopsis thaliana
  unsure (1)..(526): unsure at all n locations
atgatctnnnnnnnnnnnnnnnnnnnnnnnnnnnnnnnnnnnnnnnnnnnnnnnnnnnnnnnnnnnnnnnnnnnnnnnnnnnnccacgcgtccggaattaacctacacaactgaaactcgagttaagaaccggaaacagaatccaattcaaccaaaccgaatcgaaccgaaccggagtttttatccaatggtgaagcaagcgatgaaggaagaggagaagaagagaaacacggcgatgcagtcaaagtacaaaggagtgaggaagaggaaatggggaaaatgggtatcggagatcagacttccacacagcagagaacgaatttggttaggctcttacgacactcccgagaaggcggcgcgtgctttcgacgccgctcaattttgtctccgcggcggcgatgctaatttcaatttccctaataatccaccgtcgatctccgtagaaaagtcgttgacgcctccggagattcaggaagctgctgctagattcgctaacacattccaagacattgtcaagggagaagaa

SEQ ID NO: 122341 - DNA, 1377 bp, Arabidopsis thaliana
  unsure (1)..(1377): unsure at all n locations
ctatagggattgctggtacgcctgcaggtaccggtccggaattcccgggtcgacccacgcgtccgagaaaacttattagagagtccatcagggatatctaagggagaatttgggtcgttttctgaaagcacgagactggaacgtatgcaaagctcacacaatgctggttgagtgtttgcgttggagggtggataatgaaattgacagtatcctatctaaaccaattgttcctactgagttgtatagggatgtacgagattctcaactcataggaatgtcaggttacaccaaagagggcttgccggtctttgctattggcgtcggcctcagcacatttgacaaagcttctgttcactactatgtccaatctcacatacaaatcaatgaatatagagaccgtgttttactgccttctatttctaagaagaatgggaggccaatcaccacctgcgtcaaggttctagacatgacggggttgaagctttcagctctaagccaaatcaagttagtgactatcatatcgaccattgatgatctcaactatccagagaagacaaacacgtactatgttgtgaacgctccatatatattttccgcatgttggaaggttgtaaaacctcttttacaagagaggacaaggaaaaaagttcatgtcttatccggttgcggaagggatgaattattgaagattatggacttcacatccctgccacatttctgtagaagtggaagctctgggtcatctcaccacactcagagcgcaaattgtttttctatcaatcatcccttccatcaacagctatacaactatgtgaagcaccattatgaaacccaaggacaagcagaacctgcaaagcaaggatcattccacgtgggttttcctgagcctgaagctgaacgttgtgtgatagccaaaaccatagaatcggagctgcacaagtttgagaaccgcaacggtctggccgtgtccattgatgacagaaaatccagtcatgaaacactggcaaatggtgacctctgaatgcttctgagggaattccttcagtgcctccacaactgagatatatattttacaggtgagctagcaattcaaatgagtaagggagtactgagctgtgtccgctccctagccatgcaaatgtaaagcgaaaagaagagaataaatcttgaactgaatgcacttctggttttatgtatagtattatttgatcctctaatgtagcaaatttatttgtgggaaatctacctctcatttccctaagcatctgtgtttttggtgtttgatctgctctttggctgaacaacaacagtttaggnnnnnnnnnnnnnnnnnnnnnnnnnnnnnnnnnnnnnnnnnnnnnnnnnnnnnnnnnnnnn

SEQ ID NO: 122342 - DNA, 548 bp, Arabidopsis thaliana
  unsure (1)..(548): unsure at all n locations
atgatttnnnnnnnnnnnnnnnnnnnnnnnnnnnnnnnnnnnnnnnnnnnnnnnnnnnnnnnnnnnnnnnnnnnnnnnnnnccacgcgtccgcccacgcgtccggaaaaaaggaacagactttttacttgtgccattgaccaagaaccacaaagaggaggaaatcaaatggtttttgggagtttgatggattgattgattattcagcaaatcccacagaagaaatcagaagctgcttcttattttttggtcacgaccagtcttaatcaaaaggaaggagtcaaaacaatggggatcgtttcagaagaagccattgatgaattccaagagctgatggatcaagttgaggagccactgaagaaaacttatgagagagtccatcagggatatctaagggagaatttgggtcgttttctgaaagcacgagactggaacgtatgcaaagctcacacaatgctggttgagtggttgcgttggagggtggataatgaaattgatagtattctatctaaaccaattgttactactgagttgtatagggatgtacga

SEQ ID NO: 122343 - DNA, 476 bp, Arabidopsis thaliana
tggactcatagtttggtgccaagtgacccaaaaaaaaaaaaaaaaagtcgatcttgaagatttcatactttttctggcaattctgtttggtttcagaggaaggagtcaaaacaatggggatcgtttcacaagaagccattgatgaattccaagagctgatggatcaagttgaggagccactgaagaaaacttatgagagaagccatcagggatatctaagggagaatttgggtcgttttctgaaagcacgagactggaacgtatgcaaagctcacacaatgctggctgagtgtttgcgttggagggtggataatgaaattgacagtatcctatctaaaccaattgttcctactgagttgtatagtgatgtacgagattctcaactcataggaatgtcaggttacaccaaagagggctttgcggtctttgctattggcgtcggcctcaacacatttgacaaagcttctgttcactac

SEQ ID NO: 122344 - DNA, 761 bp, Arabidopsis thaliana
  unsure (1)..(761): unsure at all n locations
tgatactccnnnnnnnnnnnnnnnnnnnnnnnnnnnnnnnnnnnnnnnnnnnnnnnnnnnnnnnnnnnnnnnnnnnnnnccacgcgtccgtacgggtgtcagaagacgacagaaggggacgaatgagatcggcaacaagagcgtaaaccctagcagcagacacaacacgagttcatcgagaagcaagatgactttcaagcgaaggaacggtgggaggaacaagcacaacagaggacacgtcaacccaatcagatgctccaactgtggcaaatgttgccccaaggacaaggccattaagaggttcattgtgaggaacattgtggagcaggctgctattagagatgttcaggaagctagcgtctatgagggatacacattgccgaagctatatgcaaagacgcaatactgtgtctcctgtgctatccactctcatgtcgttagagtccgttcccgcaccaaccgcagggttcgtactcctccacctcgtttcgccagacgcaaggaggatactcccaagcctgggcaaccaggacaggcacctcgtcctgctggacctggagctgcagctgcagtgcaccgcgtgtctgaagccttcaagcagagctttctggcttgtttccaatgtcctgtaacgctttaagntgttgcccngntaannagtttncatggntcngaatctgaaacattnggcggattcttaaccnggggncctantttaagggccaccggggggnccaanttttcccttnganggaatttgg

SEQ ID NO: 122345 - DNA, 700 bp, Arabidopsis thaliana
aagcggacacacacttaagtccatcgacatctggagagtgagaagagaggaatagccaaagatgactttcaagcgaaggaacggtgggaggaacaagcacaacagaggacacgtcaacccaatcagatgctccaactgcggcaaatgctgccctaaggacaaggccattaagaggttcattgtgaggaacattgtggagcaggctgctattagagatgttcaggaagctagcgtctatgagggatacacattgccgaagctatatgcaaagacgcaatactgtgtctcctgtgctatccactctcatgtcgttagagtccgttcccgcaccaaccgcagggttcgtactcctccacctcgtttcgccagacgcaaggaggatactcccaagcctgggcaaccaggacaggcacctcgtcctgctggacctggagctgcagctgcagctgcaccgcgtgtctgaagccttcaagcagagctttctgtcttgttttcctatgttcttgttacgtctttaaggatgtttgtctctgtttaacatagttttgccatgtggatcttgaattctgtcaaactatttcaatagttgattcaacttgtttttttttttgttcctataaaaaaaaaaaaaaaaaaaaaaagggcggccgctctagaggatccaagcttacgtacgcgtgcatgcgacgtcaggctgtct

SEQ ID NO: 122346 - DNA, 616 bp, Arabidopsis thaliana
  unsure (1)..(616): unsure at all n locations
tcgggtcaagcgtcgcttcgtgcgacgacatcgatagagcgggaagaatgagatcgggggaaagagcatgaaccctagcagcagacacaacacgggttcatcgagaagcaagatgactttcacgcgaaggaacggtgggaggaacaagcacaacagaggacacgtcaacccaatcagatgctccaactgtggcagatgttgccccaaggacaaggccattaagaggttcattgtgaggaacattgtggagcaggctgctattagagatgttcacgaagctagcgtctatgagggatacacattgccgaagctatatgcaaagacgcaatactgtgtctcctgtgctatccactcgcatgtcgttagagtccgttcccgcaccaaccgcaggtttcgtactcctccaacctcgtttcgccagacgcaaggagggatactcccaagccttgggnaccaggncaggnaccttgtccttcttgaccttggggtncaanttgcagtgaacccgngtgtttnnaggctttaaanagnggttttttgcttgttttccaatgtntttttacggnttaaagngnnttttttctntttaaaaaggtttccacgnggnnttaatttt

SEQ ID NO: 122347 - DNA, 580 bp, Arabidopsis thaliana
  unsure (1)..(580): unsure at all n locations
gggactcggagagggnnnaggaagagcaagacgaagganccgagccanagaggtctattaacacaccaaaagcttctncttcttcttcctctcgtctctaaaaatccttcctttctttctgggttttctcgaatcttcatctctcattcaaacccacaagtccgatctcgcgatccaaacaccatggaagaggttgaagaagaagtgagacgaatcgtcgaacaagttaaagagcttcatgactcttccacatccttcgtctcttcttcttctcaagaagagctttctctccgtaacagagcctccgtcgttgactcatcaatccgccgtcttcattctactcttgcctctgacaaacatctcgatcccaagcttttcgaaaagctagaagaggatctgcaacgagctagatgcatgcttgcagatggagacacttcatcgtttcttccatctaaaccctcaagggcggttttgtgagaatgtttttgggacctgtgaatgttagagcttcacgaaaagatatacagccttaaggtcaaggaggatttaatagcttcaggggtaggccagctcttctttt

SEQ ID NO: 122348 - DNA, 403 bp, Arabidopsis thaliana
aggacgcgtccgcccacgcgtccgcaataagctcacggatttctcctcaaaatcctaatccaatcatttctccaattctccaaggagtttggtaatacacaaataacatggaagacgttagaagaagaaacagaggacatcctctgctcagatccaagaagagaggagaaggctacaaccatggcttctcaccgtctcagattcaatctcttgccgtcatctgtcaaactttcctccctccggagaccacgtcggaacagcaagctgttaattcctcccgcccggcctcctctactcaaccaccattcactgatgaggtggcggagatgatagtgaaaaacggacgatcagaagcagtcaaagttttgagaatcatattgatgattttgtcattcagatttgg

SEQ ID NO: 122349 - DNA, 420 bp, Arabidopsis thaliana
ggaagttgtgtgagagaaagaaaaagcccagagagaagagagtgagacccacaacacagacacaaagtagacgaagaagacgacgacgaaacagctctcttcttctctcctctctctcagcatcttctgctggtttggtctttcactaaagtctcggtgtgcacctaaatgtgcttgatccaaggtcgttataattctgtgtacagagccaatgccatatatagaaatgaagagcaagataagcaaggttcttggtgtctgtaagaaacataaagcaagtacaagaaattcttgctctttgtccaaaatatcaggagacttggaaagcataaccgcagctattactacttgccacgacgatgagaaacagcaccctgggttggatactttttctcgggagagtgaaactaatgagcccgc

SEQ ID NO: 122350 - DNA, 983 bp, Arabidopsis thaliana
ctcgctgtccctccttctctttctcattcattgcaatgggcagaagatgctcacactgtggaaacgtaggacataactcaagaacatgttcttcttaccaaacaagagtagttaggctctttggtgttcatctagacaccacaagctcttctccgccgcctcctcctcctccctcgattttggccgctgcaataaagaaaagtttcagcatggattgcttgccggcatgttcctcctcttcctcttcctttgctggttatctctccgatggtctcgcccataaaacacctgaccgcaaaaaaggggttccatggacggcggaagagcaccggacgtttctaattggattagaaaagcttggaaaaggagattggagaggaatctctagaaacttcgtcgtcacaaaatccccgacacaagtggcaagtcatgctcaaaaatactttctccggcaaactaccactctccatcacaagagacgccgcaccagcctctttgatatggtttcggccggcaatgttgaagaaaatagtactactaagaggatatgtaatgatcatattgggtcgagctcaaaggttgtttggaaacaaggattactcaatcctcgtcttggatatccagatccgaaagtatcagtatccggctcgggtaactccggtggactcgatcttgagctgaagcttgcgtccattcaatctcctgaatcgaatattagacctattagcgttacgtgaatctatataacacgttatgatcagtttcattagaataattcaaatgtttacatatataatatcttatcgatcctatctaatttgattttgatttaacgttagttactttgataatttcgtcgatattgtttttttggttttttcattgtgagattttttgtcttggaagttggatccatacatatttctgtaaaactttatatttaaggtatatatatctagcgatcataaaagtttcaatattcc

SEQ ID NO: 122351 - DNA, 488 bp, Arabidopsis thaliana
cacaaagatctttctaaagttctaaaacatctctctctctctttctctagaaatttcaaagtctcttcttttcttttctatttgatcatgaattctatgttcagtgccttcgacgctctcttcgcagaggtcatgggaaagaaccttatggcttcttcgtttactgctactaccgcaacaaccaaacctgccgccgcgccgcaaacacaaacgcaggagaaggcaaacgcaagtagcaagaagataggtttggtgcagaagattccgaggtttgctttggagcttgatggtcttcactgcttcgaaacaatagtccgttcttgatttgattcgttcttggttcttggcttcaagatcagaaacttagaatctgagtttcttatatttttatttattttattaattcattataacatgtgattgtgaatacgttttggaattttgatattgatcgatttgatcccattatatatttcttggattctccg

SEQ ID NO: 122352 - DNA, 578 bp, Arabidopsis thaliana
  unsure (1)..(578): unsure at all n locations
ttgagatatcaatatcaatactcctgtgagaacaaaatgaagctttcttgtggtacaagctttgcgttcttgattctgtttctctttgcggcacaatctatgcatgtctatgcgggtagcttccacaaagacgttcagatacattggggtgatggccgtggaaagattcacgacagagatggaaaacttctatctctctcgctcgacaaatcctctggatccggttttcagtctaaccaggagtttctctatggcaaagccgaggttcaaatgaaacttgtccctggtaactcagctggaacagtaacaacattctatcttaaatctccgggaactacgtgggatgagattgatttcgagttcttggggaaacataagtggtcatccatatactctccatactaatgtttacacaaaaggctcaggagacaaagaacaacaatttcatcttatgggttggcccaaccgctaactttcacacttaattggatcacatgggatccccnacgggttntttttcagttnaggggtncnttnggggggtaaaganccngggcaattggggccgncccacgnnc

SEQ ID NO: 122353 - DNA, 528 bp, Arabidopsis thaliana
acgactcactattgggaaagctggtccgcctgcaggtaccggtccggaattcccgggtcgacccacgcgtgcgctaagatactataactactctttccaaaagcaattttaaatggtgtcattttgcggtagaaggttcgccttcttgattatctttctctttgcagcacaatatgagcgtgtctacgctggtagctttcacaaggacgttcagatacattggggtgatggccgtggaaaaattctcgacaatgtcggaaatcttctttctctctcgctcgacaaattctctggttccggttttcagtcccatcaagagtttctttatggcaaagtagaggttcaaatgaaacttgtacctggtaactctgctggaacagtgacaacattctatctaaaatctcctggaactacatgggatgaaatagattctgagttcttgggaaacataagtggtcatccatatactcttcatactaatgtttacacaaaaggcacaggagacaaagaacaacagtttcatctatg

SEQ ID NO: 122354 - DNA, 459 bp, Arabidopsis thaliana
  unsure (1)..(459): unsure at all n locations
aatgtttcgattttaaggtcggaccggagtggattaaactggatttaaaaccaggattttgcctttggcgtaacctttcgaagaggaatgtctgcaaacgagatacccgacgagctatggagaaagatcctagagattggcgtaaagtcttcgactttctcgtacaaagatctttgctgcatctctatctcctctcgccgtctcttccgattgtcctgcgatgattccctctgggatcttctgctcgtccatgatttccctaaccacatcgtctctgcttcttcttcttctgaatctcccaccaagtttatctacatgactagggtttgagagggagaaggagaggaaattagctgcccataggaagagctttactcagggaggggagtgaaatttctttaaatgggggncccggaggantncgggaaatttnggggcnncgattttncccnccngggg

SEQ ID NO: 122355 - DNA, 909 bp, Arabidopsis thaliana
  unsure (1)..(909): unsure at all n locations
gtgaactatacaagactttgacgtcgctcgccgcgtacgtaagctcggaattcggctcgagcgttaaaccaccacatccttccctgaaaccctaaccacaacaatcgccgccgtctctagaaatatccatccacctacttcggctttgtttatcagattttgatgaaaccagatcgggtcttcctctagatccgttctaggttttctatttccaccgtcttatcattatcatcatcatcaattcatcatcatcatcaataatccagatgctcaccaaattcgtcattcatagacatgtctctgtttctgaaagacgattcgattcaaattcgcgaagtctggaacgataaccttcaagaagaaatggatctgatccgagatgtcgtcgacgacttcccttacgtcgccatggacactgagttccccggcatcgtcgtccgacctgtcggaactttcaaatccaacgctgattaccactacgaaaccttgaagacgaacgtcaacatcctcaagatgatccagcttggcctcactttctccaatgaacaaggcaacctccctacctgtggcactgacaagtattgcatctggcaattcaatttccgagaattcgatctcgattccgatatcttcgctctcgattccatcgagcttctcaagcaatcaggcatcgaccttgccaaaaacacgctagacgggatcgattccaagagattcgcagagctcttaatgtcctccgggatcgtccttgaaacgaaaacgtgcattggggttacattnccncagtggggtngatttcggnttacttgnnaaaanctctttganttgccaaaaacctngccgggattcgaaaacagactcnttnaangntcatnancggttatttccgaccgngtnnncattaanacc

SEQ ID NO: 122356 - DNA, 571 bp, Arabidopsis thaliana
ttaatacgactcatatagggaaagactggtacgcctgcaggtaccggtccggaattcccgtgtcgacccacgcgtacgcaatcgataagtaataataatattatctcttcttctctgcttccattttgggtatcgataaaccaccacatccttccctgaaaccctaaccacaacaatcgccgccgtctctagaaatatccatccacctacttcggctttgtttatcaggttcgatatatctatcaccaccgccttcttatctcaatttctgtgtttgatttttgctttgttggtgtttgattttaccgcagattttgatgaaaccagatcgggtcttcctctagatccgttctaggttttctatttccaccgtcttatcattatcatcatcatcaattcatcatcatcatcaataatccagatgctcaccaaattcgtcattcatagacatgtctctgtttctgaaagacgattcgattcaaattcgcgaagtctggaacgataaccttcaagaagaaatggatctgatccgagatgtcgtcgaccacttcccttacgtcgccatggacac

SEQ ID NO: 122357 - DNA, 594 bp, Arabidopsis thaliana
  unsure (1)..(594): unsure at all n locations
atgatactgccagctannnnnnnnnnnnnnnnnnnnnnnnnnnnnnnnnnnnnnnnnnnnnnnnnnnnnnnnnnnnnnnnnnnccacgcgtccgcggacgcgtgggctcagtctcaaagagagtcttggacaagaagtctccttgtaacttcctcgtctttggcttaggacacgatagcttgatgtgggcatctctcaatcacggtggacgcactttgttcctcgaggaagatgaagcttggattgagacagtaactaagaaattcccaaacttggaatcctaccacgtcgtatacgacacaaaagtgaaagattccaacaagcttatggagctaaagagaacagaggattgcaaagccgtgtctgatcctagagattccaaatgtgctctgtctctcaagggttttccagctgacgtgtacgagacgcaatgggatgtgataatggtcgatgctcccactggttaccacgatgaagctccagggaggatgagcgctatttacactgcgggtttattggctcgtaaccgttatgacggtggggagactgatgttttcgttcacgatattaaccggccggtggaggacgagttct

SEQ ID NO: 122358 - DNA, 556 bp, Arabidopsis thaliana
  unsure (1)..(556): unsure at all n locations
cnnnnnnnnnnnnnnnnnnnnnnnnnnnnnnnnnnnnnnnnnnnnnnnnnnnnnnnnnnnnnnnnnnnnnnnccacgcgtccgccaaaaacccaaatcgaaaaatcgattctttagtcagaaaaaatgaggaccaaatctccatcttctcttaatctcaaggtcatattcataggttcctcaatcttgatcttgatcatcatctacttagcaagatcaaacatctcttcttcctcttcaaagccaatctccaaaacaaatctctcccaagaagaagaagaaactcagcataaacaagaaggatgtccaacaacacaacaatgcacaaagatgccactttctttatccgatgcattggttcattacgtcactagtaacgtcactccacaacaaacatttgatgaagtctctgtctcaaagagagtcttggacaagaagtctccttgtaacttccttgtctttggcttaggtcacgacagttttaatgtgggcatctcttaaccatggtggtcgtaccttgtttattgaagaagaccaagcttggattgcgatagtaa

SEQ ID NO: 122359 - DNA, 550 bp, Arabidopsis thaliana
atggtggagagattgatttagatacagagtttgaatctatcttgaggagaagacgaagaagctcagggaatatattgcagttgcttcaagggattcgtgcagggattgcttctgagtatgaaagctctgataacaattgggataattctcgagagagggatagagttataatgattaatccgtataaccaatcgctagttgttccttcggatcagaatcagaatcatccttcattgacttcacttggagattacttcattggacctgggttagatcttttgcttcagcatttggctgagaatgatcctaataggcaagggactccacctgctcgtaaagaagctgttgaagctttaccaacggttaagataatggaacctttgcaatgttctgtttgcttggatgattttgagaaaggtacggaagctaaagagatgcctcgtaagcataagcttcatgctcggtgtattgatccctggctcgagcttcatagttcttgtcctgagagtcgttttgagcttccttctagtgctgatgatgatgatgagac

SEQ ID NO: 122360 - DNA, 513 bp, Arabidopsis thaliana
  unsure (1)..(513): unsure at all n locations
nncnnnnnnnnnnnnnnnnnnnnnnnnnnnnnnnnnnnnnnnnnnnnnnnnnnnnnnnnnnnnnnnnnnnnnnnccacgcgtccgcccacgcgtccggttgttggtgaacctgctcttcctagaactgagattgtgaggcaattgtgggcttatataaggaagaataaccttcaagacccgagtaacaagcggaagatcatctgtgatgatgcgttgcgtgtggtttttgagactgattgcactgacatgttcaagatgaataagttgcttgctaagcatattctcccgcttgatccatcaaaggactctggtcaagcaaaaaaggcaaaaactgaggtggagactaagactgagaccaccgagcctattagttcaactgctattagttcaactgttacattatctgagccacttggtaagttctttggcactggtgagacggagatggcagacgaagagattattcgccgtgtttgggaatacataaaactcaacaatttagaggacccagt

SEQ ID NO: 122361 - DNA, 553 bp, Arabidopsis thaliana
cagctctctacgactcactatagggaaagctggcacgcctgcaggtaccggtccggaattcccgggtcgacccacgcgtccgggctgctttgagtacggcgctgtttaacaatggtatgagttgtggagcctgctttgagctaaaatgcgccaacgaccctcaatggtgtcactcaggtagtccttcgatcctcatcaccgcaaccaatttctgcccaccaaacttggctcagcctagcgacaacggaggatggtgcaacccaccacgtgaacactttgacctagccatgcctgtcttccttaagatcgctcaatatcgcgccggcattgtccccgtctcataccgcagggtgccatgtagaaagagaggaggcataaggttcacaatcaacggtcaccgttacttcaacttggttctgatcactaacgtggctggagcaggagacatcgtgagggctagtgtgaaaggatcacggactggttggatgagtttgagcagaaactggcgacaaaactggcaatctaatgctgttttggttggtcaagcactctc

SEQ ID NO: 122362 - DNA, 437 bp, Arabidopsis thaliana
agcacaaaacctaactctttctctatacaagagcgcaagctcgaaggcgctcttgttctttcttcattttctccttaacaatcaccctcatagtaactttaaaactctctgtttctagtaattcacacacaaaatggctattaaactagcaattctatttaccacatttgttctttttagcctcgccgacgctagaatccccggtatttactccggcggcgcatggcaaaacgcacacgccactttttacggtggcagcgacgcctccggcacaatgggaggagcttgtggttacggtaacctatacagccaagggtacgggaccaacacggctgctttgagtacggcgctgtttaacaatggtatgagttgtggagcctgctttgagctaaaatgcgccaacgaccctcaatggtgtcactcaggtagtccttcga

SEQ ID NO: 122363 - DNA, 1172 bp, Arabidopsis thaliana
  unsure (1)..(1172): unsure at all n locations
tttcatttcaactccaattttgattatcttggtttcgaatatncctcatttnctccaatcacaggacgaaaagtaatcatctttttgtcttttcttctcccgcgcgtccctacaatggactctccggtatcaaaaaccgatgcatcgaaagagaaattcgtggcttcacgaccatcaacggctgattcaaagacgatgagaggttgtggactcgcgaatctggcatgggttggtgtagataaagtagagcttcgtcagaggttgatgatgcctgagtatcttcgtctcgctatgcgtgactgtatcaaacgcaaagattcctcggctattcctgatcatttacttcttcctggtggtgctgttgctgatatggctcctcatgctcctatggttgttttcattaaccccaattctggtggtcgtcatggtcctgttcttaaagagaggcttcaacagttggggagcgaggaacaggtgtttgacctcacggaagtgaagccgcatgagtttgttcgatacgggttggggtgtttggagaaagtggcagcggaaggagatgaatgtgcaaaagaatgcagagcaaggttgaggattatggttgcaggaggtgatggtactgttggttgggttcttggatgtcttggagagcttaataaagatggaaagtcgcaaattcctcctgttggagttattcctctcggtacagggaatgatctttcaaggagttttggttggggtggttcgtttccttttgcgtggagatctgctgttaaaagaacactccatcgcgcaagtatgggtccagttgctagacttgacagctggaagattttagtgtcaatgccatctggagaagtcgtagatcctccttattctttaaaacccgctgaagaaaacgaacgttgatcagggtttggacgcgggaattgatgcgcctccacttgcaaaggcttatgaaggtgttttctacaattacttaagcataggtatggatgctcaagttgcatatggcttccaccatcttcgcaacactaaaccatatcttgctcaaggccctatttcaaataagattatatattcaagttttggttgcagtcagggttggttttgcacgccttgtgtcaacgatccaggtttaaggggacttaggaacataatgaaaattcacatca

SEQ ID NO: 122364 - DNA, 490 bp, Arabidopsis thaliana
gaaaattcttcgaatctgaaatccgatcggtgagcagaaaccctaatttcgtacagtctcatgattgagatttgcgtcttctacactctctgttttcactcctcctgattcttctctcaatctcttatccgatcgggctcgcttgttctgatttcgtgagggtgaacatggatggaaacaaagacgatgcgttgaagtgcttgaaaatctgcaaaagtgctatggaagctggagatcgacctcgcgctttgaaattcctggctaaagctcgtcgtcttgatccaaatctcccgatcgatgatctcgtatctgagcttaacaacaacaaatcagacgaaccaggatctgcaaaatcgcctggatctgcagcagcaaaggattcttccaattcttcagatcggccttctttacgtcaacgtggatcgtcaacaacgtcatcgtcttcttcgatgtcctacactgaagaacagatctcaatcgtgagaaagat

SEQ ID NO: 122365 - DNA, 432 bp, Arabidopsis thaliana
aatgttggaaaaacacacaaagcaacttcttcttcttgttcggcttttatcatctctgaaaattgctttatttggttgaattcattggattgttgatcgagattggtttactgattgatcgaaagtatggaggaagatcgtggggaagcgatcgttttagatatttcgccggagattaataatactccggcggtaatgatgagagttccacggaggattcgtgagaggcttttgtctgactgtagtaataagaagacagtatcttctgttcaagatattgaagacaagcttcttcatgcccatctacgaagacagcaattttatcataacgtttcgagaaaggctcgtgctaaacctagaagtccttcacgatcatctgatgaagaacttggccaacgaatcgaagcaagacttctggctgctgaacaaaaa

SEQ ID NO: 122366 - DNA, 948 bp, Arabidopsis thaliana
  unsure (1)..(948): unsure at all n locations
agctcnnnnnnnnnnnnnnnnnnnnnnnnnnnnnnnnnnnnnnnnnnnnnnnnnnnnnnnnnnnnnnnnnnnccacgcgtccggttgtgataaagggtttgttgaagttctggcctatcacgaatagtcagaaggaagtgatgtttctcggggaggtcgaagaaattgtagaagcaatgagtgtgatggagtttcaaaagatcatggtccctttgttcttgcggattgcttgttgtgtcaccagttcccactttcaggtttctgaaagagctttattcttgtggaacaacgatcaaattgtaaacttgattggacataaccggcaagccatcctaccaatcatgttcactgctttagaaaagaatgctcagaaccactggaaccaatccgtgctaaacttaaccttaaacgtacgaaaaatgttctgcgaaatggacgaggctctgttcatgtcttgccacgcccgctttaaggaggacgaagcaaagcaatgttctgctgcggaaaagaggaaagaagtatgggcaaggctagagaatgcagcaagtatgaagccgataacaggaaagactgctgttctggtaactcctcgagcaacctccatcgcctgctaaatagcgtttaaaccaattcacagacagtttatccaaagcaacaacatcgagaagatgatggagtggctgttgcttaagctatagtcttgggaacttttcatcgaggttgatctctgtaatattatataactttgatgttgttagctgtgtgggttttaatgctaattctattgctttcttttaaagcaatgaaaccatgctgcagatttttatcaaactctttgtatcaatcaattaagtttatatatcctttttctttcaaaaaaaaaaaaaaagggcggccgctctagaggatccaagcttacgtacgcgtgcagtcgacgccataatcttc

SEQ ID NO: 122367 - DNA, 471 bp, Arabidopsis thaliana
ctcactctctcactgtcggcaaactaacttattcacttttccggcactgattctgctcgggaaaaacaactccggcacaaaatgcagctttttccagtcatgttagccacactctgcattgtcctgcagcttctcattggctcgtcagctttggctacgacaaatcgccacgtgtcaaactctcattggcttcccgcagtagctacatggtacggaagccccaacggtgacggcagcgacggaggagcgtgtggttacggtacgttggtggatgtgaagccgttacatgcgagggttggagcggtgaatccaattctcttcaaaaatggtgaaggttgcggagcttgttacaaggttcgatgcttggacaagagcatttgttcccggagagccgttaccgtcataattaccgatgagtgtcccggctgctctaaaaccagcactcactttgacctcagtggtgccgtcttt

SEQ ID NO: 122368 - DNA, 513 bp, Arabidopsis thaliana
aataccactcactttagggaaagctcgtacgcctgcaggtaccggtccggaattcccgggtcgacccacgggtccggaagtcaacaaagttctcaatgtctgttctcttgaaaaagacctacaaatgatggagtttggagataagactgagattggagaacgcggaatcaacctcagcggagggcagaagcaacgtatacagctcgcacgtgctgtctatcaggaatgcgatgtatacttgctcgacgatgtttttagcgcagtggatgctcataccggttcagatatattcaagaaatgtgtaagaggagctctgaaaggcaagaccgtattactcgttacccatcaagtggatttcttgcacaacgtggattgcatcttggtgatgcgggatggaaagattgttgaatcaggaaaatatgacgaattagtcagctccggattggattttggggaacttgtggctgcacatgagacgtcaatggagctggttgaacccggtgcagactctgc

SEQ ID NO: 122369 - DNA, 422 bp, Arabidopsis thaliana
cccacgcgtccggttatttcaattcacgttggtcaagccggtatccaagtcggtaacgcatgctgggaactcttctgcctcgagcacggtatccaacctgacggtcaaatgccatcagacaagaccatcggtggtggtgatgatgccttcaacaccttcttctccgagactggtgcaggtaaacacgtcccaagatgtgtcttcctcgatctcgagccaaccgttattgacgaagccagaaccggtacctacagacaactcttccatccagagcaactcatctcaggtaaagaagatgctgccaacaacttcgccagaggacattacaccattggtaaagaaatcgttgatctctgcctcgatagaatcagaaagctcgctgatcaatgcactggtctccaaggtttcctcgtcttcaactc

SEQ ID NO: 122370 - DNA, 622 bp, Arabidopsis thaliana
  unsure (1)..(622): unsure at all n locations
cnnnnnnnnnnnnnnnnnnnnnnnnnnnnnnnnnnnnnnnnnnnnnnnnnnnnnnnnnnnnnnnnnnnnnnaccacgcgtccggaaagatcaaatctttgacgacatcaaggaggaggatttggtaagctacagataaaaacaaaagctatgatatgagataatgtagtccaccaccacaccaaattcccccttcaccgtctctcttcgtcggtgattcacattccgatttggtgtcttttttactcttaacaagtcctcaaaaaccctacttttactcgagattttgtctccgccgccgagtaccaagtgcctcccgatctacgccccaatccctaaatggctacggaggctacaaccgtacccaaattccaggaacctgatctccggcaggtttctcagacaccggatttcaaaccggaaatcgctcacgatggtcttaagttctggcaatttatgattgctggttcgattgctggctccgtcgaacacatggcgatgtttcccgtcgataccatcaagacccatatgcaagcgcttcgaccatgtcccttaaaacccgtcggaatccgggaagctttccgttcgattatccaaaaggaaggaccttcagctctgtatcg

SEQ ID NO: 122371 - DNA, 917 bp, Arabidopsis thaliana
cttacttcctctgtcttccttcgcttccctcttctctcaccacaatccgagagagagacagtactgtaatccaagtgagagagagagagaaatgaaaatgcagacgaagaagctctttatcaccattgtctcctttcttctctatgctccattgttcttatcttcaccagttcctgaccctgaatctgtcgttgaagaagttcacaagagcattaatgcgtcggttgcaggaagaaggaagttaggttacctctcatgtacgaccggtaacccaatcgacgactgttggcgttgtgaccctcactgggagcaacaccgtcaacgtctcgctgactgcgccattggattcggcaaaaacgccatcggtggccgtgacggtcggatctacgtggtcaccgactcaggaaacgacaacccagttagccccaagcccggaactttaagacacgccgtggtccaagacgagccactctggatcatcttccaacgagacatgacgattcagctcaaagaagagctaatcatgaactcattcaagaccatcgatggccgtggtgcttccgtacacatctctggtgggccttgtataacgatccagtacgtgaccaacattatcatccatgggattcatatccatgattgcaagcaaggtggcaacgctatggtgcggagctctccacggcatttcgggtggagaacgatatcggacggtgatggtgtctctatctttggaggaagtcatgtttgggttgaccattgttcgttctctaactgtgaagatggacttattgatgctatcatgggctcgacggctatcactttgtctaacaatcatatgacacatcatgataaggtcatgttgcttggtcatagtgatacttacagtcgtgacaagaatatgcaagttaccattgctt

SEQ ID NO: 122372 - DNA, 540 bp, Arabidopsis thaliana
  unsure (1)..(540): unsure at all n locations
nnnnnnnnnnnnnnnnnnnnnnnnnnnnnnnnnnnnnnnnnnnnnnnnnnnnnnnnnnnnnnnnnnnnnnnnnnnnnnnnnnccacgcgtccgcccacgcgtccgcccgaagttgctcttcttgttcactctctgatctagtcttaactcctccaactacaattccatggcggtgtctcttcttctctggactctcttcctcttctcatttatcttctccctccaatcacacagcaaagaagaagaagaagacacaccaatcacacgattccagcaatacttaagattcaacaccgctcatccaaaccctaactacaccgcaccaatctcttttcttcttgatcaagcaagatcaattggtcttacttctcgaaccatcgagtttgttcctggtaagccagttcttctcctcacatggctaggctcaaaccttaacctttcttcaattctcttcaactctcatctcgattctgttcccgcggaatccgagaagtggatacatccaccattctcagctcaccgaaccatcgatggtcatat

SEQ ID NO: 122373 - DNA, 862 bp, Arabidopsis thaliana
tcttcccctcctatataaaaaaaatcgacatcgcttttgctcacttctctctcttaggtttttttttcccttctcccaatctcatcttctccgaaaacctttcttctctcaaatttctgtgaaaacatgtctgacgacgagcaccactttgaggccagcgaatccggagcttccaagacctatcctcaatcagccggtaacatccgtaaaggtggtcacatcgtcatcaaaaaccgtccctgcaaggttgttgaggtttcgacttccaaaactggcaagcacggtcacgccaaatgtcactttgttgctattgatatcttcactgctaagaagcttgaagatattgttccatcttcccacaattgtgatgttccacatgtgaaccgtgttgattaccagttgattgatatcactgaggatggcttcgtgagccttctcactgacagtggtggcaccaaggatgatctcaagcttcccaccgatgatggtctcaccgcccagatgaggcttggattcgatgagggaaaggatattgtggtgtctgtcatgtcttccatgggagaggagcagatctgtgccgtcaaggaagttggtggtggcaagaaaacaagtttcattccgatatattattaccaattttgacaacggacgttattggctttaagaaccccactgatgttttgtcttttttacctaaatttaagacccctttggggatgcagtttcctttgggtgggaaagaaccatacccaatattccttatttgggggttttttgggaattgggttagagaaaaaaaagactttgggtggttttgaaagaacaattttcaaaaaggcgtctgcctctaatttaaaaaaaa

SEQ ID NO: 122374 - DNA, 958 bp, Arabidopsis thaliana
cggacgcgtgggcggacgcgtgggcggacgcgtgggttcattcccaataatctcttggctatctcgaacataatgacatgatgtctgacgaagagcaccacttcgagtccagcgacgccggagcttccaagacctaccctcagcaggctggtaacatccgtaaaggtggtcacatcgtcatcaagggccgtccttgcaaggttgttgaggtttcgacttcgaagactggcaagcacggtcacgccaagtgtcactttgttgctattgatatcttcactgctaagaagcttgaagatattgttccatcttcccacaattgtgatgttccacatgtgaaccgtgttgattaccagttgattgatatcactgaggatggcttcgtgagccttctcactgacagtggtggcaccaaggatgatctcaagcttcccaccgatgatggtctcaccgcccagatgaggcttggattcgatgagggaaaggatattgtggtgtctgtcatgtcttccatgggagaggagcagatctgtgccgtcaaggaagttggtggtggcaagtaaacaagtatcattcgatatattattaccagtttgacaacggacgtcaatgttataagaaccaaaagatgtttttctttttcctaatttagaccctttgtgtgtgtttcttgttgcaagacaaccatatctattggttttggattgttggaaaagtttgtgttgaaacattcaaagtttcttatgagatgttattcttaaaaccactttttgtttgttcactggatatgtttgttcatgaagcttgttttaagcaactctttacatgatattcattgctatttgcacgattcaagagtgacatatacattttatttaacaataacagtgtaagatatgtgattgaatacttgtggaaacatagagttacacaggctgcgatagtattcgacattttaact

SEQ ID NO: 122375 - DNA, 818 bp, Arabidopsis thaliana
  unsure (1)..(818): unsure at all n locations
cgnntccgcttctcttcnnaaatttcnnngtgaaaacatttgtctgtnacgacgagcacncnnactttgagggccgagnncgagtggccggagcctnntccaagaacgctatcctnnncaatcagccccggtaacaatnnccgtaaaggggtgggntcacatcngnntcatcannaaaaccccgtccctttgcaagggttgnnttgagggtttcngnaacttccnnaaaactngnngcaagcanncggtcnnacgccaananntgtcactnnttgttggcttattgggatatcnnttcactgggctaagaaagcccttgaagatattgttccatcttcccacaattgtgatgttccacatgtgaaccgtgttgattaccagttgattgatatcactgaggatggcttcgtgagccttctcactgacagtggtggcaccaaggatgatctcaagcttcccaccgatgatggtctcaccgcccagatgaggcttggattcgatgagggaaaggatattgtggtgtctgtcatgtcttccatgggagaggagcagatctgtgccgtcaaggaagttggtggtggcaagtaaacaagtatcattccgatatattattacccagtttgacaacggnccgccaatgttattaaggaccccaaagatggttttcccttttncccaattttagaccccttggggggggggttcccctggtcgcaanaaacccctttccnatggggtttgggatttgggggaaatttttgggtnaaancnccaaagttcctangggggggttcccttaaaaacccccttttgttgtg

SEQ ID NO: 122376 - DNA, 523 bp, Arabidopsis thaliana
  unsure (1)..(523): unsure at all n locations
agctacnnnnnnnnnnnnnnnnnnnnnnnnnnnnnnnnnnnnnnnnnnnnnnnnnnnnnnnnnnnnnnnnnccacgcgtccgcgacgaacactcacctctcctgacctcatggaacctttcaacaactttctgttcatggaccggtgtcacgtgcgacgtctctctccgtcacgtgacctctctcgacctctcaggtcttaacctctccggaactctctcctccgacgtagctcatttacctctgctacagaatctatcactcgctgctaatcagatctcaggtcctattccgccgcaaatctccaatctctatgagcttcgtcacctcaatctctccaataatgtcttcaacggttcatttcccgatgaactctcctctggattggtgaatctccgtgttcttgacttatacaacaacaatttaaccggagatttaccggtttcactcactaatctcactcagctccgtcatcttcacctcggtgggaattacttctccggcaaaatcccggcgacgtacgg

SEQ ID NO: 122377 - DNA, 817 bp, Arabidopsis thaliana
  unsure (1)..(817): unsure at all n locations
cnnnnnnnnnnnnnnnnnnnnnactactcactatagggatagctggttcgcctgcaggtaccggtccggaattcccgggtcgacccacgcgtccggcggaagctaaggagaggcgaattcgaatcgagaagatggtgtctgggtcagggatatgttcaaagcgtgtcgttgttgacgcacgtcaccatatgtgtggtcgtcttgcttcgatcatagctaaagagttgctcaatggacagagtgttgttgttgtccgatgtgaggagatttgtttgtctggtggtttggttcgtcagaagatgaagtacatgaggtttcttaggaaacgcatgaacactaaaccttctcatggtcctattcatttccgtgctccgtctaagatcttctggcgtaccgttcgtgggatgattccacacaagaccaagcgtggtgctgctgctcttgcacgtttgaaggtgtttgagggagtaccacctccttatgacaaggtcaagagaatggtcattcctgatgctctcaaggtgttgaggcttcaggctggtcacaagtactgcttgttgggacgtttgtcttctgaagttggctggaaccattacgataccatttaaggagcttgggggggagaagaagggaaaggtcccaaagcttttgttatgagccgtaaggaagccaacttacccaaagccttaaggggccaaaaggcccccagaaaagggtttgccacagaggaaggaaacctcttgggtattcccccaagcctctcggattggtttcctttggcctttcggatccacaagttcctctggaatgaaaaaaa

SEQ ID NO: 122378 - DNA, 657 bp, Arabidopsis thaliana
  unsure (1)..(657): unsure at all n locations
gtgacactatagcaagactatgacgtcgcatgcacgcgtacgtaagctcgggagaggcgaattcgaatcgagaagatggtgtctgggtcagggatatgttcaaagcgtgtcgttgttgacgcacgtcaccatatgtgtggtcgtcttgcttcgatcatagctaaagagttgctcaatggacagagtgttgttgttgtccgatgtgaggagatttgtttgtctggtggtttggttcgtcagaagatgaagtacatgaggtttcttaggaaacgcatgaacactaaaccttctcatggtcctattcatttccgtgctccgtctaagatcttctggcgtaccgttcgtgggatgattccacacaagaccaagcgtggtgctgctgctcttgcacgtttgaaggtgtttgaggggagtaccacctccttatgacaaggttaaagagaatgggcattcctgatgcccctaaaggtgttgaggcttcaggctgggcacaaggactgcttggttggaccgttgccttctgaagttggctggaccattacggtaccaccaaggccttaggtnaaanaaggggaggccaaccttgattgcgaaaaaaaccccaacccacgggaagccnaaaggtccagggaacttggcccncccanttttnaccga

SEQ ID NO: 122379 - DNA, 805 bp, Arabidopsis thaliana
  unsure (1)..(805): unsure at all n locations
aagctaaggagaggcgaattcgaatcgagaagatggtgtctggctcagggatatgttcaaagcgtgtcgttgttgacgcacgtnaccatatgtntggtcgtcttgcttcgatcatagctaaagagttgctcaatggacagagtgttgttgttgtccgatgtgaggagatttgtttgtctggtggtttggttcgtcagaagatgaagtacatgaggtttcttaggaaacgcatgaacactaaaccttctcatggtcctattcatttccgtgctccgtctaanatcttctggcgtaccgntcgtgggatgattccacacaaggccaagccgtggtgctgctgctcttgcacgtttgaaggggtttgagggagtaccacctccttatgacaaggtcaagagaatggtcattcctgatgctctcaaggtgttgaggcttcaggctggtcacaagtactgcttgttgggacgtttgtcttctgaagttggctggaaccattacgataccatcaaggagcttgaggtgaagagaaaggagaggtcacaagctttgtatgagcgtaagaagcaactcaccaagctcagggcaaaggccgagaaggttgcagaggagaaacttggatcccagctcgatgttcttgcatcgatcaagtactgaagaaaatcagcatctatcttttggtttaactcttgttttggtttttatctattcagattttgttttcttccttgtatcactgttgaagtttatcacctcatttcagttttatttatcagttgatacttcaatccttagggatgaagtcntt

SEQ ID NO: 122380 - DNA, 1014 bp, Arabidopsis thaliana
cgaagatggaatttgagttcgagagaagaaaggtcactaaagaggatataagagagctaatttctagggagatacttgagtaccaccctcagctgcttaaagatcatatgaacggggctgataaagccagttttctctacccaagtgctgttgatcaatttagaagacaatttgcgcatcttgaagaaaacagtggtaaaaccggccctgtggcacctctagaaaggaaacatgcctctcttcccagatcaacggtcatacactcaaccgcagtagcacgaggaggacaaccaaaacttatgaataacacaaacacattgaaccctgaaactactcaaaacattccttttaatcatgcaacaatacaagcacaacaaagaaacctctcagcagccaaaccaagcacattcatgggcccggttgcacctttcgacaatggcagaatcagcagagatgcatatgacccgagatcattcatccggagcactaatctccccttttcacaacaatctgctgcaacagtcgccatgggaaagcagcaagagagaagaacaactatggagcctgagaagcaggcaagacaaatatctcagtataatagatatgcaccagatgtagccatcaacatagacaacaacccgtttatcatggctagaacgggaatgaacaaagccgaaaacatcagtgaccggatcataatcgacacaaatctgttacaggcaactgccggaataggagtcgcagcggcagctgcagcagctgctcctggtggttctgctcaccggaaagttggagctgttcggtacggtatgtcaaagatgtactagttctccacctaagctgggctttcatcacacagaacattgtatgtttccatcttcatgtcataaaagaaaattgtctatgacacaaaaccatatgagcaaaaaatattttttttattaattgtgatccatcatttgtttgtttttttctattccgacaaataaataaatggatgttagattctggtat

SEQ ID NO: 122381 - DNA, 498 bp, Arabidopsis thaliana
aaatacgactcacttagggaaagctcggtacgcctgcaggtaccggtccggaattcccgggtcgacccacgcgtccggtttatattttaattgtttggatatttgcttttatcttctaccaagttcctctgattttagtcgaagaaattagtagctgaaaatccaaaaatcggacttacttcatcagctttttggccccactttacaaagtatgagcaagtttttcttgttttctacagcaaagcaatgctcacaccattttcgtggagcttaaagtcttcaaacccaaactaaaagctttgaaatttctctgcaagaaacagagagagagatctagggattggctattaagagagagagagtagagtactacactattggttcctgtgctgttgtgttttgtgcatctgttcttgtgtttctcagataaaatattagtttcagtctttcagagacattgaatctcacacacttactaacacacactcacacacgcgt

SEQ ID NO: 122382 - DNA, 703 bp, Arabidopsis thaliana
  unsure (1)..(703): unsure at all n locations
gaaactttcaaaatgcttagctgagccagtcagatatgattcaacaagaggtgagaaaacgtctgagnttgggaaaggccctgatatttntcatagctctgatgagagtaaagggcaaggtgattttgatgactacagctgggacaacattggtagttttgatgatcttgatcgaatgttcagcaatgatgtccctatatttggtgatggcagtctcagcggtggtgatgagttatggtcatcttctaaagatgtatccaatagcccaaaatcattatcatcaatgttggactctcaagatctaggattggatattagaactgagtttgagcaacaagagaaccagcaatttccattgactggaaaagccaatggtctgtcatcccaaagtgtcccaagtgtacgtgtaactcttaaggctgaccaatatcgtgagcataagggtcaaccctcagttgaggaccagccatatcaacaaaataaaatgatgaacttttcgaaaatgcctgggacttctgaggcaaggccctttcaagagctgtacggccacaggattccatttagtaattcagctggaaaatgtgtaaatcagttggcaccgccacaatcgtctctgatggctgttaatctcctgagtgagtctgaggggtctgggacatcacactattcacatatgccaaaccaatacatggctaattctgct

SEQ ID NO: 122383 - DNA, 456 bp, Arabidopsis thaliana
gcctcatacccagaaaaacaaaaggataggaaagacgaagaaataaaaagagagagaatgttagagagacaaactctgagagacaaaacaagagaaaatcgctcgtcgtcggtattcaagcgtctgtgactccgataaagcctagactagcgaggacggcgagagagagagagagagagctttggagttgtcgtatctctaaatcggaggcaatttgagtgagataaagacaaaggaaggaatcaagtggactaccgaagcgagttttgagctttttcagagacggatttggagatttcttgttgatatcgtctgcttagaggcttatttggtaccagatgaaacagatctgagcttcggaaggtatggcgagttcggaggtttcaatgaaaggtaatcgtggaggagataacttctcctcctctggttttagtgaccctaaggagactagaaatg

SEQ ID NO: 122384 - DNA, 476 bp, Arabidopsis thaliana
  unsure (1)..(476): unsure at all n locations
gntctttaagcttccttatgaagagaaacnaataaatattttgactccagctgctggatacagaggatatcagagaattggagaaaatgtgaccaaaggaataccagatattcatgaagccattgattgttacagagagattaagcaggggaagtatggggatataggcaaagttatggaagggccaaaccagtggccagagaatcctcaggagtttaaagagttgatggaggagtatattaagctatgtacagatctttctagaaagattttgagaggaatctccttagctcttgctggatcaccttatgagttcgagggaaagatggctggtgatcctttttgggtgatgcgtcttattggttatccaggtgctgagttcacaaatggccaacctgaaaatgatattggatgtggagctcacactgactatggcttgttaactcttgtgaatcaagatgatgacaaaactgctc

SEQ ID NO: 122385 - DNA, 733 bp, Arabidopsis thaliana
ggcttctggagaaaagagataacctgcttccatgagtttaaattatctgtcttgagaagctggtagatttttctattgatgaacaatgggtgagaacggggagaatcattcagtctctcaagagagtaaatccaagaagcttgagagtaaaaatcattcaggtgttcccaagagcgatctttggactgatgggattatttgtgcctttgagtttattcgaggtccgaaaaaacatgttgattcaaaacaacttgagaaaggtgctttgaagcaagaagatggaccaatcagtcatagtttccctggtcataacccgtttgttgattcgtctccagttgatgatttaaggtcaaggtcggtatcttctttggattttaaagaggctcatttgcttccatcagggcatgttgagagatatgagggaagtcattgggtacctattggttgggctagaataactgaactagttcaaatggttcaagtaaacgctgagtggcctaatctagagttgattgatgatgaagaagatgtccctgttacagatttagcagctccgtattgggaacgaccaggtggccctacatggtggtgtcacttgactgctggaaactcttttgttgagggatggcttagaagtgctacgtggttgcatcctgcaattagtctggcattgagggatgaaagtaagctaataagtgaacggatgagacatcttctatatgaggacaatcag

SEQ ID NO: 122386 - DNA, 693 bp, Arabidopsis thaliana
  unsure (1)..(693): unsure at all n locations
nnnnnnnnnnnnnnnnnnnnnnnnnnnnnnnnnnnnnnnnnnnnnnnnnnnnnnnnnnnnnnnnnnnnnnnnnnnnnnnnnnnccacgcgtccgaaaaagaagaacccaagatcgactcttacttcgaatctctctcaactttcttcctcagcttacgggaacttccacacatatacatccacaagaacccatatcgaagattcatcctacatatatttacatggatcagtactcatcctctttggtcgatacttcattagatctcactattggcgttactcgtatgcgagttgaagaagatccaccgacaagtgctttggtggaagaattaaaccgagttagtgctgagaacaagaagctctcggagatgctaactttgatgtgtgacaactacaacgtcttgaggaagcaacttatggaatatgttaacaagagcaacataaccgagagggatcaaatcagccctcccaagaaacgcaaatccccggcgagagaggacgcattcagctgcgcggttattggcggagtgtcggagagtagctcaacggatcaagatgagtatttgtgtaagaagcagagagaagagactgtcgtgaaggagaaagtctcaagggtctattacaagaccgaagcttctgacactacccctcgttgtgaaagatgggtatcaatggagggaatatggacagaaa

SEQ ID NO: 122387 - DNA, 839 bp, Arabidopsis thaliana
  unsure (1)..(839): unsure at all n locations
gttcgcaacttgtaacgctattttgctctctcgattcctttctctcttctcttatctttgctgcttcttttgctccgccgtcttcagctcagtcctgcttcagctctccggcgaaattgaagaagaaggttgcaatggctgatcccagtgaacaaaaagaaaaggttgtgaaagaaaagaaagaaaaggttaagaaagaaaaggttgtgaaagaaaaggttgcaaaggcttcttcgagtggacagaagaagaaggacgtcaagaaggaaacgggtctcggactcagtgttaagaaagatgagaacttcggggaatggtattctgaggtttgtaaacaagatatgattgagtactacgatatctctggatgttatattctacggccatggtcaatggccatttgggagattatgcaaattttctttgatgcggaaatcaagaaaatgaaggtcaagaattgctatttccctctgtttgtatctcctggtgtcttagaaaaggagaaggaccacatcgagggattcgcccctgaggtttgcgtgggttacaaagtcaggtaaatctgacttggaagtcccaattgctattcgtccaaccagttagacagtnatgtacccttactacagcaagtggntaaggggggcaccntgacttttccttttnaaggttaaccacttggtgcaaatatttntttagattgggngntcagcaaaccctanccccttttttccggggcccgtgagttccntttggnaggaaggtcacactnnatttgccccaaaaacaggancagnttaagnggccttaaaatttttngggtttcccncgntanttnagga

SEQ ID NO: 122388 - DNA, 858 bp, Arabidopsis thaliana
  unsure (1)..(858): unsure at all n locations
tatacgactcatatagggaaagacggtacgcctgcaggtaccggtccggaattcccgtgtcgacccacgcgtccgcggacgcgtgggttcgcatcctccacaagaagaaaattcgatcggtcgattagtctttgtttgatttcgaaatggctcgtactaagcaaaccgcgaggaaatccacaggaggcaaagcaccaagaaagcaactcgcaaccaaggcggcaaggaaatctgctccggccaccggaggagtgaagaagccgcatagattccgtccaggaactgttgccttgagagagatcaggaagtatcagaagagcactgagcttctgatccgtaagcttcctttccagcgtctggttcgtgagatagctcaggatttcaagacggatctgaggtttcagagcagtgctgttgctgctttacaagaggctgctgaggcttaccttgttggtttgtttgaagacactaatctttgcgccattcacgctaagagggtcaccatcatgcctaaggatatccagctcgcgaggagaatcagaggagaaagagcttgaagactgttgttatggtttatatcttttgatttagttcgtcaatggaactctatttctggattttgatttgcgttttagtagtaatgggttcttgtaagtgttgagctttggctcgttttaattttcagttgttaggtactttggtttagttagccttgaagtgttcgatgaaataccccaacgaaactctctcctgtttaatagaacttattttccttaaaaaaaaaaaaaaaagaagggcggccgctctagaggatccaagcttacgtacgcgtgcatgcgacnnnnnnnnnnnnnnnnn

SEQ ID NO: 122389 - DNA, 870 bp, Arabidopsis thaliana
  unsure (1)..(870): unsure at all n locations
tttttggatttgcgtccntccccggnccgcttcccttttcccacctatcgcccttggaactgtcccctcggtccgccgatcccgncgccccctccgttcaagctcaatttgcctcttagatcgtaaatgccagccagccancgcagaatcccctggngaagccccgagaagccactggcgacgaancgcaggaatccgctccaccccgagnntgaagannccaccagttccgtccggaacagtagcgtgcgtgaaatcagaagtatcaaaaagcacagagctttgacccgtagcttccttccgagattggttcgtgagatagctcaagatttcagacggatctgaggtttcagagtagtgcagtcgcagctcttcaggaagcagctgaagcttatttggttggtttgtttgaagatactaatctctgtgctattcatgctaagagggttacgattatgccgaaggatattcaacttgcgaggaggattagaggtgagagggcttaagatttgaagaagatgaagaaaaacaatggtgtagaatagatttgcttgtttgctctcataagatttgtagattcatgttttagatttggttttgagttttcttagtcttttgttctgaagtgtcttccagatgttcgatgaaatgcccaaatgaaaatttaatctacttttgcaactttctaagaatcagtcttcagtttaacttattagatttgcaattgaagttgtcattttggttgtaacttatttgtatattgttacatctgtattcaggtcttagtgacttgtgtcaaaatggttctaatttattgaccaaagcagggttaatcattttattttcctgcagcataaaaaaananccaaa

SEQ ID NO: 122390 - DNA, 735 bp, Arabidopsis thaliana
attctcaccgaatcaaatccaaaagagcaaatttacaatcttgcgaactcctaaaatggctcgtaccaagcaaacagctcgtaaatccaccggaggaaaggcaccaaggaagcaactcgcgaccaaagctgcgaggaaatcagctccagccaccggaggagtgaagaagccacacagattccgtccaggaacggtggcgttgagagaaatcaggaagtatcagaagagtactgagcttttgatccgtaagcttccgttccagagattggttcgtgagattgctcaagatttcaagacggatctgaggttccagagcagtgccgtcgcagctcttcaggaagcagctgaggcttatcttgttgggctctttgaagatactaatctctgtgcgattcatgctaagagggttacgattatgcctaaggatatccagcttgcgaggagaatcagaggagagagggcttaagtgaacgaagatgatgaagattaagaagactagtcgtttagttatggattagcttgtttggtttcaatggatatgtaaagccgtctcttagatccggtttcgagtgttcttagtcttttgctctgatgtgtcttccagatgttcgatgaaatgcccaaaggaaatttttaatctactgttgctactttctaagaaaaaaaaaaaaaaaaagggcggccgctctagaggatccaagcttacgtacgcgtgcatgcgacgtcatagctctt

SEQ ID NO: 122391 - DNA, 426 bp, Arabidopsis thaliana
cggacgcgtggggtctcaacaatcaaaagcttcaaatttttcattgtcaagaattctcaaaatggctagaacaaagcaaacagctagaaaatccaccggaggaaaagctcctagaaagcaactggcgacgaaagcagcaaggaaatcagctccagccaccggaggagtgaagaagccacacagattccgtccaggaacagtagcgttacgtgaaatcagaaagtatcaaaaaagcacagagcttttgatccgtaagcttcctttccagagattggttcgtgagatagctcaagatttcaagacggatcttaggtttcagagtagtgcagtcgcagctcttcaagaagcagctgaagcttatttggttggtttgtttgaagatactaatctctgtgctattcatgctaagagggttacgattatgcc

SEQ ID NO: 122392 - DNA, 487 bp, Arabidopsis thaliana
ctcactctcgatctcgacgcgaaatagctttctctcttccaaaggcaattatcgaaaacctgcaaaaagtttctccgccaagtctctccaaaacccctttctcatctctacttttcttcttcttcttcttcttctactgcgctcgctcctcgctcctccgtctccgtcttcaacgtaatctcgaagtcggttgtttcaatcctgccatggccgaagggaagttcgatctgcctgacgatctcatcttttccaaatcttctgatcagctcaaagaattggcctcagataacagcattcccttgtctccgcagtggctttacacgaaatcaagcgagtacaagatggatgttcgatctcctactcctgttcccatgggaaatccaagtgacccaaatccgaaggatgcatggcgcttggatgcacctgaagacaaaaaggactggaagaaaattgtgcatgagaatgaaactagtcgcagatggcgtga

SEQ ID NO: 122393 - DNA, 830 bp, Arabidopsis thaliana
  unsure (1)..(830): unsure at all n locations
nnnnnnnnnnnnnnnnnnnnnnnnnnnnnnnnnngctagccgttccggtccggaattcccgggtcgacccaccccacgcgtccgcgaaagccttgagagagagaacacagacgataccaactttcttcaatctcgttgccgcagtataattatctcattcctcggatatatctctccttctgcggcggcgacaagaagctacaagaataaaaagtctgttttctctcttttcaagaaaccacttacttcgaaaatggctcgttctatctctaacgttaagatcgtatctgctttcgtctctcgtgaactctccaatgctatcttccgacgtggttatgcggccacggcggcgcaagggagcgtttcgagcggtggaagaagtggagctgttgcttcggctgtgatgaagaagaagggagtggaagaatcaacccagaagatttcttgggttccagatcccaaaaccggttattacagacccgaaaccggttccaacgagattgacgcggctgagctacgagcagctctcttgaacaacaagcagtgattgattattattacatgtaattttgtcaaggtctttaagaggagattagtgggtaatgatctggtgcagtgaaccctattttcatatgttaagtgcggttctgtaatgaataaaatagagaagcgtttggtttcctctaattgtaacaaaaggatcgttggatgtatgatagagtttttcttataaaaccatttcagaaaaaaaaaaaaaaaaaaaaaaaaaaaaaagggcggccgctctagaggatccaagcttacggaccnnnnnnnnnnnnnnnnnnnnn

SEQ ID NO: 122394 - DNA, 700 bp, Arabidopsis thaliana
  unsure (1)..(700): unsure at all n locations
nnnnnnnnnnnnnnnnnnnnnnnnnnnnnnnnnnnnnnnnnnnnnnnnnnnnnnnnnnnnnnnnnnnnnnnccacgcgtgcgtgcggctgcgagaaacgacgagaaggggatcaaccaaaccaaaccaaaaaaaaaaaggaaccatctttctcctaaatctctacaatggctcgatctttatctccttcactttctctctctcgataccgtttcgccgcagcttctcttcttctcccttcatctcaaaccattttcatccgatctcaatcctccaatcgtcggtctaactctaaccatctcggagtaatctacgagattgatatcgctgcggatcctcttgtcaataagttggaagatgctgtccaccggattatggtacgccgatccgcacctgattggctcccttttgtccccggtgcttccttttgggttccacctcctagatcccagtctcatgggatcgctaagctcgttgagaagctggccaatccgatctctgatgaagaatctatttcaatctcatcggttcgaggatggcccttgctctgattacttcatcaaaggtgtaaagcctcaatcaagttgagacggggntggcttcaaaaactggatattactccgggggcgggggataaacccaaacttggtatgggttttgtttcaagttttnggtttttncnnggtncgnggtcggtnggg

SEQ ID NO: 122395 - DNA, 643 bp, Arabidopsis thaliana
  unsure (1)..(643): unsure at all n locations
acgcgtccgtatgtccccggtgcttccttttgggttccacctcctagattccagtctcatgggatcgctaagctcgttgagaagctggccaatccgatctctgatgaagaatctatttcaatctcatcggttcgaggatggccttgctctgattacttcatcaaaggtgtaaagcctcaatcagttgagacggagatgacttcaaatactgcatatcactccgaggacgaggaataaaccccaaaactcgtcagggctcttgctcttcaagatttgtagatttatgaacacgaatcaacgaagattcgaatcaccaagagcagctgcaaagacatggtttagacttttagataaggtagagtaaagcaaaccttttacagactgatcagatcctatccagtcttagtgaaattaaataaggaaaaggtgctgttgctttaccctctgttttcttgtaatctcccttataacagtttgttgaatcgtgtgtatatatatttccgcataagctcgcagattcggttctcttaaaaaaaaaaaaaaaaaaaaaaaaaaaaaannnnnnnnnnnnnnnnnnnnnnnnnnnnnnnnnnnnnnnnnnnnnnnnnnnnnnnnnnnnnnnnnnnnnnnnnntagaattcgt

SEQ ID NO: 122396 - DNA, 1489 bp, Arabidopsis thaliana
  unsure (1)..(1489): unsure at all n locations
ggcttaaaccagagagagagtgtgtgtggtcgagccatttgaccaaaagcaaaaacttaaaactggtttcagatctgaagtaaaagggttttgcttcggattctccggcgtcgtttaaatgatctctgacccatcttccttggcttaataattctggtccctccttttatctctttttactgttgatttatctgaatatgccacgctctttcttccacatgtttattctctcttcctttcttcaacacaagcgtctggactaaggaaagccaacaacaaaatctggtttcaagacggttggcaggagtttgtcaaccgtttctccattcggattggtttcagatacaaagttacagtctacattttcaatttatcctccacactctgagatcaaccaccattctagtagtgaagctcttatgcaaatggattccgcacagaatcagttcaacaaacgtgctcgattgtttgaagatcctgaactcaaagatgctaaggtcatttatccatcgaaccctgaatctactgaaccagtgaataaaggttatggcggttctacagccatccaaagctttttcaaagaatctaaagctgaagaaacgcccaaggtacttaagaagagaggaaggaagaagaagaatcctaatcccgaggaagtaaactcttcaactcccggtggagatgactcagagaaccgctcaaagttctacgagagtgcttctgctagaaagagaactgtaactgcagaggaaagagagagagccgtcaatgcagccaaaacattcgaaccaacaaatccttactttagagttgttctgcgaccatcatatctatacagaggttgcatcatgtacttgccatctgggtttgctgagaaatacctaagtgggatatctggtttcatcaagctccagctcggtgagaaacaatggccagtgaggtgcctctacaaagcagggagagctaagtttagccaaggatggtatgagttcacactcgagaacaatataggcgaaggagatgtatgtgtgtttgagctactcagaactcgggatttcgttctcgaagtcaccgcctttcgtgtcaatgagtatgtgtgaccaaaaaagatttccctttcatcagcgatcttgcaggtagctttccaaagttaaaattttatgtaggggtctcttaaccattctctctcttgcattggttgtctctgttctagtagtgttttgagtgaaatttcaggttcctatgtttggatgtggataagtatttgacgattataataacctctgagtgggaaactctttgtttgagtggtagctaggttcaaaagtagagttgtatatacttttatcttcatcaggataattatgtttatttgaattgttgattattatggaaaaaagaaaaagaatccataaaaaaaaaaaaaaaaaaaagggcggccgctctagaggatccaagcttacgtacgcgtgcatgcgacgtcgtgncg

SEQ ID NO: 122397 - DNA, 542 bp, Arabidopsis thaliana
  unsure (1)..(542): unsure at all n locations
nnnnnnnnnnnnnnnnnnnnnnnnnnnnnnnnnnnnnnnnnnnnnnnnnnnnnnnnnnnnnnnnnnnnnnnnnnnnnnnnnnccacgcgtccgcttcaatctgatataactacccttggagcatcggtgaggaaaagagaaagagagagagaaggcagttttgttttccaaatgtcagcaattcttgcagctgccattggtggtgctgtaggagctcttgcattgattgctttgtttgtttttctcctttggttttgtgtctttcgtcgtaagaatctgtctagaacttctgagactggctcttctgatccatctactcaagaaggaagaaatgttgcaattgagttgtcaatgagagaagctagaagatttgaaatggaggaacttgctcaagccaccaagagttttaccaatcaaagtcttattggtattggcaaattcggcgaggtttacaaaggtttgcttcaagatggtgttcttgtagctatcaagaaaagacctggtttgcctactcaagaatttgttaacgaggttcgttatct

SEQ ID NO: 122398 - DNA, 534 bp, Arabidopsis thaliana
  unsure (1)..(534): unsure at all n locations
atgatcctgtnnnnnnnnnnnnnnnnnnnnnnnnnnnnnnnnnnnnacgcctgcaggtaccggtccggaattcccggttcgacccacgcgtccgcggacgcgtgggctttcctctagccactcttcgccactctctttctctctcccttgttttccaacagtaacaatggcgtcagcttccaagcaaaacccttcttcttccaaacctcctaggcatccatctccgatcattgcttcaaccccctcgaaatccggtgtattggaggaatcccaatttcgaaaccctaataacccgtcgacgtcatcgaattcaccgatttcgatggcggtggaggatcagatcctgggaaattccaatcacctcactcgcccggagcttctccgacgcagatcgcacaacctgaagcagctctctagatgctacagagaccattactgggctctaatggaggatctcaaggcacaacatagattttatagctggaactatggtgttagtccttccaaagatgagaattatcaccaaaacaagag

SEQ ID NO: 122399 - DNA, 616 bp, Arabidopsis thaliana
  unsure (1)..(616): unsure at all n locations
atgaatacctctgtctcagatttcaaaatccccccggcaagtatgtccagcttcgacatccttagcgtcgctttgttcatattcctgtaccgcagagttctcgagccagtagccaacagattcaaaaagaatggatcaaaaggaatcaccgagcttcacaggatgggaatcggacttgtgattgctgtcatagctatgattgcagccgggattgtggaatgctataggcttaagtatgcagacaagagttgtactcactgtgatggctcaagctccttaagcatcttctggcaggctccacaatactcactcatcggggcatcagaagtgttcatgtacgtgggtcagcttgagttcttcaacgcgcaaaacaccagacgggctcaaagagcttcgggagcgctcttgtgtattgatgtcaatgtcaattggggaccttttgttagtagctttgttggtaccaattggtggtgaagatctcaacagtgggccacatgcccttgggtggnttccaaggnattttcaacaaacgggcactttggcaggttttttttcccccctggtccggtacggggtttccctgggggtnaatcatgcaaaatggcaaccntcaatc

SEQ ID NO: 122400 - DNA, 539 bp, Arabidopsis thaliana
caagctccttaagcatcttctggcaggctccacaatactcactcatcggggcatcagaagtgttcatgtacgtgggtcagcttgagttcttcaacgcgcaaacaccagacggactaaagagcttcgggagcgctctgtgtatgatgtcaatgtcaatggggaactttgttagtagcttgttggtaacaatggtggtgaagatctcaacagaggatcacatgcctggttggattccaaggaatctcaacaaaggtcacttagacagattctatttcctcctggctgcgttgacgagcattgacctggtggtatacattgcatgtgcaaaatggtacaaacctatacaactagaaggaaaagatgagatgcaagacatgagtgatgatgactatgacaccgagagtgaagaggaacgagagaaggattctaaagtctaacaaatgtgtgtttggttttcagttttccggtgatgtaacagcaaactgattcataaataaaaggctaaatcggatcgctttttgtcgaaaaaaattttaact

SEQ ID NO: 122401 - DNA, 742 bp, Arabidopsis thaliana
  unsure (1)..(742): unsure at all n locations
acttnaggntgncnggaanccnttccagggccccccgggnntttnaacaccccntttcgggcttntanaangggggggnaaacccnccattgtnttgacccctgggnggtcaactgctaaccncgnggctaantacagaccggctttcccggattctgccagtggtttncccggttatgacccactgatccctttgactggtcttgtagtgccgagtccacctgcaaggcattagtctgatatacagaggtctaatccctatgttggctgaaggatctgccaaggcaccagatagtgaagcccccgaagttatcattgaagctgctctgaagtcggctactcagagaggactgtgcaaccgtggtgatgcaatcgtggcgctgccccgtattggagctgcctcagttattaagatctgtgtggttaagtgagattacagacttctttcaatacctcaaatcttggattgttggtaatcgtaactgagattttgctttgtagcatgaaataaagaaaacaggtcacaatagttcctgaaactctgttacttttaagatatctctctctctttttttttctttctatttagtatttcaagtttatggatcaaaatctgcttcttatggctcccnaaaaaaaaaaaaaaaataaaaaaaaaaataaccccnnaagnnnnnnnnnnnnnnnnnnnnnnnnnnnnnnnnnnnnnnnnnnnnnnnnnnnnnnnnnnnnnnnnnnnnnn

SEQ ID NO: 122402 - DNA, 684 bp, Arabidopsis thaliana
  unsure (1)..(684): unsure at all n locations
aagaccgatagagctgctatgatcgatgagattgtggattatgtaaagtttctcaggctccaagtcaaggttttgagcatgagccgacttggtggagccggtgcggttgctccacttgttactgatatgcctctttcatcatcagttgaggatgaaacccgtgggggtggaaggactccgcaaccagcgtgggagaaatggtctaacgatgggcctgaacgtcatgtggctaaactgatggaggtgaacgttggagccgcgttgcagcttcttcaatcaaaggctctttgtatgatgcccaatctcattggcaatggcaatttaccattctcaacctccggatacatcttcagtggtcaagcctgagaacaatcctccacagtaggatttctgcaataaagagtttgtacagctaatccaactgtccaacatgggtttttcttctgctctaatgactctggtttcttctctcctctctcacccacttgaaaggtaaaaaagtgaaaaaggctttgtagatggaatcaatgtaggatttgcagtagagggaaaaaaaatgtcaaaaagctcaattgatcaagtattaaaaaaaaaaaaaaaaaaaagnnnnnnnnnnnnnnnnnnnnnnnnnnnnnnnnnnnnnnnnnnnnnnnnnnnnnnnnnnnnnnnnnnnaacggatttac

SEQ ID NO: 122403 - DNA, 691 bp, Arabidopsis thaliana
  unsure (1)..(691): unsure at all n locations
atgatcctnnnnnnnnnnnnnnnnnnnnnnnnnnnnnnnnnnnnnnnnnnnnnnnnnnnnnnnnnnnnnnnnnnnnnnnnnnccacgcgtccgcggacgcgtgggtggcaatttaccattctcaacctccggatacatcttcagtggtcaagcctgagaacaatcctccacagtaggatttctgcaataaagagtttgtacagctaatccaactgtccaacatgggtttttcttctgctctaatgactctggtttcttctctcctctctcacccacttgaaaggtaaaaaagtgaaaaaggctttgtagatggaatcaatgtaggatttgcagtagagggaaaaaaaatgtcaaaaagctcaattgatcaagtattattgtaatcattgtacctttattttaggtggactttgatgaaagcaactttttgttttcaagactttagtgggaggttgaggaaggagcttgaagggtgttatttattagtagtagtagtagtgggaagttgtgggaccttgttgagttgtgttcaaattgaagaaaaaacaagtatttgtaatttgtcaccccttgtattattatttattttgtatgaaaaaaaaaaaaaaagnnnnnnnnnnnnnnnnnnnnnnnnnnnnnnnnnnnnnnnnnnnnnnnnnnnnnnnnnnnnnnnnnnnnnnnnntagaatcg

SEQ ID NO: 122404 - DNA, 654 bp, Arabidopsis thaliana
  unsure (1)..(654): unsure at all n locations
nnnngcgtccgaaaaaccaacaaaacaaactcaaaaggattcttcttcaaacacaacatcttcaagaaaacatgaaaatggaaatgggtttagtgttccttacagtttttatggctgtgatgtcttctacaatggtctctgctcagtcaagctgcacaaacgcgttgattagcatgtcgccgtgtctcaactacataactggaaactctacctctcctaatcagcaatgctgtaatcagttgagtagagtagtccagtcttctcctgactgtttgtgtcaagtccttaacggtggaggctctcagcttgggatcaatgttaaccaaacacaagctcttggtctgcctagggcttgtaatgttcagactcctcctgtcagtcgctgtaataccggtggtggtggtggtggttctacttctgactctcctgcagaatcaccaaactcttcaggaccaggtaatggatcgaaaaccgtaccagtaggagaaggagacggacccccatcgtctgatggaagctctatcaagttctcattccccctaattgccttcttctncgggggttccnaaagggaantcctgnggacaaattcccaaaacngtttgggcaaccaaatnganncttaattgncccaatnaccaaatcggggggagc

SEQ ID NO: 122405 - DNA, 528 bp, Arabidopsis thaliana
  unsure (1)..(528): unsure at all n locations
gtaatgttcagactcctcctgtcagtcgctgtaataccggtggtggtggtggtggttctacttctgactctcctgcagaatcaccaaactcttcaggaccaggtaatggatcgaaaaccgtaccagtaggagaaggagacggacccccatcgtctgatggaagctctatcaagttctcatttcctcttattgccttcttctccgcggtttcctacatggcaatcttctgagttactattttcccatacgcttttgtgccactcagattgcattctttatttgtccctatttattcacatttcgttgtgattttgtgtgatgtattttatgctctgtaaatccctactctccgggtgatattgctttgttgtaccaacggagagcattttggatctctttaccttttataataaacattactttccagaaaaaaaaaaaaaaaaaaagnnnnnnnnnnnnnnnnnnnnnnnnnnnnnnnnnnnnnnnnnnnnnnnnnnnnnnnnnnnnnnnnnnnnnnnnnnnnnaatc

SEQ ID NO: 122406 - DNA, 414 bp, Arabidopsis thaliana
tgttctggcgccgcaggagcataagcttccgcccaggccaaggaggaacaacaagcggcttgctgcttcggatccggatccggatcctattgagtcggttcaggagaaaccaaagcgcacgcgtggatcgtcgaagcaagaggaaaatgaactgcccaagagtactagggcttcgaggaaaaagaatctggacgatatcgccgataaagaagaggaattggatgtggaaattgagaaggtggtcaaagctagggttgggaggcctcggaagaacgcaggcagtgcaattgcgaaggaagaagaagttgtggaggagaaaaaaagggttgggaggccccggaagaacgcaagtagtgcaattacggaggaagaagaagttgtggaggagaaaaaaggcaactctagggctcggag

SEQ ID NO: 122407 - DNA, 915 bp, Arabidopsis thaliana
gactgtccgtctgcggtaccggtccggaattcccgggtcgacccacgcgtccggagaaattgggtgttgagaaaggtgaaaaagggaagatgatgagtaaaaaaagaatgttaagaaagatggagatgagagtgaaagtgggttttggtttagattcaagtttatctttagttgtatctcttctagatcaaaagttgatagttccatgaatgctactgctgttattgcagaacctaagaaagttattgagaagcttgaaggtcatccagctccgactaaagacactggctgtgcggagagcggttcctcaacacctctaatgagcggggaattgaagtattcttctaagctacggattttcatgtttaacgaccttaagttagccactaggaatttcagaccagagtctcttctcggtgagggtgggtttggatgtgtttttaaaggatggatagaggagaatggaactgcacctgtcaagcctggtactggtctaactgtagctgtcaaaacactgaacccagatggccttcaaggtcacaaggagtggctggctgaaattaacttccttggaaaccttgttcaccccagtctggttaaattagttggctactgcatggaagaagaccaaaggctgcttgtttacgagtttatgccacgaggaagtttggagaccatcttttcagaagacctacctctcccttggctgttcaatgaaattgacttggtgcagtaaggtctcccttcttacaagagctgaaagccatctattcgagattcaaactctatatttactggtggggaaatatgcaagctctctatttggcctgcaaatgctcaacagaaaatccacttcacccagctgggactatggttgctgccgattgtagcggctctgcacaaacgtgttcagtt

SEQ ID NO: 122408 - DNA, 568 bp, Arabidopsis thaliana
  unsure (1)..(568): unsure at all n locations
nnnnnnnnnnnnnnnnnnnnnnnnnnnnnnnnnnnnnnnnnnnnnnnaccatcttttcagaaggaccttacctcccccgcggccggttcgaatgaaaattgcacttggtgcagctaaaggtctcgcctttcttcacgaagaagctgagaagccagtcatatatcgagatttcaaaacatctaatattttactggatggggaatataatgcaaagctctctgattttgggcttgcaaaagatgctccagacgagaaaaaatcccatgactcgggttgatacgtgggaacttatggttatgctgcccctgaatatgtaatgactggacatctgacaacgaagagcgatgtatacagttttggagtagttttacttgaaatattaactggacgaagatctgtggataaaagtcggccgaacggggaacagaacttggtagaatgggtgagacctcatctcttagacaagaaaaggttttaccggctattagatcctcggttagagggtcactactcgatcaaaggtgctcagaaagccacacaagtagcggcgcaatgccttaaccgagac

SEQ ID NO: 122409 - DNA, 564 bp, Arabidopsis thaliana
ctttctcctccgacacactccaaaactcataaatctatctgatgcgaatttgactaactctttcgtaattcaggatcttactacaaatctttaactcaccaatcttcttcttattcaaagattagagagaaaatggacaacgagctgtttatgaacacagagtttccaccaccgccggagatggcgacgcatttcgaacaccaacagtcttcttcatcggccatgatgcttaattgggctttaatggatccaaatccgcatcaagattcttcctttttatgggaaaagtcaacggaacaacaacaacaacaaagcatctttgactctgctttaagctcattagtctcatcaccgacgccgtcaaattccaacttctccggcggtggcggtgacggttttctcatcagagaactcatcggaaagcttggaaacatcggtaataataataacaactccggtgagatctacggaactccgatgtctcgctccgcctcatgttacgcaactccgatgagctctccaccgccaccgacgaattcgaattctcagatgatgatgaacaga

SEQ ID NO: 122410 - DNA, 713 bp, Arabidopsis thaliana
cgactcactatttggagggctggaccgcctgcaggtaccggtccggaattcccgggtcgtcccacgcgtccggtggccgttccttgaaatccgattctgattccttccttttggatccgattctatctccaccttcaagcacaatattcgactcggtactctctctttcttcttcttattgcaaaaagattctctttttatctgttttgtggatatagagattctggataaaaacaatcatcttttttctctcaaaaatctctgcttaagaactgggattcttcaaaagctcttctcttgtctgatttcttctgaatttcccctctaagtctctccaattcttctccattagctataaagtcgattcctttatcaccgttctgaagaatttggtcgaaagttttggcctttagtacccaattttcaatcctggcgataactgaattgaaaagggttccaaaagttacatcacctgaaaacaacagtgcttttgattgtgttggtggtttggagtgcttgataagttgaatcacggcccttgatatggggtcctgcttatcatcatctggaggtggaggaagcaggagatctctccatggctctcctcatgttcctggacctgggaggaggaagaggcctcccaagaggagacctgggtcttgtagttcttcgtttgataacaccgaggagccacttcttcatagggatccctg

SEQ ID NO: 122411 - DNA, 544 bp, Arabidopsis thaliana
atgatcctgccagctacaatacgactcaccttagggaaagctgcgtacgcctgcagatagcagagaggaaacgtttctcttgttcgttggaatctccgtccctttttgttgatcgacggtggtgaatcttagacatggcggctgcgaagctcgtcgctttgttacttcttgccttgcttttcaccaccagcgtcttcgccgatgctgatgagccggaggtttctgaggctgccggatccgatggctcttccaagatccacctggatcagcttaatgccaagatccgtgccctagaatctcaaatcgatgagaaaacccgggaagttcagggcaaagacgaggtagtagcagagaaggagaaactactcaaagaaagggaagacaagattgcttccttgcagactgaagtctcatcactacagaaaaagggatcatcagattctgcaaaacagttgggaaaggctcaagcacgagctgatgaattagagaagcaggttgaggttctcaagaacttctttggggcaaaaaaaccaaggggggaaag

SEQ ID NO: 122412 - DNA, 894 bp, Arabidopsis thaliana
  unsure (1)..(894): unsure at all n locations
atgatactgccnnnnnnnnnnnnnnnnnnnnnnnnnnnnnnnnnnnnnnnnnnnnnnnnnnnnnnnnnnnnnnnnnnnnnnnccacgcgtccggcaagatctaatcgggtctgatctcgagcttccttcactaaccagagatcagaatcgtggtggtggttacgatctcgtcgatcgaatgccgtttctatacattcgtgtagctaaagcgaagcgagcgaagaacgatggaagcaatccggtttacgcgaagctcgtgatcggaacaaatggcgtgaaaaccagaagccaaaccggtaaagattgggatcaagtgtttgcttttgagaaagagagcttaaactcgacctcgcttgaagtttccgcttggagtgaagagaagattgagaaggaagataaaacaacgacgactactgagagttgtttaggaacggtgtcgtttgatcttcaagaggttcctaagagagtgcctccggatagtcctttggctcctcaatggtacacattggaatctgagaaatcaccggggaatgacgtcatgctcgctgtttggctcgggactcaagctgatgaagcgtttcaagaagcttggcaatctgattccggtgggttgattccggagacgagatccaaagtttacttatcttcgaagctttggtatttgcgtctaacggtcatacaaacccaagatttgcagctaggtttgggatccgaagctaagtcaaagatccccaccactgagctttatgtgaaagctcagcttggacctcaagttttcaaaacggctacgacttcgattgggccgtcggcttcttcgtccggatccggtaacccgacttggaacgaggatctagttttcgtaacttccgagccgtttgagccgttcttgatagt

SEQ ID NO: 122413 - DNA, 450 bp, Arabidopsis thaliana
cccacgcgtccggtcatttttaataggaaaataagacatagttatctacaatataaagcctattcggtataataacagagtagaatctaacaaccccaaagctttcatagattgggttttgtagggatatttcagtttttactggaaggatcatgaagaacatcaacaatggcttcttcctctgcatgcttttactcctctggtgttttgtgcattcggggatttcaattgatcctttctccccaagcgactcactcaaaacagagtgtgtaatgaagcctccacgaagcagtgaaacgaaaggattattacaatttagccgctctgtcgaagatgactctgatgaagaatgggaaatagatggaagtggatccataagagaaatggcacagagaagtcagcttcaccaacgagacatttacagcttctctgcttgggtgaagttgagag

SEQ ID NO: 122414 - DNA, 586 bp, Arabidopsis thaliana
  unsure (1)..(586): unsure at all n locations
cccaagcgtccgctctcgcagctcttctctattttcagcaatcgcctataatattaggtaaagctaaaagggtctgattcgtttgttttttcactgaagaatttggaaggaagtgattccgttgtgaaacagaaaagaagtatgggtactcacattgatatcaacaacttaggcggcgatacttctagagggaatgagtcaaagccattggcgaggcagtcttcgttatattccttaacgtttgatgagcttcagagcacattaggtgagccggggaaagattttgggtctatgaatatggatgagttactcaagaacatatggactgctgaggatactcaagcctttatgactactacatcttcggttgcagccccgggacctagtggttttgttccgggaggaaatggtttacagaggcaaggctccttgaccttgcctagaacgctttagtcagaagactgtccgttgaggtctggaaatacctgaattcgaaggaggtagtattgggaatcttgaacggatgcgtttanggaacaactttnggggaataccntggaggtttncncccctgggtntaaaanta

SEQ ID NO: 122415 - DNA, 540 bp, Arabidopsis thaliana
  unsure (1)..(540): unsure at all n locations
nnnnnnnnnnnnnnnnnnnnnnnnnnnnnnnnnnnnnnnnnnnnnnnnnnnnnnnnnnnnnnnnnnnnnnnnnccacgcgtccgacagttctttgttacaattttttttcctcaaattgtttttgaaagggttttattatgcggttaaacatcaacaaaatctctgttcttttatatatatatgaacaaaaagagatttaagaaaaaaaaatagatgataccttaagcaatactatttaattgaagtatgtttagttattcatattaaggatcttgttttcaattatggtgaattttgagttaattgaaatgatatttgtgaataactttaatgaagaatcttgtttttattttggtgaaatatgacagtaagttggaatgagaagagaagtttttgagtcggtgagcaccaatgcttctaatgaaagggttcacgtggctcccaaaatagcggcagaggaacaagattatgaggagaaagaatgcactgaggagaattctctctctcagaatcataaatcttctaatgtaatcacagag

SEQ ID NO: 122416 - DNA, 531 bp, Arabidopsis thaliana
  unsure (1)..(531): unsure at all n locations
atgatactnnnnnnnnnnnnnnnnnnnnnnnnnnnnnnnnnnnnnnnnnnnnnnnnnnnnnnnnnnnnnnnnnnnnnnnnnnnccacgcgtccgctttgtctctgtctttttctttgtcttcttcctcgtatctctccctttcttctcatccgcagcacctccgtcttctgattctatctacgaatcattcgttcaatgtttctccgacaagacaaaatctccacaagcccaaatcaccgacaatgtcttctctcggacaaacccttctttctcctccgtccttcgtgcttacattcgaaatggcaggttcaacacttcatctacgccaaaaccagctatcatcgtcactcctcgctccgatatccacgtcagcgccgccgtcacttgctcaaaaagtttaaatttccttctcaaaatccgaagtggtggccatgattacgaaggtctctcttacatctctgataaaccattttttatactcgacatgtcgaatctccgtgatgtctctgttgatatcgccgatcaatcag

SEQ ID NO: 122417 - DNA, 434 bp, Arabidopsis thaliana
attcaggaaaaagatttcatctttgagtttttcattcatctatcggttgtttccattctcaggtttcagtcgaaaattccctctctttcttttcgatttgatctgggtttcattgtacatagctcgatcttcaagtttcgtcatctgggtcttgtaaagttttagacttttagggttgttttacttgtgaagtttctctcttttctaatggattctctgggtaattgatcgattagggtttaagattttagcggtggggaaagctgtttggttctagaattctatcttgattaacgtcacttgcagctttctcacaggttttggaattgtactaggttttgattgataatcatagattggtagtgatttgggagtttcttgattgtgtaatcatggcggaggctattggtgctgtatctttggtgggtcatcga

SEQ ID NO: 122418 - DNA, 483 bp, Arabidopsis thaliana
catgacgactcggagatctctaggctatggctacgttaactatgcaactcctcaagatgctcccagggcactgaatgagctgaatttcatggctcttaatggaagggctataagagttatgtattctgttcgtgatccaagtctccgtaagagcggagttggtaatatatttattaagaatcttgacaaatcaattgatcacaaagcacttcacgagacattttcagcctttggtcccattctatcttgcaaagtggccgttgatccctctggtcagtcgaaaggctatgggtttgtgcagtacgacactgatgaagcagctcagggagccattgataaactgaatggaatgcttcttaacgataagcaagtttatgttggaccctttgttcacaagctgcagagagatccttcgggtgagaaagttaagttcactaatgtttatgtcaaaaatctctccgagtccttgagtgatgaagagct

SEQ ID NO: 122419 - DNA, 560 bp, Arabidopsis thaliana
  unsure (1)..(560): unsure at all n locations
tgatacgttcnnnnnnnnnnnnnnnnnnnnnnnnnnnnnnnnnnnnnnnnnnnnnnnnnnnnnnnnnnnnnnnnnnnnnnnccacgccgtgcgaaataaaaaaggtctaaactttactcttacatgcgccattgaactaacagggctaatggctgcagctcctttactgctccaactacgatttccacagttgcagagatattacatccttcgaattcaagttttgggtattgatcgtgagaattcaaggaacatcttttcttcggtcagtatgtggcactctaagttagtgttcgtctctcggatcaaattttcgaattactcttgcttagtttctctgattacttgtgtagatgtgattacccaataagcctgaaaacaaaaggcgtgattttgtgattactctggcgtaataatgcctcagtatgggtcaacgggtcaacactgcgagttcacggcgggcgtcttacttctcgtggccgacttcaagcaggctaagcaacgccgcggaagaaagagctaactatttctcaaacttgcagaaagaggangatgatgat

SEQ ID NO: 122420 - DNA, 578 bp, Arabidopsis thaliana
acgactcactatttggaaagctggaccgcctgcaggtaccggtccggaattcccgggtcgtcccacgcgtccgattttatttttttcccctaccaaattttcttcgaatttcagctcagatcccttccttcttccagatcgatcttcagatctattgttttttaagaatgggtttcaagcgaacgtttgacgctgaagatgttcaagagctcaacgttaagaatggtagacagattagttactgtaataagctggccaaactagatgaaggagttccatatcgtctttcactggagaagccaggtgtcgtaggtaataataacaccttgtttcttgcagaggggttcacatgataaacttaagcagttcgcttaatgattatctgtctttatcatttagcaggatttggatataagtgatctctaccgggtataaatgggagggtaacgttgacaaggggtttgagaccactgcgcctttctcttgggtcacacactgggttcgtctgaggaggattctcagtctggagctacgattcagtctaccatttctcatgaatctcctgagtcagatatacc

SEQ ID NO: 122421 - DNA, 897 bp, Arabidopsis thaliana
cccacgcgtccgcttcattgtcaggaggtcttgagagtttcagaggaagcagcagttttcttccattcattaagcttgttgacacatttgacgcgcaatatagtgttatctcaaatgatgagactctgtttactttcttgacgaataaagatgcccctaagtagaaattagtccgggttgatctaaaggaaccaaacagctggactgatgttgttgaagaacacgaaaaggatgtcttagcatcagcttgtgctgtcaatgggaatcacctggtcgcatgctacatgagcgatgtaaagcatattctgcaaattagggacttgaaatctggttcattgcttcaccaattacctctagatattggttcagtatctgatgtttctgctcggcgcaaggacaatacctttttctttagctttactagctttctcactcctggtgtgatttacaagtgtgacttagccaatgaatctccagaagttaaggtattccgggaggttactgtacccggatttgacagggaagcatttcaagccattcaggtcttctatcccagcaaggatggaacaaagatacctatgtttattgtggcgaaaaaggatattaagcttgatggatcacacccatgtttgctctatgcatatggtgggtttaacataagcataacaccgtctttcagtgccagccgtattgtgcttagcaagcatctcggtgttgttttctgctttgcaaacattcggggtggtggggagtatggtgaggaatggcacaaagcaggttcacttgccaaaaagcagaactgtttcgatgactttatctctggggcagagtatctcgtgtccgctggttatacacaaccgagcaagctgtgtattgaaggtggcatcaatggtggtg

SEQ ID NO: 122422 - DNA, 393 bp, Arabidopsis thaliana
cggacgcgtgggcgcaaatctctttcactcttaaacctcataaccttagagatcatcagtcatcaatcatcttcttcgttgttatcacttctttagtagctctcaacgagatttctccaaaatcagcgatgcctttaacgagatcaaagagtcttccggcgacggagaacggtggatccgatcgggagacactccaatcaggaagatcagtggctgggattctctataaatggactaattacggaaaaggatggagatctagatggttcctcctccgcgacggaatcttatcgtattccaagatccgaagaccggagaatgtcaatctcttatctcccttccgatgatctgaggttaatcggagatatttccaccgatcgtctcttgagaatg

SEQ ID NO: 122423 - DNA, 668 bp, Arabidopsis thaliana
aattgatctaaaacttgttcactaagaaaaaatcaaaatcaaatcagagcaccaaaaccgactcagatctagatcggatttctccaatggctctcgaatgggttgtgttaggttacgcagcagcagctgaagcgatcatggtgattctcttgacgatgcctggacttgacgctctccgcaaaggattagtcgctgtaactcgtaatctcttgaaaccgtttctctcgataatcccgttttgtctcttccttcttatggatatttactggaagtatgagactcgaccttcttgcgatggtgattcgtgtactccttctgagcatcttcgtcaccagaaatcgatcatgaagtctcagcgtaacgcgcttctgattgcgtcggctcttgttttctactggattttgtactctgtcacgaatttggttgtgaggattgagcagcttaatcagagggttgagaggctcaagaacaaggattaagtaagatccagctgcttcgtccctcgtcttcctcaggtcctttagtgttttcgagttgtttgaatttcgatgaaagagtctctttactacttgtgccgttttaggttttttctgcgtttgttttccgatgtttgctctttgttgaactggggattgaaggatctataatacttaaaatatatgcttctt

SEQ ID NO: 122424 - DNA, 849 bp, Arabidopsis thaliana
atttctttcctttgccatatttataaaataaaagagagagaaagaattttcaataattttcaacaagcaaagttcatgatggggaataagcgaaatctcggatttgtgatcttcttctgggctctggtggttgcagtagtagccacggccatcgagcatcgtcgcaatgagaggactaaaggcgtcaatggtcttgacaagatcatcatccgcgaccgtcgtggccgatctgctgaggtttacttgtatggaggtcaagtcagttcttggaaaaatgagaatggagaggagttacttgttatgagtagcaaggctatattccagcctccaacaccgattcgtggaggaattccagtattgtttccgcaatacagtaacaccggtccacttccctcacatggatttgtaagacagaggttctgggaggttgagactaaaccacctcctttgccatcactttctactgctcatgttgacctgatcgtaagatcatccaatgaggatttgaagatctggccgcataagtttgagtatagactgagagtagcattgggacatgatggagatttgacgttaacatctcgtgttaagaatactgatacaaaaccatttaacttcacatttgctcttcacccctacttcgctgtttccaatatcagtgaaatccatgtcgaaggattacacaacttggattaccttgaccaacaaaagaacagaacacgtttcactgatcatgagaaggttataactttcaatgctcaacttgacaggttgtacctaagcactccagatcaactaagaatcgtggaccataagaaaaagaagactagtgttgtacacaaggaggga

SEQ ID NO: 122425 - DNA, 547 bp, Arabidopsis thaliana
  unsure (1)..(547): unsure at all n locations
ctctctctttcacttgcagtgtgtcgctttgctgccttcattctcatttcacacgaagattaaaaaaagttggtctctttcctaatttagaacagtgataaaccaatcccagatccgagtctctctccccatctccttctttctctcttttgaataacacactgcggttttttgcctttgagatctgtcattgtctcttccaaatctagaacctttacttgggttgtaacagattcaaatatctgtaactagtgagaaatcatcaatttttaaagctgaagtcttcacttagtagtctgcatcctttaactcggaacgttgggtctccgtttggctttatctcaaataagaaggcaatgaaaggaagatcagatggacggcaaaagaagcgggtgattgctttggtttgcgttgcagcggtagttcttgttctcgtatatctgttctacggctcttctgatcatagagcatcggctatcgaatacgggagaaaactcgggttaggtgcngatgatgatgatactaaacaggatgacacttctagctc

SEQ ID NO: 122426 - DNA, 601 bp, Arabidopsis thaliana
  unsure (1)..(601): unsure at all n locations
atgatactccnnnnnnnnnnnnnnnnnnnnnnnnnnnnnnnnnnnnnnnnnnnnnnnnnnnnnnnnnnnnnnnnnnnnnnnccacgcgtccgcaaatactgaaaataaaaagaagaagagagaaatctacggtggtgggtgattcgccggagttcaatttcgtagctagatttctcctccttttccccccgacgagctgtgcgagagagggaggggaatcatgcagaaacggagaacggtgaaggaatctacgaagataagaaatggtaaaggtatggattccggcgaaaagaagagatctgagaagagattgatgaagttcgaggagttacctaggtatttgaaagataacgagttcatacacaatcattatcgatgtgagtggtcaatcaaagaaactttcctcagcgctttctcatggcacaatgagactctcaacatctggacgcatttgtgtggatttgcgatatttacttggatgatggttgtgagttcaatggagacgacggagcttggcctcgccggctttgttagccttctctccggagcaacaattcgctggccatggccgtcaatggcaatgtcaaaagatgtttacttc

SEQ ID NO: 122427 - DNA, 487 bp, Arabidopsis thaliana
  unsure (1)..(487): unsure at all n locations
cctctntgtntcctcctccgggaagctttctgtctctctctctctctctctacacaagaccttgaagaatccgattccataacaatggcgacttcgttagcacgaatctctaaaagaagcataacatcggctgtttcatcgaatctgattcggcgttacttcgccgcggaagcagtagcggtggcgacgacggaaacacctaaaccgaaatcgcaggtgacgccgtcgccggatcgggtaaaatgggactacagaggccagagacagataattcctctgggacagtggctaccgaaggtagctgtagatgcttacgtggcacctaacgttgtgttggctggtcaggtcaccgtctgggacggctcgtctgtatggaacggtgccgttttgagaggagatcttaataagatcaccgttggattcttgctcaaatgtccaggaacggtgtgttgttcatgctgcgtggtcggcgcctacaggattacca

SEQ ID NO: 122428 - DNA, 1029 bp, Arabidopsis thaliana
  unsure (1)..(1029): unsure at all n locations
cagctacnnnnnnnnnnnnnnnnnnnnnnnnnnnnnnnnnnnnnnnnnnntgctcaagttaaagatttcatcccccccctccggcattacggtggctacaacgagatggctgatatactcgtcaacttaacctctttagccactgagatgggtcgactcgtgtcagaaggctacgttttaaccgttcttgctcctaacgacgaagccatggctaagctcacaacggaccagcttagcgagccaggtgctcctgaacaaattatgtattaccacatcataccggagtatcaaacagaggagagtatgtacaacgctgttcggagattcggaaaagtgaagtatgattcattgagattcccacataaagtgttggctcaagaagctgatggatctgtcaaattcggacacggtgatggttcagcttacttgtttgatcctgatatctacacggacggtcggatttcagttcagggtattgatggagtcttgttcccgaaggaggaaacgccggcgacggagattaaaccagctgctccagtcgttaagaaagtttctaaatcaagaagaggtaaattgatggaggtagcttgtagaatgatggggtcacggtttattccgtgtcagtgatttcacacgttatcaaaaaaaaattccaagcttccaaattcttaattctgtaaacatgtggaaaaaaaaaagaaagagttgaatatgtaaatgatgtgatttttgggttcgttgttatttgcatgttctatttgtaatttttttattatcataaatatatatatatatatacgtagattttgattaagtttgttatttgggggtgagtaaaaaagttctaggagtttagagaaatcaaatatgtaatacaagttatacaatctgtatggaaataataaaggaaggatccatttgtgtgcctaaaaaaaaaaaaaaaaaaaaagnnnnnnnnnnnnnnnnnnnnnnnnnnnnnnnnnnnnnnnnnnnnnnnnnnnnnnnnnnnnnnnnnnnnnnntagaatcg

SEQ ID NO: 122429 - DNA, 539 bp, Arabidopsis thaliana
  unsure (1)..(539): unsure at all n locations
nnnnnnnnnnnnnnnnnnnnnnnnnnnnnnnnnnnnnnnnnnnnnnnnnnnnnnnnnnnnnnnnnnnnnnnnnnnnnnnnnnccacgcgtccgaaataattctcttaaaagagctaagaaaatgcattcctctttgataaaattgggatttcttcttcttcttattcaggtatcattgtctcatgctcaactaagcccttccttttacgataaaacatgtccgcaagtctttgacattgcaaccactaccattgtcaatgctctaagatcggaccctcgcatcgctgcaagcatccttcgtcttcatttccacgactgctttgttaatggatgtgatgcatcgatattgttagacaacaccacatcgtttaggacggagaaagatgcgtttgggaacgctaattccgctcgaggtttcgatgtgatcgacaaaatgaaggctgccgtggagaaagcatgtcctaaaactgtttcatgtgctgatttgctcgccatcgcggctcaagaatctgtcgttttggcgggaggtccttcatgga

SEQ ID NO: 122430 - DNA, 677 bp, Arabidopsis thaliana
ttagcaaaagcggttgaaggtcctctacttctcggcccaccgtaacaacatacactgtcaatccatatagttatcataaacccacacgtcaacgaaaccactcttttgacttcatcctctatccaatcacaccacgccacgttaacaccacgacctagtgtttctgtgatctccacacagagaaagaagcgtttcggttctgttttcgccccaacacaaagactccttttgtttcttttcctcaattggatcgaaaaaacccctaactttgacatggaaggagagattcaagactgggaaatacttcagagctcgagatctaccacggaagatgacaattcgaggagcttggaggagattgatgatggcacgcaaggtatgattaggtttgatcatttctctcttgagaaccagagtggtttgtctcgtttggaggcaaacgatgaagatgggtctgttcaatcgggtagtccaggatggatcgaacctagctccgatgttccttatggtccgaagcattttagtgagttatggtctgattcaagcagtgatcggcttgatgatcagaggttagtggatgatgatgtgaataacgagatgggtatagagagaaacgaagtgggtactgttgaatatagtgaaagtatagctcaagacatggatttgataagctctga

SEQ ID NO: 122431 - DNA, 653 bp, Arabidopsis thaliana
accacgcgtccgtgtggagccattgcaactgcacagagcattcgaatgtcaggctctactcgtgatctggtcatacttgttggttgaaacgataaccgattaccataaaattggcttggtacctgctggatggaagattcaaatgtttcaaagaatcaggaacccgaatgctgtaccaaatgcctacaacgaatggaactacagcaagtttcgtctttggcaactgactgaatacagtaagatcatcttcatcgatgcagacatgcttatcctgagaaacattgatttcctcttcgagttccctgagatatcagcaactggaaacaatgctacgctcttcaactctggtctaatggtggttgagccatctaattcaacattccagttactaatggataacattaatgaagttgtgtcttacaacggaggagaccaaggttaccttaacgagatattcacatggtggcatcggattccaaaacacatgaatttcttgaagcatttctgggaaggagacgaacctgagattaaaaaaatgaagacgagtctatttggagctgatcctccgatcctatacgttcttcattacctaggttataacaaaccctggttatgcttcagagactatgactgcaattggaatgtcgatattt

SEQ ID NO: 122432 - DNA, 642 bp, Arabidopsis thaliana
gcgaaaaaaaagagggaaaaaaaaaggaagttgtgtgaatccaaagggtggaaaccttttaagagggcaggaaaaaaggcggggggggtttccaaagccgaaaagaacccctaaagaagaggtttatgggtcctgtttcgatggagccgcttcctttaggttccagattcagacctaccgatgaagagctcgtcaatcactacctccgtctcaagatcaacggacgtcactccgatgtccgtgtcatccctgatatcgatgtctgcaaatgggaaccttgggatcttcctggttcgtctctttattctctcaaaatttgattccttttattctcagattctgttttccctctcaaagattccaccttttttttctttactcaattgggaacaaatctgattgtcggcagctctctcggtgattaagacggatgatccagagtggttctttttctgccctcgtgatcggaaataccctaatgggcatcgctctaacagagcaactgactctggctattggaaagctactggtaaagatcgtagcatcaagtctaagaagactttaatcggtatgaagaagactcttgtcttctatcgtggacgagctcctaaaggtgagcggactaattggattatgcacgag

SEQ ID NO: 122433 - DNA, 364 bp, Arabidopsis thaliana
gcaaagtgttgaagactttttagaaagcagaaaaaaaagcagagagtgtattcaaagtcggaaagaaaccctaaagaagaggattatgggtgctgtatcgatggagtcgcttcctttaggtttcagattcagacctaccgatgaagagctcgtcaatcactacctccgtctcaagatcaacggacgtcactccgatgtccgtgtcatccctgatatcgatgtctgcaaatgggaaccttgggatcttcctgctctctcggtgattaagacggatgatccagagtggttctttttctgccctcgtgatcggaaataccctaatggtcatcgctctaacagagcaactgactctggctattggaaa

SEQ ID NO: 122434 - DNA, 421 bp, Arabidopsis thaliana
cccaagcgtcccacttttggatcttcttcttcttcttctctctcaatactcacaaatcctccattttctctgagtttagtttcttcttcagacactaagattcaagtcctctctttggtcggagaagatgcaggtagtctcgagcttcgattttcagtcttcgccgttctcacacggcgccggagagattctcatttctccggtagaccaccgagagttatcctcacacggtgacgcgcttgaaggcgcgtgtgatgactcgactagattggcggcggtgaaagtacagaaggtctacaggagttatcgtacgcggcgtagattagcagactctgtcgttgtcgccgaagagctctggtggcaagcgatggattatgcgaggcttaatcatagtacgatttcgtttttcgattactcgaga

SEQ ID NO: 122435 - DNA, 504 bp, Arabidopsis thaliana
ggggagaattaccacatgatgaaggcgatctcagacatccatgatttgcctcttttgtcttctttaccttattcgtctctcattctttgaatctcctttccctttctctcaatcttcctcacttacatttcttatctcactccctctctcactttctccttcaatgttctctcctctgcgttttcacgaaacagagaaccttatcgttccgtcttcgtagacattgaaatcgatagagaggtgttgatttgattacgtttaatattgattcggatgaacggaagagatggttactaatagctacatggatacgcgatcaaatttgacaagtgtgaatcgaggatccaatgtggatctcgaagatcgattccagagggagctcgaatctttgctccaacaacatcgtaatcagcaatcatttggccgagaacgataacgagacattgatgttcacagaagcggaagcgcgcctcctaccgtggaaggattgttgagagctatgga

SEQ ID NO: 122436 - DNA, 499 bp, Arabidopsis thaliana
tttcactcgtccgatctgcagatcacttatacacagccatttgtggaatcataccaaacatttctagcccaggttgcaggatatttcattgtggaggatcgggtgattaggacagctggagatttcttgttggctgatcaagttgagacaatgtgggaaacagccatttccaaaattgtagccatattggagaaccaatttgccagaatggattcgcctactcatctgcttttggtgaaagattatgtaactctccttggcacaacccttagacagtacggttatgaagtgggtccagttcttgatgcccttgacaagagccgagataaataccacgagcttcttcttgaagagtgtcgaaagcaaattgtgactgctattacagaggacacttatcagcagatggtaatcaagaaggaagctgactatgaaaacaatgtcttgtcgtttaatcttcagacctcagacattatgccggctttcacttacattgcgccct

SEQ ID NO: 122437 - DNA, 524 bp, Arabidopsis thaliana
cggacgcctgggttccgcccgctcctccattgcaaaatctagctcgatctgtgaaggtttctctgagttcttcaaaaatctcttctagagaaagacttcattagctcaattttagcaacttcctccacctccttttactcacactgtgcttcgatttcaacttcgcatttcacaatgatccccaacggagaattgagattacctgctctcaaggtccgtgaagaccgcgtgtcaccctcacctcctattccggtcaccagaaccctagtggctgatactgacgtcacttccgatgacgatatgagtacaaattccgaggatgtctctctcgattcgtctcccgagaacagtagagtgtccagtgccgttggtcgcagctacgggagaaattcgtcttattatacttactccgaggtgagctcatcacgagagactttggtcggtgcgcgcgaaccgacgggacctagatttgatggtgatacggaggaagatgaatccaccgattcagcttctagcacgcaatt

SEQ ID NO: 122438 - DNA, 570 bp, Arabidopsis thaliana
aatacgactcactttagggaaagccggtacgcctgcaggtaccggtccggaattcccgggtcgacccacagctccgcccacgcgtccgcggacgcgtgggtttctccagaacctgacggaaaaaaacttgaatctgcaaatcgacttcccccggagaatgcgatcggagatcggaaactgaggaattgctgctctctactcgcggtgtttagtttacgattggaatatggggaagatatttagctggttagtggtgttattgtcattgatctcattagtccctgttccatcggaatcggctgttttgagtgtagatctaggttcagaatgggttaaagttgccgtagttaatctgaaacgaggacagagtccaatctctgtagccattaatgagatgtccaagaggaaatccccagctttagtagcatttcaatctggagaccggttactaggcgaggaggctgcgggaataacggctcgttatccgaataaagtttattcacaactgagggatatggtgggaaaacctttcaaacatgttaaggatttcattgattctgtctacttgcc

SEQ ID NO: 122439 - DNA, 589 bp, Arabidopsis thaliana
  unsure (1)..(589): unsure at all n locations
gggcccttttnttggnncccncaggncccgggnggngnnccttntncagnngttccccaccttccngggggggaggttccccccnncttggtcattacctcctcccatgngtctgnttttaccgggggtggtggtggtggaggatgttccttcatcttcttccaatggccctctggaagatctctctgacctcatgtccccacctccctatcaggggggggatttatcaaagttctatggagggaaattctcaatccattcacatccactagcaaatgttaaaggccttgaagatcttatgaagagagggtttaataaaagtagaaactatggagcaaaaagaaagtcatctaggagtactggagggattttagatcaaagctacaaaagggtttttagtcctaaagctacaatctccaagaaacccaacagaacaccttcctctgctctctcttgtctagccagaagaagacattagatctcagacaaacattagtttctctttccaagttttaaccctttttacgattcaccaaaatcggtttcagtaacatgacaacaacagtaagacatcgtagcattccactgt

SEQ ID NO: 122440 - DNA, 447 bp, Arabidopsis thaliana
aattgtagaacaacacacaactttctttctcctcctgttcaagactcctttattttctcttatgttcaaagagatgaatctgaatctgaagcaaatgggcaacatgatctatgaagatccaacaaggatccaagaagaagaagacattgttcaagaagtttcgacaacattctctgaggaagaagataactcatcatcttgttcattatcttcttccatgtgttctgattttacagaggatgatgatgatgatgatgtttcttcatcttcttcaaatggacctcttgaagatctctctgacctcatgtcacacctccctatcaagaggggattatcaaagttctatgaagggaaatctcaatcattcacatcactagcaaatgttaaaggccttggaagatcttatgaagagaggggtttaataaaaataggacctatgggcaaaga

SEQ ID NO: 122441 - DNA, 623 bp, Arabidopsis thaliana
  unsure (1)..(623): unsure at all n locations
nnnnnnnnnnnnnnnnnnnnnnnnnnnnnnnnnnnnnnnnnnnnnnnnnnnnnnnnnnnnnnnnnnnnnnnnnnnnnnnnnnnccacgcgtccgcagacttcacactttcactttcattcgctttttcttctctattactgcaatcacttgttcacgataatggcggacctctcctctgtcgatgagttcctgaatcagtgcaaacaatccggcgacgcagcttatggcgccttgcgatcggtcttggagcggctcgaggatccgaatactcgatctaaggctcggatcttcttgtctgacatctacaaacgcgtcggatcttctgagacgtctctccaaacctaccattttcatatccaggacatctatctcgatcaatacgaaggctttcagtccaggaaaaagttaaccatgatggtcattcctagtatttttattccagaagactggtcatttacattttatgaaggacttaacagacatcctgacaccatctttaaggataagactgtttctgaacttggctgtgggaatggatggatatcaatagccattgctgctaagtggttgccttaaaggtatatgggctcgatattaatcctagagctgtgaaaatttcttg

SEQ ID NO: 122442 - DNA, 764 bp, Arabidopsis thaliana
  unsure (1)..(764): unsure at all n locations
nnnnnnnnnnnnnnnnnnnnnnnnnnnnnnnnnnnnnnnnnnnnnnnnnnnnnnnnnnnnnnnccacgcgtccgagatgatgaagcttgtgaggttgatgaggagtcttcaagtaatcatacttgtcaagaatgtggtgctgagtttaagaaacctgctcacttgaagcagcatatgcagagtcattcgctcgagagatcttttacttgctatgtggatgattgtgctgctagctataggaggaaggatcatctcaataggcatcttcttacacataaagggaagctctttaagtgtccgaaggagaactgcaagagtgaattctcagtacagggaaatgttggtaggcatgttaagaaatatcatagtaatgacaaccgtgataaggacaatactggtttgggcgatggtgataaggacaatacttgtaagggggatgatgataaggaaaaatctggtagtggcggttgtgagagggaaaatgaaggggatggcggaagtggtaaggacccataatggtaatggcgattctcagcctgcggagtgttcaactggtcagaagcaggttgtctgcaaagaaattggttgtggaaaagcctttaagtatccttcacagcttcaaaagcatcaggattctcatgtgaaattagactctgtggaggcattttgttccgagcctgggtgtatgaagtactttaccaacgaagaatgcctcaagtcacacataagatcctgtcatcagcacatcaactgtgagatatgtg

SEQ ID NO: 122443 - DNA, 548 bp, Arabidopsis thaliana
ctatgacaacccatgcacgcgtacgtaagctcggaattcttttcgagctaggcactaccattatcaatccgctctcttctcaaaaaaaaaaatcgactctaaaatcaaactctctcaaagctccccaaaaaaaccctagttctgaatggaatcggcggattccggacgatccgatccggtaaaaggagacgacccgggtccatctttcgtctcttcaccaccagctacacctagcaggtatgagtcacagaagcgacgcgactggaacacgttcttgcagtacctcaagaaccacaagccgcctctcgcgttgtcacggtgtagcggagcgcatgtgatcgagtttctcaagtacctcgaccagttcggtaagaccaaagtccacgtggcggcttgtccttacttcggccatcagcaacctccgtctccttgctcatgccctctcaagcaagcttggggatctctcgatgctttgatcggacggttgagagctgcctaccaggagaaacgggggacggccggattctaacccgttcgccgcacgtgcg

SEQ ID NO: 122444 - DNA, 1198 bp, Arabidopsis thaliana
  unsure (1)..(1198): unsure at all n locations
atgatcctnnnnnnnnnnnnnnnnnnnnnnnnnnnnnnnnnnnnnnnnnnnnnnnnnnnnnnnnnnnnnnnnnnnnnnnnnnnccacgcgtccgcccacgcgtccgcccacgcgtccgattttagctcttgcctcagaggcctctgtgtctttggcaggaggaccttcatggactgtgttattaggaagaagagatggtctcaccgcaaacttgtctggagccaattcgtctcttccctctcccttcgaaggccttaacaacatcacatcaaaatttgtagctgtcgggctaaagacaaccgatgtagtatccttgtctggagcgcatacgtttgggcgtggtcaatgcgtaacgttcaacaatagactattcaacttcaacgggacaggaaaccccgacccgactctgaactcaacacttctcagcagtcttcaacagctatgtcctcaaaacggcagcaatacagggatcaccaatctcgatctgagcacacctgatgcgttcgataacaattacttcacgaaccttcagagtaacaatgggcttctccagtcagaccaggaactgttctcaaacaccggttcagccaccgtcccgattgttaattcctttgcaagtaaccagaccctgttttttgaggcgtttgttcagtctatgatcaagatggggaacattagtcccttgactgggagtagtggagagattagacaagactgtaaggtggttaatggacagtcatcagccactgaagcaggggacattcagttacaatctgacggaccagtgagtgtagcagatatgtgaacaacgatgagatcagtttcaccgtttgtttatcatatatgaataataactcctaggccgaatcatttttgtgaaaaaaataagtttggttgaggagaaaataagtgagtggtagggttgtgttttacacttttgaaaattttaatattctaaaacattattatgcctaaagacatgcatgcatgtataacgtctatcgttttgatacattttgtggatttgaatctaaattgtgtcacaacgacaaaatttaaaagaataaaataaaaaactagattcatgtcatgatttatcaaaaaaaaaaacaaaaagnnnnnnnnnnnnnnnnnnnnnnnnnnnnnnnnnnnnnnnnnnnnnnnnnnnnnnnnnnnnnnnnnnnnnnnnntagaatcg

SEQ ID NO: 122445 - DNA, 1477 bp, Arabidopsis thaliana
  unsure (1)..(1477): unsure at all n locations
nnnnnnnnnnnnnnnnnnnnnnnnnnnnnnnnnnnnnnnnnnnnnnnnnnnnnnnnnnnnnnnnnnnnnnnnnnnnnnnnnnnccacgcgtccgcttcttcagagcacacaagctctgagatcccatcaataaatggcggtaacagagtcctctgtttatttactctaacaagtcctttaaggttttaataacccagtttcatgggggttacttccttgtatctagccctgttatagcaaggagctcgtgatcatgagtggtacagagttagatgagcctggaaagttaaaacgtgctgtcattgatgcttctgctggtggtgttgctggtgcgatttcacgtatggttacctctccccttgatgttatcaagattagatttcaggttcagttggagcctacagctacatgggctctgaaagattctcagctgaaaccgaagtacaatggtttgtttcgaacaacgaaggatatctttagagaggaaggtttatcgggtttctggcgtggaaatgttccagctttacttatggttgtgccttatacatccatacaatttgcagtcttacataaggtgaagtcttttgccgctggttcatcaaaggccgaaaatcatgctcaactgagcccttatctttcttacatcagtggggcactagcagggtgtgcagcaacagttggatcgtatccgtttgacctattgcggnctgtattggcgtcccagggtgagccaaaggtgtatccaaatatgaggtcagcatttctgagtatagtgcaaactcgtggaatcaaagggttgtatgcaggattgtcccctactctgatcgggatcattccttatgctggtctgcagtttggcacctatgacacatttaaacgctggagtatggtatataataagcgataccgatcttcttcatcaagctcaacgaatccaagtgatagtctttctagctttcagcttttcctttgcggtttagcttcgggcactgtttctaaactagtctgtcatccgcttgatgttgtcaagaaaagattccaggtcgaaggtctgcaacgtcacccaaaatatggagcccgagtagagctgaatgcttacaagaacatgtttgacggtttagggcagatattaagatctgaaggttggcacgggctttataaaggcattgttccatcaaccattaaagctgcacctgctggtgctgtaacatttgtggcctatgaacttgcatccgattggtttgaggcaaatttcccctgaacttgtaaaattcttcaattctatttgtaaatcttattctattttgcttttgagtaataagtaatataagattccatccttctctgaacagagaccaataatgcaaactctttcttactaggaaaaaaaaaaaaaaaaagnnnnnnnnnnnnnnnnnnnnnnnnnnnnnnnnnnnnnnnnnnnnnnnnnnnnnnnnnnnnnnnnnnnnnnnnnnnn

SEQ ID NO: 122446 - DNA, 510 bp, Arabidopsis thaliana
  unsure (1)..(510): unsure at all n locations
ttgacgtcgcatgcacgcgtacgtaagctcggaattcggctcgagactgtttcttgcacaatgtgttcctcttgcgacaatccatgtaatcctgtcccatcttcttactctcctcctcctcctccgccatcaagctccggtggcggtggatcttattattactctcctcctcctccttcaagctccggtggtgttaaatacccgcctccgtacggcggcgacggctacggtggctattatccgcctccttactacggcaattacgggacaccaccaccaccgaatccgatcgttccttattttccgttttactatcatactcctcctcagggatattcaggctcggctcgtttacagaattctctcctctttgctctgttcgccgtcttgctctggtttggggactggggattcatctgggtccggggcggcaaaaggggnccggggggaaacccgagacggcctcggcggcttttggaagcggcgggcgcggcggcggcgagccaccga

SEQ ID NO: 122447 - DNA, 797 bp, Arabidopsis thaliana
  unsure (1)..(797): unsure at all n locations
aggacgcatgggctctctcttttcttctttcatcttctctcttccttatcacttgactttagtccaaatctctagctcatttgtcagacaacaaatttctgacaatggaagcaatcagattctctaatttgtcaggtcttcttattctcttaatgtcactgcctcttttagtgacttcaaaggacgaaactgtttcttgcacaatgtgttcctcttgcgacaatccatgtaatcctgtcccatcttcttactctcctcctcctcctccgccatcaagctccggtggcggtggatcttattattactctcctcctcctccttcaagctccggtggtgttaaatacccgcctccgtacggcggcgacggctacggtggctattatccgcctccttactacggcaattacgggacaccaccaccaccgaatccgatcgttccttattttccgttttactatcatactcctcctcagggatattcaggctcggctcgtttacagaattctctcctctttgctctgttcgccgtcttgctctgttttgtgtgacggcgattcatctgtatttggccgggaaaagtgtacggtgtaaaactgaaatatcttgtttacttatttaactttttttacatttttgttgacaatttgtatttattatatcttttcaattaattaagaacatttataactaaaaaaaaaaaaaaaaaaggnnnnnnnnnnnnnnnnnnnnnnnnnnnnnnnnnnnnnnnnnnnnnnnnnnnnnnnnnnnnnnnnnnnnnnnnnnnnnnnnnnnnnnnn

SEQ ID NO: 122448 - DNA, 461 bp, Arabidopsis thaliana
agaacaatcaataaaaacaaaatctcttacctcaaaagaaaaagctctcttatggctgcttcttcttctgtgagacccaccccaacgggacctcaagtgttcatcaacttccgaggaaaagatctgcgtaacggcttcctaagctttcttgagcctgccatgagagaagcgaacataaacgttttcatagacaaggacgaagtggtgggcacagatctggttaacctttttgtgaggatccaagagtcaagggttgcggtggtgatcttttctaaggactacacaagttcggaatggtgcttagatgagctggccgagatcaaggactgcattaatcaaggcggtctcaatgcgattcccatcttctacaaacttgcaccttcctccgtgttagaactcaaaggaggttttggcgatactttcagggttctaaaggagaaatataaaaatgatcctgaaag

SEQ ID NO: 122449 - DNA, 566 bp, Arabidopsis thaliana
tgatacttcagctctaccacgactcactatatggaaagctggcacgcctgcaggtaccggtccggaattcccgggtcgacccacgcgtccgcgtttttgtatcgagtttattaattcacaatgggaaaagaaaagccacatattaaccttgtcgtcatcggtcacgtcgatgctggaaagtccaccactactggacacttgatctacaagtgtggaggtattgataagagaaccatcgaaaagttcgagaaagaagccaaggaaatgggcaagtcctcattcaaatatgcttgggtcttggacaaactcaaggctgaaagagaaagaggtattaccatcgatattgccctgtggaagttcgaaacctctaaatactacttcaccatcattgatgcccctggccacagagatttcatcaagaacatgattactggaacctctcaagctgactgtgctatcctcgtcattgcttcccctgccggagagttcgaagctggtatctctaagactggacaaacccgtgaacatgccctccttgcttacactcttggagtcaagcaaatgat

SEQ ID NO: 122450 - DNA, 389 bp, Arabidopsis thaliana
gaataaaatattccccgaggcgccgtgttcttgtggcttgctacttatcttctgctgcaatccgcataaatcggatttgcaaaattttcttaacctaattcgtttcttcgcgatcaaaccacagatttttcaattttagtgaagtttcattttttaaggcatggctactctcaacggaaaagcttctccgtattctgaagaaaacatcaaattcaagtatgatgattatgatgatgatgatgatgatgatgatggtagtggtagtggtagtggtggtggttatgaagatggacctaaatggtctgttcaatcaatccccacaaagaaagaggtggagtcttcgattctcgactcaggagattactttgtcgactgatatgattcatccg

SEQ ID NO: 122451 - DNA, 668 bp, Arabidopsis thaliana
aaaaagaagaagaagaaaagagaagaagctcttgttatcccggcgttcttaaaacaacgacggcgacggtgacggctaagcggaagagcttttgttgccaatgacggactcttacggcgccgtctccgtcgacgttggaacaatctatcttggtggcaaggagcatcgtgttaaaactgctagtggtgttgtgtctgtcattgtctatggagacagagaaaagccagcattgattacttatcctgatttggccctaaaccatatgtcatgcttccaagggttattcttctgtcctgaagcagcttcattgctgcttcataacttctgcatttaccatatcagtccacctgggcatgagttaggagctgctccaatttgtcctaatgattcagtcccttctgctgaaaacttggcagatcagatccttgaagttctcaactttttcggccttggtgttgtgatgtgtatgggagtgactgcaggtgcttatatcctcaccttattcgcgatgaaacatagagaacgggttcttggtttgattcttgtctcaccgttatgcaaggcgccgtcttggtctgaatggttttacaacaaggttatcacaaacttgttatattattacggaatgtgtggagtggtaaaggaatttttgcttcaaagatatttta

SEQ ID NO: 122452 - DNA, 569 bp, Arabidopsis thaliana
atacgactcactttagggaaagctgcgtacgcctgcaggtaccggtccggaattcccgggtcgacccacgcgtccgcaggcttctgcttacatcatcggtgttgccggatgggccactggtctcaaactcggtggcgactcaccagggattcagtacagcacccaccgtgccatcgggatcgctctcttctctctagcgacagttcaggtgtttgcgatgtttctgaggccaaaaccagagcacaagcataggctctactggaacatttaccaccacacgatcggctacacgataatcatcctaggggtggtgaacgttttcaaagggctaggcatattgagtcccaagaagcagtggaaaaatgcctacatcggtatcattgttgttctcgccattgtggccaccctactcgaagccttcacctggtatgtagtcattaaaagaaggaaactggaggctaaaacggctcagcatggagcatctaacggcactcggtctcagtatgcttaagattagcaacagacttgcttccttttctctttgtgcatagagacacagttatttatct

SEQ ID NO: 122453 - DNA, 444 bp, Arabidopsis thaliana
acttacaaaatggagataaaaccctctaggatattctccaccatcaccatcttctttctctgccttctactagcacacgtcacctccaaggcatcatcatcatctctgtgcaatggatctgtggcggagtgcagcagcatggtggagacagaggaaatgagtgtgataatggagtcttggtcaagccagaggttgacggaggagcaggcacataagctttcgtatggagctttgaggaggaatcagcctgcttgcgatggtggtaaacgaggcgagtcttactcaactcaatgtcttcctccaccgtcctaacccttatagtagaggctgctctaagcattaccgatgcggccgtgactcttgaccattcaccatcatgaatctttatgttggaaaacacctatgttctttattttgttggtggaattgaattgttttggtttc

SEQ ID NO: 122454 - DNA, 559 bp, Arabidopsis thaliana
  unsure (1)..(559): unsure at all n locations
nnnnnnnnnnnnnnnnnnnnnnnnnnnnnnnnnnnnnnnnnnnnnnnnnnnnnnnnnnnnnnnnnnnnnnnnnnnnnnnnnnnccacgcgtccgcccacgcgtccgcccacgcgtccgcactctttcctttttttctctctctttgatctcctcgaacccatcatcttaaatcgcccgatcaattctatctccggcggtctagcatttttcatcgccggcgaaacattttttaccaattctccagcttggctaatcaactccgatcacgttccgtattcccaaattcgatctcgaagggggacatagagaagtctttcgcgaaggagaatcacgagactttgattacttttggcactcttatgttttcttactgaataaagggacttcatttacagcaactggagctgtttttattgtttacctccaagcgcataattaaacgagaggcatgaagaactgctgaattcaatcaatgcaagtttgtttcgttagcttgaatggatgtagcaacagatactacaaggcggcgtcttcttccatccgacaagaacaatgcag

SEQ ID NO: 122455 - DNA, 836 bp, Arabidopsis thaliana
  unsure (1)..(836): unsure at all n locations
cgnnnnnnnnnnnnnnnnnnnnnnnnnaaagacggtacgcctgcaggtaccggtccggaattcccttgtcgacccacgcgtacggtgaatggagctgtagagacttgttttgggtcgtttcatcggtacgctcaatacatgaatttctcacatcctttgatcaaagagaagtttaatcccaaagcatgtgcgtgggcgtatggaatgaacttctttgatcttgatgcttggagaagagagaagtgcacagaagaatatcactactggcaaaatctgaacgagaacagggctctatggaaactggggacgttaccaccgggactgatcaccttttactcaaccacaaagccgctggacaaatcatggcatgtgcttgggctgggttacaatccgagcattagcatggatgagatccgcaacgctgcagtggtacacttcaacggtaacatgaagccatggcttgacatagctatgaaccagtttcgaccactttggaccaaacacgtcgactatgacctcgagtttgttcaggcttgcaattttggcctctgaactatgaaaattttctttatcatcaaaatctgaaagcatatgttgtttgttacttcagctctacgaagttttaaccttagtttttgtttgtgtttatttatatatttttgggggtttagtagaacacttgtattttgttcatagctatctttgttctatggcaacctataatcaaagcttaattataaaaaaaaaaaaaaagggcggccgctctagaggatccaagcttacgtacgcgtgcaggcacgctcataatcttctattagttgttcctaatacaatcg

SEQ ID NO: 122456 - DNA, 913 bp, Arabidopsis thaliana
acggatctatggtccctggctcgagaaatccaatgtggggtgaagagttcaattttcccacagatgaacttcctgctaagattaatgtaacaattcatgattgggatatcatttggaaaagtactgttcttggctcagtaactattaatgttgaacgtgaaggccaaacgggtccagtgtggcactcattagacagcccgtctgggcaggtttgccttaacattaatgcaatcaaactacccgtgaatgctcctagggctgtaactggatatgctggagccggtagaagaagggtcacattggatcagcaaggcccaacaattgtacatcaaaagccagggcctctgcagacgatatttgatctcctcccggatgaggttgtcgagcacagttattcatgtgccctggagaggtcattcctgtatcatggccgaatgtatgtttccgcgtggcacatatgtttccactccaatgttttctctaagcaaatgaaggttgttgtccctctcggagatatagatgagattcgtagaagtcaacacgcgttgataaacccagctataacaatcatactacggatgggtgctggtggacatggtgttccccctcttgggactcctgatggtagagtgaggtataaatttgcatcattttggaacaggaaccatacactaaaagcattgcaacgtgcggtgaataattatcatgcaatgttagaagtcgaaaagaaggagagagcacagtctgctttgcgtgctcatagtagctctgtgaaaggaggtggtaaagtacaagtgaaagctcctgaagatactgcagctgtaccttgtaagtttcaagctttcaataaaggagaagtccttggtaacatctacaatgatgtttttgccagtacacctgagccagttcctga

SEQ ID NO: 122457 - DNA, 709 bp, Arabidopsis thaliana
cttttaatctcaggcaggaaggtgaaatttttcgatttcgtagatcaaaatggcggcaccattcgcgttaaggaaaatcggtgttcctccgaactcggcgaacctgacggaagctcgccgccgtgttttcgatttctttagagctgcctgtagatctatccccaccatcatggacatttacaatcttcaagatgtcgtcgctccttctcagctccgctatgctatctctgctcagattcggaataacgctcacatcaccgatcctaaggtaattgatcttcttatattcaaaggaatggaagagctgactgacattgtggatcacgcaaagcagcgtcaccacatcatcggtcaatatgtggtgggtgaagggctcgtgcagaatactggaaacaaggatcaaggaaagactgattttctcaagaatttctacaccagcaactacttttgaactggtgatgtttacttttcgagtttcacataagctgtactgtttatgctgcttcagttcttgctcaagtttgcatatgtcttgccagtattgtattctcgacatttggaagaagtcttcttcctggaaataattagatcttttcatttgtatgagtattttctctgactcaggttggttatacatagtattagccaaacctctgtaagctttatgtgtgacagtgtttactgggcaatcttgctatgatttcaagat

SEQ ID NO: 122458 - DNA, 557 bp, Arabidopsis thaliana
  unsure (1)..(557): unsure at all n locations
tcctcttcagctccaacaggctcaaaaagtgatccaactgatcacaactccataaattctgaagatgatttactcttgtctgcaatgaccaaagatggacagaccattcttttggatggcaatactgggaaaatacttgcctcttgcctgagacctctaaagaacccaactgcgatttgtatgcacattatagagaactgctatgaaaactatgaaacgcccagtgaaaaaccagctgaaaatccatctgggaaggataaacatgagaacaaatctcatataatcaaagctagtgagagtcattcaccagacggtgaacagaatgctgtcacaggaacaaaacttttttgatccagatatttgcggattcattatttctcatggtgttctgagggtgcactgcgcttgtatacctgtaaaggttctatctcagggaggctttnagggctttttggggggnaatntccaaggcgnnttcttggtggggtccttaaaaagntggnggggntttgaggctcctttttccnncaggggtttttaanaggnttccggnntgc

SEQ ID NO: 122459 - DNA, 592 bp, Arabidopsis thaliana
ggcagctgctgtttagaccatcgatccgacaatttcatagcgaaaaacctactgtgagctacaagaatctgcctatgaacacacatggtgatactaatcccatctttagagctcagagtcagcttcacatcactcgaattcgggtcattgaactgattcccggggctccgaatcaccagaagatccgaaatccgttgcatcgcaagcgcttgcttatcctgagctgaaataacaagatgattcacattcgtcgtcctcgcagccgtagccgccgcagaagaagacgatgaagacgacggcggagatgcaagcacaccgttatggatctgaactggaactttccctatggtatcagcttcactagccatcatttcgaacagcgtcggacttgatcgtgtcttgtcgtgcatcgccggaggcggcggaggagacattggatttagaagacctgccgttaaagcggagttgcgcttagtgaagctcgaagggaaagaagagtcacgcggcgagctgtaaccgttccccccagacgtcgtagccgtacagtaatccatgaccggtggagatcctttcggatccgaaaacgaagttg

SEQ ID NO: 122460 - DNA, 440 bp, Arabidopsis thaliana
tttattcgcctctatcagaagcttgacgaaatctcttctccgtctctctctctctttccctcgtccattccacgatcttcttccaatctcaaatctcccattttctagtgtttcattttgatccttcttccttcctctggagatttctcaaatctcttcaactattttgatttgccgccatgtatcgacgcgccacttccggcgtgcgttctgcctccgcaaggctttcttcttccctctccaggatcgcctctagcgagacagcttcggtttcggctccatctgcgtcgtcgcttcgcaatcagacgaaccgatctaagagtttctcctcggctctccgctcctttcgagtttgctctgcttccacgcggtggagccatggtgggagctggggatcgcctgctagccttcgcgctcaagctaggaattccactccggtt

SEQ ID NO: 122461 - DNA, 622 bp, Arabidopsis thaliana
acggacgcgtgggcggacgcgtggccgactcagagcttttgagtcttctaaatctctatcgaatttttctagggttagggctcctgatcgatttcgcgagctctgcgattattttaagtattaggatccgaaattagaaatgggtggagagggagattcaagtcagccgcagagtggtgaaggagaagctgtggctgtgaacatcaggtgctctaatggcacgaaatttagtgtgaagacgagtctcgattcaacggtggagtctttcaaagagttggtggctcagagcagcgatgttccagctaatcagcagcgcttgatttacaagggtcgtatcctcaaggacgatcaaactctcctcagctatggtttgcaggctgatcacaccattcatatggttagaggctctgcaccttcttcagcaccacctcctgctccggccgcaagccaaaccactgcacctagtgttactcgaggggttggttcagataatagctcgaatctaggaggagcgagtcctggggaatctttgttccctgggcttggatttaatcctccgggttgttgaaaatgcaaggtctgggttatttggagctggtcttccggatcttgtgcagacaca

SEQ ID NO: 122462 - DNA, 723 bp, Arabidopsis thaliana
  unsure (1)..(723): unsure at all n locations
caatnngggtccatggcttccaagctggatcaacccgggagctaatttctacattgttggtcccgatcctgccgtgggccatccgacagagaagagagatctttatgatgccgatcacgggaagaaagtgcttagcatggcaccaggacttgaacgcctcaacattcttcccttcaaggtcgctgcatatgacaaaactcaggggaaaatggccttctttgatccctccaggtctcaagacttcctcttcatatcaggaaccaagatgcgtggcttggcgaagaagaaagagaacccaccagatggtttcatgtgtccctctggttggaaggtgttggttgattactacgacagtctcagtgcagagtctggtaatggaagggtttcagaggctgttgcttctgcttgaatgcaaaaggttcccttgtccccacaagtttcacatttcctgtttgttagtaactaaactccgtgacaaaaagcttccaataaaaccaatgtaacatctgtgtgttctttgcgtctctgttgtcaaacttgtcgtcgagtcgcatcgatttgtaccatatttgcttattgtgttttaaatgtaacaacatttgtgtataaactatttctcgtggaaacagaaactttaagctnnnnnnnnnnnnnnnnnnnnnnnnnnnnnnnnnnnnnnnnnnnnnnnnnnnnnnnnnnnnnnnnnnnnnnnnnnnnnnnnng

SEQ ID NO: 122463 - DNA, 732 bp, Arabidopsis thaliana
  unsure (1)..(732): unsure at all n locations
atgatctnnnnnnnnnnnnnnnnnnnnnnnnnnnnnnnnnnnnnnnnnnnnnnnnnnnnnnnnnnnnnnnntcacgggtcaaaccacgcgtccgcaagttttacttagccgttacggtcttggtcgtaaccccaaggtttggtctgatccacttagcttcaaaccagaaaggcatctcaatgagtgttcggaagtgactttgacggagaatgatctccgttttatctcgtttagtaccggaaagagaggatgtgctgctccggcgttaggtacggcgataacgaccatgatgctagcgaggcttttgcaagggtttaagtggaaactagcaggaagtgagacacgtgtcgagcttatggaatcgagtcatgatatgtttctttcgaagcctttggtgttggtcggagaattgagattgtcggaggacctttacccaatggtgaagtgaggcgacggtgacgtacggcgaggataattccgtatatactatggataacccaaagtttagtgaatcacaaaccaaactttgttcggttttggtccttttggaaacacttgatctgtgttttctcttgcttttttctatatgtatgtattaattttggttttgttttgatgattaataagaaggtattcacaaaaaaaaaaaaaaaaaaaagnnnnnnnnnnnnnnnnnnnnnnnnnnnnnnnnnnnnnnnnnnnnnnnnnnnnnnnnnnnnnnnnnnnnnnnnn

SEQ ID NO: 122464 - DNA, 398 bp, Arabidopsis thaliana
gatgaaatcaaaccaaccattaaggaacttgtaatggcggcgccagacaacccatcaaacgccgtggaatgggccattgcggagatgataaacaaaccggagatcctccacaaagctatggaagagatcgatagagtcgtcggaaaagaaagattcgtccaagaatccgatataccaaaacttaactatgttaaagctattatccgagaagctttccgtcttcatcccgtcgccgccttcaacctcccacacgtggcactctctgatacgaccgtcgcaggttaccatattcctaaaggaagtcaagttttacttagccgttacggtcttggtcgtaaccccaaggtttggtctgatccacttagcttcaaaccagaaaggcatctcaatgagtgttc

SEQ ID NO: 122465 - DNA, 615 bp, Arabidopsis thaliana
ctataattagtgtactcgaattaaatatataatttcttaacgtaataataagatacaacaagttgcaccaaatcccactctctcactctagaaaccaaatgtcgttgataataatagaacactttctttctctctctaaaaagcaaaagtagtctagtcactgatttcttctaatcctccggtggagtgagagatgatatctccgacgttgtttcctctcctctgcgctttatttctatgtcttccagtggctgttatcttcacagtccagcgagaactcacctgcgttatctcgccggagtttggtttccgctctctttccgtcttctctctttactctcgaaatgtccccgactcttcttcttcttctccggcggttcggattcgacagccgattcccaaagaagacgaccctcttcttcgactatcttctcgggttaacccgaatctacctcccggttcgacccggaaaatagcttttatgtacttaacgacgtcgcctcttccgttcgcgcctctttgggagatgttcttcgacggaatctccaagaatctttacaatgtctacgttcacgcggatccgacccgagaatacgacccgccgttctccggcgt

SEQ ID NO: 122466 - DNA, 519 bp, Arabidopsis thaliana
  unsure (1)..(519): unsure at all n locations
cccacgcgtncgcccacgcgtncgcccacgcgtccgcccacgcgtccgaacatttgcccgaaaaaccctagaatcccaaaatagaatccctaaaagagaaagaaagcaaaaatggaggacacgaagccaccattgggaggtaacaacaatcctcagcagcagcagcaacaacaacaacttctctatcaacaccaactacaacaacaacagagacaacaacaaatgcttctattgcagcaattgcaaaaacaacaacagcaacaagcagcaatgtctagattcccgtcgaacatcgacgtgcatctccggccaccggggttgattcagaaccgacccattaatcctccgcctcagcagaatcctacccctaaccctaatttgggacagcagacaccgaattttcaacagcagcagcagcagaatgtatcgagtcagcagatgatgcagcaacaacaacaacagcagcagcagcagaaattgatgaggccattgaatcacatcgagcttcaatgcgcttat

SEQ ID NO: 122467 - DNA, 508 bp, Arabidopsis thaliana
aaccggagggccggggctcgtcccaggcgtgcgtctgaatcgcattataagtctctgtgttcttatctttggtgaatgagctcagctcttaattcttagcgtctgtgatccttctctcaaatgggttgtctgatttctcctgtaatgaaactccgtcgtctctcctcagccgactcgcggcgatttgcataccggaatctcgccgagaatatggaagatccagtcataagggtggtggtagggaaggagaagaaggagttcatggtcgaaccgtatgtactcgaagagtacccgttcagagtcttgataggttcagctagggatcgtgccaagaaccggttaaaccggaccggtagagtggtgtggcttgatcatgtcgactcgatcttatttgagcacttgctgtggcttcttcggaacgatgcctctacgttttcggatttggatgttctcgagatcattgaattctatgctcaagattgttagggaaagaaatggattaacagtg

SEQ ID NO: 122468 - DNA, 532 bp, Arabidopsis thaliana
  unsure (1)..(532): unsure at all n locations
nnnnnnnnnnnnnnnnnnnnnnnnnnnnnnnnnnnnnnnnnnnnnnnnnnnnnnnnnnnnnnnnnnnnnnnnnnnnnnnnnnnccacgcgtccgcgccttgttcgatctcatcatgaggttgctttcaaagagattcaaaacctcattgcatcagaccaacacacaaacatcattcggtggtatggtgtggagtatgatcaagattttgtatacctttctctagagcgttgcacctgcagtttagatgatctaatcaaatcctatttagagttttctatgacaaaagtattggaaaacaacgattctactgaaggagtggctgcttataagatccaacttgattctttggagggagttatcaaaggaaacaacttttggaaagtggggggtcacccgtcacctctcatgcttaaactaatgagggatatagtttgtggaatcgtccacttacacgaattgggaatagttcatcgggacttgaagccacaaaatgtgttaatgagtagagatatgactttgagtgcaaaactg

SEQ ID NO: 122469 - DNA, 514 bp, Arabidopsis thaliana
ccacgcgaccgcacacgcgtccggccaaaccaacaaaaaaaatcatttaattttcgcggagagatggagaaattctcgtacaactcttatccagattcaaccgactcgtcaccgagatctcgtgagatcgaattcgataacccgccgcctccatgggatgatcagaaccagaaccagcagcaacatagctacaaggtgaagtttatgtgcagctatggcggcaagattcagccacggcctcacgataatcagctcacttacgtaaacggagaaacgaagattctttccgttgatcgcgggattagattccctgttttagcttccaaactctccaccgtatgcggcggcggtgatggcggcggaggagaagttacgtttaagtatcagcttccgggagaagacttagacgctttgatctcggttacgaacgatgatgatctggagcatatgatgcacgagtacgatcgcttgcttcgtttgtcgtctaagccagcgaggatgcgtttgtttctct

SEQ ID NO: 122470 - DNA, 941 bp, Arabidopsis thaliana
  unsure (1)..(941): unsure at all n locations
cgaacgcgtgggcggacgcgtgggcggacgcgtgggcggacgcgtgggcggccgcaaaccattttttgtcaatctagggttcttcttcgtacttgcagatttcgcctccgttttcactacgatctgtgaagatgttctccgctcagaacaagatcaagaaggacaagaatgctgagccaacagaatgcgaggagcaagttgctcaggctttgtttgatttggagaacactaaccaggagttgaaaagcgagttgaaagatctctacatcaaccaagctgttcacatggatatctctggaaaccgcaaagctgttgtgatttacgttccattcagattgaggaaagctttccgcaagattcatccccgtctcgtcagagagcttgagaagaagttcagtggaaaggatgttatctttgttaccacaagaaggatcatgcgtccccccaagaagggtgctgctgttcagaggccacgtaacagaactcttacctcagttcatgaagctatgcttgaagatgttgctttccccgctgagattgttggaaagcgtactcgctaccgtcttgatggttccaagatcatgaaggtctttttggatgccaaggaaaagaacaacacagagtacaagctcgagactatggtcggtgtgtaccgtaaacttactggcaaagatgttgtttttgagtacccagtcgaagcttgaaagaagatgatgaagaaccatcaggatagtgaaagagagcttttgtttatgttttgtggtatttaggatgaaggaaactctcttgattcagttccttgttcacaatctttaatgttctatttacaatgactactttttgtgtttttcaattttgaaacaaaaaaaaagtcaaannnnnnnnnnnnnnnnnnnnnnnnnnnnnnnnnnnnnnnnnnnnnnnnnnnnnnnnnnnnnnaa

SEQ ID NO: 122471 - DNA, 702 bp, Arabidopsis thaliana
  unsure (1)..(702): unsure at all n locations
nnnnnnnnnnnnnnnnnnnnnnnnnnnntaatacgactcatatagggaaagccggtacgcctgcaggtaccggtccggaatccccgcgtccgcccacgcgtccgccgaagctctggattaacctattttcaccttctaaggttcttcgtcgttcttattgatctgtgaagatgtattcgggtcagaacaagatccacaaggataagggtgttgcaccaacagagtttgaagagcaagttactcaggctttgtttgacttggagaacaccaaccaggagttgaaaagcgagttgaaagatctctacattaaccaagctgttcagatggatatttctggcaaccgcaaagctgttgtgatctacgttccattcaggctgaggaaagctttccgcaagattcatcttcgtctggtcagagagcttgagaagaagttcagtggaaaagatgtgatctttgttgctaccagaagaatcatgcgcccaccaaagaaaggctcagctgttcagagaccacgcaacagaactcttactttttgtccatgaagccattctcgaggatgtcggttaccccgctgaggtttttaggggaaggggaccagntaccgctttgttggaccaggtcatnagggttttttggtngaaactaanccggccttngacaacttggnnaatgtggtttcaggacttcggnaagttgttntgg

SEQ ID NO: 122472 - DNA, 847 bp, Arabidopsis thaliana
  unsure (1)..(847): unsure at all n locations
acgcctgcaggtaccggtccggaattcccggtttgacccacgcgtccagcccacgcgtccggatccacaaggataagggtgtggcaccaacagagtttgaagagcaagttactcaggctttgtttgacttggagaacaccaaccaggagttgaaaagcgagttgaaagatctctacattaaccaagctgctctcctcgatatgtcggggcaaccgcaaagctggtgtgatctacgttccattcacgctgaggaaagctttccgcaagattcatcttcgtctggtcagagagcttgagaagaagttcagtggaaaagatgtgatctttgttgctaccagaagaatcatgcgcccaccaaagaaaggctcagctgttcagagaccacgcaacagaactcttacttctgtccatgaagccatgctcgaggatgtcgcttaccctgctgagattgtaggaaagagaaccagataccgtcttgatggcaccaagatcatgaaggtatttttggatagtaagctaaagaacgacactgagtacaagctggagacaatggtgggtgtgtacaggaaacttacagggaaagatgtagttttcgagtacccagtcatagaagcttgaagagatgaatgtttgtttcattcttttttgtcggatagagagcttttgattctgtttgggagtaaaactctttgcaaagattttgttatttcagcatttcgcaatctcttcttcaaagttcgatttatcgatccaaaaaaaaaaaaaaaaaaaaaaaagaaaaannnaagggcggcagctctagaggatccaagcttacgtacgcgtgcatgcgacgtcatagatctct

SEQ ID NO: 122473 - DNA, 446 bp, Arabidopsis thaliana
atctagacaaccacaagaacacaaaacacacaaaaacaaagaggttctttctttgaagaagaaatggaaaaagttgatgtttatgatgagattgtcggaaagagaaccagataccgtcttgatggcaccaagatcatgaaggtatttttggatagtaagctaaagaacgacactgagtacaagctggagacaatggtgggtgtgtacaggaaacttacagggaaagatgtagttttcgagtacccagtcatagaagcttgaagagatgaatgtttgtttcattcttttttgtcggatagagagcttttgattctgtttgggagtaaaactctttgcaaagattttgttatttcagcatttcgcaatctcttcttcaaagttcgatttatcgatacaattcttttttcctactagcattcatagtttcaaaaacaaaagtttcaact

SEQ ID NO: 122474 - DNA, 804 bp, Arabidopsis thaliana
  unsure (1)..(804): unsure at all n locations
gannnnnnnnnnnnnnnnnnnnnnnnnnnnnnnnnnnnnnnnnnnnnnnnnnnnnnnnnnnnnnnnnnnnnnnnnnnnnnccacgcgtccgaaatcttttaacatctcaccatcttcttcttcaatggaaactccggattaaatgacacttctgtaacttcctatatttactaaaatgccatctcgcctctctccgccagatattccgccgctgcaaccgacgcctacggttagtgacggccatcatcgtttccagactcttccacttatcatagccggttctctgactttaaccggagttttactcatcctcgtcactttacttatttaccgaagactctaccgaaaccgtacggctccttcagatcttatctccaactccaagtctcctcaacactaccaatgtcgacgcttctcttactctaagctccgccgcgctacaaactctttctccgagtcgactcacctcggtcacggcggattcggctctgtttacaaagctgatttcccgagtggcggcgattcactcgccgtcaaagtcatggatacctccgctggttctttacaaggcgaacgtgagtttcacaacgagctttctctctcttctcacttaattggctctcctcatgtcgtctctctccttggattctcctccgatcgtcgtggtcggaagcttatcctcgtctacgaacttatggctaatcgtagtttacaagacgcgctttttgatcgcanatgtgtggagcttatggattggaacanaaggtttgagattgccacggatatagcaaaagcatcgaggtt

SEQ ID NO: 122475 - DNA, 458 bp, Arabidopsis thaliana
aaaaaaagtcattcgttttaatcgcattacgctttcggatggcgcgaaaggttaaattataaaatggacgattttacgaatccacatattcctggatcaacgggaacccttcgtttctttcccacccgcgtgttatccccgtttctcaaatttctcatctttccgggaaaattcactttttttttttcctgggaagattcgttgtgttgtgaattttagtgggcaccttcaaattttcgatttttttttttattttccttgtctcttacctgatttggtgatttattattacatcaaccactcgattcgttagatttccggatttgaaaaagagtcaccaacttgtacggattctcgttttggggatcgagtattgctgatttgtgattttgttgtttttgggtactttccctttgtggattcggatctggttggtggctttgtcaaatgggcgcatt

SEQ ID NO: 122476 - DNA, 772 bp, Arabidopsis thaliana
cctcccatcatcagttttagtgatgcatcatttggctaccctggtggtccgttgttgtttaggaacctaaatttcggaatagatctggacagccgtattgcaatggtgggacccaatggtattggtaaatcaacaatactcaaacttatttctggcgatctgcaaccaagctctggaacagttttccgttctgctaaggttcgagttgcaccccgcggccggcaccatgtggatggactagacctttcatcgaatcctcttctatatatgatgagatgctacccaggagtaccagaacaaaagctgagaagtcacttgggttctcttggggtaactggaaatcttgcactgcagcccatgtacactttatcaggtggtcagaaaagcagagttgcatttgcgaagataacattcaagaaaccacacttgctattgcttgatgagccgtccaatcatcttgatttggatgccgtggaagctttgattcaaggacttgtcttattccaaggcggtatttgcatggtgagtcacgacgagcatctgatatcgggaagcgtggacgagttgtgggttgtgtcagacggcaggattgcaccattccatggaaccttccatgactacaagaagcttctccagtcttcaacttaagctgcgccgcatttcttgtattccccaaatccatgttgcgtttttgtttaccctcaatacgacacaagagtcctttatacctgagaatttggcgacagtattttgctttatgtattaaggttga

SEQ ID NO: 122477 - DNA, 528 bp, Arabidopsis thaliana
gggacagctggtacgcctgcaggtaccggtccggaattcccgggtcgacccacgcgtccgattttagtcaaaagaatcacagagagtattttttttaggtatcgtgtaatggctttgactacaaaacctcaccatcttcagagatctttcctctctccgtcgcgtgtttccggcgaacgatatttggaatctgcgccatcatgtctgagattccgtcgcagcggtgtccaatgctcggtggtggctaaggagtgcagagtgaaaggagtgaaagcgagacagattattgatagtagagggaatccgacggtggaggttgatctgattaccgatgatctgtatcgttcggctgttccaagtggtgcatctaccgggatctacgaagcgcttgagcttagagatggagacaagagcgtctatggtggtaaaggtgtattacaggctattaaaaacatcaatgaacttgtggctccaaaactcattggagttgacgttaggaaccaacctgatgtccatgctcttaagccg

SEQ ID NO: 122478 - DNA, 430 bp, Arabidopsis thaliana
aaaacaaaaaaaaaatgaggaagagctgaaagattcgcgacgaagcaaaacgacagtgttatctatcgccgccttgttgttctgtttaacaagtgtagaggaaccaaagttgaaaactttgaacttcccattgattttaatgttaattactgatcattcgaatctgaaattgaagcatatgagtgcttaatctgtgagtgttagaagaagtagaagaagatgcagagggttagggtttcatctcaaagagcagttgtgcataagcttggtgattctcagatgacattatctcccaaatttagagtagctgcatcgatacaatcgacattgttcgatagatcatcggaattagaactgtctcttagaggagagcccttgattcccggtttaccagacgatgttgcgcttaactgtcttttacgggttccag

SEQ ID NO: 122479 - DNA, 553 bp, Arabidopsis thaliana
  unsure (1)..(553): unsure at all n locations
ctctnnnnnnnnnnnnnnnnnnnnnnnnnnnnnnnnnnnnnnnnnnnnnnnnnnnnnnnnncattgctccacgcgtccgcccactcgtccgctctctctctctctctctctctctctctctctctctctctcttttggactttctcaatccatatccctctctctgttttttctaatttgagcctctaaagtctcctcgttttgttcatgttgttgttcaagtgaagaagctcaattatgtttacaacattgttgtaatttcaaaacttcataagaatttctctgataataaagaaaaagctggagtagaactattttaaagtgtcatcatgaagagactaagcagctcagattcaatgtgtggtctaatctccacttctacagatgaacagagtccaagagggtacggaagtaattaccaatctatgcttgaaggttacgatgaagatgctacactaatcgaggaatattccggcaaccaccaccacatgggtctatcggagaagaagagaacattaaaaggtccccaaggcaaagcccttgagaagaattt

SEQ ID NO: 122480 - DNA, 632 bp, Arabidopsis thaliana
actatagaagagctatgacgtcgcatgcacgcgtacgtaagctcggaattcggctcgagcaaaaccttctcatgtcttcttctctcctcgacctttgaggtggaaaattaaatatattcccttagctttttttctcctttagttttcttcttcttcttgagttttttttcttttgatcctctctaatttccttgttgattcatcgactagatctaattcttctcacagaagactgagtgtgttctttctttcaaatctttcaaaaactagggtttttactgtcttgaaatcatatttattcttctaaatttagcaaaaagaacacgatttactttccatttcagtcgtcttgtcactctctctctcttctttaaagtctccctttttagcaaaaattctctctctcacaaaatttatttcctctggcttcttcttcctcctcctccatctcttctctttactctctctttaatcatctctcattcttgaatcttgatccatcaaaatcaatcccgttctcgaaagatccattaaaatcaaaacctaagctctctctctggcttctagggtttttttgttcggtggtgatggcgagagaaaagattcagatcaggaagatcgacaacgcaacg

SEQ ID NO: 122481 - DNA, 490 bp, Arabidopsis thaliana
cacgtgtattctcgcattgtctgaagggagataaaagcggtggaggtataatggttctaggtcaaatcaagaggccagataccgtctatactcctcttgttccatcacagtgagttctcaatctttctattatacatttaaactcttatcacattacgtaaagagaagcacaggtagattttggggtacttaacatcatgatgaatcagacttcaatgttagggtaggattcctagatttatttttgtataagacaaggaggtagatccagggtttaactgatgattatgaaagtcatttacacagatataaatgcgagagttgttacaatatctgctatatcattctgcttgtaggaatcatatgatccagaaatagacattttgtagctgactctatggaaataatatgcagttcgtatatcttgggttaggaaaatcaaaatatataaacccacgtcttgattcagataatatgctgcaaaaaaata

SEQ ID NO: 122482 - DNA, 555 bp, Arabidopsis thaliana
  unsure (1)..(555): unsure at all n locations
nnnnnnnnnnnnnnnnnnnnnnnnnnnnatgatcctgccagctcnnnnnnnnnnnnnnnnnnnnnnnnnnnnnnnnnnnnnccacgcgtccgaacagatccacaaatttcataaggttcagagcaaatcggagagagagagatggtgacgaaaacggaggagatacagttaaaccaactcgagaatcaagttgagaatggaggaggaggtgtttgggagtatctgtgcctcgttcgtaagctcaaggttcgccgatcagagattgtgctcaagcatggtctctcgatcttgaacgattcgggaaagcgatccgctcttggtccagatgaatggaccctgtatgagcaggtagcaattgcagctatggactgtcaatctctcggtgttgcacagaattgcatcaaggttctaaagaagaaatttccggagagcaaacgtgttggcaagctggaggctctgctgctagaagcaaagggaatgtgggaagaggctgaaaaagcatatacaagccttttggaggataatccacttgatcaagtaattcacaaaagaaag

SEQ ID NO: 122483 - DNA, 677 bp, Arabidopsis thaliana
gggctattgcgtcctgtaaaggcttttttggagggagataaggctagaaactacttgacccaaaaaacaaaggaggagttactgcatggcagtgtcagtgaaattaccaggcggtattatgaattagctgctgatgttgttagcgtggcaagaaaaacacagtcatcgcttcagaaattgcgtcaaaatgcacagagacgaggaggtgcagcatcaggtgtttctgatcaaaatgtatctgaaacagacaagatgtgtatgcagttgttccttgatattcaggagtatggccgaaacgtttctgctttggggctgaaaccggcggatattccggagtactgttccttctggcaatgcgttgcacctgcggataggcaaaactcaattagtgtttgaggacgctcgcttccatacatacatcattgtggtatcatatatctgataataagaaatcgctgcttcttcttttctatagcttgtgtttgtttgctttaacagtgaagataagaggaagagagttttgttgaagagaagagtggttttttttttttccccgccgaagttgcattatgtgaggtctgagtttagtgccagctttggccatttaatcttttatgtaggactatttcatcttcagtatataacacgcaccaaagggaatgaaacttttaactctt

SEQ ID NO: 122484 - DNA, 344 bp, Arabidopsis thaliana
  unsure (1)..(344): unsure at all n locations
aacgatgatcagcttcaagaacaatacagtgcaaaaaaagtctcgagtttntccgaagagaaagaagcgagtttggaagaagtcaaacaagcttttaatgcgtctttcgaaaacaaagatggtttcattgatgctatagagttacagagagttttgacaatctttagggtttaaacaaggatcttacttagacaatttgtttggtaatgattaggtcattagatgggaacaaagatggaaaaatcgattttaacgagtttgttaaattcatggagactagcttttattgaaccaaaaagttttgtaatgacattcattctttaatctaatgttaatacttcatt

SEQ ID NO: 122485 - DNA, 516 bp, Arabidopsis thaliana
  unsure (1)..(516): unsure at all n locations
atgatttnnnnnnnnnnnnnnnnnnnnnnnnnnnnnnnnnnnnnnnnnnnnnnnnnnnnnnnnnnnnnnnnnnnnnnnnnnnccacgcgtccgaaaaaaaaggaaccatcaaagaggaagccaagaaaaaaaaacgtcggtgatgagaggaggggctttgttatgcggacaagtccaagatgagattgaacagctttcgagagagagtagtcattttagtctttctactggaattttaccttcacttggtgcaagaagtaatcgacgagttaagcttaggagattcgttgtatctccttatgatcacaaatacaggatatgggaggctttcctagtggttcttgtggtttacacagcttgggtttcgcctttcgagtttgggttcttgagaaagccaaggccaccactatctatcaccgataacattgtgaacgcattcttcgccatcgatatcatcatgacattctttgttggttacctcgataaatcgacttacctcattgttgatgaccgtaa

SEQ ID NO: 122486 - DNA, 517 bp, Arabidopsis thaliana
gataaaacaaatactcatatctcatcctttggcatgtttaggagccatctctcagctggacggagacaacacagacacttgtgccagagagggaacacaatcttcccaagtcttcgaaaggtttcaaggatatatccatggcgatccagaagatcctctttgcttcacttctcatatgctcactgatccaatccatccacggggcggaaaaagtaagactcttcaaagagctggacaaaggtgcacttgatgtcaccactaaacccagccgagaaggaccaggtgttgttttggatgccggcaaggatacgttgaacattacatggacgctaagctcgattgggtctaaaagagaggctgaatttaagatcatcaaagttaagctatgctacgctccacctagccaagttgaccgaccatggcgcaaaacccatgacgagctcttcaaagacaagacctgcccacacagatcatagccaagccttatgacaaaacacttcaatcaactacttggact

SEQ ID NO: 122487 - DNA, 1026 bp, Arabidopsis thaliana
cgactcactatttggaaagctggaccgcctgcaggtaccggtccggaattcccgggtcttcccacgcgtgcgcccacgcgtccgcccacgcgtccgcccacgcgccgcccacgcgtccgcccacgcgtccgctccaacataattcatcatctatggcttcttcacatcaacaacagcaagaacaagaccagtcagctttagatctcataacccaacaccttcttactgatttcccttccttagacacctttgcctccaccatccaccactgcaccacctcaactctaagccaacgcaaaccacctcttgccactatagcagttcctactactgcaccggtggttcaagagaatgatcaaaggcattacagaggcgtcaggagaagaccatggggtaagtatgcggctgagatcagagacccaaacaagaaaggtgttcgtgtctggttaggcacttttgacacagccatggaagctgcaggaggttatgacaaggcagctttgaacctgcgaggaagcaaagctattcttaacttcccacttgaagcaggaaagcatgaggacttgggagacaacaagaagactatttctttaaaagcaaagaggaagagacaggtgacggaggatgaaagccagctgatcagccgtaaagctgttaagagggaagaagctcaggttcaggctgatgcttgtccattaacgccatcaagttggaaggggttttgggacggagcagacagtaaagacatgggaatattttccgtgcctctgttatctccttgtccatctcttggacactctcaactcgtagttacttaagcttcagagggtcaaactggaaaaaatcaacattggattgttttcaaagcttctagattagctgattgtaaaaaaatgttttactatattcattcattcttcttaaatgcaattctttctacccttaaaagaaaaaaaaaaagggcgaacgctctagaggatccaagcttacgtacgcgtgcgttcgacgtcataactcttctatagt

SEQ ID NO: 122488 - DNA, 670 bp, Arabidopsis thaliana
agccagctgatcagccataaagctgttaagagggaagaagctcaggttcaggctgatgcttgtccattaacgccatcaagttggaaggggttttgggacggagcagacagtaaagacatgggaatattttccgtgcctctgttatctccttgtccatctcttggacactctcaactcgtagttacttaagcttcagagggtcaaactggaaaaaatcaacattggattgttttcaaagcttctagattagctgattgtaaaaaaatgttttactatattcattcattcttcttaaatgcaattctttctacccttccttaaacgagctcaaacttacaaaaacttagggaggtcttaaaccaacaaacctgtcttttctagatcactatcaatgtccagcctaaagagatacagaatgttcaagacgcacagatagaagagaaaactaatgctccaccagagcttcgacttccagatgtacttgatgctaaggtcgtaacatgttcacgtcatacaacatggcaagattacgtagactatttcaagtcaccaaatcaaaggaaacaaccagagagaaatactgaagatgaaagtgtactgattgcattttagtccttcaccctgagaatgttaagacgttgattatcaaatgacaccacaaactcagtcg

SEQ ID NO: 122489 - DNA, 526 bp, Arabidopsis thaliana
gggaggtctactccaaggggtacacctagagtgtattctggtaggactccgcgtagaggtcatggtggaggagtagcgtttcagtggtttcgtagtagccggttggtttattggctgcttttgattacgctttggacgtatcttggattttatgttcagtctaggtgggcacatgataatgaaagcaaagttgagtttttacggtttggaggcagaccgagaaaggatgagttatatatggagaagattaaaggactggatccggttgctaatgagaattctgaggctttggttaatattactggtaaagatgatgctggttcgaataagaggacggatgttagtctgatcaagaaagatgatggggtttctcgacggagcttgagttccaagcagaagacgagaaaaactgtccggacttctcgtagtaagatccgtgttaagcagaaggtgattaaagaggtacttgagactaaggatttggatgatgagcaagatccacaacttccattgacaaatgctactt

SEQ ID NO: 122490 - DNA, 580 bp, Arabidopsis thaliana
agctacatacgactcactctagggaaagctgcgtacgcctgcaggtaccggtccggaattcccgggtcgacccacgcgtccgctctcatcaatcatcagccaccaacaattcttcgctctctctgctctgatctctctgctcgaatttactaacgatcccttctctgcaggctcatctttatctaatttcgtttactcattatatcttctaatccgtttcgtatactatcgctattcttgttttctgtttgtttgtattttgggattttctttgtgtttagtgataatggatgcaggtttgaatcggtgcccacttcaagaacactttcttcccagaaaaaattccaaggaaaatctggacaggttcataccgaatagatcagcgatgaattttgactatgctcactttgccctcactgaagaaagaaaaggtaaggatcaatctgcaacggtaagttcaccatccaaagaggcctacaggaagcaattggctgagaccatgaacttgaaccacacaaggattctcgccttcagaaacaaacctcaggctcctgtcgaactgcttccgagcaatcactct

SEQ ID NO: 122491 - DNA, 555 bp, Arabidopsis thaliana
  unsure (1)..(555): unsure at all n locations
tgatacttccnnnnnnnnnnnnnnnnnnnnnnnnnnnnnnnnnnnnnnnnnnnnnnnnnnnnnnnnnnnnnnnnnnnnnnnccacgcgtccgctcgattctcatcatctgcgacgaaattcatcactcgctctctctctgctcggaacgattccctcttcgctagccttatttgattcgtatttgtctgatttcgtttaatcttctagatcttttaatattcgtttcttttatcatcgcttttgtgtgttttgctctgttttcttgtttttgtttggtgataatggatgcaggtatgaacaacacttcttctcactacaagacgcaggctcgttgccctcttcaagaacactttcttcccaggaaaccttctaaggaaaacctggacaggttcataccgaacagatcagcgatgaattttgactatgctcactttgccctcactgaaggaagaaaaggtaaggatcagactgcagcggtaagttcaccatccaaagaggcctacaggaagcaattggctgagaccatgaacttgaaccacacaaggattctcgcc

SEQ ID NO: 122492 - DNA, 495 bp, Arabidopsis thaliana
catcgttgaagaagacgaagaagataccttcctctttatcttctccgatttctcaaccttcccgtctgcttgtcgtaaagaaatggcgccgagtagacgggatttacagcttactccggtcaccggaggttcttcttcccagatcagtgatatggaagaagttggtcttctcgattcgtatcacaacgaagcgaacgccgatgatattttgactaaaatcgaagaaggaagagatgtttccggtttaaggaagattcaggtcggagtcaccggtatgacttgtgctgcttgttctaattccgttgaagcagctttgatgaacgttaatggcgtcttcaaagcctctgttgctttgttacagaatcgagccgatgtcgtcttcgaccctaatttagtcaaggaagaggatattaaagaagctatagaggatgctggatttgaggctgagatattggctgaagaacagacacaagctactttggtgggtcaatttac

SEQ ID NO: 122493 - DNA, 381 bp, Arabidopsis thaliana
attttatgtattttgtctgaaaatataatcaggggaaaaaaaaaacagaacaaaaacagaggaaggctatagagattgatggacaaactgtgtctagggtgcttcatcatctttgtttgtttgtaaaactcttgtcacacacactgttatgagtcattttctgctgtgtgtgttttgttttgtggtgatgtaagttaaaaacaagcgtgattctcatgtggcccatctcaatcaatggttggtgatttgtggggtttttaggcttttctattatcttatcttttggggataagataaaagcctaaaactgtatgtaactatgtatggttcttcgaataaaaaatcaccaatctctccctgtcataaataagtgttgccaag

SEQ ID NO: 122494 - DNA, 760 bp, Arabidopsis thaliana
aattacatagtgagaaaatttaacgtttgattttacgattaggattggctcaggaatcagtggttagaccaagaaacaaagaaaaaacaggttacagtgagcaaaagtaaaccctaatatacataaaacactattcgactagagataattaatccctgatctgagcaattcctggttattacaggtgcagcctcaccgggcttatagaaattgggaagaagaacacacagaaagagcaagacctcatctgatcatatcctgtctctttctgaagggaaactctctgagaagctgttgtggctgagctctgttgaacactcttacagctctcttcgagctttttgatgcacacacgttaatgagagtctctgccgttgaacttatattcaaattttgtgtaccaatctcattcggattgccactgcaagctgtgtgaccttgtttggatggtagagaaccgcacagacagcaaaacagacagcgaacgtagcgattaagaacatagtttgacgggacctgaatgctaaagctgagtgcgtttttatacacgacttccttggccagtctcctatgtcatttacgttcatgacaacctctttgtttaacagaggatcagtctcttttccgccgctatctggtgaacagtctgcctgtattctctctttacaatctaatcctgcttcaggatcccggaactctatagggctttgatgctataagtgaatatcactcgccaaatccatattttcatgtagaagcc

SEQ ID NO: 122495 - DNA, 844 bp, Arabidopsis thaliana
  unsure (1)..(844): unsure at all n locations
tgatacgttnnnnnnnnnnnnnnnnnnnnnnnnnnnnnnnnnnnnnnnnnnnnnnnnnnnagagtttcctggngaagaagccccgcctccggctatcacggaggagctggaagacatggcagaggataatacatcatctagagcgggaaacttggttgtaccaaatttgtcttcagaggtgagtgacgtgacatcgtcctctggaccggttaagctggcagacctgcaaagaattctgaacaacctctctggtggccctgtaggtattgctggagatcaagacgaaggtttagcattaggggatatcttgaaaccggagttgataatgccattgcttgaggcgttgccggtacaagaacgactatcttcgcatttacctgagggtcattctagggcagaagatatactggagttgttgcagagccctccttttcgtcaacaagtagatgcatttacctatgtactccgcacaggacaaatagatttgactcagtttggtatagacccaagtaaatacaagttcacagtggactcattccttgaagcacttgaagactcggtttcaacgcaatcaagggatgcgatggatgagagttaatcttttcatattctcatgattttgttcgaactttgatattgaactgagaaaaacatcttcgttgtttggtggatcatttatggagttttcatgaaagtgtaaggatcatcatgggattttcctttaaaaaanaaaaaaagacncaaaagcggccgctctagaggatccaagcttacgtacgcgtgcatgcgacgtcatagtannnnnnnnnnnnnnnnnnnnnnnnnnnnnnnnnnnnnnnnnnnn

SEQ ID NO: 122496 - DNA, 545 bp, Arabidopsis thaliana
  unsure (1)..(545): unsure at all n locations
tacggctgcgagaagacgacagaagggggaaggagaaagtgagattaacgagaaaccccaagagagaaaatcttcatcgacaaaattcgattcagctgctgcagctattcacttcgtccatagcacgtagatggcagaaaaggcctgtataaaacgtcttcaaaaggaatatagagcactttgcaaggaaccagtctcccatgttgttgctcgtccttccccaaatgacattctcgagtggcattatgtgctggaaggcagtgagggaacaccttttgcaggtggattttactatggaaagatcaagtttcctcccgagtatccttacaagccaccaggggattacaatgactacaccaaatggtcgattcatgacacaggaggaaattttgtttatctcatgagtgatttttcatccaggaaaggntggaatncgatgtgggctgtatcaagatacnttcagggcttctcncatttatnntgggtaccagnccgcaacttgnnggngtnacctactgaaattnggacaccggtttggtaggaac

SEQ ID NO: 122497 - DNA, 1077 bp, Arabidopsis thaliana
ggaaaaaggaaaggctgtggttgttggtggcggttacatcggtcttgaactcggtgctgctctgaaggctaacaacctcgacgttaccatggtttatccagaaccttggtgcatgcctcggcttttcaccgctggcattgcttccttctacgagggttactatgccaacaaaggaattaacattgtcaaaggcactgttgcatctggtttcactaccaactcaaatggagaggtcactgaggtgaaattgaaagacggaagaacgttagaagctgatattgtgatagtgggtgtcggtggtagaccaattatatcactcttcaaagatcaagttgaagaagagaagggtggtttgaagactgatgggttcttcaaaacaagccttccagatgtatacgccattggtgatgtagccaccttcccaatgaaactctacaatgaaatgagacgcgttgaacacgttgaccatgctcgcaaatccgctgaacaagccgtaaaggcaatcaaggcggctgaggaagggaactcaattccggaatatgactatcttccatacttttactctcgagcctttgatctctcatggcaattctacggtgacaacgttggagaaagcgtattgtttggggacaatgacccggaatcgccaaagccgaaattcgggagctactggattaaagaacggaaagtggttggagcatttttagaaggtggaagtcctgaagagaacaatgcaattgctaaacttgcacgagcacaaccttctgttgagagccttgaagtgctatctaaggaaggcctttccttcgccacaaatatataaattgcctttctaggttgtgtgttagtgtgagctttgagttcagagtggcttttatgtcactttgctattatgatagcagagtcgacatttttgttatttgtttgacccactttcttgtgattgtttggttccaaaataaaattgaaagctactcaattcacttttctgctaaaaaaaaaaaaaaaagggcggccgctctagaggatcccagcttacgtacgcgtgcatgcgacgtcatagtaaatctatagtgt

SEQ ID NO: 122498 - DNA, 556 bp, Arabidopsis thaliana
cgggactttacttcgtattgtacggtaagagcgaagagaggaaatttgcagcgcttgagaaggcagcgatccagtcctccgcggagcatggtattgaacgtgcacctgtttctcgcaactccatcaagtcgtccatcacaacaccactactccatcagtcaacggacaatgtttgactactttggacaaatcactctccagctaataattacaaatgccattacccaattaaaagggaacaatggtgtgccgttgtgttttatgacttttgtgtctgctttttttcttagtgttttctcttcttttttttttctaaaaaattattaattacctaagaaaggtttttgaagaaaggaaaaaaaatggtggatgagacatcattgttcatgaggatgatgatgatgatgatagtgatgaagaagactatgtgggagctttggattgagacttttctatatataagatctggctgatatattagtgccattttttcttacatttcttgtggggtttttccttccccttatcatcaataggatggttttaatttgccttt

SEQ ID NO: 122499 - DNA, 544 bp, Arabidopsis thaliana
  unsure (1)..(544): unsure at all n locations
nnnnnnnnnnnnnnnnnnnnnnnnntaggacacactatagaagagtctatgacgtcgcatgcacgcgtacgtaagctcggaattcgggccgccaatgagcgcgacgcagacgcagacgcatggaccgcactcgctggccttcagggtgatgcgactctgcaaaccgtctttccacgtcgatcctcccctccgcattgaccctttcgatcttctcgccggcgaggatttctccgacgatccctcttccgcctccttgttccgccgccacgtatcttctgccgacgctgtcgactccgatctcagctaccgaaatagattcctcctcaaccatcctaccgatccaatcggtctctctggtcttctgcttcttcctcagtccttcggagcgatctatctcggagaaacattctgtagctatatcagcgtcaacaatagttccacttcagaagttcgggatgttaccattaaggcagaaattcagacagagaggcagaggattctacttctggatacatccaagtcacctgttgaatcgatacggaca

SEQ ID NO: 122500 - DNA, 327 bp, Arabidopsis thaliana
cccacgcgtccggtaaaacctttacttctgagcaagacaagaaaaaagaagatattgagcgattatgattcgcgcagctgccaaattctccagagaagcagcggcaacgattcgtggccgcacgatctccgttagaggaaaccttattcgatactcgacgccattgagattgattcacggtgaaatcagcgttccaaacgcgaatcatgttgctattcagatggttaattacgctctttctcacgctaggtcacaaaaatcagatgaatcttatgctcaagggatgctagtgcttgagcagtgtcttgggaatcaacctaacgatga

SEQ ID NO: 122501 - DNA, 911 bp, Arabidopsis thaliana
  unsure (1)..(911): unsure at all n locations
nnnnnnnnnnnnnnnnnnnnnnnnnnnnnnnnnnnnnnnnnnnnnnnnnnnnnnnnnnnnnnnnnnnnnccacgcgtccggaaaaaaaggacgttcttaaggagaaagattctgggaaggaagaatctccgtcaccaccggcggattcttcggctccggcggcggagaagaaagctgaagacaccggtggagctgtccctgataatggcaaagttggtaaaaagagaaaaagaaagggcaaagtttggctactactaacaatcctaccgatggacctgcccgtactcaatcacttcctccgcccactgcaacagattatgaccgtccaattaatcagatcaacgaccaccatataacaaccactaataatccgccacgtcacgatctgtatccttatcctgcacaaggctattatgcgccgcaagtcatgtatggcgtaagttataacgttgctcaacctccggtgagtgtagacgctgcgtcgtattatacacctccaccaccgtattcgtatgcgtacatgcacaacggttatcaaccgtccgatcaaaacccttgtcaacctcggccgtcagattcgtttgagttattcagcgatgagaatccaaacggttgtgcgataatgtgatgtcaaattaccaaaaggaccttgaactctgcttatacgccttgtatgacttaaggatggtttcgtaatttgaagttctttcacgtgcaagttagcttaatggtgtttctagttaagtttattttaatgaatgttgtattagttttataactatgattatgattatgttaagataaaaaaaaaaaaaaaaaaaaaaaaaaaacaaagnnnnnnnnnnnnnnnnnnnnnnnnnnnnnnnnnnnnnnnnnnnnnnnnnnnnnnnnnnnnnnnnnnnnngtcctaa

SEQ ID NO: 122502 - DNA, 2113 bp, Arabidopsis thaliana
  unsure (1)..(2113): unsure at all n locations
nnnnnnnnnnnnnnnnnnnnnnnnnnnnnnnnnnnnnnnnnnnnnnnnnnnnnnnnnnnnnnncggccacgcgtccgcccacgcgtccgggcagtgattataacttcgtctccgtgtctgttcaagctcccattcttgtggccttcacgcttcaggaacaaagaccagtatctctctgaaagactacttctcggaaattttcgtctccatggcacccgtgagggggattcttggcttgcaaagggcagtgtccatttggaaggaaagtaacagactgactccagctttgagatcattcagcactcaagctgcatccacttccaccactccacagcctcctccacctcctccgcctccggaaaagactcatttcggtggtctcaaggatgaagatcggatttttactaatctctatggtctgcatgacccatttctcaaaggcgcgatgaagagaggtgattggcataggaccaaagatttggtgctcaagggtactgattggattgtcaatgaaatgaagaaatctggacttcgtggacgtggtggtgctggtttcccttctggtcttaagtggtcctttatgcctaaagtttctgatggccgtccctcctatttgggtgtcaatgctgatgagagtgagcctggaacttgtaaagatagggagatcatgcgtcatgaccctcacaaattgttggaagggtgtttgattgctggtgttggaatgagagctagtgctgcgtatatttacatcaggggtgaatatgtgaatgagcgtttgaatctagagaaggctagaagagaagcgtatgcagctggtctcttggggaagaatgcatgtggttctggttatgattttgaagtttatatccactttggtgctggtgcgtacatttttggtgaagagactgcgcttcttgaaagccttgaagggaagcaaggaaaacctaggttgaagcctccgttccctgctaatgctggtttatatggttgtcccacaactgttaccaatgtggaaacagtggctgtttcgcctaccattttaaggcgtggacctgagtggttttctagtttcggtaggaagaataacgctgggacaaagctcttttgtatatcaggccatgtaaacaagccatgcacggtggaagaggagatgagtatacctctcaaggaactgattgagaggcattgtggaggtgttaggggtggatgggacaatctacttgctatcatccctggtggttcatctgttcctctgatccctaagaacatttgcaaggatgtgctgatggatttcgatgcgctcaaggctgtccaatcagggttaggaactgcagcagtcattgtgatggataaatcaaccgatgttgtggatgcaattgcaaggctctcttacttctacaagcatgaaagctgtgggcagtgcactccttgcagagagggaacaggttggctttggatgatcatggagagaatgaaagttggcaatgcaaagctggaagagattgatatgctgcaggaggtaaccaaacagatcgaaggacacacaatctgtgcattgggtgatgcagctgcatggcctgtgcaaggtctgataagacactttaggccagagctcgagagaaggatcagggaacgcgctgaaagggagttgctacaggctgctgcttaagtaccttgttaaccagagggagtttgctattattttccatggaaataaaatttgaatgaacaactagtaacggttttgggatgcaaagctacttcagaaggagaagaaggtaatgtaatttgtttgaatggttaatgttaaaactctcttaaagttgtatcagaaagagcgcgatttgctcttttgcattactctactttctttattgtttgcctgttatgtttattcgagtatgaaagcccattttggggacaaccaaagaaacccttttcatgtttgaaataaagaatgctcctttttgggttttaaaaaaaaaaaaaaaaaagcaaaaccaaaagaaaaaaaaaaaaaaaagaaaaaaaaaagggcggcacgctctagaggatccaagcttacgtacgcgtgcatgtgacgtcatagatcttctatagtgtcgtcctaaat

SEQ ID NO: 122503 - DNA, 437 bp, Arabidopsis thaliana
tttgttcatcggatctaaagcgccactcaaaagggtttatgaaaaggttagggttttaacaacaactcaaataacagagatggatttcgagaagagaaaagctgcgacacttgcttcaattcgttcatcagtgactgataaatctcccaaaggttttctcgacgaacccatcatccctctcctcgaaaccatcaatcatcacccatcttacttcactaccagttcctgctcaggtcgaatctcaatcctttctcaacccaaaccaaaatcgaatgattcaactaagaagaaagctcgtggcggttcatggctctatatcacacacgacccagctgattcggatttggtaatttctctccttttcccttccaagtcaaatcagattgacccaattgaccaacctagcgaattagtcttccgattcgagccgttgatca

SEQ ID NO: 122504 - DNA, 936 bp, Arabidopsis thaliana
  unsure (1)..(936): unsure at all n locations
atacgactcactttagggaaagctcgtacgcctgcaggtaccggtccggaattcccgggtcgacccacgggtccgaattgctatgattttactctgagaatcagaagaagaaatctcggtgagcaaaatccctagttttgggatgatgtttccacgactacgattgacgaaggtcttcttctccccgatcatcgccgggaaatggatcgtctttgccgacggtagcagcggcggcggcgttggtagaaatggctactacggtggattgtggtcgtcggccgttattccttccaatgttggtttagctgtcgctgtcaccgtcatggccgtggccgtcgctttcaccgtctactctcgtagaggaagcattggatcaccgtggtcactaaggagaagaaagcgagttcttcaacctaaacaatggaatgcttttttcacagaggaagggcgactcagtgatggaggtgtcaaatttctgaagaaagttcgtagtgggggtgtacatccaagcatcagaccagaaagtttggccgttccttcttggagtgtatgacttaaagagcaacaaagaagaaagagactccattcgacagctgaaactgacggaatatgaaaacctgcggagacagtntcgcgagattcatgaacgctatgaaaatgtctgcgactcaaaggagacagctcagagcagcaacactgaagacagtcaggttcttgaatcccatgatattgaggaagtcgagagttncacaagnaccatcaccgtagatgnantcagagaaggttgaattctgaatcgnttatccagggttgggaccttttaaaagngncgttntcnccncagaagttcttctggaaatnttnaggcttanccaattcttnagaacccgggtttncctttttngnttccgggggnttgnancccaattttttccc

SEQ ID NO: 122505 - DNA, 530 bp, Arabidopsis thaliana
  unsure (1)..(530): unsure at all n locations
nnnnnnnnnnnnnnnnnnnnnnnnnnnnnnnnnnnnnnnnnnnnnnnnnnnnnnnnnnnnnnnccacgcgtccgcacacagctgcaacactatcttctcagaaatggtaaccgaagctttcgaattcgtcgccgttcctttcaattccgatggctggggacctccagacgcttccgacgtttcctcctccgcctctcccaccagcgtcgccgccgctaatcttctcccgaacgttcctttcgcttccttctcccgttccgataagctcggccgtgtagctgattggactcgcaatctctctaatccatccgctcgtcctaacaccggatccaaatcagatccgtctgcagttttcgatttctccgctttcgcaatcgacgaaggcttcggtctcgcttcctccggtggtaatcccgacgaagacgcagctttccgtctcgtcgacggtaaacctccgccgcgtcctaaattcggacctaaatggcgtttcaatcctcaccacaatcggaatcagcttcctcaacggcgag

SEQ ID NO: 122506 - DNA, 612 bp, Arabidopsis thaliana
atgatacgtcagctctctacgactcactattgggaaagctggtcacgcctgcaggtaccggtccggaattcccgggtcgacccacgcgtgcgattttttatgtcaaaaaaaatgttttccttttcccttaacaaaaaatctacaaagtctgaaactctcagcaatcagataaaaagattacaagaagttcttttaattaaccttttgcaatttgtcttgtgtttctcacaacacaaaaacttgtaaaagtgttaaaaaatcaagatctgaaaaatcttatcaccgcttctaggtttttcagttttttttcttccttttcctgatctaaattaacttatatttcttagggtttcacttcttgaaacatttaatcagaattaattaacctctctagggctttcatggcgaatccatggtggacaggacaagtgaacctatccggcctcgaaacgacgccgcctggttcctctcagttaaagaaaccagatctccacatctccatgaacatggccatggactcaggtcacaataatcatcaccatcaccaagaagtcgataacaacaacaacgacgacgatagagacaacttgagtggagacgaccacgagccac

SEQ ID NO: 122507 - DNA, 808 bp, Arabidopsis thaliana
  unsure (1)..(808): unsure at all n locations
gnnnnnnnnnnnnnnnnnnnnnnnnnnnnnnnnnnnnnnnggaccgggccggaattcccgggccgacccacgcgtccgaacattaaaactcatctctctcatcatctttggccatggcaaaagacttggatgtgaacgagagtggaccaccggcggcgagagactacaaggatccgcctcccgcaccatttttcgacatggaggagcttaggaaatggccgctttatagagcggtcatagctgagtttgtagcaacacttctgttcctctacgtctcaatcctgactgtaatcggctacaaagctcaaaccgatgcaaccgccggaggagtggattgtggcggcgtaggaatattgggtattgcgtgggctttcggtggaatgatctttgttctcgtttactgtaccgccggtatctccggtggtcatataaatccggctgtgacggtgggactattcctggctcgtaaagtgtcattggtgcggacagtgttatacattgtggctcagtgccttggtgccatctgcggttgcggtttcgtcaaagcattccaaagttcttactacaccagatatggaggtggagccaacgagctaaccgatggcttcaacaaaggtaccggactcggtgccgagaacattggaacctttgtccctggattcaccggtcttcttgggaaaccgatcccaaaacgaaaatgctccgtgacctcttaacctgcccgatttttggggtccacctttccccatttgggctttgccccgcctcttcatggagtccaattttaagcccaccccatattccccat

SEQ ID NO: 122508 - DNA, 570 bp, Arabidopsis thaliana
  unsure (1)..(570): unsure at all n locations
cacgcgtccgcagatatggaggtggagttcacgagctagccgttggctacaacaaaggtaccggactcggggccgagatcattggaacttcggtccttgtatacaccgtcttctcggcaaccgatcccaagcgaaatgctcgtgactctcacgtgccagttttggctccacttcccattggctttgccgtcttcatggttcatttagccaccattcccatcaccggaaccggtatcaacccggctcgtagctttggagctgccgttatttacaacaacgaaaaggcctgggacgaccaatggattttttgggttggaccgatgatcggagcagcagcagcagcgttttaccatcagtttattttaagagcggctgcgattaaagctcttggctcatttggctcctttggctcctttaggagctttgcttaatatacatttattttaaattaaaccccaagttataaatactttggtcaaattaaaaggttgttacaattcgggtttaagggggggggtaacatgtgnctccttaaaggtncggttttgtcccnntaattcatggnttgta

SEQ ID NO: 122509 - DNA, 544 bp, Arabidopsis thaliana
  unsure (1)..(544): unsure at all n locations
ctttgccgtcttcatggttcatttagcccccattcccatcaccggaaccggtatcaacccggctcgtagctttggagctgccgttatttacaacaacgaaaaggcctgggacgaccaatggattttttgggttggaccgatgatcggagcagcagcagcagcgttttaccatcagtttattttaagagcggctgcgattaaagctcttggctcatttggctcctttggctcctttaggagctttgcttaatatacatttattttaaattaaaccacaagttataaatctttgatcaaaattaaaaggatgattacaaatgaattaagtggaagttacatgtgatcttctttatatgtttctgtttttttgttctctctttcatttcatggaatttcccattcgtgtaattgtaaatgtggttttaattaatgttgctttaagataaaaaaaaaaaaaaaaaaggggcggccgcnnnnnnnnnnnnnnnnnnnnnnnnnnnnnnnnnnnnnnnnnnnnnnnnnnnnnnnnnnnnnnnnncattcg

SEQ ID NO: 122510 - DNA, 500 bp, Arabidopsis thaliana
  unsure (1)..(500): unsure at all n locations
ccnnnnnnnnnnnnnnnnnnnnnnnnnnnnnnnnnnnnnnnnnnnnnnnnnnnnnnnnnnnnnnnnnnnnnnnccacgcgtccgcggacgcgtccgcccacgcgtccgcccacgcgtccgcggacgcgtccgcccacgcgtccgattaaaactcatctctctcatcatctttggccatggcaaaagacttggatgtgaacgagagtggaccaccggcggcgagagactacaaggatccgcctcccgcaccatttttcgacatggaggagcttaggaaatggccgctttatagagcggtcatagctgagtttgtagcaacacttctgttcctctacgtctcaatcctgactgtaatcggctacaaagctcaaaccgatgcaaccgccggaggagtggattgtggcggcgtaggaatattgggtattgcgtgggctttcggtggaatgatctttgttctcgtttactgtaccgccggtatctccggtggtcatataaatccg

SEQ ID NO: 122511 - DNA, 550 bp, Arabidopsis thaliana
ctcgactcctttagggaaagacggtacgcctgcaggtaccggtccggaattcccttttcgacccacgcgtccgcgaaaaagccctgactagtgaagaatccgatgtcagcgactgctctctcgagattaaacccagtttctcaatttgggtttcaaagaatcgttgctgggaaaagtaagagcttcttctccaattcgggtcaaaggagattgttttctgatagttctcggtttcgtcaagccatggctgcttctggttctttgccagtgtttggagacgcttgtttggatgatttggttactacttgttcaaatggcttagacttcactaagaagcgttctagtggtggtagcttcactattaattgtcctgtagctagcatgagacttgggaagagagggggaatgatgaagaaccgattggcttggcactattctgttgccgatccgctagaaaggagtcgcgccctctttgggacattgtctaggagtgttcatacttctcctatggcttggttcttcggttggaccggctcatgagctgtcttct

SEQ ID NO: 122512 - DNA, 615 bp, Arabidopsis thaliana
aatcaacttccacttcttccacggaaacaagcaattcgatcaaacgtgaaagcaatatttaagatttttgtctcatactctaagcaagcaatatccaaataaacattcttatacctccactcctcctctgtctgattccttcacccaattcttgtctcgtttccatcaatccattgtctttgattccagaggttcttggtttatttggatgtggtgattatggatatggagtcttggaagttgctcagaagtgtttgtgtgctttcttttctccttggctcttgttttgtgtatcaaagccttcgtgttgttgatgctcaagaagatccaaaaccagccgtgactttgcaagtagatgcttctaatggaggtggacgacccattcctgaaacgctatttgggattttcttcgaggagatcaaccatgctggtgccggtggattatgggccgaacttgttagcaacagagggtttgaagctggtgggcaaaacacaccctctaatatttggccatggtccattgttggtgatcattcatccatatatgtagctacagaccgttcatcatgttttgaacggaataaaatcgcactgagaatggatgtgctttgtgat

SEQ ID NO: 122513 - DNA, 738 bp, Arabidopsis thaliana
accggtccccaattcccgggtcgacccacgcgtccggagctcgtggggcgcggctctggtaaggatctcgccgtatactttctccgcaatcggaatcgccatctcgatcggtgtctcagtcctcggtgccgcctggggaatttacattacgggaagtagtttgatcggtgcggctatagaagctcctcgtattacttcgaagaatctcatcagtgtcatcttttgcgaagccgtggctatatatggagttattgttgcaatcatactgcaaacaaagttggagagtgtcccatcttcaaagatgtatgatgctgagtctcttagagctggatatgcaatctttgcatctggaattatagttggattcgccaaccttgtatgcgggttatgtgtaggaatcattggaagcagttgtgcattgtccgatgctcagaactccacactttttgtaaagattcttgtgatcgagatattcgggagtgctctcgggttgtttggagttattgtgggaattattatgtctgcacaagcgacatggccaacgaaatagatatatatatatccggtctgtatatgttgtggtctacttgcaaatctggaaaaacatggcttcttgattatcttcattgttatatcgttccaatgtctagacgaaaatcttgtgtgaaaactgagaaccacttttggatccccaattttttgtatttgtttaaaacttttgaataaaaccttttggag

SEQ ID NO: 122514 - DNA, 444 bp, Arabidopsis thaliana
gggggttgctcaatttcagagcgcacagactctgttaatcatctcctcctccgaaagacagagaaagagacaaatcaaattcattcatatcaaagagatagagagaaaatgtccggtgtggctattcatgcgagttcatggggcgcggctctggtgagaatctccccgtacactttctccgccatcggaatcgccatctccatcggcgtctctgttcttggtgctgcctggggaatttacattaccggaagtagtttgatcggtgccgccattgaagctcctcgaatcacttccaagaatctcatcagtgtaatcttctgtgaagccgtggctatatacggtgttattgtggcaatcatattacaaacgaagttggagagtgtaccatcatcaaagatgtatgatgctgagtctctaagagctggatatgcaatctttgcttct

SEQ ID NO: 122515 - DNA, 348 bp, Arabidopsis thaliana
gactgatcttgttgttcatcagttgaagtgctacattgggacaccgctgagtgcaacatatttgctttgtcggggccgcgttgtggcaaactgccaaccgattatcggacttttcccgccctgtgtgtgcagctgtgcctcattaaaccttaggcgcactgtctgtggtcactgtcaagcgttcgcgtggtgtcctgggtcgaccaaattttcgattttctctcggcgttgtgctgtttgatctgagagcgagcgtcgcgagccatgcaggcggcgccgccttctgacagataccacctggtttatatttgcttcctcttacttggtctcggcttcctcctcccatgg

SEQ ID NO: 122516 - DNA, 560 bp, Arabidopsis thaliana
accacgcgtccgctagattaaaatcctaagctaaggaagaagaaggttttgatgttagtgaaaggttagattttttattccgatcttggtcagtctcctccaatcgtgatttctcttctggatccaagctgatgagctctacgtcttcctcccagatggttcagctcgtagctgacaagcatgtacgttacattctgatggcagaaaagaagaaagagagttttgagtctgtggtgatggatcatctaagaatgaatggtgcatactggggactcaccactctcgacttacttgacaagctcggctgtgtttctgaagaggaagtcatttcatggctcatgacttgccagcatgaatctggtggctttgccggtaacactggacacgatccacatatcctatatacactcagtgctgtacaaatcttggccctatttgacaaaatcaacattcttgacattgggaaagtgtcaagttatgttgctaagttgcagaatgaagatggatccttctcaggagatatgtggggagaaatagatacgaggttttcgtacatagct

SEQ ID NO: 122517 - DNA, 366 bp, Arabidopsis thaliana
cccacgcgtccgcccacgcgtccgaagaaaatggttcccatcatcagagaagctctctccactctcttgtcttcccgcgatgaatcgggttcagttcgtgtggctggattggttcttgacttcttctgcgtccctatgatcgatgtaggaaacgagtttaatcctcccttcttacatttttcttgacgtgtagcgcagggttcttgggtatgatgaagtatcttccagagagacaccgcgaaatcaaatcggaattcaaccggagcttcaacgaggagttgaatctcattcctggttatgtcaactctgttcctactaaggttttgccgtcaggtctattcatgaaagagacctacgagccttggg

SEQ ID NO: 122518 - DNA, 951 bp, Arabidopsis thaliana
  unsure (1)..(951): unsure at all n locations
agaccggtaccggtaattncccggngtcgnacccacgccgtccggtaatcgcttcatcttcttcttcttcaacaaatcgagtcctttttctgataactcatttcgatttcagaaactcgccaagaactggatactctggcggaatcagagattaagaaccgagacgtggttctgaaactgtatgaagccctgagatctcgcgacgtcaaatctgtgcaccagatcttaaccccagatctggagtattggttccacggtcctccgccgcaccagtttttgatgcgcgtactcaccggaggtgtctctccgtcttcttcctccttcgaattcgtacctctctccgtcgtttccttcggatctaccgtaatcgcggaaggctgcgacgccgcgacatcgatttcttggatccacgcttggactgtagcgaatgggataatcacacaggtgagggagtactctaacacttctctcaccgtcacacggatcggtaacgttgttgctggacgacgctccgctgagattgcgcctccgtcgcattgttcctccgtgtgggaaagccaattctcgggtcgggctggtaaacccgtacccggtttggttctggcgatttgaaagagtttggtaaagtaagtaacagccacgtcaggagaataactaaataaaggctgcttacgtgtctgtgtgtggttggtttgtttgttgtatgggttaaaaaggattttgttgctgttttaaacgcggtgtgggcttctggggctacggtcgcgtttggctgtcgctagtttttttttttttttttaagttgtttgtctgaaaattcgtgtgggtttgtgttttttagtgggagcaagtatggggaaacccaaatcgacttgttgtcccgttgcgtttgatgtaacgtttgcttatgttataattgaaataaaaaagtgcttttgggatcttttgatg

SEQ ID NO: 122519 - DNA, 496 bp, Arabidopsis thaliana
  unsure (1)..(496): unsure at all n locations
tacccnntaacnccgaanccgtaaccttatttccttaaccgttcccccccttcccccttccacctccctccgccgctttncccccccgtgtgggaaacccccaatttcccgggttcgggctggtaaaccccgtaccccggtttgggttctggccgatttggaaagagtttggtaaagtaaagtaaccagcccacgtcaggagaataactaaataaaggctgcttacgtgtctgtgtgtggttggtttgtttgttgtatgggttaaaaaggattttgttgctgttttaaacgcggtgtgggcttctggggctacggtcgcgtttggctgtcgctagttttttttttttttttaagttgtttgtctgaaaattcgtgtgggtttgtgttttttagtgggagcaagtatggggaaacccaaatcgacttgttgtcccgttgcgtttgatgtaacgtttgcttatgttataattgaaataaaaaagtgcttttgggatct

SEQ ID NO: 122520 - DNA, 819 bp, Arabidopsis thaliana
  unsure (1)..(819): unsure at all n locations
cnnnnnnnnnnnnnnnnnnnnnnnnnnnnnnnnnnnnaacaataatacctcacaaagaacaatatggctccacctcgcgtccccattctcatccttttctctttcgttatcgtagtctcatcctcaagctttactccaccgcgtcacccatttgatcccttaaccgagaccgaactcaaactcgtccgaaccatcatcaacaagtcgtaccccgttggtccgaatcataagttcactttccaatacgttggtctcaacgaacccaacaagtctctagtcttgtcttggtactcatcaccgaatcataccatcaaaccaccaccacgccaagcgttcgtcattgctcgagacaacggaaagaccagagagatagtccttgacttttcctctcgtgccatcgtctcggacaaaattcacgtaggaaatggttaccctatgctctcaaacgacgtgcaagaagcatccaccgagcttgttgtcaagttcaagctgtttatggacggggtcgcaaaacgtggcttaaacgtttcggagatcgtgttcacgacgtcaacgattggatggtacggtgagactaaggccgaggctgtgcgagttattagattgatgccgttttatcttgacggcaccgttaatatgtatcttagacctattgaaggaatgacgataatcgttaatcttgatgagatgaaggtatcggagtttaaggacaggtcagtggttactatgcccatagctaacggaacggagtaccgtatctcgaagcttaacccaccctttggaccgacgcttcataacgccgtccttttgcagccggat

SEQ ID NO: 122521 - DNA, 1250 bp, Arabidopsis thaliana
  unsure (1)..(1250): unsure at all n locations
tgatacgtcnctgtaatctgactcactatagtgaaagctggtacgcctgcaggtaccggtccggaattcccgggtcgacccacgcgtccgatttgcatgctctcaaacccgaattaaatcgacacttttcagtttttgttttaacaagtagagtttcccaaaatattggatatatttctttttcaaatttcggaaaagaaatgagttgcaatggatgtagagttcttcgaaaaggttgcagtgaaacatgcatccttcgtccttgccttcaatggatcgaatccgccgagtcacaaggccacgccaccgtcttcgtcgctaaattctttggtcgtgctggtctcatgtctttcatctcctccgtacctgaactccaacgtcctgctttgtttcagtcgttgttgtttgaagcgtgtgggagaacggtgaatccggttaacggagcggttggtatgttgtggaccaggaactggcacgtatgccaagcggcggttgagactgttcttcgcggcggaactttacgaccgatatcagatcttcttgaatctccgtcgttgatgatctcctgtgatgagtcttcagagatttggcatcaagacgtttcaagaaaccaaacccaccattgtcgcttctccacctccagatccacgacggagatgaaagactctctggttaaccgaaaacgattgaagtccgattcggatcttgatctccaagtgaaccacggtttaaccctaaccgctccggctgtaccggttccttttcttcctccgtcgtcgttttgtaaggtggttaagggtgatcgtccgggaagtccatcggaggaatctgtaacgacgtcgtgttgggaaaatgggatgagaggagataataaacaaaaaagaaacaaaggagagaaaaagttattgaacctttttgtttaaaaccgacgacgcaaaacactcaaagattttgaggctctcttttttagggttttgagtgggaatggatatttagttaatgatttttctctatcgagaaatatgataaaattttggggatatatattttgccgatgagaataaataatctgttgagaattgtttcattgctaacatatggtgtgtatgtttttttttccaagcttaactattcaaatattataaattatcagggaaaaaaaaaaaaaaaaaaaaaaaaaaaagggcggccgctctagaggatccaagcttacgtacgcgtgcatgcgacgataatagctggtcgatagt

SEQ ID NO: 122522 - DNA, 937 bp, Arabidopsis thaliana
  unsure (1)..(937): unsure at all n locations
nnnnnnnnnnnnnnnnnnnnnnnnnnnnnnnnnnnnnnnnnnnnnnnnnnnnnnnnnnnnnnnnnnnnnnnnnnnnnnnnnnnccacgcgtccggcatatggtgtatgtgcgatgccgtcctcacctcaaagagtttatggagagagtgtcccgactttttgagatcattatatttacagctagccaaagtatttatgctgagcaacttctgaacgtgcttgaccctaagagaaagctctttcgccatagagtgtaccgtgactcgtgtgttttctttgatggtaactacctcaaggatttgtcagtcctcgggcgtgatttatctcgtgttatcattgttgataactccccacaggcatttggtttccaagtggaaaatggagtcccaatagagagctggtttaatgacccatcagataaagaactccttcacttgctgccatttcttgaaagcctaattggagttgaagatgtaaggccaatgatcgccaagaaattcaatttaagggaaaaaatttatccacctgtacccccccctgaatatcctgttgaggcgggagatcctttcgaaaggtaaagtctatccccaaaacccttttaaagaaaaaatttggcccaaaaccaaaggttggagaaaaaatataagtaaaccaaggttgtttttttattagtttaaattaaaaacttggtatccaaaaaaaaacaggatatgcctgtaaaaacagtttaaggcccaaaaactgtaaaattgttttctcgtttttttcctgggccccatggttttcccnnnnnnnnnnnnnnnnnnnnnnnnnnnnnnnnnnnnnnnnnnnnnnnnnnnnnnnnnnnnnnnnnnnnnnnnnnnnnnnnnnnnnnnnnnnnnnnnnnnnnnnnnnnnnnnnnnnnnnnnnnnnnnnnnnnnnnnnnnnnnnnnnnnnn

SEQ ID NO: 122523 - DNA, 521 bp, Arabidopsis thaliana
  unsure (1)..(521): unsure at all n locations
nnnnnnnnnnnnnnnnnnnnnnnnnnnnnnnnnnnnnnnnnnnnnnnnnnnnnnnnnnnnnnnnnnnnnnnnnnnnnnnnnnnccacgcgtccggggaagccatgacgcgtactttacggatgatatgcctcaagtatgtgaattcgtcacccatctttggaaaatttagagtgttttatttatctcttatttccgggttgattttggtgccagataaagcctttgaatcactctcatgatttaccagcgccggatcaaaacggagagacttatatatgtagctgcatgatttacttgcgacccacgaatggtgcaaagcttctaatgaagaaatggagtgaggaacttcagtcccaagcttggtctgagtccatccgttttaaagcaaatgatcagcctgcttttaacttggcacttaacaaaacagcccatcaagttagtttttgtgtcctccacgttccatttcttcaaaatcaacgcatagaatcttcttatatacttatgagttataaatgttgga

SEQ ID NO: 122524 - DNA, 553 bp, Arabidopsis thaliana
  unsure (1)..(553): unsure at all n locations
tgatacgtcnnnnnnnnnnnnnnnnnnnnnnnnnnnnnnnnnnnnnnnnnnnnnnnnnnnnnnnnnnnnnnnnnnnnnnccacgcgtccggttttggaagctattacgacaaagaagtgcgaagatcagttccacttggaatcactagaaactcttggtgactcttttctgaaatatgctgtttgtcagcaactattccaacactgtcatactcaccatgagggtcttcttagcacgaagaaagatggaatgatttcaaatgtcatgctctgccaatttggatgtcagcagaaacttcagggatttatccgcgatgagtgttttgaacccaaaggttggatggttccaggtcaatcatctgcagcttattcacttgtaaacgatactctacccgagtctagaaacatatacgttgctagtaggaggaatctgaaacgcaagagtgtggccgatgttgtagaatcattaattggagcatatctcagcgagggaggtgaacttgcagctttgatgttcatgaattgggttggaataaaggtcgactttacaacta

SEQ ID NO: 122525 - DNA, 577 bp, Arabidopsis thaliana
atgattctggctagcgctacttcgactcactatttggaaagctggaccgcctgcaggtaccggtccggaattcccgggtcgtcccacgcgtccggaaccacgttcatgacctcagttgtggcagctatggtcatccacctcatcctccgagcctccggtttctcagctagtcaagtagacaccattccaggcatcctcctcctgatcttcatatgcgtcttgatatgcccatttaacacattctaccgtccaacaaggttctgcttcatccgcatcttgcggaagattgtttgctcaccgttctacaaggttttgatggttgatttcttcatgggcgatcaacttactagccagattccattgctgagacaccttgagacaaccgggtgttacttcttggctcaaagcttcaaaactcacgaatacaatacctgcaaaaacggaagatactatagagaatttgcttacttgatttctttcttaccctacttctggcgtgccatgcaatgtgtaaggagatggtgggacgaatcaaaccctgatcacctaatcaacatgggaaaatacgtgtcagcga

SEQ ID NO: 122526 - DNA, 453 bp, Arabidopsis thaliana
  unsure (1)..(453): unsure at all n locations
ttgctcttcgtgctttgtatcgtgatcatcgtcggtgttggtaactgcacatttcagatcaaaagaaagaagttgctagaatggatattccacatgaagcagaagctggagcttgggggattctccctggttttggtcgtcaccatcatccctccagtgatgctactttgttctccagttctttacctgttttcccccgtggaaaactgcaattgagtgataacagagatggtttctcactgatagacgatacggctgttttctcgcacaaacaagtttaacggaagtgcttgattgacttttgaaatctcattccattgggaacctgctcccttgattgaagagggatcttttgacaggggtttgatggntgatcttnaccnggggggngttaccaaatgctnatggntaataanccttttttggaagtggggggggattngnccttnacgg

SEQ ID NO: 122527 - DNA, 368 bp, Arabidopsis thaliana
  unsure (1)..(368): unsure at all n locations
catgcanggttacatncgctgaaaattcatttgacgaacttctaaatcttgtcgagatgaaccatcaactagcctgtgatcccgaaaccggtgggtgtgggaaacgcaaccatatccaccatattctcaccactccaccacatgtttttactacagttttagggtggcaaaacacatgtgagactgtagaagacatagccgctactcttgcagccttgaataccgagatagacatcagcatcatgtaccgtggtctggaccctaagagcacatatagcttagtttccgtggtttgttattatggacagcattatcactgttttgcacatagtcgtgagcacggtcagtggatcatgtacgatgacaaa

SEQ ID NO: 122528 - DNA, 575 bp, Arabidopsis thaliana
  unsure (1)..(575): unsure at all n locations
gaagaagcaaaagaaaaaaaaaagattgaaatggagaagaagctaccgagaagattggaaggcaaagtcgcgattgtgacggcttcgacgcaagggattggtttcggaatcactgagcgtttcggtctcgaaggcgcttccgtcgtcgtctcttcccgcaaacaggcaaatgttgatgaggcagtagcaaaactcaaatccaaagggattgatgcatatggaatcgtctgtcatgtttccaatgctcaacatcgccgcaatcttgtcgaaaagacggttcagaaatatgggaagatagatatcgttgtctgtaacgctgctgccaatccatctacagacccaatcttgtctagcaaagaagctgttcttgacaagctttgggaaatcaatgtcaaatcctctatacttctcctgcaaggatatggctcctcaccttgagnaggggttcttctgttatcttcataacttcctatttgctggntttcaccacaaggnnctattngctatgtatngngcactaaaactncnttntnngnctaactaagngnttcttcctagatgccccgatcanggtc

SEQ ID NO: 122529 - DNA, 518 bp, Arabidopsis thaliana
  unsure (1)..(518): unsure at all n locations
nnnnnnnnnnnnnnnnnnnnnnnnnnnnnnnnnnnnnnnnnnnnnnnnnnnnnnnnnnnnnnnnnnnnnnnnnccacgggtccgggaagaggaggaagaggaggaggaagaggagacggtgattgaacggaaaccactggtggaggaaagaccgaagagagtagaggaagtgacgattgaattggaaaaagttactaatttgagagggatgaagaagagtaaagggatagggattcccggagagaggagaggaatgcgaatgccggtgactgcgacgcatttggcgaatgtattcattgagcttgatgataatttcttgaaagcttctgaaagtgctcatgatgtttctaagatgcttgaagctactaggctccattaccattctaattttgcagataaccgaggacatattgatcactctgctagagtgatgcgtgtaattacatggaatagatcatttagaggaataccaaatgctgatgatgggaaagatgatgttgatttggaagagaatgaaa

SEQ ID NO: 122530 - DNA, 711 bp, Arabidopsis thaliana
tctttccacaacattcatacgcaactcccttaaatcttgaaacgaccaatttcttcaaaacaatagtttgtttgcgatggcgacagaacaagaagctgaagttggaacagagacatcctctgtttccggaaggtttttgaggaacagagatttatatctcttcttgccttttctcttaggcttctctgatcaagaatcatcaaacggagatgatgatgatgttgcttcatcgcgtgagagaatcattttagtcaacccttttacacaaggaatgattgtgctcgaaggctcatcaggaatgaatcctctgcttcgtagcttactggagtcacgtgaggaaggtcgtcctcctgcgtccaaggcttccgtcgatgcgatgccgatcgttgagattgatggctgtgaaggagagtgtgtgatctgtttggaggagtggaagtccgaggagacggtgaaggagatgccgtgtaagcataggtttcacggtggatgtatagagaaatggttagggtttcatgggtcgtgtcctgtttgtaggtacgagatgcctgttgatggagatgagattgggaagaaaagaaacgatgggaatgagatttgggttaggttcagtttcaacgatggtcggagaattagagatttttctgcgcaggacggtggaaacagtgatggtgttgagtccgagaattaggatttacataagaagctttt

SEQ ID NO: 122531 - DNA, 1055 bp, Arabidopsis thaliana
cccacgcgtccgcccacgcgtccgaaaagaacaatgcatcgggaaacaaaagaggcttttctgacacaatggatcagtttgctgaagctaaaagttcagtgtatactgagaaaaactggatgttccctgaagcagcagccacccagtctgtaacaaagaaagatgtgccacaaaacatacccaaaggacagtctagcactacaaacaatagctctagtccacctgcagccaaggcacaaattgtcggttggcctccagtgagatcctacaggaagaacacattggccactacttgtaagaacagtgacgaagttgatgggaggccaggttctggggctctcttcgtgaaggtcagtatggatggtgctccttatctgaggaaagttgacctgaggagctacactaactacggggagctttcttcagccttggagaaaatgttcaccactttcactcttggtcaatgtggatctaatggagctgctgggaaggatatgcttagtgagaccaagctcaaggatcttttgaatggaaaagactatgtgctcacttatgaggataaggatggtgactggatgcttgttggagatgttccgtgggagatgtttattgatgtctgcaagaagctgaagataatgaaagggtgtgatgctattgggttagctgcagctccgagagcaatggagaaatcgaagatgagagcttaaaagatggaacatgacaaagctttctaattatacaaaatatgtgcgatctcttttggtggtgtttttaaatttcaaaacatcaatatctctagtttctgagatttttaaaagaagtaagtaagcccccgaatgtaaggaaatgaagaagaattaaaaatgatctatttttgttgtttgtttgttgctttagtcagtaaactggtcgttgttttatgttttgtgtttgaccttggatgtgtggttgacttctaaaaaaaaaaaaaaaaaaaaaaaaaaaaagggcggccgctctagaggatccaagcttacgtacgggtgcatgtcgacgtcaagctcgtctgagtatac

SEQ ID NO: 122532 - DNA, 520 bp, Arabidopsis thaliana
atttagggaaagcacgtacgcctgcaggtcccggtccggaattcccgggttgacccacgcgggcggccacgcgtccggttcaactaataacgcaaaaatcagtttctctttgagtaagtgtttattacaattaaactaactcaggcaagtctatgatcatggcttcttctgctgctgcatcgatctctatgataactctaaggaacctctctcgcaatcatcaatctcaccaaagcacttttctcggtttctctagatccttccataaccaaaggatctcatctaacagtccaggtctctccacacgagcaagatccaccacttcctccactggaggtttcttcagaaccatttgcagcagcagtagcaatgactactccagaccaactaagatccaagagcttaacgtctacgagtgtcaacggaggtggatcgaaacaggtccagcgggttttaaaacttaggggaaaaaccacatcagctttgtcccggagatcttgtgcccctcacaaacaaactc

SEQ ID NO: 122533 - DNA, 825 bp, Arabidopsis thaliana
tggccgttcgcagtaccggaccggaattcccgggtcgacccacgcgtccgaaagaacagaatgagttctaagtttgatatcggctccttaagcatagtaatgactctgcttatttgcttcttattattatctttggctccaaaacttgaggctgagctcgcaacggtccaacatgctccaaaccccgatggctctatcagttttctggtgattggagattggggtaggcatggactctacaaccaatcccaagttgccctccagatggggagaatcggggaggagatggatatcaattttgtggtatcgacgggtgataacatctacgataacgggatgaaaagtatcgatgatcccgcctttcaactctcctttagtaatatctacacttctcctagcctgcaaaagccttggtaccttgtattggggaatcacgactatagaggagatgttgaggcacaattgagtcctatcctcagatctatggatagccgttggatttgcatgagatccttcatcgttgacgctgagatcgcagagctcttctttgtcgacacaactccttttggagatgcttatttcctcagtccacaagaccaaacttacgactggagcggcgtatcaccgcgaaaatcctaccttcagaccattttaacggagttggagatgggtctaagagaatcaagtgccaaaaggaaaaattggggggggtcacccatgctataaaaaagtggcttcctttctggggaaatacccaaaaagacttgaaatcttttccctttttaccccatcccttggagccaaaataaaggttgatcttttttt

SEQ ID NO: 122534 - DNA, 1745 bp, Arabidopsis thaliana
taggtgacactatagaagatctatgacgtcgcatcgcacgcgtacgtaagctcggaattcggctcgagctaccgctcaaattctcactacacgagcgtgcaccagccttcatcagtgactggctatggtacagctcaggggtactacaacaggatgtatcagaacaagttatatggtcagtatggtagcacagggagatctgctttgggttatggttcatctgggtatgattcaagaacaaatggaagaggatgggcggccacagacaacaaatacagaagctggggcaggggtaacagttactattacggaaatgagaacaatgtagatggtttgaatgaacttaacaggggacctagagctaagggcacaaagaaccagaagggaaatctagatgatagcttagaggttaaggagcagactggagaatcaaatgtaactgaggttggggaggcggataacacatgtgttgttcctgacagagaacagtacaataaagaagatttcccagtggattatgcaaatgccatgttctttatcatcaagtcatacagtgaagatgatgtgcacaagagcattaaatataatgtttgggctagcacaccaaatggaaacaagaagcttgctgcagcataccaggaagctcaacagaaagctggcggctgtcccatctttctgtttttctcggtcaatgcaagtggacaatttgttggtcttgctgaaatgacaggaccagttgatttcaacacaaatgtggagtactggcagcaagataagtggaccggctctttccccctcaagtggcatattgtgaaggatgtgccaaacagtttactgaagcatattactttagagaacaatgagaacaaacctgttaccaacagcagagacacacaagaggttaagttggagcaaggtttgaagattgtgaaaattttcaaggagcatagcagcaagacttgcattttggatgatttctcattctacgaggttcgacagaagactatcttggagaagaaagccaagcaaacccagaaacaggtaagcgaggagaaggtaaccgatgaaaagaaggaatctgcaactgcagagtcagcgagcaaggaatctcctgcagctgttcaaacgtccagtgatgttaaggttgctgagaatgggtctgttgctaaaccagtcacaggcgatgtggtggcaaatggttgctaactaagaggatggtgtcgctcacggcatgggcataaaactgactagagatgaagatatgaacaatcccgtttaacgtttctcttgagaagaagattgccgtgagccttgaagcatggaaggagctttagtacctgagacggatccgtttctttgcccttagaagtttaaatcccagttatttttttttcaatcttttcttgttttcatttttccttttcttcaaaatcgcagtctcgttacaagtttatgttgggtttctttttcattttctgttgttcctaccctgtaaaaatgcgcataggacctactaaatcgtgggaagaattagagaaaaggagataaaagcagggtgggattttgttttttcatgtctgttggatttttaggcagagttttcttttcttttggtttcttgctttggtttcagacttgactctcttgagtcgtttagaatttgagatggtcttttgcctctctcgtcttgtttctgtcattctccaaagttatctgaatcaatccatgttttaagaaaaaaaaaa

SEQ ID NO: 122535 - DNA, 769 bp, Arabidopsis thaliana
  unsure (1)..(769): unsure at all n locations
agcaaggtttgaagattgtgaataattctaaggagcatagcaacaccacttgggtggtgttttataactcattggggggggttccacagaagactatatcggagaagaaagccaagcaaacccagaaacaggtaagcgaggagaaggtaaccgatgaaaagaaggaatctgcaactgcagagtcagcgagcaaggaatttcctgcatctgttcaaacgtccagtgatgtaaaggttgctgagaatgggtctgttgctaaaccagtcacaggcgatgtggtggcaaatggttgctaactaagaggatggtgtctctcacggcatgggcataaaactgcactagagatgaagatatgaacaatcccgtttaacgtttctcttgagaagaagattgccgtgagccttgaagcatggaaggagctttagtacctgagacggatccgtttctttgcccttagaagtttaaatcccagttatttttttttcaatcttttcttgttttcatttttccttttcttcaccatcgcagtctcgttacaagtttatgttgggtttctttttcattttctgttgttcctaccctgtaaaaatgcgcataggacctactaaatcgtgggaagaattagagaaaaggagataaaagcaaaaaaaaaaaaaaaaggnnnnnnnnnnnnnnnnnnnnnnnnnnnnnnnnnnnnnnnnnnnnnnnnnnnnnnnnnnnnnnnnnnnnnnnnnnnnnnnnnnnnnnnnnnnnnnnnnnnnnatatcat

SEQ ID NO: 122536 - DNA, 513 bp, Arabidopsis thaliana
cattgaacaaaagtattcttccgattagtttaccaaatatattatttggttcgtttgaaatctcttatatcacggtttaataacgccgtggtattcactgttacgactagctcgccggagaagaagaagaatgaaggaggagaagaaagacgacggagtaatggctgaggagaagccttacatgttctggatttggactttggcttctacgattttccgattattcctgatcttttccccggcaaatatcaacctatcttcccgtccggaggtctccacccctcacaccagccttcgccgccttgctgaaggttactggttgaagcagtcatcactgtcgccatacgcaggatcaatgtatcatggctctccattgctactctccattctcggtcctctcacagttcagaggatcgaagggcaatcgagtcatcatttgtgcagatttacttagtgcactgcttcttcgagctattggtcagaagctccagaagtcttatagaatgaatttga

SEQ ID NO: 122537 - DNA, 541 bp, Arabidopsis thaliana
cgcattaatctctctctctgtatcttctcttgagtggagcgaatatccaaaagagttccgagtttctttcatccttcacgagcttatactttttcttctccattcgtttgtttttaacgatcaaaaacaacggcgaaggtattggaaataagacagaagctgttagctctgtttctccatggtgtcaagatcttgtgctaattttctagacttatcatcttgggaccttttagattttcctcaaactccacgaactcttccacgcgtcatgactgttccgggaatcatcaccgacgtagacggtgatacaacctccgaagtaacttctacctccggtggttcacgtgagaggaagatcattgtagctaacatgttaccactccaatctaaaagagatgcagaaactggtaaatggtgttttaactgggacgaagactctctccagttacaacttagagatgggttctcttcagaaacagagtttctctacgttggatcacttaacgtagacatcgaaactaacgaacaagaagaagtttca

SEQ ID NO: 122538 - DNA, 568 bp, Arabidopsis thaliana
  unsure (1)..(568): unsure at all n locations
caaagaagaagaagacattattttaagtgagtnctctctctgtcacactcacaaagctttatactttctggctactgcaagctcatcactgaaaagagcttaaaccagagagatctgataagagaaattttagagtctctctgcttcaacaagatctacatcgaccaggagattagaaagaatcatgggttctaagcataacccaccagggaataacagatcgagaagtacactatctctactcgttgtggttggtttatgttgtttcttctatcttcttggagcatggcaaaagagtgggtttggtaaaggagatagcatagctatggagattacaaagcaagcgcagtgtactgacattgtcactgatcttgattttgaacctcatcacaacacagtgaagatcccacataaagctgatcccaaacctgtttctttcaaaccgtgtgatgtgaagctcaaggattacacgccttgtcaagagcaagaccgagctatgaagttcccgagagagaacatgatttacagagagagacattgtcctcctgataatgagaagctgcgttgt

SEQ ID NO: 122539 - DNA, 475 bp, Arabidopsis thaliana
cggacgcgtgggttctccttcctcatcatcgttactctcgtgtttatctctccgacgtaaccatggatagcgatactctctcaggattattggaaaacgtcgccaaaaaattccccgatcgccgagctctctccgtttctggaaaattcaatctcactcacgcgcgtcttcacgatctaatcgaacgcgccgcttcacgccttgtctccgacgctggaatcaaacccggcgatgtcgttgctctcaccttccctaacaccgtcgagtttgttataatgtttttagcggtgataagagctagagccacggcggcgccgttgaacgcagcgtacacggcggaggaatttgagttttacctctccgattcagattcaaagctattgttaacctctaaagaaggaaacgcaccggctcaagaagcagcttcaaagctgaaaatctctcacgtcaccgctacgctgcttgacgctggctc

SEQ ID NO: 122540 - DNA, 723 bp, Arabidopsis thaliana
cccacgcgtccggaaaacccgagtgaaccagaacctgaaaagtcacctgcttgggttgagtggcgagagacctctgagtccaccgcaccaccttcttccaacccagaggagactaccatattgtccaatggtgatgttcaaattgagaaagaggataatgatgatgatgatgatactgataacaaaagtgcagtgaaaacaccaggtgtacctggcgatgaaaccacagagaagttaccagatgagagtggtgttgaacccactgagaactcaccaaaagctagtggcattgaacccacagagagctcaccaaaagcgagtggagctgaagtaactggaaacttgagagattccgatcctgctgaatctcatgcggatgctaaaagctctgaacctgaaagccctcatgggacaaaagaaacagaggttgcagcagaagcagataccaaagagaccgaagaggctgtgaaggaaccagagaaggtagtgtgagctttttacttaaccgggggtctctttgactgataaaacaaaatttcttctggtttagtttgattaagggctttgtctgttttgggtacaatttattattctatttttttcttttccttgtttgtttacttcattgtatcatctccaaatccggtattttttattcaacattattgtcgaccaaaatttgttactagcttttcatattttattagtataatcttttacctc

SEQ ID NO: 122541 - DNA, 523 bp, Arabidopsis thaliana
gcctgcaggaaccggcccggaattcccgggtcgacccacgcgtccgttctttctcagaccacaatagcagaacccgataaagagctacagcggtttgcaatctggaaatactcattcctcaaaacctgtgaagctgttgatctggagcttgagcatcaccgaaagatagattctttcaacagcggtacgaccgctctaaccattgtgagacagggtgatgttatttatatagcaaacgtcggggattcacgtgcggtattggccacagtttcagacgaaggaagcttggtcgcggttcagctcaccgtagatttcaagccaaacctgcctcaggaggaagagcggataatcggatgcaacgggagagtattttgccttcaagatgagccaggggtccaccgtgtatggcaaccagtagatgaatctccggggctcgcaatgtcaagagcattcggagactattgtatcaaagattacggattggtctcagtgcctgaagtcactcagaggcatatatccatta

SEQ ID NO: 122542 - DNA, 439 bp, Arabidopsis thaliana
cttcttgtttccttcgctcgattctcttctcttctcctactaaccttcgttcaaatcaccatctccccactttcttccccaagaattatctcatttgctctcattccacttcttctcgcttcgaatcgctctcggtttcatcgatcggaactggatctaccaagaaatcatccgatactcggagaaaggtaaagagcatggctacgacaaatataggaaaggaggagaagaaaagagtcgagatttatgatctcgaagagaatttagtgattgatttggctaaattcacagcagatctctccgataagttttgtaaagagagaggcgctttcaccgtcgttgtctccggtggctctctcatcaaatcactccggaaattagtagaatctccttacgttgattctatagattgggcaaggtggcattttttctgggttga

SEQ ID NO: 122543 - DNA, 591 bp, Arabidopsis thaliana
  unsure (1)..(591): unsure at all n locations
cnnnnnnnnnnnnnnnnnnnnnnnnnnnnnnnnnnnnnnnnnnnnnnnnnnnnnnnnnnnnnnnnnttcttcccacgcgtccgcttcttgtgggacaaaccctaattattttacttcgatatctctccacttttcccgctcaatcatctgatctttccctctctcagcaatgcatgatcttcgattttctatcagtgttcaaagctgaaaaaaatcgaactgggtctgttgatttcttcaggtctaaaatcagattagattagagaagaagaagaagaatgctggaagctgtagatagctcaggagtggtgaatggaggattcccgcagattcagagcttttacggcgattgcagtagtgaagaagagttatcggtattgccacgtcatacaaaagtggtggtcaccggaaacaacccggacgaaatcggtgcttgttggtcttcaaggtgttgtcaaaaaagctgtcggtctcggtggttggcattggctggttttgaccaatgggattgaaggaaaagttccanaggaatccnttagngnccttnaccncctnctggaaccnngnagccggtncccttgttncggaacc

SEQ ID NO: 122544 - DNA, 577 bp, Arabidopsis thaliana
acgactcactattgggaaagctggcacgcctgcaggtaccggtccggaattcccgggtcgtacccacgcgtgcgccgcaaacgattctcattgtgaactctgataatatctaagacgacgaaatgttggagctacgtcttgttcagggctcgttgttgaagaaggttctagaatcaatcaaagatctggtgaacgatgcgaatttcgactgctccagcactgggttctcactccaagctatggattcgagtcacgttgctctggtgtctctcttgctaagatccgaaggcttcgaacactacagatgcgacaggaatctctccatggggatgaatctcggcaacatgtcgaagatgctcaaatgcgccggaaatgatgacatcatcaccatcaaggctgatgacggcggcgacaccgttaccttcatgtttgagagccccacgcaagacaagattgctgattttgagatgaagttgatggatatagacagtgaacatctgggaatacctgatgctgagtaccactcaatcgtgaggatgccttccaatgagttttccaggatttgcaaagatctcag

SEQ ID NO: 122545 - DNA, 627 bp, Arabidopsis thaliana
  unsure (1)..(627): unsure at all n locations
nnnnnnnnnnnnnnnnnnnnnnnnnnnnnnnnnnnnnnnnnnnnnnnnnnnnnnnnnnnnnnnnnnnnnnnnnnnnnnnnnnnccacgcgtccgaaaaaaaaaaaccgaagtggtttcttaccaaaaaatcaaccaatctccttcacgaatttccatctgagaagaatttgaatcggtggagatggaaccgccggagaatagtttagattccgatggttcgaacttagagacagcggagaggataatactccggtgggactcagcagcgactgatggagcaagagggaagatgattttccaaagcgatcgtgatgaggtggatcggtttcttcgagccgttgatgaaatccaacggtccttatcttctgtctctttctcttcttcttcctcctccgccgccacctccgccgccaccgtagtcgatgaacacgaggtcaaagccaacttcagctattcaaatcgctatggctagactcgaagacgagttccgtaacattcttctctcccacacaactactttcgagcctgattnacttttcctcgngganccatcagtctctcccgtntttaaccgtcgaagttggagaagataccacccgtaactcncnggaggaagaagatttaaa

SEQ ID NO: 122546 - DNA, 718 bp, Arabidopsis thaliana
  unsure (1)..(718): unsure at all n locations
cagcgaacacggagttccggcatcatttaaggttccaactggagttgtcataccttttggatcgatggaattagctttaaagcaaaataattcggaagaaaagtttgcgtctttgctagaaaaactagagaccgccagacctgagggtggtgagctacacgacatatgtgaccagatccatgaactgatgaaaacgttgcaagtgcctaaagaaacaatcaacagcataagcaaagcgtttctcaaagatgctcgtctcattgttcgttcaagtgctaacgtcgaggacttagccggaatgtcagctgcaggactctatgaatcaatccctaacgtgagtccctcggatcctttggtgttttcagattcggtttgccaagtttgggcttctctctacacaagaagagctgttctaagccgtagagctgctggtgtctctcaaagagaagcttcaatggctgttctcgttcaagaaatgctttcgccggacttatcattcgttctgcacacagtgagtccagctgatccggacaagtaacccttgttggaagcccgagatccgcccctgggtttaagggtgagaccttttagccttccaggaccaagagggacacccatggggggcttcgntttcggggaaagctcgncgggggtttttcaaaaccttagntttnngaaanttnagngngggggtntttttttnaggaacaggncncct

SEQ ID NO: 122547 - DNA, 500 bp, Arabidopsis thaliana
ggggaaggccctgcccccggcgggtcccggcccggaattccgggttggccccacgcgtccgttctgtctttcggcctttctcccccaactcgcgaacaaagcaaaccctagatcatccatcggcgagtgagacggcagctcctcgtcggtaattccttccaccggcggcgaccactcaccctcagatctctcaatcccactcatctctgtaacattctggtggaaattctgccatggcggagcatttggcttcaatctttggtactgagaaagacagagtgaattgccctttctacttcaagattggcgcttgccgtcatggtgaccggtgctcgcgtcttcacaaccgtcctaccatctccccaacactccttctttcaaacatgtaccaaaggcctgacatgattacccctggtgttgacgctcagggccaaccactcgacccgcgtaagattcaggagcactttgaggatttctttgaggatctttttgaggagctt

SEQ ID NO: 122548 - DNA, 581 bp, Arabidopsis thaliana
cccgaacaaagcaaaccctagatcatccatcggcgagtgagacggcagctcctcgtcggtaattccttccaccggcggcgaccactcaccctcagatctctcaatcccactcatctctgtaacattctgtacgctttctctctctctttcttcgcttttgtgatctattacggctcggtctctgtgcctcccagctctattttggagcactgcttcgtctctgtgtttatttggctcctttgtgtgtttctctatctctgctttttcttttgtattgctctgtttccgattttatatccatatgtctctggttatttgggttatatctatgtgtgattcttttgttcctttctttccattgaacttcaactagcctggcttaagatcctctgccttttaatcttcaaatagttgctcaatcttttcgctttcgtaacataatttagtttcttgttgatgtttttgatatctaccaatctcttttcaatttatgtctatatgttgctaaatatctggttcaatgactgatttcttaaactcagggtggaaattctgccatggcggagcatttggcttcaatc

SEQ ID NO: 122549 - DNA, 1154 bp, Arabidopsis thaliana
  unsure (1)..(1154): unsure at all n locations
ccgnnncggaanncccgaggaggccgactcatacgtattctaccccctcatgttctgccaattcctctactctcttcagcaacccctacaatataagaactttaataaaggtaagaagcctactaantcatcatctttgcaagggtcaagcttgccagaagcaccctcttcattgtttccttttagtaccagttctcaaatgttagctcctagttcattgcctttccctggtctaccacctgtgacgctctcgtctagcctgcagtctacactgcaatcagcaccatctccttcactagcttcagagatggcacctccgttgctgtcaaacaaagctcctattactgctcctcctaccctacctcaggatactaatttgctttcgttttctctatctactacgagagccacagaagcaagtactggccttccactgtctaacaagcctagtgtagtaactggtccaatttctccgccgcagacaacaccattaacatctgctcctgttgcgggagtttctagttccattagccaagataagccaaaacctttgttggttactcctggtcaactgctgcagtctggatcttctgcagttctttgtcccaccctcgacaaatgctggtaaagatgttgagggggttcaagtatcgtcatcagctgggttggaacaatctgttccagttacatccgaagcccaacctccaatactgccattgccttcctctgcaagaccaactcagaagccaaacgggcattctttcccaaatcataatggttacaggggacgtggaagaggacgaggaagaggagcagggagatcacaccaagtaatgaaattcactgaagattttgatttcacagcaatgaacgaaaagttcaataaggatgaagtatggggtcatcttgggaagagtactaccttagatggtgatgaagatgatgattccccgactgtagatgaggctgagcttcctaagatcgaggccaaacctgtttacaacaaagatgactttttcgatagcctatcatcaaacaccattgaccgagagtcccaaaattcaaggcctaggttctcagagcaacggaaactagatactgagacatttggtgaattctcgagattccgaggaggtcgaggagggcgtggtggt

SEQ ID NO: 122550 - DNA, 404 bp, Arabidopsis thaliana
  unsure (1)..(404): unsure at all n locations
ctatgacgtcgcatgcacgcgtacgtaagctcggaattcggctcgagctcgagccgattcggctcgagcggctcgagcccaattgcatcagcagtctctgattcgaccccctcatgggctgccaatgcccaactctcttcagcaacccctgcaatatcctaactttaatacccctcctccacctactgggtcatcatctttgcaggggtcaagcttgccagaagcaccctcttcattgtttccttttagtaccagttctcagatgttagctcctagttcattgcctttccctggtctaccacctgtgacgctctcgtctagcctgcagtctacactgcaatcagcaccatctccttcactagcttcagagatggcacctccgttgctgtcanacaaagctccta

SEQ ID NO: 122551 - DNA, 597 bp, Arabidopsis thaliana
  unsure (1)..(597): unsure at all n locations
atttaggaccactatagaagagtctatgacgtcgcatgcacgcgtacgtaagctcggaattcggctcgagatggaatctgaaagactcgaatcacatcttctgaataagcaagaagaagaagcttcttccttcacttctggtcttcttctcagcacatccgtcgttgtcgctggatccttctgttatggctgcgccatgtcatattcgtcgcctgctcagtccaaaatcatggaagaactgggactttccgttgcagattattcgtttttcacttcggtaatgacattaggaggaatgattaccgccgtgttcagcggtaaaatctctgctctcgttggtcgtcgacagacaatgtggatctcagatgtttgctgtatttttggttggctcgctgtagcctttgcacatgatattataatgcttaatactggacgactcttcttggggtttggggttggtctcattagttatgtgaaattacacccaaaacatttcgtggaggattttcttattccaatcagcttctacaatgtcttgggatttcactcatgttcttcaccggaaactntttccattggcgaacatttagctctttt

SEQ ID NO: 122552 - DNA, 523 bp, Arabidopsis thaliana
  unsure (1)..(523): unsure at all n locations
atttctctcgctctctatctctctcaaacactatggaatcccaaacaacgttcgagtatgaaagtcttgcgttcacaaagttgtctcactctcaatggactgattacttcctctctgttcccatcgatgattcggagctagacgctattacaagagagattgacatactcaagccggaagttagggagctcctatcttcccagggtgacgatgagacatcgaagaggaaagtgcttttgatccaatcgcttcttagccttggcctcgcatttcattttgaaaatgagatcaaaaatatactagaacatgcttttcgaaagatagatgatataactggtgatgaaaacgacttgtctacaatctccatcatgttccgcgtcttcagaacatacggacacaatttaccatcaagtaagacaattgtttagtcggtggcaacaaatctaagaatgtttttatcattntattttgtaacagattacctgcaataccatcacaattagcaatagatttcgactaaagg

SEQ ID NO: 122553 - DNA, 579 bp, Arabidopsis thaliana
  unsure (1)..(579): unsure at all n locations
nnnnnnnnnnnnnnnnnnnnnnnnnnnnnnnnnnnnnnnnnnnnnnnnnnnnnnnnnnnnnnnnnnnnnnnnnnnnnnnnnnnnccacgcgtccgcccacgcgtccgcccacgcgtccgattttgatttggttttgtagcctacgaattcgaatcatcagcatcatcttcaacaccagcttaacgaaaatggagtataataagtggccacggactagtactctctcaccaacttccacctctccaagcaaaccctaaccctaaccaccaccatgtcgctacctctgctggtcttccgtcaaggatgggtggatcgatggcggagagagcaaggcaggccaacattcctccactagcgggacccctaaagtgtcctcgatgcgactccagcaacactaagttctgttactacaacaactataacctcactcagcctcgtcacttctgcaaaggttgccgtcgctactggacacaagggggcgccctgagaaacgtccctgtaggtggaggctgccggaggaataacaagaagggcaaaaatggaaatttaaaatcttcttcttcttcgtccaaacagtct

SEQ ID NO: 122554 - DNA, 858 bp, Arabidopsis thaliana
  unsure (1)..(858): unsure at all n locations
nnnnnnnnnnnnnnnnnnnnnnnnnnnnnnnnnnnnnnnnnnnnnnnnnnnnnnnnnnnnnnnnnnnnnnnnnnnnnnnnnnnnccacgcgtccgcttttttaaccatgaagtgaccgtcttccttgtcttttttctctccctgttgagatctctgagaaaaaaaaaatccatccgatcttcaaaaaaagtcaccccctttaacattcttctccaatctctctacaaaccctaatctcagccatggatctcgctgcagaagagcttcaatttctcaacattcaaggcatattacgtgaatccacaacaatccccaaattttccccaaaaaccttctacctcataaccctaaccctaattttccctctctccttcgcaatcctcgctcattccctctttacccaaccaatcttagctcagctagatgcaactcctccttcagatcaatctaaaaccaatcacgaatggacccttcttctcatttatcaattcatctacgtcatcttcctcttcgccttctctcttctctcaacagccgccgtcgtcttcaccgtcgcttcgctttacacgggaaagccagtttctttctcttcaacaatgtcagcgattcctctggttttgaagcgtttgttcattaccttcctttgggtttctttaatgatgcttgtgtacaactctgtcttcttgttgtttctcgttgttttgatcgtagctatcgatttacaaagcgtgattctcgctgtcttctcgatgggtgtgatgtttcgtctgtttttgggtgttcatgtttacatgactgcttggtggcatttagctagtgtagtctctgttcttgaaccgatttacggtatcgccgcga

SEQ ID NO: 122555 - DNA, 516 bp, Arabidopsis thaliana
gctcgatgtccttttgagcaagtgaccaagattctgactctttttatgaaaacattcatcaaatcccgagaggagaatgaaaaacaagccgaggctgagaagaagaaactggagaaagaagcaattaaagagaagtcagcgacaaagaaagatggcgtcgataacgacaacgatcttatccagcagatccatagacatagaacatgaacaaacatcggtcttgaacggaagacccgaggttttcagatcgatcgataaaagctttgttttataggactcaatgttgcacatacggaacaagagcagagatctttcctagatcttagacaaagtagtcaacgtctatgatgtttagatggaagtgttttatctctgatcacttcattgatgtaaaatcagaggttcgtatttatgtcctagaaaatatttgaacttacatagaacccagaagttatattatcttcactgtgcagacaaaaacatttttttttccaagaataataaatcttctcaaaa

SEQ ID NO: 122556 - DNA, 509 bp, Arabidopsis thaliana
ccctcgcgtccgtgttactatagatgaagaaattacggatgagaaacaagaagaggttactgtagttgaaaaagcagagtgttctgatgctaaagatgtagctgtggacagtgatgaacctgcggatagagaagatgatgaagggttggtagttgcagaaaatgttcatgttcaaagtgaaggtatagattgtgattctccagttagcggtggcagtaactctgattcaccacccgtaccagctccaccaccaaaaccttcttccactgtcaatcctggtagtaacagatcggttttgggaagttttggcgctttacgaattggaccaacacgaagagctgctgggcctcgctctcttgtttccagtaggagttcgccaactggatcacatccttcttctccaagatcacacagtgagaacgagggctataatagttctgatgagcatatgccatgctatgtgccctctcatcctggctctggcttggaaagagaacaccagtttgaag

SEQ ID NO: 122557 - DNA, 821 bp, Arabidopsis thaliana
gtctgagccggcgaagcttgccgtttccgccgttggaggagagtttttactgttgctgtcctgttgacattttgagacatgaaatgatcttgggttgatgtttgtatggtagcagaggaatagtagtcatgaagcttatttcacttgttagaaacgttcgttctcgccaatgtcaaccggaagtaatctggtctgtgcaagttcgtttcttgcagcaagactctgtctcgaaagctaaacccaagaaatacaaatacccgtcagtttatgatccgtatggtcctagaccccagccttcaagcaaaatcatggagctagctgagcgtatagctgctttatctccagaagaaagaaaacagattggtcctgcactcaatgaacacctgaggcttccaaaacaacagatgatttcatcggacggcattggagcaaaacaggataccggagctgggaatgtagaggagaagaaggagaagacggctttcgatgtgaagttggagaagtttaatgcatctgataagatcaaagtgataaaagaagtgagaacgttcacaagtttgggtctgaaggaagcgaaagagcttgtggagaaagtcccggctattcttaaacaaggtgtgacaaaggaagaagctaatgaaatcatagccaagatcaaagctgttggtggaatcgcagttatggagtaggtgacttttgacacttcgattgtttttttgtttgattcactatttggtattgtgatcacatcttggtacttaaggtagatgttttgtaataacaaatcgattacttgacattgagttttcaagaactttggt

SEQ ID NO: 122558 - DNA, 880 bp, Arabidopsis thaliana
tatacgacttactatagggacagctggtacgcctgcaggtaccggtccggaattcccgggtcgacaaagaaaacattcgaaaccctaaaatctccattagaattcgaaaatgacaaagaagagaaagctcgaaggagaagaatctaacgaagctgaagaaccgtcgcagaagctgaagcagacgccggaggaggagcagcagcttgtaattaaaaatcaggataatcaaggagacgttgaagaagttgaatacgaggaagtagaggaagagcaagaagaagaagtagaagatgatgacgatgaagatgatggtgatgagaatgaggatcagacggatgggaatcgtatagaggcggcggcgacgtctggatctggcaatcaagaagatgatgacgatgaaccaattcaggatctgttggaaccattttcaaaggagcaagttttgagtcttcttaaggaagcagcggagaagcatgttgatgtagccaatcgaattagggaagtagctgatgaggaccctgttcatcggaagatctttgtgcacggtcttggttgggaacgaaaacagaacgcttattggagttttaagcagccggagagatccaaattgcaggttggtttgatagatctaggaaactaaggtttgggttatttgacaagttcgtcagggctcgacccctcaacggcttaaaaaaatggagtcgttgacggctccaatggttttaagacctgcttggggactcttgctgtgaagtgttaacccgctagtttgactgggctctcaaaaaattttttttatgggggcaaactgcccaaagggtggtgtttcaattggaaaaaaaagccttggctgtaattctgaaaacaagttgttttttta

SEQ ID NO: 122559 - DNA, 501 bp, Arabidopsis thaliana
  unsure (1)..(501): unsure at all n locations
nnnnnnnnnnnnnnnnnnnnnnnnnnnnnnnnnnnnnnnnnnnnnnnnnnnnnnnnnnnnnnnnnnnnncccacgcgtccgaatcagctttttggagaagaaaccaaagaaaacattcgaaaccctaaaatctccattagaattcgaaaatgacaaagaagagaaagctcgaaggagaagaatctaacgaagctgaagaaccgtcgcagaagctgaagcagacgccggaggaggagcagcagcttgtaattaaaaatcaggataatcaaggagacgttgaagaagttgaatacgaggaagtagaggaagagcaagaagaagaagtagaagatgatgacgatgaagatgatggtgatgagaatgaggatcagacggatgggaatcgtatagaggcggcggcgacgtctggatctggcaatcaagaagatgatgacgatgaaccaattcaggatctgttggaaccattttcaaaggagcaagttttgagtcttcttaaggaag

SEQ ID NO: 122560 - DNA, 470 bp, Arabidopsis thaliana
aaaatctttaattcttaatccaaacccagaaacttcctctgaaaccacttcatcatccatgaaagagatcggctcaaaaccaagaaagttacttcctttatgcttcatcatcttcctctgtttttgttcctctgttatggctgcagatgaagacgacataagatgcttaagaggactcaaagcatctctcacagatcctcaaaacgcgttgaaatcatggaacttcgacaacacaactcttgggtttctctgtaacttcgttggtgtgtcttgttggaacaatcaggagaatagggttatcaatcttgagcttcgtgatatgggtttatctggtaaaatcccagattctcttcaatactgtgcgagtttacaaaaacttgatctttctagtaatcgattgtctggtaatatccctacagagttgtgtaattggttaccttttttggtatctcttgatttgtcaaacaatg

SEQ ID NO: 122561 - DNA, 398 bp, Arabidopsis thaliana
cggacgcgtgggcggacgcgtgggtgaaaacatactgacgacaactccttctctctcttaaaacaaattttttttttctctctacaaagctccgccgccgcctagggttaccggttccggtggctttttcagcaccggaaccggatttctttgttttagtgtctctagtttcgatttcttgtgggtttaatgtgatctgaatcctattttcttctaacggtttcttttctaaattctcagatctaaatctgtaaagtctaaatcttttcctcttccggttttgttgcttgtttgtctccttcgtctgcagtttcaattctggccgttccaactatggcagaggcacgtttttttctatccttcaacgcctcagatgcagatctctctccattgaagat

SEQ ID NO: 122562 - DNA, 390 bp, Arabidopsis thaliana
agaggctttagggtttataagacccaaacaaaaaacattcatcagtctcaattcaaaatcctccatcaatggagaaatacgagaagctcgaaaaggtcggtgaaggaacctatggaaaagtctacaaagcaatggagaaaaccaccggaaaactcgtcgctctgaagaaaactaggctcgaaatggacgaagaaggtataccaccaacggctctccgtgagatctctcttctccaaatgctttctcaatcaatctacatcgttcgtctcctctgcgtcgaacatgttattcaatcgagagattcgactgtttctcactctcccaaatccaatctctatctcgtttttgagtatctcgacactgatctcaagaaatttatagattctcata

SEQ ID NO: 122563 - DNA, 649 bp, Arabidopsis thaliana
  unsure (1)..(649): unsure at all n locations
tgatacgtccgctctccacgactcactatatggaaagctggtcacgcctgcaggtaccggtccggaattcccgggtcgacccacgcgtccggaaaaaaaaaagaacattcacgtctctctcgtttttttggccgacgacgatcgctgaattgactgccggagattcctttaatcgtcagattctcgttgagggataatgaatcctgaatatgactatctgttcaagcttctgcttattggtgattctggtgttggaaaatcatgcttgcttctaagatttgctgatgattcttacctggatagctacataagcaccattggtgttgactttaaaattcgcacagttgagcaggacggaaagaccatcaaactccagatctgggacacagcaggccaagaacgtttcaggacaatcactagcagctactacagaggagctcatgggatcattgtcacttatgatgtcacagacctagagagcttcaacaacgtcaaacaatggctgaatgaaattgaccgttacgctagcgaaaatgtgaacaagctactggttgggaacaagaacgattcacttcacagaaagtgtaccnngngaagcaaggnttcagtgantnggncctcttggaaaggcnaangcncctgggggttc

SEQ ID NO: 122564 - DNA, 608 bp, Arabidopsis thaliana
  unsure (1)..(608): unsure at all n locations
taggtgcaactatagaagagccttgacgtcgcatgcacgcgtacgtaagctcggaattcggctcgagcttgttaacattctcacttcacagaaagttgtatccactgagacagctaaggctttcgctgatgaacttgggatcccattcttggaaacaagtgctaagaatgctaccaatgtcgaagaagctttcatggccatgactgctgcaatcaagaccagaatggcgagccaacctgcaggaggatctaagccaccaacggtccagatccgaggacaacctgttaaccagcaatcaggctgctgctcctcttaattcgctttggtaacacttaaccatattatgtcattcgtttgcatgtaagaaatctaaacaacgttgcttcttaaatcttttgtatttggtttttcaatttttcacttgtgtccaaaagcttttaaattctttgtaatgggacttggattattaataaacttctttagtaaaaaaaaaaaaaaaagggccggccgccgactagtgagctcgtcaacccgggannnnnnnnnnnnnnnnnnnnnnnnnnnnnnnnnnnnnnnnnnnnnnnnnnnnnnngtagctgnnaaatcat

SEQ ID NO: 122565 - DNA, 781 bp, Arabidopsis thaliana
  unsure (1)..(781): unsure at all n locations
aatgannnnnnnnnnnnnnnnnnnnnnnnnnnnnnnnnnnnnnnnncccacgcgaccacgatcgtgttacgtctctctctctctcagtctctcatcaccgacgaagatcacggctcttttctctgtttaatcggcggaatctctcttcttattttatttttcttccggtagatcgatccagctccgagatcaatcatgaatcctgaatatgactatttgttcaagcttttgctcattggtgattctggtgttggaaagtcgtgcttgcttctaaggtttgctgatgattcctacctggatagctacatcagcaccattggtgtcgactttaaaatccgaacagtcgaacaagatggaaagaccatcaaactccagatttgggatacggcaggccaggaacgtttcagaacgattactagcagttactacagaggagctcatggaattattgtgacttatgatgtaacagatctagaaagcttcaacaacgtcaagcaatggctaaatgaaatcgaccgctatgctagcgagaatgtgaacaagctactggttggggacaagtgcgatctcacttcacagaaagttgtatccactgagacagctaaggctttcgctgatgaacctgggggcccattcttgggaacaagtgctaagatgcacccatggncgaagagcttcatggcatgctgcggnancagncngatgggngcaccngcnggggnttagcnccaaggccaatccgggggacngtnaccagatnggngggccctaatcgttgggc

SEQ ID NO: 122566 - DNA, 694 bp, Arabidopsis thaliana
  unsure (1)..(694): unsure at all n locations
gctactacagaggagctcatgggatcattgtcacttatgatgtcacagacctagagagcttcaacaacgtcaaacaatggctgaatgaaattgaccgttacgctagcgaaaatgtgaacaagctactggttgggaacaagtgcgatctcacttcacagaaagttgtatccactgagacagctaaggcttttgcagatgaacttgggatcccattcttggaaacaagtgctaaaaatgcaaccaatgtggaagaagctttcatggctatgactgctgcaattaagacaagaatggctagccaaccagctggaggtgccaagccaccaacggtccagatccgtggacagccagtgaaccagcaatcaggctgttgttcttcttgattcaattagtcaccactcctctttcgatcatcacaccattatgatcatttgtttgcattgcatgttagacttctccaaattaacaactctttggatccttttgcttgtttttcatttgctttcttttgatccgattcttttctgatgtacgttgaagtttgaaacccataacttctatatagtaaaaggtcttttatgccggnnnnnnnnnnnnnnnnnnnnnnnnnnnnnnnnnnnnnnnnnnnnnnnnnnnnnnnnnnnnnnnnnnnnnnnnnnnnnnnnnnnnnnnnnnnnnnnnnnnnnnnnnnnnn

SEQ ID NO: 122567 - DNA, 659 bp, Arabidopsis thaliana
ccggcactatacgactcttatagggaaagctggtacgcctgcaggtaccggtccggaattcccgggtcgacccaggcgtgcgcccacgcgtccgtacggctgcgagaagacgacagaagggtacggctgcgagaagacgacagaagggtacggctgcgagaagacgacagaagggtacggctgcgagaagacgacagaagggtacggctgcgagaaagtaaagagaaaaaccctaatcttcatcttcatcttctcccgccgtcggccgtaagaggtttcgaagaagcaaagtgagcaacaatggcgggaggcaagatcaggaaggagaagcccaaggcttcgaatagagcaccatcgaaccattaccaaggaggaatatcgttccacaaatcgaaagggcaacatatccttaagaaccctctgcttgtggattcgatcgttcagaaagctggtatcaagagtaccgatgtgattctcgagatcggtcccggtactggaaacttgaccaagaagcttctagaagctggcaaagaagttatcgccgtcgaacttgactctcgtatggttctcgagcttcagcgccgttttcaaggaactcccttctctaaccgcttgaaggtaattcaaggggatgtgctcaagacggagcttcccaggtt

SEQ ID NO: 122568 - DNA, 691 bp, Arabidopsis thaliana
  unsure (1)..(691): unsure at all n locations
ccnnnnnnnnnnnnnnnnnnnnnnnnnnnnnnnnnnnnnnnnnnnnnnnnnnnnnnnnnnnnnnnnnnnnnnnccacgcgtccgcccacgcgtccgcgttcatgtcttttctccggccaccgaaacgatgccatctgtttagtgcgcctttataattcaacgaccctttgtacttttccgattcctctttctctataacttcatctctcccattctcttcactcttctcaaaaattcgatctttttagggtttttcttttatcctcttatcgctaatctggagctctatagagactataaagggtttttgattgattcgggagctcgagatttgacttcttttagctgattcggcaagtttgtatctagaaaggatcgattggtgaggtcaatagtggttggtgggttttagtaatggaagacggtgagcttgatttctccaatcaggaagtgttttcgagttcggagatgggtgaattaccacctagcaattgttcgatggatagtttctttgatgggcttttaatggatactaatgctgcttgtacccacactcacacctgtaaccccactgggccagngaacactcatactcacacgggcttccatgtccaccacgagtttctcccgggtgagagcgatgnaaaaggtttctactgntggtacagctgngtcttntggggagaagggt

SEQ ID NO: 122569 - DNA, 666 bp, Arabidopsis thaliana
  unsure (1)..(666): unsure at all n locations
ccccccctcgaggtcgacggtatcgataagcttgatatcgaattcgcggccgcctcgacgaaatcaatcctaattgagaaccaaaaaagccaacgacctctcaaatccaagaacggggcttttgtcttcaaaatgaaaagtttgcagagaaaaagggggagagggagagagtctcagacaataccatattaacaccaaagaacgagtttttggaagcaaaagagaccaaccacacttactactgtcagggccaaaatcaaaacccttacctggaaaagatatatatccattttagttatcaaatctaaaattgagtctctctacatcctaccctcgcaccaaaaccaccacccttgattcctacatgcatagccatgtctctctcctaattgtatattttcaccggcttctcgtatgcgtgtcggttctgatttgcagcataagcccttttaggagcattatcaatgtgctccaacccaagatactgctcccacgcaccgtatacatctcttctctgaaagcgattataaacaacatctgtgtccagcaagtaatcaggacgtcccattgaaaacgatgcaaactcccttgggaagccccttcgggggtggggtnntttgganggggntggttttnnaaggtcccncnggggtccaaagnggggcc

SEQ ID NO: 122570 - DNA, 717 bp, Arabidopsis thaliana
  unsure (1)..(717): unsure at all n locations
attgagtctctntacatcntaccctcgcaccaaaaccaccacccttgattcctacatgcatagccatgtctctctcctaattgtatattttcaccggcttctcgtatgcgtgtcggttctgatttgcagcataagcccttttaggagcattatcaatgtgctccaacccaagatactgctcccacgcaccgtatacatctcttctctgaaagcgattataaacaacatctgtgtccagcaagtaatcaggacgtcccattgaaaacgatgcaaacttccacttggcaaagtcctcatcagggacatggagtttcttttggatacgggtcttgatttcttctaaagtttcaccttcgtggattaccaaaaagaagggttccccaaaattttgaacttgctgattttgtccggcctctttagtaaaatgatatacgtgaattaacctatcattgggaccaatattcttctcttcttcaggtatctcctctgctcgtaaagtccagtactggtcattgatgttttcaattcgttcagtagatggaaagatcttgtagatcttgtggaaaaagacctcaagtaacctcagttctgcatcttgatgcgaaagctccacctttgtgcggccgnnnnnnnnnnnnnnnnnnnnnnnnnnnnnnnnnnnnnnnnnnnnnnnnnnnnnnnnnnnnnnnnnnnnnnnnnnnnnnnnnnnnnnnnnnn

SEQ ID NO: 122571 - DNA, 887 bp, Arabidopsis thaliana
ggcgaaccaagtttagaaaggctatgaacaaagctgattttgatgctagcacaagggccattgattctctgataaattatgagactggcaaatattttaacaatgaaggttatgaggctgaaaagtatgaccagttcctgaaaaaatatgaagatgctgccctgcaaactcaaagaagtcttgcttcctcgcgcccgggacaaagtatcatatttagtacagctttatcaacagcaatggtgttgtgctctcagggtatcatgaatggccagatgacagtcggtgatttggttatggtgaatggacttctctttcagctgtctcttcctctaaattttttgggtagtgtttaccgtgaaacaattcagagccttgtggacatgaaatcaatgttccagttgctagaggagaaatctgacatcacaaatacaagtgacgcaaagcctcttgtactgaaaggtggaaacattgagtttgaaaatgtacacttcagttaccttccagagagaaaaatattagatggaatttcctttgtcgtaccggcaggaaaaagtgtggcaatcgttggtactagcgggagcggcaagtcaacaattcttaggatgctattcagattcttcgacacagattccggaaatataagggtttgacgggcaaggatataaaggaagtgaggctaggatagcctcccgaggctccctcaggagtttgtgccccaagatactggtccttcttcaatgccacaatttttcaccaacatccattatgggcggctctcagctacagaagaagaggtgtatgaggctgctcggcgtgctgcaattcatgaaacaatcagtaatttccctgataaatattccacgatcgttggggaaagggggctcaag

SEQ ID NO: 122572 - DNA, 705 bp, Arabidopsis thaliana
ttctcatgtcttcttctctcctcgacctttgagggtttttttgttcgttgtgatggcgagagaaaagattcagatcaggaagatcgacaacgcaacggcgagacaagtgacgttttcgaaacgaagaagagggcttttcaagaaagctgaagaactctccgttctctgcgacgccgatgtcgctctcatcatcttctcttccaccggaaaactgttcgagttctgtagctccagcatgaaggaagtcctagagaggcataacttgcagtcaaagaacttggagaagcttgatcagccatctcttgagttacagctggttgagaacagtgatcacgcccgaatgagtaaagaaattgcggacaagagccaccgactaaggcaaatgagaggagaggaacttcaaggacttgacattgaagagcttcagcagctagagaaggcccttgaaactggtttgacgcgtgtgattgaaacaaagagtgacaagattatgagtgagatcagcgaacttcagaaaaagggaatgcaattgatggatgagaacaagcggttgagggcagcaagtatgtgtcttacccctctctgttgataacaaatccccttttcttttggtctacccatttaccgtgcacactccctaaatttaatccccagttgtctaccaacacatatgttttgaccatacctgggggggaaattgattaa

SEQ ID NO: 122573 - DNA, 656 bp, Arabidopsis thaliana
  unsure (1)..(656): unsure at all n locations
atcaacccgtgccccctanccccaattgcaattcttgctngagacttantgatatgtttcccntgatttngcngggaccgcatctngcggaagagaccgngcgacttggcatgcaaatatgtaacaatgtgcatgcacacggtggtgctgaatcggagaacgctgctgtgtacgaggaaggacagtcgtcggagtctattactaacgccggaaactctaccggagcgcctgttgactccgagagctccgacacttcccttaggctcggcttaccgtatggtggttagagatggaacaattcaaagaagttgatggagtgaggagagtaatgtaaatctttttaactcggtagtaacaagagacaatgtctaagtagtgaattctcaaatgtttgtgtaagtttctgcctatggaagaggctttcatttttatgattttcactatgtatgatctctcttcactgcatttctggttagtaacgcttgtcaccgataaactttctcgttatggaaagttagaatataaaatattgtagaattttgattaacgaaaaaaaaaaaaaacgaacccataaagcgaccgctctagaggatccaagcttacgtacgcgtgcaggcgacgtcataactcttctatagnnnnnnnnnnnnnnnnna

SEQ ID NO: 122574 - DNA, 895 bp, Arabidopsis thaliana
ccaacgcgtccggttcgagttctgtagctccagcatgaaggaagtcctagagaggcataacttgcagtcaaagaacttggagaagcttgatcagccatctcttgagttacagctggttgagaacagtgatcacgcccgaatgagtaaagaaattgcggacaagagccaccgactaaggcaaatgagaggagaggaacttcaaggacttgacattgaagagcttcagcagctagagaaggcccttgaaactggtttgacgcgtgtgattgaaacaaagagtgacaagattatgagtgagatcagcgaacttcagaaaaagggaatgcaattgatggatgagaacaagcggttgaggcagcaaggaacgcaactaacggaagagaacgagcgacttggcatgcaaatatgtaacaatgtgcatgcacacggtggtgctgaatcggagaacgctgctgtgtacgaggaaggacagtcgtcggagtctattactaacgccggaaactctaccggagcgcctgttgactccgagagctccgacacttcccttaggctcggcttcccgtatggtggttagagatggaacaattcaaagaagttgatgcagtgaggagagtaatgtaaatctttttaactcggtagtaacaagaggcaatgtctaagtagtgaactctcaaatgtttgtgtccgccctacaaagaaaaaaggctttcatttttatgattttccctatgtatgatctctcttcactgcatttctggttagtaacgcttgtcgccgataaactttctcgttatggaaagttagaatatacactattgtagaattttggttgtataaaaaaaaaggtttccacaccccgagcgaaccgctctagaggatccaagcttacgcacgc

SEQ ID NO: 122575 - DNA, 714 bp, Arabidopsis thaliana
  unsure (1)..(714): unsure at all n locations
atgatacttcnnccgncgnaatgnnaacccaaccggcnntgnnancgggggtaacccccattttcccctacaaggccgtcttcttcctccttcaatctctctcgttcgtatcatctgctctgcgatttcaatggcgagccgttggttgagacctgaggtgtatcctttgttcgctgctaccggagttgccgttgggatctgtgcgttttccttgatcagaaacatcaccggaaaccctgaagtcagatgcaccaaggagaacagggctgctggaattttggataaccatgcagagggagagaagtataaggaaaatttcctgaggaagtttgttcgcaacaagaaacctgaaatcatgcctggactcaacaagttcttcactgatcctacatactgaaaccatctttgcacaccgctttgtcgtattgtttctggaattgaatctctttgtgatataaaaccgcatttgtcaatttcacattgttgatgtatcctccagctgaagacacttgttaatgctgggcttatgttgtcacttttaagcagaaaattgtatgacttgcttatggcagcatactcttttaatgaccatctcatctgagagtaataagcacttgataaaaaaaaaaaaaaaaagnnnnnnnnnnnnnnnnnnnnnnnnnnnnnnnnnnnnnnnnnnnnnnnnnnnnnnnnnnnnnnnnnnnnnnnnnnnca

SEQ ID NO: 122576 - DNA, 618 bp, Arabidopsis thaliana
  unsure (1)..(618): unsure at all n locations
aaatataaagtgaggtcttttctacgtctcttcaacattctcagagaagccgtcttcttcctccttcaatctctctcgttcgtatcatctgctctgcgatttcaatggcgagccgttggttgagacctgaggtgtatcctttgttcgctgctaccggagttgccgttgggatctgtgcgttttccttgatcagaaacatcaccggaaaccctgaagtcagatgcaccaaggagaacagggctgctggaattttggataaccatgcagagggagagaagtataaggaaaatttcctgaggaagtttgttcgcaacaagaaacctgaaatcatgcctggactcaacaagttcttcactgatcctacatactggaaccatctttgcacaccgctttggcgtattggttcctgggattgaatccctttgtggtataaaaccgcatttggcaattccccatggtgtaggaacccccagctgaanancttgtaaagctggggtatgtggcccctttaagcngaattgnnnactcctntggggaaccctttanggcnncccccgngnaaaaacgggcggatccnggggncaaacgaaangtnaaagccaacccccccnttggggg

SEQ ID NO: 122577 - DNA, 624 bp, Arabidopsis thaliana
acccacgcgtccgcccacgcgtccgcccacgcgtccgcccacgcgtccgcttcctccttcaatctctctcgttcgtatcatctgctctgcgatttcaatggcgagccgttggttgagacctgaggtgtatcctttgttcgctgctaccggagttgccgttgggatctgtgcgttttccttgatcagaaacatcaccggaaaccctgaagtcagatgcaccaaggagaacagggctgctggaattttggataaccatgcagagggagagaagtataaggaaaatttcctgaggaagtttgttcgcaacaagaaacctgaaatcatgcctggactcaacaagttcttcactgatcctacatactgaaaccatctttgcacaccgctttgtcgtattgattctggaattgaatctctttgtgatataaaaccgcatttgtcaatttcacattgttgatgtatcctccagctgaagacacttgttaatgctgggcttatgttgtcacttttaagcagaaaattgtatgacttgcttatggcagcatactcttttaatgaccatctcatgcggccgcgaattcgatatcaagcttatcgataccgtcgacatcgagggggggcgcggca

SEQ ID NO: 122578 - DNA, 966 bp, Arabidopsis thaliana
tacgactcctatagggaaagacggcacgcctgcaggtaccggtccggaattcccgggtcgacccacgcgtccgcccacgcgtccgcacaaacagaggcagagatcttaagagttaaagactaatcccaacaatggcgtctctcaaagtcccaagcaatgttcctcttcccgaagatgacgccgagcaactccacaaggctttttcaggatggggtaccaacgagaagctgatcatatcaatactagctcacaggaacgcagcacaacgcagcttgatccgcagcgtttatgcagctacctacaatgaggatcttctcaaagcattagacaaagagctttctagcgactttgagagagctgtgatgttgtggactcttgatccaccagagagagatgcttatttggctaaagaatccaccaagatgttcaccaagaacaattgggttcttgttgaaatcgcttgcacaaggcctgctcttgagcttatcaaggtcaagcaagcttaccaagctcgatacaagaaatcaatcgaggaagatgtcgcgcaacacacatctggtgaccttcgtaagctcttgcttcctcttgtgagcactttcaggtatgaaagagatgatgtgaacatgatgcttgcaagatctgaagctaagatacttcacgagaaggtctcagagaaatcttacagtgacgatgacttcatcagattcttgacgacaagatgcatagcacagctcggtgctacactcaaccactacatcaacgagtatggaaacgccattaacagatcttgaaggaagagcggacgacatgactacatgaactactagagctgtatcacatgttgactaccctgagagcattcgagaaggtcttcgctatcatcacaaatgggacagacaatgggacctaccgagcgtgctccgactgagtgcatgacgctcaaagattcacgagaacggttcttga

SEQ ID NO: 122579 - DNA, 963 bp, Arabidopsis thaliana
accaagaacaattgggttcttgttgaaataagcatctctttctagcgactttgagagagctgcgacgttgtggactcttgatccaccagagagagatgcttatttggctaacgaatccaccttgatgttcaccaagacaatgggtctgttgaatgctgcacaggctgctctgagctatcaggtctgcaagcttccaagctcgatcaagaaatcaatcgaggaagatgtcgcgcaacacacatctggtgaccttcgtaagctcttgcttcctcttgtgagcactttcaggtatgaaggagatgatgtgaacatgatgcttgcaagatctgaagctaagatacttcacgagaaggtctcagagaaatcttacagtgacgatgacttcatcagaatcttgcaacaagaagcaaagcacagctcggtgcaacactcaaccactacaacaacgagtatggaaacgccattaacaagaacttgaaggaagagtcggacgacaatgactacatgaaactactaagagctgtaatcacatgtttgacataccctgagaagcattttgagaaggttcttcgtctatcaatcaacaaaatgggaacagacgaatggggactaacccgagtcgtgactacacgaactgaagttgacatggaacgcatcaaagaggaatatcagcgaagaaacagcattcctttggaccgtgctatcgccaaagacacttctggtgactatgaggacatgcttgttgctcttctcggacatggcgatgcttgaaactgtttcaactttcgagttcctcctttctcttactgcatggtttgttttaaataaaagagttgtgaaactggttctgcaactatttatcaatgatcgtttgagtttgttaaaaaaaaaaaaaaagggcggccgctctagaggatccaagcttacgtacgcgtgcatgcgacgtcaagatcttctatagtg

SEQ ID NO: 122580 - DNA, 1140 bp, Arabidopsis thaliana
  unsure (1)..(1140): unsure at all n locations
caactgttgtggacgaggttgaaatgtctgaggtatctcctgttttccctaaaacagaagagactaatccttgtgacgtcgcagagtcttctcttgtaatccccagcgaatgtcgtagtggatactctgtccctgaggttacaaccaccgggcttgacgatatcgattggctctcgtttatggagtttgattccccgaagctgttctctccgttgcactctcaggtgcaatctgagctcggttcctctttcaatggcttacaatctgagtctagtgaattgttcaaaaaccacaatgaggattacattcagactcagtacggtacaaatgatgcggatgaatatatgtccaagttcttggattcttttcttgacattccctatgagccagaacagatcccatatgagccacagaatcttagctcatgcaacaagatcaatgatgaatctgagagaggagttaagattagagctcgacgagcacaagccccgggttgtgctgagcagtttgtaatgcagggcgatgcctcaagaaggctgcgtcttcaggttaaccttaacagccacaagtcagaaactgacagtacacaacttcaatttatcaagaaagaggttaaggacacaacaacggaaactatgacgaaaggatgtggaaatttcacaagatcaaagagcaggactagtttcatattcaagaaaattgcagccatgggatgttcatacagagggcttttcagagtcggtgtggtagcggttgtgtgtgtgatgtcggtctgcagtctagtcgcataaatccgctgaatgtgatgtttgttccgatcaattcatatagtaagaataaagaaagtggtttttacgggtggagagagcgcggatttgtgtgtataacaggggttttggcctggttctgcatctgttgttattgttgttgtttttgtcggcttaagcttaaccatggtcggtttaggagtgtagtagacttgtagttaacatgtacgacgactcataatattcagatggtaatgtttggaaatttttttaaaaaaaaaaaaaaaaaaaagnnnnnnnnnnnnnnnnnnnnnnnnnnnnnnnnnnnnnnnnnnnnnnnnnnnnnnnnnnnnnnnnnnnnnnnnnnnnnntt

SEQ ID NO: 122581 - DNA, 902 bp, Arabidopsis thaliana
  unsure (1)..(902): unsure at all n locations
ctttccagctacccaaaatgccctctggctagaaagtatccttcaagccacgataatccacttcatgtcctagcttaaaaggatcctatcagtggttagtggaaccaaatgtttatctctgttaccaagttggtgggctttccgcaaaatggtctttatctcactggaagccttagtctactttggtcaccttccaccgtgccttaataggcacgttcactaacgataaccgagcttcaaatccataacaacacttcatttcctttcctctgatatcgcttccctccataaccagcaaagactgccacacaacaaaatcggagctgctgggaaattacaaacgctctctcaattcagactaatagctggaaaaagactttccctcaaagaagagaaaaagaacattggtaagttctcaatgggtgaaccagatgctgaagaaggtttagccgagaagcttgaaaccgagaaatggaaaaaagtcgtgcccttcaaggagtttccgtcgagtcttcctgtagcaaaactcgtctctggagaaatcgaagtgacgatgaacatgaatgatcatatagattcacctgggagtgtgattggagaagttagaaagcaaattccgccggaaatgttcgatctttctaagcttgtgtgtgggacttatatagacagtaggttacttgtacttaggtgtgtaaatggttcagcattgttgttcacaaggtccagcttggaccataagtctatgtagccatttggctcaggttcttatgtatataacaaatgaatcattctttttgggactaaaacaaaaaaaaaaaaaaagnnaagnnnnnnnnnnnnnnnnnnnnnnnnnnnnnnnnnnnnnnnnnnnnnnnnnnnnnnnnnnnnnnnnnnnnnnnnnn

SEQ ID NO: 122582 - DNA, 1269 bp, Arabidopsis thaliana
atgatttgccgagcactaatacgactcacttagggaaagacggtacgcctgcaggtaccggtccggaattcccggttcgacccacgcgtccgcggacgcgtgggcggacgcgtgggcaaatccttgatagaaactggggagcaggtgggcaccttttatctttgttaattgctaccagaccttctgaaagaataagttgcttggatgctcttaagcatccctttctatgtggaccaagatggcgtgttgccccatcaatggatatcatcagatggggtcttggatcaaccgcagtaaagatttcagaagaatacatttaccgcatgcctcagcgccaaagacttgcccacttcattggactgatggagatgctaaatccttatccaaagccaaactgttggttggagcttttaccgggaagatggcgtcttttatactcaactggaaagcacataggtctaactctgcgtcagccttccacacgtgccttaataggcaacgttcacttaacgataactcgagcttcagaatccataaacaacacttcactttcctttacctctgatatacgcttcactgccataaccagcaaagactggccacacaacaaaatcggagctgctgggaaattacaaacgctctctccattcagactaatagctggaaaaagcctttcctcaaaaaaagaaaaaagaccattggtaagttctcaatgggtgacccagatgctaaagaaggtttacccgaaaagcttgaaacccgagaaatggaaaaagttcgtgcccttcaaggagtttccgttgagtcttcctgtagcaaaactcgtctctggagaaatcgaagtgccgatgaacatgaatgatcatatagattcacctgggagtgtgattggagaagttagaaagcaaattcccccggaaatgttcgatctttctaagcttgtgtgtgggacttatatagacagtaggttacttgtacttaggtgtgtaaatggttcagcattgttgttcccaaggtccagcttggaccataagtctatgtagccatttggctcacgttcttatgtatatagcaaatgaatcattctttttggggctaacccgttgtagtctctgtgtatgttgtggtaatgtatgcttttggcttttaggtcgtaataacggctttttagtaaaagctttatactaaaaaaaaaaaaaaaaaagggcggccgctctagaggatccaagcttacgtacgcgtgcatgcggcgtcatagtctaactatag

SEQ ID NO: 122583 - DNA, 942 bp, Arabidopsis thaliana
  unsure (1)..(942): unsure at all n locations
nnnnnnnnnnnnnnnnnnnnnnnnnnnnnnnnnnnnnnnnnnnnnnnnnnnnnnnnnnnnnnnnnnnnnnnnnnnnnnnnnnccacgcgtccgataatccgtacactaatgagggatattttgatcggagtcaattacttgcacagccatggtctggctcacacagaactgagattggaaaatgtgcatattagccctgtggatagacatatcaaagtagggattctcggaaatgctgctgactttaacggggatgttccaagtactagcaacgcttacagtaccatggacagacgacaaatgatgatagcatttgacatgagatgtgttggattcatgatggcaaaaatggtacttcaagaattgatggatccattaatctttgcgaaattgaagtctttcctggcaaaggggaatgatccttcctcgctgcgggagttttttgtgacgacgctcaatacaaactctgaatctggaaataccggagtgcaaatacttgatagaaactggggagcaggttggcaccttttatctttgttaattgctaccagaccttctgaaagaataagttgcttggatgctcttaagcatccctttctatgtggaccaagatggcgtgttgccccatcaatggatatcatcagatggggtcttggatcaaccgcagtaaagatttcagaagaatacatttaccgcatgcctcagcgccaaagacttgcccacttcattggactgatggagatgctaaatccttatccaaagccaaacgtatgaattaccacctctcatgattcttgagctttgatatatgtattgcttattctagtgtggtatgtgtgaaaacaaaattgttttaatctcttgtttaacacagtgttggttggagctcttaccgggaagatggcgtcttttatactcaactggaaagcacataggtctaac

SEQ ID NO: 122584 - DNA, 535 bp, Arabidopsis thaliana
  unsure (1)..(535): unsure at all n locations
atctccctctccatctctctgctcgcttgtgacagtaaacatgggagctctcaattatctttctgagtatttctctaaccatttctacgtctcaatacgaaaacggaagaaacgtaaagtcatgcagacggtgaatattaaggtgaagatcgactgtgacggatgcgaacgcaaaatcaagaacgctgtttcctccatcaaaggagcaaaatcagtggaagtgaacagaaagatgcacaaagtaacggtgagtggctacgttgatcccaagaaagtgctgaagacagtncagagcactggggaaaaaggaagctgagctgtggccgtatgttccatacacaatggtggcttatccatatgccgccgggagctttcggcaaagagggcccccgccggggtttttttaaggaaagttcgggagcaggctcaaggcgnaccgtggaaagtccttccgggttaagcctcatggcccctcctcttttgcgncgggnaccccttaacggcttccccgttttttgntnagtttggttgcatt

SEQ ID NO: 122585 - DNA, 504 bp, Arabidopsis thaliana
  unsure (1)..(504): unsure at all n locations
ggaagaaacgtaagtatgcagacgggaatataagggaagatcgactggacggatgcaaccaaataagaacgctgtttctcataaaggagcaaaatcagtggaagtgaacagaaagatgcacaaagtaacggtgagtggctacgttgatcccaagaaagtgctgaagacagtgcagagcactgggaaaaagaaagctgagctgtggccgtatgttccatacacaaatgggtggcttactccatatgcccgcccggagcttacgacaagagagccccgccgggttttgtggggaagtcggagcaggctcaggcgcagccgggaagtactgacgataagctcatgtccctctttagcgacgagaaccctaacgcctgcaccgttatgtgaataagtatagatngcatgagccgatgttataatttgtaatgtataacgttttatgaagttaaagtactggaaccttttttgttactgtattatgtgagaagcaacgcaanatatagt

SEQ ID NO: 122586 - DNA, 661 bp, Arabidopsis thaliana
ggtcaagtcaatatgttaggagtttatatgcagagatcttggattatctgggtcgtttcttgtttgttggtcgttcctatttacatctttgccacgccggttctgagactactcggtcaagcagaggagatcgctgttccagctggacagttcactcttctaaccataccacagctcttctcactggcctttaatttcccaacctctaagttccttcaagcacagagcaaagtggttgctattgcttggattggatttgtggctctttcccttcacgttattatgccctggttgtttataatcgagtttggttgggggacaaatggtgctgctttggcgtttaatattacaaactggggaactgcaattgctcaaattgtttatgtgattggttggtgtaatgaaggctggtctggtttatcttggttggcttttaaagagatttggcccataaaagattttaaaacttcaaaaacagaggtgttgttatgcttcttctcttgtgcattaaggccgtttatgatggtatcctagaatctacatatttgccatatcttattcgttaataaagatattttctttggtgcaaaaaataaaaaaaaaaaaaacccaaaagagcgaccgctctagaggatccaagcttacgtacgcgtgcgtgcga

SEQ ID NO: 122587 - DNA, 794 bp, Arabidopsis thaliana
ccaacctctaagttccttcaagcacagagcaaagtggttgctattgcttggattggatttgtggctctttcccttcacgttattatgctctggttgtttataatcgagtttggttgggggacaaatggtgctgctttggcgtttaatattacaaactggggaactgcaattgctcaaattgtttatgtgattggttggtgtaatgaaggctggactggtttatcttggttggcttttaaagagatttgggctttcgttagactctccattgcatctgctgttatgctttgtcttgagatctggtatatgatgagtatcattgttcttactggccgtcttgacaatgcagttatcgctgttgattccctttctatatgcatgaatatcaacggcttggaggctatgttattcatcggaataaatgcagctataagtgtccgtgtatccaatgagcttggcctaggccgtccacgagcagctaagtactcttgtctatgtcacggtcttccagtctctcctcattggtcttgtctttatggtggctatcatcatagccagagaccattttgctatcatcttcacaagcagtaaagtacttcagcgtgcagtgtctaagctagcttatcttcttggtataaccatggttctcaacagtgtgcagccggttgtttctggtgtggctgttggaggcggttggcaaggcttagtggcctatatcaacttgggctgttactacatttttggccttccctttggatatcttcttggttacattgcaaactttggagtgatgg

SEQ ID NO: 122588 - DNA, 591 bp, Arabidopsis thaliana
ctgtgccgtcctgtggaaaacatcgttctttcaccaacaatggcgaagaagcgagatcgaattgtcaacactcaaccttttatctccgatgacgcctccgtcgcttcttccaggaaacgatcaaaggttccaaaaacccatcagaaacaggaaaagttgattgaagctggtatgagcgagaagatcatgaaacaagctcttgcccaacaaaaggaagttgctgatgaagagaacgccgagagaaaccctagtagcgccgcttttgctgttgccggcgctgcgactgctggagaggagcagaaaattctggaggaggaagaagatgatattgatgattttgatggaacctttgaaaaccagagccaattcgataagcaagaggagattaatgaggatgatgagaagttgtttgagtcattcttaaataagaatgctcctcctcaacgtacgcttactgatatcattatcaagaagctcaaagataaggatgctgacttagctgaagaagagcgtcccgatcctaaaatggaccctgcaataactaagttatataaaggtgttggcaagtttatgagtgagtatcgtgggaaa

SEQ ID NO: 122589 - DNA, 662 bp, Arabidopsis thaliana
tctactacgactcactatatggaaagctggtccgcctgcaggtaccggtccggaattcccgggtcgacccacgcgtccgcggacgcgtggggtctcaaaaacactcggcataaaattcagctctttaagaaaaaaattcagaggaaaattaaaaaaagtggatataatagagaaaaaggtaaaggaaaggaatagtgagagagagagagggagagatggtcttcttgtttagaacatgttgtttccaattattctaagaatggcgttttaggtaaatgatcacagcttattacagatggaagagaagctgactcaatttgtggtttagatttgtcaaagaggatcgtgtggaatctgaaagttttcaattttcactaaaaataggattagagttaaaaaggaggaagaagaaatggggaaacacaaatctttcagaagcaaagcagtgcactttgtcaccgatctcaccgctggtcttcttaatcccatctctgataaaccctcctccgctcatcctcctcctcctcttccggatgaggaagatgagtctaagagaaatcagctagagtctacaactgctgagcagcctaaggatttggttgacgaaccagacacttcttctttctctgcattccttggttcactgttatcttcagatccca

SEQ ID NO: 122590 - DNA, 1243 bp, Arabidopsis thaliana
tcgcatttattaacatttttatctctctccctattaaattattttattctctcttagcaacattcatcaaccagagcagattcactatcatcatcttataacacatcttcttcctctaaagtttattttcttaaacttattacaaaaaacatgatcttcaaaagttgatttaatctctttttatccatcttcttcttcatttctcaatatcaaacttttctttttttgtaagcttaacataaaccctaatattttcttgatttttttcaagaaaataaaaacataaagatgcttgaagttagatcaatggatatgactccaaaatcaccagaacccgaatccgaaactccgacccggatccaaccagctaaaccaatctctttcagtaacggaatcatcaaacgccaccaccaccaccaccacaacaacaacaaagtcacttacaaagaatgtctcaagaaccacgcggcggcgattggtggtcacgcgcttgacggttgcggcgaatttatgccgtctccttcgtcaacaccttccgatccaacttctctcaagtgtgcagcttgtggttgtcaccgtaacttccaccgttctcagatctaaacttcgccgccgcggctaaccatctctccgccacgcctggctcgaggaagcgattcaggacgaagtttagctcaaatcagaaagagaagatgcatgaattcgccgatcgaatcggttggaagattcagaaacgtgacgaagacgaagttcgtgatttttgccgtgagatcggagttgataaaggtgttctcaaagtttggatgcataataacaaaaactccttcaaattctccggcggaggagcaaccaccgtgcagagaaacgataacggtatcggcggcgagaacagtaacgatgatggagttcgcggtttagctaacgacggtgacggtggtggtgggagatttgagagtgatagtggaggagctgatggtggcggaaacgtaaacgcctcgtcgtctccgtcgtgaagaagaaaacatcatgtcgttttgcagggaaagagttataataatggaagcttaagctttgtttttagctttagatcatagagagtaagcactggtattattatcgttaatacgttttattcatattaattaaactcttttagctctttaaaaaaaaaaaaaaaagggaggccgctctagaggatccaagcttacgtacgcgtgcatgcgacgtcatagttcttctatag

SEQ ID NO: 122591 - DNA, 877 bp, Arabidopsis thaliana
  unsure (1)..(877): unsure at all n locations
cccaaacgtccggaaacatgagaccaactcaagttggttgttcgtgtaataaataaaaattgaatctttcgactaaaacaaagtttatcttcttcatcatcttatgtgacaagaacgaacaatcctccattgacccaaatttcgaaaatgtcaacgaatcttcttcgtcttattctcctagtcatcactttatctatcacttcatctctgtcaactccgtcgccggctgattctcctccttatctatggccgttaccggcggagttttcgttcggaaacgaaacgctctcggtggatcccaccgtgactctaatcgtagctggaaatggcggtggatctctgattattagagctgcgtttgataggtatatgggtataagctttaaacacgcttctggtagaggttctctattgtcgaggattagatttctgaaaatggttgagtatgatatcacttctttgaagatccgttgttcattctgattctgaggagcttcaattgggtgtggatgagagttatacattgatggtgtcgaagaagaacgagcaatcgattgttggagcagccacgatcgaggctaatacagtttatggtgcacttagaggattggagacatttagccagtttgtgtgcctttaattatataaccaaatctgtgcaaatatataaagcaccatggtatattcaagataaacctagatttggataccgcggtctgctgatagatacatcaaggcattaatttaccaattgatgttattaagcaaataatcggatccatgtcctttgccaaaccttaatgtcctgcattggacattgtagncgggnaannatttnccnttnaaacncctncatnncccnaatttttgggaagng

SEQ ID NO: 122592 - DNA, 390 bp, Arabidopsis thaliana
cttaaaacttcaaacacttgagaaaaaagcttttgatttcacatcttaatctaacaagtcaaacacttttcaaaccacaaaattcgtcaaagctctgaaacaaataaacattttttaatttctccctttttaatggaaatctcttctttcccatttccatacctacaagacgacgagtgttcccatttccttggtctatttcaagacatggactcttctccttctactttcggattagaaggttttaatagcaacgacaataatactaatcaaaagaaacgcccaagaaaagacgacgaaggcggtggtggtggcggcggaggaacagaagttctaggagctgttaatggtaataataaggctgcttttggagatatactcgcgacgctt

SEQ ID NO: 122593 - DNA, 698 bp, Arabidopsis thaliana
  unsure (1)..(698): unsure at all n locations
aattttagcttcattccttcttttgctctgatcaaagtcttctccttcccttctctctctctttcctcctctgcacatttctgggttcttctcttcttatgctctgtttcttttaagacacagaagaaacagtacagagttgagattttcttaaacaaaagtgaaaagagaagaaacaagtgacagctcaaacggacaaaaaccactcttgggtctttcttgcttctgattctttctcttctctaatagaagaaaacatctagaagctaaaaaaatgtcggaaggagtagaagcgatagtagcaaatgacaacggaacagatcaggtaaacggaaaccgtaccgggaaagataacgaagaacacgacggctccaccggttctaacctaagcaatttcctatggcacggtggctctgtctgggacgcttggttcagctgcgcatctaaccaagtggctcaagtgttattgacattaccgtactcgtttagtcaactaggaatgttatcaggaataggacttcagatcttctatggtttactaggaagctggactgctgatctcatctctgttctcttacgtcgaatacagagctcgtaaagaataacgaaggcagaagctttcaaaaaccacgtcattcaggggtttgaaatgcccttgatgggacttncntnggtcntacctggtaagaccnaggnct

SEQ ID NO: 122594 - DNA, 600 bp, Arabidopsis thaliana
  unsure (1)..(600): unsure at all n locations
cnnnnnnnnnnnnnnnnnnnnnnnnnnnnnnnnnnnnnnnnnnnnnnnnnnnnnnnnnnnnnnncaacaatcccacgcgacgtagtctcaaaggtcacagcagcagcagcaacaatcagagcaacaatggagtctgctaaatcaaaaaatcccgatagctaccaaaatatcttgatgatgcgtcacggtgatcgcattgacaaaatcgatccactctggcttgatacagctgcgagaccttgggatcctcctctcgttcaagacggtatggttcgtgcgtttcaaactggtcaacggattcgatctcagatccaatttccgattcaccgtgtcttcgtctctccttttatccgatgtatacagactgcttccgaagtcatcgctgctctctccgccgtcgatttcgatcctaacgctacttcgtccaaagacgtcacttcaatcgataaatataagcttaaggtttccattgaatttggtttgagtgagatgctgaattcaattgctattaagcctgagattgctcccaaagatgggaaattcgatttcatgatttcagaacttgaagcgatttttcctgatggaatggttgatcatagt

SEQ ID NO: 122595 - DNA, 569 bp, Arabidopsis thaliana
atgatactccagctctctacgactcactattgggaaagctggtccgcctgcaggtaccggtccggaattcccgggtcgacccacgcgtccgcgggtcaattcacatacttgtttaacggcaacaaaaacctaccgataaatgctaaactaacgaaatcggatcatagctcgacgaagtctcgatcttttctattctctctttctgggtattcgtgggttttacccagatttcgaaattgaatggcggacgaactggaattgtcgccgttggttccaccgtcgccgatggtcgagccttccgagatcgatctcgaagctggaggacctggtgaacaaattcagtgccgaatctgccttgaaactgatggtagggatttcattgccccatgcaaatgcaaaggaacatcaaagtatgtacatcgtgattgcttggatcattggagagctataaaggaaggtttcgcgtttgcgcactgcacaacttgcaaggctccatattatctgagagttcacagtgctggagataggaaatggcggacattgaagtttcgcttctttgttactcgaga

SEQ ID NO: 122596 - DNA, 559 bp, Arabidopsis thaliana
  unsure (1)..(559): unsure at all n locations
nnnnnnnnnnnnnnnnnnnnnnnnnnnnnnnnnnnnnnnnnnnnnnnnnnnnnnnnnnnnnnnnnnnnnnnnnnnccacgcgtgcgcccacgcgtncgcccacgcgtncgagtactgagaatcttggagaagtgcttcggggtgaccggattgagaatgccccatactcgtttaaaatgcgggaggcacatatgtgcaatattctcggccgggtcactcttgatgccaagacagctaaagcgtttaaagaaaagatcgatgatgagtaccgggtcaacatgatcctcgacaaccttcctctggttgttccaattgaaagagtcgaccagggttctccctctgttgtttatcagcttgggtatcatgttggtcttaaaggccagtacgaggggagcacagagcagaagttctttatgcacaatcacttggcatttacagcccgctatcacagagatatcccaactgatgctgcaagaatcgtgggatttgagggtaaacctttcgtgtgaacctgagtttgagggagagtggagggagaagacccgtctgacaacttggg

SEQ ID NO: 122597 - DNA, 524 bp, Arabidopsis thaliana
tcatacgactcactttagggaaagctgctacgcctgcaggtaccggtccggaattcccgggtcgacccacgcgtccgcttccttcgtgtggaacagccatggctatggagtttctgaggagcagtagaagaatattggaatcttctggatgcgcgatcgctttgatttttctgctcttcatccatggagctcactcattctatctcccaggtgttgctcctcaggatttcgagaagggtgatgagctgaaggtgaaagtgaataaattaacttccataaagactcagcttccatactcgtattactcccttcctttttgtcgccctagcaagattgtggacagtactgagaatcttggagaagtgcttcggggtgaccggattgagaatgccccatactcgtttaaaatgcgggaggcacaaatgtgcaatattctcggccgggtcactcttgatgccaagacagctaaagcgtttaaagaaaagatcgatgatgagtaccgcgtcaacatgatcctctacaac

SEQ ID NO: 122598 - DNA, 769 bp, Arabidopsis thaliana
atacgactcactttagggaaagctcgtacgcctgcaggtaccggtccggaattcccgggtcgacccacgcggttcgaagctattcgaatgcgtaacagtcacaacaagtatctaacagcagacgacgatgaagaaaccgtaactcaaaaccgtaacggatctaccaaaaacgctcgatggaccgtcgaaccggttcgtgattctttccatgttattcgtcttaaaagctggtacggtaagtacttaaccgcttctaacgagcggttcttgctcggggctacggggaagaaagtgattcagttgaaactgagtcgggttgattcgtctgttgagtgggaaccgcttagagaagggtctaagattaagcttaggactagatctggtaactatttacgaggtaatggtggtcttcctccttggagaaactcggtcacacacgacgttcctcatttgtctgctactcaggattcgatttcttgggatgttgatgttgttgagatcttgactgattccgaattcaagacggagtctgcgaaagcgccgccaccgaagacgacgtctccaccgccgcatcggagaccgacgagttcgccgttgtcggctgagtctccaaggacttcgtcttctctttcagacagatccgattcagattcggttgagtcttcgcctaaatctgatggacgaaccatatattaccatgtcgctgactaggaaggacacgtggaagatgaaacaactgttggatatgctttcacgtttaaaggaaata

SEQ ID NO: 122599 - DNA, 384 bp, Arabidopsis thaliana
tttccgctcatttccccttctctgttgttacagaagtcgacggcgagtagcttcaaccaaaaagaaacaccagtatctgtctcagcaatggaatttttccagaaagcaaaagctattcgaatgcgtaacagtcacaacaagtatctaacagcagacgacgatgaagaaaccgtaactcaaaaccgtaacggatctaccaaaaacgctcgatggaccgtcgaaccggttcgtgattctttccatgttattcgtcttaaaagctgttacggtaagtacttaaccgcttctaacgagcggttcttgctcggggctacggggaagaaagtgattcagttgaaactgagtcgggttgattcgtctgttgagtgggaaccgcttagagaa

SEQ ID NO: 122600 - DNA, 635 bp, Arabidopsis thaliana
  unsure (1)..(635): unsure at all n locations
nnnnnnnnnnnnnnnnnnnnnnnnnnnnnnnnnnnnnnnnnnnnnnnnnnnnnnnnnnnnnnccacgcgtccgatttctagcaaaacaattctctcttttgtcttgaagataagtttcacaaaaaggtctgcttcgcctcttctacgacgttgcagaaactaagaagagatgggtcttctctccaacagaatcgatagatcgagtctgaaacctggagatcatatctactcctggaggactgcttacatctatgcccatcacggcatctatgttggagatgatagagtcatccatttcactagacgaggccaagaagttggaaccgggactgttctagatctcatactagtcagctcaggtccatcccgaaaccacacccactgtccaacctgtgttccacctaacgaaggtcacggtgttgtttcctcatgccttaactgtttcctagccggtggtgtcttgtaccggtttgagtactcagtcaacgctgctcacttcctcgtcaaagccagaggaggaacttgcacactcgctgtcgctgaccctaatgagattgttgttcaccgggccaaacacctccttcaaaacggatttggatgttatgacggtttcaagaacaactgtgaggatttcg

SEQ ID NO: 122601 - DNA, 797 bp, Arabidopsis thaliana
ggccccccctcgaggtcgacggtatcgataagcttgatatcgaattcgcggccccgggcaagcgaagccagcattacttagctactgtggatgtggaaccgagttcatccacatactcgagtgttatccacagattaccaatgccttaccttgaagatgaacttcatcactcaggctggaactcatgtagctcttgctatggtgattcttcttgcgagagacgttatctcatcttgccttctcttctgtctggtcgtatttacgtgatcgatacgaaaacaaacccgagggaaccatctttgcacaaattcgtggaccctgcagaggttttggagaagacggggttggcttatccgcatcagcctcattgcttagcttccggagacgttcttgtgtcttgtcttggagacgaagatggaaacgcagaaggcagtgggtttctcttacttgattccgagtttaacatcaaaggaaggtgggagaaggatggaaacagtcctttgtatgggtatgatttctggtaccaacctcggcataagacgatgatcagtacctcatggggagccccggccgcgtttaccaaaggatttgacctcaaagacgtctctgatggcttatatggaaagcatctacatgtctatagctggccccaaggagaattgaaacagattcttgaccttggtgataccggacttttacccttagaggtaagattcttgcatgagccggataaagctacgggatttgcagggtgtgcgttgtcgaatactgcaataaaatttttcaagaaccattat

SEQ ID NO: 122602 - DNA, 537 bp, Arabidopsis thaliana
  unsure (1)..(537): unsure at all n locations
nnnnnnnnnnnnnnnnnnnnnatcttggttgaaagatagagacgaaattggaagcgtcgatgaacaaccacgagggagactgatgaacgagcgggccggtttatgcgacacccctcctcgcgatgtctggtccacgagaaaaactcatctatgttgctgccatatacactggaaccgggcaagcgaagccagattacttagctactgtggatgtggaaccgagttcatccacatactcgagtgttatccacagattaccaatgccttaccttgaagatgaacttcatcactcaggctggaactcatgtagctcttgctatggtgattcttcttgcgagagacgttatctcatcttgccttctcttctgtctggtcgtatttacgtgatcgatacgaaaacaaacccgagggaaccatctttgcacaaattcgtggaccctgcagaggttttggagaagacggggttggcttatccgcatcagcctcattgcttagcttccggagacgttcttgtgtcttgtcttggagacgaagatg

SEQ ID NO: 122603 - DNA, 668 bp, Arabidopsis thaliana
cgggtcgacacaagcctctatactgatgcgagatgacgacagaagtagaagaaaccaaagcgaaatcaaaaagctcagcaattttccagatttctctaattgacgatggcgctttgtgctactactcaaaggactatccgtatagcggcgacgctccggcgtgttgctcgacctttcgctactgacgcggtggttgagtcggattacaagcgtggtgagatcggtaaggtctccggaatcccagaggagcatctttctcgcaaggtgataatatactcacctgctagaacagctacccagtcaggatctggaaaactcggaaaatggaagattaacttcgtctccaccttaaagtgggagaatccgttgatgggatggacttctacaggtgacccctatgctaatgttggtgactctgctcttgcttttgattctgaagaagctgctaagtcttttgctgagcgtcatggttgggattataaggtcaagaagcccaacacaccattattgaaggtcaagttcttactcggacaactttcaagtggaaaggcaatcctcaaccagaaaactgatgttacaccttcttccaattccctctctttctcactcttgcttataaaatttcatcagaagaaatctaattttgttttaacgtgctctgtttctga

SEQ ID NO: 122604 - DNA, 483 bp, Arabidopsis thaliana
gtggacttctacaggtgacccctatgctaatgttggtgactctgctcttgcttttgattctgaagaagctgctaagtcttttgctgagcgtcatggttgggattataaggtcaagaagcccaacacaccattattgaaggtcaagtcttactcggacaacttcaagtggaaaggcaatcctcaaccagaaaactgatgttacaccttcttccaattcttctcgagcaaaagaagaaacctcatttgatattaattctcatgtttctttgttattttagcatctgtgagctttttggttgaaaagaaccattatccatggctatgtttacttattccaataatatgatgatgatgatgaaacacactcctttgatttttcttcatagtttaaaaaaaaaaaaccaacgcggccgctctagaggatccaagcttacgtacgcgtgcatgcgaggtcatagtctagtatagttcagttaaatcaag

SEQ ID NO: 122605 - DNA, 462 bp, Arabidopsis thaliana
agcccaagcgtccgcaaaatccatggcttcagtgaattctcgaagtggtttctgcaactcaaactcaacattctacagcaaacgaacaccaatcccactcccgccaaatccatcactcgacgtcactactttcatttcttcacaagctcatcgtggccgtatcgccttcatcgacgcttccacaggtcaaaacctcaccttcaccgagctatggcgtgccgtggaatccgtcgccgattgtctctccgagatagggattcgcaaaggccacgtcgtcctcctcctctccccaaactcaattttattccccgtcgtttgtctctccgtcatgtcactaggcgcaatcatcaccaccacgaatccactcaacacttcaaacgagatcgctaaacagattaaggattcaaatccagtcctcgccttcaccacatcgcagcttctcccgaaaatctccgccgccgc

SEQ ID NO: 122606 - DNA, 401 bp, Arabidopsis thaliana
atatataaaaaaaaaaaagtgagagagagagcaaatctgtgtgatggaagttgctcttgagtttgggattatttatcttttcaatatcatttgatgaagaaggatggtgagatgggaagaagtgatgtcaggaggagtaggagatgaaagagagacaacgttggagtggtgaagaagatgcattgttacgtgcttacgttagacagttcggtccgagagaatggcatcttgtgtctgagcgtatgaacaaacctttgaaccgtgacgccaagtcttgtttagagagatggaagaattatcttaagccagggatcaagaaagggtctttgacagaggaagagcagaggcttgtgatccgtcttcaggagaaacacggcaacaagtggaagaagattgctgct

SEQ ID NO: 122607 - DNA, 441 bp, Arabidopsis thaliana
  unsure (1)..(441): unsure at all n locations
aaaaagtaatatcacaaatcaaaaactaaacattgagaatgaactcagtgtgtatctccagctgcatcaacgatgcacacgaccctcgcgtgccggttcgtcctgtacgtgcctcctacgtgaatctctataagtggccggagtccgacgccgagttcgtcaggtccgtacgtcgtggaggcggcctaccggcggcccgtgtagttgatagcatatcttgtcgacagatgtatctccgtagctacactttctctcgggaagacgacgagagcaaatcggagaaggtgtcgtctgggacgcagacgtcgtgtctaaggggagagtttaagggaacagcgttcgtctcgacggtaagggttaaggagggaaatttggaatcatcactcgttttggggttcaaannccgngttttntnttnttaaaaanagggggtttttttgg

SEQ ID NO: 122608 - DNA, 452 bp, Arabidopsis thaliana
acccacgcgtccgcccacgcgtccgaacgcaaattgggtgttattgttccatggagatctgcacacggctttgttgtgcctccaattttggcggagcatttgctaacctttgaacttgaagcggatgtgaaaaccaacgagtttttcctcgagttcgaagtcaaccgttacgaagtggtgataaaagaatgtggagtactccaactctaagtccttccatttttttggaagactggttgggacgcacttggttgagaacttgagagaagaacaagacagtgatctattgttattgtttcttccacttacctgaatcccacctccagttcctctataacatccatggcacggcacttcttcaatgcgtttttcctaacaaccaccgtttaaaggcggagaaggagatcacgaggtaaagttttttccatagtaatactgttcccacgcgtccg

SEQ ID NO: 122609 - DNA, 1192 bp, Arabidopsis thaliana
  unsure (1)..(1192): unsure at all n locations
aatacgtttctgcaacatcttgtgacttttgggattgtgaagaaggatgatctagctctttataggaaacttgtggttggttcagcttggcgtaaacagatgccaaagcttgctgtttcagttggtttgggcgaccaaatgcctgatatgattgaagagttgataatcaggggacaacagcttgatgcggttcatttcacttttgaagttggtcttgtacacttgttcccncctgttcctttgctcaaagcttatctgagggatgcaaagaaagctacagctttaatcactgatgattccaacaattctggccgatctgcgcatcttgtggcgcgcaaagagcaaccagcacttagaggcagccttaaaatgcattagaagaatacaaacctcgaggaagaattcccccccgggaaccccaagaagaggttggatcagctagagaagaccaaaaccgagaagagaaaaccagccgtgattcccgccaacaagagaacccgagcaagctacagcggtccaatgccaccagccaaagcagggcgtatcacaaacgcttacgtctcctctttcccaccgcctccaccaacattcatcagatcccaaagtcactcacctcaatacggtgtaccagcatacaccacatccccacctaccatctacagcaacaggagccctccataccaatactcacccgaggcggttcatggttcttaccaaacctctccggtcagttatccgacagcatatggtacctactgcagtccggtggctgctccaccccctccagtttaccatcctcacccgcaccaccaccaccatattcagcatgcttactactgattagacaatgacaaaggaaaaaagaagatggtaagtaaccaaccactgatctctggtgtctacgttttgtctctacctcgtttttgttgtaatctctctttttttatatcgtatcatttgtagctaacactctcactctttctggttctgaattagtctacccttgtgtgtttattaatctaaattatacatatctattcactttcctaatgtttcaatcaacgaatttagttcagtacttaatagattcatcttaaaccaaaaaaaaaaaaaaaagnnnnnnnnnnnnnnnnnnnnnnnnnnnnnnnnnnnnnnnnnnnnnnnnnnnnnnnnnnnnnnnnnnnaacggaaa

SEQ ID NO: 122610 - DNA, 519 bp, Arabidopsis thaliana
ctcaatcccactttccgacgaacaaaaacaacatctgaaaaaaatcatgaatccagcagattccgatcatccacagcttccaaacatcaagatccatcaccctccatctccacgtcactctcaccatcaccactcctcatctactccctcctccgccgcaactccaacaccaaccgccggagctcgtcgtaaaatcggagtcgcagttgatctctccgaagaaagctctttcgccgttcgttgggctgtagatcactacatccgtcccggagacgccgttgttcttctccacgtttctccaacctccgtcctcttcggtgccgattggggacctctccctctgaaaactcaaattgaagatccaaacgctcaacctcaacctagtcaagaggattttgatgcttttacttcaaccaaaagttgcggattctagctaaaaccgttgaaggagttaggggttccttataagatcccttttgtgaaagatcatgatatgagagagagattatgtcttgagat

SEQ ID NO: 122611 - DNA, 809 bp, Arabidopsis thaliana
cccacgcgtccgctcaaatggatttactgacttgaacgagccagtccaatgccaagattcagtacctgtttcttcttcttccagggacttatattctctttatggagcaaacatttcacacgtgcaaggccagtgggtggaaaaaaatactagtcaaaatggatggatggttctagaagcagggaacggaaaaagcactccaagagacaagttatgcctgccttcccattcggtacaagttctttctaacagtgcatttcaacctctgggatacccttcaactgaccacagcaagttatcgggcgaaagagcatctttcaaatgtgaagttcgtcaaaggaatcctgaggtttcgtatgatagctatgtggaatcaagtgtggcatcaaatgttccaagcttgaatcatggatatcgcccggaatctgtcagaccttggagccattggatttcatcatgggagaaccgaagtagcagctcagttcagaaacctttgccacttcaagcgaatctattcttgacttttaatactcaagtacgggcagactcaagtgcagagatgagaagccgtgattctaacgggcttaaccaaggatttctcttcaattctcggcaggaaaagtgcctttaaattttccatcagtaaactttaaccatcttaacaatggcccaaaaggggcagttactaatggttctttgtgtgagagtgtgatgcatcagagtcttaaaaaccttcaaggaccaaaaaagcaggagtgctcttctggtttgccctggataaaacctaagccccttaacaaaatggaaaa

SEQ ID NO: 122612 - DNA, 439 bp, Arabidopsis thaliana
agtgaaggaagggttaagagagaaaggtaaagtaacaagtctctcgagtttcctttttgctttcccttttgtgtggttcatctctcagtcttcttcttctgctataacgctcttctccatcaccgtataatcgagtttcgattgtctccgacgaagagaagctgacacttctggtttcgtcaatttctactgggataaagctctctactacctttttgctcagagaaaatggtttgattttcgaggatgataaaggcttcaggttgttgtagaggtgtttttgccagccttggtgctggtcatggattttatctgactatcgtatgtgcctttgatgaaactaaataatgccccggggagagttagctatgggctctttagagactgtttgttggcttaagggctgcttggtttatcgcttcttgttatttattatctg

SEQ ID NO: 122613 - DNA, 959 bp, Arabidopsis thaliana
atacgaccctcttagggaaacctggtacgcctgcaggtaccggtccggaatttccgggtcgacccacgcctccgggtcactgaaagtctctgaaaccaccaccaaagagaaaaacagttctttagagagcatcaaagctccgaggaagagagagagagacgctatggaagcattgaactaacacaactctaaatctctaattttacgggtggctctagttctatacattatggggaagtctacccaaaggctgaagaatgtattgccttgcgaaaaaaccttctaaatctagtgggttccaaagacaaagagaggagttggtgagctggaaaagaagtacctggttactttcaaaggggggaagaattaagatgtgggatccagatctttcatctttctggaggtgcagagaccaatacccgttgatagaaagggggggttggtagagactcaaaatggaggacccggaagaaacctcagatggatgaaatggaaccttccctgagggaaatgaaccagaatcttcagattggtggcccttggtccaagatcattcacttatccgatgccgaaagaatcccacccagagattggcggttccttcaggggaccaaccttggcaaaccctccgaaggctaccctggaaacaagaaacctaccggccagggctttggccagaagcttcctccttgtatcaccaaaggggttccttggccacccctttgatccctccaatccaactctaatctggacctgggtaagaacacctggacaccctctggctcttggaaccaattcctcacccgagagaactataggcgaaaccttcacaaggctcttaccgggctgggttcctaacccaaaagagggcgctaagcctcgctcaacttgaagtcctcaccaccactcttgggttgaaaccaaccggttccagagttaacccgtcaagagccccctgt

SEQ ID NO: 122614 - DNA, 814 bp, Arabidopsis thaliana
  unsure (1)..(814): unsure at all n locations
cacagatcttttacagagaatcttgtaagaagaaagaagatgattgagaggtgtttaggagcttaccggtgccggagaatccaaagagctttacgccaattaaaggtaacgattctctgtcttcttcttaccgttgttgtcctacgtagcacaatcggcgccggtaaattcggaactccggagcaagatcttgacgagatccgtcaacatttccacgcacgcaaacgaggtgagcctcaccgtgtcctcgaagaaattcagaccggaggagattcttcttccggtgacggtggaggtaattccggtgggagtaataactacgagacgtttgacatcaacaagattttcgttgacgaaggtgaagaagagaaacccgacccgaataaaccttacactctcggacccaagatatcagattgggatgagcagagatctgattggttagctaagaaccctagcttccctaatttcatcggacctaacaagccacgtgttcttttggtgactggttcggcgccaaaaccatgtgagaatcctgtcggtgatcattacctcttgaaatcgatcaagaacaagatcgnttactgtaggttacatggggatccgagatcttctncaacaatggctctttctncgatgcaagaatggctggttttttggggnaaaggttccattgattanggaagntttttgttgtcacaatcctgaggttnaggttnttttggtggntgggaaggnntncnatngttcaaggaatggntttnaggttccnttgggggggtnaaagntcnancttggggttcatggttgntta

SEQ ID NO: 122615 - DNA, 384 bp, Arabidopsis thaliana
aaacattttgagaaaccaaagaagaagaagaagaagaagaacaagcagaagctaaagaagaagacttgaacttgagagatggagcgcagacagtcatatgtgcttgtcgcgctcattggattgcttctcttgacagatattgtcattgcacagagcgatggcggcaaaggcaacggtaacaatggcaaggggaacgaggtacaagtagacaagggtaaaggagataatggcaaaagtaacggtaacggtccaaaggataaagaacaggagaagaaggacaaggtgaaggcagccatggacaagaaggagaaggagataatggataaggaggaataggagaagaaggataaggaaaggaaggaaacggagatgaaggataaactg

SEQ ID NO: 122616 - DNA, 531 bp, Arabidopsis thaliana
gttctagatcgcgagcggccacccttttttttttttttttttttttttttttttttttttttttttttttcaacaatggaaacttgcagataattttcgaataagaacagaggaaacgtgtctgattcgaagatacgagaagctataatctgtcaaaagagcaagaacagttgaaaacaaaatcacatcgactagtacaaaggattcttttaggcgactgggatcatcgcagggtaatctacggctgtgagtggtgcatctgctacgagagcagccggggcagcaacctgagcaggtgcatagatggcctcttcttctttaggagaatgaatgatcacaacatcaggcaatggtgtctttggtcctgatatgcccttagggtcccaatcaagcataaccttcaccttgattcccaacacaccttgtctaagcaaaacatgtctcactgcagagtctatgtattccttagttggttgaccagatgacaccatgtagccatctttgaacttcatagacttggctctggcagca

SEQ ID NO: 122617 - DNA, 466 bp, Arabidopsis thaliana
  unsure (1)..(466): unsure at all n locations
aaccagaatcttttcctctttctctaatcatatcaaaagctcccttaaccatctctctatagctgcatatatatatataagcaaaatctgttctcttcactagattacaaaaccaggcaccaaaaaaataaaaacttgtatttttgttttctgggatctctctaatggagcaacagcaacaacaacaactaccttctactactactagacccaagcccaagctactaaaccggctcaatacctacgtcggttcgagccgggttggcaaacggttcaaactcgccgaacgtaattcaactttcacgacggagctccgtgctggtaccgccactttcttaaccatggcttatatcctcgccgtcaacgcttcaatcctttctgatccgggggganttgcccngttccgatnganccccaatggcaaaccagggtgacctcgagngacggacgggnncgntaaccaaca

SEQ ID NO: 122618 - DNA, 368 bp, Arabidopsis thaliana
ccgtcgttggctaaatcgctctggttgccaactcgatcatcatcttcttctacccactttctctggctgctctccgtatctaggagcgccctcagatctgtgcttaattctccggtaacattaccggcatcactgggattgctgatctggaaccgctgtgaaattttaggttttctctgagaagacaggcaagtttaacgatggcggcgaagacggccagatcaaaagctacgccgacgaaggaaaatggtgtcagagtcgaggaaggattgagtctgttcaagtctgataagttcgatgctgatgcttatgtgcaatccaaatgttctatcaacgagaaggatataaagcagttatgctcgtatcta

SEQ ID NO: 122619 - DNA, 589 bp, Arabidopsis thaliana
cggacgcgtgggcggacgcgtgggcggacgcgtgggcggacgcgtgggcggacgcgtgggcggacgcgtgggcttttgttctttgtcgcttcaattcaacgcttattcctaaattcgattttgcgttgtcaaattccttaaatttcgttacaaaggtttgatatttccgatgagatctccagcaaagacgatgccgtcgatgtcaccttcttcagtttccacggagaaatctccacctccgtcagatacttcaatggctatagtagctttcgataactccactactcacttctcttcttctccatcgccgccacattctcttgatcattccagtgaatcggagaaggaagatgcgaaaagtaaacccgagagtagaagaaacaagaatcctggaaaggttgaggaaactccatctccgattgtggtggttcataatcacaatcgctctgtgaaagaagtggttccgacgagaaagagtgcgagagttggttctgggagaagtagtggccaacgatctggagctgtttcggctattttgagaaggtctaggagagaagatgtggtaaagttttcagctttagggtttcgg

SEQ ID NO: 122620 - DNA, 629 bp, Arabidopsis thaliana
  unsure (1)..(629): unsure at all n locations
cnnnnnnnnnnnnnnnnnnnnnnnnnnnnnnnnnnnnnnnnnnnnnnnnnnnnnnnnnnnnnnnnnnnnnnnccacgcgtgcggagaaagctcataggggacagatgagagcaactggtgatccatacctgcaacattgtgtggagactgcaatgttgttggctgacattggagctaattcgactgttgttgtagctggaattttacatgatactttagacgattcgtttatgagctatgattatattctcagaacttttggatcaggagttgctgatcttgtggaaggggtctctaagctgagccagttaagtaaacttgctcgggagaacaataccgcttgtaaaaccgtagaagcagatcgtttgcacactatgtttcttgcaatggcagacgccagagctgttcttataaagttagctgatcggttacacaacatgatgactctatatgctttgccaccagtgaagcggcaaaggtttgccaaagaaactctagagatatttgcgcctttggctaatcgtttgggaatttctagctggaaagttaagcttgaaaatctgtgttttaagcatctccatcctgatcagcaccatgagatgtccgatatgcttgagggatcattcgat

SEQ ID NO: 122621 - DNA, 635 bp, Arabidopsis thaliana
atgatactccagcgtctctacgactcactattgggaaagctggtccgcctgcaggtaccggtccggaattcccgggtcgatccacgcgtccgggcctgcttaatttcggacgaggatgatttggaaacaatagcaatcatgtttgaggttttcagactatatggacacaagatgccttgcgatgtgttcgagagattcaaaagcgaagatgggaagtttaaggaaagtttagttggggatgttagagggctgctacagctgtacgaagccgcgcatctaggagcaccatctgaagatataatggatgaagccttaagttttgcgcggtatcacttggaaccgttggcaggcaccgaaacaagctctaatctttttaagcatgtagaaaacgttttgtatagagctcgatatcatagcatagagatactagtagcacgacagtacatctctttctatgatcaagaagaagaccaagatgagacgctccttaggttttcaaagctcaatttcaatttttgccagatgcattacgtcaaagagctcaaaattgtcactagatggtggaaggagctaggtatcgcatctaagctaccgtactccataagggagcggaaatgtggagacttatctttggg

SEQ ID NO: 122622 - DNA, 398 bp, Arabidopsis thaliana
gagagagtgtgagtttgattgaggaaagacgacgacgagaacgccggagaattaggattttgattttattttttactctttgtttgttttaatgctaatgggtttttaaaagggttatcgaaaaaatgagtgagtttgtgttgaggttgtctctgtaaagtgttaatggtggtgattttcggaagttagggttttctcggatctgaagagatcaaatcaagattcgaaatttagcattgttgtttgaaatggagtcgagttatgtggtgtttatcttactttcactgatcttacttccgaatcattcactgtggcttgcttctgctaatttggaaggtgatgctttgcatactttgagggttactctagttgatccaaacaatgtcttgcagagctgg

SEQ ID NO: 122623 - DNA, 1291 bp, Arabidopsis thaliana
  unsure (1)..(1291): unsure at all n locations
caaatacaagaaatttaataacctcgagcagttaccctatttaaatcccctctagccttgttttccttctcacacctatgaagcaatggaagaagagagagaccacaatgcatctgagtcgtctctcccatctttgagcaagcagttggagagctcgactcttggaggaagcacggtcgacgttcccgtcgttgatctaagcgtttctcatgaagacttcttggtgcgtgaggtggtgaaagcgagtgaagagtggggagtttttcaggtggttaaccatgggattccaaccgagctgatgcggcagctgcaaatggttggtacgcagtttttcgagctcccggatgctgaaaaggaaaccgtggcgaaagaggaagacttcgaaggatacaagaagaattatctaggaggtataaacaattgggacgaacatctctttcacagactctctccaccctcaattatcaattataaatattggcctaagaatcctcctcaatatagggaggtgacggaggagtatacaaagcatatgaagaggctaacggagaagattcttggttggttatcagagggattagggttacagcgtgaggcgttcacgcaaagtataggtggtgacacggcagagtatgtgcttagggtcaatttctatccgccaactcaagacacggaattagtcataggagcccgcggcgcacagcgatattgggtgcaatcgcactcctcatcccaaatgaggttcctgggccttcaagccttcaaggacgaacaatggttggaccttgactatatcgactccgccgtggttgttatcattggcgatcaactcatgaggatgaccaacgggaggttaaagaacgttcttcacagagcgaagtctgataaggacaaattgaggatttcttggcctgtttttgttgcacctagggctgatatgtccgtnggacctttgccggagtttaccggagacgagaatcctcccaaattcgagactttaatatataatgactatattgaccagaagataagaggctgggcgctcgaagatcttccctgtctactgaaaaccctcaataccttcaataaatggatgatggattgttcaaggggacaatttcttttaatagctttccttttgagggggttctatatgggggacaataaaacctatttcaaggatttaaaataatattggggaaagctaagcgggttggccaaatattcatctgattgatgctatacattcaaatgtaatcgctcctatcctatgtacgtagtgattaacctc

SEQ ID NO: 122624 - DNA, 522 bp, Arabidopsis thaliana
cggctctaattcgactcactttagggaaagctcggcacgcctgcaggtaccggtccggaattcccgggtcgacccacgcgtccgcttcaattaatctcagatttagatcgagagagaccaaattgagagcaagatctttgcattgttcatctcttgctttgtaatgccggtgttcttcatcgtaaccgactcggtggacgcgatcaattgactcgttctcttttggatccttgttgactcggcgagcttggcttaggagacatgggaggtgtgccttcaacgccgcgaaaaaccggtggtgatgatgtttcggtggccgagtacctcattgccacttttgttggggagaaatcgtttcctttagcgtctgatttctggaacaagctacttgagcttccgttgagttctcgctggcctagtgatcgggttcaacaagcccgtgaacttttcgcacaaagtaatggctccactaaggccccttgcaaaactattgattcatctgtcctggtgtttgcaagagct

SEQ ID NO: 122625 - DNA, 357 bp, Arabidopsis thaliana
cggacgcgtgggggaagatcataggagcgcagcattttgctgaagccgctaaagcagctggtgctttcaatccggatatcgactttgcttcaccaatggatggcgatggacatggaagtcacacagcagctattgcagctgggaacaatggtattccagtgaggatgcacggttatgagtttggaaaagcaagcgggatggctcctcgtgcaaggattgctgtttacaaagctctctaccgactttttggacgctttgtagctgatgtggtggctgccattgatcaggctgttcatgatggagtagatattttgagtctctcggttggtccaaacagtcctccagctactacaaaga

SEQ ID NO: 122626 - DNA, 375 bp, Arabidopsis thaliana
agtacataccaagaagaagaagaggcaaagaaaaagatgataacgggaaacgaattctacacggtgatgtgtgccatggcaccactctacttcgccatgttcgtggcttatggatcggtaaagtggtgcaagatcttcacgccggcgcaatgttccggaatcaaccgttttgtctccgttttcgccgtcccagtcctctctttccacttcatctcacaagacaacccttacaaaatggacacaatgttcatcctcgccgacactttgtccaaaatcttcgtcttcgttttgctctctctatgggccgttttcttcaaagccggtggtctcgattggctcatcactctattctcaatcgctactctccctaacact

SEQ ID NO: 122627 - DNA, 499 bp, Arabidopsis thaliana
  unsure (1)..(499): unsure at all n locations
nnnnnnnnnnnnnnnnnnnnnnnnnnnnnnnnnnnnnnnnnnnnnnnnnnnnnnnnnnnnnnnnnccacgcgtccgcggacgcgtgggttcgcgacaatcccagcggctttgcagctcgtgctagaaggaagatatattgttgcagtgattttatctgtgactcatcttgtgctaatggagtatggtgcttcagagattcaagatgacattcctgggtccaatgcttaccttactggactaagtattattggtggagtcactctgtttccttctgctctagagggagcgataatggggccgttgataacgacggtggtgattgctttgaaggatctgtatgcagagtttgttctgaatgagccaaagaagatcaattagttgttattggtttctttaataggagcttcaagtgcttttgccgtggctgctttgtcttggaagaagattcatgtagattagtagagagactcaagtgttgattgaagtgtgtgttttgtg

SEQ ID NO: 122628 - DNA, 591 bp, Arabidopsis thaliana
  unsure (1)..(591): unsure at all n locations
nnnnnnnnnnnnnnnnnnnnnnnnnnnnnnnnnnnnnnnnnnnnnnnnnnnnnnnnnnnnnnnnnnnnnnnccacgcgtccgagctcagagctaaagctttcgtacaactgacactcctccaaaacttccaagaaagcatcagatcccattctccgcaatcatctctcaattttcaaaaaaagcagattaaaacagagattagcgagtgagagagagagacaaagatatagagcttctcgtgaagcaacagtgaagaaaaggaaagtgaatcgccatggatgatcgccttcgcttaagccgcagaatccgctttcttcttcttgcttggctccgtcgttctcgctccggaagaatagagtttatcagacgatttggatacaaggaaataatcaaagcaacagaaggtttccgtaaggttatttacaccaactatcacgggtctgcatacagagctaaattcaaaggtggtgaggttgctttggtcaaagaactcactgctcttgatcttggacgagaaaggtttgatgaggaagttcagcttttgggtcgcttacgtcaccgtcatctccttacacttcgtgggttttgca

SEQ ID NO: 122629 - DNA, 1870 bp, Arabidopsis thaliana
ggggcattccaaaaacttggagatccaactacaaaacgacaagcagtctgatgcaacattgctttttttcttctagtttctgttcgttattggatttaataggtagggtactgtaggaatctttatttaaatcgctgccgtttctttgactctttttctttctttatcctcccaagtaaacaaaacgtaaacaaaacaggtatgaaagctataattgtaaaccacgatcaaatttatggaagcattggtttatacatttctcttagtatccactttagggataatttttttcgctattttttttcgggaaccacctaaaatttcaactaaaaaatgaaataatttttcattatcttcattaacgtaatcagcctccaaatatttggaggctgattacgttaactagtccccgtgttcctcgaatggatctcttagttgttgagagggttgcccaaaggcagtatatagagcatacccagtaaaacttacaagtaacccagatataaagatggcgactagggttgctgtttccattattatagaattgaaagaccacaccggatctatgctaagatcatttatttacaacggaatggtatacaaagtcaacagatcgtaatgaatacaaaataagatttatggctacacaaactgttgaagatagttctagatctggtccaagaagcactactgtagggaagttattgaaaccattgaattccgaatatggtaaagtagctcccggatggggaacgacccctttgatgggtgttgcaatggctctatttgcggtattcctatctattattttggagatttataattcttctgttctactggatggaatttcagtgaattagactgagaagaatcttgaagttctagcttttagctcgatacaaaaaagtaaagtatgcaggtctaacaattttagcctattctcctttggtagttcgaccgcgaaatttttttctgcattgtatatttccggaatatgagtaaagtttatgattggttcgaagaacgtcttgagattcaggcgattgcagatgatataactagtaaatatgttcctccgcatgtcaacatattttattgtctaggcggaattacccttacttgttttttagtacaagtagctacgggatttgctatgactttttattaccgtccaaccgttactgaagcttttgcttctgttcaatatataatgactgaagctaactttggttggttaatccgatcagttcatcgatggtcggcaagtatgatggtcctaatgatgatcctgcacgtatttcgtgtatacctcaccggtggttttaaaaaacctcgcgaattaacttgggttactggtgtggttctgggtgtattgaccgcatcttttggtgtaacaggttattctttaccttgggatcaaattggttattgggcggtcaaaattgtaacaggtgtacctgacgctattccggtaataggatcacctcttgtagaattattacgcggaagtgctagtgttggacaatccactttgactcgtttttatagtttacacacttttgtattacctcttcttacggccgtctttatgttaatgcatttcctaatgatacgtaagcaaggtatttctggtcccttataaataatatagattctaggtatttgtacttacttattacttggtgaaggaacgatagtattttattgctataaatatggattattaaaaaaattaaacatgtatttggatatttcccttcaactccacaatattttattatttttttgacataaaaagtctcaaaaaaattctatgaagagataatggattatgggagtgtgtgacttgaactattgatcgggccgtgca

SEQ ID NO: 122630 - DNA, 1227 bp, Arabidopsis thaliana
  unsure (1)..(1227): unsure at all n locations
ctctatntgcggtattcctatctattattttggagatttataattcttctgttctactggatggaatttcagtgaattagactgagaagaatcttgaagttctagcttttagctcgatacaaaaaagtaaagtatgcaggtctaacaattttagcctattctcctttggtagttcgaccgcgaaatttttttctgcattgtatatttccggaatatgagtgtgtgacttgttagaattgaccctatggatagtacagagaatggggtctgtcatctttatcaagatggttttacttcgtcggatattcattcgagtatctggagcacgaaatagatcaaatagatcacaaagtattcgaactatgattcataacttaaatactcaaacctcgtagccggacttctttccgttctatcttataaactttaataaatcaaaaaaattttctgcttttaaactcttatttggatcaaaggacaaacgcttctttgtattttatgtttttagtcattatagctttttttttattgaataagtgatgatccaatggttctcactcagtgaactttggactttgaaggtttcattaaattatcgtggttctcgtatgaatctgaggtttcaattgattagttaagtagggtcttaacaagagaattcctatcaataataaagaaagcaagaagagatccctgtccccgttccatacaaataccaaataaaaaaagacaataaagataggtaatctagaagattcaagaggcctgtaacgatcaacacaacataaagacgaatgagcttacttgattttttggcatttaaccacaaagacgagctttcgcattttgactctttcatatctttaaataataaaaaataatattgaatgagagacaagtttaaaactttatattccatatctgtttcaatcagtatttgggtctttttttgtttgagctgtacgagatgaaattctcatatacagttcttggagggggagtaaccttggtttacctatctcaataaagtttatgattggttcgaagaacgtcttgagattcaggcgattgcagatgatataactagtaaatatgttcctccgcatgtcaacatattttattgtctaggcggaattacccttacttgttttttagtacaagtagctacgggatttgctatgactttttattaccgtccaaccgttactgaagcttttgcttctgttc

SEQ ID NO: 122631 - DNA, 388 bp, Arabidopsis thaliana
caatatcaaaaactcttgcttctaattctcttcattcatggcttcagagaagagtttcaagaagagaaagatcaccgatgatgtagacggagtaggagtaggaggaggactagaatcccttcccgaagatatcatcgccgacatattctctcgcctaccaatctcctccatagctcggcttatgttcgtttgcagatcttggagatctgttttgactcaacacggtcgtctctcttcttcttcttcttccccgacaaagccatgtcttctccttcactgcgattcgccaatacgcaacggtcttcacttcctcgacctatcagaagaagagaaacgcatcaagaccaagaaattcacattaagattcgcatcttccatgccggagttt

SEQ ID NO: 122632 - DNA, 754 bp, Arabidopsis thaliana
accggtccggaattcccgggtcgacccacgcgttccagatctactaaaatccccaaattcaattttcaaaatttgaactcctagaaaaccctagcctttgcaattgggtgctacatcttccaaatcgttccgggatcgaaatctctcgaattggggacgttgtacattgcacacgatgggcgatttcaacctcgctctcgtgattgtcgcgatcgttgtttgcgtcatcgtattcatctctagcatctatcttctcgtcaactatcagcatccagatgatgcaaaccaggcttatttccccaaattcgtcgttgtttttggcctttctattgctatgatctcgattctcatgttaccggctgatgtggccaatcggcatgcttgtcgacatgctatatacaatggagcttgcaatctcaccttgcccatgaaggatctttggcttgctatttatatcgtggacgctattctcgtgttctttgtcatccccttcgcaatgtttttctatgaaggcgaccaggacaagactcttggaaagaggataaaaagtgccttaatttgggtagttaccacggctgttgtttgtgctctggtgcttggaattttatatggtgtcattggaaaggtggacttttcggtcaggcatttggcttctgccacatccactttccctacttcctggcagtttttaaatacttaaccatgcataggtaacactgctcgccagtgctcagcatttacagttaatcccaca

SEQ ID NO: 122633 - DNA, 529 bp, Arabidopsis thaliana
cggaaaaaaaaaaccagatctacaaaaataaataatccccaaattgaatttcaaatttcgaagcttcaagaaaccctaatttttctcaatctaagctgaggtttgggatctcgtacattgcacgcgatgggagatttcaatctcgctctcgtgattgttgcgatcgtagtttgcgtcattgttttcatctccagtatctacctcctcgtcaactatcagcatccagatgatgcaaaccaggcttatttccccaaattcgttgttgtttttggtttatccattgctatgatctctattctcatgttaccggcggatgtggctaaccggcatgcttgtcgacattcgatttacaacggcgcttgtaatctcaccttacctatgaaggatctttggcttgccgtttacattgttgacgctgtgcttgtcttcttcatcatccccttcgctatgttttttatgaaggttctcagacagggttttgttagaggttaagagtcttttatttggttggatcttttgctgtcgattg

SEQ ID NO: 122634 - DNA, 545 bp, Arabidopsis thaliana
  unsure (1)..(545): unsure at all n locations
caaaaaaaagtgtagaagcagaagaaacccatcatcatcatgatgaactcttctcttctaactccttcttcttcatcttcttcccatatccaaactccatcaacaactttcgaccacgaagacttcctcgatcaaatcttttcctcggccccgtggccctccgtcgtcgatgatgctcatcctcttccctccgatggcttccacggccacgatgtcgactcaaggaatcagccgatcatgatgatgcctttgaatgatggctcctccgtccacgctctttataatggcttctccgtcgccggatctcttcctaactttcatatccctcagggatcgggaggaggattgatgaaccaacaaggacaaacgcaaacgcaaacggaacctcaggcggagcgcgtcttacaggcaactgggggtacgggttggggggttccccaagaagtagggcttaaaatccgggctttgggggggtnaacgaacttgttcctcaaaggtttccccaaagggttcggggaagttgtttttgtttttnaattttnttt

SEQ ID NO: 122635 - DNA, 637 bp, Arabidopsis thaliana
  unsure (1)..(637): unsure at all n locations
gaagaaacccatcatcatcatgatgaactcttctcttctaactccttcttcttcatcttcttcccatatccaaactccatcaacaactttcgaccacgaagacttcctcgatcaaatcttttcctcggccccgtggccctccgccgtcgatgatgctcatcctcttccctccgatggcttccacggccacgatgtcgacccacgcgtccgatggctactgttaagaaaggtaagcctgatcaccgtaagaaggtgcttcctgctgtcattgctaggcagaggaagccttggcgccgaaaggacggtgtcttcatgtatctcgaagataatgctggtgtcattgtcaatcccaagggtgaaatgaaaggatctggctatcactggaccaatcggaaaggagtgtgctgatctgtggccaagaatcgcaagtagctgcgaacgccatcggttaagcaagcttgagatccctaggttttgggttgaacggttagcattatctctatttgggattgtttttggtttttggcctagactttgnaacccnaaacgggtcaaggcctaaaaaccccggttccggnaattgaccnaggttagcnncgaacgggttggnnaaaaaaaaaaaaggggggcggggngc

SEQ ID NO: 122636 - DNA, 618 bp, Arabidopsis thaliana
  unsure (1)..(618): unsure at all n locations
gcnccccnccggtgcnccnctaaactggacccccgctcaggatcnccccccaggtctcctgggctcccttgcacccactgtgaactgtgctgccaacaccggagctaagaacctttacatcatttcggttaaaggaatcaagggtcgtcttaaccgtttcccatcagcgtgtgttggtgatatggttatggctactgttaagaaaggtaagcctgatctccgtaagaaggtgcttcctgctgtcattgttaggcagaggaagccttggcgccgaaaggacggtgtcttcatgtatttcgaagataatgctggtgtcattgtcaatcccaagggtgaaatgaaaggatctgctatcactggaccaatcggaaaggagtgtgctgatctgtggccaagaatcgcaagtgctgcgaacgccatcgtttaagcaagcttgagatctctatgttttgtgttgaacgtttagcattatctctatttgggattgttttttgtttttgtcttagacttttgttatgccttaaagctgattctagttcttataagaaaccttcggttcccggtgccagnttggcaccncagtggtttaaggccaancggaaacttgggatttgatcc

SEQ ID NO: 122637 - DNA, 551 bp, Arabidopsis thaliana
  unsure (1)..(551): unsure at all n locations
atgannnnnnnnnnnnnnnnnnnnnnnnnnnnnnnnnnnnnnnnnnnnnnnnnnnnnnnnnnnnnnnnnnggggggacgacgccacgcgtccctgctactctgcaaccatgtcgaagcgaggaagaggaggaacctctggtaacaagttcaggatgtcactgggtcttccagtggcagccactgtgaactgtgctgacaacaccggagctaagaacctttacatcatttcggttaaaggaatcaagggtcgtcttaaccgtttgccatcagcgtgtgttggtgatatggttatggctactgttaagaaaggtaagcctgatctccgtaagaaggtgcttcctgctgtcattgttaggcagaggaagccttggcgccgaaaggacggtgtcttcatgtatttcgaagataatgctggtgtcattgtcaatcccaagggtgaaatgaaaggatctgctatcactggaccaatcggaaaggagtgtgctgatctgtggccaagaatcgcaagtgctgcgaacgccatcgtttaagcaagcttgagatctctatg

SEQ ID NO: 122638 - DNA, 390 bp, Arabidopsis thaliana
ttgtttcaatgggagtatactcagatggatcctacaatgttccagctggacttatctactccttccccgtaacctgccgtaatggagagtggaccattgttcaaggtttaccgattgatgacgcatcgaggaagaagatggatttgacagcagaggagttgaaggaagagaaggacctcgcttactcatgcctctcttaaaccggtcttttctcagctggtttaatcagtgagagctttgtttcgaataaagaagttttgttataaaatgaacttttaataacctcatgagcttgaggtttagttttcctaatgttcccatgatgtgtcggtactgaaatgctgcccatatataaacaatcattttgataattgaccacttaaggtttcc

SEQ ID NO: 122639 - DNA, 814 bp, Arabidopsis thaliana
  unsure (1)..(814): unsure at all n locations
ctggtacgcctgcaggtaccggtccggaattcccgggtcgacccacgcgtccgcaacaatggcggctgctgcgaaggagatcctacggcgaccagtggcggcaacaataaggctaaccgttccggcgggaggagcgaggccagccccaccggtaggtccggcgctaggtcagtacaggcttaacctgatggctttctgcaaagacttcaacgctaggactcaaaagtacaaaccagacactccgatggccgtgacgataacggcgttcaaggacaactctttcgaattcaccgtcaagtctccgacggtgtcgtggtacatcaagaaagcagctggagtcgataaaggaagcacacgcccgggtcatttgtcggtgacgacgctatcggtgagacacgtgtacgagatcgcgaaggtgaagcagacggatccgttttgtcagtatatgccgttggaatcgatttgcaaatccatcattggtactgctaattctatgggtatcaagatcgttcaggatttggagtgattttagggtttctgatgaaagagtggaatcaatttgcttctggtaaacgtctttgctttgagtagtaaagtataaaccatgaatgaatttcacagattgttttgtgttttggtgttacttccattgtgttgtttgtttcaatggataattgagctccaaaagctttccaaaatcaaaatagatattgagtttgtttaaaaaaaaaaaaaaaaaagnnnnnnnnnnnnnnnnnnnnnnnnnnnnnnnaacggnnnnnnnnnnnnnnnnnnnnnnnnnnnnnnnnnnnnn

SEQ ID NO: 122640 - DNA, 812 bp, Arabidopsis thaliana
  unsure (1)..(812): unsure at all n locations
gattccgggttgaaccccccgtccgaatcagaatcgcaacattggctgcttgttgcaaaggagatcctacggcaaccagtggcggaaacaataaggctacccgttccggcggaaggagcgaggccagccccaccgttaggtccggcgctaggtcagtacaggcttaacctgatggctttctgcaaagacttcatcgctaggatttttaagtacaaaccagacactccgatggccgtgacgataacggcgtacaaggacatctctttcaaattcaccgtcaagtctccgacggtgtcgtggtacatcaagaaagcagctggagtcgatataggaagcccacgccccggtcatttgtcggtgacgacgctatcggtgacacacgtgtccgagatcgcgaaggtgaagcagacggaatccgttttgtcagtatatgccgttggaatcgcttcgccaatccatccatggggactgcttattctatggggatcaagatcggtccagatttggaaggaatttaggggtttttaataaagagtgggatccatttgcttttgggaaacgtcttttcttttaatagtaaagtaaaaaccctggattgattttcccgaatggtccgtggtttgggggtaactcccaatggggtggttggttccaatgaaaaattaggctccaaaggctttccaaattcaaaaaagatattaggttggtttaaanncnnggttcaaaaaaaaaaaaaaaaaaaagggccgcccgctttaaagaatccaggctaaggtaggcgtgcatgcgccgtcaaagctcttctataggtc

SEQ ID NO: 122641 - DNA, 630 bp, Arabidopsis thaliana
  unsure (1)..(630): unsure at all n locations
cnnnnnnnnnnnngcgataaatcctctcttccttctacatctctcttttcctctctttctttctctctctcagccctaagagagaagaaataggctctgctctgcgccttttctacaagaaattcaccaaaaaagcttgaatatttatcggaatcaaagcttgggtttttaatcctggtaaagccatgtcacatatggtgtttcagagcgttgtcgctcccaaacccttatctcctctcaaaccctgtttacctatccctcgtccactcgttactctgccttgtaagctccgtcgtggcttcgttagagcttcttcgtcctcgtttcttgtcgatgattcagtttcaggactcgagcgttgcttacagttaccttctggagttgagttaggcacatcttcctctggctctttctctgcaagtactcagatgtgtcctgtgatgaaaggcaaatttggttcggtaggagctgttactttggaaaaagggaagcttgatatgacccagaagatttcctgagactaaccctgagattgcacctggaggaggggggggaacctttggaaagagtatcaatatgggggggggcaagggaagcgaccatactggggatgatgatgataactttgat

SEQ ID NO: 122642 - DNA, 531 bp, Arabidopsis thaliana
  unsure (1)..(531): unsure at all n locations
cctttttagttagtgactcgagattacataaaatcttctatacactggatccacatctgtttcaatcatggcggagaatggtgaagagaagttacttgctgttgcgcgtcacatagccaaaacacttggccacaatgaatccatggccgatgatatcttacagatcttctccaacttcgacggcagattttctcgcgagaagctcgccgaaggtcaagctggagaagatggatccggagtcgccacactcgagcgagctctaaattcaatagacggtcagatctctcgctttgttgctgcggaccaaccaatttgggctgatcctgcagattcagctgctttcctcgacacaatcgatgagctcgcttgcaatcattagagagtggagtcccatggctttcagagaaacctatcggcaatctgtctaacacgcgccgacggtatgatgcaggaagctatgttccgaatcgaannaagggtcagggcnntntttgagnctgnggctnaggtttttgggttaaatcnnaaggg

SEQ ID NO: 122643 - DNA, 641 bp, Arabidopsis thaliana
gttgatgattactatcaccaagcctgtcttgctaagaaatctgcaggtgcaaaactgaagcatcatttctgtccaaatcatttgagggaccttcaacagcgtgcacggtcgaacaacgagccccatgcttttcttcaggttgaggctcttggtagggttcctttctcttcaatccgcaggcctcgtcctctgcttgaagtggaccctccaaattcagctaaatttggtaatgcagagcataaacctacggataagccccttgatcaagagccgatgcttgcagctagagtgtacattgaggatggtctttgtctcctccttgaagttgatgatatagatcgtttcttggagtttaaccaactccaggacggaggacaccagttgaaacaaagacgacaagcattgttgcagagccttgcggtttcacttcagctcggtgatcccctcgccaagaatgggcaaagccagtctcttgatgattttctctttctaagggttatctctcttccaaagggtcgaaagctacttataaggtatcttcagctaattttccctggcagcgacctaatgcggatagtttgcatggccattttccgtcatttaaggtcattgttcggagtcctttcatctgaccccgatat

SEQ ID NO: 122644 - DNA, 778 bp, Arabidopsis thaliana
ctctagggttggttggtacgcctgcaggtcccggtccggaattcccgggtcgacccacgcgtccgcaacaacaacaaaacttaagggaaagataatcgtttgtctgtgcagagagagagagagagaaaatgaggttgttcgatccatggccagtgttcttcaagagagaatggaaacgttgctggccattcctcaccggtttcgccgtcaccggcgttctcatcaccaagctaaccgccggactcactgaggaagatgctaagaactccaagttcgtccagcaacacagaaggtgattcactgaagcaaaatgtagaagctgacaaggcatatagatttgggactatagtgaatgcttcagctttgaaacatgttcaataacaaagaagatcattctatatactcttttattttctctgagtttcgaaatcagcttttccttttctgaaacttagcaatggaatggtttttgttcacagtatcttattcccatttgtttggaaatggattttatggcctttttgaatcatgcgaacgcacatttcaataaggatttcgttccccaatgaatattaacgtttgttctaataatcctttggttctcaatctcataaaatggaatggagaacctattcccttcaatttgtttggggggacacccaaacctttttccaatagttttgaggggggggggcccgctttttttagaggtatctccaagggttttacgtttccccccgtgcttttggccaaacagccaaaaggcctcttttttttt

SEQ ID NO: 122645 - DNA, 486 bp, Arabidopsis thaliana
cacaatccgatcctctggtgggctctcagaggatgagatccagataccaaagtttagagagaagaccaaagagaacaaaaagagaaaaagagaaagatgaggttgttcgatccatggccagtgttcttcaagagagaatggaaacgttgttggccgtttctcaccggattcgccgttaccggcgttctcatcaccaagctcaccgctggactcactgaggaagacgccaagaactccaagtttgtccaacaacacaggcggtgatctactgacgtgagttgtcgaagctgagaagccgaagcgttcttatggaaactactgagagtgcttcagctttcaaacctgttctaataacatgaaagagaggattatagacactatcaatctctcgtttccttttctctgtgttttcacaactcttgaacagtgcaaattctactctgtttatccaatttttttcctttgcaatgaatttcttcttctctt

SEQ ID NO: 122646 - DNA, 716 bp, Arabidopsis thaliana
ctcaacgaaagccaaattcgaatcggtccacaaaataccaaacgtcgtcggatcaatctacaccacacatattccgatcatcgctccgaaagtccacgtggcggcgtattttaacaagagacacacggagaggaatcagaagacgtcgtactcgataacagtacaaggagtggtcaacgccgacgggatcttcaccgacgtttgtatcggaaacccaggatctctcaccgacgatcagatcctggagaaatcttcgctttcacggcaaagagcggcgcgtgggatgttacgtgacagctggatagttggaaactctgggtttccgttgactgattatcttcttgtaccgtacacgagacagaatctgacgtggacgcagcacgcgtttaacgagagtatcggagagattcaggggattgcgacggctgcgtttgagaggctcaaaggacggtgggcttgtttgcagaaacggacggaggtgaagcttcaggatctgccgtacgtgcttggagcttgttgtgtgttgcataacatttgtgagatgaggaaggaggagatgttgccggagttgaagtttgaggtttttgatgatgtggcggtgccggagaataatatccgatctgctagtgcggttaatacgagggatcatatctctcacaatctcttgcatcgtggacttgccgggacaagaactctataggctctgtttttcacct

SEQ ID NO: 122647 - DNA, 767 bp, Arabidopsis thaliana
agctctatacgacttcactatagggaaagctgggtccccctggcaggtcccggtccggatttcccgggtcgaccaacccgtccgtccggttgcaagaagacaacagaagggggttgacaaatctctcaaaaccatttgttttgcaatcgcagatccgtttttcttcgggtctcatcacaatgaatggtttctctgatcttaatccttctgagagcaaaccttctctgtcacaactagctccattagaagccattctgtttgatgttgatggaacactctgtgactcagatcccatccaccttattgccttccaagaactgcttcaagagattggttttaacaatggtgtcccaatcgatgagaaattttttgttgagaacattgctggaaaacacaattctgaaattgctctacttctgttccctgatgatgtttcaagagggttaaaattctgtgatgaaaaggaagctctttaccgcaaaattgttgcagagaagataaagccacttgatgggcttataaaactgaccaaatggttcgaagatcgtggattgaaacgagctgcggtaacaaacgctccaaaagaaaacgcagagctcatgatatcgaaacttggtctgactgatttctttcaagcagtgattcttggctctgaatgtgaatttcccaaaccacaccctggaccttacttgaaggctcttgaagtgcttaacgtgtcaaaggagcacacgctagttttcgaagactcgatctctgggataaaagct

SEQ ID NO: 122648 - DNA, 611 bp, Arabidopsis thaliana
  unsure (1)..(611): unsure at all n locations
atgatactgccagctannnnnnnnnnnnnnnnnnnnnnnnnnnnnnnnnnnnnnnnnnnnnnnnnnnnctctgtgtctcacaccacaccaaccacttcttcttcttcttcttcttctacataaaacctaacgccatggattcagatttcggaatccccagagaactctcccctcttcagcaacttcgatctcagtacaaacctgagcttcctccttgtctccaggggactactgtccgcgtggagcttggtgatggaaccactgtggctgaagctgctgattcacataccatggctcgtgctttcccgcataccttaggccagcctttggctcacttcctcagggaaactgctcaagttcctgatgcgcacatcattaccgagcttccttcagttagagttggaattgtgttttgtggaaggcaagctccaggtggacataatgtgatctggggtcttttcgaggctctcaaggtgcacaacgcaaaaagcactttgctaggatttttgggtggttccgagggtctatttgcacaaaagactctagagattacagatgatatacttcagacttacaaaaaccaaggtggttatgatttgctcggaagaact

SEQ ID NO: 122649 - DNA, 489 bp, Arabidopsis thaliana
  unsure (1)..(489): unsure at all n locations
atcagcggacgcgtgggtctgagtctctctgacactctcaccaacctaatttctcacaaaaacctaaaaagttatcgcccatggattcagatttcggaatccccagagaactctctcctcttcaacaactccgatctcagtaccaccctgagcttcctccttgtctccaggggactactgtccgtgttgaacttggtgatggaaccactgtggcaaaggctggtgatgctcatatcattgcccgtgccttcccacatactctaggccagcctttggctcatttcctcagggcaactgctaaagttgctgaatgctcagatcattactgaccatccagtgaagagggtcggaaattgttggtcctgtggagggcaggctcctggctgggcacaaatgtagtttttgggggattttacgnggnttntaaaaggtnacaaacggggngnaccacttttgctttgnnnttttttggggtngtcctaaaggntt

SEQ ID NO: 122650 - DNA, 617 bp, Arabidopsis thaliana
  unsure (1)..(617): unsure at all n locations
ggtacacggccccccctctgtgtcgacggtatcgataagcttgatatcgaattcgcggccgcccttcttcttcgcttctcctcgctctttacaggggaataataagtgtagtcttcttcctcatgatcattactggatctcaagtaaacgcatcgtcacacctaatggtctcatctctggttctgtggaggtgaagggaggaattattgtgtcggtggtgaaggaagttgattggcataagagtcaaaggagtcgagtgaaagtgattgattatggagaagctgtcctcatgcctggtctcattgatgtgcatgttcatcttgatgatcctggaagaagtgaatgggaaggttttccttctggaactaaggctgctgctgctgggggaataactacattgggttgacatgcccttaaacagtttcccttcaactgtatcccctgaaactttgaaacccaagattgaagctgcgaaaaacagattacatgttgatgctgggtcctggggaggtttggacctgaaatgccccaacccaagggcccttgaagccccctaanatgngggngtcttnggccaagccttaatgggccctnanggacaacggtttccaaggnaa

SEQ ID NO: 122651 - DNA, 430 bp, Arabidopsis thaliana
gaggagagagatatggagagaactttgcttcaatggagactattgcctcttctcgcactcatcgttgctcttttctccttcttcttcgcttctcctcgctctttacaggggaataataagtgtagtcttcttcctcatgatcattactggatctcaagtaaacgcatcgtcacacctaatggtctcatctctggttctgtggaggtgaagggaggaattattgtgtcggtggtgaaggaagttgattggcataagagtcaaaggagtcgagtgaaagtgattgattatggagaagctgtcctcatgcctggtctcattgatgtgcatgttcatcttgatgatcctggaagaagtgaatgggaaggttttccttctggaactaaggctgctgctgctgggggaataactacattggttgacatgcccttaa

SEQ ID NO: 122652 - DNA, 648 bp, Arabidopsis thaliana
  unsure (1)..(648): unsure at all n locations
accgggccnnaatccccntgcggacntcccccacacacctggtanccctgttggcctggcaaacctgagngcgtaactgaagagaccccgaattacccagaggtgggctgacaagcagtacaagaagtctcacttgggaaatgagtggaagaagccttttgctggttcttctcacgctaaaggaattgtccttgagaaaatcggtattgaggctaagcagcctaactctgctatccgtaagtgtgctagagttcagcttatcaagaatggaaagaagattgctgcctttgtccccaatgatggttgtttgaactacatcgaggaaaacgatgaggtcttgattgctggatttggtcgtaagggtcacgctgtgggagatattcccggagttaggttcaaggtcgtgaaggtttctggtgtttcactcttggccctcttcaaggaaaagaaggagaagccaagatcttaagcaacccgtacaaaaagcttcaagcttttgaaatggtttttgatagttcagtttaagtcttgttctgttctactttatgtttcaagaacttgattttgtgttacattttatgagtttttgaattaagacattatcgtttaatattattggcgtttaatcaatttactcttttacccggg

SEQ ID NO: 122653 - DNA, 585 bp, Arabidopsis thaliana
  unsure (1)..(585): unsure at all n locations
gagggttttctcagccgcttaagagcttatcatctttgtgcttcctgcaaatagctctttgctgttgatctttctcctccatcaacaaacatgggtaagacacgtggtatgggagctgggcgtaagctgaagagactccgaattaaccagaggtgggctgacaagcagtacaagaagtctcacttgggaaatgagtggaagaagccttttgctggttcttctcacgctaaaggaattgttcttgagaaaattggtattgaggctaagcagcctaactctgctatccgtaagtgtgctagagttcagcttatcaagaatggaaagaagattgctgcctttgtccccaatgatggttgtttgaactacatcgaggaaaacgatgaggtcttgattgctggatttggtcgtaagggtcacgctgtgggagatattcccggagttaggttcaaggtcgtaaaggtttctgggggtttcactctttggccccttttcaaagggaaaaaaaagggggacccaagtttttcaggaacccctttcaaaaaagntttaaantttttnaaatnggtttttaaaggccagtttaag

SEQ ID NO: 122654 - DNA, 812 bp, Arabidopsis thaliana
  unsure (1)..(812): unsure at all n locations
ccacgcgtccagcactagagccggtaaaattctttctctttctttgtttttctcttttttcggcacatccatgatttttcttccaacggaatcaattctagttttctagatctaaatatttaaagcttaaatctcctcctcctttggtttttgatgttttgcttttttgtctccgccattctcagcatcatatctggttgtatctttcttggtaggtagaagcagtcttcaatcggttcttctctgcctcagattaagaaatttcgccatcgtaaatctagatcttcttcctttcttcaagagacgttctttgagtctctatttttttggatgcgtttcaccgcctctgtgacttctcgagagtattataaagagggtcacacgacactttcatttggttttaacctgttataaacaagactcttgtattataatccgtttgtgtgtttttctaagtctcagttttgttttaatttgcaaggtttaggctttgttaatcttttttttgaatttccagattctgatccagaaagtattaatggatgttgtgtagtttatttgctcgggtttttttccctttgtttactttgtttgatcactgtttctggtgttcttggactcgccgactaatgtttccggaagtgttcatgtacccgccggctctttgtaattccctttaaaccttatcaatagaatctttttgatggnnnnnnnnnnnnnnnnnnnnnnnnnnnnnnnnnnnnnnnnnnnnnnnnnnnnnnnnnnnnnnnnnnnnnnnnnnnnnnnnnnnnnnnnnnnnnnnnnnnnnnnnn

SEQ ID NO: 122655 - DNA, 602 bp, Arabidopsis thaliana
gctgtgcagtaggtcagactcttgtagtgaattcactgcaaagtaagggaaagcttggcttggaaatgggagttgaacaagccatcgattcgggctaatgtgtatagtttgattcgtctggggagcttttgagagatagcaatttagttttccgcttacgaatgatctttttctgatgcgtcattttgattaagtgtgtacttctgcaatggaggcttctctagctgttatacagaggcctcaagctggagcttcgaatacggtttataagagtggccctctcttcatatcatcaaaaggactaggttggacatcctggaagaagcgttggtttatccttacccgaacttctttggtctttttcaaaaatgatccaagtgcattaccacaaaagggaggtgaagtaaatttgacccttggaggcattgacttgaacagttcggggagtgtcgtggtgagagaagataagaagttgctgactgtactattcccagatgggcgtgatggacgagccttcacccttaaggctgagacattggacgacttgtatgaatggaaggctgcccttgagcaagcccttgcacaagctcccaatgcagcac

SEQ ID NO: 122656 - DNA, 1541 bp, Arabidopsis thaliana
aatttgtatagtgttgtatctctctctctctctctctgtctgtttgtttcagagaaggatttttggcgtctccacgcacgatttaacgcatcgaagctctctgcacgcttcctgaaagagagagagaagagagagatcgcagatcgatttctcttaaatctctcgtgaatcccatttgccttctctctgctagattctctcttcttctcttcacccatttctcgctttctcctttgttctctcatctgggttcttctcaaagcctcttcctttttatgccatggtgggtgcgtcttcctcttacgcatctccgttatgtacctggtttgttgctgcttgcatgtccgtctctcacggtggaggagatagccgtcaggctgttgctcttcaatctggtgggcggagtcggcgaaggaggcagcttagcaaatgctctgtcgcttctggatccgctagcattcaggctctcgtcacttcttgtttggattttggtccttgtactcactacaacaacaacaatgcattgtcttctctctttggatcgaatagtgtttctttgaatcgaaaccagaggagattgaatcgtgctgctagctccggtggagccatggcagtgatggagatggaaaaggaagctgcggttaacaagaaaccacctacggagcagcgtcgagttgtagtgacaggcatgggagttgaaacatcattgggtcatgacccacataccttctatgagaatttgctaccaggcaacagtggtattagccagattgaaaattttgattgttctgaatttcctacgcgaattgcgggagagatcaaaagcttctcgactgaaggatgggttgctccaaaactttctaaaaggatggacaaattcatgctctatcttctcacagctggtaagaaagctttggctgatggtggggttactgatgaagtaatggcagagtttgacaaaaccaaatgtggagttttgattggctcggcaatgggaggaatgaaggtcttttacgatgctattgaagctctgagaatctcttacaagaagatgaatcctttttgggtaccttttgcgacaacaaacatggggtctgctatgcttgccatggatctgggatggatggggccaaactattctatttcaactgcttgtgccacaagcaacttttgcattctgaattcagcaaaccacattattaaaggtgaagctgatgtaatgctctgtggtggctcagatgcagttattattccaatagggttgggaggttttgttgcatgccgggctctttcacaaaggaataatgatcccacaaaagcttcacgtccttgggataccaatcgagatggtttcgtgatgggagagggagctggagttctacttttggaagaactcgagcatgctaagaaaagaggtgcaactatctacgcagagttcctcggtgggagtttcacatgtgatgcctatcacatgaccgagcctcaccctgatggggctggtgttattctctgtattgagagagcgttagctagtgctggga

SEQ ID NO: 122657 - DNA, 724 bp, Arabidopsis thaliana
atgacacaagcggatttaggacttgcagatgcttatatcaatggagatttttctttcgttgataaagaatcaggacttttaaatctgattatgattctcattgctaacagagatacaaaatcaaatcttagtaagaaaaggggatggtggacaccgatgtttttaactgcgggtttagcatctgcaaagtattttctaaagcatgtctctaggcagaacactctaacacaagctcgtagaaacatttctcgtcactatgaccttagcaacgagcttttcggtttcttcttggatgataccatgacttactcctctgcagtattcaagtcggatgatgaggatctgagaactgcacagatgagaaaaatctcgcttctgattgataaggcgagaatagagaaggaccacgaggttttagagataggatgtggatggggaactttggccatagaagttgtgagaagaactggatgcaaatacaccgggattacgctatctattgaacagcttaaatatgctgaagcaaaagtgaaagaagctggacttcagggctggattacttttgtgctccgcgattatcgccaactatctgatgctcccaaatatgacagaattatagcttgcgagatgctagaagcggtcggccacgagttcatggagatgtttttcagtcgttgtgaagccgcgcttgcagaaaatggcctaatagtcttgcagttcatat

SEQ ID NO: 122658 - DNA, 405 bp, Arabidopsis thaliana
aaatttttgtttttatttttctgatgttacaatggcagacaagatcttcactttcttcctaatcttgtcttcgatctctcctctcttatgctcttctttgatctcacctcttaatctctcacttattagacaagcaaatgtccttatctctctaaagcaaagttttgattcctatgatccttctcttgattcatggaacattccaaatttcaactctctatgttcttggactggtgtttcttgtgacaacttgaatcagtctattactcgtctagacctatctaatctcaacatctccggcactatctctccggaaatatctcgtctttcgccgtcacttgtttttcttgacatttcttctaacagtttctccggtgagcttcctaaagagatctatgagctctc

SEQ ID NO: 122659 - DNA, 418 bp, Arabidopsis thaliana
acttagtcgttcacgaaacatctcatatatatctagagagagaaacaaaacaatatatagagaatctatatagaatcatataagtggtacatacctctcaaatcgaggaagaaaatgaaaggaggaaagatggataaattgaagccaataatagcaatcatatcactccaatttggatatgcaggcatgtacatcattactatggtctccttcaagcatggcatgaaccattggatccttgctacttaccgacatgtcgtcgccacaattgtcatagctccttttgctctcattctcgagaggaaaataaggcctaagatgacatggccattgttccttaggattcttgcccttggattcctagaaccacttttggaccagaacttgtactacataggaatgaaagccacgtcagcaa

SEQ ID NO: 122660 - DNA, 411 bp, Arabidopsis thaliana
cccacgcgtccgcccacgcgtccgcggacgcgtgggagaaagcagaatgagaaacttcaggttgttaggcatgaaggagatcctgattttgaagatggtgatgatgctgattttccaatgatggatgagggaaggcagccattgtctaggaagataccaatcaatatcgagcaagataaatccttaccggatgttaattgtgctacgtcttgtgattcttggtctcttctttcactaccgtattcttcaccccgtcaaagatgcatatgctttgtggcttatttctgttatatgtgagatatggtttgctgtttcatgggttcttgatcagttccctaaatggtaccctatcgagcgagaaacgtacttggaccgactctcattaagatatgagaaagaagggaaaccgtc

SEQ ID NO: 122661 - DNA, 544 bp, Arabidopsis thaliana
agcgtctctacgactcactatatggaaagctggtcacgcctgcaggtaccggtccggaattcccgggtcgacccacgcgtccgacaggttggagaacgtggtgttcaactctcaggtggacagaagcagagaattgcaattgctagggcgatgttgaaagacccaaagattctgttactagatgaagctacaagcgctcttgatgctagctctgagagcattgttcaggaagctttagacagagtcatggtggggaggaccactgttgttgttgctcatcgtctctgcaccatcagaaatgttgattccattgccgtgatacagcaaggccaagttgttgaaaccggaacacatgaagaactcattgccaaatccggtgcttacgcatccctcatcaggtttcaggaaatggttggtactcgagatttctcaaacccgtcaactcgtcgcactcgttcaacccgtttgagccattcactgtcaacgaaatcactcagtttaagatcaggaagtttgaggaatctgagctattcttacagcactg

SEQ ID NO: 122662 - DNA, 492 bp, Arabidopsis thaliana
gtttgttctcacttctcacttctcagatttttataaacatgaatgaaacctgaattgttccactaactctcagcaaaaatgcgatcactttacttaatcgtcttcatcgttattagtcttgttaaagcttcgaaaagcgatgatgggttttgttcagcgccttcgattgttgaatcggatgagaagacgaaccccatttattggaaagccacgaatccaacactctctccttcacacctccaagacttgcctggtttcacacgaagtgtatacaaacgagatcatgcgttaataacaccggaaagtcatgtatacagccctttacctgactggacaaacacattaggggcgtatttgatcacaccggcaacgggttcccattttgtcatgtacttggcgaaaatgaaagaaatgtcaagttcaggtttgcctccacaagacatagagcgtcttatattcgtggtcgagggtgctgtgacactcactaacaca

SEQ ID NO: 122663 - DNA, 391 bp, Arabidopsis thaliana
cttttctttccaaatttgtttccatggcgcagcagagccaacgtccaatctcaaaccgtcacatctctctcctcaaccgtaacggtctcatcctccttctccttctagctctctttgttatcctcggtgtattcttacctttgacaaaatcttccttgttcatgtttccaaacacaacatcttcttctctttctccttcttcttctttatcggtctccgactggcgcgactattcccttgctcaagccgttaagtttgttgctaagaacgagactgtgatcgtctgtgctgttagctaccctttcttgccttttcttaacaactggttgattagcatttctagacagaaacatcaagaaaaagttcttgtgatcgctgaagactatgctac

SEQ ID NO: 122664 - DNA, 376 bp, Arabidopsis thaliana
aggggaaaataacgctgttcaaaccttagtttcgactgcattatgtggagtgatacattccattattgggggacaaccattgttgattcttggtgttgcagagcctactgttataatgtacaccttcatgttcaattttgctaaaagtagaacggatttgggctctaatctctttctagcgtggaccggatgggtttgcttgtggacggggctgttgttgttcttgttagctgtattaggcgcttgcaccttcatcaatcgattcactcgacttgctggggaactgtttggtactctaatagccatgcttttcatgcaagaagccattaaaggcattgtggatgagtttggtgtccccggaagaacaaatccaaga

SEQ ID NO: 122665 - DNA, 477 bp, Arabidopsis thaliana
  unsure (1)..(477): unsure at all n locations
cgaacccaaacaaaaaaacattttttctctataaatcctttattattgttataaaaactccgatggatcggcaaaattccgatgacatcatgagatttctcgatggaatggctagctccgacgacgttcttttcggttttcttgacgaaggaaaccagtcaccggaagatttctccgtaaacctcaacgccggcgaagatgacggtgacgaagacgacaataataacaattctgaagataacaaagctttttggcaggaacacgaacaacttcttcaggggacactgtataggacaagttccattgagacaaagattagacaagctacaaaagaagcgttgaaacaagttaaatctaagggtctttattgtgtttgccggcgaccagtggacggcggttgccggagttgcttacgtggcgaaatctcttttggcaccctnaggantttcgccggnttcggtttctttaaccctaaat

SEQ ID NO: 122666 - DNA, 1089 bp, Arabidopsis thaliana
  unsure (1)..(1089): unsure at all n locations
agaaaganagattctcctcctncgattccagcgaaggaaaagcgtattcctcgtnagcactaacttctnactcctctntnctcctncttcatcagtctacgttcacacaatctttcacccacctattcaaagctctctccggaagtttcgaggggttggttgttggttttcccgatgacttcggatggagctacgtcgacatcagcagctgcagctgcggcggcggcagcagcggcgaggaggaagccgtcgtggagagaaagggagaataatcggaggagagaaagacggagaagagctgtagctgcgaagatatacactgggcttagagctcaaggtgattataatttgcctaaacattgtgataataatgaagtccttaaagctctttgtgttgaagctggttgggttgttgaagaagatggtactacttatcgcaagggatgcaagcctttacctggtgagatagcctggggcttcatcccgggtaactccatattcatcacagaaccagagccctctttcatcagcctttcaaagtcccatcccatcttaccaagttagcccgtcttcttcatcattcccgagtccttctcgcggtgaaccaaataacaacatgtcctctacattcttccctttcctcagaaatggtggcattccttcttctcttccttccctcagaatctcaaacagttgtccagttaccccaccggtctcatcgccgacttctaagaacccgaaaccgttgcctaactgggaatctatcgctaagcaatccatgggccattgctaaacaatcaatggcgtctttttaattatcctttctatgcggtttctgcacctgctagttccgacacatcgcccaccaagttttcatacccccgggttactattcccctgtgtgatgagtctgactcttccactgttgattctggtcattgggtaagctttcagaaatttgcacaacaacagccattctctgcctctatggtgccaacctctcgtaacttcaatcttgtgaaacctgcgcctcagcagatgtctccaaatactgctgccttccaagagattggtcaaagctctgagttt

SEQ ID NO: 122667 - DNA, 875 bp, Arabidopsis thaliana
cttctccgcttctgtagcaatgtcaatgtggtaccctctaccttcttcttcttcctccactcactaaccaaatccagaatcaacaataatagaaaaagccctaactttctccgtcgatggctttcttcttctactttttcttcctcttgactctttcttctccttcttcttctgcttcctcttcaaactccttgacttacatcgtccacgtcgaccacgaagctaaaccctcaatcttccccactcattttcactggtacacttcctctcttgcctcactcacctcttctcctccctccattatccacacatacgacaccgttttccatggcttctccgctagactcacttcacaagacgctagtcaactcttagaccatcctcatgtcatctctgttatcccggaacaagtccgtcacttgcacaccactcgttcccctgagtttcttggtcttaggtccaccgacaaagcgggtctactcgaagagtctgatttcgggtcggatctagttatcggagttatcgatactggtgtttggcccgaaagacctagctttgatgaccgtggtcttggtcctgttcccattaaatggaaaggccaatgtatcgcttcccaagattttccggagtctgcttgtaaccgtaaactcgtcggagctagattcttctgcggtgggtatgaagcaaccaacgggaaaatgaatgaaacgactgagtttcgctctccgcgtgactccgatggacatgggactcacacagcttcaatctccgccggccgttacgtttttccggcgtcaactctcggctacgctcacggcgtcgctgctgggatggctccaaaagctagactcgccgcttacaaagtctgttggaac

SEQ ID NO: 122668 - DNA, 629 bp, Arabidopsis thaliana
  unsure (1)..(629): unsure at all n locations
tttttggtttgcggnacatttccccgggaccctttccctnttccccnnccttntccccccctttgggaactntccccccccagntcccccccngaatccccgggggcccccccnccccggaaaccccngtcaaatctgggnttccatcatctgcccccccaggcttcctggcctaaccccgacgatgaggagcgtggtgcagatgatcgaggacgcggaaccttgcagattgatggggattgtgatcagcaaagagagtgatgtcaaggtcaaagaaataagttgatgattgagggaccaagtcactcttttggggtctgttttgttcacaatgaaacttagggagatcgagtaaagtggatcatctaaatctattaagacgtacgtaagagtttagatggagagtgttgtaatactagtactccgggttatgaaatcataggtgttgtaacgatctcattgtaaactattttcttgtaattgtagaattttaaggttttcaaatgttcatgaaggtcaactactaaatgaaaaaaaaaaaaaaaaaaggcnnnnnnnnnnnnnnnnnnnnnnnnnnnnnnnnnnnnnnnnnnnnnnnnnnnnnnnnnnnnnnnnnnnnnnnnnnnnnn

SEQ ID NO: 122669 - DNA, 803 bp, Arabidopsis thaliana
  unsure (1)..(803): unsure at all n locations
ttgaaacctagaattgcggattttggtcttgccaagattcttcaggccagcaatggggctccagagtccacgcatgtcgttgcgggaacctatggctacatagctccagagtatggatatgcgtcaaaagtgactgagaaatgcgatgtatatagcttcggggtcgtgttgatggagctagtcacagggaaaaaaccgatagaggcagagtttggagagagcaaagacatagtgaattgggtgagcaacaatctgaagagcaaagagagtgtgatggagattgtggacaagaagataggagaaatgtatagagaagacgcggtcaagatgctgaggattgcgatcatctgcaccgcaagacttcctggactaagaccgacgatgaggagcgtggtgcagatgatcgaggacgcggaaccttgcagattgatggggattgtgatcagcaaagagagtgatgtcaaggtcaaagaaataagttgatgattgagggaccaagtcactcttttggggtctgttttgttcccaatgaaacttagggagatcgactaaagtggatcatctaaatctattaagacgtacgtaagagtttagatggagagtgttgtaatactagtactccgggttatgaaatcataggtgttgtaacgatctcattgtaaactattttcttgtaattgtagaattttaaggttttcaaatgttcatgaaggtcaacccctaaaaaaaaaaaaaaaaaaaaaaaaaaaagagggcggccgctnnnnnnnnnnnnnnnnnnnnnnnnnnnnnnnnnnnnnnnn

SEQ ID NO: 122670 - DNA, 421 bp, Arabidopsis thaliana
  unsure (1)..(421): unsure at all n locations
gaaagagaaagaagaagaaagaaacaatggagtctcccaaatctaacgtcgacgatggctaccagaacatcttcgtcatgcgtcacggtgatcgaatcgacaatttcgagccactctgggtttcaaccgccgagagaccttgggatccacctctggttcaagacggtatgattcgtgcgtttcgtaccggtcaaaggatccgatctcagatcgggttcccgattcaccgtgtcttcgtctcccctttcctccgatgtctccagacagcttccgaagtcgtcgcagctctatccgccgtcaatgtcgatcctaacgccatgtcttccaaagacgtcccttccattgataaatctaagctcaaggtttcctattgatttaggttttgtgtgagatgttgaactcagtcggctataanggcgtg

SEQ ID NO: 122671 - DNA, 570 bp, Arabidopsis thaliana
acccacgcgtccggtccattaacattgtgaccattctaaaaccctaaaatttaaagaaaaaataaataaatagcctttttgaccaaaaaacccaatctatggttttgcccactatctcttcctctctcctcctatatatatgtcttatgatgagcacacatcatcatcattcacatacataagccaaatgggtgtgtggtggatagtgctggtggtggctgtcttgactcacacggcgtctgccgccgtgagagaatatcattgggaggtggagtacaagtattggtcgccggactgcaaagagggcgccgttatgaccgtcaacggcgagtttcctggtcccaccataaaagccttcgccggagacaccatcgtcgtcaatctcaccaacaaactcaccaccgaaggccttgtcatccattggcatggaatccgtcagttcggaagtccatgggcagatggagcagcaggagttactcaatgcgcaattaaccctggagagacttttacctacaatttcactgttgaaaagccgggaaacacatttctaccatggacactatggcatgc

SEQ ID NO: 122672 - DNA, 610 bp, Arabidopsis thaliana
ttcattcctccatcctatttttcttcttcgccaaagtgttattcctcaactttatatattacacaaatgtctttagccgcggataatgtgttgttggtggaagaaggaaggccagccacagcggaacatccatcggccggaccggtttatcgatgtaaatacgctaaagatggcctcctcgatctccctaccgatattgattctccttggcagttctttagtgaggctgtgaagaaatatccgaatgagcaaatgttgggccaacgcgtaacgactgattctaaggtcggtccatacacgtggatcacatataaggaagcccacgacgctgcaattcggattggatcagcaatcagaagccgaggcgttgatccgggacactgttgtggtatttacggagctaattgtccagaatggattattgcaatggaggcctgcatgagccaagggatcacctacgtgcctctatacgattctttaggcgtaaacgcagttgaattcatcatcaaccatgccgaggtttcgctagtatttgtgcaagagaagacagtttcatccatcttatcgtgccaaaagggatgttcttcgaatttgaagactattgtgagct

SEQ ID NO: 122673 - DNA, 860 bp, Arabidopsis thaliana
ggaaagctggcacgcctgcaggtaccggtccggaattcccgggtcgacccacgcgtccgcttacctatctcaaccctcttgggaagaaggcaggtttacttccagaagaagaaaatgaagacgctgatcaggggaaagatccaatgcgtagatctttgtctactgcagatgggaacagaagaggagaggtcgcaatggggagaatgagtagggactctgcggctgaagcatcaggtggtgcaggcaataagaaaggaatggttcttcctttcactcctttagctatgtcctttgacgacgtcaaatactttgttgacatgcctggggaaatgagagaccaaggagttacagaaacaagactccaactgcttaaaggtgtgactggtgcatttaggccaggagttttgactgcgcttatgggagtgagtggtgccggtaagactacgcttatggacgttttggccggaaggaaaacaggtggatacattgaaggagatgtgagaatatcaggattcccaaaggttcaagaaacatttgctagaatctcaggatattgtgagcagaccgatattcactccccgcaagtaacagtcagagaatctctgattttctctgctttccttcgtcttcctaaagaagtcggcaaagatgaaaaaatgatgtttgtggatcaagtgatggaattggtagagctggacagtcttagggactccattgttggtttaccgggtgtcacggggctttccacggagcagagaaagagactgacaatcgcggtggagcttgtagccaacccttccatcatctttatggatgagccaacttcagggctagacgctagagcagcggctattgtgatg

SEQ ID NO: 122674 - DNA, 517 bp, Arabidopsis thaliana
attcaatccaaaatcccatactaaattaaaaccaacacacaggaagaaagaagaaacctctcatcttcccctctcttctgttgaagaaagcttaaacctttctgggtttcttttaactatggcgacaagggttagtttcttcttagctctggtaatgacggtggtgattcttgctccttctgtcgtctctggagaaaatgggttttccgatcttaaaatccgtactcacttgaaacgactcaacaagccagctctcaaatcgattaagagcccagatggagatatgattgactgtgttccaatcactgaccaaccagcttttgctcatcctctgctcattaatcacactgtccagatgtggccaagtttgaacccagaaagtgtatttagtgagagtaaagtttcatcaaaaaccaagaatcagcagtctaatgctatacatcagctttggcatgtgaatgggaaatgtccaaagaacacaattcccatcagaagaacgagaagacaagatctttac

SEQ ID NO: 122675 - DNA, 595 bp, Arabidopsis thaliana
  unsure (1)..(595): unsure at all n locations
nnnnnnnnnnnnnnnnnnnnnnnnnnnnnttttaaagagaagagaagatctctgagaagaaactcctctgacgcctcgcctccgcccaaatctctctcaactctcaagctcctctctttttcttccttctgcaacaacaacaactgttactgatctctctctctctctcccaagtttttattttattttgatcggagatcgagatcagctagacatggctcctgccatgaagatcgtcttcggtctcttgacatttgtcactgtcggaatggtcatcggttccttgttacaattggcctttattaatagattggaagattcgtacggaactggatttccgtctctaagaggacttcgaggacagaacacccgctatctacgagatgtctcccggtgggcaaatgacaaagatgcagaattgttacggattggcaatgtcaagcctgaagtagtcagttggtcccctcgaattattgtgcttcatgactttctcagtccggaggaatgtgaatacctaaaagcaatcgcccggcctcgcctttaagtttccactgttgttgatgtaaaaaccggaaagggagttaaagtgacgtga

SEQ ID NO: 122676 - DNA, 367 bp, Arabidopsis thaliana
gggattttgattgtagtttatgcttactacaatgaagagatgatccccttttggattttctattgcttgttttgttgttgtggtgtccttttgatttctaaattctttctccttcttattcaggaactggatttccgtctctaagaggacttcgaggacagaacacccgctatctacgagatgtctcccggtgggcaaatgacaaagatgcagaattgttacggattggcaatgtcaagcctgaagtagtcagttggtcccctcgaattattgtgcttcatgactttctcagtccggaggaatgtgaatacctaaaagcaatcgcccggcctcgccttcaagtttccactgttgttgatgtaaaaac

SEQ ID NO: 122677 - DNA, 1045 bp, Arabidopsis thaliana
  unsure (1)..(1045): unsure at all n locations
nnnnnnnnnnnnnnnnnnnnnnnnnnnnnnnnnnnnnnnnnnnnnnnnnnnnnnnnnnnnnnnnnnnnnnnccacgccgtgcgcaaacaaagacttatccttctaatttcctttttgaaaaagaacctaaataaaaagattatggtatttttctcgacttgcaagtcggtacaattccatacggaaatcatgaaaataagcgacgtggatgtctctgatattcatggaggcatggatcagaacagaagaactaaaacctttttcgacttcatgaaagcaaagaaaggtatcttgttatgtactgatgttgctgctcgtggtctcgatattccttccgtggactggattatacagtatgatccaccagacaagccaacggaatatatccatagggttggtcgaacagcccgtggagaaggagcaaagggaaaggcattacttgtcttgattcctgaagaacttcagtttattcgctacctgaaggctgcgaaagtacctgttaaagagcttgagttcaatgagaagaggcttagtaatgttcaatctgcgctggagaaatgtgttgccaaggactacaatctgaacaagttagccaaagatgcgtacagggcttatctctcagcatacaattcacactctttgaaagacatctttaatgttcaccgacttgacctcctggctgttgctgaatcgttctgcttctcttcgccgcctaaagtgaatctgaacatagaaagtggagctgggaaggtgaggaaggcgagaaagcagcaaggtcgcaatggcttcagtccttacagtccctatggcaagtccacacctacaaaggaggcataaagtgtcatttgtttacaaaattactattttgctccgtagttttgactaattaccaccaccaagttttgtttaaagagtaaacagtgcatttgatttaaatgaaatgttccttggctactattaaaaaaaaaaaaaaagnnnnnnnnnnnnnnnnnnnnnnnnnnnnnnnnnnnnnnnnnnnnnnnnnnnnnnnnnnnnnnnnnnnnnn

SEQ ID NO: 122678 - DNA, 561 bp, Arabidopsis thaliana
  unsure (1)..(561): unsure at all n locations
nnnnnnnnnnnnnagcgctacacgactcactatttggaaagctggaccgcctgcaggtaccggtccggaattcccgggtcgacccacgcgtccgctctcttcgtctctctcttgtagcaatgccgcttcttcatccacagtcgttgcggcatccttctttcgagattcagacccaaagaagaagcaattccacaacaagattgcttctttctcacaagtttctccattctcaagcttccattatctcaatctccaggacaagaatcctcaaacgggtctctcagaatctctctgtagctaaagctgcttcagctcaagctagtagtagtgttggtgagagtgttgctcaaacatcagaaaaagatgtgttgaaggctctgtctcagattattgatcctgattttgggacagatattgtttcttgtggttttgtgaaagatttggggattaatgaagctttgggtgaggtttcgttccgtttggagctgacaacacccgcatgtccagtcaaagacatgtttgagaacaaggcaaatgaggtagttgcagcccttccatggg

SEQ ID NO: 122679 - DNA, 1243 bp, Arabidopsis thaliana
  unsure (1)..(1243): unsure at all n locations
ctcagggaactcaaaaaaaaaacatccaacaccaaagacaatggagatgagtttgcgtctcgcttcatcttcaacctcaaacccaatttgtctactaaaccctggaaaaaaccttaatttcccaatccgaaaccatagaatccctaaaacttcgaaacccttttgcgttaggtcttcaatgagcttgtctaaaccacccagacaaaccttatctagtaactgggatgtatctagcttctccattgattccgttgctcaatctccttcaagactcccaagtttcgaagaactcgataccaccaacatgttgctccgtcaaagaatcgtctttttgggttctcaggttgatgatatgacggcggatttggttataagtcagctattgttactagatgctgaggactcagaaagagacattacgctttttatcaattcacccggtggatctattactgctgggatgggaatatatgatgcaatgaaacaatgtaaggcggatgtatctactgtttgcttagggttagctgcatctatgggtgcgtttcttcttgcttctggttcaaaagggaaacggtattgtatgcctaactctaaagttatgatccatcagccacttggtactgctggaggcaaagcaacggaaatgagcatacgtataagagaaatgatgtaccacaagattaaacttaacaaaatcttctctagaatcactgggaagcctgaatcagagatcgaaagtgacacagaccgtgataacttcttgaatccatgggaggcgaaagaatatggtttgatcgacgctgtaatcgatgatgggaaaccgggactaatcgctccaattggagatggtactcctcctcctaaaaccaaagtctgggatctttggaaagtcgaaggaaccaagaaagacaacactaacttgccatctgagcgctccatgacacagaatggttatgccgccattgaatagaactgttgttgcagcgtttacgccttttatatgttattctggtggtacctgtaaccatataacgttgcatttcctgtgtttgtaccatttctctgatagatttttggaataatttgaaggcaaaagatagattatttgttgtagaagaagctccaaaatttaatgattaaattgaatcatcaagccatgagaagctttttgttttcgcccgtaantaaaaacccccattaacaaaannaaagcgcccgctctagaggatccaagcttacgtac

SEQ ID NO: 122680 - DNA, 714 bp, Arabidopsis thaliana
  unsure (1)..(714): unsure at all n locations
aacgntanncttctggtcccannggcgtnttnttggnaaaggacggttntccctncctaagtttgccacgccctggtctctggngcaagcacggaatggcntccgtttagngaatgatttccacaagattaacttancaaatcttctctanatcactgggaagcctgaatcagagatcggaaagtgacacagaccgtgataacttcttgaatccatgggaggcgaaagaatatggtttgatcgacgctgtaatcgatgatgggaaaccgggactaatcgctccaattggagatggtactcctcctcctaaaaccaaagtctgggatctttggaaagcgccacgcggcccggaaagacaacactaacttgccatctgagcgctccatgacacagaatggttatgccgccattgaatagaactgttgttgcagcgtttacgccttttatatgttattctgggggtacctgtaaccatataacgttgcatggccgtgcgtttgtaccatttctctgatagatttttggaataatttggaacgcaaaagatagattatttggttggagaagaagctacaaaatttaatgattaaattgaatcatcaagccaaaaaaaaaaaaaaaaaagggcgggccgctctagaagatccaagcttacgtacgcgtgcatgcgacgccataatttttttataatggcacctaaaattaaattcactg

SEQ ID NO: 122681 - DNA, 413 bp, Arabidopsis thaliana
cggacgcgtgggatttgttactggtgatcatgaaccacagaacagtgattttgttgattttggcggtttatttgatgagcctgagactactgagggacctgtttttggacctccttccaaggctgaagcctcgggagttggttttatggcgttcagcagcgagtctgatcctgaagaaatcgatgattcggatttaccggtgtctgtagagaggtgtttgggtcatttcacaaaacatgagatactgtcagatgacaatgcttggaactgcgagaactgttcaaagaacctgaaactccaacggttgagagaaaagcgaaaatccaatgaagatgaatcgagatcaagcaacaccagcaacggatgggtgaaagaaaatgaagatgaaggttttggagaaaccgaaattttgg

SEQ ID NO: 122682 - DNA, 847 bp, Arabidopsis thaliana
  unsure (1)..(847): unsure at all n locations
caggcttacgtcccatcatcattccccgttctctttttattttctctaatcgccgacgattatctctttcgtccggcgatagctattttgtctcttcaaatccccatagaccaatactcaactcttcatctccatgtctcctcaatctcatttctctccttagtgattgagctttttccttctttctctttggttattattccttctcctcctccgtcgtgtttttgattgatttcagaatctaaatctccgtttgatttctccatactcgtgctgattttcacctatgtaatgtgatttatgagctctgtttagttcaaatcgacggcgatcgttgaatttactgatcaatgtgtaagtaagagcttgaagaaatagtttttgttgttgttgtgaaagctcagagttttgtttgcttttttgttgacttttttgagattgatgctggatctcaatctcgacgtcgactcgaccgagtctactcagaacgaacgagattcgattactgttaaaggggtttctttgaatcagatggatgaatcggtgacgtcgaactcttctgttgttaatgctgaagcttctagctgtatagatggtgaagatgaagttgtgctctacacgaacggncaagtttccaatttgagatactgaaaggagggaggagaagaagaagaagaagatgatgatgaaagaagtcctgtnatgatgccnaaggggtttttcccggtgncaaagggatgancttatggntccngcgcccaagtccaagngcnccggtggaattcccnccaagggggancaggggggccttantgaccggcggtggngcnnccccggggtccccnnc

SEQ ID NO: 122683 - DNA, 896 bp, Arabidopsis thaliana
cccgacgaaccctgtttcgcgtctcttttccaatcccaatccaatttcgattccttgattggaggattcgtatagccgtaaatccgttattgggttcttccgattatccaccgatagatctcgatcgaacgtttttctccgattggatttttgggtgatttcgccggaattcataatcagacgggaggagtcgcttctcttctcttgagtaatttagtccctttttgtgttatggaatcaattggttgatgaacaaatacaagtgtaaaacgatgccgggtttaacaacacacatgaatgagcattactcttcttctgggttttggtctgaggacgacgatggacttacctacgatcagttggaccagttctggagtgagctgtcgtcgaaagctaggcatgagcttcttaggattgacaagcagacactgtttgagcaagctcgcaagaacatgtgctgttccagatgccttggactgttgcttgaaggcttcgcccagattctttctgctgggagggccgcgtacgaaaaaagaatgatgggaccctccaaagataactgtaaatctaatggcactaggaaatgtacggttgcgtaccagagccctcctgttcatcgatggggaggtctcaccacaacacgctcgggatgtatcactcttcttgactgctttttgactgcaaaaactttcaaagggcttcaaaatgtctttgaaagtaaccgtgctcgagagagggaacgtgagttgctttatcctgatgcttgtggtggcggtggtcgggtatggcttagtcaagggattgctggttttggtaaaggtcatggaacaagagaaacatgtaatttgcataccacgaggctctcttgtgatacattagtggatttttggtctgca

SEQ ID NO: 122684 - DNA, 534 bp, Arabidopsis thaliana
agctctctacgactcactattgggaaagctggcacgcctgcaggtaccggtccggaattcccgggtctacccacgcgtccgcccacgcgtccgcccacgcgtccgcggacgcgtgggaaaacggaaggttagtttgttcgatgttatggaagatccttctctttcgtcgaagaacaccaaatccaatggtctcggacttgcggcggcggctggtggtggaagcaatctgatcaacaaatggaacggaaaggcttattctcagaggtatttcgagattctggagaagaggagagatcttcccgtttggctccagaaagatgactttctcaatactttgaactctaatcaaactctcatactcgtcggtgaaactggtagtggtaaaactacacagattccacagtttgtattagatgctgtggtggctgacaactccgataagggaaggaaatggttggtgggatgtacccagcctcgtagagttgctgcaatgtctgtgtctcgtcgtgttgctgatgaaatggatgtctccat

SEQ ID NO: 122685 - DNA, 691 bp, Arabidopsis thaliana
ccgcgctgtcaacgctgggcgtgagtgagatctaacaatcggtagcgaattgtggaaattttgttccggttttgaagtctcaatctcggggttccggttttagcaactacttcttctgacatttcagctgttctagttgatctttatatactttatatgatctgggattttgaagagtttttagggaggaaccaaaatttctgagagagaaaaatgaagttatcgagctgcgttttgatcttccttctatgtaacacattctcctcgatttctgctttccgtctgagtcggagtcaaccaactgagcgaatttcaagtagtgctggtgatgtgtcggaggatgatcccgtgtgatgactgaaagtctctgattatgagcttccaagtaaatacaacaagaagatacttcacaacgatccgagatgtctaaaccacatgttagctgctgagatatatatgcaacggtttcttttatctaacccagttcgaacacttaatcccgaggaagctgattgattctacgtacctgtgtacaccacttgtgatctcacgcctaatgggcttcctcttgcttttaaatctccacgaatgatgagaagtgccattcagcttattgcttccaattggccatactggaatcgcacagtacgagcagaccacttctctgttgtgcctcatgactctggagcct

SEQ ID NO: 122686 - DNA, 433 bp, Arabidopsis thaliana
agagaaatttctcagttacgcttcatcctcctctaagagatcttttttctatcttgggtagtagagagaaatggcgggtcggggaaaacaacttggatctggtgcagcgaagaagtctacttctcgtagtagcaaggctgggcttcaattccctgttggtcgtatcgctcgatttttgaaagccggtaagtacgccgagcgtgttggtgccggagctccggtctatctcgccgccgttcttgaatacctcgccgctgaggtacttgagcttgctgggaacgcagcgagagacaacaagaagacccgtatagttccacgacacattcagcttgctgtgaggaatgatgaggagctaagcaagttgcttggagatgtgacaattgctaatggaggagtgatgcctaacattcacaattttcttttttctctagga

SEQ ID NO: 122687 - DNA, 616 bp, Arabidopsis thaliana
cggacacgtgggttaatttctctctctctctgtggagtgttcgaatctccaagctctctctcaaatggcagcgtccacatagtagagctgaagaagcactgtatctatctacagagaaagtgaagaggaagaaaaggaagagaggatatagaaattaagctggcgacttttagtccgaggcgagcaatggcagagttacggcactcgagctctctcggtagccgatcttcttcttctccgttacgtgccgccggagatgaggattcttcatcgcctcatgtacacgatcactctcctaacggcggagacgacgaagatggtcgcccacgtcatccttctagagatcgagaccgtccgatctggtttcactctttgtttcctttcttcggtgatgatcctagggtttctcctcagaagaataaaatctcgcttctattgattttgattctcgctattgctagcttgatctcagtttatgggattattaatcacttgaatgctccttatttatgtaaaaaagatgggattgtgctaaactgtcctcatgtaaaagagtcaccttctccttgggagaatcctttatctgcaacaacttcttggaagccttgtgctgagc

SEQ ID NO: 122688 - DNA, 522 bp, Arabidopsis thaliana
  unsure (1)..(522): unsure at all n locations
nnnnnnnnnnnnnnnnnnnnnnnnnnnnnnnnnnnnnnnnnnnnnnnnnnnnnnnnnnnnnnnnnnnnnnnnnccacgcgtccgcactttcttcttctttgatcatatcatatttatcttcactacaaaaaaaacaagtaaaataaagccaatcttcttaaatatctccagaagatctatcagcatttacgtattcaggtcctccaatttcttctcacaaagaaaaaggaagaaaaaaaagaagttgtgagagcaaaaaaaaaatggcagtggataaagtgattgtgaagcagaggaacattatattggttggaattccaattgatgaaagtggcgtagaggttttaaaatgggcacttgaagaagttgcaaaacatggagattgtgttgttgttgtccatgtttgttttacttattaccgtgccttgaaaagcaagtcatcgctggatcggtacttaaaaccatacattgaattctgctcaacaaagaagattgagctcacaggagaagtgttaaagggaa

SEQ ID NO: 122689 - DNA, 508 bp, Arabidopsis thaliana
  unsure (1)..(508): unsure at all n locations
nnnnnnnnnnnnnnnnnnnnnnnnnnnnnnnnnnnnnnnnnnnnnnnnnnnnnnnnnnnnnnnnnnnnnnnnnnnnnnnnnnccacgcgtccggtaaatttacaggtaatgtatttatgtacatatagaatttttagataagctcaaaaagctggtttgtttagtgaatagggaaagttttgggtcgtcgatgaatgtgtcattttctcttatcccaaatttgctcgatcatacccaataattggatggctttctttcaacaatcggtttttccttctatttccccacaggtattatatatatatctcatatatttctttaataattataatgtttagttggaaattctatccagattctgtccacatatatgattcgaatattatccgaaattaggaacaagccgaatataaatatatccatgcataatcattaacccactgtatgacttcaatatgaatatattcatctatatattggatatatattacacttgattggtagataa

SEQ ID NO: 122690 - DNA, 406 bp, Arabidopsis thaliana
atcttaaacacaaacacgcaaaagatggaaaagagtcttcttgtcctctgtctcattttgttttttacttatagttacgtctcggctaattactatccacctaaagccttagtatcaaccgtctctaagaacacaatcttgcctatcttcaccttcacactcaacacaaaccaagagtttttcattcacatcggcggtccctatcttgtccgtaaatgcaacgatggtctccctcgtcccatcgtcccttgtggctcccccgtatgtgctctaactcgtagattcactcctcaccaatgctctcttcccagcaacaaaatcatcaatggagtatgtgcttgccaagcaaccgcttttgagccattccaacgtatatgtaactctgaccaattcacctatggagatt

SEQ ID NO: 122691 - DNA, 1081 bp, Arabidopsis thaliana
  unsure (1)..(1081): unsure at all n locations
nnnnnnnnnnnnnnnnnnnnnnnnnnnnnnnnnnnnnnnnnnnnnnnnnnnnnnnnnnnnnnnnnnnnnnnnnnnnnnnnnnnnccacgcgtccggagaaagtgaatgggctaaacaaagctcgggctattctcaccacggccaggaagaagaatcctgggggggctgagctatggttagctgctattcgcgctgaactgaggcatgacaacaagagagaagcagagcacttgatgtcaaaggctctgcaagactgtcccaagagtggtatcctctgggctgcggacattgagatggcgccacgtcctcgacggaaaacaaagagtattgatgctatgaagaagtgtgatcgcgaccctcatgtcaccatagctgttgccaagctcttttggcaagacaagaaggtggagaaagccagagcatggtttgaacgtgctgttaccgttggcccagatattggcgatttctgggcgttgttctacaaatttgaacttcaacatggctctgatgaggacaggaaggaagttgtggcgaagtgtgtagcttgtgagccgaagcatggcgagaaatggcaagccatctccaaagcggttgaaaatgctccccagcctattgaagttatcttgaagagagttgtgaatgcgttgagcaaggaagagaattctgcttgagagtatcaattttcttatgtttttcatgatcaagctctgctcatagcacattaccccttagttcttgttttctctttgcaggctcaacttttaaccattcatgtttttcttcagtagcgagacctgatattgatttacaggagtgtttccccagatacatgtagaattctcagtttactaaatgcttcagttttctttgtgagtctctgtgtgctgcagtgttcagctattaaacttcttttgttatttggaaaactgatcatttgttgttcgtttccnnnnnnnnnnnnnnnnnnnnnnnnnnnnnnnnnnnnnnnnnnnnnnnnnnnnnnnnnnnnnnnnnnnnnnnnnnnnnnnnnnnnnnnnnnnnnnnnnnnnnnnnnnnnnnnnnnnnnnnnnnnnnnnnnnnn

SEQ ID NO: 122692 - DNA, 577 bp, Arabidopsis thaliana
  unsure (1)..(577): unsure at all n locations
nnnnnnnnnnnnnnnnnnnnnnnnnnnnnnnnnnnnnnnnnnnnnnnnnnnnnnnnnnnnnnnnnnnnnnnccacgcgtccgcccacgcgtccgcggacgcgtggggttaactgcaaatgtacggaaagaatcaacaaatagataatttataaattggtggagaaataccaagagcatcaaatggactcacgtcttttaaagacacttcctcaatattcaccattagtaatgattcttatctctagtcttagcaaaatgatggtgtggcaggtatatcggcaaaatcttcatagcgaactaggcgcactaaagttgatggtcaaaataatcagaaaaacagaaaaagttcaaaaacagaaagagttggaggattataaaaccaaattccctagaattaaaatgatatggattctcatttaccaaattccaataaaggtaatgataattaatagagaaaccctaagatgttaagtaatcaaagagacggtaaataagctgtatcagcaagaacaaataacttagaagcatggctttccaaaaagagagcatttgattagtagagtaaatagtaatctc

SEQ ID NO: 122693 - DNA, 499 bp, Arabidopsis thaliana
  unsure (1)..(499): unsure at all n locations
atgatttnnnnnnnnnnnnnnnnnnnnnnnnnnnnnnnnnnnnnnnnnnnnnnnnnnnnnnnnnnnnnnnnnnnnnnnnnnnccacgcgtccgttatcattcatatctctctctttctctctctctcagctctggagaattaaacagagaaattttttggtctcaggtttatatcaaagatgcaaaacgttcctgaagaccaaaacaaaatggtcatagatgataaacttcctccattttcatgggaaagaaagttgaacagtcaagcaaagactccttctgagttcaaattgagtaaacgagatcacatgcatctgtttccattaggctacagattgtggcgtcacaccaaagacgaagccgccaaaggaagagcttcgatcttcgatatcttcagaaaacaccatattacgggagatcacggtgtccctttaggaggaattggttcaggaagcattggaaggagttacaagggtgagtttcagcagttcaagctgtt

SEQ ID NO: 122694 - DNA, 1014 bp, Arabidopsis thaliana
  unsure (1)..(1014): unsure at all n locations
atcaggggatatggtctcggatcaggaatctcccttttcattgccaccaacatttgtgaaagcattatctggaaggcatttagcccaactaccatcaacaccgggcgtggagctgagtttgaaggtgctgttattgcactgttccatatgctgataaccaagtccaacaaggttgcggctctccgccaagctttctaccggcaaaaccttccaaatgttaccaacttgcttgccacagtcttgatcttcctgattgtgatctacttccaaggtttccgtgtggttttgcctgtgagatcaaagaatgcccgtggacaacagggttcttacccaatcaagctgttctacacctccaacatgccaatcattctccagtctgctctcgtctcaaacctctacttcatctctcagcttctctaccggaagttcagcggaaatttctttgtgaacctattgggacagtggaaagaatctgagtacagtggacaatctataccagttagtggtcttgcatatttgatcacagctccagcaagtttctctgacatggcagctcacccgttccatgcactgttctacatcgtcttcatgctcactgcttgtgctcttttctcaaagacatggattgaagtctctggatcttctgctagggatgtagctaagcagctaaaggaacaacaaatggtgatgccaggacacagagaatcaaacttacagaaggaactgaacagatacatcccaacagcagcagcttttggaggagtttgtatcggtgcacttacccgctttggctgatttcatgggagccatccgggtcggggacccccattctggttggcgggcacgatcataataccagaattccngacctttnagaaaggaaaagccagtgnacccgggttctncggggncaaagtacctaaagaaggggaaactttgcctngggaaaannngnnaaaagnttacgtntgnncnccaaaaanaattttggggncttgggnancactttttttc

SEQ ID NO: 122695 - DNA, 656 bp, Arabidopsis thaliana
  unsure (1)..(656): unsure at all n locations
ccccnncannttttanacnctcagnnccgctgtgccttnccaaaacntggttgagccctggacttctcctnggatttnctanccgcttagggacaacaaatggtgatcccagggccccggggactcaaacttacagaaggaactgaacagatacatcccaacagcagcagcttttgggaggagtttgtatcgggtgcacttaccgttttggctgatttcatgggagccatcgggtcgggaaccggaattctgttggcggtcacgatcatataccagtatttcgagacctttgagaaggaaaaagccagtgaactcggcttcttcgggttctaagttagcttaaagaaggtgtaaactttgcctgaggcaaaaaagcagagcagaagaggctttagcttctgtgcccacctcaaacacagacaatttgtggtggcacttgggttagactacttttttttgttgttgttgaaacgaaattttctctttagtcatttatgtttttttgttactttttacaagttaaaaaacttatgtgatagacgcttttctaatgtatgtttctaggaaaaaaaaaaaaaaaagcaagnnnnnnnnnnnnnnnnnnnnnnnnnnnnnnnnnnnnnnnnnnnnnnnnnnnnnnnnnnnnnntgtcctaa

SEQ ID NO: 122696 - DNA, 439 bp, Arabidopsis thaliana
acccacgcgtcaagcgacggcaacgaagacggcgaagaatacggcggacacgaggattcccaacgatcagattctttgacattccacggcggcttagatatcagcttctccgatccgctctctctgtttgtgtaaatcatggtgatcgcggctgcttcctctttttccctcggtccatctcattgccatcaatcttacacggatgagttctcttcctccataccttacaaaagaaccagcaatgcaagaaatcgtgtgtttgatggatgtggctctgctaatctctctgttttaagttccagatgcaagattcctttttttggatcagcatttcatgtatcatccggtggacatgatctcggcctcacgaaagtttcggttgctgctgattattctgattcggttcctgattcatctttctatggatatcatcctctag

SEQ ID NO: 122697 - DNA, 523 bp, Arabidopsis thaliana
ccagctctcttctactcacttatggaaagctggtcacgcctgcaggtaccggtccggaattcccgggtcgacccacgcgtccgcccacgcgtccgtgagtttctacaggtcagattccacccgcatcattcagaaatagttgcgagtggaagtttagatctcgaggtccgcttatggaataccacaacttctgaatgcattagatctcatctattctatcggcctattgcttctatcgctttccatgctgagggtgaactacttgctgttgcttctggtcataagctgcacatgtggcactacaataggagaggagagggatcatcaccaactgttgtattgaagacgaggcgatctttgagagctgtacactttcaccctcatggggctccattacttttgaccgcagagtggcaggtgaatgacattgattcattagattcctcaatgtctagagcaacatctatgggctacttgaggtatccgcccctgctattttgttcacaagcacggaaagcaatcc

SEQ ID NO: 122698 - DNA, 540 bp, Arabidopsis thaliana
  unsure (1)..(540): unsure at all n locations
cagctctcnnnnnnnnnnnnnnnnnnnnnnnnnnnnnnnnnnnnnnnnnnnnnnnnnnnnnnnnnnnnnnnccacgcgtgggattcgagcaaaaaacaaaagaaatggttatggagcaagctggaacgacatcgtattcggtcgtgtcagagtttgaaggaacaatactgaagaacgcagattcattctcttacttcatgctcgtagccttcgaagcagctggtctaattcgtttcgctatcttgctgtttctatggcccgtaatcacactccttgacgttttcagctacaaaaacgcagctctcaagctcaagatttttgtagccactgttggtctacgtgaaccggagatcgaatcagtggctagagccgttctgccaaaattctacatggacgacgtatgcatggacacgtggagggttttcagctcgtgtaagaagagggtcgtggtcacgagaatgcctcgagttatggtggagaggtttgctaatgagcatcttatagcacatgaggtcatcggtacggaactgattgtaaacc

SEQ ID NO: 122699 - DNA, 572 bp, Arabidopsis thaliana
  unsure (1)..(572): unsure at all n locations
tttgcccgtttcacttcttttgctcaaggctgatgctactgtcacaactgtacattctcacaccaaggatcctgaggctatcatacgggaagctgacattgttattgctgcatgcggacaagcccacatgattaagggcaactggataaagccaggggctgcagtaattgatgttggaactaatgcagtcagcgacccgagcaagaaatcaggataccggttggttggagatgttgatttcgcagaagcttcaaaagttgcaggtttcataactccggtccctggtggtgtaggcccaatgacagtggcaatgcttctcaggaacaccgtagacggtgccaagcgtgtctttggcgagtaaaacaatctactgtatgtaataaagaaaccaagagtttctccattctgtaattgtgtacttggcttgacgatatttttccactcaaataaattgaaattggcgttccctttggattaacaaaaaaaaaaaaaaaaagnnnnnnnnnnnnnnnnnnnnnnnnnnnnnnnnnnnnnnnnnnnnnnnnnnnnnnnnnnnnnnnnnntcgtcctaa

SEQ ID NO: 122700 - DNA, 924 bp, Arabidopsis thaliana
  unsure (1)..(924): unsure at all n locations
cgccnnnnnnnnnnnnnnnnnnnnnnnnnnnnnnnnnnnnnnnnnnnnnnnnnnnnnnnnccgagacagagagccacgcgtccggagagagagagagagagagataaagggtcgataaggtctttttccgtttccttgacctctctgggatttggatttcgatttggatttcgatttcctcatctcatcgatttgcttctcaatctctccaattcgattctcctctggaaatttcaatcctttttatattttccttggtgatttctaagataattaagatcgagaaaaggagaattttgagagagaaagcatccatccatcgatggccgctatgagcgacaaggaagctatggtggatccttttttggtcgaggctcttcagaaccctcgtcatcgtctcaccattttgcgtatggagcttgatatacagaagttctttcaaagtccagagcagcaacaatatgagttccagcctttgcctacatcttatcttcgtcttattgctcaccgtgttgctcagcattacgggctatttaccactgctttagaaggtggtggtgttgatggctcagggaacagaatcctggcgaccaaaacggttgaaagtagatacccttacgtctgtttgtctgagattcctgtaaagcaacctgagattcatggtaggcctgagggtttcaaaatcgccatcaagcctaggcctaacagaggagctggtgggagtggtaggggatcaggagtagagaagaatcttttgagaagcgttgaggagagaaaagaagaagatgataaagctcggggctcgatcttcacagccctaacagttcagactctgaagattgcttaacacgagctcctcctcctcccactttttgtaagtnnaaaaacacatngttttaancccggattttggcctcaangtgg

SEQ ID NO: 122701 - DNA, 465 bp, Arabidopsis thaliana
  unsure (1)..(465): unsure at all n locations
gtttcgcgtctcttctcttctctctcagaaaatgctcatcagaaattgtctcctttttgtttccttgatgtgttttctcttctaatctccggtgaaacaaagaacaaaggattcataagacacaaagcagagaaggagagagagatacgaggcttttcttcatctttatggcttctatgaccgagaaggaagctatggtggatccttttctggtcgaggctcttcaaaatcctcgtcatcgtctcaccattttgcgaatggagcttgatatacagaagttctttcaaaaccctgagcagcttcagttcgaattcccgccttttccaacatcgtacctgcgtcttgctgcacatcgagttgctcagcattatggactagtaaccatggctttggacaatggtactggtgcaggagatggatccgataacagaatcctcgtgacgaagaccagcggaaaagnggntt

SEQ ID NO: 122702 - DNA, 1336 bp, Arabidopsis thaliana
  unsure (1)..(1336): unsure at all n locations
ctctttttaatacgtgccgactcttctctacataaactctacacccgaatctgtgtcttagagttagagagagagagaccacgccagatatacctttcttgtttcaccggttttcatacacaaaaatggcgggcagtgcctcattcgccgccgcattattcatcggactctctcttctcttcgccgtcacggctgaagatccgtacagattctttgaatggaacataacttacggcgatatatacccactcggtgttcgccaacagggtattttgatcaacggggcgtttccgggaccggacattcattcggttactaatgacaatctcatcatcaacgtctacaatagcctcgacgaacctttccttctttcatggaatggaattcaacagaggaggaactctttcgttgatggagtgtatggaacgacatgcccaatcccgccggggaagaactacacttacattcttcagatgaaggatcagatcggaagtttttactacttcccttctctcggctttcacaaagccgccggtggatttggtggcattcgtatcctcagtcgtcctagaatcccggtccctttccctgatcccgccggagataccactgtccttatcggagactggtacaaagcaaaccacacggatttgagagcacagcttgataatggtaagaagcttcctttaccagacggcatcctcatcaacggtcggtcaagtggtgcaactcttaatgttgaacaaggtaagacatacaggtttagaatatccaatgtagggttacaagactctctcaacttccgcattcaagaccataagatgaaagtggtggaagtcgaaggaacacacactcttcagactactttctcttcactagatgttcatgttggacaatcttactcagtccttgtaaccgcggaccagactccacgggattattacgtggtcgtctcttctcggtttacctcaaatgtccttactaccacgggtattttccgatacagtaattctgctggtggtgtttctggacctattcctggtggacctaccattcaaatcgactggtccttgaaccaggctcgagccatcagggctaacctttcaggcgagcgggaccaaggccaaaatccacaaggatcgtaccacttacggtatgataaacacttcaagaccggtcaagacttgctagctctgcttggtaaggtttatgggaagaacggtacggtnttaacagtntttatttaaaccggagaaatccnttgaaatcgggggtntttaaagttncgggttttaaagagngggganaaggccancccctggggggntntcctttc

SEQ ID NO: 122703 - DNA, 433 bp, Arabidopsis thaliana
ggtcgtctcttctcggtttacctcaaatgtccttactaccacgggtattttccgatacagtaattctgctggtggtgtttctggacctattcctggtggacctaccattcaaatcgactggtccttgaaccaggctcgagccatcaggactaacctttcagcgagcggaccaaggccaaatccacaaggatcgtaccactacggtatgataaacactacaagaacgatcagacttgctagctctgctggtcaggttgatgggaagcaacgatacgctgtgaacagtgtctcattcaaacccgcagacactcctctgaaaatcgcggactacttcaagattgacggtgtttacagaagtggaagcatacagtaccaacccactggtggaggaatatacctcgacacatctgttatgcaagttgattacagaacc

SEQ ID NO: 122704 - DNA, 599 bp, Arabidopsis thaliana
tctacgactcacttagggaacgctggtacgcctgcaggtaccggtccggaattcccgggtcgacccacgcgttcgcccacgcgtccgcccacgcgtccgatgggattgtgtaagcttgaaacttgactatctgggtctctcccattttctgttctcttttgtattctgagtgaaagttttgttttctgggggaaaaaattagggttcttagatggaggagatagaaggaacaaacagagcagctgttgagagttgtcatagagttcttaatcttttacatagatcacagcaacaagatcatgttggttttgaaaagaatttagtatctgaaactagagaagctgtgattaggttcaagagagttgggagtttgttaagcagtagtgttggtcatgctaggtttagaagagctaagaaacttcagagtcatgtctctcaaagtctcttacttgatccatgtcaacaaaggacaacagaagttccctcatcatcttctcagaagacaccggtactccggtctggtttccaggaattgagcttgagacaaccttcagattcactcactttagggactcgctcgtttagtttaaactcaaatg

SEQ ID NO: 122705 - DNA, 795 bp, Arabidopsis thaliana
ttaggtgcacactatagaagagtttatgacgtcgcacgcacgcgtacgtaagctcggaattcggctcgagatttgcaattggatcttctatgccttcattttgtggagctaatctgtgctgggaactgcaccgaagctctcaaatttggtaagacaagattggctccttttgggaaggtcaaaaaatatgtagaaaagcttgaagacgtaatggcattgctcgcttatgaagaccctgagaaatccccaatgttccatcttttgagctctgaataccgccaacaagttgctgataatctgaaccgcacaattcttgaacacacaaaccacccgagctacacaccaatggaaaggatcatacaacaggtgacagttgtgagacaatacttgactgaggagaatggcaaagatgcgtttcctccattctctctgaaggattctctcaaaggctaagatcgcaggactactccaaagtttgctaggaggaggatatgctaagcattgtcatgtaaatacaaaaagaccttgctcctctctaaagtttgcaaggttagtcttccatggccacaggcggggtttcagtttgctgttacaggagatcaatattgtgaaggacagtttcggcttggtttggtttggtttggttcagttctctaccagaagattgtttcatcaactttgtgtgagtttagtcgataaatctgtaatccatatctttggaatacacatttctctttgtaactatcgtttatgttttgatagaatacttgcaaattcaagggttttatttttagg

SEQ ID NO: 122706 - DNA, 492 bp, Arabidopsis thaliana
acggcgtctctccggactcacacctcatcgaaatttggccatctcatctggcttcttcccctccggcgttggataaccatcattacttctcgcgccggcttcgagtggaacaatatggatcctcgtcaattcgaacacaccgttgttgctgataatgatattcacagcattgttatgtcatatcttctgcacaactgcttcaacgaaactgcggactcacttgcttcttccactggagttaagcagcctgcaattgatcgtgataacatggagagaagaaaacaaataatacattttatactggagaggaaggcgttgaaggcttttgaactaactgaacaactagcacaagacttgcttgagaaaaacaaggatttgcaattcgatcttctatgccttcattttgtggagctaatctgtgctgggaactgcaccgaagctctcaaatttggtaagacaagattggctccttttgggaaggtcaaaaaatat

SEQ ID NO: 122707 - DNA, 503 bp, Arabidopsis thaliana
aggtgacactatagaagagttatgacgtcgcatgcacgcgtacgtaagccctcaagtagaaagcctacgaaatagcatcggaccaaaagacaaactcaccgagtaaacatacgcaacctgtcgtgtaagtaaaaacaatttgatagtgatctctctatgtttggtggaggaagagggcctatgggtggcggcggaggtatgttacgcgccgccggtcgtgcgatgacgaggaccggtgtagccaacggtggtattcaagatccctttgcttcttcatcatcatcgtccacgtcgtctccggctggaaacgcctctgtttcgcatgtccagaaacagagatcttcttcttctgggtcgaataatctgacgtattccgcggcttctgggttgttgttgaatcttccggtggctgcaacctccggatggagcggcggcggtcctttttcctttgttaattctggaggttatgatgattttgagtgggtttctgaggaagaagatga

SEQ ID NO: 122708 - DNA, 651 bp, Arabidopsis thaliana
atgatactccaggtctctacgactcactattgggaaagctggtccgcctgcaggtaccggtccggaattcccgggtcgacccacgcgtgcgcccacgcgtccgcccacgcgtccggcaaatttcaaagcatttcaaaaaccctagcctatctctctttatctctcacaacaaaatctttgaaatggcgatctctaaggcttccattgttgttctcatgatggtgattatctccgtcgttgcatcggcacaatctgaggcaccagcaccaagtcctacttctggatctagtgcgatctcagcgtctttcgtgtcagctggagttgcagcagtcgcggctcttgtttttggctcagctcttcggatctaagttactgtgatggtgatttcgtacagagattgtttttgcggtataggccattcatcattattcgtcgtctcgtgtgtattccgaagcagcttatagatctcattttctatttgtccctcttcttcttcgttttctatcttaatcttcatatctgtatgaggatattactatttctttttagagtatttgtggttttgtgattttctagacgatttcttagttatgcgatatggtttttgatatgatatgaatcttattctatttatttatatggatttccctt

SEQ ID NO: 122709 - DNA, 505 bp, Arabidopsis thaliana
tacgcctgcagtaccggtccggaattcccgggttgaccacgcgtccgcccacgcgtccgtatctaataaatggcgttacaaaggcaactcctgaagagagctacttccgatatctatcaccgccgtgcgatctctctcctccgtactgatttctctacttctccttcgattgctgatgctccgccgcacattccgccgttcgttcaccagccacggccgtataaaggtccttccgccgatgaggttttacagaaacggaagaagtttctcggaccttctcttttccactactaccagaagcctcttaacatcgttgaagggaagatgcagtacttgtatgatgagagtggtaggcgatatctggatgcctttgctggaatagtcactgtgtcgtgcggtcactgccatccggatattcttaatgcgattacggaacagagcaagctacttcagcacgcgactactatttacctgcatcatgccattggtgattttgctgaagcat

SEQ ID NO: 122710 - DNA, 556 bp, Arabidopsis thaliana
aaggaaaaaacactagtcgctcgctgctcttcaattttcttctcgaatctaatcgattgatttctccttcgattcttcaggagaatcactgaagcttttgcctcccaagtagaaagagatatggcaactcttgaagattctttccttgctgatttggacgagttatctgacaatgaagcagaattggacgagaatgatggtgatgttggaaaggaagaagaagatgttgatatggatatggctgatttagagacacttaactatgatgatctcgataatgtttctaagctgcagaagagtcagagatatgctgatattatgcataaagtagaggaggctcttgggaaagattctgatggagctgagaaaggaactgtcttggaagatgatcctgagtataagcttattgtggattgtaatcagctttcggtcgatattgagaatgaaatcgttattgtccacaactttatcaaagacaagtacaagcttaagtttcaagagcttgagtcgttggttcatcacctattgactatgcatgtgttgtgaagaagattgg

SEQ ID NO: 122711 - DNA, 812 bp, Arabidopsis thaliana
ctctcttcttttctcatcaaacttatttctctctcgatcgcaatatatacgattccataaattctcccaaaaacaaattaagagatagaggagagatcatgaggtcaccggtgcaactccaacacggctcagacgccactaacggtttccacacgctgcagcctcacgatcagaccgatggtccgatcaagagagtgtgtctcacgcgcggtatgcatgtccctgaacacgttgcgatgcaccacacacacgacgttggtccggaccagtgttgctcctcggtggtgcagatgatccacgcgccgcctgagtccgtgtgggctcttgtgcggcgtttcgataatccgaaggtttacaagaacttcatcagacagtgccgtatcgtccaaggcgatggactacacgtcggcgatctccgggaggtcatggtggtctctggactcccggcggtctcgagcaccgagaggctcgagatcttggacgaggagcgtcacgtgataagctttagtgtcgttggtggggaccacaggctcaagaactaccgatcggtgacgacactacacgcgtcggacgacgaaggtaccgtggtggtggagtcttacatcgttgatgtgccgccgggaaacacggaggaggaaactctaagcttcgttgatactatcgtccggtgcaaccttcagtctctggctcgaagtaccaaccggcaataatctcatctttcttatataaattgcaattatgtatctaattttttttgttgttctatttcttttagatgttcgatattctttacaaaaaagaaaatttcgagt

SEQ ID NO: 122712 - DNA, 609 bp, Arabidopsis thaliana
  unsure (1)..(609): unsure at all n locations
nnnnnnnnnnnnnnnnnnnnnnnnnnnnnnnnnnnnnnnnnnnnnnnnnnnnnnnnnnnnnnnnnnnnnnnnnccacgcgtccgcccacgcgtccggggcgctaaatgataaatcttctacatcaaacttgaaaattgaagctcttgtcttcaccaaattagtcttggcatcacatgcgcctcctgtttttcacccttacattaaggctctttcaagtcctgttttagctgctgttggtgaacgctattataaggtgactgctgaggcattaagggtttgtggggaacttgtcagagtagtacgcccaagtactgcgggaatgggctttgattttaaaccgtttgttcatccaatctacaatgcgataatgtcccgcttgacaaatcaagatcaggaccaggaggtcaaggagtgtgctatcacctgcatgggtcttgtgatttcaacatttggtgatcaactgagggcagagttaccttcatgccttcctgtgcttgttgatcgactgggaaacgaaatcactcgcctcactgcagtaaatgcattttctgtcattgccacttctccgcttcaaattaatctatcatgtgtcttggaccatttgattg

SEQ ID NO: 122713 - DNA, 410 bp, Arabidopsis thaliana
atgctttcttcgatttgcttctgctttcttcgatttgcttctgctttcatcgcggttcaggtcactcttttcgcagccatggcgattcctttcatggaaaccgtcgtgggttttatgatagtgatgtacatttttgagacgtatttggatctgacgcatctcactgctctcaagcttccaactctcccgaaaaccttggttggtgtaattagccatgagaagtttgagaaatcacgagcatacagtcttgacataagctattttcactttgttcatgagtttgtaactatacttatggactctgcaattttgttctttgggatcttgccttggttttggaagatgtctggagctgttttaccgaggttgggccttgatccagagaatgaaatactgcatactctttcatt

SEQ ID NO: 122714 - DNA, 535 bp, Arabidopsis thaliana
  unsure (1)..(535): unsure at all n locations
agggcttctctaccgtttcgttgatggtcaagagctttcttcccccaatgggcttgatggctctttggggcttataggtggctattccgcttattctcatgacgttaatgtctacttgctacctcttaaggaagtgatgagggagacaatggaaagtttcatgcgcgacctcggtttcgcgagtagattagaccttattgttatggctgcatccgtagttgccagtctgaaaatatttttattagactgcacaaccggacagctttttactgggacaagtaaccgccaattgcttccttgtgtacccgatgctttggttagatcggttcatgataccaacggcgatcagcaacaggatgccatgctgctttggttggaagaacatggccggcggttacaaaccggcactataaatgtccgtcaacagaacaatgtcaagagtatcagtttgttcccggagatttccttcccttgtgttccggctctgccggaactaaattggtggtgcaagtacggngttncgnctttttttttt

SEQ ID NO: 122715 - DNA, 525 bp, Arabidopsis thaliana
tgattttgccagctctacttcgactcacatatatggaaagctggcacgcctgcaggtaccggtccggtattcccgggtcgacccacgcgtccgcccacgcgtccggtggtttgttagggaagcttgaggactagtctgcgtattttttacatatttcacagttttcacagtacagtttggctttataagagttgggatatgggaagaacttctacaaggatcactatggggttatattcatcttttaatattctccttcaatgtatttatgatcattgcaagtcatttaaaatgtatgacaaccgagcctggagtcctcccacgagattatgacgagttggatagttagaaattaccaccggaactaagtttagctcttaactaaattcacaattctttactttaagaggaggatgattcgaatacttaataaaatcacagttaagatatatgtgttgatacataggcttccagccaatatggaaataatgttaagagcctaaagtttcagcagttcttcaaaga

SEQ ID NO: 122716 - DNA, 1365 bp, Arabidopsis thaliana
  unsure (1)..(1365): unsure at all n locations
aggaacttgaggagcattttcatgggcttgagaggtctttgaagagaaggtttcatgagcttgaagatcaagaaaaagagtatgaaaccaaaacaaggaaagctcaagaactgttggagaaaaagaaggcagctgttgaggctaaggagaaggcggcgcttgaaaggcttcagaagaagagagacgcagctatgtttactataaacagtgctttggataagtataacaacgctcctgtcagtaaaccttctgttggtgaacgttggccacaaaatgctgtagaggattcatccaatgtctttgctgctgatagtattaccgatgataatccggatggtattgtgcaagatgttcagatctcacctgtgatgggaaattatgaggtgaaggcttatccacagttactgaaactgtgcggggatatggactcaacgggtctccataagtttgtatcagataaccgcaagaaccttgcatcactaaaggaggagattcctatggcgttcagggctgcagcaaacccagccagcttagtgttggactctttggaagggttttaccctatggaggcaccaactgctgatggaaaaaaagacgctaacctcttgggcatgcgcagaacctgtatcatgttgatggagtcccttagcatactgttatctggtctggaccgcaactgccttgctgttgttctctcacaaaatgttaagcatagagccaaaactattgcagaaggatggaatccactgctggaatctcttgacatggatgcttgcaatggtaattctttggaggctcatgcattcctgcaactgctggccacttttgctattgttgctgattttaaagaagatgaactcttaaagctgatccccatggtttcacgtcgccgtcaggcagctgagctctgccgttcacttggattagctgaaaaaatgcctggtgtgattgaagttctcgtgaacagtggaaaacagattgatgcggttaacttggcatttgcgtttgaactcacagaacagttctcacctgtctcattactgaaatcttacttgatagaggcaaggcgatcttccccccaaggcagacctggcaatgcatctcctgctgttcaggatgagttcaatgagcgggagcttataggcctcaaaaccgttataaagtgtatcgaagagcatagcctggaagagcagtacccagttgagccacttcacaaacggattctccagctcgagaaagccaaagcgggccaaaaaggggggcaaccagaacccattggaaacctctaagccaaaacgggccccggcgggggttctaaaccccgnggnttnatttncaaanaaccanttanctttnccaanacac

SEQ ID NO: 122717 - DNA, 668 bp, Arabidopsis thaliana
  unsure (1)..(668): unsure at all n locations
cctactaccggtatnnnnnnnnnnnnnnnnntcactagtcacgaccacacaaacaaaaaaaatataacatttagagagagagaaaggtacagcagtggcaaactcgtaaataaagaatgtcaaaagattgcggtaaccacggtggtggcaaagaagtagtcgtccggaaactctgcgccgccataatcgccttcatcgtaatagttctaatcaccatcttcctagtttgggtcatactcaggcccactaaaccaagattcgtcctccaagacgccaccgtctacgccttcaacctctcgcaaccaaacctccttacttcaaacttccaagtcacaatctgcatctcgtaaccctaactccaagatcggaatctactacggaccgtcctccacgtcttacgctacatacatgaaccagcagatcactctacgtacggcgattcctccgacgtatcaaggccacaaagaagtcaacgtttggtctcctttcgtctacgggactgcggttcccatcgcaccttacaactccgtcgctttgggagaggagaaagatcgtggatttgtagggttgatgatacgcgccgatgggaccgtgaggtggaaagtgaggactttgatcaccggaaaatatcatatccatgttcggtgtcaggcgttcatcaatcttgg

SEQ ID NO: 122718 - DNA, 1214 bp, Arabidopsis thaliana
  unsure (1)..(1214): unsure at all n locations
nnnnnnnnnnnnnnnnnnnnnnnnnnnnnnnnnnnnnnnnnnnnnnnnnnnnnnnnnnnnnnnnnnnnnnnnnnnnnnnnnnnccacgcgtccgaaaaaaaagaactctttcgtcgactaatgtgatttattgttcaccggagtattaaagaagatgatgatcggagaaactcgcaggacttatcccactgttgaaatacctccatggccggtacttgaagagcttacaacgtcggagtttttttctccggtgatgaatagtccagattgtagcatgcttgaagctttggcggggttgcagcgttatttgccgtctaacgaaccggatccggagtcatacccggatctattgggtccggattcaccaatcgatgcttactcatgcgaccatttccgtatgtacgatttcaaagtcaggaggtgtgctcgtggccggagtcatgattggacggagtgtccgtacgctcatcccggagaaaaagctcgccggagagatccgaggaagtaccattactctggtacggcttgttctgattttcgtaaaggtggctgcaagaaaggtgactcttgtgagtttgctcatggcgttttcgagtgttggcttcatccagctcgttaccgtactcagccgtgtaaagacggtggtaactgtctccggaaaatttgcttctttgcccattcaccggatcagcttaggtttttacatactcggagccctgacagagttgattcttttgacgtttcgtctccgattcgtgctagagcatttcagctgtcgatttctccggtttctggttcgccaccgatgagtccaagagctgactcggagtcctctccgatgactcagtcactgagtcgatctctcgggtcttgttcgataaacgacgtcgttccttcgtttaggaatttacagtttaattcggtaaaatctgaccgtatttcgaagtctcattggcttttttggatatcttccaaggaaaagaggaagggatcttagtgtgttcatattattttatttactaatctcgtattttatctgctaataagaattaattatggattttggggcctgatttttctaagatgatcgttgtatagatgtgccttagggttttaattatgaaatagtattaatataaccgtgttttataagactataatgttagattgtaaccacttggtactaatctatgaatgaatgcaaattattatct

SEQ ID NO: 122719 - DNA, 516 bp, Arabidopsis thaliana
gggggaagaacccgtaatggagcgtgtcgttgagtcgggtcgtgagctacgagaaaagatgcgcgagaaactgcacaaggagaattgcatggatcgagttgcccaggatccggatcagaatttgggcgaggctcctgatgtcgggtgggtatctgacctgctcatgtaaagaaaaaaatctgaccgtatttcgaagtctcattggcttttttggatatcttccaaggaaaagaggaagggatcttagtgtgttcatattattttatttactaatctcgtattttatctgctaataagaattaattatggattttggggcctgatttttctaagatgatcgttgtatagatgtgccttagggttttaattatgaaatagtattaatataatcgtgttttataagactataatgttagattgtaaccacttggtactaatctatgaatgaatgcaaattatttttctaaaaaaaaaaaaaaaaagaaaaaaaaaagggcggcagctctagaggatcca

SEQ ID NO: 122720 - DNA, 491 bp, Arabidopsis thaliana
  unsure (1)..(491): unsure at all n locations
nnnnnnnnnnnnnnnnnnnnnnnnnnnnnnnnnnnnnnnnnnnnnnnnnnnnnnnnnnnnnnnnnccacgcgtccggctttagtgagtggaggcatagatagctgttatgctatgatgaagtgtatccaatacggtcacgagatcgtggcattggctaatttgttgccggttgatgattccgtcgatgaattggacagctatatgtatcaaactgtaggccaccagattttagtgggttatgcagaatgtatgaatgtgccattgttcagaacaagaatccgaggttcttcatggcatcagaaacttagctaccagctgactccagatgatgaagtggaagatatgtttgtcctgttaagtgaagtgaagagacagataccttccatcactgcagtatcgtctggtgccattgcatcagactaccaacgactgcgtgtggagagtatttgttcaaggttaggccttgtttctttggcatttttgtggaaac

SEQ ID NO: 122721 - DNA, 595 bp, Arabidopsis thaliana
cttccggacaaaccatcttcaagatcccttacctacgtacccaaaaccggttttaaccaaagaagaacaggaggtggacgagaaaatggtgagcttgcaagcacagagtatcgtgaacaccgtggctttccctatggttctcaaagccgccttcgagcttggcgtcatcgacaccatcgctgctgcaggaaacgacacgtggctctcaccgtgtgagatagcgtgtaatctcccaaccaaacccaccaacccggaggcgccggtgttgcttgaccggatgctgagcttacttgtcagccactcgatcttgaagtgccgtatgattgaaaccggagggaacggtcgaaccggaaagatcgagagggtgtatgcagcccaaccggtttgcatgcatgttgtgagagatagtgatgggacaagatctatcgcgcctatgttcatgtagctccatacccaagtgtttttcatgacttggacagatcttaaagatgtgatactagaaggaagagatgcgtccaactctgcccacaagattgataatctttcaatacataaattcagatcaaccatgtgctgagtcgataatcgtgcaatg

SEQ ID NO: 122722 - DNA, 515 bp, Arabidopsis thaliana
  unsure (1)..(515): unsure at all n locations
cnnnnnnnnnnnnnnnnnnnnnnnnnnnnnnnnnnnnnnnnnnnnnagtggtggcgagatcttggatcatcttcgcttggccgcttgggcggtggtcgtcggcatcgtcactaattaattattgtgattaagaaaaaatgctaaattgagtttcgtcgtcttctgcttctgcttaagcttcttcatcatttagctccagaggcggagctttcttctctctctgtggacgaccatggcggcggacgacggcgaccccactaaattcgctgcaatctacgactcatcctctccgtcacaccctcttctctctaaaccctccacgtccgctctcgattctccgcgtcgaagtgatcccgaatccgacccaactcagtttcttcagatctcctacaattttggcccaagaactttcaaggacatccctttcctacttctcttcgatcttctcggactctccacctttgggtntggaatcttctccatttttcatagaaataacgattacgggaactcct

SEQ ID NO: 122723 - DNA, 527 bp, Arabidopsis thaliana
  unsure (1)..(527): unsure at all n locations
cggaanaaccgggccgacccagcgcgtgcgtttcagatctcaaaaactttttctcttttccgattccaatcttctctcgtctgctttcctcaaaggttttttcatcactttatgcttcacaagcgagctagtgaagctaacgataagaacgataataccatcatcggttccgatttagcatcatctaagaaacgccgtatcgatttcactgaatcttcgtctgataagtcttcttcgattttagcttctggtagtagcaggggttttcacggcgatagcgtcgttcagcaaatcgacatggcttttggtaattcgaaccgtcaggagattgatgaagatctgcacagtcgccagctcgccgtctatggtcgtgagactatgaggcgtctctttgcttccaatgttctcatctcggggatgcacggtcttggtgccgagattgccaagaatcttatacttgcctggtggggagtctggggccctgcatgatgaaagagttgtagagctatgggacttatcaagcaact

SEQ ID NO: 122724 - DNA, 522 bp, Arabidopsis thaliana
  unsure (1)..(522): unsure at all n locations
nnnnnnnnnnnnnnnnnnnnnnnnnnnnnnnnnnnnnnnnnnnnnnnnnnnnnnnnnnnnnnnnnnnnnnnccacgcgtccgaaaaagcgtttcctctccttctctttccatttctctctctctcctctctcgctcgctggcttcgaggagaaaaaagaaaaattggagaaataatttaactggttctcggagaatctagggttctttttagccacgccttgctgatctccttcgtgaattcgattccgattctcacctggtcttttgtggcctaaagctcataagtttatgctagtgcaagaagttatataggaatgacatattagatttacaatgatggaagtggggttctctcttattcagtggttgatcagttctggtgctgacagtccgtttatatttggatggcttgtaactggatctgttggccttctggctgttatctacacatttcttanatggcagaaaaaacttctttaaattgggttaaagctgctgctagagagaagaagaaggtatgg

SEQ ID NO: 122725 - DNA, 1298 bp, Arabidopsis thaliana
  unsure (1)..(1298): unsure at all n locations
atgatactccnnnnnnnnnnnnnnnnnnnnnnnnnnnnnnnnnnnnnnnnnnnnnncccgacccgaatttccgggtcgacccacgcgtccggcttcttcttcctttagtaaattcaagtgtgaggtgtgtttattgataaagtgctcattttctcggatctcagatcttagatccaaaccctcattatttcattgatccaagatctaatagcttgagcttgctgggattttagttatggcgagacggcaagtaggttcaacaagacgtgttggcgatggtggaagcttcccttttgcaggagctttacactcaaagtctcgatcttctccactactatctatttgccttgttcttgtgggggcttgtcttctcattggttatgcttacagtggtccaggtatatttaaaagtatcaaagaagttagcaaagttacaggtgactattcttgcacagcagaagtccaaagagccattcctgtacttaagaaggcttatggagatggcatgcgcaaagtcttgcatgtgggccctgacacatgctcagtggtttccagtctattgaaagaagaagagactgaagcatggggtgttgaaccatatgatattgaggatgcagattctcactgcaagagttttgtgagcaaaggtcttgtacgtgttgctgatatcaagtttcctctgccctaccgggcaaaatccttctctcttgtgattgtgtcagatgctctggattatctctcacccaagtacctgaacaagaccgttcctgaactcgcaagggtggcttcagacggtgtggttctttttgcaggtctccctggtcagcagagagctaaagttgctgaactctctaaattcggccgacccgctaaaatgcgtagcgcatcgtggtggaaccgctttttcgtccagacaaacttagaagaaaacgatgcaccaagcaagaagttcgaacaggctgtttccaaaggattatacaaaccagcctgccaagtcttccacctcaagccattacattaaccagccaccaccaaagcctactggttccacaccaaagcatatttacacgtagagccgcacgcgaaaaaaaaaaatagcgtaatcgatatttctccttgtattttgtaacaggtcagtttttatccttcaatgttgtatccgccaacacaatttttcctattcaattaaatcataattattatcaccaaaaaaaaaaaaaaagnnnnnnnnnnnnnnnnnnnnnnnnnnnnnnnnnnnnnnnnnnnnnnnnnnnnnnnnnnnnnnnngtaacgaaatt

SEQ ID NO: 122726 - DNA, 438 bp, Arabidopsis thaliana
agcactcgataattaacactagggacgaagaagctctcgtttagtaaattttagcttagaacacagaagaagcattttttcggatctgagatctttagatccgaacatcgtttatttcaaatcgtttattcaaggtctaaaaaaaagttttgaagaatcatagccatgtcaagaaggcaagtaaggcgtgtaggggatagtggaagcttcccatttgtaggagctctgcattcaaaatcacgttcgtctcctctgttatcagtttgccttgttctcgtgggagcatgccttctcattggttatgcttacagtggtccaggtatgttcaaaagtatcagagaagtcagcaagattacaggtgactattcttgcacagcagaagttcaaagagccattcctattcttaagagtgcgtatggagatagcatgcgcaaagtc

SEQ ID NO: 122727 - DNA, 3241 bp, Arabidopsis thaliana
  unsure (1)..(3241): unsure at all n locations
agtgaagtaacttcaaaggccctaaactcacttccttacgattcacccggtcaagcctttgtggtttttgagaagccagctggggtccctgctgttggaaagttctccaacacattgactttcgttgttaaggaggttgacccaagcacagtgtgaagcagaagatgatggagtagaagatgagtaccagctagaggatcttgaggttgtagctggagattacatggtgaaagtgggtgtctccaatttcaggaatgcgtgggaaagcatggatgaagaagatgagcgtgtagacgaatatggccttggccaaagagagagtttgggagaagctgtaaaggctgtcatggatcttcttggcatgcagacttgtgaggggacggagacaattccgctcaatgcaaggtcacacacgtgtctattgtcaggtgtgtacataggcaacgtgaaagtgttagtgagggcacagtttggaatggacagctcaaaggacattgcaatgaagctgacagttagagctgaagacgtttctgtcgccgaggccattcacgagattgttgccagcggctaaaacctcttgcgtttcttcagtatcagagaatgtcatctattcctgctgctaaacctcaaaaatacatcaactattataaatagcatagtattactttctttcttttttccttgcattattactgtcaaatacactatggaggttttctttttattttatgacggtgctttttgatttctcaaaaaaaaaaaaaaaaagattagagatcttcttctttctcctgttgcatctgaagataaaggaaacagaaagcgcgagatctgagtgacggagtaatttcaaagggaggttttcgagatcagaaatggcgcaacccctcgtgaagaaagacgatgatcacgacgatgagttggagtattctccattcatgggaattgagaaaggagcggttcttcaagaggctagagtctttaatgaccctcaggttgatcctagacgatgctcccaggtcattacgaagcttctttatttgcttaaccaaggggagtcattcaccaaggttgaagcaacggaagttttcttttcagttacaaagctttttcaatcaaaagacacgggtttgaggagaatggtctacttgatcattaaggagttatctccatcatctgatgaggttatcatcgtaacaagctctctgatgaaggatatgaatagtaaaattgatatgtatcgagcaaatgctatccgtgtcctctgccggataatagacggaacccttctcactcagattgagcgatacttgaaacaagccattgtggataagaatcccgttgtttcaagtgcagctttagtcagtgggcttcacttgctcaagacaaacccagaaattgttaaaagatggagcaatgaagttcaagaaggtattcaatccagatcagcccttgttcagttccatgccctagctttgctccatcagatacgccaaaatgatcgcttggctgttagcaaattggttggtagcttgaccaggggatctgtccgctctcccttggctcagtgtcttttgatacgttacaccagccaggttatccgtgacatggccaaccacggtcaatctggagaacgtccgttctatgaatttttggagagttgcctgcgccataaggcagaaatggtgatccttgaggctgccagggcaattactgagcttgatggtgtgacaccccgcgtccggactccagcaatcactgttcttcagctctttttgagttcccccagaccagtgttgagatttgccgctgtccggactctgaacaaggttgcaatgactcatcctatggctgtcaccaactgcaacattgatatggagagtttaatctctgatcaaaatagaagcattgctacactcgcaataaccacactattgaaaacagggaacgaatcaagtgtagaacgtttgatgaagcagataactaattttatgtcagatattgctgatgagttcaaaattgtggtcgtggacgcaataagatcgttgtgtgtgaaattcccactgaaatacagatccttgatgaccttcttaagcaacattcttagggaagaaggtggatttgagtataaaagagcaatagtagattctattgtgaccattatcagagatattccggatgcaaaggaaagtggactgcttcatctatgtgaattcattgaagattgtgaattcacatatctttcaacacagatccttcattttctgggaattgaggggcctaacacctcagatccaagcaagtatatacgatatatatataatcgtgtgcatctagaaaacgccactgtccgggctgctgctgtttccacacttgcaaagtttgggtttatggttgaatccttgaagccccggattactgttctattgaagcgttgcatctatgacagtgatgatgaggtccgtgatagggcaacactatatttgagtgttcttggtggtgatggtactgttgacactgataaagagagcaaggatttcctatttggttccctggaggttcctctagtcaacatggaaactagtctgaagaattatgagccctctgaagaagcttttgatatcaactccgtacctaaggaagttaaatctcagccccttgcagagaagaaagcccagggtaaaaagcccactggtcttggtgcaccaccagctgcacctgcttctggttttgatggctatgaaagacttctctcatccattccagagtttgccgcctttggaaaacttttcaagtcttctttacctgtggagctaactgaagcagaaacagaatacgctgtcaatgttgttaagcatatctttgacagtcatgtggtgtttcagtacaactgcactaacacaataccagagcagttgttggagagggtcaatgtcattgtagatgcttcagaagctgaggaattcagtgaagtaacttcaaaggccctaaactcacttccttacggttcacccggtcaagcctttgtggtttttgagaagccagctggggtccctgctgttggaaagttctccaacacattggctttcggtgttaaggaggttgcccaagacaggtgaggaggaggtgntgggtagaaggtgggcccnctgggggcctttaggtttagctggggttcatgggaaggggggtccatttaggattgggggaacatggtagaagtaccgttgcggtttcctnc

SEQ ID NO: 122728 - DNA, 420 bp, Arabidopsis thaliana
ataccatttagattagcagcgaatttcaaacggagatgtcagaatcagtgattcagggatcgaatccggatcgggttttatctccgacgagctcgaaatcagtgacgcagacggtgaacgggtcgcatcaattcgtgattcaaggatacagcttagcgaaagggatgggtatagggaagcacatagcgagtgataatttctccgtcggaggttatcagtgggggatcttcttctacccggacggtaagaatccggaggataattcgtcgtacgtctctgtttttatcgcattggccagtgaaggaaccgaagttagggcgcttttcgagctagctcttgttgaccaaagtggaaaggggaaacataaggttcatagccattttgagcggtcactcgatggtggcccttatacactcaaat

SEQ ID NO: 122729 - DNA, 432 bp, Arabidopsis thaliana
  unsure (1)..(432): unsure at all n locations
nnnnnnnnnnnnnnnnnnnnnnnnnnnnnnnnnnnnnnacccacgcgtccgtttttattttctttctttttttttttgttagtttttttttttttctttcttcatctcgtgaacgatatagtacctgaaccctagcggaggaaaatcaaaaattgtctaggagaaacaaacagagatatctttctttctttttatcagtggggaaaaaaaatgcagaatccgagactgaagcaacatcagcagcaacaacaacaacaagctatgatgcagcaacaagctctgatgcagcaacactctctttaccatcctggtgttttggctcctcctcagttagagcctgttccaagtggaaaccttcctcctggttttgatcccagtacttgccgtagcgtgtatgttggaaacatccatacacaggtcacagagcctttg

SEQ ID NO: 122730 - DNA, 926 bp, Arabidopsis thaliana
  unsure (1)..(926): unsure at all n locations
agcttctttgtgaccgacgattctttggatcaattgaaggctcaattactcgagaaatcgggtctgaatttcaccacattcgaagctcttggtgcttacatttggcgtgcaaaggtaagagctgcaaagactgatgaaaaggagaatgtgaaacctcgcgtttcgataaatataaggagattgatgaatccacctttgcctaaaggctactggggaaatggatgtgtgccaatgtatgctcagatcaaagctggagaactcattgagcaaccaatctggaaaactgcagagctcataaaacagagcaaatccaatacgagtgatgaatatgtacgctcctttatcgacttccaagagctgcatcacaaagatggaatcaatgccggtacaggagtgaccggattcacggactggcgatacttggggcattccacgattgattttggatggggaggacctgtgacggttttgccactatcaaacaagttgcttggaagcatggaaccatgttttttcttgccatattctactgatgctgcagctggaagcaagaaagacagtgggtttaaggttttggtaaatctgcgcgaatctgcaatgcctgagtttaaagaggccatggataagttccacaaaggtgaatttgccctgtcttgatcaccgacaaaacgacctccatagatgcccaataaaacacaaacacaaaatcatcaaccatttgtacaatttcgatttcgtcactgaacaaatgttttggagctcagtgtatttgatttgaagagcgtccattaagagaagccttaccctatgtttcacagttatcgcttctgtcaaaaaaaaaaaaaaagnnnnnnnnnnnnnnnnnnnnnnnnnnnnnnnnnnnnnnnnnnnnnnnnnnnnnnnnnnnnnnnnnnnnnnnnnnncaa

SEQ ID NO: 122731 - DNA, 915 bp, Arabidopsis thaliana
  unsure (1)..(915): unsure at all n locations
atgatctagccagctacctaatacgacttctatagggaacgctggtacgcctgcaggtaccggtccggaattcccgggtcgacccacgcgtccgcccacgcgtccgctcaagcagcaaacagggaatgataatatcgaagttgggaaaatcaggccaagcctttttgatgcgtttggtgatgattcgagcccgaaagtgaagaagtttatgaaagtgatcttaggtaagcttcaggctggaaatggagaagaaggtggattaatgggaatgcttggcaaattggcttcagggtttcttgagggtaaactaaacgatgaagactatgtgaaacccgctatgcagacacacgttgggagtaaagaagaggtttatgctggtggatcaagaggttcggttccgcttccagacagcgggatactgatcagcggttgccaaaccgatcagacctctgctgatgcgacttcagcggggaaacaactgaggcttatggagcgatgagcaattcgatacagacgatattggaggagacagacggtgagatatcatacagagaaatggttaccagggctaggaaggcattgaagaagcagggggttactcagcagccaggtttgtattgccatgatggttatgccaacgctcctttcatctgttgaaaacagaggttttattgaatgttttttactacgtacgacaccgtgattggaagtctggtcggaaaaataagcctgtttttctttttgctgttgatggcattatgtaattacagttatgtgtgtgggtctgtgaacctaaaatcttcttgttatggaatcatatgtgggtggaaatatntttggtttctttctggaacctttgatttgacacattaaaaagttttttacngacaaaaaaaaaaaagggggcgctaaaga

SEQ ID NO: 122732 - DNA, 819 bp, Arabidopsis thaliana
  unsure (1)..(819): unsure at all n locations
caagctggaaatgaaaaagaaggtgattaaatggaatgcttgccaaattggcttcagggtttcttaagggtaaactaaacaatgaagactatgtaaaacccgttatcaagacacacgttggaagtaaaaaaagggtttatgcggtgggatcaaaaggttcggtttccgcttccagacagcgggatactgttcagcccgggtccaacccgatcagccttctgctgatccgactccagcggggaacccaactgaggcttatggccgcgatgagccatccgatacaggcgatattggaggagccagacggtgagatatcaaacagagaaatggttacaagggctaggaaggcattgaagaagcaagggtttactcagcagccaggtttgtattgccatgatggttatgccaacgctcctttcatctgttgaaaacagaggttttattgaatgttttttactacgtacgacacgttgattgaagtttctggtcggaaaaataagcctgttttttttttttgctgtttgatggcatttatgtaatttacaagttatgtgtgttgtgttctgtgaaacactaaaattcttcttgttttattgagatctattatgttggttgtgaaattattttttgtttttcttttcttgttaactctctgtattctgcacatcaataagaaaaagtttttttttaacggaacataaaaaaaaacaaaaaaaggnnnnnnnnnnnnnnnnnnnnnnnnnnnnnnnnnnnnnnnnnnnnnnnnnnnnnnnnnnnnnnnnnnnnnnggannnnnnnnnnnnnnnnnnnnnnnnnnnn

SEQ ID NO: 122733 - DNA, 902 bp, Arabidopsis thaliana
  unsure (1)..(902): unsure at all n locations
cccacgcgtccggtaaatataatatataagatcgatctcacttttggtcggaataagaagctattggatcgctgacagataatccgatcagattcagagagttttatcgatcagatcattttttctcaatgacgaaaaaggcggtgcttattgggatcaattacccaggaaccaaggcggagttacggggatgcgtcaacgatgttcgtcgtatgtacaaatgtctcgttgaacggtacggcttctccgaggagaacatcaccgttctcatcgacaccgatgaatcctctactcagcctactggcaagaacatccgccgcgcgcttgctgatctcgtcgaatctgccgattccggcgacgttcttgtcgttcattacagtggacacggtacgaggttgccggctgagactggtgaagaccgatgacacttggtttcgacgagtgtaattgttccttgcgacatgaatctgattactgatgatgattttagagatcttgtggacaaggttcctccaggttgcagaatgacaatcatttcagactcttgtcacagtggtggcctaatcgacgaagccaaggagcagattggagagagcactaagaaagaagccgaggacgaagatgaatctgaagaatcttcttcaagattcgggtttaggaagttcttgcgcagcaaagtggaaggcgccatcgagtctcgagggtttcacattggagggaacaagaaggatgaagatgaggcggaagaaatcgagactaaggagattgagcttgaagacggagaaacgatccatgccaaagacaaatctcttcctctgcagaccttgattgatattctcaagcagcanacagggaatgataatatcgaagttgggaaaatcaggccaagcctttttgatgcg

SEQ ID NO: 122734 - DNA, 586 bp, Arabidopsis thaliana
  unsure (1)..(586): unsure at all n locations
cnnnnnnnnnnnnnnnnnnnnnnnnnnnnnnnnnnnnnnnnnnnnnnnnnnnnnnnnnnnnnnnnnnnnnnnccacgcgtgcgcccacgcgtccgcccacgcgtccgcccacgcgtccgcacaaaaatggcgtcgacgaagccattgattgtcgcagcgaagacgctccgaaaccggatccacttccgatctggatccacatctactggtccaagccggtgggcgacaccgggtcacgaagaacgacccaaaggatatttcatgaaccggactccgccgcctccaggacagtcgcgcaagtgggaagattgggagcttccatgttacatcacaagcttcctcacgattgtaatcctcggagtgggtctcaatgccaaacctgatctttcaatcgagacctgggctcaccagaaagctcttgagcgcctcgagatggagaagcttgcatctgccggagattcatctggttaatcccaaaacttgggagatatgattcaatggttgatctggtatgtatgtgttttgtttgtttttccggggatttgaggagattttcccatttatgatgatgatcacgaatactagt

SEQ ID NO: 122735 - DNA, 603 bp, Arabidopsis thaliana
  unsure (1)..(603): unsure at all n locations
gcttcaaacaccacttgcagtttttcttattctcctgtcttgtctaaagaaaaaagagagaggaagaaatggagacttttgaggaaagctctgatttggatgttatacagaaacatctatttgaagacttgatgatccctgatggtttcattgaagattttgtctttgatgatactgcttttgtctccggactctggtctctagaaccctttaacccagttccgaaactggaacctagttcacctgttcttgatccagattcctatgtccaagagattctgcaaatggaagcagaatcatcatcatcatcatcaacaacaacgtcacctgaggttgagactgtctcaaaccggaaaaaaacaaagaggtttgaagaaacgagacattacagaggcgtgagaaggaggccatgggggaaatttgcagcaggagattcgagatccggcaaagaaaggttcccgggtttggttaggcacttttgaggggtgatattgatgctgcaagggcttttgcctatgcagcttttaagtcaggggaagaaaactgtnnaaacttcctttggtcagaagatnttcccgcattntccgaaagggggcccgtttg

SEQ ID NO: 122736 - DNA, 647 bp, Arabidopsis thaliana
  unsure (1)..(647): unsure at all n locations
anttgtcagatccatnccanagatctccaggggaagcagatcatcttatctccaccnccaactcacttgggttgagctntcccnacccggagaaanccaaagnggtttgaagaaccgaagacattacagaggcntgagaggngcccatgggggaaatttgcagcagagattcgagatccggcaaagaaaggatccaggatttggttaggcacttttgagagtgatattgatgctgcaagggcttacgactatgcagcttttaagctcaggggaagaaaagctgttctcaactttcctttggatgccggaaagtatgatgctccggtcaattcatgccgaaaaaggaggagaaccgatgtaccacagcctcaaggaacaacaacaagtacttcatcatcgtcatcaaactaatgggggaatagtgatgtttaattagtatatataggttaatatcttaagtatgtgaagcatcatgtatagagccaagaacctgttagactagtgtactgaaaagaactcttgcaaaatatgtactaaagagttcctgtaacaatggaacttctgtgttttctcttgtcttaaagagcttaaggttctaggaccaatattnnnnnnnnnnnnnnnnnnnnnnnnnnnnnnnnnnnnnt

SEQ ID NO: 122737 - DNA, 672 bp, Arabidopsis thaliana
  unsure (1)..(672): unsure at all n locations
cccagttccgaaactggaacctagttcacctgttcttgatccagattcctatgtccaagagattctgcaaatggaagcagaatcatcatcatcatcatcaacaacaacgtcacctgaggttgagactgtctcaaaccggaaaaaaacaaagaggtttgaagaaacgagacattacagaggcgtgagaaggaggccatgggggaaatttgcagcagagattcgagatccggcacagaagggatccaggatttggttaggcacttttgagagtgatattgatgctgcaagggcttacgactatgcagcttttaagctcaggggaagaaaacctgttctcaactttcctttggatgccggaaagtatgatgctccggtcaattcatgccgaaaaaggaggagaaccgatgtgccacagcctcaaggaacagcaacaagtacttcatcatcgtcatcaaactaatgggggaatagtgatgagaaggaagtatatataggttaatatcttaagtatgtgaagcatcatgtatagagccaagaacctgttagactagtgtactgaaaagaactcttgcaaaatatgtactaaagagttcctgtaacgcggccgcgaattcttgcagcgcggtgcatccactagttagagagcggccgcctccncggtgcagctccagc

SEQ ID NO: 122738 - DNA, 522 bp, Arabidopsis thaliana
cctgcaggtaccggtccggaattcccgggtcgttcacgcgtcggcccacgcctccgcttgctccgacacgacaacaaatccagattttgagcttacggaaacttgagaaggagaaaaaaatgtcgaacatagacatagaagggatcttgaaggagctacctaatgatgggaggatcccaaagacgaagatagtttgcacagtacgaccagcttctcgcactgtttccatgatcgaaaagcttttgaaagccggtatgaatgtggctcgcttcaacttctcacatggtagccatgaataccatcaagagacactcgacaacctccgctctgctatgcataataccggcattctcgctgctgtcatgcttgatactaaaggggcctgagattcgtactggtttcttgaaagatgggaacccttatccactgaaggaaggtcaagagattactataaccactgattatgacattcaaggagacaaatcaacgatatgcatgagctataaaaagcttgcttttggt

SEQ ID NO: 122739 - DNA, 795 bp, Arabidopsis thaliana
caagatcgtattaaagtttctaccgccattgatatgactttgattggaaactctttccctccttcctccggagagtttcgtggtgacgttagatggtatatcgatcccgtcatcgggtttcttacgagtacgaactcagcgttactagccaacatctatccttacttcagctacgttgacaatccacgtgacatatctctctcttacgctctcttcacttctccttccgtcgtcgtatgggacggctctcgtggctaccaaaacctctttgacgctttacttgacgttgtttactctgccgttgaacgctcaggcggtggatctctcccagtggttgtttccgagagcggatggccttctaacggtggaaacgccgcgagtttcgataacgcgcgagctttttacacgaatcttgcgtcgcgtgtgagagagaacagaggaacaccgaagagacctggaagaggagtggaaacgtatttgttcgctatgtttgatgagaatcaaaagagtcctgagatcgagaagaattttggtttgttttttcctaataaacaaccaaaatttccgatcacattctctgccgcgagagacggtacggcggttgagtgatgattttatatgctgagatttatgtgaataattgggagattatcccataaaaggttccaaataaagacaaatttcaaataaaacctgttagtccaagttaaattaaaaaaaaaaaaaaaagggcggccgctctagaggatccaagcttacgtacgcgtgcatgtgacgtcatagatcttctatagt

SEQ ID NO: 122740 - DNA, 493 bp, Arabidopsis thaliana
ggcatttacgcgtcagtgagagtggagtatataacaatctgaagctgaagaagaagaattgagagataacgagagatagtttcttcttcatccaaaagaatccaatcttttcctcaaaagatagtttctggatcgaacgacaatggagattttctactacttggtgtttggggttttgggtctcgtcgtcgcggcgttggagcttagcaagaacaacaaggatcgaatcaacacttcttcagctttcaattctttcaagaacaattatctccttgtctattcgctcatgatggcgggtgattggttgcagggtccatatgtgtactatctttatagtacttatggatttggtaaaggggacattggacagcttttcattgctggttttggttcctctatgttgtttggtaccatcgttgggtctctagccgacaaacagggtcgtaagagggcatgtgttacctattgtatttactatatattgagctgcatc

SEQ ID NO: 122741 - DNA, 1280 bp, Arabidopsis thaliana
  unsure (1)..(1280): unsure at all n locations
nnnnnnnnnnnnnnnnnnnnnnnnnnnnnnnnnnnnnnnnnnnnnnnnnnnnnnnnnnnnnnnnnnnnnnnnnnccacgcgtccgaattgctgaaggtgtggatttcattgctgtatcgtttgtcaagtcggctgaagtcattaatcaccttaaaagttatcttgctgctcgttcccgtggaggggaaattggagtgattgcaaagatcgagagtatcgattcactgaccaatttggaagaaattattctagcatcagatggggccatggttgcaagaggagatctgggagctcagatacctcttgagcaagttccagcagctcaacagagaatcgtccaagtctgcagagcgctgaacaaacccgtcattgtcgcttctcagctactggagtccatgattgagtacccaactccaaccagagcagaagtagccgacgtgtctgaagcagtaagacaaagatcagatgcattgatgctctctggagaatcagctatgggacaattcccagacaaggcgctcacggttctaaggacagtcagtttaagaatcgagagatggtggagagaagagaaacgtcatgagtctgtgccgcttcaagccataggctcttcattttcagacaaaatctcagaagagatctgtaactcagctgctaaaatggctaacaatcttggagtggacgcggttttcgtttacacaacgagcggacacatggcatcactggtctcccgatgtcgcccggactgcccgatctttgctttcacaaccacaacctcagtgagaagacgcttaaacctacaatggggacttatcccattccgtctcagcttctcagacgacatggaaagcaacttgaacaaaacattctcgttactgaaatcaagaggtatgatcaaatctggtgacctcgtgatcgcagtctcggacatgctgcaatcaatccaggtaatgaacgtcccgtaattctctctctttatacaatttcgcaatcccgcaaaagagtgttttgtttcctacttttgttactgtttttagactactcttacattagattccagaggcatcatcatcttcggtttgttaacaacagtaatgtgtaagctttgtttgtagtgtgtactgtttgtttttggttttcaataatatcagtaatcttattcaaatattcgattcnnnnnnnnnnnnnnnnnnnnnnnnnnnnnnnnnnnnnnnnnnnnnnnnnnnnnnnnnnnnnnnnnnnnnnnnnnnnnnnnnnnnnnnnnnnnnnnnnnnnnnnnn

SEQ ID NO: 122742 - DNA, 472 bp, Arabidopsis thaliana
cccacgcgtccgctgaaaactcttttctctccacctctttctctcttaccccaaacacaaaatctcctctttaatggatatatcgcctctccgatctcattcttcctcgtttttatctgccaaactcttattgctcttcttcttttgtagttttcgtgcttcttcgatttcttcttcttcagttgtttcccatcgtcgtaatccttctagctttcggtttctttgataattccctttgaattcgtttttcttcttctttcaatttccgcaaataatcagccgccgataagataatcatggggaggaaatctcagcgtaagaacgcgacaatgtttgatagtgatgatgatacaagtagtgtaagctcttcctccaccatgccatctgagagattgttgaatcctggtatggatgaagttactgttctcaaggatgctttggtagatcaacccttgatgctctctatgagaaa

SEQ ID NO: 122743 - DNA, 559 bp, Arabidopsis thaliana
  unsure (1)..(559): unsure at all n locations
acgactcactatttggaaagctggaccgcctgcaggtaccggtccggaattcccgggtcgatccacgcgggcgtttctcatctcgccggtcaacttttgagagagagaagaagaaaaatgcatttgagtgagaatgaaggtgtcgaaggtaacaccttcgtggtcactggaggtcttggcttcgtcggtgcagctctctgcttagagctcgttcgtcgtggtgctcgccaagttcgctcttttgacctccgtcactcttctccttggtccgatgatctcaaaaacagtggcgttcgctgcattcaaggtgatgtgactaagaaacaagatgtggataacgctttagatggagcagactgtgttttgcatcttgcttcttatggtatgtctgggaaggagatgcttcggtttggtcgttgtgatgaggttaacatcaacgggacttgtaatgtcttggaagctgcgtttaaacatgagattacaagaattgtgtatgttagcacttacaatgttgtgtttggtggtaaagagattctcaatggtaattanaggttttgcc

SEQ ID NO: 122744 - DNA, 545 bp, Arabidopsis thaliana
  unsure (1)..(545): unsure at all n locations
cggacgcgtgggcaattcgttaccattgctctgtttttcaaactctgtgaactcataatatgagcttttgaagaactgcttaacgatgagcttagttctcagattcaggcaacatttatctcaaacctcatccagattatcacttctttctcgaatcggcggttaccggagttacacccaaccggcgaagattgaagatgaagaagaagaagaattcgatcagagaaagctcccaacagattacgatccagctacttttgatccaacagagcatcgaagtccaccaacggatcgtgtattcagactcgtagacgggatctcatctctaacattattagcaatctccgagcttggttcgattataatgaaggaggaaggtatgacggagttaccaacagtcgctgttatgaaacctngggctngtggtngtgttngtgtttggtggtggtggtgggatggtgagtcaaagtggtntnagtaagnagcttaagtggggaggcanttttttantnaagttggggcttttaagnatctctaggtnagtc

SEQ ID NO: 122745 - DNA, 1118 bp, Arabidopsis thaliana
  unsure (1)..(1118): unsure at all n locations
tcctcctgcggtaccggtccggaattcccgggtcgacccacgcgtccgagacgatgacgacattcatggctcctcctccagcagcgacttcccttgccttccatcctcaagacaataatataattgctatcggaatggatgactcttctattcaaatctacaatgtcagagttgatgaggttaaaagtaaattgaaaggtcatcagaagagagtgactggtttagcattctcaaacgtgctaaatgttcttgtttcctctggtgctgattctcagctttgtgtatggagcatggatggatgggaaaaacaagctagcaaacagatacaaattccaagcgggcattcaccaaatccacttgctcatacacgcgttcagttccatcaagaccagatacatgtacttgttgtccatgccagccagttagccatatatgaggctcctaaattagagaacatgaagcagtggataccgaaagagtcaagtggttcagtcacagatgcagtatattcatgtgatagccagtcaatctatgcagcctttgatgatggaagtgtgagtatcttgacggcaacaacattgcaactgaagtgccgcattggtcccaattcatatttgccttcaaacccgagctcgagagtatatccagccacagttgcagcacatccgtctgaaccaaaccagtttgcagttggactaaccgatggtggggtccacgtgatcgaaccaccaggtccagaagggaagtggggaatatccgcaccaccagaaaacggagcagggccaagcgtctcctcagctcccgggtcagatcaacaaccgaggtgaggtctggtctgttcaccaagctcgcaccatgcagcctcccaagttattattataccctttgagaggatagctctgagattgtaggttattatattgtcttactcaattcatagtaggtgaaaggtgaagcagcagtttcttccattaattctagtgttttactaaatggtttcatttgagattcccttattagtaccaaaaaaaaaaaaaaaaaaaagaccnnnnnnnnnnnnnnnnnnnnnnnnnnnnnnnnnnnnnnnnnnnnnnnnnnnnnnnnnnnnnnnnnnnnnn

SEQ ID NO: 122746 - DNA, 712 bp, Arabidopsis thaliana
  unsure (1)..(712): unsure at all n locations
gcgtccgcccaatttgtctgtctctcttttgttttctctgctaacagatctctctaaatatctgttacttttgttcatatctttttacttttcaaactactaattttcctttcgcttcttctattaataacaacactctctctctcagacttcttttcttttttttctacggcgttgattcattcgcaatgacctcagtttctgtgtaccataattgacctagcagattctgtttttaatggtagattctgacccggtggaatttccgccggagaaccgccgtggacagctcttcggcaaatacgaggtcggaaaattggtgggatgcggcgccttcgcgaaagtgtaccacgggaggagcacagcgacgggtcagagcgttgcgatcaaagtggtgagcaagcaacggctgcagaaaggaggactcaatggcaacattcagagagagatcgctatcatgcaccgtctgcgccacccttctatcgtgcgcctgttcgaggtcctcgccaccaaatccaagatctttttcgtcatggaattcgccaagggcggttgagctntttcgccaaagttttcaagggcagggtttttcgggggttcttagccgncgttatttcnagcaaggttatttccccgtcggttatttcnctcccggggatttttaccgnnttttaaccggnnattcctcnttncgggagcngntttaagcttt

SEQ ID NO: 122747 - DNA, 403 bp, Arabidopsis thaliana
actagcaatgcagaaagctcttcatctactccagtcagcagtgaagaacttaacatttcttctcacctccggaagtttactttcaatgatcttaagctatctactagaaatttcagacccgagagtcttcttggagaaggtggttttggttgtgtctttaaaggatggatcgatgaagacggtactgctcctgttaaacctggtactggtcttacggttgcagtcaaaaccttaaatcctgatggacttcaaggtcacaaagaatggcttgctgagattaatttccttggtaaccttctccatccaaatctagttaagcttgttggttattgcattgaagatgatcaaaggttgcttgtgtatgagtttatgcctagaggaagtctggagaatcaccttttca

SEQ ID NO: 122748 - DNA, 506 bp, Arabidopsis thaliana
  unsure (1)..(506): unsure at all n locations
atgatatcgccgnnnnnnnnnnnnnnnnnnnnnnnnnnnnnnnnnnnnnnnnnnnnnnnnnnnnnnnnnnnnnnnnnnnnnnccacgcgtccgagaaaatgtctcactcgttttgccttataatatttctttcaacaacaacccaaatctacaaaaaatcccaataaaaaaaaacttcagtctgtttgacattttgtcgaacacttggacggcatcacaaaaagctctaaactttctgactaccaatggcggattcgtcttccgacaaggagaagaaggaaaataataagcagcccgtgtatcgtggagtccgtatgaggagctggggaaaatgggtatcggagattcgcgaaccgaggaagaaatcgagaatctggctcgggacttttccgacggcggagatggctatgcgtgctcacgacgtggcggctatgagtatcaaaggaacttcagccattctcaatttccctgagctctctaaacttcttccccgacccgtttcgctc

SEQ ID NO: 122749 - DNA, 782 bp, Arabidopsis thaliana
taaacccaattgttatcctccccaaaccaaacggtcaaacctcactcaccatgagacaccttagctcacctccatggcctctcctccttctcctcctcctctcttctttcacctccggcgaatcctctctgtccgcagaaaaaaacaaattgcacaccggtggtctcagtagacagagttttcctaaaggattcgtgtttggaaccgccacgtcagcttatcaagtcgaaggcgagactcatcaagacggtcgtggcccaagcatttgggatgccttcgtcaagattcctgggaagatcgccaagaatgccacggctgagataacagtggaccagtatcaccgttacaaggaagatgtggatttgatgaagaaactgaacttcgatgcttacagattttccatttcatggtccaggatattccctgagggaagtggtaaagtcaactggaaaggagttgcttattacaatagattgattgattacatggttcaaaaagggattacaccttatgctaatctgtaccactacgatcttccattggctttggaaaacaagtataaaggcttgcttggtagacaagtagtgaaagattttgcggattacgctgagttttgttacaagacatttggtgatagagtgaaaaattggatgacgttcaacgagccgcgtgtggtagctgctttaggttatgataatggtattttcgcaccgggtagatgctcaaaagcatttggaaattgcactgaaggaaactccgcgacagagccatacatagttact

SEQ ID NO: 122750 - DNA, 546 bp, Arabidopsis thaliana
cagctctatacgactcactatagggaaagctgtccgcctgcagtaccgtccggattcccgggtcgacccacgcgtccgcggacgcgtgggcggacgcgtgggccttttccccggaaaatttatttgctgatttttcttccttccatcgccacttttcctggaaaaaaaaactaaatttcgtctctttctttaagctaaaggagctttctgtgatcaattttttctatatttctgtagttgcgttcttatttcacgcgctttgtgatttgattatttaagccactaatggcttaggatctgtatattatcacttcatgaattctcgttttctcggataagttgttaagtttctaaattagggaattttaggaattagggcttttttgggtttgtatgtgtgcttgattgggtaagaagatggctgcagttataagaaagttattacctttcccatcaccgaatcctaaaagggataatcgagaaagtgacgatgatgatgaaacaagtagtggctatcgaatcgaatattcattcgccagtgagtat

SEQ ID NO: 122751 - DNA, 396 bp, Arabidopsis thaliana
cttcgccatcatgtccttaaattatctctttttaatgaatggagcgataaagctctcacctttatgcctcctcctactttttccacttaatcatcccacttccttcttcagatgtaagcaatgttgcctagagtcctcctctgattcagatttcgttgctgaatcttttgtaaaactctgttcttcgtatgtcgagaagccaaattcagggaatttagggttttacaaaaaaataaaaaagagtttctttttttggatgatggaatcgaattactcaggtgtggtcaacggctacgatgtgagtttcttaccaacttcgattccggatcttggattcggtgttccttcttctagtgattttgatcttcggatggatcaatactatcaccaaccttc

SEQ ID NO: 122752 - DNA, 573 bp, Arabidopsis thaliana
aagacgcgtgggcggacgcgtgggcggacgcgtgggttgccctctggcgttttctgtcttgagctaaagaaataacaaataaaccgaaaaaaataaaaatagaaactttttttttttgtttatttgttctttctccaaaactccttttttttctcaccattatctcatgaacgtgagtggaggctctctgagtagagagagcctacccttgaaaataacctagggaggtctccaattttcaagctttacccattcaaaagaatcgtccttttttcctatttctgactttgagctatgatgatggtccattcgatgagcagagatatgatgaacagagagtcgccggataaagggttagattccggcaagtatgtgaggtacacgccggagcaagtggaagctctcgagagagtttacactgagtgtcctaagccaagttctctaagaagacaacaactcatacgtgaatgtccgattctctctaacatcgagcctaagcagatcaaagtttggtttcagaaccgcaaatgtcgtgagaagcagaggaaagaagctgctcgtcttcaaacagtg

SEQ ID NO: 122753 - DNA, 506 bp, Arabidopsis thaliana
  unsure (1)..(506): unsure at all n locations
nnnnnnnnnnnnnnnnnnnnnnnnnnnnnnnnnnnnnnnnnnnnnnnnnnnnnnnnnnnnnnnnnnnnnnnnccacgcgtccgctattttctacgaacttcagaatctttcgtctctcttaattatttttctcaaatttctcgaaacatctagttttcttttcaaccagccaatcatgggtagtgatcatcatcatcgaaagctccacgttatgttcttccctttcatggcttatggtcacatgataccaactctagacatggctaagcttttctctagcagaggagccaaatccacaatcctcaccacatctctcaactccaagatcctccaaaaacccatcgacacattcaagaatctgaatccgggtctcgaaatcgacatccagatcttcaatttcccttgcgtggagctggggttaccagaaggatgtgaaaacgttgatttcttcactgcaaacaacaatgatggttaaaaacggagatgatcgtgaaattcttttttct

SEQ ID NO: 122754 - DNA, 721 bp, Arabidopsis thaliana
  unsure (1)..(721): unsure at all n locations
gccnnnnnnnnnnnnnnnnnnnnnnnnnnnnnnnnnnnnnnnnnnnnnnnnnnnnnnnnnnnnnnnnnnnnnnaccacgcgtccgcccacgcgtccgcggacgcgtgggtcttagttcagggaggaggctcgagaacagtgccccatatctgaaagctgaagctaagaatctggacgttcgtgtttaaaccgacgacgtatttgaaattggctttgaaggaaaggtgaaattaatggcggaatcgtcgtcgccgtcgcctactgaagagatcgttcggttgattaagcgtttaagcgcttacgttgctttcaaaatgtcaagccttttctccactacatcgattcgaaatctggattcaagatcaattggtgcgattgcggggcttgcgattgcggtgatatttacgtggagggcgataagaacgcccggagagcaacgtcagagaaggcagccgaagcgtaggattcacaatgctgaaacgtctagtgctgctgctgctgcttctcagtcgaatctagcttcttcggttgctccggaagtttcttcgcctcgtgaggataattcgggtcaaaattgttggttgaccagtnctttcaacccngttaaacctcctttggggaaaatagtttggcanaancttngttaagganggaggaacaatccgnntctttgggaattttttggacaagnccgaggctnccnaaanagngccgttggttg

SEQ ID NO: 122755 - DNA, 932 bp, Arabidopsis thaliana
  unsure (1)..(932): unsure at all n locations
ctcactatatgggaaagctggtacgcctgcaggtaccggtccggaattcccgggtcgacccacgcgtccgcccaagtcagaaaaagtagaataagaagaagaagaagaagaagaagagaaagagagtcagagacgacgacggacgaaacgacgctattcttacgctttcttcgatcgtcgatttgattttttcccttccttcttatttttctcggttgaagtagaagataaagcatcgatacatgatggctgattgataagagttttctccggagaggttcggagttttttttttagaaaggaaacattaaaaaagatggcagtctcttttcctcgtcttccgaggtggttgtgtggtggtagtaacactaaagatagagagaagaaagagtcaattcctaaaggatcttcttcacttagtccttcactgaagaagactactactagtaagactggttcttcctcttcatcagtgaagaagaccaagagaggatggattggaagaggaggatcaggatcaggaggggaagaggataagattgggaatgtggtgtttcctgaacctgatgatccagagtggtcaattggttgggttgagccacatggaccaggttttaaagctgaggatgatgattgtggtggctttgtggttttggttcctctttacaagaaagttatggatggttcagggaatcagattccgaatggcttcttctctcctgctgctcctgatgggaagaacatggaacagtggctgtcgtctatggggaagctataaattggagattgggaagaataagactagttctctgttgtttcagtatcgagatttaagcatcgaataatctaaaaaaaaaaaaaaagaannnnnnnnnnnnnnnnnnnnnnnnnnnnnnnnnnnnnnnnnnnnnnnnnnnnnnnnnnnnnnnnna

SEQ ID NO: 122756 - DNA, 962 bp, Arabidopsis thaliana
  unsure (1)..(962): unsure at all n locations
nnnnnnnnnnnnnnnnnnnnnnnnnnnnnnnnnnnnnnnnnnnnnnnnnnnnnnnnnncaaaaaaaaagaaaaagagagagagagcagcaaccccagcagcatcgaagatcgtcgatcgtcgatcggttgctctctttcattaatcagatctaattgatacccaagcttcttcatcggaggccgtatctcacgaggaaacatgggcggtagatttggagtcctcctagtcctcttcctcttgagctggtcttgtcatgctacaaacccgattcttctcgaaccattcgaatcagctcatgatgacaaccaagtctgtgaactatgtgacaagtatgtcacgctagtcattgattaccttcaagactacgacaaccagaatgaactcgttgaggcccttcatatcagctgctctcagattcctcctctcaaaaaacagtgtctttcaatggtagatcattacacccaacttttcttcacacaagtctctactatcaaatcagaccaaatctgcaaacggcttaacctctgtcaagctgtgacaccggcctttgcctctcaaggccatcaaggaaactgcgaggcttgccgcgagactgtctctgaggttgtcaccaaactcaaggatcctgagactaagctgaagataattcggttacttctcaaggaatgcaagtcgcttaacaattaccaggacaagtgcaagaagatggtattcgagtacgggcctctgatgcttacggatttgcagaagtttctggagaagaaagacgtgtgcactatcctccacgtctgtccaggtccagccacccaccgtgactacgttcctgcggtggagtcattggcagattcgtaaattcggccaccttggttttgtcgtcattcacactaataccatgccatgatcgtgatgctaatttaatttggtaacccggtggtcatgtacaatcctgattgatatatt

SEQ ID NO: 122757 - DNA, 373 bp, Arabidopsis thaliana
aattgctttttaagctttcttaccattaggaccattaagagctttccataaaagcatcacaacggctgcaacagttaacaaatacaaggacgagtacagaaactggttcaggagtcatcatgcctcagaactgcatagcaccaaggcctgaagaagatggtggagtcatggttcaaggtttgccagatatgtcagacacgcagagcaagtctgtactagccttccctacgattacttcacaacctggtctccagatgtctatgtatcccataactctcaagtttgaggaggttgtgtacaaggttaagatagagcagacaagtcagtgtatgggatcatggaaaagcaaagagaagacgattttgaatgggat

SEQ ID NO: 122758 - DNA, 413 bp, Arabidopsis thaliana
gacaaagttttttggttgggatacatatgattcttttatgcagcatgatgtacaagaactcaacagagttctctgtgaaaagcttgaggacaagatgaagggaactgttgtggagggaacaatacaaaagctatttgaaggtcaccacatgaattacattgagtgcattaatgtagattacaaatctacacggaaagagtcattttatgacctccagcttgatgttaaaggctgcaaagatgtatatgcttcttttgacaagtatgttgaagttgaacgccttgaaggagacaacaaataccatgcagaaggacatgatttgcaggatgcaaaaaaaggtgttctattcatagactttccaccagttcttcaacttcagctcaagaggtttgaatacgattttatgagggaca

SEQ ID NO: 122759 - DNA, 569 bp, Arabidopsis thaliana
cagctctctacgactcactattgggaaagctggtcacgcctgcaggtaccggtccggaattcccgggtcgacccacgcgtgcgtgaaagctttgttttgagttattttcaaagctaataaaaggagtgcttttatatttgatctaagtattcaaatctttaaagttgtggctaaacttcagtttgtgtttgcttttgtttatcaagattgttcttagactttttcgagttaaaaaacttgtgtgttggagtcatcatcgtgatcaatggaaaataaagttgagaaggagattacttgggtgattaaaaatttctcttctctgcaatctgcaacaatatattctgatatattcgttgttggtggctgcagatggcgttgtcaggccttccccaagggatataataaggctgattatctttctctgtatctcgacgttcctgataaagaatctttacctattggatgaagaagccacacaaaattttcttttactttagtaaataaaatttcgggaaaactctccaaacttaaagagactcagcagtggtttgataagaatgctcctgact

SEQ ID NO: 122760 - DNA, 694 bp, Arabidopsis thaliana
  unsure (1)..(694): unsure at all n locations
cccacgcgtccaacacaacctctcttctcactctatatactcccaaaatggcttataactaccgttttgccattcttctcgttctcctctccgccaccgtcggctttaccgcagccgcgttgaagcctccggttcgaaccttgaacggaaacattactcttaatctcatttggtacggaaaattcaccccaatccaacggtccataatcgtcgatttcatccgctctatcagttctgtcaccgccgccaaaggtccatccgtcgcgtcgtggtggaagacgacggagaagtacaaaaccggcgtttcaactcttgttgtcggtaaacagctcctccttgagaattaccctctcggaaaatccctaaagagcccttaccttcgtgctctgtcaagcaaacttaacgctggtggtgctcggtcaataaccgtcgtcttaacggcgaaagacgtcaccgttgagggactctgtatgaaccgatgcgggactcacggggtcaaagtcaagttcccgttaacagtggagcttacggtgtgggtcgggaaacttttgaaaacgcagtttccctgggttacttncgggttggncngttttcattaagcctgatcttacggngccnnaatttttcggccgnttaggttnnacctaannggngncgtcggtagtttncngggattgtttataaaanantnggg

SEQ ID NO: 122761 - DNA, 413 bp, Arabidopsis thaliana
gaaaaaaaaaattgacaaacaaatataaaatccctatgaacaactctagagaagaccagtggttacaacactatgagcaacaaaatattcaagagattactccgtgcttcaacgccattaacatcgcgtcatcgtcgggatcttcccttggagacggtggtgccgcggcacatgaagctgctggaaggagatctagggcttcgaggagagccataccaacaaccctcctaaacgcaaaccctagcaatttccgagccctagttcagaaatttaccggacgttctgccggaggtgaatccaaccgcagaaaaggtccagtgactttggatttcgggtctcccactacaatctccaaagaagctatctttccagtctcaagcgatcgaagtaataacaatcttgatcatgtggtc

SEQ ID NO: 122762 - DNA, 582 bp, Arabidopsis thaliana
  unsure (1)..(582): unsure at all n locations
gtcttattccacgatcattagcaacaccagcttcctctctctcgcttcaaagttcactactcgtggatctcgtcttcagtgtacagtatcaatggctcgatctgcggttgatgagacatcagattcaggagcttttcaaagaactgcatcgacattccgtaacttcgtttcaaaagattccaattctcagtttccagctgaatctggtagataccatctttacatatcgtatgcttgtccatgggcttctagatgcctttcatacttaaagatcaaaggacttgacgatgcaataagcttctcgtctgtaaaacccatttggggaagaaccaaagaaaccgatgaacatatgggatgggtctttccaggttcagataccgaagttccaggagctgatcctgaccatcttaatggtgctaagagtgtaaagggacctctatgagattgctnagccaaactacaccgggaagtatactgttcctgtctgtgggttaggagcnaaaactnntgttacaacgnggtcagaataatccggntgtcaacactgngtcaatcatattggggaanctntnttntnttnnt

SEQ ID NO: 122763 - DNA, 505 bp, Arabidopsis thaliana
  unsure (1)..(505): unsure at all n locations
tgatatnnnnnnnnnnnnnnnnnnnnnnnnnnnnnnnnnnnnnnnnnntgataatggcgtgatacctttttctctcctctcaacaaacgcgcctctaatctctcaatcttctccaactccaatttcttgcaattcactccaacttcttcttcatcttcttcttctctctctctctgagattctagatttcgtttctcacgttttcttcaccaaatatgggaacctgcttctccagctcaactaaatccacggctgagatctctccctttgacctcgtcgtcaaacctcctcctccttccgccgccgccaccgcaccaccaacccaacgaatccccaccgcgaaaacagaaacatcgacggtgagcttcaccgcaacagtgagattatacggaccacctaacagtctagtgacgtcgtatctccgtttcgctcttctccacaagaaagttccgctccgtttcgttccatcggaagaccaaaaaccgacgattcaagtcggatcgga

SEQ ID NO: 122764 - DNA, 437 bp, Arabidopsis thaliana
caaagctgctcaattttggtctgcacattgattatgtgtcggacagagactatcgagtaatacccagtagtcaattatctggtttttgatcgattccatcaaaatttgatcttttttcttctctgaagcgaaagctctcgcctttacattttcgccaattgtgcaaatttactgttccacaagttttcaaaatgaaggcgatcttcaaccgtagagttgtcgtcgactcatcttcgcgtctcaccaagctgctcgcgaatccaactactcattctcacctgaatcgtcaaactttcacttctctctataaaccaaaccagagccgccattttcgaacacactatcttccttcaagcccgtcgtctcctcccgtgagccgctttgacccttctcagctatggcgatcggagaaaattcgtgggtttttcgcgagcgct

SEQ ID NO: 122765 - DNA, 500 bp, Arabidopsis thaliana
  unsure (1)..(500): unsure at all n locations
ccggcannnnnnnnnnnnnnnnnnnnnnnnnnnnnnnnnnnnnnnnnnnnnnnnnnnnnnnnnnnnnnnnnnccacgcgtccgcggacgcgtgggcggacgcgtggggtagaggtagctcctcagttccagaaccaggagatgaagttcatgagactgaccaaaaggaacactatcctcttcttccctgattcagttcaagaggtcatgaatttcaggacagtcaatgggtcatgtgaaggaattgaagatcccgatcatcccttcagtagtgaaaggcctcgattcggcctcatcccggcaggttcaactgatgcaatagttatgtgcaccacaggagctcgtgatcctgtaacatcagcgctgcatatcattctaggtagaaagctcttccttgatgcaatgcaggttgtgcggtggaaaacagcatcaacctcgacgattggaccttattttcgttatgcagcctcattcgctggatacgggttttatggtgatgtc

SEQ ID NO: 122766 - DNA, 846 bp, Arabidopsis thaliana
aaaaaacgctcgtcttcttcttcttcttcttcttatattacttcttcctcccacacagacaaattttgtaacgaagacgggatcgcgataagatcccggtgatcgaaaagccctaagaagtaatttttcaagggaaagggacttaaagatgcatacttttggttacagagcaaatgctctgctcactttcgcagtcacggctcttgctttcatttgcgcaatcgcgtccttctcagacaaattcagcaaccaaaatccttctgctgagatccagatacttaatatcaatcggtttaagaagcaatctcatggtaacgatgaggtcagcttgacactggacatatcagcagacttgcaatcactttttacttggaacaccaaacaggtttttgttttcgtagcagcagagtatgaaaccccaaagaattccctgaatcaggtttctctatgggatgccattattcctgccaaggaacatgccaaattccggattcaagtctcaaacaagtacccgtttcatcgatcagggacagaatcttcggggcaaagacttcaacttgacattacactggcatgtcatgcccaagaccgggaagatgtttgctgacaagatagtcttgcctggttacagtttaccagatgcatacagatgatgaagattgaataaaacatcaaacctagtccaagactttttgtatttcagttttctgaaaagttttagactttcttttattccaaagaaaactaattcaaaagtactattgttctcttagaatcaaacaaaactattctttttagtgatcttaattagttgttaatgaggtgaaaatcacgacctcttaattt

SEQ ID NO: 122767 - DNA, 575 bp, Arabidopsis thaliana
  unsure (1)..(575): unsure at all n locations
atacacctattcagggaccgggccgggaattcccagggtggcccacngcgttcaccacccaaaagaaaaaacacacacacatcttagagagatgaaagagactaattttggcgagaaaacgcgcgttctggtagttggtgggacgggatcattggggaggaggattgtaagtccgtgtttggctgagggacacgagacttatgttctccagcggccggagattggagtggacatcgagaaggtgcagctccttctttctttcaaaagactcggcgcacatctcgtggaaggctcattctccgatcaccaaagccttgtctctgccgtaaagcaagtcgacgtggttgtctccgccatgtccggtgtccacttccgcacccacaacatccccgttcagctcaagctcgtcggagccatcaaaggaggccggtaacgtcaagcgttttttacccatcaaaattttggatggctccnccacgtttcgggcatnccattcccccggagggaaaattttntcaaaaaatgggaattcggattaataaggccggggttttcaaaaaacngggggttttttc

SEQ ID NO: 122768 - DNA, 519 bp, Arabidopsis thaliana
  unsure (1)..(519): unsure at all n locations
nnnnnnnnnnnnnnnnaaaccaggaggttttcaaagactatggagtgaagaagacgaaatcttagtgttacaaggaatgatccacgcctccgctgatacagggaagtctccttatgtagatactaatgcgttttacgatttcttgaagaaatcgattagctttgaggttagtaagaatcaattcatggataagattaggagtttaaggaagaagtatattggtaaagaaggaaggaacgaacctagttttgtgaaagctcatgataagaaagcttttgaattgtctaagtttatttggggacctaaaggaatagctcttgattctaatgttaagtcgaacggtgtatcgaaaaagagtgtggcgaagaagaagattgattctgttaagcaagagttggtgtttgccggtggttcttcaactaatggtaaaaaagttgaagaagatggtggtgatgatggatgtgattggtttgataactcgtctcttgttaggatgattgctagtttgggtgttgatga

SEQ ID NO: 122769 - DNA, 694 bp, Arabidopsis thaliana
  unsure (1)..(694): unsure at all n locations
atagaagagctttgacgtcgcatgcacgcgtacgtaagctcggaattcggctccttctttgtatatttttttttttttgaccatggcggaggaatttggaagcatagatttactcggagatgaagatttcttcttcgatttcgatccttcaatcgtaattgattctcttccggcggaggattttcttcagtcttcaccggattcatggatcggagaaatcgagaatcaattgatgaacgatgagaatcatcaagaggagagttttgtggaattggatcagcaatcggtttcagatttcatagcggatctactcgttgattatccaactagcgattctggctccgttgatttggcggctgataaagttctaaccgtcgattctcccgccgccgctgatgattccgggaaggagaattcggatttggttgttgagaagaagtctaatgattctggtagcgagattcatgatgatgatgacgaagaaggagacgatgatgctgtggctaaaaaacgaagaaggagagtaagaaatagagatgcggcggttagatcaagaagaagaagaagaagaaaaaaaaaaaaaaaggnnnnnnnnnnnnnnnnnnnnnnnnnnnnnnnnnnnnnnnnnnnnnnnnnnnnnnnnnnnnnnnnnnnnnnnnnnnnnnnnnnnnngcgtagtgacctggagtatcat

SEQ ID NO: 122770 - DNA, 432 bp, Arabidopsis thaliana
gtccgctgctgaattcttcacgattttccaactgggaccgctccacttagacggaaacacttccaaagctgcagacaaatgggtgtctatagacgagtatttggatggctacttggtggaaaggaagaacagatatgggaaaaacatggaagtgatcgatgtcggaatgcaagagataaaaacttacttcaggctcttcttgttgtcttcagtacttctgatgttcatgttctgttccaggatagcgaagagcaagtatagtagaaactccatgcctgtcttgccatgaaactaatggaggaagctctcatttaattaacccttgtaagttagtaattcttttggttgcgaaacttgtattcctcattttagaaatgttgtgtctcatgaaaagacaacataattctttggatttgtgatatattcttaagt

SEQ ID NO: 122771 - DNA, 712 bp, Arabidopsis thaliana
cagctctctacgactcactattgggaaagctggcacgcctgcaggtaccggtccggaattcccgggtcgacccacgcgtgcgggcttcatcgactaatgaagtcatcaaagaaacgtgctcacggcgttaagcttcaagaaaccaaccatgtctctccacccaacaacagaaccatctccaacacgcaactatcactctcccctgacttcacctacaaaaaccagctctctctagaagacaggttgttgttagacagagtccaaagtataagatttggtccaaatctaagtaagagtcaagagttagtcggtttgaagaagaacaagaaaggattcaagatttgggcactgagtagaagtacaggaaactctccaaaagttgatctttcagataagaactcttctagtgatttggatgtccttgatggtttggatttcgctttccaataggcgcaacacgttcggtttgagaaccggtttttgatcaaattcttctgtatttatagataaattctatcattcttgtatataaacacagcatataagcacaaaacagtgatgtaatagttgatacagaaacaaagacactatatggttggtttagttggattttgtgtttcaggtcaaaaaaaaaaaaaaaggacggccgctctagaggatccaagcttacgtacgcgtgcatgcgacgtcaaagctcttctataaggcacct

SEQ ID NO: 122772 - DNA, 889 bp, Arabidopsis thaliana
  unsure (1)..(889): unsure at all n locations
atgggcaaattcaaggtaagtctctatcagctactgaagttttaaattttgaatcttcaaactgatctagcaaactacgaattggtaatttggaatacaggatagagtttgggaaaggaaaaggaaaaggcgagaacaacgggaatccaacacgacttcagacgcttcatcatgcggataaaccaatagttgattcatatgtactcgaactcgttgtatggcttcatcgactaatgaagtcatcaaagaaacgtgctcacggcgttaagcttcaagaaaccaaccatgtctctccacccaacaacagaaccatctccaacacgcaacttatcactcttcccctgaccttcacctacaaaaaaccagctctctctagaagacaggttgttgttagacagagtccaaagtataagatttggtccaaatctaagtaaaagtcaagagttagtcggcttgaagaagaccaagaaaggattcaagatttgggcactgagtaaaagtacaggaaactctccaaaagttgatctttcagataagaactcttcaagtgattgggatgcccttaatggtttggatttcgctttccaataggcgcaacacgttcggtttgagaaccggtttttgatcaaattcttcggtattaatagataaattctatcattcttgtatataaacccagcatataagcccaaaccagtgatgtaatagttgatccagaaccaaagcccctatatggttggtttagttggattttgtgtttcaggtcaactactttcttttttctctcnnnnnnnnnnnnnnnnnnnnnnnnnnnnnnnnnnnnnnnnnnnnnnnnnnnnnnnnnnnnnnnnnnnnnnnnnnnnnnnnnnnnnnnnnnnnnnnnnnnnnn

SEQ ID NO: 122773 - DNA, 403 bp, Arabidopsis thaliana
tcgtcctcggctacaaactcttgatcaggaggaagagctttcagtacctgagatcaaagctgaaatggagaagtcgcttcaatggcttgtcccgttcgctgaaaacaccaccaaagcacatcaaggcttcggatgggtaggtgaatgggcaaattcaaggatagagtttgggaaaggaaaaggaaaaggcgagaacaacgggaatccaacacgacttcagacgcttcatcatgcggataaaccaatagttgattcatatgtactcgaactcgttgtatggcttcatcgactaatgaagtcatcaaagaaacgtgctcacggcgttaagcttcaagaaaccaaccatgtctctccacccaacaacagaaccatctccaacacgcaactatcactctcccctgac

SEQ ID NO: 122774 - DNA, 656 bp, Arabidopsis thaliana
cgactcactactgggaaagctgacccgcctgcaggtaccggtccggaattcccgggtcgtcccacgcgtccgcagacacactcgcgaaaatggcggctcactcttcttgcaactttgctttgacgaatccgatcatctcacaaatcgattctttctctaagaagaaactatctgttccattatacttcttctctacaagaaaagcattgacgaatccttggttaggcgttgttgattcatccctctctctcacttctccagtctccgctctacaaactaatcgcccaagaagaatccataaatccgccatctccagcttacccaccgcgaatccagatttagtggtttctgatgcgaaaaagcccaaatggtcatggagggcaattaaatcatttgcaatgggagagcttgaagctaggaagctcaagtatccaaatactggaactgaagcacttctcatgggtattttgattgaaggaactagttttacttcaaagtttttgcgggcgaataagattatgctttacaaagtgcgtgaagaaacggtcaagttactaggaaaggcagatatgtatttttttagcccggaacatcctcctttaactcaagatgcacaaagagcacttgactctgctctggatcagaatctaaaagca

SEQ ID NO: 122775 - DNA, 435 bp, Arabidopsis thaliana
atttttgtgagtgaagagatttagagtaatcatgggtttaactcgaaatttcattttatggattcttttgtcatctctcttcacggcgattcaactaacgtcgtctcaacgcaacactccaccaccacgctctaaagacgccgatctctgcaacggcgtgttcgtttcctacacttacttaaccggtaccaagattaaaccaaacgacacgaagaaccagccgtaccggttcgaatcagagatcacggtcctaaacaacggccgcgacgagcttaaatcgtggcaagtctttgttaaattcgcccaccgcgagattcttgtttcagcgaccaacgctgttctctctgacggttctagcctcccggctagcgttgagaacgggacaatcttcgccgggtttccatcggcggatttgaagacggcgatcatgaccgc

SEQ ID NO: 122776 - DNA, 586 bp, Arabidopsis thaliana
  unsure (1)..(586): unsure at all n locations
cctacgaaggtcgcacggtcatcgcatnaagcttgtatcatcgaaattacgcccgccccccccgagcctggtttagttgaccacatagatgtttcaaacaaatcagtagcaaaagtctacgtgaggagcacaccgaaagaccaacaaacaactgacgttgtccatggtaatggtaacggtattcctgctaaaagaactggtggtcagtataagtactacttcaatatcggtagtgttgattcttttgaggagaaactcgaagaagctcaagaagcgttaggtgttgatcgtcatgaatatgttcctgtcacatacgtctctgaaatggtctggtatcaagagttcatgaggtttgcaccgactttgttgctcttgggtactctgatctatggtgcgagacgggatgcaaggtggattggggtgtaggaggaactggcggtaagaatggtccgtggattttcaatttnggcaaagntaccaataacgggngctggtaaacatccaggntaaggtttntttnaaggattttccttgntttnccggggntaanaagaantttttgggtttnnccattccctangcccgc

SEQ ID NO: 122777 - DNA, 436 bp, Arabidopsis thaliana
gaaaaagattcacttctccggcgagcaatttcaagtttctcggtaatggcgatgtcttctggaactctcaggatctctgcgaccttagtatctccttatcatcatcaccaccgtaatcgcctctcattaccttcttcttcttccaaggttgatttcacgggattcataagcaatggcgtaaacagtttggaaactcagaaatgtactcctggactggcgatcagccgcgaaaacacacgaggtcaggtgaaggttcttgcaaggaacaccggagactatgaactatcaccaagcccagcagagcaagagatagagagctttctctataatgccatcaacatgggtttctttgacaggttaaacttggcttggaagataatattcccatctcacgcatcaagaagaagctccaacgcaagaattgcaaagcagcggc

SEQ ID NO: 122778 - DNA, 661 bp, Arabidopsis thaliana
tcaagctctattctgactcaatttatggaaagctggtacgcctgcagtgtaccggtccggtatacacgggtcgacccacgcgttcggtcactgacacagcatcagtaggtgtagctgttagtgataatggagtaagcacgaatgtggtgcagcatgaagctacggcagactctgaggatacagatgctggttcgccccaaagaacagatgagagtgaggcaatgagtgaagatgtgaacaaaacacccctaagggctgactcggatggtgaagatgatgaatcagatgcagaacatcccgggaaagtctccattggtaagaagctttggactttcttgacgacgtagcccaatctttgatcagagaatgtagctaatcttcttctgttgacaatattagtgttttgcttcttgatctttagtagctacttaggagggcttgtgttaatttcgtttggatattttttcaccacaatgtagtgttttctttctagctttctaccacttagttgctatcttgttaaagatgatcttcaagaaatctccattcttttggtatgttttagatgatgatttatttatttaaaaaaaaaaaaaaagggcggccgctctagaggatccaagcttacgtacgcgtgcgtgcgacgtcatagtcttctata

SEQ ID NO: 122779 - DNA, 789 bp, Arabidopsis thaliana
ggcagggagtacattgttgatctcatgggagatccaggcacgcttatccccgctgatgcagctggactacaaatggactttgatgattctgtctactctgccagtcccagagatgttgattcatctcatgtagcttcttccagcagtggggtcgagagctcaattgaagaacacacagaatcttggtcagcggaacatcgttctaggaccaagggttcccgggaggaaaaccaatctgcaggtgccgcgcgtccgatgattccaaatattagggaagctgtgggaagtcaaaaggctcctgttcaacatctttccagcaagcctactcattctttcactcatgccagatcaccttcgtggactgaaggtgttagctctccagctggacgcaggatgaaagtcaaagatgtttcacaatatatgattgatgctgccaaagagaatccacaactagctcagaagcttcatgatgtgttacttgaaagtggagttgtagctcctcgaaatttattttcggaagtctattcagagtcaatggaggcaacaggtgaaatcaaatctgtggctgaatccaatgatgagaaagggaaagattttggaacaatccagcaaggaagaaaccagagcaaccttggccctgtgaggtttttgcctcctcttccaagaccgcaatctaaagcaattacccatgacctacgtgaacattcaggatctggactcggtcatttgtctgaacattgcaatattgatggtcactctgattcctcacattctgaaacatctactgac

SEQ ID NO: 122780 - DNA, 1196 bp, Arabidopsis thaliana
tcggacgtaaataccctccatatcatctccggcccttcctatatttaaacaccatcatacatctctccctcctttgtctcgtcttccatgtccgatatatcgttaccagagaaagagagctcagagatttagttagcttaatttttcttttcgttttgaaattaaggaagtgattgttatcaccggaggagagagagaaaatgttgggaattttcagtggagctatagtatcgccgccggaagagttagtggctgccggaagcagaactccgtcgccgaaaacaaccggatcaactttagtaaaccggttcgtcgagaaaaatccatccgctgtttctgtacaagtcggcgactatgttcagcttgcttacagccatcacaacgagagtcctctccggcctagatcatttggagctaaggatgaaatattctgcttgttccaaggctcacttgacaacctaggaagcttgaaacagcagtacgggcttgcaaaaaacgcaaacgaggttctcttggtcatcgaggcttataagactctccgtgacagagctccttacccggctaaccacgttgttgctcacctaagtggcgatttcgcctttgtggtctttgataaatcaacctccactctgtttgtagcctctgaccaagttggcaaggttccattgtattggggaataacagctgatggctatgtggcatttgctgatgatgttgacttactaaaaggtgcttgtggcaagtctcttgcgtctttccctcaaggctgttattactcgacggcattaggtgggcttaggagcttcgagaaccctaagaacaagatcactgcagttcctgctaatgagggagaaatttggggagctaccttcaaggtggaaggagcaacagttcttgcagattgaaaatgaaagagaaacacaaaagaagtttcatgtctcttaaagctctcgaactgtaacagcacaaacaaaaaaaaatatgtaggaaaaacaaaaagctgttctatgagtacttgaagctatcaatggttggtgataatgtgtgtagtgttgtatctctcttatgtcttatgcttctttgtacagcacgtgtgtgtcttctggtgttattagtgtcttcttcctaataagttaatgtctctgaaacaaaaatctaccttctcttgaaaaaaaaaaaaaaagggcggccgccga

SEQ ID NO: 122781 - DNA, 387 bp, Arabidopsis thaliana
aaggtattgttgagcaagtccgtgatggcagcaccattcgggtttatcttcttccggaatttcagtttgttcaagtatttgttgctggactccaggctccatcgatgggaaggagacaatcaacacaagaagctgtcgttgatcctgatgttacagcaacttcgaatggagatgcttctgctgagacgcgtggccctctaacaacagctcagagacttgctgcctcagcagcatcgtctgttgaggtttcctctgatccgtttgcaatggaagccaagtactttactgagcttcgtgtgcttaatagagatgttcgtattgttcttgaaggcgttgacaagttcaacaatctgattgggtcagtatactattccgatggggatacag

SEQ ID NO: 122782 - DNA, 326 bp, Arabidopsis thaliana
caaattctctggagctggagggtcaacccacccccctccttcttccaacctaaacctctcttctatgcgaacttcttctctaccaccgtcgtctccgccgccatgtcccctctcctcctcctccgtcctcacagtcgtctccctcctctcctcttccctctctcagccctcgcctccttcagcgattctgatcgattgtggcgcctcttcctcctccgtaatcgacggccgacaatggcaacccgacgagactttcgtctccagcggcacaccaaaaaacgtttccgatcaagtcctcgacgaaatcttattcactgttagatctt

SEQ ID NO: 122783 - DNA, 444 bp, Arabidopsis thaliana
gttatttttgttttgtaaatttggcaaaaactccctccaaaaaaaaacttagttgactgagaaaactaagcaaaaagatctccgatcggaatcttcttattcgccatggatgctctttctcaggcgatcagttccgggatctccgttccttacaagaacaattcttcttctctcgttccttctcacggactcacctccttaatcctccggaaatcgagatctccggtgaatccctcatcacgatctcgcgtctcggtgcgagcttcggagattcaacacagcaaaacctcagcttcatcgatcgatctcagcgatccagattggaaattaaagtatgagaaagatttcgagcaacgattcagcatacctcacatcactgatgtcttacctgatgctgaagccattcgttcaacgttttgtcttaagatgaggtctccgacggaa

SEQ ID NO: 122784 - DNA, 731 bp, Arabidopsis thaliana
  unsure (1)..(731): unsure at all n locations
gaataggtctnttcatgataatcctatccactgaagcagtcaccaaaatcatcgatctcgcactgctgtcaccaccacaatgctttgaaggagatggttccagcaagagcgtcaagatcttcaaccaatttacccagtacgaatctcattccaaggattcctatattgttctcgaagaacanaatcagaaganaacttatagagaattgacgttcggcttgagacggagatttagccgtcaattttgactgagaagcgtcgtctccggtaggaatttcgaacatattacgacgagcttcccaaagcgcattagtcaccggagaatgatacattccaggccataagctaattggtttccgcattgaagatcctgcatcgatcgaattttgatcaggattttcatctgacggtaccgtcgaattccacatcttctgagacctcgtagccggaatccaaaatccatcaccaagtttcccgcggtttctccgtagagaatgggagagaagctttcccgctgaagatctcatggatctacgatgacggaagcagagaattggagaggtacaattttcctttatgaatcgatagaatctctcattctttccttttgcctgttctctcgttgtgagctaagtgccggacgcgtggctcgacccgggaattccggaccggtacctgcaggcgtgcnnnnnnnnnnnnnnnnnnnnnnnnnnnnnnnnnggaagaatcat

SEQ ID NO: 122785 - DNA, 555 bp, Arabidopsis thaliana
acgactcactattgggaaagctggaccgcctgcaggtaccggtccggaattcccgggtcgatccacgcgtgcggtacaaactggcacaagttctgaggatgacttgaggatcaagtttgaggagctcaaaggaaagttttatggattggctgaacagaatgaaatgctggagcagtccttgatggaaaggaatactttggttcagagatgggaaaaactcctggaaaatattgatatccctccacagctacactccatggaagtggaaaacaagattgaatggcttgcaagtacaattacagaggctacacatgaccgggataatctccaacagaagattgataaccttgaagtctattgtcaatcagtaactactgatttggaagtctcacaaaagcaagtaggtgatgtcgagggaaatcttcaatcatgtgttagtgagagggtgaatctttctgaaaggctggaaagtttgattggtgatcatgagagtctttctgcaaggggcattcaccttgaagttgagaatgagaaactgcagaatcaagtgaaaga

SEQ ID NO: 122786 - DNA, 502 bp, Arabidopsis thaliana
  unsure (1)..(502): unsure at all n locations
nnnnnnnnnnnnnnnnnnnnnnnnnnnnnnnnnnnnnnnnnnnnnnnnnnnnnnnnnnnnnnnnnnnnnnnnnccacgcgtccgaaacactttatcaagagattcacttagctcttcaggcgatgatgcttcaagcttcaatggttcaatggtctcttctagcttcgcttcgccttcagacaaaccgaagcataagtcaatctctccttacaaattcatatcttctcttatcatgaattctcctctgaggaaatggagaggaagtgagactaagaacaagcccaaacctcagcctctaattcaatgcttcacttacaacgagatttcaaaggccacatatgattttcaccaacggaatatagtaggcataggaggctactctgaagtgtacagaggagatttatgggatggtagaagaatacagtgaagagattagccactgagagtggtgacatgaacaacgagaaagagtttcttaccgaacttagcatcataagtcatg

SEQ ID NO: 122787 - DNA, 395 bp, Arabidopsis thaliana
gacccacgcgaccagcttgatccagattcggttctgatcggagctgccatggaacgcatcatcggcggcaagtacaagctcggacggaagatcggcggtggttccttcggagagattttcctagctacgcacgtcgataccttcgagatcgtagctgttaagatcgagaacagtagaacaaagcatcctcagcttctctatgaagctaagctatatagaactcttgaaggaggaagtggaattccgcgcataagatggtttggagttgatggaacagagaatgctttagtgatggatttgctcggtccaagtctcgaagatcttttcgtctactgtgggagaaaattttcaccaaagacggtcttgatgttggctgatcaaatgctaactagaat

SEQ ID NO: 122788 - DNA, 329 bp, Arabidopsis thaliana
  unsure (1)..(329): unsure at all n locations
aacaaacgtctgctccctttggacttgaagctgcacagccttcgaacttaaagaggaagggcaaaagaacgttggcttccatggnaaagccagtgagttgcttcatcagtttggagtccatgtcatgccactcaccaactgaacacattacagctacctccttcgcttccatcgaacttgttaatgtgatctcttgaaaataacctgttatacctatgatggttatgcctatctatgtttaaatgtttttaagcgttctcttttgtgatgttggtctttatataatgttacgtatgatacatttgaataaaggtggttgattccatccc

SEQ ID NO: 122789 - DNA, 446 bp, Arabidopsis thaliana
cccacgcgtccgcgttttttctctgctccagggggaaattaaaaaagtggaaccttttcatctcctggagcgatcaatttctttttcatcatatcgctgactctcgtcttcgtcgtctttgatcgtatcgaggaattgggtttagttcgattcgatcatcagctatctcaatttttctggggattgttctaaaggtttctagtgacttgtttaaagtggttggtattggataatgccttctctcatctcacagcaatggcaggagaggactagtggattcttttcttcatcaggaacgaagcttatggaagcagggcagactgctggtagttttgtcggggaagttgctaaggatgcgaaagtgaatgttgcagatgttgcataaagagttgggtcgttgtttaaaagccggtgggcaattcttcaacaacctgcaactagacatg

SEQ ID NO: 122790 - DNA, 488 bp, Arabidopsis thaliana
taatacgactcacttagggaaagccggtacgcctgcaggtaccggtccggaattcccgggtcgacccacgcgtccggcgatgagtgctattcctgctctatccaaaccatcggtacaggctattatttttgtgccacgtgtgataaaagggtccacaaagaatgcgtcgagtgtccacttgagattagttatcctacccacaccaaacattctcgccaactcctctattccaaatatagatttgaccattgcatctactgtagaaaaagagcaacctatatgatttagttttgtgctctttgcgacagttatatgcatgtcctttgtgctcagtcaaaaatacccttttttatagaccagccaaaaagacatgaccatactctcacccttttccctagacaagcttccttaacctgcaatatttgtggtttgataaataaactccatttcacctacgtttgccctatatgcgatttcgtagcccatag

SEQ ID NO: 122791 - DNA, 595 bp, Arabidopsis thaliana
acgactcactatttggaaagctggaccgcctgcaggtaccggtccggaattcccgggtcgatccacgcgtgcgactaaactcaaatcttcctctcagtttctcccactcttcttcctcaaccttccgatttatcggattactctaaaatacccaaaatggaatctcatggaaaaacccatcagaaagagcacgataatgatctctctccgaaacccataacgttgtcaaagtattcgaaacgggtcgagttaaagactctgcttgatcggagcgaccgcggcgcaggattggctgggaaaagggttgtgattggtggttgggttaagtctgctagagcgggtaagaaaaattctcctcctcctcctctgcctgtagttgccgccccttcgccgtcgagtggtggggatcaagctcatacgacggccaacattaggtgcacggagataatccaatcgaaaatgaatattttcaagagatttttcgatgtactgagccggtggtggtaagacttatccaatctttgataagacagaactcgccggtcagaaggccgtgccaccaccggagtatgttttttacttcttgatcagtgat

SEQ ID NO: 122792 - DNA, 657 bp, Arabidopsis thaliana
  unsure (1)..(657): unsure at all n locations
cnnnnnnnnnnnnnnnnnnnnnnnnnnnnnnntctctctctaatcttttttttttcttccttgttctctatctccccgcgtccgtcttcttcttccttctcctttctctgtttatttgcttcgtttcctcttctctttctccgattctttatccatcttcgctcagatcttccccgtttcaactctttggatccagattctcctcctttttatgtaggtaacacgcatatcaagtgttaaagagtcaagatcacaaaaagttctatcgggtgatctgggctgctttcttttgtaatctaattgcagaaactttgctctgacttggatagcttcgtaaaaggttcaatctttctccgtttttcatcaatgagtagtaactaatctggaaatttgttgggagagaaagggcacattgcactgctattgctagagaacgtttctgcatccatgctggtagagagcatgcgtggatactgtgttttgggtgatgcccctgacaaaattagttcccgatgcattcggcgttgtgacgatatgtctagtcgctctgctagttcttttgggtctcctttgcatcgcttactcgttctatttccagtctcacgttcgtaagcaaggctatattcaacttggttacttcagtggtccctggattat

SEQ ID NO: 122793 - DNA, 518 bp, Arabidopsis thaliana
cagcactaatacgactcactttagggaaagctcgtacgcctgcaggtaccggtccggaattcccggtgtcgacccacgcgtccggacacacctcaccgagactaccattaggaaggataagacacagacacatagtgaggcttctcggattttgctcaaaccacgagacgaatctacttgtctatgagtacatgcctaatggtagtctcggtgaggtgcttcacggtaagaaaggaggacacttgcattgggacacacgttacaagattgctcttgaagctgctaaaggactctgttaccttcatcacgattgttctccattgatcgttcacagagatgtcaaatcaaacaacatcctccttgattcaaactttgaagctcatgttgctgactttggtctcgctaaattccttcaagattccggtacttctgaatgtatgtctgcaatcgctggctcttacggctacatagctccagagtatgcgtatactttgaaggtagatgagaagagcgatgtg

SEQ ID NO: 122794 - DNA, 528 bp, Arabidopsis thaliana
tgattctgccagctctatactgactcacattagggaaagctggtcacgcctgcaggtaccggtccggaattcccgggtcgacccacgcgtccggaagttattgcttgttcttggactacttgtttgttcgattgcgttcgcggtagtagccataatcaaagctagatcattgaaaaaggcgagtgagtcacgggcttggaggttaacagctttccagagactagacttcacgtgtgacgatgtcttggattctctcaaagaagacaacattataggcaaaggaggagctggtattgtctataaaggcgtaatgcctaatggtgatctagtcgcggttaaaagactcgctgcaatgtctcgtggatcttcccatgatcaccgcttcaacgcagagattcataccttaggaaggataagacacagacacatagtgaggcttctcggattttgctcataccacgagacgaatctacttgtctatgagtacatgcctaatggtagactctgcgaggtgcttcacgggacgaa

SEQ ID NO: 122795 - DNA, 504 bp, Arabidopsis thaliana
  unsure (1)..(504): unsure at all n locations
agctccnnnnnnnnnnnnnnnnnnnnnnnnnnnnnnnnnnnnnnnnnnnnnnnnnnnnnnnnnnnnnnnnnccacgcgtgcgatttgctaatattaaacactttttcttttagaaaaaaaaacaaatatggccgttgattcacctcttcaatctcggatggtttcagcgacgacttctgagaaagatgtgaaagctctcaagttcattgaagaaatgactcggaaccctgactcggttcaagagaaggttcttggagagatactgactcgtaactctaacaccgaatatctgaaacggttcgatcttgatggtgtcgttgatcggaaaacgttcaagagcaaagttccggtggttacgtacgaagatttgaagccggagattcaacgtatatccaacggcgattgttctccgatcttgtcttctcaccccatcaccgagtttctcacaagctcaggaacatctgctggtgagaggaaactaatgccaacaattgaagaagactt

SEQ ID NO: 122796 - DNA, 455 bp, Arabidopsis thaliana
tgaaagacaagtatattttcttatttactatataaagtaatttcactttctcagatcccgattcctcttgatcatcgtcttcttctaccaaaattgttgcgcgacaatggagaaatacaacagtttatcagattttctcaaggagttctacatccctacgtacgtcctctcggcggaaacagaagaggaggaggaggaggagagtcgtcctacacctgcgagccccgtccttgtcttcatcaactccaaaagcggtggtcagttgggtggcgaactcattctcacctaccgatctcttctcaatcacaatcaggtctttgatctcgaccaggagactccagataaagtgctccgcagaatctatcttaacctggagaggctcaaagatgatgatttcgctcgtcagattcgggagaaattaaaaatcattgttgcaggaggtgatggcactgctg

SEQ ID NO: 122797 - DNA, 675 bp, Arabidopsis thaliana
  unsure (1)..(675): unsure at all n locations
gtacactatagaagagctatgacgtcgcatgcacgcgtacgtaagctcggaattaggctcgagtcctcctcttacgtaaccctaacgaagtcgaagattctctggtagatctatctcgattcgattcgattcctcttttttcccagaaaagtcgctattgaaatcgaacgaaagtgttgaagattttaccagtcagaggtatatatatatagagagagagttatggatttggatcaatggatttccaaggttaaagatggtcagcatctctccgaagacgagcttcagcttctctgcgaatacgtgaaagagattctgattgaggagtcaaacgtacagcctgtaaacagtccagtcaccgtatgtggtgatatccatggccagtttcatgatcttatgaagctttttcagaccggaggtcatgttcccgacaccaattacatttttatgggggacttcgtggatagaggttacaaccagccttgaagtcttcactattcttttacttcttaaagctagatatccagccaatattacactttttgcgcggaaatcatgaaagtaggcagctaacgcagggttttgaaagttctgattntgtactacatgtggcaatgtcatgtcagatgtagacatcgatgttagctaagatgcattntatgtgaatcaagtatt

SEQ ID NO: 122798 - DNA, 802 bp, Arabidopsis thaliana
cgtaaccctaagcggacggagcaatgctctgctagatctatctttctttcaattcttcaccagagatcgtcgagactcaccattgaaatcgaagaaacagcaccaatttccacttcaccaccgaaagagagagacagagaggataataaaaggccgccatggatttagatcaatggatttccaaggttaaagacggccaacatctctctgaggacgagcttcaacttctctgcgaatacgtgaaagaaattcttattgaggaatcaaatgtacaacctgtcaacagtcctgtcaccgtctgtggtgatatccatggccagtttcatgatcttatgaaacttttccagaccggaggtcatgttcccgagaccaattacatatttatgggggatttcgttgatagaggttacaacagtcttgaagttttcaccattcttttgcttcttaaagcaagacatccagccaatatcactcttttgcgtggaaatcatgaaagtagacagctaactcaggtgtatggtttctatgacgaatgccaaaggaagtatggtaatgctaatgcttggagatattgcacggatgtttttgaactatcttacactttcagctattatagatggcactgttctatgtgttccatggtggcctttcacctgatgtacggacaattgaccagataagattgattgagcggaattgcgaaataccgcatgaaggacccttctgttgattcttatgtggagtgatcccgaaggatattgaaacaggggctgtcagtccacgtggagccggtttgggcttt

SEQ ID NO: 122799 - DNA, 523 bp, Arabidopsis thaliana
  unsure (1)..(523): unsure at all n locations
nnnnnnnnnnnnnnnnnnnnnnnnnnnnnnnnnnnnnnnnnnnnnnnnnnnnnnnnnnnnnnnnnnnnnnnnnccacgcgtccggagaaaaccaactctggagaatggcgaatctaccttcttctctctccatgggcacacctttcggtggtcctagcacctccgcacaaaatcctaccggagctccggccaacaaagatcgcaatttggcctctgctgaacagttggtactcgatctcagcaatcctgaactcagagaaaatgctcttctcgagctttccaagaaaagagaattgtttcaggatctggcgcctttgttgtggaactcttttggtaccattgctgccttgttacaggagattgtatcaatctactctgttcttgcacctccaaatctgactcctgctcagtccaaccgtgtttgcaactcgctcgctcttcttcagtgcgtagcatctcattctgacacgagaatgttatttctcaaggctcatatcccgttgtacctttatcccttccttaa

SEQ ID NO: 122800 - DNA, 749 bp, Arabidopsis thaliana
  unsure (1)..(749): unsure at all n locations
gaagnactatcccatggagctccattggatgaggctcaccatttagtactttgactagctgctgcgagtctgaagctacaacaagttttttgaatccaagatctgctgcgtgttggatagcgagagagagagccgatgcttttgccaataagggagatctgatgttcatcgctgcagctttatgatgggattccaaatggttcgaatggtccacaaaaacccaaccgaaaccagcctgtaaggtctcttctctccacccacccgtctcgagaacattgaatcgtgtctaaatcgatctctgagggagatatacctggaatcacgatcttagatttcgatgcttggatctgagctcctaaccattctgtggattgagaaatagattgggatatgagatccatactcgagatgtgtttttgctcaaaaattagcttgttcctgcaattccataggttccacaagatccaaatgggaagttgtccttgtccaattccgattggtggaagggtaacgaggagctttgagacttccaaaccctgtttcatacttgtgatccgggaagcttgaagcgtggttttgaaaggagaaagatcccagaccttagaagcaaatgggcagaggaaaagcagatggagaattgattcagcctcgtcgcagtgaggacagagagcaagcggatttataccacgcagcctcaggttttcaccaactgggagagcattcttcatgggtttccagaggaaaatttt

SEQ ID NO: 122801 - DNA, 845 bp, Arabidopsis thaliana
accggtccgcaattcccgggtcgacccacgcgtccgaacaaaacacaaaaacaacaaaaaaaccatttccccaaaaaaaaaaaaccaaaaacagaggatgaaacaaaaccagagcaagttcttgagaataatctcaacacctctaagagctttaggcaaggcacgtgatttctacgtgagaagcatcaccggttgcgcagctcgtactcaatattcctcctccgcctccgtctccgctccttttccaagaagccggagctcctcctccgccgccttctcctcctccgcatcatcccggagaaccaccgatttcgggatagatgaagattacagcgagctagtgagagctgcgtcggtgaggagtttagggcacaagaatgagatagacatgttgatacaagagaagctgcaacagcagaagcaacagaagcaaggagggttgcctaagagctcgagtgctgggatggcgaggatagaggaagaggaagaaacagaggaaggatctgtgaatccgaaggtgaagaagactaagaaagtctctgatcttttgtatcctcgtagcaaatcttacgccgttactactagtacccctatcttgtaacttctcttcttcttttttcttcttcttaattttagtattttgtggattgattatcatttttctagctcgatttttcgtgcactgtgaaatactattttcttagcttgattttaataattttgtggattgattagaaataaataactaaacctactctaaaaaaaaaaaaaaaaaacaagggcggccgctctagaggatccaagcttacgtacgcgtgcatgcgacgtcatagctcttaaagagt

SEQ ID NO: 122802 - DNA, 601 bp, Arabidopsis thaliana
  unsure (1)..(601): unsure at all n locations
agaaactgagaaagaagttttatttattaattaatggcggaagagaaaagctacaagtacgtgatcattggaggtggtgtagccggcggttacgcggcgagagagtttagtaatcagggcctgaagcctggtgaactcgcaatcatttccaaggaaccagtgcctccttttgagcgtcctgaactaaccaaggtatatattgacctcgaagtcaatccgacccttgcaaatatctatgtttgtgctggaactggagaagcgaagcagttaccctaactggtacaaagagaaagggattgatctaattgtgggcacagagatagtcaaagcagatcttgcttcaaagacacttgttagtgatgatggcaaaatttacaagtaccaaactttgctaattgcaaccggttctactaacataagattntcagaaattggcgtccaagaagcagattgttaagnatatattcttacctaagggnaaatcgcggnttagtgntgagctttccctttgctatngaacntntatnttgcaaagggggaaagggccgtccatcattgggcggncggtttctnaggggcttnagntaaggtcnttnnntta

SEQ ID NO: 122803 - DNA, 583 bp, Arabidopsis thaliana
gttctcaggaatcacctttttgtgggcatcatctctatcaccattgtgctccaggtagtcatcgtcgagttccttggaacatttgcctcaacgactaaccttgattgggagatgtggctcgtctgtatcggaatcggttctatcagttggcctttggcggtgatcggaaaattgataccggttccagaaactccggttagtcaatactttagaataaaccggtggagaaggaactcatcaggttaataattagtttgaaaagagaaaacagtttaataccaaaggtggcttttagtggtacttgtgaatacgtttacctcttttctctcagtattttcgcaaacggcatcttcggtttaatacagataaaaaataaacctatttttgtttagtggttaagcttgttacgttaatccttaaatgctcaaagtccggagtaatctaaacgaagtgacttattgtgtcccaagtaaaaaagcaatctctatacaaagaggcttcattttaaaaaaaaaaaacaaagggcggccgctctagaggatccaagcttacgtacgcgtgcatgcgacgtcatagatcttct

SEQ ID NO: 122804 - DNA, 596 bp, Arabidopsis thaliana
  unsure (1)..(596): unsure at all n locations
caaaaccaaaaagaaaaaaaaaaatcaaaacagaagcgagcgaagaggacggagggagaggatcttcttccctctttctcttatctactttctcttctaaatctctaatcttttgaaaccctaaatcaaagttttgtttttttttatcaactggggaagaagaaaggtgtaacctttatataaccatggattccggtgacgcgacatctttgcttttgacgaaaattcgaagcttggagccagattatgctcctaagattattgggtatttgcttttacatgattttggtgatagagacttgatgcatctggctcgtggacctgaatcgattttgcagtcgactattttcgaaagtgaagagtcccttgggggatttcccccaacaatcggcttccttcnaatccgaaggcncctccccggtgaanccaaacggcggccccccctaaagggaaanggaagccccacccaaagggggtnaggnttccggaaaaaccccgggnttncccttttaaaaccccccggggnatnaaaanggnnccnggggaaangggggaanccccaattcccaaaaaccgggtngnaccttggtccnngc

SEQ ID NO: 122805 - DNA, 660 bp, Arabidopsis thaliana
  unsure (1)..(660): unsure at all n locations
tgatacttcnnnnnnnnnnnnnnnnnnnnnnnnnnnnnnnnnnnnnnnnnnnnnnnnnnnnnaaaacaccggtccggaatccccgcgtccgcccacgcgtccggtacaacccaacacactaccgtgaacctaaattttacacaaagcttttcaaagaatgccatatgaatgacgaagatgggaattcgtatgaactctctttggttagctgtaaatgcattggagcttatgtgagaaacaaaaagaaccagaaccagatatgctggctttggcagaaagtcagttcggataatgataggggcttccaacgcttcttggacaatgtccagtataagtctagtggtatcttacgctatgagcgtgtctttggagaagggtttgttagcacagggggactcgagacaacaaaggaattcgtggatatgctggatctgaaacctggccaaaaagttctagacgttgggtgcggaataggaggaggggacttctacatggctgagaactttgacgtggatgttgtgggcattgatctatctgtaaacatgatctcttttgcgcttgaacacgcaataggactcaaatnctctgtagaattcgaagtagctgattgcaccaagaaggagtatcctnataacanctttnatgttatttntagcaggg

SEQ ID NO: 122806 - DNA, 565 bp, Arabidopsis thaliana
tgatacttcagctcacgcgtccgaaaaaaaatcggaactttgggatttatggtaagacaccgaagaacacacagccattcctctttattgaccgcttccttctttctctgtcacatacgaatcggggaaatttggatcccgatcgtgatctttagtttggtgaatttgagctggaattggagcttaaaggatcggttttttgactgatctaattgttttgaggatcggtctttcataaagttgttgtctttgaagcttttttgactggtgaggacgaaaaagttgtgattttgggaattagggttgttttgtttcgaattcgccatggatacgagcaggagagctgtggaatcgtattggaggtcgcggatgatagatgcggttacgtctgatgaggacaaagttgcgcctgtgtacaaattggaagagatctgtgacctccttcgttcttctcatgtcagcatcgtcaaggagttttctgaattcattttgaaacgtcttgataacaaaagccccattgttaagcagaaggctcttaggttgataaagtatgctgtgggaaagt

SEQ ID NO: 122807 - DNA, 521 bp, Arabidopsis thaliana
gactcactttagggaaagctggtacgcctgcaggtaccggtccggaattcccgggtcgacccacgcgtccgctttcttcactgtagaatccgtcgaccaaacaactagctccaatggcataatgagcattgtagtttgcaatttcttcttccgtgaagaagaagaagatggctttggagaaagaggaagaagcgtcacaaaacggtgcgttttgtgtccttgatgggctctattgcgaggaagaaaccgggtttgtggaggacgatcttgatgacgatggagatttagattttctcgagaaatctgatgagagtgttgtaaagtttcagtttttacctcttttggatatgttcttatgggatgacgatgagattctgagtttgatttcaaaggaaaacgaaacgaatccatgttttggggaacaaatcttagatggctttttggtttcttgtaggaaagaggctttagattgggttcttagggttaaatctcattatgggtttacttcattgacggctatt

SEQ ID NO: 122808 - DNA, 577 bp, Arabidopsis thaliana
acgactcactatttggagagctggaccgcctgcaggtaccggtccggaattcccgggtcgatccacgcgtccggttttccgcatacttttcatggagattaaccgtggtggccatcccaacacttgttcttcttctaatcccagggttgatctatggcaaataccttgttcacttatcaaagaaatcttttaaagaatacaccaaagcaaactccatcgtggaacaggctctaagctccatcaagacaattctttcattcacagccgaaactcaaataatcaagaaatactcggaagtcttggaaagacacaaaaagcttgggttaaagcaaggtcttgccaaaggtttagccgtgggaagctcagggatttcattcaccatttgggcttttcttgcttggtacggaagcagattggtgatgcacaaacaagaaaccggtggacgcatttatgcagctggtatctccttcgtcttgggtggaatctctctagggacggcactgactgaaataagatacttttccgaggcttcagttgcggcagctcgaatatgttcaagaattgatagaatttcaga

SEQ ID NO: 122809 - DNA, 424 bp, Arabidopsis thaliana
cactatctctctcttaatcgatcgatgaagatcaggtgcgacgtctgcgataaagaagaagcgtcggtgttttgcacggccgacgaagcatctctctgcggcggctgcgaccaccaagtccaccacgctaacaaactcgcctctaaacatctccgtttctctctcctttatccttcttcttccaacacctcctctcctctctgcgacatctgtcaggataaaaaagctctgttgttctgtcaacaagatagagctattttatgcacagattgcgattcatcgatccacgctgcgaacgaacacacaaagaaacacgataggtttcttcttacaggggttaagctctctgcaacatcgtctgtttacaaacctacttcgaaatcttcttcttcttcttcaagcaaccaagatttctctgtccctg

SEQ ID NO: 122810 - DNA, 391 bp, Arabidopsis thaliana
tgcagaaaagtacccaaatatattttcccagagttcagtttttgggaggtttccatattttctgccgagcttagttatatccgtctatgctactgcggttctcatcgcttgctggtggcttcctgaaactcttcatacacgttgtagaattgcacaagggagacttaatccaacagagctaaacgatgatgaaagtagaggaggaggacttgatgaacagaaaataattaataagccaagtctcttgaggaatcgtccattgatggctatcatcattgtttattgtgttttttccctccaagagatagcatacaatgagatattctcactctgggctgttagtgaccgaagctatggaggattgagcttctcatctcaagatgttggtgaa

SEQ ID NO: 122811 - DNA, 642 bp, Arabidopsis thaliana
atacccatggaagaagatcaccaagtgcttatacaggagaacacatctcaatcatcttctcctgtaccggaaatcaacaacttctctatacatccggttatgcaagtctttcccgagttcccggtaccaacagggaatcaatcatacggacagcttacttcatcgaatctcatcaatttggttccattaacttttcagtcaagtccagcaccgctttctctcaacctctcactagcttcatctaatcttaatgaaccatctccttcaatgcatccagcattcaacacgattggagtcgcttagagcttatcctaaaggtgaaaatctgcaacacaccctgtttgtttctttgctgtacagataggtcttgactttgttataaaaaaattcgtcaaatttatgtatttggctaaaaaaaatctgttgaaaagaagaataataaacagagtttggagataggacttaagtggggttttagggttcataatcatcctgtgtttttccttccatgtttggaagttgttgtaatactctctaagttcattcgtgtggatccatcaaaacttataaatcatattaacgttaaaaagaaaaaaaaaaagggcggaagctttaaaggatcccagcttacggacgggggca

SEQ ID NO: 122812 - DNA, 618 bp, Arabidopsis thaliana
cttaaatcgatcacaatctactcacttttgaagtaactatagtaagattgatcagcaagcaaaatatggctcaaaaggttgaagcaaaaggagggaaaggaggcaaccaatgggacgatggatccgatcatgacgccgtgaccaagattcaggttgcagtaggcggaatgggaattcaatacattcagttcgattacgtcaagaacggacaaaccgaacaaactcctcttcgtggtatcaaaggcagtaccattccaactgatccgtttgtgattaaccatcctgaggagcatctagtttctattgaaatttggtataaacctgatggtcttattcaagggcttaggttcatatccaacaaaaagacttctcgtttcattggatacgatcgtggtactagatcatttctccaagttcaagacaagaagatcattggctttcatgggtctgccggagacaatcttaattctcttggagcttactttgctccgttgactatcccattgactcctgccaagccgctaccggcacttggtagtgatgattgaacagcatgggatgatggtgcttactttggggctaagaaggtgtacgtacgacaagcccattatggtctat

SEQ ID NO: 122813 - DNA, 770 bp, Arabidopsis thaliana
  unsure (1)..(770): unsure at all n locations
acaataaccaaaaagcccatcattgggtaaatcttcacatcgggacatggacggcgaaggggaagggagcggaatacggctgagcaagagattcgctggcgggaaggtcaccggcggtagcttcagaagtcgattacaagaccaaatccggtaccgcttggagccactctttcctgaatcagaagccatggcatcctctttcttatcccaatcagcgccgcaaatggatcgccgagcagactcatgcccaacacgatcgaagagcggaagaggtggctcgccagtttgcgcaagagcaggaatttttcaagcaagcagctcttatctcgaagaaagaaagagagaagatcgcaaacgatgaaagctgtgagctttatgtatgttcgtccacctggctatgatcctgaaagtgccaaagcagcagaatacaaggatgagaaacacaagggtcagggttcttcaactcaggatccagtggcggacgacaatgttggttctagaccagaagaatcacaaggtgggggagaacgcacacaggaaaggaagaaaccacgacccaaagatgtgtttggtcgtgctcttcctactgaagaagaatttgaggttcttaaaaatgcaccaaggatggagactggtattcctgggagagtaaagccatttncagttgaagtgcgtaattgtgnaatntcttganatgtgggaacttttggnacccaaagcgggtgatccgtnactncccntttaaagggtgcagtaantcccaantnnag

SEQ ID NO: 122814 - DNA, 519 bp, Arabidopsis thaliana
  unsure (1)..(519): unsure at all n locations
atgatctggccnnnnnnnnnnnnnnnnnnnnnnnnnnnnnnnnnnnnnnnnnnnnnnnnnnnnnnnnnnnnnnnnnnnnnnnccacgcgtccgcaccgccatctaaacaccactccttcacctgagccgcggcgaagaaggtggaagcgaatctattagattagggtttatacgattataggaggacgaaatcagaaagacgagctagaggaagctgcgatttttctggaagataaacaatggcacaagattcagagaagagattccaccaaatcatggataaactctttaccccatcgaaatctcagcttccttcttcctccaccagttcttctgtagagcaacaatcaagaggcaagaagcgtcaaaatccttcatctgcgttagcattggttgagccaaagattgtattagctaccattgataggtcttcagctttgaaggttcctgctggaacatcgccttctggtctttgcaggccgtgggatagaggagatcttatgaggaggcttgctactt

SEQ ID NO: 122815 - DNA, 675 bp, Arabidopsis thaliana
  unsure (1)..(675): unsure at all n locations
agtgatgatgattatgttgtggacttagaagcaggcttgttaacaaagagcgggaatggtcaatgcaaatcaagctgttgtggagataagaaaaatcaagagaatgttgtgatgatgaaaccaagtagtaaaaccagttctgatcattctcaccctggttgttgtggcgataagaaggaagaaaaagtgaagccgcttgtgaaagatggctgttgcagtgagaaaactaggaaatcagagggagatatggtttcattgagctcatgtgagaagtctagtcatgtcaaacatgacctgaaaatgaaaggtggttcaggttgttgtgctagcaaaaatgagaaagggaaggaagtagtggcaaagagctgttgtgagaaacccaaacaacaggtggagagtgttggagactgcaagtctggtcattgcgagaagaagaagcaagctgaagacattgttgtcccggtgcagattatttggtcatgcattaacgcatgtggagatcgagttgcagacaaaggaaacctgcaaacaagctgttgtgacataagaaaaggttaggagacaggttgccgcttctagtgngacnncctacctgggaaggatgccgttaagtgaggactcanctgcccggactngggntgaaaantgctgnaggtcccgtgaaaaaccngggtc

SEQ ID NO: 122816 - DNA, 672 bp, Arabidopsis thaliana
  unsure (1)..(672): unsure at all n locations
catgacctgaaaatgaaaggtggttcaggttgttgtgctagcaaaaatgagaaagggaaggaagtagtggcaaagagctgttgtgagaaacccaaacagcaggtggagagtgttggagactgcaagtctggtcattgcgagaagaagaagcaagctgaagacattgttgtcccggtgcagattattggtcatgcattaacgcatgtggagatcgagttgcagacaaaggaaacctgcaaaacaagctgttgtgacagtaaagaaaaggttaaggagacaggtttgctgctttctagtgagaacacaccttacctggggaaaggagtcctgattaaagatgaaggaaactgcaagtttggcagcgagaacatggggacagtgaaacaaagctgccatgagaagggcttcagcgatgaaaaccaaaccgggggaataaatcttgcttcggaggaggggccagatggtcaagatttctcctcggggttttgtgtgaacgagggaacagtggaacaaaagcttcgatgagaaggagcattctgtgttggtggagaaggaaggtttngacatggnaacttggttcttttttgtaaatnccaagctggttttttntgggaancacaggaggttnagtttaggngcnatttcnccntnnggggtaaanaangngggccc

SEQ ID NO: 122817 - DNA, 514 bp, Arabidopsis thaliana
  unsure (1)..(514): unsure at all n locations
nnnnnnnnnnnnnnnnnnnnnnnnnnnnnnnnnnnnnnnnnnnnnnnnnnnnnnnnnnnnnnnnnnnnnnnnnnccacgcgtccgcttcttcttcttcatcttcttctatatattggtgtttcatttgttctgctttaaaagtacacaaagattcatcttttttcggtcctctgattgggcaaaagactagctcggtcgtgttttgaacaagagatacatgttttgaaaaattcctcgcaaaagaagagaaagaaagactcaaacttttgtttgaatttgataccattttttatatatataccaaaagtccaagactggtttcatttttgggtttggtctgaaacctctcttcgtgttgtttgttcatggtatgtcttaattagggtaaaaaaatacttgattgttttctctcaatcatcatgcatagagtacgcaataaaccggttaaatccaccgctactgcttccgtcaagcatttaatcaaacagagaggcggcgacggagctacggcgg

SEQ ID NO: 122818 - DNA, 1177 bp, Arabidopsis thaliana
  unsure (1)..(1177): unsure at all n locations
gaggacttgaatacggaagcttgagagaatgaaagcgatcgtgatctctgtgccagatactctccaaagacttggcctttataatccaccacctggctcaagcccttaccttggtctcgaatgttctgggaccattgaatccgtcggtaaaggcgtctctcgatggaaagtcggagaccaggtgtgtgctcttctttctggaggaggttatgcagagaaagtttctgttcctgctggacaaattttcccaattcccgctggtatctctctaaaggatgcagcggctttccctgaagtggcatgcactgtttggtctactgtcttcatgatgggccgtctctctgtggtgatcattcttgatcatggagttcaagtgggatgggacatttgctatcagatagctaaacatctgggagtgagagtatttgtcacagctgggagtgatgaaaagctagctgcgtgcaaagaactcggggctgatgtttgtataatttacaaaacgaggatttttgttgcaaaggtaaaagcggaaaccgatgggaaaggagtggatgttatcttggactgcattggggcaccgtatttgcagaaaaatctcgacagcttaaactttgatggaaggttatgtattatcggtttaatgggaggagccaatgcagaaataaaactaagtagtctgcttccaaagcgtctcactgtcttaggagctgcattaagaccaagaagccctgaaaacaaagcagttgttgtaagggaagtcgagaagaatgtctggccagcgatagaagcagggaaggtaaaaccagtgatttacaagtatttaccattgtcacaagcagcagaaggtcatagccttatggagagtagcaaccatattggtaagattctccttgagacttgattctctgcaaagggagaaatgttcagagacaagagtcatggtcaataatcaataaaatctggtcgattctgttcatagatatctctttacaagagttctgtttgttggcttttatgtatctctgatttggtcaaaaagacactgtaactatggaacatatatagtatcaaataagctgttgtaaccaaaaaaaaaaaaaaaaagnnnnnnnnnnnnnnnnnnnnnnnnnnnnnnnnnnnnnnnnnnnnnnnnnnnnnnnnnnnnnnnnnnnnnnnn

SEQ ID NO: 122819 - DNA, 879 bp, Arabidopsis thaliana
  unsure (1)..(879): unsure at all n locations
atgatattnnnnnnnnnnnnnnnnnnnnnnnnnnnnnnnnnnnnntccgttttttctttggaaccatctagtctaagagaaagccacgcgtccgaagagaaagaagaagaggacttgaatacggaagcttgagagaatgaaagcgatcgtgatctcggagccaggtaagccggaggttctgcaactccgtgatgtggcagacccagaagttaaagacgatgaggttctcatcagagttctcgctactgctttgaatcgtgcagatactctccaaagacttggcctttataatccaccacctggctcaagcccttaccttggtctcgaatgttctgggaccattgaatccgtcggtaaaggcgtctctcgatggaaagtcggagaccaggtgtgtgctcttctttctggaggaggttatgcagagaaagtttctgttcctgctggacaaattttcccaattcccgctggtatctctctaaaggatgcagcggctttccctgaagtggcatgcactgtttggtctactgtcttcatgatgggccgtctctctgttggtgaatcattcttgattcatggaggttcaagtgggattgggacatttgctattcagatagctaaacatctgggagtgagagtatttgtcacagctgggagtgatgaanagctagctgcgtgcaaagactcggggctgatgtttgataaatacaaaaccgaggattttgttgcaaggggtaaagcggaaccgtgganaggagtggatgtatcttgactgattgggcaccgattgcnanaatctcacagctaacttgatggaggtatgatatcngttatggangagcatgagaataactagagctgctcaacgctactgctagactg

SEQ ID NO: 122820 - DNA, 1029 bp, Arabidopsis thaliana
tcctggttacaaaactcgttacgatgatgttgatctcattaccatcagagaaaacacggaaggagaatacagtggccttgaacatcaggttgttagaggtgtggtggaaagtcttaaaatcattacccgtcaggcgagtttgagagttgcagagtatgcttttctctatgccaagactcatggaagagagagagtttctgctatccacaaagccaacattatgcagaaaactgacggtctctttctcaagtgttgtcgtgaggttgctgagaagtatcctgagatcacttacgaggaggtcgttattgacaactgctgtatgatgcttgtgaaaaacccagcactttttgatgtcttggtgatgccaaacctgtacggtgacattattagcgatctgtgtgccggattggttggaggactaggattgactccaagttgtaatattggagaagatggtgtagcccttgctgaagcagttcacggttctgcacctgatatcgctggaaagaacttggcgaacccaaccgcgttgcttctgagtggagtgatgatgttgcgtcacctgaagttcaacgaacaagcagaacaaatccacagtgcaatcatcaacaccatagcagagggcaaatacagaaccgcggatcttggaggtagttcgaccaccacggaattcacaaaggcaatctgtgatcatctctgaacatcgtaaaatccaattctttatcgaatcttcttttgggagccttttttatagcctcgaattcttcttgttttcttgttttacgattagaataaaagaaaaagcaaaaaaacggctcttcatgagttttgaagttattgtttctgccttaaaatttctctgccgtaaggcaagaagattcataacactggaaaaagtgatgttctttctgaatcgatcagaagaattttgttttgttgcttgaaaaaaacccaaaaagggcggccgctctagaggatccaagcttacgtacgcgtgcatgcgacgtcaaagtcttctataggtcacct

SEQ ID NO: 122821 - DNA, 502 bp, Arabidopsis thaliana
caagaggaataaattcacacgcgaacttcgatagttgttaattttcgttgaacacaagtgacgaatttgagagagaaaaaaatagaaaatcagagataaagaatttgagtttcttggaattaaaggatcgattttgttgaagtgaaattgaaattgattgtgaaaagagaaagagactgatggtagcagaagcagaggttgtgtttcaacagagtttaccggcggttctggagattgagttgtttgacggagtttcctccgccgttaaatctcccgtttcttctccgaaattgggttttactcagtcaacggcgtcggtttccggaagtttaacgacttctcctgtgcctgcctgcgttcctgtgggtgattgcgatcctagtgtcttggatttatattccgaccatccggtctggaagctttgctgatattgggccaaagagaaacatggtagatgaacacattctcatagacgatttattttcttaagttgggttccttt

SEQ ID NO: 122822 - DNA, 917 bp, Arabidopsis thaliana
ctacaatttccctgaagaactctttgcagatgctggtatacttgctattgagcatgctgactttgagggaatagagcgtcttggtttggttactggtggtgaaattgcttcgacctttgacaacccagagtctgttaagcttgggcattgcaagctcatcgaagagatcatgattggtgaagacaagttgatccatttctctggctgtgaaatgggccaggcttgctcaattgtcctaagaggggccagtcaccatgtcctagatgaggctgaaagatcactccatgatgccttatgtgtactctctcaaacagtgaatgacactagagttttgcttggaggtggatggccagagatggtgatggcaaaggaagtagatgagcttgcaaggaaaactgctggcaaaaaatctcatgccattgaagctttctcacgtgctctagttgctataccgacaacaatcgctgacaacgctggtttagacagtgccgaattggttgctcagcttcgtgcagagcaccacactgaagggtgtaacgctgggatcgacgtcatcactggagctgtaggagatatggaagagagaggaatctatgaagcattcaaagtgaagcaagcggttctgctttcagccacagaagcatctgagatgatattgcgagtggatgaaatcattacatgtgctcctaggaggagagaagacaggatgtgaaaaacccaacacaaacacatgaacgtggtgggagcctcgagatttcatgattgtgttttcgatttggatcagaatacaacctttttaatctgtttaatgttttgctcctccttagaactcatctttttgttttgtttccttttaatcttgttttgagtttgaatttagacgtttgaaaaaagtgttagctccaaagtttttaatt

SEQ ID NO: 122823 - DNA, 575 bp, Arabidopsis thaliana
atgttcttcttcctcttccgattcatagttttttttttttccggtaacttgtcatcaattagatctcgtccgaagttgaatctttagttcgcgagcttttggacaacttcgaggtcttagctttgcaatgaaattgtacgaacacgatggagttgatttagaagatgggaagacagtaaaatccggaggagataaaccaattccaagaaagatacataaccgggctttgttatccggtttagcttattgcatttcttcatgcagtatgatacttgtcaacaagtttgtcctctccagctacaacttcaatgctgggatcttcctaatgttataccagaactttgtctcggtgatcattgtggttggtttgagtttaatgggtctaataactactgaaccacttactttgaggttgatgaaggtctggtttccagtgaatgtcatctttgttggtatgcttatcactagcatgtttagtttgaaatacatcaatgtagcaatggtcactgtcctgaagaatgtcactaatgtgataactgcagttggtgagatgtatctgttcacaagcaacatga

SEQ ID NO: 122824 - DNA, 645 bp, Arabidopsis thaliana
  unsure (1)..(645): unsure at all n locations
accacgcgtccgtttttttctttctgagaaaaatgaaccgcaagaatccgagtggagtggtgccattcgctgttctccaatccaaatacgccaaatcttcccaaaaataaataaacctttccttttctttctcttcactctgttcccatatctacagtgactcttctctctctgtatattactcttccttcactatctctctctctttactgggtcttcttcagcttctgagtcttctcctctctctctatctctcaagtgggctttgctttgctgtttttgtcttccttcgacgactcacttttgcagattctcataaattcttcaaagctttgagtcttttttcagattcgagggtcggttttatatatgcttcaaatctcttacccaaatcaggtatggagactctgcatccattctctcacctacctatctctgaccaccggttcgttgttcaagagatggtgagcttacacagctcgagtagcggtagctggactaaagaagagaacaagatgttcgaacgagctcttgcggtatacgctggaagactcggcctgatccgctgggtttaaaagttcgcttccattgatccctgggaagacctgttttttaatggtaatgaaggcaatttaggnaagcttt

SEQ ID NO: 122825 - DNA, 473 bp, Arabidopsis thaliana
ctctatttgtcctaacgacctgattgcattagacaggaacgaaaaggaatgcaaaagatgagagtttcggggtttagagttcttctcttggtttcttgtttcttcggcaaatccaaaggagctgttgttcctgcactcatcatgtttggcgactccattgttgacgttggcaacaacaataacttactcagcattgtcaaatccaactttcttccttacggtagagacttcatcgaccaaagacccaccggaagattctgcaacggaaaactcgctgtagatttctcagccgagtaccttggtttctcttcatacccacctgcattcctaagccgggaagcaagcaacgagaatatcctgatcggtgccaactttgcatcagcttcttcaggatactatgatgccacatctgttccatttgtaaaggagacaacacagtcaaacatcattacacacatacccaagaaatgatc

SEQ ID NO: 122826 - DNA, 694 bp, Arabidopsis thaliana
  unsure (1)..(694): unsure at all n locations
acgactcactatttggaaagctggtccgcctgcaggtaccggtccggaattccccggctcgtcctttcataatctccaatcttcttcggattcgacgaatccgtcatcgccgacggaatcgtggccgtgtaatattaacagatggggaagaagagaaaatcaacagccacaagcctcgatgaggtagatcggactgtttacgcttcttttcgcaccgccgctaactctttatctcagctttatactcagtctatgaatcatcagaagttatcttttcaagccggtgaacgccatggtttggaaaaactgtaccaatggatatggagacaacaagaaggagggtcaagagtgacacctatggatattgtcaattatattcagaacgagctcgaatgctgcatagacgagcctccaatatccccaagagcgccaccaccgcaaccaacaatgcatgtcacgaatcccgggctcatgaccacttcaggcacctctttcccaacagctgtttccagtggttaggtccgagcagtttgagaaccaggccaagaacctcggttttttcaaacggactttcaagcccaatacggggtggttttaagaacttccaaatttccgcagggagggttacacatccggggggccccccacganttagnaacagggggtttcttcccggttttttttttattgttgc

SEQ ID NO: 122827 - DNA, 1132 bp, Arabidopsis thaliana
ttaggtgacactatagaagagtctatgacgtcgcatgcacgcgtacgtaagctcggaattcggctcgagctcgagccgaggcggctcgagcggctcgagctttcataatctccaatcttcttcggattcgacgaatccgtcatcgccgacggaatcgtggccgtgtaatattaacagatggggaagaagagaaaatcaacagccacaagcctcgatgaggtagatcggactgtttacgcttcttttcgcaccgccgctaactctttatctcagctttatactcagtctatgaatcatcagaagttatcttttcaagccggtgaacgccatggtttggaaaaactgtaccaatggatatggagacaacaagaaggagggtcaagagtgacacctatggatattgtcaattatattcagaacgagctcggaatgctgcatagaccagcctccaatttccccaacgagcgccaccaccgcaacccaccaatgcatgtcacgaatcccgggcttcatgaccactttaggcacctctttcccaacagctgttccagtggttaggtccgagcaatgtgagaaccaggccaagaactcggttttctcaaacgcactttcaagcccaatacggcgtagtcttcagaactaccaaattccgcagggaggctacacatccggcggaaccaccagaagcagtgaagtgaacaggggatctaactctccaggttctattgattcttcaatggacatgcatgcagaataagaagtgtgatcgtaaacacaactcttgtttaatgatgtttgatctatatacaaaaaccggtttgattcctcataatgtatcaattgattcttatcttggaggtttgtttgttggtaattttgttagagtttctaaaaggtcacatgtaaatcattgtgtgtctgattattattatcacttgtttaactcttttaacttttcatcttttaaactacttgatgaccaagagttttcacatctacttgaatactcttttaaccctaaaataaactcaatggattcttgtaaaaaaaaaaaaaaagaacggccgctctagaggatccaagcttacgtacgcgtgcatgcgacgtcaaagctcttctataagttcaccta

SEQ ID NO: 122828 - DNA, 426 bp, Arabidopsis thaliana
cttcttcttcttctccgttcgtgctctggactcgctcgaaatcgatccgatgataatttatgcagctcgaaacttaatttagaatcatacctttttctggatttggctgacgaatccgttttcaattgcacgagttgcttcgccaggtttatcaacttaagaatgtctaattatcaaggggatgatgctgagtacatggaagatgtggatgatgaaatggatgaggatgatttagatgaggattttcgtggggatgatatggctgcctctgattccgatgtcgatgagtttgactactctaataatagaatagctgacacttcagctgaccaagcccgggaagggaaagacatccaggggattccttgggacaggcttagtattacgagagagacatacagacaaactagactagaacagtataaa

SEQ ID NO: 122829 - DNA, 721 bp, Arabidopsis thaliana
  unsure (1)..(721): unsure at all n locations
nnnnnnnnnnnnnnnnnnnnnnnnnnnnnnnnnnnnnnnnnnnnnnnnnnnnnnnnnnnnnnnnnnnnnnnnnncggacgcgccacgcgtctactctctttcatttcctcttttcgttgacttactaaagtactcttgtttcaatcttcattctagagagattctgtttcatggatgctattttgccagtacccgttgatgggttcagattcgacaccggttctggatcttgttgcaaaccgaggaacaatcttgaatctgggacgaccaatcgtttcacttgtttcaacgaatctgaatctcagagcaacccttctccgaccgagtctaaggtatgttcagattaccttcctgtctttaagtacatcaatgacatgttgatggaagaagatcttgaaggtcagtcttgtatgttggaagacagtttggctttacaagccgcagagagatctttcttcgaagtgcttcaagatcaaactccaatctcgggtgatctagaggatggttctcttggaaacttcagttctataacgagtttgcatcaacctgaagtttcagaggagtcaaccagaaggtatcgacatagggatgatgatgaagatgatgatcttgagagtggaaggaaatcgaagctccccgcgatttctccggtggatgacctactagagaagtttgaggaagtgttgttggtaagtcaaaagaatgatcagggagaagcaac

SEQ ID NO: 122830 - DNA, 517 bp, Arabidopsis thaliana
  unsure (1)..(517): unsure at all n locations
cagctacnnnnnnnnnnnnnnnnnnnnnnnnnnnnnnnnnnnnnnnnnnnnnnnnnnnnnnnnnnnnnnnnnccacgcgtccgcggacgcgtgggctagttgctgtcacacttgtgctttatgcaaaagggaaatacaaggatggaaattttagccctgatcaatcctatctctatcttaccatcatctatacaatatcatacactgtagctctgtacgcgctggtcctcttttatgtggcatgcaaagatctgcttcagccattcaatccagtcccaaaatttgtgattataaagtctgttgtctttctaacctattggcagggtgttctagttttcctttttgctaaatctggatttataagggatgaagaagaactagccctcttccaaaattttataatatgtgtggaaatgcttattgctgcagctgctcatttctatgcatttccgtacaaggaatatgcnagagcccatgttggaggagctcgcagtttctcaggaagtcttgcacatgc

SEQ ID NO: 122831 - DNA, 503 bp, Arabidopsis thaliana
aattttggagacgctctttctctttcatagagagagagtgagaaagttctgatacggcggcttctcactgtcatctagctgtaccactgacgataaatctctctcttcctctaaatcgttaacttatacttgcagattctcgcgttgatagtaaaaagatggtgaagcttttggagctgttcataacttcatcaaaaccagtcgttgagattctgttgataacatcagtcggattttatatggctctcgatggagtcaatcttcttggtcatgatgctcgtaaatatctgaacaacattgtcttctatgtgtttagtccttcgcttattggaagccgtttagctgatagtgttacatacgaaagcttggtcaaaatgtggctcatgccggtgaatgttctgcttacattcatcattggtcaaacttggctggattgttattgccatcactaagcctccttcacaccttcgtggtctcattcttgggtgttgtgctgctgggaa

SEQ ID NO: 122832 - DNA, 576 bp, Arabidopsis thaliana
ggtactaggccaaattttggagacgctctttctctttcatagagagagagtgagaaagttctgatacggcggcttctcactgtcatctagctgtaccactgacgataaatctctctcttcctctaaatcggttaaaaaattcattcccttcttggattgctctgttttcttcggcggttcttgcagctccattgattctctgtttcctctgctacagttaacttatacttgcagattctcgcgttgatagtaaaaagatggtgaagcttttggagctgttcataacttcatcaaaaccagtcgttgagattctgttgataacatcagtcggattttatatggctctcgatggagtcaatcttcttggtcatgatgctcgtaaatatctgaacaacattgtcttctatgtgtttagtccttcgcttattggaagccgtttagctgatagtgttacatacgaaagcttggtcaaaatgtggttcatgccggtgaatgttctgcttacattcatcattggttcattacttggctggattgttattgtcatcactaagcctccttcacaccttcgtggtc

SEQ ID NO: 122833 - DNA, 511 bp, Arabidopsis thaliana
aaataaatgaaataatacaaagggatctttatgtaaaggcgtcaccaattagtggaaataatggagcaagccactacactcttcatattgctttccactctcctcctcgccgtctccgttgagtctcctcagccaccgctatttcccgatgaagctctccccactaaatctggctacctcccggttaaacccgcacccggctcgtccatgttctatgccttctacgaagcccaagagccaaccacacctcttcctgacactccgctcctcgtttggctccaaggtgggccaggctgctcttcaatgattggcaacttttacgagctcggtccctggcgtgtagtttcacgcgccacagacctcgagcgcaaccccggcgcatggaaccgtctattcggactactttttgtggataacccaataggagtcggattcagcatcgcagcctcacaacatgacatacccacaaatcagagacaggtcgctgagcatctttacgccgctctcgtgg

SEQ ID NO: 122834 - DNA, 516 bp, Arabidopsis thaliana
  unsure (1)..(516): unsure at all n locations
cnnnnnnnnnnnnnnnnnnnnnnnnnnnnnnnnnnnnnnnnnnnnnnnnnnnnnnnnnnnnnnnnnnnnnnccacgcgtccggagagcttctcacagtgaagcaaacaatggagtcttttcggcgattctccttgctatccttcattgccctacttgcctacttcgctttcctcgcttctgctgaacatcacgtccatcaattcgtgatcacaccgacaccagtgaagaggctgtgcagaactcaccaaagcatcactgtgaatggtcagtaccctggtccaacgcttgtggtcaggaacggtgactctctcgcaatcactgtcatcaacagagcccgttacaacattagtattcattggcatggaatcagacagctgcggaatccgtgggccgatggtccagagtatataacacaatgtccgatccgtccaggacaaacctacacttacagattcaaaatcgaggatcaagagggtacgctttggtggcacgctcatagccgctggctcagagcc

SEQ ID NO: 122835 - DNA, 872 bp, Arabidopsis thaliana
  unsure (1)..(872): unsure at all n locations
acgcctgcaggtaccggtccggaattcccgggtcgacccacgcgtccgggattcttctctgaaaactcaggaacctcaagtagtggaaacttctccttctccggtagctcaggagcctcctcaagtagctgacaaacctgcgattgttccttctccgatagctcaagagccagacaacgatgttccggcgcgcgggaaacgagtttgctgagttcgccgccgggtgtttctggggagtggagcttgctttccagagaatccctggcgtgaccgtgactgaggtcggttacactcatgggatctctcacaatccgtcttatgaagatgtctgtacgaacaccacgaaccatgcagaagttgtcagggttcaatatgatcctaaagaatgcacttatgagacacttcttgatttgttttggtctagacataatcctaccaccttgaatcgtcagggagaacttttgggagcacaataccgatcaggtatatatttctacacaccggagcaagagaaactagcacgcgagtctctagagaaagagcagaaaaaactggaggataagattgtgactgagatcttaccggcaaagaaattctacaaagctgaagaataccatcagcagtaccttgtcaaaggtgggatgcatggaaacgctcaatcacctgcaaagagctgcaaggaccctatccgctgctatggctaatcaaaagcctttgttcctcttctcccaaaacagaggattctcccagaggacctctttacctgttgcttttgttggtttgtgtgtgttccgtgtgtttataatgtancttgtcaatctnaatncatacattattaaaaggttntngggtccatcttcacccctttgntg

SEQ ID NO: 122836 - DNA, 743 bp, Arabidopsis thaliana
aatactacttacattgaaatatgaatattcctatttagcgatgatttttacgtgttaatctctgactagcttctttgtagatataaacgagcttcccgaggtctcatcatcaaacaatacacttaacaatggattcttctctgaaaactcaggaacctcaagtagtggaaacttctccttctccggtagctcaggagcctcctcaagtagctgacaaacctgcgattgttccttctccgatagctcaagagccagacaacgatgttccggcgccgggaaacgagtttgctgagttcgccgccggttgtttctggggagtggagcttgctttccagagaatccctcggcgtgaccgtgactgaggtcggttacactcctgggggctctcacaatccgtcttatgaagatgtctgtacgaacaccacgaaccatgcagaagttgtcagggttcaatatgatcctaaagaatgcacttatgagacacttcttgatttgttttggtctagacataatcctaccaccttgaatcgtcagggagaacttttgggagcacaataccgatcaggtatatatttctacacaccggagcaagagaaactagcacgcgagtctctagagaaagagcagaaaaaactggaggataagattgtgactgagatcttaccggcaaagaaattctacaaagctgaagaataccatcagcagtaccttgtcaaaggtgggatgcatggaaacgctcaatc

SEQ ID NO: 122837 - DNA, 551 bp, Arabidopsis thaliana
  unsure (1)..(551): unsure at all n locations
ggattcttctctgaaaactcaggaacctcaagtagtggaaacttctccttctccggtagctcaggagcctcctcaagtagctgacaaacctgcgattgtcccttctccgatagctcaagagccagacaacgatgtcccggcgccgggaaacgagtttcctgagttcgccgccggttgtttctggggagtggagcttgctttccagagaatccctggcgtgaccgtgactgaggtcggttacactcatgggatctctcacaatccgtcttatgaagatgtctgtacgaacaccacgaaccatgcagaagttgtcaggggtcaatatgatcctaaagaatgcactttatgaggcacttcttggatttggttttggcccaggcataaccctaccacctttgaatcgtcagggggaacttttggggggcaatacccggccagggtattcttttncaacccggggcagggaacgtgcacgggggcttnttgggaaggggcggaaaaccttgggggtnagtttnaccttagttttccgnaanganttttcaaggttg

SEQ ID NO: 122838 - DNA, 604 bp, Arabidopsis thaliana
tccgaaaagaaaaaaaggctttttaactgaaattgaaacacaagatgggatgctcttcatacgctggcagatctatcgctggtgatgcctggaactggcactggtactgggtcattaagtcaaggctgggggaaaaaaagctggggaagcttatgtttcagattttaaagggactgatccggcattcatgtctaaaagtagttctcttagaaacttcaaacagagaagatacggcagcaatgacctttgtaaccctgaactcgagagaaaaagtccaagtagttctttaatccaaaagagacggcagaaagcattaccagctaaagttcttaaagatgagcttgctgcaagctcacaagtcatagagccttgtaatagcacgggaatacgtgaggaagataagcctgttgggagaggtaaacggtccgcaggtattcgaaactcacatgaaaagaaatctgccaaatctcatgatcacacttcgtcaagtaacagcatagtagaagaagatgagtcagctccatcaaatgcagtcattaagtaacaagttaacttgccaactaaagttacgagcagaagaaagatagttactgagaaacctcta

SEQ ID NO: 122839 - DNA, 508 bp, Arabidopsis thaliana
ggaatgctgcgccgcctgaaggtaccggtccggaattcccgggtcgacccacgcgtccgcagatccttaaatctccaaatttcctcctcagtcttatcattatagacaaaacccttttctttgtaaattttttcccaatctatggaagtgcctagtgaaaccacgaatttagccgatctccggcgaccattggtggttccggttgtctcggagcgtaaacctccggcagacgtcggactcggactagagagtgttttaacggagcgtagccttccgtaccggaggcgcgtgtacttaggggcatgcatagagatgaagctacttttccggttggcacttccggcgatacttgtctatttagtcaacagcggaatgggtatttccgctcggatcttcgccggacatctcggtaaaaatgagctcgccgccgcgtccatcggaaacagctgcttcagtctcgtctatggcctcatgttaggtatgggcagtgcagtcgaaacactatgtg

SEQ ID NO: 122840 - DNA, 555 bp, Arabidopsis thaliana
agaaagatgaacatgcatcgtgataacattagatggttacaatatcctcaccaacttggaagtgacacaaattatacattactactagttagtactagtagatctgaatctctctctctttcttcttctctaatgccgtaaattgtaagctaactcttcccacatagtgcctcgattctcgcttttgctctctctctctttcctccgacaatgaataggaatctcagagaatctcttgccggtgggaggaatattccggcgatctctcagtttcgtagaggcaataacaacaacagcaacaacatctctcaaaatggcttctctagagattccgatgagaatctagatcttttctctaagatccgtcgctcatttcctttggcttcctccgacgaattacccgacgtttctgcaaaactcgggagactctcggtcggatccaaaatagctcccaaaggcaaagatgatctcttgtcttcagctgaaggaggaaaaaatgattatgattggcttcttacgcctcctggaacacctcttggaaacgactctcattca

SEQ ID NO: 122841 - DNA, 766 bp, Arabidopsis thaliana
  unsure (1)..(766): unsure at all n locations
atgattctgccagcatcnnnnnnnnnnnnnnnnnnnnnnnnnnnnnnnnnnnnnnnnnnnnnnnnnnnnnnnnnnnnnnnnnccacgcgtccgaagagactctcgccgtctaatgggaagctgttggtctgatggctcttacgctggtggaggaatggtcggtgttggtggtggggctaattcctccgccgccactcctaacgacgccgttgactactatctcaagtctcgtggctacaatggcctcttttctcagatcgagttatctttctctgcttccaatttgcgagaccgggacgtgatttcaaagagtgatgcaatggtggttgtttatacaaaaggaagagatggaacacttgctgaattgtttcgtagtgaagttgttttgaattctttgaatcctaaatggattaagaattttactattggttatcagttcgagattgtgcaaacattgctgtttcgtgtctatgatattgacactcagtttcaaaattctaaggaggagctcgacgaacagcaatttctcggtgaggcaacatgtacattgtccgaggtggttaccaaatcaaataggacgattgctttagaacttatgcgtaaagaaggtgttgctgcacagactcagccacaacataatggaaagcttattgttcatgctgaggagtctttagcttctaagaccaatacagagattgtatttagggggttgaatttggaatcaaaggatactttctctaaaagtgacccgtttttggtgatatct

SEQ ID NO: 122842 - DNA, 517 bp, Arabidopsis thaliana
  unsure (1)..(517): unsure at all n locations
atgatatgccnnnnnnnnnnnnnnnnnnnnnnnnnnnnnnnnnnnnnnnnnnnnnnnnnnnnnnnnnnnnnnnnnnnnnnccacgcgtccgctgaaacaaaaaaaaaagaagatcagacaaaataaatcattgtcaatcgacgattcagaagcttaatcgtctagaatcaacataattcttcgattgtacactctgattggctacttgttagatctaagaagaggccaagtgttatttcgtactaacattatcatggaggagacttctattgaagcagacactgcggagaagtcccaaaccatataaaaggcttcacgtcagcaagatcggtgaatgatattcgtgccgccatcgtctcagaataaactgactattttctaaaaaggttatcgccaagattagtatttacgaattagaattgataaggaaggtcactaggaaggagctggggaaagagattggggatttgggcagaaacctgggtattgctaataagccttggcttatgcttgggga

SEQ ID NO: 122843 - DNA, 479 bp, Arabidopsis thaliana
ccacgcgtccgcaaagcctggatcaatcatcatcttcatcaatttccagattcagattccaaatctccgaagcttaacgaaaacaatggcggcagaacctaaccgctaagaatttccctgtcctctcttatgtcttggctcgtctcccttctttcaccgccaaatccccttcctcctccgttcctcccttcgacatcgaacaaccaccaccatcatcatcatcatcatcgattgagatcgtcactcagatgcctcacttaacacaaccagatgttctcgcttcaatgacaagtgcgatctctgacgtcgccgagactcgatctatccttcgaaccctaggacctagaccagatcacgaatcagtcgataaggctcgtgctaaactctcggaaatcgaatcgttcttatctgaatcgttcgaggatatcgcgttaaccgatgcggcggcgaaagatgagaagaggagacaagagatggat

SEQ ID NO: 122844 - DNA, 544 bp, Arabidopsis thaliana
actacgactcactattttggaggctggaccgcctgcaggtaccggtccggaattcccgggtcgatccacgcgtgcgggacaggcaatcaaaggattcttgccttgaggttgtttaccggatgtactggctgtgttatcatatccacacatacaagaagacgcaggtgtctctggttaatggaatatcgatgggtggaggtgcagcattgatggtccctatgaagttttcagttgtgacagagaaaactgtttttgcgactccagaagcaagtttcgggtttcacactgattgcgggttctcctacatccattcacgtcttcctggtcatttaggagagttcttggctttaactggggcaagattgaacggcaaagaacttgtagcaattggaatggcaacacattttgtaccttctggtaaattgatggatctggaggcacggcttgtgagtttagactcaggagatgcggatgtagtccaatccacaattgaagagttctccgagaaagtcaaccttgacaaagacagcatccttaacaagca

SEQ ID NO: 122845 - DNA, 596 bp, Arabidopsis thaliana
  unsure (1)..(596): unsure at all n locations
cgnnnnnnnnnnnnnnnnnnnnnnnnnnnnnnnnnnnnnnnnnnnnnnnnnnnnnnnnnnnnnnnnnnnnnnnccacgcgtacgcctctctctctctccgatctcaatagatcgctggagttgagagagcttcgggacttcgcgttccttgacgaagaagacgatacttcttctccttccatcacagcttcacgcaaatctttctgcagttacatcttcttaagattctgagttccgacttatttcgtggaaggattttgatatttcaacagtgattttaattttatactggaacttaagcatcacttaatcttccggctaaaatgatgtcgccgaagcaaatctccgacgatcgaggatcttcacatttcaggcatacaccattccagataatccaccttattgggaacttttttaggatatggtcagtatattcgatgtaccgatacttgaatcagacgggagcgcctgttgttctctttctcttctgctgtctggtgccttcatcaatcatcttcttgataattcaaaagccatggaaaggaagggctctttctaatcaacagattgtaccttctcttatcaatggagtcatc

SEQ ID NO: 122846 - DNA, 619 bp, Arabidopsis thaliana
atcttattgaagaggcaggacaaccgaagaatgctggctcgactgctgcgactgcttttcttataggtgataagttgattgttgctaacgttggtgattctagagttgtagcgtcaagaaatggttcagctgttccactctctgatgatcataaacctgatagatcagatgagcgacaacggattgaagatgctggtggctttattatttgggctggaacatggcgagttggtggaattcttgcggtctctcgggcttttggagataagcaacttaagccatatgtgattgcggagccagaaattcaggaggaggatataagcacattggagtttattgttgttgctagtgatggactgtggaatgtgttgtcaaacaaggatgccgtggcaatagtacgagacatttcagatgcggaaacagcagcaagaaagcttgtgcaagaaggttacgcacggggtagctgcgacaatatcacttgcattgttgtacgattcgaggtttcttgagcaagaaccaaattcatattgttcttgttctatgaatgtaccatcttcagctgttgaatacactaacatatttgggttatccaattttataaaagaaagatatatttatg

SEQ ID NO: 122847 - DNA, 481 bp, Arabidopsis thaliana
  unsure (1)..(481): unsure at all n locations
cggacgcgtgggtacagtcaaatcactcagagaaagctactaggtctctcctcgacatttgctttcaattcgatccagtaattttcttctcatcggagagagaaaaaaaaaatggaagacccgttgattggtagagatagtcttggtggtggtggtacggatcgggttcgtcgatcagaagctatcacgcatggtactccgtttcagaaagcagctgcactcgttgatctggctgaagatggtattggtcttcctgtggaaatacttgatcagtcgagtttcggggagtctgctaggtattacttcatcttcacacgtttggatctgatctggtcactcaactatttcgctctgcttttccttaacttcttcgagcaaccattgtggtgtgaaaaaaaccctaaaccgtcttgcaaagatagagattactattaactgngagagttaccgtacttgaccaatgcagaatccattatctatg

SEQ ID NO: 122848 - DNA, 849 bp, Arabidopsis thaliana
  unsure (1)..(849): unsure at all n locations
nnnnnnnnnnnnnnnnnnnnnnnnnnnnnnnnnnnnnnnnnnnnnnnnnnnnnnnacggacgcgtgggccacgcggccgactttcttccccgaagatgcgtcctttagacgagaccgagacaaccgtcgtcttcgagaagctcttcaaattcgtcggcaacaacctcaagaagatcgtcgagaacccatcagacgaaggacccgaatctacacccggcagctactgcttccgcctccagaaaaacagagtctactacgtcagcgaagccctcgtgaagcgagccacaaacatctccaggaaaaacctagtctccttcggaacctgcatcgggaaatacactcacgccggtagtttccatctgacgattatgtcactcaatatcttggcggcgaatgctaaacacaaggtatggcttaaacccacttcggagatgtcgtttctttatgggaaccatgtcttgaaaggtggattagggaggattactgatagtattgttcctggagatggtgttgttgtgttctcgatgtctgatgttccgttagggtttgggattgctgcgaagagtacacaggattgtaggaaattggatcctaatggtattgttgtgcttcatcaggctgatattggagagtatttgaggggtgaagatgacctttgaaagtttaaaggttttgtctttgttgtgtcttagtttgattctgcttgttgctttgagttttaaagtatgtagctgttacaagtttcgtggaacttggttctggatctatgaaagtctcgatttttataaatctgtttttgaggtgttttgtgagactcttgagtatgtaaaagctaaaaaatttacattc

SEQ ID NO: 122849 - DNA, 440 bp, Arabidopsis thaliana
  unsure (1)..(440): unsure at all n locations
cccacacgtccgcagaatccatggatcgtgctttaactccgcgttttgatactccagctactctctcccctttccgataccgatatgggagctctctggccatcactcgacgattcgcgccggcgattgtttgcgcgaaacgatctccgatcgatggagtgagcgacgagctgaatctgattgcttcacagaacttagatcaagctcccgcacgaagactagcccgttccgcttttgttgacttgcagcttcagctggatcactgcttgttcaagaaagctccgagtgggatcagaacagaggagtggtatgagagaaattcgaaaggggaagatattttctgcaagagttggttgccgaaatccggcgacgaaatcaaagctgctgtatgtttctgtcatggctatggaancacttncactttcttcttcnatggtata

SEQ ID NO: 122850 - DNA, 950 bp, Arabidopsis thaliana
cccacgcgtccgccctaatcactcttgcagtcaccactgtcgccgtccgtctctccttctccttcttagggaccattcctcctctttcagaccagattctagaagaggaaaaatggcaggatgtgcaatgaatcttcagttctcaagtgttgtgaaagtgagaaacgagatctcttcttttgggatttgtaatcgagactttgtatttagagatttagccaaggcaatgaaagtgcctgttttgcggattagaggtggttcaggtaggcaaaggtcgaggcttttcgtggttaatatgtctcaatctcccattgagccacaatctggtggttttgcggctactgaacaaattaaaggagaaggtgataatagtatcttagggaaagacaatgttagaaacttaggaactggatccagcttgagaatttggatattgatggtaatgttggagatggttttaatggtagtgatggtaatgggggtggtggaggaggtggaaatggaggagaaggtgatggtgaaggtgaagactacgaagaaaaagagtttggaccgatattgaaatttgaagaggtcatgaaggagactgaagctagaggagctactcttccatctgatatgttggaagctgctaagaactatgggatccgcaaagtgcttctccttaggtacttggatttgcagagctcagcagggcttcttgggtttgctataagatcatgggctatgcttcgtaacagaatgttggctgatccatctttcctcttcaaaataggggctgagatagtcattgattcttgctgtgccactgttgctgaagttcaaaagagagggaaagatttctgggcggagtttgagttgtatgttgctgatcttttagttggaactgtggttaacattgctctggtcggtatgttggcgccttatgttcgttttggacaaccttccgc

SEQ ID NO: 122851 - DNA, 557 bp, Arabidopsis thaliana
  unsure (1)..(557): unsure at all n locations
cagctctcnnnnnnnnnnnnnnaaaaaaccctaaatataatttcacgcagctgcctctcttttcttcttcccctcccccgcccgccgagtgaagccgcgactgtgaaatcatgagaggagtaaaacgcgccgccatctccgaatcgaatgactctccctttaagaatgcaaaaccagtggaaggaatcttttttggtactcagaagaatgtggtaccgatgcagcagagttcagtaacatcagcatcattggataaacagagggctgagttagctaggaagcatgtgagagctcttaataaccaatttgtaagttgggtgcagttacagctgaagaatcatcctgatgaactttgggaagatgggatgaatgactacattacgcatgcttcaaacattctggaaaagtttaaggatgtggtcagctggcttaaagaaaataaaggaaagggggagaatttatcccctgaatctcgtggagcagaaaataaattagtggctgaagtcaagaataccaatgttaaatcattttcaaacaatattccttttgcttcaaac

SEQ ID NO: 122852 - DNA, 557 bp, Arabidopsis thaliana
  unsure (1)..(557): unsure at all n locations
cagctctcnnnnnnnnnnnnnnnnnnnnnnnnnnnnnnnnnnnnnnnnnnnnnnnnnnnnnnnnnnnnnnnccacgcgtgcgcttctgcctccaaactctctctttctctctcgagaaccttaagaaaacgttacaaatggctgttgaagcaagacacatgaatctcttctcttctcaatacattaccaacagagaatgtgttaaatctcaaacgaatatgaacaacggacaacaaatcgccggcggtggttttccggtaacaatcggtgatcggaatttacagtacatagatccgattaacagcttcaacaaatcagaaagcgagctcacagctatttcaaaacgtcagagagattcaacgtttgattcagacgctttaatcgcatctcagaaacgcagagcaatcgcgttttctccggcgtcattaatcgacgcagagttagtttcacagatccaacagcaaaactcagaaatcgatagattcgtagcgcaacaaacggaaacgttgagaatcgaattagaagcgagacaaagaacgcaaacgcggatgttagcg

SEQ ID NO: 122853 - DNA, 910 bp, Arabidopsis thaliana
  unsure (1)..(910): unsure at all n locations
gtaactnncnnnnnnnntacgactcatttagggaaagctgctacgcctgcaggtaccggtccggaattcccgggtcgacccacgcgtccgaagagatcgattgtgaaagaatcaaaatttgttgagataagacatggtgttccgtggcgacacggtggtgtccgtagctcatatatcggctgagatttttcagcgattacggtggattccgccgtcggatcgaatcagcagcggagagatgttacaactcgtttgttgttttccgcttcagcaactgggtcgattcgttttatggttctggaactatatctgtgttccacctccggagattttgtattttgatggtcgtcgtgatgatgacgatgatggttatggatcatcttcgtcgtcttcgaatgttactcatcatcataattactatcatcttcatttggagtgaccaaagttcccggttttcctgatttgttgttgtaaagtttttatttttcccgtttttgtgcagagaaagatcatgttttgattttgggtttaattccttgggagtgttgaatataatcagagtctggtgttttaaatccttgcttatagaatcagagaagatgttgagcatttggtgatacatatatattttnagctttcattgtcttaaggagtcaaagaagcttgctttgatctattgcttgtccaaatctagctcttgatagattatgtagcaattcgagtttattatactgtttcttctggacanattggntagttggnttgacttaggnatgtttagttagtggagttaggngggtgaaggttaaggntttggaattaggggtattttnnttcanatnggnggttnaagttngccagaggntcaagccttttttgccggaaaattgtatnccccnagnataaaggg

SEQ ID NO: 122854 - DNA, 932 bp, Arabidopsis thaliana
ttcgacgtttatcgatacgctagatatcgaattcgcggccgcgatttttctaaagcagccgaaacttacgtttccctgaattttccctactgacaaaatttcacttcaaatacaaatctcgtcttcatgagtcttcttcttcgtccaaattgaattttctccgcacacgagagttgaatgttgattttcggctgtttatatggtctccggtcccttagggttttaattcttctgcagatctctcacgatgagcgttgcgaaatcccaagtatggcagccatgcaagaagaagaggtcctcctcctgattcaatagagatctatctatatatatataagaggccgcgatatatatatagagagagagatggcttcttcgaacaacggccttcacgatcgactccttcacgatcaaccgccttctggtagttcttctggtggtaggacacgagttggtaacgtatgagcttggccgaactttgggtgaaggacctttctgctaaggtcaaattcgctagaaatgttgagaatggtgataatgcccctattaaggttattgataaagagaaagttctgaaaaataagatgatcgctcagatcaagcgtgagatttcgacgatgaaattgatcaagcacccgaatgtcattcgtatgtttgaggtgatggctagcaaaactaagatctacttcgttttggaattcgtcactggtggggagcttttcgataaaatttcaagcaatgggagattgaaggaagatgaggcgaggaagtatttccaacagctgattaatgcggttgattattgtcatagcaggggagtttatcatagagaccttaagccagaaaatttgcttttggatgctaatggtgctttgaaagtgtctgactttggattgagcgctctacctcagcaagttcgagaggatgggtta

SEQ ID NO: 122855 - DNA, 434 bp, Arabidopsis thaliana
caaacggcttcacttctaactggtgcggtcctaatgggggtgactacacaggcgtgttttgggcaccggctctagataacccttatgtcttaaccgtcgctggtatagacttgaaccatgctaatatcgccggttatctccctttagagcttggtctcttaaccgatcttgccttgttccatatcaattccaaccgttttcaaggtcaacttcccaaaactctaaaatgtctccatcttctccatgagcttgacgtcagcaacaataaactctccggcgagtttccttccgtaatcttctctttgccttccttgaagtttctcgacattaggttcaatgagttccaaggtgatgttcctagccaactctttgacctaaacctcgacgctctctttattaacgacaacaaattccagtttaggttaccgagaaac

SEQ ID NO: 122856 - DNA, 999 bp, Arabidopsis thaliana
  unsure (1)..(999): unsure at all n locations
ttcctaatgagattgcaacacaaaacaacaatcaaagttttggaacagaacgtcagataaagataccagcatacatggtgagtaggaactctaatgatggttatggttggagaaaatacggtcagaaacaagtgaagaagagcgaaaaccctaggagttacttcaagtgtacgtatcctgattgtgtttccaagaagattgttgagacggcttctgatggacagatcactgagatcatttataaaggtggtcataatcatcctaagcctgagttcaccaagagaccatctcaatcttcattaccatcatcggttaatgggaggcgcttgtttaatcctgcttctgttgttagtgaacctcatgatcaatcagagaactcttcgatttcgtttgactatagtgatcttgagcagaaaagttttaaatcagagtatggtgagatacatgaagaggaggaacaacctgagatgaagaggatgaaaatagaaggtgaagatgaagggatgtctatagaagtaagcaaaggagttaaagagccaagagttgtggttcagacaataagtgatattgatgttcttatagatggctttagatggaggaaatatggtcaaaaagttgtcaaaggaaatactaatccaaggagatacgacaagtgcacattccaaggttgtggagtgaataagcaagtggaaagatccgcagcagacaagagagcagttctcactacctatgaaggaagacacaatctcgatatcccaaccgcgctacgtcgctcgtgaaattattgggacttagtcactagtaatatgatttaggctttctaaaaacaaaaaatcttactatggcttatcttttgtgctcattcacagtttgtttatttgtttgttacacagtcaatactttgttttgtaaaaaaaaaaaaaaaaaagnnnnnnnnnnnnnnnnnnnnnnnnnnnnnnnnnnnnnnnnnnnnnnnnnnnnnnnnnnnnnnnnnnnaac

SEQ ID NO: 122857 - DNA, 505 bp, Arabidopsis thaliana
cagctctactctgactcacattatggaaagctggcacgcctgcaggtaccggtccggaatacacgggtcgacccacgcgtccggagcatttgaagcgcggtcttttgaagcatctaaagcatccattgatatgaaggtatccacctccgcaatggcttcaagcatcagccccgctattggtaaaattgaacacatggacgcaggctctcctgcaaggccaaccccaattcctaatggaattgaggcaatgtcaagaactatggaaaagccaagaaacttggactctgttgataagtctaaacctttagagctcacagaaattgttgatccgactcagtgccgacaagtgacaatgccagatagcatggactctgttagcaaggttgctcggcttctttacacaaattctggcgttggtgatctggctctcggatcagatggagttcaagactatggaagtggatccgcagcgagcaagatccaactgggaaggcaactgctagtg

SEQ ID NO: 122858 - DNA, 958 bp, Arabidopsis thaliana
  unsure (1)..(958): unsure at all n locations
nnnnnnnnnnnnnnnnnnnnnnnnnnnnnnncacgcgtccgctaaaagctcgtcgtcgtcttcaatggtgaatctcaaaccaattggataaataaaacaaaacaaaaaaaacttcacaaaaaaaaaaaaaagatccaaattacaaccatgccttcggagttaacaccagaagaacgatcggaactaaaaaactcaatcgccgagttccacacataccaactcgatccaggaagctgttcatcactccacgcgcaacgaatccacgcgcctccggaactcgtctggtcaatcgtacgacgattcgacaaaccacaaacatacaaacacttcatcaaatcctgctccgtcgaacaaaacttcgagatgcgcgtcggatgcacgcgcgacgtgatcgtcatcagtggattaccggcgaacacatcaacggaaagactcgatatactcgacgacgaacggagagttaccggattcagtatcatcggaggcgaacataggctgacgaattacaaatccgttacgacggtgcatcggttcgagaaagagaatcggatctggacggtggttttggaatcttacgtcgttgatatgccggaaggtaactcggaggatgatactcgtatgtttgctgatacggttgtgaagcttaatttgcagaaactcgcgacggttgctgaagctatggctcgtaactccggtgacggaagtggttctcaggtgacgtgaaaatgaagaaaaaaatatgatttaatttcttttattaaaaacaaaatccagaaatgttatttatgttgcttcgtataagattctcttcttcttttgtctgtttttgcttttttaacctcatatagtcatatttttaccaaaaaaaaaaaaaaaacaaaaaaagnnnnnnnnnnnnnnnnnnnnnnnnnnnnnnnnnnnnnnnnnnnnnnnnnnnnnnnnnnnnnnnnnnnnnnnn

SEQ ID NO: 122859 - DNA, 375 bp, Arabidopsis thaliana
gtacgtgaaaaccatatatcgcatcttctcattcggctttcattgccctcattaaaacacacatcatatcgcccccaaaattttgatttgattagagaggtgtgtggaaaatggcggcagagtatgccgagtgtttgctagagaagaacttccatgaggattgttctggctgcaaggttgatcagatgaagaggcttcgccgtggatttcccttctgggagctttttaccgtttggatcatcgttctttgcaccgctttgcccatttcttctctattcccctttctcgacttcatgattgatgagttcaacattgcaaagaaggaagaggacattgggttctacgctggatttgttggttgctcgttcatgctcg

SEQ ID NO: 122860 - DNA, 1185 bp, Arabidopsis thaliana
  unsure (1)..(1185): unsure at all n locations
acgtttttccttcccacaggaaaagaagaaaaacagacagcggaggactaaaacaactagccacaacacaacgcttcaaatatatattactctgccactttcttcaatcttccttcaaagattcttattacagcgacacacaactcttttccatttagatttttgattttttttggttctctaaaggaggagagaaatgttggctatcttccacgaggcgtttgctcatccgccggaggaactcaacagtccggcatctgagaaatgctctaaacaaccaaaacttccagaagaaaccctaaatgatttcttattacgttaccctctcaacactttctccatgtctttcggacaagctgctgttcttgcttacgttcgtccctctgcttccttctccatccaccagaggttgttttgtggatttgatgacatctactgtctcttctttgggagcttgaacaatctgtgtcagctaaacaaacagtatggtctcaccaagacaacaaacgaggccatgtttgtgatcgaagcttataggactcttagagacagaggtccttatccagctgatcaggtcggcaaaggctttagacgggtagcttttccctttggggtttatgatagcaaagccggctctgtcttcactgctctgggatctgatggaggggtgaagctatactggggcatagctgctgatggatctgttgttatatcagatgatttggatgttatcaaagagggttgtgctaaatcttttgctccatttcctacagggtgtatgttccatagtgaaggagggttaatgagctttgagcatccaatgaacaagatcaaggcgatgccgagggtagacagtgaaggagttctatgcggtgccaacttcaaggtggatgtgtacaatcgtgttaacagtatccctcgtcgaggaagtgaagccaattggtctctctgaatacttttaataacactttcaatttggtttctttttcgcacttgtgcttcttctccgctttcatcttagttatggactgttcctaagcttgccatgaataaaactgtgaataataaagcttttaatgttctgtttcttactttaagtcagacaataaacttttaacacttgtgatcaaaaaaaaaaaaaaagggcggccgctnnnnnnnnnnnnnnnnnnnnnnnnnnnnnnn

SEQ ID NO: 122861 - DNA, 555 bp, Arabidopsis thaliana
  unsure (1)..(555): unsure at all n locations
nnnnnnnnnnnnnnnnnnnnnnnnnnnnnnnnnnnnnnnnnnnnnnnnnnnnnnnnnnnnnnnnnccacgcgtccgcccacgcgtccgcccacgcgtccgtacggctgcgagacgacagaagggtacggctgcgagaagacgacagaagggtgctctgggatctgatggaggggtgaagctatactggggcatagctgctgatggatcatgttagtccagctgctaaggaggttctcgaggtttggttggagcggtgtgtgaaggaagaagaagagaagattgtggttggggaagaagagagaatggagttggagagaagagataaaagctttagaacggaagagcatagaggacgatttggatttgcagtttccgagaatgtttggtgaagaagtttcctcccgtgttgtacacgctattaaagaagctttcggtgttctctagattatgtaactatatatatacatcagttaatgttcattgtactaaacatttactttcatcaatgtcacaagaacgcaaaatgaccacccaccaagtcctgttttctccta

SEQ ID NO: 122862 - DNA, 412 bp, Arabidopsis thaliana
gacaaacacgatcgccgatccatttacgagccgtcgttgctctacacatatcaacaacaaatcttatcctcccaactatcttttctctgattttcttttcttctccagtttccatttctagaatcgatcgatattgaaggagagaagatgcctggtttaacatgtaacgcgtgtaacatggagttcaaggacgaagaagaacgtaaccttcattacaaatccgattggcaccgctacaatctcaagcgcaaggtggctggagttcctggagttacagaagccttgtttgaggctagacaatctgctcttgctcaggagaagaataaatcaaatgaagcacctatgctttatacttgtgcaatctgtgctaaaggttacaggagttccaaggctcatgagcagcatcttcagt

SEQ ID NO: 122863 - DNA, 494 bp, Arabidopsis thaliana
  unsure (1)..(494): unsure at all n locations
nnnnnnnnnnnnnnnnnnnnnnnnnnnnnnnnnnnnnnnnnnnnnnnnnnnnnnnnnnnnnnnnnnnnnnnnnnnnnnnnnnccacgcgtccgcaaatcctcttcttccatctccactgcttcctaattccccggaattcttcacaacccataaagggaagagagagttattcactggtatgagttcgtcgtttcattgagattatacacaaaacaagattataacttttttgctgggttttggagactatggctggtggtaacgaagtcaaccttaacgaatgcaagagaattgtcccactcaacacatgggtcctcatttccaatttcaagcttgcttacaaagtcctccgtcgccctgacggttctttcaaccgcgacctcgccgagttccttgaccgtaaagttcccgccaactctttccccctcgacggcgttttctccttcgaccacgtcgactcaacagctaccctttcaccagaatctaccaacct

SEQ ID NO: 122864 - DNA, 790 bp, Arabidopsis thaliana
tggccgtctgcggtaccggtccggaattcccgggtcgacccacgcgtccgcacaaacttttgcgaaaaagagagagacaggacggggaattacatgttcagaattgcagagatgctcccaaatgcatggttccacaagctcaaagacgtgactaaacactctaaacccaaaaacaaagcttcttcttcttcctcaaacacttgtagcaagaagaaaccttcctcagattctcttcctcaacactcttatttctccaacagcttagtagctaacaatcctcctcaccataactcaccaagaaactctcttcacacaaaagagatgagtaagagaaagacactttacaagccatcccttaaacctttgactcctcctcctcttcttgtatctgcaagtttcaacaagagcaagatcaacgatcaagaatcgtgttacagcttgtccccggctattgaaacctaccctgagtcttttgtgtatagattctacgaagaggatgatgatgatgagttcggtgaattttccaacttcaagatcaacacagagaacaaagctttcaccaagcataaagtcaaagtgattggattgggagagaaagcttgtgctgcaagccagccgattaaaaaaccgcaacaaaggccttcttttctgggaaaaatttcaacaaaatgaaagaagatttatggaatattaaagcccctccaaagaaagaacccaaaggggccagcttttcttagttgggaaagaaaaacccattctggctgggggataaaaacccttcaaaaagaag

SEQ ID NO: 122865 - DNA, 490 bp, Arabidopsis thaliana
  unsure (1)..(490): unsure at all n locations
ttcaccttcttctttatctaaggaaacaaaaacggagttttcttaagagaaatatcacaaacttttgtgaaaaagagagagacaagatggggaattacaagttcagaatttcagagatgctcccaaatgcatggttccacaagctcaaagacgtgactaaacactctaaacccaaaaacaaagcttcttcttcttcctcaaacacttgtagcaagaagaaaccttcctcagattctcttcctcaacactcttatttctccaacagcttagtagctaacaatcctcctcaccataactcaccaagaaactctcttcacacaaaaaagatgagtaaaagaaagacactttacaagccatcccttaaacctttgactcctcctcctcttcttgtatctgcaagtttcaacaaaggagcaagggtcaaacgcgttcaaggttcgtcttacaaggttttttccgggttttttnaaccncccctgaggtttttgtg

SEQ ID NO: 122866 - DNA, 896 bp, Arabidopsis thaliana
ctccctcatcactttgataaacaagagtctcatttttcgcttttccaaagggaacaacttcttcggattattatctatggcagagaagcttgagccggtgaaggttttgtactgcggagtttgctctcttccagcggaatactgcgaattcggtcccgatttcgctagatgtaagccctggctcgtcgaaaacgccccagatctctatcctgatctcctcaaagaagcaaatgagaaggcagcagataatgtttctgacaaactccagtcggtgggaatctcttcaggtggtgctgatggggcaccatcttcagctcagactgcagggacatccaagaaggaggaagtgaagcgcctacctggggggaaagttaaaaagaaagatcgacaggaagttatcattgaaaaggttgtacgcaacatacgcaagtgtatcaccattgtgaaaggactagaactgtttgggataaaactcagtgatgcctctaaaaagcttggtaagaagtttgccactggagcatcagttgtcaagggaccaactgaaaaggagcaaattgatgttcaaggggatataatctatgatatcgttgaattcattacagacacttggcccgacgtacctgaaagatccattttcttcatcgaagatgggaagaaggttcaggctgggtgatgatcacctttgtcctcgttttttggcatggcgggttcatgtagacgagctagttcctgagttttcctatgtgtttggaggaaatcgcatcttgattataactttcaacgtaacgtatagttggatttatcatactattttcttattcgggttgcgatagttccaaacatgtttctccaaacatttctctttttgggggtcttaatatttaaaatgtgtcttg

SEQ ID NO: 122867 - DNA, 1270 bp, Arabidopsis thaliana
  unsure (1)..(1270): unsure at all n locations
gcnnnnnnnnnnnnnnnnnnnnngaaatttataaactttattcctcaattcaatttggggtttgcttcatttttttcacgccacgcgtccgaaacaagttccgggtgttttgaaagaaccccgacaatggcgtggaacgtgttcaagttctgcacagcacttcgcgccttgggttcgatcatgatcttaattgttatcgggatcatcggattcacatactacgccgttgtcgtcgttaattacggacctgctctactgatcggtggtgtcgattcattactatctgttctcgtcttagcgttcttccactttctgcttataatgctactgtggagttatttctctgttgttgtgacggaccctggtggtgttccaacgggttggaggccagaattagacatagagaaaagcgagggaaaccaaccagctttatggaaagcttcggtgagatcctcgttcatgtgtaaaattgtaaaagtgcaatcaatataaacccgcctcgttctcaccattgttcagtctgtggaagatgcatactaaagatggccatcactgtgttgggtggtgcattgtgttgtgcaaataactacaaatcattctcttattcttgtttgcacatttctcagacacggtggctgcaatatcactatgccaatcttcctcgtattttcaacgatggagatggtgatatagccgtatcaccaggaagcctagcagccagctgtgttgcatttgtattgaacatagcatgtgccctaagtgtcctaggcttcctaataatgcacataatgttggtcgctcgtaacacccctactattgaggcgtatgaaaagcatacagtgaactggccatacaacgttggtcgtaagacaacctttgaacaggtttttgaaagtgataaaatgtattggttcgtgcctttgttcacggaagacgataagaagaagttctcagcgcttggagggttagactttacgagcaggtcggagtccgagacagagccgcttcagtctctatgaccttgcaatcttgaaatttttggaagtgtgtcttctgctttgtgtatgtatcaatcaaatattatatccaccattgtcttgtgtattataaagattagtgcctaatgtggaatttgtatctttttatttcgtgaaaagaaatttctccaacttcttaaaaaaaaaaaaaaaaaagnnnnnnnnnnnnnnnnnnnnnnnnnnnnnnnnnnnnnnnnnnnnnnnnnnnnnnnnnnnnnnnnnnnngtctcaat

SEQ ID NO: 122868 - DNA, 518 bp, Arabidopsis thaliana
  unsure (1)..(518): unsure at all n locations
nnnatgatacgtcagctgtatacgactcatatagggaaagctggtacgcctgcaggtaccggtccggaattcccgggtcgacccacgcgtccgggtattgtagaaagtgcaatcaatataaacccgcctcggtctcaccattgttcaggctgtggaagatgcatactaaagatggaccatcactgtggttgggtggtgaattgtgttggtgcaaataactacaaatcatttctcctattcttgtttgacggatttcttgagacaacggtggttgcagtatcactattgccaattttcctcgtattcttcagcgatggagatggtgatataaccgtatcaccaggaagcctagcagccagctttgttgcatttgtattgaacatagcatttgccctaagtgtcctaggcttcctaataatgcacataatgttggtcgctcgtaacaccacaactattgaggcgtatgagaagcatacagtgaactggccatacaacgttggtcgtaagacaaactttga

SEQ ID NO: 122869 - DNA, 1668 bp, Arabidopsis thaliana
  unsure (1)..(1668): unsure at all n locations
caggaagtgttcaaaggaacgaaatacacttcttcttccatttgatgtctgtggtccgaatgaaaaatatctctgtattaaccagaaacgtgtttcataagcatctttaactcttcagctctcaaattcttcatgaatatctctgcttatcgatcaagtgagagcaaatgcaatttttaagagccagctattggatctataactgaagaggatatatatagagatgatgagttcttcttctccaacacaacttgcatctttaagagacatgggaatctatgagccatttcaacaaattgtcggttggggaaatgttttcaaatctgatatcaatgatcatagtcccaatactgttacttcctctattattcaggttgatcctagaattgatgatcacaacaacaacatcaagataaattatgattctcctcataaccagatcgaagcagaacaaccttctagtaatgataatcaagatgatgatggcaggattcatgataagatgaaacggcgtttagcgcagaaccgtgaagcggctcgcaaaagtcgtttgagaaagaaggcttatgttcagcagttagaggaaagccggttaaagttatcgcagttagagcaagaactcgaaaaggttaagcagcagggccatttaggaccatctgggagtattaacacagggattgcatcatttgagatggaatattcacactggctacaagaacaaagcagaagagttagcgaactacgaacagcgcttcaatctcatataagcgacatagaactcaagatgctagtagagagttgcttgaaccattacgctaatcttttccaaatgaaatccgatgcagcaaaagccgatgttttctacttgatatcgggaatgtggcgaacttcaaccgaaagattcttccaatggattggaggggtttcgtccatccgaacttttaaacgttgtgatgccttatcttcaaccattaacggatcaacaaatcttggaagtgagaaacctccaacaatcatcacaacaagcagaggatgctctgtctcaagggattgataaacttcaacagagtttagctgaaagcattgtgattgatgcggttatcgagtccacgcattatcccactcacatggctgcagctatagagaatcttcaagcattagaaggatttgtgaatcaagcagatcatctgaggcaacaaactttgcaacaaatggcgaagatcttaacgacaagacaatcggctcgaggtttactagctttaggagagtatcttcatagcccccggccccttcgttctctttgggccagctcgtccacaagacccaccttaaaggaggaacttattaaaactttaaaaacaagaaacagcggaatcaaaagtcttgaagaagcatactcatcacaaagcttggaaggatgttttaaaaaagatctttgttaattaagtagagtgagattctcttgattagaactttatggtttttgctttatgaagtatctctccagagaagattgtaaatttgggttgaaactttgtaatatatttagatacaacaaataagtttgaaatctgagcaatttgataataaaaaaaaaaaaaaaaaaaaaanaaagggcggccgctctagaggatccaagcttacgtacgcgtgcatgcgacgtcatag

SEQ ID NO: 122870 - DNA, 418 bp, Arabidopsis thaliana
ggagaagcgagaagagattaaaagattagaccttttcgcattcatggattcgaagttgagaaattttgtgatgggtctgtttgtgatgactgcgatcttgaataattctggtgttggcgcgtggactggagagattcgtggtagagttgtgtgtgatgtctgtgctgattcttcaattggaccagaagatcatgttcttgaaggagctgaggttgcggttctgtgcataaccaaatctggagaagttgtgaactaccaagctttcacaaactcaaaaggtgtctacacagttgcagagacaatgccagagagcgaacgttgggacgcttgccttgcaagacccatcagcagcttccacacaccttgcaatcgcctacaccaaaccaataccggaatcaaattcacttataaccgccct

SEQ ID NO: 122871 - DNA, 707 bp, Arabidopsis thaliana
  unsure (1)..(707): unsure at all n locations
agctctctacgactcactattgggaaagctggtcacgcctgcaggtaccggtccggaattcccgggtcgacccacgcgtgcgtggagcttaaactagccaccgccgagaaacaagtgcttgacgagttggtgaagctattgcagagtcgagatttgcgtggcgaaaatggaaactggaaggaatttttacatgtttacgacaaaaatgctgattcaccaagtgatccttcgaggcgttctcatgaagatttggttcagtttctgacaacttttaagaagaaagaagatttgcaacttctgaaatgtcacgccaatcatcttctgattgaaaatttgaagcaagaatcccaagatgaagacactcctgagcagatgctagttagattgacagttgagcatccgagttactcgttagactattctttcaagccatactcagaggactggtttgtatccgatgttggaatgaagatgaaaaaggtgatggaatcaactaacatggtagctgttgattgtgagatggttctttgtgaagatgggactgagggtttagttagagttggtgttgtagaccgtgatttaaaggtgattcttgacgagtttgtgaaaccgaacaaacctgttgttgactataggacagacattacagggattactgctgaagatatcganaatgctagtctctctgtggtagatatacaggaaac

SEQ ID NO: 122872 - DNA, 480 bp, Arabidopsis thaliana
aaaaaatagcaagaagaagaaaggaaaaaacaccacaaagctcgtcactccgctaccgaccactcacatcacaagtcacaacctccgccttgagatgagagccgccgccgccgccaccgccaccgtgagtcttcgacatttccgcagcttccctactattgtcccatctcttctcttctcctcctcctcctccataccttttcactccccccgtctctgcgtcttcctccgccctcgccaactcttccttaaccgtccactcgccgcaggtttcagttcctcttcatcaggtgctacctctgattcggcctacgacgttattgttgttggtgccggacacgctggatgcgaagcggctttagcctctgctcgattaggagctagtactctgcttctcacattaaacctcgatcgaatagcttggcgacccgtgtaatccagcagtaggtggaccagctaaatcacaattagtacatgaag

SEQ ID NO: 122873 - DNA, 550 bp, Arabidopsis thaliana
gaggagtactcaatgctcaaaacatagatatcctcctttagaacttcccatattatttaagtgctacatcatagggtgttttgatgatatcgatgtatgttcatatgaacggtggaagcaagtatgcaaattttgcaacagacttgactacagcctgtccccgtatcttactctctggaccatcaggctctgagatatatcaggaaatgttggcaaaagcgcttgctaaacagtttggggccaaattgatgattgttgattctcttttgttgcctgggggatcaccagccagggaagctgaatcctctaaagaaggttctaggcgtgaaaggctgtctatgcttgctaaaagagctgttcaggctgcacaagtattgcagcataagataccgacttcaagtgttgatgctgatataacaggtggctcaacattaagctctcaggctttgccaaaacaagaagtgtcaacagcaacttctaaaagttacacattcaaagcaggtgacagagttaaatttgtaggtccttcgggttctgcaatttcttctct

SEQ ID NO: 122874 - DNA, 589 bp, Arabidopsis thaliana
  unsure (1)..(589): unsure at all n locations
atgannnnnnnnnnnnnnnnnnnnnnnnnnnnnnnnnnnnnnnnnnnnnnnnnnnnnnnnnnnnnnnnnnnnnnnnnnnnnnccacgcgtccggctgcttctgcggcgatcaaaaacgccgtcgacgataataacctcaccggcgccaccaacaccgcccattctatcaaccaaacaaaatctcgccgctaatttctctctctatggcgctttattgccgtgatacactaatcatcatcttccaaaagctcaccgtcgccgatctagcgcgtgcgagctgcgtctgtaaggtttggaattctgtagccacagaagacgatcttgttgtatctgctttcacggctccatggcggatcaaagaacttgttggaagaccagcttctgtttcgttttggagagataacggaatctggaaatttgctatttctcatcggatttgtcgtggtgatagtgtgactagcctcgccgtcaaatacgccgttcaggttatggacataaagcggctaaacaacatgatgagcgaccatggtatttactcaagagacagactgcttatcccaataagcaatcctgaaattctcgcaaacac

SEQ ID NO: 122875 - DNA, 483 bp, Arabidopsis thaliana
acgcggacgcgtgggttcactttttcttctttccttttttctctctctcaacgaccacctccatgcccggagttgccttctcctgtggtcctgcctccgatctgggaatcttcatctccgaatccaccaccttctcacgctccatctccgcctccctctcatcttcctccagttcaccctcctcctttcgctgttgcaccccattgaacctcaaatcgctgcgttctcatcgccgtcctaagatttctcatatttgttgcgacggaagctctatttccggatctggcctcggcgatcccgatctcgagtttctccaagcctctgtcctcgttgcagagacaagtatgcattacaaaatgcggcgacatggtttccggcaagattcaatgtggcaaacttctaggcctttgcctcccttttctattatagctagtgaatccaaggttggtgttctccctattgggcttggatttctccgtcaat

SEQ ID NO: 122876 - DNA, 1218 bp, Arabidopsis thaliana
  unsure (1)..(1218): unsure at all n locations
cgactcacattagggagaagctggcacgcctgcaggtaccggtccggaattcccgggtcgacccacgcgtccgcccacgcgtccaagtcaagcaaaaaaaacgaaacaatggatgcgttctcttccttcttcgattctcaacctggtagcagaagctggagctatgattctcttaaaaacttccgtcagatttctccagccgttcagaatcatcttaaacgggtttatttgaccttatgttgtgctcttgtggcgtctgcctttggagcttacctccatgtgctctggaatatcggcggtattcttacaacgattggatgtattggaactatgatttggctcctttcatgtcctccttatgaacaccaaaaaaggctttctcttctgtttgtgtctgctgttcttgaaggtgcttctgttggccccttgatcaaagtggcaattgatgttgacccaagcatccttatcactgcatttgttggaactgcgatagcgtttgtctgtttctcagcagcagcaatgttagcaagacgcagggagtatctctaccttggaggactgctttcatctggcttgtctatgctaatgtggctccagtttgcctcttcaatctttggtggctctgcatctatctttaagtttgagttgtactttggacttttgatctttgtgggatacatggtggtggacacacaagagattatagaaaaggcacacctcggtgacatggactatgtaaaacattcgttgacccttttcactgactttgtagctgtgtttgttcggattctcatcataatgttgaagaactcagcagataaagaagagaagaagaagaaaaggagaaactgaggggatgtaaagtaaatttaactttatggttgttatcgtgtgtggccactttgaagatattacttgttagcactctctattggtgaccagacatgtttccactaaaaaggatctgcttgtttcacttctgcacaagtaccatcttcagattgtaaatgactcgagtgttgttcttcttttcataaacttttgttctttaagagtttggttctactgattgcatcttaccaagctaagaataatgtaggaaaatgataatcctgtttaaattttctaaaaaaaaaaaaaaaagaaagnnnnnnnnnnnnnnnnnnnnnnnnnnnnnnnnnnnnnnnnnnnnnnnnnnnnnnnnnnnnnnnnnnngaa

SEQ ID NO: 122877 - DNA, 477 bp, Arabidopsis thaliana
cccacgcgtccgcccacgcgtccgactctctctctctctcgttgcaagcaacttgttttctgaatccaaagaagacgataacgatgaatggagctataggaggtgaccttttgctcaattttcctgacatgtcggtcctagagcgccaaagggctcacctcaagtacctcaatcccacctttgattctcctctcgccggcttctttgccgattcttcaatgattaccggcggcgagatggacagctatctttcgactgccggtttgaatcttccgatgatgtacggtgagacgacggtggaaggtgattcaagactctcaatttcgccggaaacgacgcttgggactggaaatttcaagaaacggaagtttgatacagagactaaggattgtaatgagaagaagaagatgatgaccatgaacagagatgacctaatagaagaaggagaagagagaagtcgaaaataacagagcaaaa

SEQ ID NO: 122878 - DNA, 966 bp, Arabidopsis thaliana
  unsure (1)..(966): unsure at all n locations
acactttaactaagcaaaccaataatggctaccactcgtctaactctagctcctctcctcctcatcgcagccgtactactcgcaaccaaggcaacggctcagccggcagcccccgctccagagcctgctggtcccatcaacctcactgcgatcctcgaaaaaggtggtcaattcactactttcatccatcttctaaacatcactcaagtcggtagtcaagtgaacattcaagtcaatagttcatccgaaggtatgacggtgttcgcaccaacagacaatgcttttcaaaaccttaaacccggaaccctaaaccagttaagccctgacgatcaagttaaactcattctctaccacgttagccccaaatattacagtatgggatgatctcctctccgtgagtaacccggttaggactcaagcttctggccgagacaacggtgtttacgggcttaacttcaccggccaaacaaaccaaatcaatgtctctactggttatgtggagacacgtattagcaattcgttgaggcaacaacgtcctctcgcagtttatgttgtcgacatggttttgttgcccggtgagatgttcggagagcacaagctttcgccgattgctcctgcccctaaatctaaatccggtggggttaccgatgactccggctccactaagaaggcagcgtcaccgtcggataagtcaggctccggtgagaagaaagtcggactagggtttggtcttggacttattgtcttatgtttgaaatttctcttttgaaaatttaatagcaaagatttgttttgctttctattgattttatcctgcgatgtgaggtataaatatgaaatttgttgattaagttccgtgaaataaaatgtgagatttttaataaaaaaaaaaaatggcncntttannataaaataaaaaaannnnnnnnnnnnnnnnnnnnnnnnnnnnnnnnnnnnnnnnnnnnn

SEQ ID NO: 122879 - DNA, 547 bp, Arabidopsis thaliana
  unsure (1)..(547): unsure at all n locations
aagcaaaccaataatggctaccactcgtctaactctagctcctctcctcctcatcgcagccgtactactcgcaaccaaggcaacggctcagccggcagcccccgctccagagcctgctggtcccatcaacctcactgcgatcctcgaaaaaggtggtcaattcactactttcatccatcttctaaacatcactcaagtcggtagtcaagtgaacattcaagtcaatagttcatccgaaggtattgacggtgttcgcaccaacaggcaatgcttttcaaaacccttaaaaccccggaacccctaaaccaagttaaggcccttgacgggtcaaggtaaaactcatttctcttanccacggtaaggcccccaaattttttccagttttgggtggttcttccttcttccgtggggaaaccccggttagggccttaaaggttttttggcccggggcaacnggggttttacgggggttaaattttaccgggccaaanaaacccaatnaaaggnnnttnnntgggtttttgggggcannggntttggaantttt

SEQ ID NO: 122880 - DNA, 1141 bp, Arabidopsis thaliana
  unsure (1)..(1141): unsure at all n locations
tgatctnnnnnnnnnnnnnnnnnnnnnnnnnnnnnnnnnnnnnnnnnnnnnnnnnnnnnnnnnnnnnnnnnnnnnnnnnnnccacgcgtccgacagaaggggagaggaaaaaaaaagtgagcgtgttgatgcataacgaacgatgccattttccgcatcaatctcatcgccttcttcttctgtcgcgcttcttcgatcgcctctctctttcttcatcttcactcccaaaaccctaatcttcaccagaaccaggatctctggtttcccttatcttgcttcccggcgatcccgcgatttcatcaacgggagggatgatttcgctgacgatacgaggagctggaaccggaagatcaaaccggagtatgggttcgatgaggattacgatggagaagaagatgatgatgatcacgaggaagaagatagaagcttggatctgttacttagatttgtagaaaatgttttcagaaagatttctaagagagcaaggaaagctgtccgatcaattttgcctgtttcgatctctacgaagctcgtggggttttcagtgaatggagtacttattcttgcttttttgtggattttgaaggctttcctcgaggtagcttgcacacttggaactattgtatttacgagcattctacttatacgtggactttgggccggagtagcatacatgcaagagagccgcaacaataggatcaatgaactcgctgatgatcctcgtgcatggaacgggatgcaaccagtttcctgatgaattcgctttacacttgtagaaatcagaattctgacttttgggagagccataattgtttaggttcttccaaggcaataaaaccacagctgagttcagaatcagaaagcagttacagtggatgttcattggcaatgtctgatgatttagtaagtaaaaaaagtgtaatattgtagcattcaccaagtcagctatgctggtgtgtagctcaactgggatctaagtcgtcgccaatggtgaccatgttttcttagtttctaaataaataaaccaaacatataggccaaaaaaaaaannnnnnnnnnnnnnnnnnnnnnnnnnnnnnnnnnnnnnnnnnnnnnnnnnnnnnnnnnnnnnnnnnnnnnnnnnnnnnnnnnnnnnnnnnnn

SEQ ID NO: 122881 - DNA, 552 bp, Arabidopsis thaliana
acgcatgcacgcgtacgtaagcttggatcctctagagcggccgcccttttttttttttttttataagaaacaacttttaaaaaaattaaaccaactaggcatttggttgaaaacaattacaaaaaaaaaaaatcaactcaactgtttcatcaccaagcacaaagctccatttgccttctacaacaaaacctagattaatggagacatactataaaccccaaactcaacacgataccataaaaatacaaaaacaaaaacaaaaaacaaaagatgggacattgtcgctgtttagaaccagaaacttatttttcctacaactatgacagaatcaaacacaaaactggacttctctctctctctctctctctctctttctcttcttcttctcctactcttgggtctcagcatattaataaaactggctatgactttggcttttaccctttccctttttccttccatatcagcttgaaactctcggctcttcacggacattcttaccccctccttctaactcctgaactcctaaaatcacggggctgggcacaggcg

SEQ ID NO: 122882 - DNA, 1036 bp, Arabidopsis thaliana
  unsure (1)..(1036): unsure at all n locations
cagctctcctacgactcactattgggaaagctggtcacgcctgcaggtaccggtccggaattcccgggtcgacccacgcgtccgtctttctctaccattttcttttgctttaaagctctctcaatcatgatcatgaagacccccatcacagcattccattcatcctcatgaataattctacatcagtgaagaggctggtttcatctaaggcaatgaaatgtttctacttcagcaaagacaaaactcaggatgatgaagctaagactagaaagtttggttcagctacgatggctagaggaggatcagggtctgagtttaattcagatacaagtactgctacttccattacttcttccttgcacgtcctctcagagacacacagtaataatctcaaagtatttgtcctcgatgaccttaaaaccgctaccaagaacttcagccgctccttgatgatcggtgaaggtggctttggtggtgtctttcgtggcgtgattcagaaccctcaagattctcgtaaaaagattgatattgcagttaaacaacttagtagaagaggtctacaggggcataaagaatgggtgacagaggtaaatgtattgggagtagtggagcatccgaatctggtgaagctgatcggttattgcgctgaggatgatgagagagggatccaacggctacttgtttacgnatacgtacaaaacagaagtgttcaagaccatttatccaatccgttttatagtcactcctctttcctttggtcccacccagacttgaaggtttgctcaaagacaacttgctaagagggccttcgcttatccttcaatcaaggcaatgggggtttcaagatccatcttttaggggggtttnaaaatncccctaaananccttccttgnttgggancttggattcnaaaanccttcgggttttcgggcctggctccnaatggggcctcaaggtggnatcacntacggttccncccgggggttttgggnccccttggtttcagncccgnttaatcnaanagggncnncggtt

SEQ ID NO: 122883 - DNA, 483 bp, Arabidopsis thaliana
cggaaaaacaattctccttcgattttccgattctcacaaactcaatctcgatccagattccgagcttatccttctctggcgaatttcgattttctgtgtttccgatctgattacagagaaccacatcgaagcttcgagaaaaaaaaacacgatgtttaacgggttaatggatcctgagatgattcggctcgctcaagatcagatgagtcgtatgactcctgctgatttcgctaggatccaacaacagatgatgtcaaatccagatttgatgaatatggcaacagagagtatgaagaacatgaggcctgaagatttgaaacaagctgcggaacagcttaagcatactcggcctgaagatatggctgagattagcgagaagatggctaaagcttcccctgaagatattgcagctatgcgtgctcatgctgatgctcaatttacttatcagatcaatgcagctcagatgcttaaaaaacagggaaa

SEQ ID NO: 122884 - DNA, 394 bp, Arabidopsis thaliana
gtttctgagccctatggatgatttaggagagaatcagctgttccctaaccagaaaatagtacagctcacattcctctttctggctctggtttctgtgccgtggatgttgttgccaaagccattcatcctgaaaaaacaacatgaagctagacatcaaggactgtcatatgcacagcttgacgagacagatgagagtcttcaagtagaaacaaatgggggaggacatggacacgaagagtttgaattcagcgaaatctttgtgcaccaactcattcacaccattgagtttgtgcttggagctgtttccaacactgcttcttatcttcgtctctgggctctcagtctcgcccactcggagttgtcgtcagtcttctatgagaaggtccttcttatg

SEQ ID NO: 122885 - DNA, 667 bp, Arabidopsis thaliana
ggaaagctgacacgcctgcaggtaccggtccggaattcccgggtctacccacgcgtggcgacgtaatatataaaacattactaattattacaagaaacaatcagaaacatcatggaggagcaaagcaagaacaagatcagtgaagaagaaaaacaactccatgggagaccaaatcgaccaaagggaggattaattaccatgcccttcatcttcgcgaacgagatatgtgaaaaattagcggtggtggggtttcacgcaaacatgataagttacttaacaacacagcttcaccttcccttaaccaaagcagccaacactctcacaaacttcgccgggacatcgagtcttactcctctccttggtgcctttatcgccgactctttcgccggccgattttggaccatcacttttgcttccatcatctaccaaatcgggatgacgttgcttacgatatcggcaataataccaacgctaaggccaccaccatgtaaaggagaagaggtttgtgtagtagctgacacagcacaattgagtatactttacgtagctcttctttttggagctctcgggtcgggtgggatccgaccatgtgttgatgcttttggtgctgatcagttcgacgagtcggatcctaatcaaaccaccaaaacttggaactacttcaact

SEQ ID NO: 122886 - DNA, 510 bp, Arabidopsis thaliana
cagctctatacgactcacattagggaaagctcgtacgcctgcaggtaccggtccggaattcccgggtcgacccacgcgtccggtcttcttctcggtactctgagagagtgagagagaagcaacaatggaggttttctactacttggtgtttggagtcatggctgccgtagtggcagcgttggagcttagcaagacgaacaaggatcggatcaacacttcgtcttccttcaattcattcaagaacaattacctcctcgttttctctattatgatggctggggattggcttcagggtccttatgtgtattacctttacagcacttatggttttggaaaaggagatattggtcagctattcattgctggttttggttcgtcaatgttgtttggaactattgttggatctctggctgacaaacagggtcgaaagagggcatgtgttacatactgtatagtttacatactaagttgcatcaccaagcactctccacagtacaaagttttgatggt

SEQ ID NO: 122887 - DNA, 414 bp, Arabidopsis thaliana
agagattctcagtttgcggaggagacgacggagaaggaccaagtaacaacaatcaccaatcccggaaaaggcaacgacttccttcaatcgatgaaaatgaagaagacgccgagacctccgacgccggaagttccggtgaagaagacgaagacgaaactcagaatcaaggaatgagaccagaatctgaggatcgaggatcaacgagcgatgatagcgatcgtgaagttgtgattgaggagagacgatttggtaaatttgtaaatagtcagagttcttcttctagcaaagattcgcctctttctgtaacgttattggatccagatgttcttgattgtcctatttgttgcgagccattgaagattcctatctttcaggttttgcttcttcattgattacacaatccattgaagcact

SEQ ID NO: 122888 - DNA, 721 bp, Arabidopsis thaliana
  unsure (1)..(721): unsure at all n locations
aaaattcacccagtttctgatattctatgcctgctcactggatcctgaaaattgtggtgtgaaatttgctagtaagctagtggagatttttctctccagcaacaagcatgtagctactagaatgagtgcggtggcttatcttgctagcttcttggctcgtggaaagtttttgcctgtttcctttgtggctagcatgttgaaaaggttgatagatgagtgtgtgggttactgcagaacttgcaatgatgatactaggcctgaagcacatcagattttcttctccggatgtcaggcaatcatgtatgtgctctgcttcaggatgagatccatcttggatgttcctcgctttcggtcccagcttacaccattggagtcaatattaatgcacaaactaaacccattgatggtatgccttccatcggtagttgcggagttccttagacaagctaaagaaggtggtctgttcatcgtctcagactcggtcattttcgatgacctacttgagtctgagctttcccgtgcttttggcgggtttgagaggctggatacattcttcccatttnacccttgcttgctaaaatcctcaaacagctttatctcccaaaatttcatctactggtcaaatggncaaagggncctntgcgnagatggtggtgntaatgatgctnagggatcgtgnatggggttnggcagtacgagntnccggggntactttgtncgc

SEQ ID NO: 122889 - DNA, 494 bp, Arabidopsis thaliana
attctgactcacatctagggaaagctgtgccgcctgcaggtgccggtccggaatacacgggtcgacccacgcgttcgcttattcgagcatgcttaagtgctttctcaaggcgttgcctcagtacatccacaaagtattgggtggtggacaatccttacactggcgagatccattgtgaaatcccctattgaagtcccgaccacatcaccaaagtggtggagcgtcgcgctgctgctcagaagagctactatcatgaatcgactttggatagtcgcattgaactctgcaaaaaatttatggatgagatgaaagcccggtctgattctatcgccactgacatttcagaacagatgggaaagcccctaagccaacccaagggagagattaaggggttgatcgagcgagcgacagccttgatggacctggcgccaaaggcactcccagacgaagtgctgcccaaacaaggcttttaccgaaagctctccttcgagcct

SEQ ID NO: 122890 - DNA, 1326 bp, Arabidopsis thaliana
tacgactcacttagggaaagctgctacgcctgcaggtaccggtccggtttcccgggtcgacacgcctccggaaaaaaaggagctcccttttctatctctaagggaaaatgggtagcaagatgttgtttagtttgacaagtcctcgacttttctccgccgtttctcgcaaaccttcctcttctttctctccttctcctccgtcgccgtcttcgaggactcaatggactcagctcagccctggaaaatcgatttctttgagaagaagagtcttcttgttgcctgctaaagccacaacagagcaatcaggtccagtaggaggagacaacgtcgatagcaatgttttgccctattgtagcatcaacaaggctgagaagaaaacaattggtgaaatggaacaagagtttctccaagcgttgcaatctttctattatgatggcaaagcgatcatgtctaatgaagagtttgataaccttaaagaagagttaatgtgggaaggaagcagtgttgtgatgctaagttccgatgaacaaagattcttggaagcttccatggcttatgtttctggaaatccaatcttgaatgatgaagaatatgataagctcaaactcaaactaaagattgatggtagcgacattgtgagcgagggtccaagatgcagtctccgtagtaaaaaggtgtatagtgatctcgctgtagattatttcaaaatgttattgttgaatgttccagcaaccgttgttgctctcggactctttttcttcctggacgacattacaggttttgagatcacatacatcatggagcttccagaaccatacagtttcatattcacttggttcgctgctgtgcctgtgattgtatatctggctttatcaatcaccaaattgatcatcaaggacttcttgatcttgaagggtccttgtccgaattgtggaacggaaaacacctccttctttggaacaattctgtcaatctccagcggcggcaaaaccaacactgtcaaatgcaccaactgcggaaccgcgatggtgtatgactcgggttctaggttgatcacattgccagaaggaagccaagcttaaaccctgtgagctagatgaagatgggaaaagaagaatgggttttgtcagaagcaaaatagattcgaagttaaatgtatatgtaagatcttccatgttagctctctctccttcacatgttttctgatttgtaagtattgtgtgtaagcaataagagatatataatatgagcacttcttccaaaaaaaaaaaaaaaaaaaaaagggcggccgctctaaaggatccaagcttacgtacgcgtgcatgc

SEQ ID NO: 122891 - DNA, 466 bp, Arabidopsis thaliana
cccacgcgtccgcatctccacacctctcttatctcttattttcttccctgcagatttataagaaaaccgaggaataaggaaaaaaaactaaaaaaatcagaagaaacctgagaagctcacagtaaacacatcttcaaccacaggttcatacttactgaaaaaaacagaggaaaaaaaggagctcccttttctatctctaagggaaaatgggtagcaagatgttgtttagtttgacaagtcctcgacttttctccgccgtttctcgcaaaccttcctcttctttctctccttctcctccgtcgccgtcttcgaggactcaatggactcagctcagccctggaaaatcgatttctttgagaagaagagtcttcttgttgcctgctaaagccacaacagagcattcaggtccagttggaggagacaacgtcgataccattgttttgccctattgtagcatcaacaaggc

SEQ ID NO: 122892 - DNA, 430 bp, Arabidopsis thaliana
agaagttttactaatttaaatccttgctacgttctcttaccgttcttccttgtcctagccacgaatgcaacacatacaaacaatttcctcccaaggccacggactgggtattacggtagtgcatgctggaatgtagaatcgatagttcggtccgtggttgagtctaactatcttgctaatccagccaatgctccaggcattttgcgtatgcactttcacgattgtttcgttcaaggctgtgacgcctccgttctcctagccggacctaactctgagcgaacggcgattccaaatctatcgttgagagggtttaatgtcattgaagaagctaagactcagcttgagatcgcttgtcctcgaacagtctcttgtgctgatatcctcgcactcgctgcacgtgacttcgtccatttggccggtggaccatggt

SEQ ID NO: 122893 - DNA, 486 bp, Arabidopsis thaliana
  unsure (1)..(486): unsure at all n locations
cgggatacattcaccaccagcccgtgatggcctgatctgcttcctcctcctccttacttcttgtttccatcttggtttcaaatttcttcaaagattccgatcatcttcacgtcggagtacacaatctgaaaccgatcatcatcatcatcaattggggtttttaatccctagaatcagtagaaaatatcgatcattgagcttcgattctggtctccgtttgattgtttcggacaatcagagctttgagtctccgaaaaggttggttatgtcatcttctgttccaaactcggaccggaagattgttactggtcccgccggttatattcttgaagacgttcctcatttctccgacgactttcctgatcatcctacatatccaaatccattacaagacaatgcagcttactctgttgttaagcagtattttgtcgatgaggatgacacggntcctcaaaaaaatagtagttcatcctgatagtcctaggg

SEQ ID NO: 122894 - DNA, 493 bp, Arabidopsis thaliana
ccaagctctaattctgactcacatatagggaaagctggcacgcctgcaggtaccggtccggaatacacgggtcgacccacgcgttcggttcatctctccgaccttaaaccctccgatccaaaaatctccaccgactctaatccaatcaaatggcctccgtcgcgcttctacggtcttttcgtcgccgtgaagtccaaatggcttccgtatctgcgtttaaatccgtttccgcaaatggaaagaattctatgtttgggaaattaggttacttggcgagacctttctgctcgaggcctgtggggaatgatgttattggtattgatttgggtactaccaattcttgtgtatctgtgatggagggaaagaccgctagggttattgagaatgcggaaggaagtcgaaccacaccatcggttgttgctatgaaccaaaaaggggaactccttgctggaacaccggctaaacgtcaggccgtgaccaatccaacaaacac

SEQ ID NO: 122895 - DNA, 604 bp, Arabidopsis thaliana
agcgtctctacgactcactatatggaaagctggcacgcctgcaggtaccggtccggaattcccgggtcgacccacgcgtccgcccgatcctgtacaagaacatttccctcaggttcagatcgcctgaagttaaacaaaaaaatgctccggtcacttcttctccgacgctccgtcggccattctctcggaaccctatctcctcttcatccaccatccgttcctcattttcgcctcatcgtactctctgcaccaccggtcaaacattgacaccaccaccgccgccaccgccacgtcctccacctccgcctccggccaccgcctcagaagctcaattccgtaaatacgccggatacgcagcactcgctatcttctctggagttgctacctatttctcatttccattccctgagaatgctaaacacaagaaggctcaaatcttccgttacgctcctttacctgaagatcttcacactgtctctaattggagtggtactcatgaggtacagactaggaactttaatcaaccggagaatcttgctgatctccgagctcttgtaaggaatctcatgagaagaagtaaggattcgtcccgtggatcgggtct

SEQ ID NO: 122896 - DNA, 787 bp, Arabidopsis thaliana
ggcagcattgcttggtcagcccatgagcatggtgttacctggcgtggtcgggtttaagttggatggaaagttgaaggaaggggttactgctactgatttagttctcactgtgacccaaatattgaggaagcatggtgttgtcggcaagtttgttgaattttatggtgaggggatgagtgaactttcactggctgatagagccacaattgcaaatatgtctcccgagtatggagcaactatgggtttcttcccagtggatcatgttacactggagtacctgaagttgacaggaagaagcgatgaaactgtgtcaatgatagaatcatatttgcgcgcaaacaatatgtttgttgactacaacgagcctcagcaagaaagagcatacacatcttatctgcagttagatttgggacatgttgaaccatgtatttctggtcctaaaaggcctcatgaccgagtgcctctgaaagatatgaaggctgactggcatgcatgccttgacaatcctgttggattcaagggttttgcagtgccaaaagaaaaacaagaagaagttgtgaagttctcatacaacggacaacctgctgagatcaagcatggtagtgttgttattgcggcaattactagttgtacaaacacgtcaaaccctagtgtcatgatcggagcagcactcgttgcaaaaaaagcttcagatcttggcctgaaggtaaaaccatgggttaagacaagtcttgctccagggtctagagttgtcgagaaatatttggatcgaagtgggctccgagag

SEQ ID NO: 122897 - DNA, 704 bp, Arabidopsis thaliana
  unsure (1)..(704): unsure at all n locations
cagctctaatacgactcactattagggaaaggctggtaccgcnctgcagggtacccnnngtccggaattccacgggggtcgaccccacngccgtccccgtnngaaaatccccactttgacagacgctaacctaaacaacaacaacgactccggcgagtgtatgtatctttcactttctcactaaccaaccagacgacaaaagaaaattattcatcttagctaagctcgattagtttctggcggaaacggttttgtggataattgttagcatattccgatcttgccctcccccgagagagagagtccaatcaatcaatcaatcaatcatctcttacgaagctacgtgtgacctaacattctccagattgttgtttatagcctcttcttagatttacgatttgtgagcttgtgaagatttcttggtagaattagagttctctgtttcgagatcgagatgaataataataataataatagaggaagatttccaccggggattggtgcggcgggtcctggtccggatcctaattttcagtcacggaatccgaatccacctcagcctcaacagtaccttcagtcacggactccgtttccacagcagcctcagcctcagcctcctcagtatctccagtctcaatctgatgctcaacagtacgttcagcgaggttatccccagcagattcaacagcaacagcaactgcagc

SEQ ID NO: 122898 - DNA, 519 bp, Arabidopsis thaliana
  unsure (1)..(519): unsure at all n locations
nnnnnnnnnnnnnnncgacttactatagggaacgctggtacgcctgcaggtaccggtccggaattcccgggtcgacccacgcgtccgtgaaaatccacttgacgacctaaacaacaacaacgactccggcgagtgtatgtatctttcactttctcactaaccaaccagacgacaaaagaaaattattcatcttagctaagctcgattagtttctggcggaaacgggtttgtggataattgttagcatattccgatcttgccctcccccgagagagagagtccaatcaatcaatcaatcaatcatctcttacgaagctacgtgtgacctaacattctccagattgttgtttatagcctcttcttagatttacgatttgtgagcttgtgaagatttcttggtagaattagaggtctctggttcgagatcgagatgaataataataataattatagaggaagatttccaccggggattggtgcggcnggtcctggtccggatcctaatttcagtcacggaat

SEQ ID NO: 122899 - DNA, 505 bp, Arabidopsis thaliana
  unsure (1)..(505): unsure at all n locations
nnnnnnnnnnnnnnnnnnnnnnnnnnnnnnnnnnnnnnnnnnnnnnnnnnnnnnnnnnnnnnnnnnnnnnnnncatcatcattccacgcgtccgctccggcgacaaaaacacagcgagcgactgacgaaaattaaacacttcgccgtcacagacactctctctatatatataatctccggcgatggagagtttcgctcttcactctctctccaccaccgccacttccaccttactctcccatcatcatcatcaccatccctcacgtctctctcttctccgtcgtacctcttcgagatctccgccttcaacaatctccctccgatctctctccgttcaacctctctccttccctcttctcaaaccaattcctcgattctccacacgaatcgccgccgcaccgcaagacaacgctcctcctcctcctcccccatctccgtctccgtctccgtctcctcaaggagcgaaactcatccctctgattctctcaatctccgtcggcctaat

SEQ ID NO: 122900 - DNA, 560 bp, Arabidopsis thaliana
agctctctacgactcactattgggaaagctggtcacgcctgcaggtaccggtccggaattcccgggtcgacccacgcgtgcgcttctctctctctctctctgtctgaaaacgactttcctctgttcttctctcccccaattcttcttcttcttctctcatcctttcccaatctccatttttcgatgcttcattgattcacgagaagacaattccatttctgatattatttgtttcctttctcgatcgattctttgcgtaaaaacctgtttctgttctgtttcagaatctgtctctcttattactctgttctgttttgtctgtcttaataaagtttctttctctctttaaagacaaattcatagttccagtttccgaacttctctctctcttgtcggattctctgatgagtcatcagatctctgtttgaactatccaatttctcatcctctcttattttcttttttaatttcacttcaccggagatctccaatcgccggagaaatgggaggattattgcatctcttcgatttccacaacaacagtttctccccgaaagttt

SEQ ID NO: 122901 - DNA, 652 bp, Arabidopsis thaliana
  unsure (1)..(652): unsure at all n locations
ccagctctcctctactcacattatggcaaagctggcacgcctgcgtgtgccgggcacgctatacaccggtcgacccacgcgtccgccgatttccactctctgggagacagaaaaacctcataatctcaaaaattgttcactgtgtttatcttccttctaaagttctaagaagcttcgattcttaattctgtttatcgatttgaattccttgtttctatttcccaaccgttagctgattgtgctagatccatttttctggtgattgatgcaacttctggagctcgattcttcgttctagtatttgattattcgaagcagagttggtgtgatgaatgctaatgaggagggggagggttcacgttacccaatcactgatcgaaagaccggagagacgaaattcgataggggttgagagtcggacagagaagcatagtgaagaagagaaaactaatggaattactatggatgtgagaaatgggagtccaggcggacctgcaaattccattggcgcaacaaacagnggnaacgnctggtngggaagggttcnccatgngggaccnttagggcccncttncgaaatacngctgcccccgnanacggacggcctccccnaatgancataantttngggcaaggggcaactgnagggggc

SEQ ID NO: 122902 - DNA, 923 bp, Arabidopsis thaliana
aaacaccggtccgttaattattaatcttcccgtctataattcattaattctcgttagcagcttcttcttcgttggattcgtaaaatggatggatttggagctaactacgagtgtttgttctttgatatggacgatactttataccctttgagcatcggaatcaacttagcttgtcgaaacaacatccaagagttcatgcttaaccaactcggaatcgaagagagtgaagttccaaagttgtgtttggatctttacaaagaatatggaaccaccatggctggtctcaaggttatgggttacgaattcgacaacgatgaattccatgaatatgtccatggaagacttccctacgagaaactaaaacctgatccactcctccgtaaccttctcctctctatgcctcaccgtaaaatcatctttactaacgcagacaaagctcacgcaacacgagctctcaacagattgggtcttgaggactgctttgaaggaatcatttgcttcgaaacactaaacccttcttctgattcaaacactcaaatcctctgtaaaccctctgttgaagcatttgaagctgcaattcgcattgcagacattgttgatccacgcaaaacggtattcttcgatgacagtattcgtaacatcgctagtgctaaagcaacagggctaaaaaccgtgtttgtgggggaatcagtgctagttccaggtgctgactatgcactaagcagcattcataacataaagggagcaatacctgatttatgggaagaccacaaagatgagaagctcgagccaattgttcagcaagccgcggttgcaaccatggtcaatgcttagagagacattctaataagaatcccacatcgattaaaagaacttataactcatgtatccgaaatatataataaataaaagaccagaatttg

SEQ ID NO: 122903 - DNA, 911 bp, Arabidopsis thaliana
  unsure (1)..(911): unsure at all n locations
ggggannnnnnnnnnnnnnnnnnnnnnnnnnnnnnnnnnnnnnnnnnnnnnnnnnnnnnnnnnnnnnnntcgcgatctagaactagcggacgcgtgggtcttcttcttcttcttcatcgtttatcacgacctctgtctcttcgtctctctcaaaagccattttaaatctctctctttctcactcaatctctctgtagctatcagatcttctcttatgttgatccccaacaaaaaattaagagaaatgaatcggagacagcaagtgaaacgtagagtaggtaaatatgaagttggaagaacaattggagaaggaacgtttgctaaagttaagtttgctagaaactctgaaactggagaacctgttgctctcaagattcttgataaagagaaagttctcaagcataaaatggctgaacagattagaagagagatagctactatgaagttgataaaacatccaaatgttgttcaattatatgaggtgatggcaagtaagacgaaaatatttatcatctgggagtgtgttacaggaggagaactctttgataagattgtaaatgatgggcggatgaaagaagatgaggcgcggagatatttccaacagcttatacatgctgtggactactgtcatagcagaggggtctaccatagagacctcaagcctgaaaatttactattggactcctatggaaacctcaagatctcagattttggattaagtgctttgtcccaacaagtcagggatgatggactcttgcatacatcgtgtggaacaccaaactacgttgctcctgaggttctcaatgatagaggctatgatggagcaacagctgacatgtggtcatgcggtgttgtactctatgtcctgcttgcaggttacttaccttttgatgattctaatctaatgaatc

SEQ ID NO: 122904 - DNA, 512 bp, Arabidopsis thaliana
  unsure (1)..(512): unsure at all n locations
atgaatcgccnnnnnnnnnnnnnnnnnnnnnnnnnnnnnnnnnnnnnnnnnnnnnnnnnnnnnnnnnnnnnnnnnnnnnnnccacgcgtccgccccaacaaaaaattaaggttcttttttgctttttaaataagtaatatatatatatatatatatatatatatatatatatatataagattgagatattctctgtcttgcttcttctttacccttttcttgtttccaatcaaatcctctaaagtttcgttctttgttctaagttttctgaaggagtgatatttgtttgtggtgtggttagagaaatgaatcggagacagcaagtgaaacgtagagtaggtaaatatgaagttggaagaacaattggagaaggaacgtttgctaaaggcaagctcgctagaaactctgacactggagaacctgttgctctcaagattcttgataaagagaaagttctcaagcataaaatggctgaacagattagaagagagatagctactatgaagttgata

SEQ ID NO: 122905 - DNA, 563 bp, Arabidopsis thaliana
cttttcagcagcctcttagtaatatggatggttggcttccacatcgtcggtttcctccgtctggggagtttgagcgtcctcgaagttctggtgctgcttttgctgatttccaggagaagtttccgttgcttaaccttccatttgatgataagctgcttcctcgatttccatttcagccgagaacaatgggaacttcgcatcaagacataatggccaatctttcgatgaggaaaagatttgaaggtactggtcattctatgcaagacctatttggcggaacaccaatgccgtttctacccaatatgaaaatccctcctatggatccacctgtcttcaaccaacaagagaaggacttaccgcctttgggtttggatcagtttccatcagctctttcatctatcccagagaaccatcgaaaggtgctggagaatataatgcttagaactggctctggaattgggcacgtacagaaaaagaaaacatgagttgatgcatggtccgaggatgaactagattctctctggattgggattcgcagacatgggtatggaaactgggagaca

SEQ ID NO: 122906 - DNA, 520 bp, Arabidopsis thaliana
  unsure (1)..(520): unsure at all n locations
cnnnnnnnnnnnnnnnnnnnnnnnnnnnnnnnnnnnnnnnnnnnnnnnnnnnnnnnnnnnnnnnnnnnnnnccacgcgtccgcccacgcgtccgcggacgcgtccgcccacgcgtccgatagtcaccattttttttgtttgtttgacctcaaaaactcctacgtttctaagctcttctctttgcttcgattcccaaaacgactatttccaaaagggtttaaagaagttatgaacactaatccagtgactaatgggtttgttaaacctgttcctactgaagaagaacaagcaaagattgaggaagtgaggaagctattaggtccattaccggagaagctttcgagtttttgttccgatgatgcagttttaaggtatctaagggcaaggaattggcatgtcaagaaagctactaagatgcttaaagaaactttgaaatggagagttcaatacaaacctgaggagatttgttgggaggaagtagctggggaagcagaaacagggaagatatatagatcgagtt

SEQ ID NO: 122907 - DNA, 394 bp, Arabidopsis thaliana
cttgagagtttttgcttcctcgtcttcttcgattcatcaaacagcgtgtgttttttgtttagagttggaagagacgaatcgaattttgaagctttcttttatgtctgacaagatatctccgttttgttgtcaatctggttgcttggaaaacacagtcctacatccagaattaaggactactactagttcctccatcactttagggtctcgcatcttcaaaccggagatccctcctctttctctccacttttttagctaagaagaatggcgctgcagaacattggtgcttccaaccgtaacgatgccttctacaggtacaagatgcctaagatggttaccaaaaccgaaggcaaaggtaatggcattaagaccaacattatcaacaatgttgaga

SEQ ID NO: 122908 - DNA, 307 bp, Arabidopsis thaliana
gacgaatgcgacgaatcactcgcagatcttttggcacaagtggaagccatggagtcccaagaacgtcttccttctccaacttcggcattccgtggtcctgaagaactattaatccggcactcaatgaacgagtagcttcagtcccgcacaaggacatagcccagcactacatgtaagcaaaggtgactccatgagctctcacaaacgatcttcaggtgcattcacgatctaacagcaccgtgcatttttagtcgtgggctcgggttcacatagagagaaatcataacctggggcacaggttaccata

SEQ ID NO: 122909 - DNA, 599 bp, Arabidopsis thaliana
  unsure (1)..(599): unsure at all n locations
ccccccctcgatttcgacggtatcgataagcttgatatcgaattcgcggccgcgctaaaaatatctctcgaattcaatcttcctgattttcaatttctgtctctagggtttcaatatccgataaaagcgatggagacggagatggatttctcagatggtgaacaaactaatggtaattcacatgttactgcctcccaatactttgctcctccgggttataatagaagtcttgtggctgcttatgggaatggaaacacaaccattggattagaaaaaggaatagaaaggagactagatcatcatgagcaactacctggttatatctttatgtgtaatgggagaacgaaaaccgattgctaccgttaccgtgttttcgggattccaagaggagggaaagacgttgttgagagtataaagccaggcatgaagcttttcctctatgactttgagaagagacttctttatggtggggatggagctactgttggtggcaggttggatatcagaacctgaagcctttgaagggaatatccagcccaggtngggttagaatgccatgaccggtaccctgncagaaancttcaagcnnatccatgngc

SEQ ID NO: 122910 - DNA, 494 bp, Arabidopsis thaliana
gaacaagggaaagaagaatccaacttcatcaattcagattcgcacgcttgaaattatctgaataaaaatcgaaagctaataatgagctgatcgctaaaaatatctctcgaattcaatcttcctgattttcaatttctgtctctagggtttcaatatccgataacgatggagacggagatggatttctcagatggtgaacaaactaatggtaattcacatgttactgcctcccaatactttgctcctccgggttttaatagaagtcttgtggctgcttatgggaatggaaacacaaccattggattagaaaaaggaatagaaaggagactagatcatcatgagcaactacctggttatatctttatgtgtaatgggagaacgaaaaccgattgctaccgttaccgtgttttcgggattccaagaggaggaaaagaccgttgttgagagtataaagccaggcatgaaagctttcctctatgactttgagaagagac

SEQ ID NO: 122911 - DNA, 463 bp, Arabidopsis thaliana
cgacccggcccacattttaaacccattttagccttttctgtttccgccgccgactgatcggaataatcgatcaaagagagaacaactgaatcttcgccggatactacgccgatgacgattgcggcagcgccagcacgccagacagatcgatcagccactggtttcaaccctgcttacgtcacgacggcgaacgcggtgagcgttccggttcaagttcctccggcgactgtggtttccgaaggattacgtaaagatgcgttgatctcatggttcagaggagaattcgctgcggcaaacgcgataatcgacgcgatgtgctcgcatctaaggatagctgaagaagcggtatctggatcggagtacgaacctgtattcgcggcgatccatcgccgtcgtctgaattggatccctgttcttcagatgcagacgtatcattccatcgctgaagtagcgatcgagcttc

SEQ ID NO: 122912 - DNA, 786 bp, Arabidopsis thaliana
  unsure (1)..(786): unsure at all n locations
ccaccaaaacttacaaaaaaataaaaaacagaaccaacaagaaaaaatacacaccaaaacccccacccaagcaaaaaaccaaacaacacaagagacacacacaaaacgacacacaaccaacacacccccccccagcggagacaaaatgaatgccttcccagtaccgaaccggaattccgggacgacccacgcgtccgggcagtggaagacgacggcacgagcttcaccgaagagcgaaaatggtgaacattccgaaaactaagaacacttactgcaagaacaaggagtgcaagaagcataccttgcacaaggtgacgcagtataagaaaggtaaagatagccttgctgcccaaggaaagcgtcgttatgatcgtaaacaatctggttatggaggtcagaccaagcccgtcttccacaagaaggctaagacaactaagaagattgtgctgaggcttcaatgccaaagctgcaagcatttctcgcaacgcccgattaagaggtgcaagcactttgagatcggtggagacaagaagggaaagggaacatctctcttttaagttgttgtttcatctatctacttttttttgttttgtttggtacctgtcctgcttcaatactgtgatatactttgaatctaccagaaatggtcctggtttttaatttaaataggacttggtctaaaaaaaaaaaaaagggcggccgccctgagggaccagctttcggccgggccttgcgagcaaagccatntngggnccccaatccaatcnnnnnnnnnnnnnnnnnnnn

SEQ ID NO: 122913 - DNA, 437 bp, Arabidopsis thaliana
ctcctcgtcttctctgttcgtctgccatatgagtccttcccaagcccaacttttctgaaattgaatcttttgggacagagatggcattaattcagaaaccagtggtgtgcaaagacactaataagatcttcatgaagcaaatacttgcgtttactgaacaggtgaccattacacagaacagtaagctctcgccacgcacatggcacaaggaagtgataaacggactaacttgtagtctctttcccctgtcaagaattagcaaatcatccttcttttacttgttctgaagcacatctagatagaattgaggcacagaggtcaacggatgtgtctcatgaccaacagaaaaaaagatacttcccaatgaatctgataaacaaagtcgcaagcaaactctgttcacgaggaggagatggcgccacgccacctatgggaga

SEQ ID NO: 122914 - DNA, 1164 bp, Arabidopsis thaliana
ctctatcacacacacccaatttgcatttctttcgtcatcatcatctactctttctgcgtttttcccagctgaataatctaaacaaggaaaagtaaaacagagtaccaatctcagattcatcagctccacttgaatttaaagtagccataactgttcgatcataggatggaagaagcaactcaagtaacgagttctgaggtccctgtagtgaaaggtgatgttgatgaccttaagacagctgatatttccgtcaaggctgtgaatggagaagtgccaaaggaggagaaagaagaggaagatggggaattcataaaagttgagaaggaagcttttgatgccaaggatgatgcggagaaagcagatcatgttcctgttgaagagcaaaaggaagttattgaaagaagctcgagtggttcacagagagaactacatgaatcacaagaaaaggcaaaagaactagagctcgttctcggcccccttgcaggggaactaaaacggtatgaatctgaacatacccatttgaaggatgagcttttgtctgctaaagacaagttccaagaaacggaaaataagcatggagatcttgaagttgtccaaaagaagcatcgagagaaaatagttgcaggggaagagagacacagctcacaggtaaagtcctgggaagatgctttgcagtcacatgacgcgaaagatatggaactaactgaagctaacgaaacttccgatgcgttcggcataaaactcgagagctcacgaaagaagttgatagagttggacgatgggctaaaacgttcagctgaagaggctcagaaatttgatgagctgcataagcaaagtgcttctcatgctgactctgagtcgaacaaagcttcggaatttgcggagctgctttaatcgacaaaagagagtgccctggtaatggaggaaaaaatggcgtcccttgcacaagtaaatcaaggatcctcctgtgaagatatctgaagacgaaaaacgttgatactgcccttaacagttctgcgggacaaatagctgccggcaagaggaattggcactctcaaaatctccgttagtcctgatgacggaaccttaaagtgtttttccacaacaatgccctcatttggttaaactgacctcaggaaacttggaccaataaaaaatgctttc

SEQ ID NO: 122915 - DNA, 478 bp, Arabidopsis thaliana
  unsure (1)..(478): unsure at all n locations
ggaancccggggcgaccacgcgtccgaatcagcaaaaaccctagaatatcttagagcttcgcttcactttcaagctcgagactttgagaaagatgcctccgaaagccaaagctaaagatgcaggtcccgtagagaggcctattcttggccgtttctcttctcacctcaagatcggaattgttgggttaccaaatgttggaaaatctactcttttcaacactcttacaaagctttcaattccagctgagaatttccccttttgtaccattgagcctaatgaggcacgtgtgaatatccccgatgagaggttcgattggctttgccaaacttacaagcctaagagtgagattccagctttcttggaaattcatgacattgctgggcttgttagaggagctcatgaaggacagggtcttgggaacaacttcttgtcccatattcgtgcagttgatggaatttccatgtttacgtcctttta

SEQ ID NO: 122916 - DNA, 562 bp, Arabidopsis thaliana
  unsure (1)..(562): unsure at all n locations
cnnnnnnnnnnnnnnnnnnnnnnnnnnnnnnnnnnnnnnnnnnnnnnnnnnnnnnnnnnnnnnnnnnnnnnnccacgcgtgcgatcttaccaaagtctgtgataatttttccgacagaagtttcatctgagaaaagatggctacatttgcacttcccttctgcgaaattcccgaggatctccagctccgaatcttatccctcctcacaccagcggagatctccagcttcgcctgcacatcgaaacgcttcgcctcgctatgtcaagaagacggcaaaatctggcacgttatgtgcgatcagagatgggggaagaaaactaagatccagaaatgggcaaacggtcaaatcccttatagacacctttacaagactctaaagggattggagaatctaattggcttctggcgtctctgcggcagagcaaatcccgccgcttcatcgccgccgcttgttttcttcgattggggttcttcttttatattgggatctagagttctatccaccggagatgatacttatgaggtaaagaagacaccttttctcttaatggggatttcggcg

SEQ ID NO: 122917 - DNA, 573 bp, Arabidopsis thaliana
  unsure (1)..(573): unsure at all n locations
cnnnnnnnnnnnnnnnnnnnnnnnnnnnncaaaatcacaaaagtcatctaaactttgaagaatctttaccaaccaggctcgcgcaaaagttggaatcgtgcacgcctctcgagttatctccggctccgatactccatctggtggattctgtagaagaaaaaatttcaatctttgttggattttctgggaaaaactcagatgggtttgctctgaatcgattggaaaatcaaaccggtgtggactctgcaaagttggttgatatgaacagtcttgtgagaagaaaacaagttgattctgttcatcttatcaaaaacgatggacctcatcagcttgccaagaaactatccgccgttgatcttgttgctattggagttgggacaacaattggagcaggagtgtatattcttgtgggaacggtagctagagagcacacaggacctgctcttgctgtatcattcttcattgctggagtagctgctgctctctctgcctgttgttatgctgagcttgcttctcgttgtccatctgctgggagtgcttatcattatgcgtacatttgtcttggagaaggga

SEQ ID NO: 122918 - DNA, 505 bp, Arabidopsis thaliana
gggtttttctcatccacatcggattttagaataccgtctagtagctcgatgaatcagactttacctcggtgtcatctttgtaacgagaagtatgagcaagaagtcaccgcctttgctaagtcggggtcgatgatcgatgatcagtgttcggagaagttaccttcttggttacgaaatgtggagcatgaacacgagaaaggaaatctcggtaaggttaaagatgatccaaacgtattagcctctcggattcccgctctgcagaagaaatgggacgacatttgtcaaagaatccatcaaactccggcgtttcctaaactcagttttcagcccgttagaccgcagttcccgcttcagcttggttcttctagccagaccaagatgagtcttggaagcccaactgagaaaattgtttgcactaggacgtctgaaagctttcaagggatggtggctctaccgcagaatccgccacaccaacctggtttatcagtcaaaatctcaaagccaa

SEQ ID NO: 122919 - DNA, 569 bp, Arabidopsis thaliana
atgatacgtcagcgtctacacgactcactatttggaaagctggtccgcctgcaggtaccggtccggaattcccgggtcgatccacgcgtccgcttttaactctcggtcaagtatgaaaaagtaccagagcgaagaagatgaagatatctctgaacagaaacctcgggcaaaagataaagcagccagtggacaacaatctgttggcagcatttcttctcggagctcccaagctagaaagcttcaacccaacaggaacatgtcttcttctattactccgcggagtgcagcatcggttccaaaaccatcaggtaaagtttcaaacacctcttctgggaggcgaagatcagacaagtcgctcgcacaatctgttccaaatttttctgaacttataaaggaaaacacgaaaccatcttctttagctgtcaaaactactatgcgatcacaggtgaaaagtagtggtcgcaccaagactatcaaggaggatacactgctccaaagacctcgatcattaaggaaaagctcctctgggaacatagactttacggaactctccactctctgctctgatg

SEQ ID NO: 122920 - DNA, 886 bp, Arabidopsis thaliana
  unsure (1)..(886): unsure at all n locations
tgatatnnnnnnnnnnnnnnnnnnnnnnnnnnnnnnnnnnnnnnnnnnnnnnnnnnnnnnnnnnnnnnnnnnnnnnnnnnnnccacgcgtccgcttctttctacaaatgggtttccaaagatctatctcttcttcttctgcattaaaatggcttggatttgtaacagcggtttgggttcaatccatctccggcaacaactacactttttcaaactactccggtgctcttaagtctctcatgaatctcaaccagctcgagctcaacaacctctctgtcgctaaagacgtcggaaaagcctttgggatcctggctggccttgcctctgaccgtcttcccactccggtcatcctccttattggttgctttgaaggtcttcttggttatggtgtacaatggctcgttgttagccgcaccatccaaccaatcccttattggcagatgtgtatattcctctgtatgggagggaacagcacaacgtggatgaacacggcggttctagtgacttgcatacgcaattttcgacgaaaccgtggtccggtctccgggatattgaaaggatatgtcggtttaagcacagctatattcactgatctctgtactgctctgttctcaaacgatccggcgtcgtttttggttttactagccgtggtgccttttgccgtatgtctcacggcggttttcttcctccgtgagatcccaccagcatcttccgcagctgaggagaacgaagagactcgttactttaccatattcaacattgtggccgctgttgtcgccgtgtatcttcagtcttacgacatcattggaatcaaaactggagtgttctcttgtcgcttttcgcttctatacttctcttcctcttggctttctccaatagccatccct

SEQ ID NO: 122921 - DNA, 426 bp, Arabidopsis thaliana
ggatagagaagtaattgatgttgatgatgagcttggagatgttgaaatgatatctgatgatacaagtagggagggtgtcgaaaacgtggctatggaggtggacgacgtggaagagaaggcggagatgggaaatggattgttttctgaggttgccagtctgaaaaatgggagcttgagggtgggtgaatgttctaaagctaatagtagttcactcgttgtgaatcgccctgtgactgatgtcacaagttttgaagcatacagaaaggttcttgagagtgctgtgaaccggacttctaaactgaaagacagaggctttgttgatttttttaaagagagaggtcgtgctttactacgaagcttgtcttccttttggagacaagatgaagaaccagtagaggttgtacaacgtgaggcatttgtacctct

SEQ ID NO: 122922 - DNA, 453 bp, Arabidopsis thaliana
cgaaaaacaaaaaaaaaaagacagaggacaaaaaaaaatcacgaaatctgattttcctctcttttgctcgaagccaagtctctgcttttactttgatccaccaacttcatcttcaacctctcgattttaggtaagattcttagagtgattttgacttatctaagaatggagctaaagagcattaaggatgcgtttgatcgtgttgcgacgaagcagaagctctcttatagcaaaactaatgagattgttcatatgttgtctcaagaaatcgataaggctttgagcatattagaggagacaccatcatcagatactatgcttcttgatcatagatctatcctcgctgatgtgaagaaagtgtttatggagattgctccaatcactcaacttgaagctactgagaaagagctacatgcggctttgaccaagtaccctaaagttcttgagaaacag

SEQ ID NO: 122923 - DNA, 390 bp, Arabidopsis thaliana
cccaagcgtccgcggacgcgtgggtttcgattttaccttacgcagaaaggttcgttgaaaccctagattcgttctcagttttcgtgttggctaatggcgagcgcggcacggggagagagcagcagtccatacggcggcggattgggaaccggaggaaagttccgggagccgacggctcgtacgtctcagaaaactccttatgatcgaccaacgacttctgtgaggaacgctggacttggtggcggagatgtcagaggcggcggctggttgtcaaaattggtggatccggcgcagagacttattacttatagtgctcagaggctcttcgggtccttatcccggaaacgcctcggctctggtgagacgcctttacaatcgccggaacagcag

SEQ ID NO: 122924 - DNA, 730 bp, Arabidopsis thaliana
  unsure (1)..(730): unsure at all n locations
nnnnnnnnnnnnnnnnnnnnnnnnnnnnnnnnnnnnnnnnnnnnnnnnnnnnttctcggtttgttcctaaccccacgcgtccggcggttgaggttttactgaccgggattcatggttcggttatggaagaagaggaggaggaactgaagagtgttgtgactaagtatccagctgatgcatcacttcctgatattaacgaaggtgtttatggaactgatgattttaggatgtttagctttaaggttaagccatgttctagggcttattcacatgattggactgaatgtccttttgttcatcctggtgagaatgcaaggaggagagatcctaggaagtatccttacacttgtgtgccttgtcccgagtttcgtaaagggtcttgtcctaaaggagattcgtgtgagtacgcgcacggtgttttcgagtcttggcttcacccggcgcagtataggacacggctttgcaaagatgagactggttgtgctaggagagtttgtttctttgctcatagacgggatgagttaagaccggttaatgcttctactggttctgcaatggtttcaccaaggtcgtctaatcagtctcctgagatgtctgttatgtctcctttgacgctgggatcatcgccaatgaaactctcctatggctaatggtgttcctttgtctccaagaaatggtggtttatggcagaacagagttaattagccttacacccaccaccgttncagct

SEQ ID NO: 122925 - DNA, 745 bp, Arabidopsis thaliana
  unsure (1)..(745): unsure at all n locations
cttttgccgaacaacacaagattgttcttttagcnnnncannccgaccaagcggggatgatttgatacaatctcttctatctcctgagttttttgttttctggtaaacaattttatctgtggagttttctggagttgctagtggaagaatctgtctcacagctaggcgattatctttcggatgaatttcatgggaacgatgatggtatagtgccagactcagcgtatgaggatggaggtcagtttccaattctagttagtaacaggaagaaacgaagaaatgatgatatgggtagtggaacaaaccatctaaagagtaatacttttatcaagagagaggcaaacatgttaggaaaaaatccatggcctgagaaagatagtggtggctcttcggtttctcgtgatacgggaacaggaaaagatgttcaggatatgacattggaggatacaaatacttcagatcatggtttcaatggtggccacgtagatgtggttgaaaatttctccactggggatcccatgttgtgtgacacttccgctgcaccgaatgatggcgtatataattatttccctaacagcattccggatgctgaaaatgatcttaacctttttcgacaatggagataaagaaaaaaatgatctcttctatggctggggtgacataggaaattttgaggatgtagacaacatgcttaggatttgggattcaacattcggcttggatagccttaataaagaaagtgact

SEQ ID NO: 122926 - DNA, 841 bp, Arabidopsis thaliana
taaaactaaaagaccaccgattcattagaaatccatccctctcactgtcaaaacccgagaagcagaaaaaagcaaaaaacagatttcgaagtttcgacgcctctctattcttcgatctctttcatatttgaatcgttcaccttcttgccgatcttcggagtatattacaaggttcttaacggatctctaaatcttctgatttaagaagatgcttcctctatcgctgcttaaaactgctcaagggcatcctatgctcgtggagcttaagaatggagagacatacaatgggcatttggtgaattgtgatacttggatgaacatccatctgcgtgaagtcatatgtacatcaaaggacggagatagattttggaggatgccggaatgttatatccgtggtaacacaatcaagtaccttcgagttccggatgaggtgattgataaagtacaggaggagaagacacgcacagatagaaaaccaccaggtgttggacggtgaagaggtacgtggtgtggatgatggaggagccagaggcagaggcagaggaacttcaatggggaagatgggtggcaacagaggagcaggtcgcggccgtggttgatgcaacaagttttaaagactcgctgccaaatctgctaacttcccattgtggagaaaaccccaagttacataagaagttggtctgttgttggttttctattaagtatgtaagggatagggagtgtgtttttcgattctccttgtgatcttttcgaaaaatgaaatttgtcttttgcctttttgtggtatatgtgaaattccaattgttttcatttgcgcttaaaaatgaatctttcaggtctt

SEQ ID NO: 122927 - DNA, 1061 bp, Arabidopsis thaliana
  unsure (1)..(1061): unsure at all n locations
atgatacttcagctctctacgactcactattgggaaagctggtcacgcctgcaggtaccggtccggaattcccgggtcgacccacgcgtgcgggataagcagataatggatctcatgaacgacaacagcaacaattcacaagacggcgatcatcagaactaccgtgtcggcgataatggattggaatcgaagaaggaagctatcttccctagctatgatttccaacctatgcgccctaatgcctccgccggattgtctcaccacgctttagatctcgccggatctgttaattccacggctgctagggtttgggatgcgtctgatcctaaaccggtttcagcttcttccgcaagaagttatggctctatggactctctcgaaccttcaaagttgtttgctgagaaggatcgaaattcccccgagtcagcgattatatctgcgatcgatcggacaatgaaggcccatgctgataaattgttacatgttatggaaggtgtcagtgcacgtctaacgcagctggagaccagaacccgagatctcgagaatttggttgatgatgtaaaagtgtctgttgggaacagtcatggaaaaactgatggtaaattgagacagcttgaaaacatcatgttagaggtgcaaaacggtgtacagttgttgaaggacaaacaagaaatagttgaggcgcagttcaactttcaaagctccagttatcaaaggtaaaccagcagccggagacacactctacacatgttgaacccactgctcagccgcctgcatctctgcctcagccaccagcttctgctgcagctcccccgtctcttactcagcagggcctcccaccacaacaatttatccaaccgcctgcctcacagcacggtctctcaccaccttcattacaactgcctcagcttcctaaccagcttctctccccaacaaggggccttatttccctccgtctggtcaagtcccagccacctccaacaattccagcctccttatcaacctcctccaccaacccagtcatttggatcaaacccccttttccaggcaacttnnttaaa

SEQ ID NO: 122928 - DNA, 576 bp, Arabidopsis thaliana
  unsure (1)..(576): unsure at all n locations
nnnnnnnntctctacgactcactattgggaaagctggcacgcctgcaggtaccggtccggaattcccgggtcgtcccacgcgtccgctttctctatctccatcaatggctgcttctgtcgaaactccttcacctaatcatacgaacaacgaaggaacacgcttgaacatggtttctgcaacttcttttgattcttcttctccatcggttagtccatcttcagacaaacgtctctggagcaatgtacgtaacagggttgatgttcttctcgaagaacatagcaaaaatcacaaacccgttaccaatacgattgctatagaatcagagagatcaaagagatttaagaatgattcgatgcttttgcttaaagggtttgattctgtttctcatactctgtctctcctttctagtaatctcgacaatgcccttcagggagttagagaattagctaaaccaccttcatattctgagatactccattcgaatctcaaagctgatcagattcaacgacaacagaaagaagaagatgaagaggaagaagagagtaaagggaagaagaggaaacacgaatctgatg

SEQ ID NO: 122929 - DNA, 1070 bp, Arabidopsis thaliana
  unsure (1)..(1070): unsure at all n locations
tgcaagaagagaatctgcttacaaaagaaagaaggcagtgttaagtctctgatttcttcttgataacattactactatgtacagattcagcaacacagttattggggtcttaaaccttctcaccttactagcctcgattccaatcatcggaaccgctttatacaaggcaagaagcagcacgacatgtgaaaacttcctccagacgccgctacttgttataggattcatcatactcatagtttcccttgcgggattcataggagcctgcttcaacgtggcatgggctctttgggtgtacttagtggtcatgatcttcctcatcgctaccctaatgggtctaacgctatttggtctggtggtgacgagccaaggaggtggagtggaagtgccagggaggatttataaagagtataggcttggagactatcatccatggttgagagagagagttagggatcctgagtattggaactccattagaagctgtatcttgagttccaagacttgtactaagattgagtcttggactacacttgattatttccaaagagacatgacttctgttcagtcgggatgttgtaagccaccgacggcgtgtacgtacgaagctggagtagtggacggaggaggagattgcttcagatggaacaatggagtggagatgttatgctacgagtgcgatgcttgcaaggctggtgttctcgaagagatccgtctcgactggagaaagttatcggttgtcaacattctcgtcctcgtcctcctcatcgcggtctacgccgctggttgctgcgccttccacaacactcgccacgcagctcatccttaccatccatctgatgataaccgcatgaccagagtccgtcctcgttgggactattactggtggagatggtggcacgnaaagaaagagcagctttactaaaagccgcatcgtttttttggtcttaatcattttctttttagnaaactgggttanggaaacacaagntagtttaaaatgttgtgtagcttgtncngnaatcatcaagggttggaantttcncnggtcatggtnntgcttatttcgg

SEQ ID NO: 122930 - DNA, 475 bp, Arabidopsis thaliana
aaacaagattattagattaaggaggagaacacatatcatatttcaggaaagggtgaaaaaacagatcctaaattagatgtaaacaaaaactattttgtctagttgtcattttttcttgtcttgtcctaatttacaacttgtcatttcaatacaaaatattgaaaaaggagaaacaaattgaagaaaaaaaaccaaaaaaaaagaatttgtcacaagatgttgataatcgcctgcttcttggaacaccctaacgaaaacaaatcatcttcccgagatctcttcttgccaacacactctactgcgacgtcgtttggtttctcgttactcacattgaaaatgttgactccgaatagcctaaccacagtctgaaccggactagaccggactttccagtggatatacaattgccggtctggtccggttgatctctcgaaacaaacccacgcgtccgcggacgcgtgggcggacgcgtggg

SEQ ID NO: 122931 - DNA, 534 bp, Arabidopsis thaliana
gctctccacgactcatattggaaagctgtcgcctgcaggtaccgtccggattccgggtcgacccaccgggcgggacgcgtgggcgaagccaaacacacaagctctctctttctctcaacaacttcaaaagccggcaggtatgaccgagacctccgaagaaaaacagaacatttctagggtttaactctgatccaccacattaccaaaactttcttcaactaggtgatcaaaaaggagtcctttttcattttgagcttctgggtctttggcttctgatttcgctataaggaagagaaaagtcaacggccatggcgggtcgtagagatagaagccaacaactccgtggatctcgaattgcgatcgccatcctcatcggtatctttatcggttgcgtgtgcgccgttctgttcccttacgggttcttcaactcaagctcatctctcaaagcaagcgaacatctttcgaagtcaagcaaccaggttggatcatcagcttgtgaatcgccagaacgagggaaaatgctaaaatcagact

SEQ ID NO: 122932 - DNA, 454 bp, Arabidopsis thaliana
gtgttgattcgttcgacgttttgtctcctacgattcgtagagcgtttcagttttcgatttctccgtcgtctaactcgccgccggtgagtccacgaggtgactcggactcgtcgtgttcgttactgagtcgttcactcgggtctaatctgggaaacgacgtcgttgcgtctcccaggaatccgcaacttaataaagtgaagtcctccccttcctcgtcatacaacaatcaaatccgaaggatacggttccggatccgggcccccccgtggtatcggttttgggtcctggttcccgtaccttaccatctacaccgacccgacctggttttatgaacatttgggagaatggcttggaggaagaaccggcgatggaacgggtcgagtcgggtcgtgaactgcgagcgcagctgttcgagaagctgagcaaagagaattgcatgggtcggattgaaccg

SEQ ID NO: 122933 - DNA, 521 bp, Arabidopsis thaliana
ccagctctaattcgacacacatctatggaaagctcggcacgcctgcagtgtgccggtccgcaatacacgggtcgacccacgcgtccgcccacgcgtccggttccaacagctgctatagcacctgcttcagcttgtgctagagctgtacatagtgctcttgttggcatcagaaatagtcttgatcctgaacataaaaaggaatccatggaaaaatacttaggccccgacaaacaaaggaagcaggaccaacaccgataaactcagattatccatgttggtgtgacttcccttttacatatagcatgtgtataggtttgaatagagtaaaagtgcagaaccattcttttaaccatcgaaaagccaaagagatgggaaaatctttggtatagaatataaatcttttaaacattatagaatcattcagtttgtttgtttctgtacataaacattttcgatcttgctccattggaaatgtaccccaccaagtttgccaaatgagtgaaagtgtacagtttttttct

SEQ ID NO: 122934 - DNA, 530 bp, Arabidopsis thaliana
ctcaggtaccactctacacacattatgaggagctggcacgcctgcagtgtgccgggcacgctatacaggggtcgacccacgcgtccgaaaacctctcctgatcccgtaatgaagaaaacgaagacgatggtggcttccatctccacccttattagacggacctatccttcaactaaccagtgtaattcactcgcgacgattcaatcacaaacccaattgcctcgcgaatctctgcaacatcattcttcagctgagggacgactccgattctccgggagagttttctgctcggaatctggcgccggatgctggaactgtggcgagaaagctgcctttttgttctgtaactcatgccgtagcattcaacctgttgatgactccgtcgactattttcagatttttggcctggagaagaagtatgagatagatcctggaagccttgaaggcaagtacaaagattggcaaaagaagctacatcctgattgagttcataacagatctaagaaagaacgagactacgcagccgagcg

SEQ ID NO: 122935 - DNA, 413 bp, Arabidopsis thaliana
acgactctccgccatggctgctaaacctcttcttcttcctcttctcctccttcttcatctctcaatcaccttagctcaaaacgacacaaatgctctcacactcttccgtctccaaaccgacacacacggcaacctcgccggaaactggaccggctccgacgcttgtacctcctcatggcaaggcgtttcttgctcaccatcttcacaccgcgtcactgaactatctctcccttccctctccttacgaggaccattaacctctctctcctccttagaccaacttcgtcttcttgacctccacgataacagactcaacggcaccgtttcaccactcacaaactgtaaaaacctcagactcgtttatctcgccggtaacgatctctccggtgagattcctaaagagatatcctttc

SEQ ID NO: 122936 - DNA, 481 bp, Arabidopsis thaliana
cccacgcgtccgtttctctttcgccattaaaactctgtttcctttttcagagattctcagagaagattcattttaccctaagaaaaaaaatgtcgaacattcttcagaatcggcgatcttcgttttcctcttcgacgaaatcttcattagcgaagcgtcaagcaccatcttcatcggagaattctgttaaacttatgccggcgatgacgaagaaacgagcaccgttaagtaacattaccaatcaaaagatcgcctcacgattacaaaattctgattcggtacattgttcaaacaagtcagcgaaattgaagatagcaccaagtgtttgcgttaatgccagtttctctagcaatctgcaacaaagcatagttcctcacaaagttgcttcttcacctagcaaatctgatgatggctcagtatcaatggacgagactaggtcttcaagtgattcctacaagagttctcatgttgagtatatcga

SEQ ID NO: 122937 - DNA, 576 bp, Arabidopsis thaliana
ttgggaaactctgtgtgtaggcggaactacagaaccaagagcctctttctaatcggagttactttaatccccttgaaccatgtcaaagagaaagactaaagagccaaaggtcgatgttgtgactcttggaccatctgttcgtgagggagagcaagttttcggtgttgtccacatctttgcttcattcaacgacactttcattcatgttactgatttgtctggtcgtgaaactcttgtccgtatcaccggtggaatgaaggtgaaagctgatagagatgagtcctcaccttacgcagctatgcttgcagcacaggatgttgctcagcgatgcaaggaacttggtatcactgccatgcatgtgaagctccgtgccacaggtggatacaagaccatgacaccttgtcctggagcacagtctgcccttaaagcccttgctcgttccggcattgaaaatatgacgtattgaggatgtttctttcatcccaacagacagtactctcatattggttggtagaagaggaagatagctcttgagtttcccgctttgtgtgatgtttctattaagctctatgtgtt

SEQ ID NO: 122938 - DNA, 515 bp, Arabidopsis thaliana
ccagctctattctactcacattatggaaagctgtgccgcctgcaggtaccggtccggtattcccgggtcgacccacgcgttcggagactgatagcacaagagatacgattagaacagctaagatatggttggcggctgctagaaagatgaaggaagcggccacagaggctgaggcggttgcaatcgcagagattgaggctgttactggaagtatgaatgttggtaaggccgaggctgtgactatctctgctgaagagtattctgtgcttgctcgtagtgctagagacgcagaggaagaggcgagaaagcgagtggaagatgcattgtcgagagttgaagaagctaactgtttcaaagaaggatgttctgaagagagttgacgaagcggctcaagatattgaatccagcatgagagtattgcaggaagctgtgcagagagttgacgctgctaatgcttcgaagatcgaaccataagatgcgctgcgaacatgactgtcacagaatggacagatgat

SEQ ID NO: 122939 - DNA, 511 bp, Arabidopsis thaliana
  unsure (1)..(511): unsure at all n locations
nnnnnnnnnnnnnnnnnnnnnnnnnnnnnnnnnnnnnnnnnnnnnnnnnnnnnnnnnnnnnnnnnnnnnnnccacgcgtccgcaaaatccttcacttgtagcccacaagaggtcatctcaggaggtgatttcggtcagtgcacgtattgtcatctcctacttggtctccattactccagccaagtagagtttgtcgcctctgctttttcttacaccattgtccaagctttctcctttttcgaagaaatctggagagagatatgtgctgacatcaaggaaggtaatcttagctcaagaatcactctgcccaagatgagaaaagctgtattggctctgatcagaccaaacccgtctcttgcttctcatatcgaggagatctgcttagagctggaaacaaatctcggatgggtcggtttgatttcaaagctttggccaaatgcaaaatttatctcctcaatcatgacgggttctatgctgccgtacctgaataagctgaggcattacgctggcg

SEQ ID NO: 122940 - DNA, 428 bp, Arabidopsis thaliana
  unsure (1)..(428): unsure at all n locations
nnnnnnnnnnnnnnnnnnnnnnnnnnnnnnnnnnnnnnnnnnnnnnnnnnnnnnnnnnnnnnnnnnnnnnnnnnccacgcgtccgatggcattgggttcctaaatgtccttcgttgccggagaaatggagttgtgggtttcggtggttctcttttgtcccaagcttgtctgcttctgtttagttgttatatgatgatggattgatgtctgtattcatctttgttatagagtatttggtattgtttgcgttcaaatcttcattttttggggtcttctatcaattgtttctttggtatctctttgtgaaataaaagattggtaatattgggtattgtttgttttcattttccatgtgtacgtacttttaaaatgaaaccatagtaattagcaaaaaaaaattgtttttgtttaaaacaaaanaataacaa

SEQ ID NO: 122941 - DNA, 932 bp, Arabidopsis thaliana
  unsure (1)..(932): unsure at all n locations
atacgactcatttagggaaagctggtacgcctgcaggtaccggtccggaattcccgggtcgacccccgcgcccgcagcgaatgaagctggtacgtttgcaagaaacgggcttgtggaacaaataagcatgacttgggacaaatctgactatttttggtatataacagacattacaatcggttccggtgagacatttttgaagactggtgattcacctcttcttacagttatgtcagctggacatgctcttcatgtgtttgtcaatggtcagctttcaggaactgcttatggaggacttgaccacccaaaactaacctttagccagaagatcaaactacatgcaggtgtcaacaagattgctcttctgagtgttgcagtgggtctcccgaacgttggtacacattttgaacagtggaataaaggagttcttggtccggtcacattgaagggagtaaactcaggaacatgggacatgtcgaaatggaaatggtcctataagattggtgtaaagggtgaggctttgagtcttcataccaacacagagagttccggtgtgagatggactcaaggatcatttgtggcgaagaagcaaccattaacctggtaccaggctacgtttgctacaccagccaggaaatgaaccattggctttagacatgaacacaatgggaaaaggtcaagtttggataaacggtagaaatattggacgtcattggcctgcatataaagctcaaggatcttgtggncgttgtaactacgctggacctttcgncgcaaagaaatgcttaagtaattttggtgaagctcccaaagnntggtcccatgtnccccggttccatgggtttaggctnnaaaccntttaggtnttttcnaagggttnaggnggggnccctacggaattntttgggtaaaaggcnttaaaggttnnntta

SEQ ID NO: 122942 - DNA, 598 bp, Arabidopsis thaliana
gaacagccggtgagttcatggcttcaagctatgactatgacgctcctctcgatgaatacggcttaccaagagaaccaaagtatagtcacttgaaagcattgcataaagccatcaaacttagtgagccagctttgctttctgctgatgctaccgttacatcgcttggagctaagcaagaagcttatgtgttctggtctaaatcatcttgtgctgcgtttttatcgaacaaagatgagaactctgcagcgagagttctgttccgtggattcccatatgatttgcctccttggtcagtcagtattttacctgattgcaaaacagaggtttacaacactgcaaaggtcaatgcaccaagcgtacacaggaatatggttcctactggtactaaattctcttggggatcattcaacgaagcgactcctacagcgaatgaagctggtacgtttgcaagaaacgggcttgtggaacaaataagcatgacttgggacaaatctgactatttttggtatataacagacattacaatcggttccggtgagacatttttgtaaaggcctggtgattcacctcttcttacagttatgtcagctggacatgc

SEQ ID NO: 122943 - DNA, 376 bp, Arabidopsis thaliana
cttctcttcctctcttttccgtttatctctttcgcagcttctcaggccgcgaagactttcattttccgtatcgatggtggatctatgccttctattttcccgacgcactaccattggtatagcaccgagttcgccgaagaatctcgaatcgtccatgtttaccacacagtcttccatggtttctccgccgttgttactccagatgaagcagataatctccgtaaccacccagcagttcttgctgttttcgaagaccgacgtcgagagcttcacaccacacgttctcctcaatttcttggtttacaaaaccaaaaaggactatggtcagaatctgattacggatcagacgtaatcattggcgtttttgacaccggaa

SEQ ID NO: 122944 - DNA, 279 bp, Arabidopsis thaliana
tctatcttcttactttcagacttgtgtccctgatttacttaaggttgctctgacctgtttggataacgtagctgacactgatggatcaatcaggggcatgagatctaagattgctgggtttcttgcaagcaacacacagcggaactggcctcgagatttgtacgagaagatagctcgaagcttttgaatctaagaaattcgaatacttgtctaaaaaagatcttgtaagaagctgttaaacccatttttgttacttaacctcgaggatcactttttgtt

SEQ ID NO: 122945 - DNA, 492 bp, Arabidopsis thaliana
cccacgcgtccgccagaaaccaaatcacacttacatcataaatcctctgtacataacccaaaaaaaaccctagaaacgaagaaagatcaagatgggtttgattagcaaagaagagataagcaaaacaagaagatattcatcttctctttggagaggtatcaaaacgatctttgttctcttcactatgtttctctctttcatcatcttttctgctccgatcttcctcgccgtcgccgacgccgtcctcccctccgcaatcctctcatcctcctcaccctccctcaaccgcctatctccttctagttttccggcgacgatttattcttacctcagtaactacgatttccgttactctctcatcgacatacctctcatctccataattagatctgccattatactatgcgtttacgggctttgtgacggaccaaagttatcaaggggaccatatctgacaataacgatgatatgctcgatatcttcactgatata

SEQ ID NO: 122946 - DNA, 777 bp, Arabidopsis thaliana
  unsure (1)..(777): unsure at all n locations
nnnnnnnnnnnnnnnnnnnnnnnnnnnnnnnnnnnnnnnnnnnnnnnnnnnnnnnnnnnnnnnnnnnnnnnnnnnnnnnnnnnccacgcgtccggtcaggaccttgtggcagctaccagcaattccggcccttgtggaggtaacaatggtgttgtaaagacaccttgtgagtacgttgtcagctatggagatggatcatacactcgaggagacttggcaagtgaaagcatcctattgggcgacacaaaacttgaaaactttgtctttggttgtggccgaaacaacaaaggtctgtttgggggatcctctggtttaatgggtttgggaagaagttcagtctctttagtctcccaaactttgaaaactttcaacggagttttctcatactgtttaccttctcttgaggatggagcttctggctcattgtcctttggtaacgattcctctgtttacacgaattcaacttcagtttcctacacgccgttagtacaaaaccctcagcttcgttccttttacattcctgaatctcactggtgctagcattggtggcgtgggaactgaaatctttcaaagctttggcagagggggattctaatcggttcaggaacgggtntccacaagattgccaccttcccatttacaaagctgttaaggnaggggttcttaaaacagttttccgggttnccaanngcnccggggtatttaattttngggcattgnttttnaccccnnaaagttttgnggcanaagggttccccttttcaaaatgttntnctc

SEQ ID NO: 122947 - DNA, 591 bp, Arabidopsis thaliana
  unsure (1)..(591): unsure at all n locations
taaaaaagctttcattttctcactctctatcatctctgtcaaattcaaaattcgagtattcgaaaaatccagctccaaaatcgttgattagcagcgactaaaacccaaagtttcctccaattttaacgaattacttcgtgggtcaatctcataatctgggaacactctttcggttttgattttgttggcagcatctattctaagcgaaatgatgggaagtaaaagagaagaagagaggaacgagaagattattcgtgggcttatgaagcttccaccgaatcgtcgttgtatcaactgcaatagccttggccctcaatatgtttgcacaactttctggaccttcgtatgcatggcttgtagcgggatacaccgcgaattcactcatcgtgtgaaatctgtgtcaatgtcaaagtttacttcctaaagaagttgaagtacttcaaaatggtgggaatcagcgcgcccgagaaatatatttgaaaaactgggggcaccaacggcagaggcttccaggaaacagtaatgctgggagagtccccgaattttccaaaatgggatgtgcaaaagaaattccgggggaatgctcngggc

SEQ ID NO: 122948 - DNA, 589 bp, Arabidopsis thaliana
  unsure (1)..(589): unsure at all n locations
ccttgcggtcccccncttacggtaagnttntggnatggatgcatnccngtcaacccttcccagntggaggccatttccgcccggggcttttcggggcccctcatgattggtgtgacgcctttgacacatccccccgaacgtttgatcttttccacggcagggacccccttcaccagaaccccccaagccccgtggatgcagctttgaagatctgcttatcgagatggatcggatactacgcccagaaggatttgtcataattcgtgacacaactgacaatattagctatatcaagaagtatctgacattattgaaatgggataaatggtccacagagacaactccaaaaggtgatcctctgtcgaccaaagacgagatagttttgatcgccagaaagaaactttggagcttgcccgccatttcagtgtcctgaaatctaacagtcaacaggcgaatgaatgagatttacagcatcagaggcgcgtagctgaggaaaatactcagcaatggagaagtgtaaattacacgacattcatacatagttgttaacttgttatgcatttgttgtaggaaactgcnaaatcttctt

SEQ ID NO: 122949 - DNA, 1269 bp, Arabidopsis thaliana
  unsure (1)..(1269): unsure at all n locations
atgatatnnnnnnnnnnnnnnnnnnnnnnnnnnnnnnnnnnnnnnnnnnnnnnnnnnnnnnnnnnnnnnnnnnnnnnnnnnccacgcgtccgtacggctcgagaagacgacagaaggtgaggaaagcttacacaatcaccaagtctagagagagttggactgaaggagaacacgacaagtttctggaagctcttcaattgtttgatcgtgactggaaaaagatagaagattttgttggttcaaagacagttattcagatcaggagccatgcccaaaaatactttctaaaggtccaaaaaaatgggactttagcacatgttccaccccctaggcctaagcgcaaagctgcttatccatatcctcaaaaggcatcgaaaaatgctcaaatgtcgcttcacgtttccatgtcctttcctactcaaataaataacctgcctggatatactccatgggatgatgatacatctgcattgttaaacattgctgtaagtggggttattccaccagaagatgaacttgatactctttgtggagcagaagttgatgttggatcaaatgacatgataagtgaaactagtccttcagcatctggtatcggaagctcaagcagaacactatcagattctaagggtttgagactggcgaaacaagctccctcaatgcatggtcttcctgattttgctgaggtttataacttcattgggagtgtgttcgatcctgacagcaaaggccgcatgaaaaagctcaaggaaatggatcctataaatttcgaaactgttttgctgttgatgagaaacctcacagtgaacttgtcaaaccctgactttgaacctacttctgaatatgttgatgctgcagaggaaggtcatgaacacttaagctcttagctgtttgtgcactcaacaagttatatatcttcttgacgacttcttgctcgcaacaactctctaccagctatcaaatgcatcgtacggttgttgtctgaggagaacataactgagtcgtcgtcacaaacaagaggaacatatgcagtttcggtcagaaccagtcgtgtgaatggtagatatatgtatgtgtgtgtagaaaatggttaccaattgtatcttctttttgataattattttttcatgccttttgtaatatgtaagtttctttacctcgttctctgattggttattttctggttatctgtttaaccaaaagctatgtaacacagtagcaaattgttacttaactcggaagtgagatacatacctctgttntattgca

SEQ ID NO: 122950 - DNA, 498 bp, Arabidopsis thaliana
  unsure (1)..(498): unsure at all n locations
cccacgtcgccgtttctctctctaaccccttctctcttcagtctctctctctctagacgatctctatcttgaataaaataccgataatgacctcaaccaatccggtggtcgccgaagtaataccggcggaaacttctacagatgctacagagacgacgattgcaacgacggaagctggtgaagcaccggagaagaaggtgaggaaagcttacacaatcaccaagtctagagagagttggactgaaggagaacacgacaagtttctggaagctcttcaattgtttgatcgtgactggaaaaagatagaagatttttttggttcaaagacagttattcagatcaggagccatgcccaaaaatactttctaaaggtccaaaaaaatggggctttagcacatgttccaccccctaggcctaagcgcaaagttgctcatccatatcctcaaaaggcattcgaaaaattgctcaantttcggttnncgtttcnatngcctttcc

SEQ ID NO: 122951 - DNA, 528 bp, Arabidopsis thaliana
  unsure (1)..(528): unsure at all n locations
cggacgcgtgggcaagacctcactgctccattttttcatcaaactgggctacaagaccacactgctccatttaatcctcaaactgggctacaagaccacactgctccatttaatcatcaaactgggctacaagacctcactgctccatttaatcctcaaactgggctacaagacctcactgctccatttaatcctcaaactgggctacatgacctcacttctccatttaatcctcaaactgggctacaagacctcactgctccattaaatcctcaaactgggaatcgcaatgacccgagaagctcctcctttctgtataatcaaggccattttgacttctctggtggtaatgatgatgatccttatggcttttctgcttccatgagacatagaccaaaaatgtaaaaaaagaagaagagaagagaagcaggatttacaaatccaaccgcaaaagatcagaccgaatagnnnnnnnnnnnnnnnnnnnnnnnnnnnnnnnnnnnnnnnnnnnnnnnnnnnnnnnnnnnn

SEQ ID NO: 122952 - DNA, 445 bp, Arabidopsis thaliana
tgttcataaaccctaaaaatcctctctttttctcaaccttgattcttagccatggagttctggggaattgaagttaaatcaggaaagccagttacagtgactcctgaagaaggcattcttatccacgtttctcaggcatcgcttggagaatgtaaaaacaagaagggagagtttgtgcctttacatgtaaaggttgggaaccagaacttggttctgggaactctatcgactgagaacatccctcagcttttctgtgatttggtattcgacaaggagtttgagctttctcacacttggggaaaaggaagtgtttactttgttggatacaaaactcccaacattgagccacaaggctattctgaggaagaagaggaagaagaggaagcaagttcctgctggggatgctgccaaggctgtaggctaacccaaaggttagccttcaaga

SEQ ID NO: 122953 - DNA, 707 bp, Arabidopsis thaliana
cacacgcgtccgctttttcatgttcgtagttgttcctctggttatcctcatcaacgggacccttgaaaccgtgtagccatcttgcttaatgattagagtcttaaagctgtgctctttcttcatcgatttgagcaagtgatcttggaaggctcttgagttctgaattccttgtaagcaatcatggcagggaaaagagaaaactttgtgagggtggatgatttggactctaggttaccatcatcatctgtagccttccaacagaactacgcctccaatttcagtggacaacttcatcctattcatgcaagcaatgaaacttctagatccttcaagaaaggtatccagaagggttccaaagggcttaagtcgatcggacgttcacttggtttcggtgtttatcgagcagtgttcccagaagaccttaaagtatctgagaagaagatatttgatcctcacgataaattccttttgtattgcaataaattattcgttgcgtcatgtattctttcagtgtttgtggacccttttttcttctatcttcctgtgattaatgctgagtccaagtgcctgtgtattgacagaatactggctatcacagcaagtacattgcggacttttatcgatgtgttctatctcgctcacatggctctccagcttatgactgcttatattgcaccttcatcacgggtctttgggcgatgtgaact

SEQ ID NO: 122954 - DNA, 531 bp, Arabidopsis thaliana
cgactcactattgggaaagctggcacgcctgcaggtaccggtccggaattcccgggtcgtcccacgcgtgcgatcttcacaaaactcaccttgaagagaggattaagaagattgtgccggagtttccaagaacagcttctagcaagctactgagaagagtcttgagagatcagattaagcaagaactactatccttacgaagtcgaatataaagccttgatcttaagtttaactagaataaaataagatctgctgagtagtagttgatctacacatgattgggtactgctcggtccaaataagaaaaccgattaaatcaaatctaccggtccttgaattctctagcctgattcacatttacatgactaaacactttgactttgttatgtttgtgtttgtgtttggtgtatatatttcatatccgattataatcttaaatttcctcaaaaaaaaaaaaaaaaaaggggcggcgctctagaggatccaagcttacgtacgcgtgcatgcgacggcatagctcttctatagggg

SEQ ID NO: 122955 - DNA, 472 bp, Arabidopsis thaliana
atgactgccggcactaatccgactcactttagggaaagatcgtacgcctgcaggtaccggtccggaattcccgggtcgacccacgcgtgcgatcgtcacttttctttctccacactttccgcaagattgttctgttcttcaaacgattctaagatgaatggagaagaagtgaaaacgagtcaacctcagaagaagcttcagaaccctactccacgtttaaacgagaggattctctcatctttgtctaagagatcggttgctgcacatccatggcatgatcttgaaatcggacctggagctccagtgattttcaatgtggttattgagatctcaaaggggagcaaagtcaaatatgaacttgacaaaaaaacaggtctcatcaaggttgataggattctttattcttcgggtgtgtatcctcacaactacgggtttgtcccacgcacactatgtgaagacaatgaccctatag

SEQ ID NO: 122956 - DNA, 1196 bp, Arabidopsis thaliana
  unsure (1)..(1196): unsure at all n locations
ttccnnnnnnnnnnnnnnnnnnnnnnnnnnnnnnnnnnnnnnnnnnnnnnnnnnnnnnnnnnnnnnnnnnnnngaccacgcgtctataaagatctcatctttctcttctccttcttccctcctgtatctgtattctcttatcagacaaaaagttccaagatttttctaatagcgatggattgtgttgaatcttatttatccggagataattctgatgaatctccggtgatgcatacttggttttctccgtctccgtctccgtctgactcttcctcttctccttcatcttctgcttcttcttccattgggaggaatagcgacgacggtgagaaatcgtcggaggacggtggagatgacgccggagagaatgaagttgagtctccgtataaaggtcctcttgaaatgatggaatctctcgaacaagtcttacctgttaggaaagggatatcgaagtattacagtggaaagtcaaagtcttttactaatttaacggcggaggcagcttcggcgttgacttcttcttcgtcgatgaaagatttagcgaagccggagaatccttacagtaggaggaggaggaatctcctctgccatcagatttgggaaaataacaagacgactccacgtggtgggatctcgaagaaacacgttatgagttctagcagaagcgctttgacgctagctatggctgttgcggctggtgtgatgaccggagaaggatcttcttccggaggtgactcgtcgccgggatcaagtccgacgacttctggatctcctccgaggcagctacatcatcatcaacatcagatgaagaagcttcctccgttgtatcctaggagtcaagggtcttttggtaatttgacttcgtctcagtcgtcgttgggtttttgtgcctggagatcgttttcggtggctgattttccgaggtgttttccggcgacggcgagtgggattgggtttaatgactcgtaggaaatgatgataacaattgttttgttaaatttttatattttgaagttagtaacaaccacatccggagaatgtatgtgtatagaagagtttcaaaacttttgaatggatcatccacatctttttttttcaaaaaaaaaaaaaaagggcgaccgctctagaggatccaagcttacgtacgcgtgcgtgcgacgtcatagctcttctatagttgtacctaatagaaatcg

SEQ ID NO: 122957 - DNA, 500 bp, Arabidopsis thaliana
  unsure (1)..(500): unsure at all n locations
accccgncnaangancttctnccggagntgacacngtcgcccgggacccaggcccgncgacttctgnatcnacctncggaggccagctacatcaatcattcaacatcagattgaagaaagcttcctcccgttgtatccctaggagtcaagggtcttttggtaattctgacttcgtctcagtcgtcgttgggtttttgtgcctggagatcgttttcggtggctgattttccgaggtgttttccggcgacggcgagtgggattgggtttaatgactcgtaggaaatgatgataacaattgttttgttaaatttttatattttgaagttagtaacaaccacatccggagaatgtatgtgtatagaagagtttcaaaacttttgaatggatcatccacatcttttttttccattttggttttttgttctatcaattacatcttttcaaaaatctttgtcatatcgaaatctgttatctgtgtggaaagtccaacattcttcttt

SEQ ID NO: 122958 - DNA, 488 bp, Arabidopsis thaliana
  unsure (1)..(488): unsure at all n locations
caaaaagttccaagatttttctaatagcgatggattgtgttgaatcttatttatccggagataattctgatgaatctccggtgatgcatacttggttttctccgtctccgtctccgtctgactcttcctcttctccttcatcttctgcttcttcttccattgggaggaatagcgacgacggtgagaaatcgtcggaggacggtggagatgacgccggagagaatgaagttgagtctccgtataaaggtcctcttgaaatgatggaatctctcgaacaagtcttacctgttaggtgagaaatctgattctttctctctgtttttgttaaagtaacgatttttaagacttaaaacttctaaattcggtatcagttttggtttctgattttgttgtgtgaatgtgtaggaaagggatatcgaagtattacagtggaaagtcaaaagtcttttacctaattttaaccggcggaggcagcttcggcgtttnct

SEQ ID NO: 122959 - DNA, 332 bp, Arabidopsis thaliana
gacaaagaaggtgtgaagaagttgggaaaacaaaattaacgcttgaagaatctaaaggtttagcttttttctcaatccgatcattcaccgagaaatattctattttatatatttatgtgaagctcttcaattgaagaaagaagaagaaaagacaatcgtcaaatgcttgactttggtttcagttcttcttcacgacagctcaaggaagatcggctctttgatgggatgggacaccaagaaatcaccatgggtttatgatgctatcaattactagtagtacgtgttatcttctgaatatatatcatggcatcctctggactgggaaatggagt

SEQ ID NO: 122960 - DNA, 342 bp, Arabidopsis thaliana
aattcctccaccatctcctctcctacttctcatcttcatcaccaccgtctaaagattcaaccttttgtaactgcttccaatggcgttagctctctccgtcgcacctacatcttcttctttgtcttccctcctctctcggacccctaacccttctcctaatttcagaacaactcatctgaatttcggttctcaaacgaggatttacacaatcaatcctctccttagatcctttaaatgccttcaatcatcttcaagagacgtacatgcgtcacctttctcaatctcagctattgcttcttcttcttcttcatcacagaccacagagcttgtaccctataagct

SEQ ID NO: 122961 - DNA, 372 bp, Arabidopsis thaliana
gtatactggtaaaaattggtggtctcttctttgtctccgagtatggagaaaatgagagggaagcgaatcagaccaagagattccggcgagttagtcgaagatgggagatctgaaagcgagcgtaagacgaggaagaaagagaatgatgttgtgagcaaaggaagaatcggaagaggaagaggaagaggagaggtttcgaagcgatctattgaaatagacatttctaatcccgagaaggatattaagcctgacggaagcagaaagtgtttgggttcgacgtgtcatcattgtaagatcttgacgagtgagagtgatcttatcttctgttcaaagtgtaacaagaagtgttattgctttgactgcatcaagaga

SEQ ID NO: 122962 - DNA, 406 bp, Arabidopsis thaliana
aggacgcgtgggtttttagggatttcactttcctcttctctctctctctctctctgcctaacctcgatttctctcgatcgctcttcaccatggatctacgatcatgtggtccttcttgaagttttttgatctcttcttcttacgggtttttacttcgtttgattttcctgttgtttgttgttcaaggatcgagatttcgtggagctctctattcgcagcttggagattggacttgtttgaattggctcttttgtgatggaggatactcggtcagttgcttcactcatggactctacatcatccaagattcagcagcttcagaaggcgtttgctgaacttgaaagtcagcgtgctgtaacacttaatctgaagcggtagggacttgaggagcattttcatgggcttg

SEQ ID NO: 122963 - DNA, 540 bp, Arabidopsis thaliana
gctccagatacagagattttctgtgagggtgaaccagttaaaagggaggacgaagaaaggcttgatgacgttggttatgacgatgttggtggtgtcaggaaacagatggctcagattacggaattggttgaacttcccttgaggcatccacaactctttaaatcaattggtgtgaagccaccaaagggaattctgctttacggacctcctggatccgggaagactcttattgctcgtgctgtggctaatgaaaccggagcattcttcttctgtatcaatggaccggaaatcatgtcgaaactagctggtgagagtgagagcaacctcaggaaagcatttgaggaggctgagaagaatgccccgtctatcatattcattgatgagattgactctattgcaccaaaaagagagaagacgaatggtgaggttgagaggaggattgtctctcagctccttacgcttatggatggactaaaatcacgtgcccatgttattgttatgggagcaacagatcgtcccaacagtattgatccggctttg

SEQ ID NO: 122964 - DNA, 498 bp, Arabidopsis thaliana
ccgtccccaaaaacaaaggaaacaaaaaatcagtcggcgaaacgggaagagatctatcggaaatcttacggcggcggaagtcatggcgaacatagaatcagaagcagtcgatttcgagccagaggaggatgaccttatggacgaagaaggtacagctattgacggagctgatgtttctccacgcgcgggacatccgaggcttaagtcggctattgccggagctaatggcgaatcagcaaagaagaccaaaggccgtgggtttcgcgaggagaaagattccgatcgtcagcgtcgtctttcctcacgcgatttcgaatcacttggttcagatggccgtcctggtccgcagagatccgttgaaggatggattatcttggtctctggagttcatgaggagacacaggaggaggatataaccaatgcttttggtgattttggggagattaagaatctaaatctcaatctcgatcgccgtaatggttatgtcaagggatatgc

SEQ ID NO: 122965 - DNA, 368 bp, Arabidopsis thaliana
aagaatctgaaatttctacgtatccccttggacacgtctacgagagaggggacttcagatggagttgcatctcaaagaattaccatgttcaagaatattagtggccaccagggattttttctttctggctcaaggccggggtggtgtatgttgttcagagagcgactacgatttcattcacagctgtgcgacggatcaattgcggcctttactgttcttcacaatgtgaattgcaatcacgggttcatatatgtcacagcacagggagttttgaagatttgccaattaccttcagcatcaatctatgataattattggccagtgcagaagattcctctaaaggccacacctcaccaagttacttacta

SEQ ID NO: 122966 - DNA, 131 bp, Arabidopsis thaliana
atgatccaatgcttgtcttggagtattctatgcttgtcctgtaaagctgtccaactcaaaccatcgatcttgtttttgtctggaaatatctcagctgaccttgtcaattcgtatctgaagcagcatgctcc

SEQ ID NO: 122967 - DNA, 710 bp, Arabidopsis thaliana
  unsure (1)..(710): unsure at all n locations
cccacgcgtccgaatcgctcgccggcataaaagagagtcagaagaggaagaagagagttacaaggattgaaaatgaagggacgtcaaggagagagagttagattgtatgttcgtggaacagtcctcggttacaagaggtccaagtcgaaccaataccctaacacttctctcgtccagattgaaggtgtgaacactcaagaggaggttaattggtacaagggtaagcgtttggcttacatctacaaggcaaagacaaagaagaacggttctcactaccgttgcatttggggcaaagtcactaggcctcatggtaacagtggtgttgtccgttctaagttcacttcaaacctaccacccaagtcaatgggagctagagtcagagtcttcatgtaccctagcaacatatgaggaggctagatttcaacaagtatcggaaggaatcgccattatcatttctcaggagctgtagttttatctattcacttttattctagactctctgttggttttgattttatcttgagacgaagtaaaacattttttttcttgagatcatatactatcgagtattaatggaacttgagaaaagctatgatcccagtcattttccttatttaaaaaaaaaaaaaaaaaaannnnnnnnnnnnnnnnnnnnnnnnnnnnnnnnnnnnnnnnnnnnnnnnnnnnnnnnnnnnnnnnnnnnnnnnnnn

SEQ ID NO: 122968 - DNA, 523 bp, Arabidopsis thaliana
cagttttatttttgatgcaatagtcccatttattgctttcatttcagttgaattgaacaccactgattctgtaacttgagatttaagattagctgtttcatttttcttctctaatggcgaaaccttgtcaacaaggctatatctatttgaaaggttgtgcattgtagttaagagcaattagattataatcctttaagtataatagattgtccaagatttatatacttaagtgaacatggatcctgattcgatttcctaatgcaggaggctagatttcaacaagtatcggaaggaatcgccattatcatttctcaggagctgtagttttatctattcacttttattctagactctctgttgggtttgattttatcctgagacgaagtaaaacattttttttcttgagatcatatactatcgagtattaatggaaaaaaaaaaaaaaaagggcggccgctctagaggatcccagcttacggacgcgggcatggcacgtcaaagctcttctaaaagtggccaccct

SEQ ID NO: 122969 - DNA, 613 bp, Arabidopsis thaliana
gggaaaggctggaccgcctgcaggtaccggtcctgaattcccgggtcgacccacgcgtcggcagattgtatgttcgtggaacagtcctcggttacaagaggtactttcaattttcagtctttctctgtatgttcttagatttttcagagttcaatgttgcgtttatggttggagattgtagtgtttagtttcattattcttaagttatttggatttgaatattcatctatcgttttggatatcaatataagatctcgataaaagtttgtaactttgccacaactgatagatttcaatgataatgctctcagatttgtaatcttattccatggtttctgatttatggttgtgcaaagtgatgcatttttgctattgcttcctttaagattagcttttaagcagttggttgatagtttgattgcttatataaagcggattaaagattgattactaacgattaagtaatgtttcaggtccaagtcgaaccaataccctaacacttctctcgtccagattgaaggtgtgaacactcaagcaggaggtaattggctcaagggtaagcgtttggctacatctacaaggcatagaccaagatgaacggttctcactaccg

SEQ ID NO: 122970 - DNA, 441 bp, Arabidopsis thaliana
  unsure (1)..(441): unsure at all n locations
taaaaaagagtaagaagaggaagacgagagttacaagggttgaaaatgaagggacgtcaaggagagagagttagattgtatgttcgtggaacagtcctcggctacaagaggtccaagtcgaaccaatatcccaacacttctctcatccagattgaaggtgtgaacactcaagaggaggtcaattggtacaagggtaagcgtttggcttacatctacaaggcaaagacaaaggagaacggttctcactaccgttgcatttggggcaaagtcactagggcctcatggtaacagcggtgttgtccgttctaaggttcaccttcaaaccctaccacccaaagtcaaatgggngctttgagtcaanagtctttcctgtggccccctgcaaccattttgggggggggtnggttttcaagggagttttctggaaggaatnnnccnttt

SEQ ID NO: 122971 - DNA, 451 bp, Arabidopsis thaliana
tcgcgggtcgacgcaagactctaaagtgagtcgtattagacagaaggggactcgccaagaagtttcctttcctttgattgcacaactaatctcaaactaaaagatcttctctttaggcatacccagatctttctctctctaaagtctccacctttcacggttttttgcttctcacctgaatccaatcaatctcgccggagtgaattcaccttcctccggttgactcgtcggacttagtccgacctttcaattcgtagattctgtttacaattcactgatcgtttgattagaaatgggttacttgttcttctaagtctctctttagctgaaagtttgttgctttacgactcttcgatttacccttacttgttcaagttcttcatcaaattcgtagttatggcgataagaatcactttcactcactccacccatgctgctcggaatctcgtct

SEQ ID NO: 122972 - DNA, 673 bp, Arabidopsis thaliana
atgatacttcagcgtctctacgactcactatttggaaagctggcacgcctgcaggtaccggtccggaattcccgggtcgtcccacgcgtccgcttcaaacaacaatctttgcttctctctgagtgatcatctttcttgttcaatggctggtcaaaagatactttctttactggttatagctcttgttgttacttttgcagctgcggctcggcttcttgatgaagaaaatgcattctcagctaccacaaccacccttggctcaggttcaggttccaccggaattggttttggtgcaggaacagggtcaagtggttcaggttccacgggattcggttttggtgcaggatcagggtcatctggttcaggttctactggaagcggtctcggtgcaggtacagggtcaataccatcaagtggttcaggtcctggtcttctaccaactgccagttctgttcctggttctttagcgggtggtggttcaggttccttgcctaccactggttcagccactggtgcaggtgcaggtaccggttcagctcttggaggtggtccaggtgctggctcagctcttggtggtggtgcgggtgccggtccagctcttggtggtggtgcgggtgccggtccagctcttggtggtggtgcaggtgctggttcagctcttggtggtggtggt

SEQ ID NO: 122973 - DNA, 426 bp, Arabidopsis thaliana
ggaggaatgatggaatcttcagctttaataaatctgcagactctcaaaattccgattcatcttattgaagaacaattttccggcgaaacagccgatgaagtctcgcctgaatcttctgtacctttcaccggcgattgacttcacttcagaatcgagagagaagaaatcgatggaaaactaaaaatagaaagagtttcaaattctcgctctctcttcaaaaccgcaaatcaagggaacgagagacgagagagagagatgagtaaacggaatccgaagattctgaagatttttctgtatatgttacttctcaactctctctttctcatcatctacttcgtttttcactcatcgtcgttttcaccggagcagtcacagcctcctcatatataccacgtttcagtgaataaccaatcggcgattcagaaa

SEQ ID NO: 122974 - DNA, 552 bp, Arabidopsis thaliana
cggacgcgtgggaccgaattggatccgactttgacatatccttacatgtatagagctgtcacacgaatgtcgaaacaaaatgctaaggctgctcttgaagaaatcaatcggatcttggggtttaaacttgctttagaatgcttagaaattcggttttgtctttatcttggtatggatgactatgaagcggctcttcgtgatattcaggctgctcttacgctgtgtcctgattatagaatgttcgatgggaaagtagctgggaggcagctccagacgcttgtgtatgagcatgtcgagaattggacaaccgcagattgttggatgcagctatatgagaaatggtctaatgttgatgatataggttctctttctgtaatctatcagatgctcgaatccgatgcttgcaaaggtgttctctacttcaggcaatctttgcttctcctaaggttgaattgtccagaagcagcgatgcgcagtttacagttagcccgcgagcatgcctcaagtgaccacgagcgtctagtttacgaaggatggatcttgtatgataca

SEQ ID NO: 122975 - DNA, 917 bp, Arabidopsis thaliana
  unsure (1)..(917): unsure at all n locations
nnnnnnnnnnnnnnnnnnnnnnnnnnnnnnnnnnnnnnnnnnnnnnnnnnnnnnnnnnnnnnnnnnnnnnnnnnnnnnnnnaaccacgcgtccgcccacgcgtccgcctaaatgggatagtcgcctcaagtgcaatctctactactaccgaacaaactatttcatcatgatcgtcgttatacttggattgggagtccttacaaggcctttagcgatcttcgctgcgcttttgacagcattaagtttggcatttctaaatgacagctttgcaggttcttttagtgagaaggcgacacgaaccgtcagaagattctctccacagttagctgctaaaatgagacctcctttgacacctgtcactcgtgggcgtccatcatcaaagagagcaatccatgtatgtggtcaaccccgttgggtttttgtcttgacatgctcacttgtgagttttgctctttggtatatttcctctggtttgctcagagtctcggttgcgctactcattgcacatcttgcaacaattcttcatgcaagcttgagaacaccgaacttgaaggcacgttttaacacatttagggaggaattccgagcagtatggcgtaactccagcgagatttagagtaatcttgtaccaccatgatcgtgttctgctgaggacataacgctgtaaagtccaaacttactgcctttctccaagataaacccggtttcgttaacactgtactatggatgttcaatctggatttgttgctcaatgactgggatcatctgttttttctttgatttgagatttgagctctgagctctttttgctagcaaaatcctctcttttttttgctaaagacttgtaaagctagctttgttgttcttcgttctaacacaaaccctttgtgtgtttagatcctagaaatcgtttatat

SEQ ID NO: 122976 - DNA, 536 bp, Arabidopsis thaliana
  unsure (1)..(536): unsure at all n locations
cgatataagcacgaaatcgctgtttctctcttcgacgaagctttgataatttgatctcaatcgatcgattctattgagaatttgtgtacctgttttcttataaggttaactaaggattgtggaatcagaagtgttgtgtttttgtgatcggagattatggattggggaaacgtaacggttgatgatctcttcgatgctctccgagaagttgactggtcgtctccgccgcgtcctccgtctgagttcttctcaaggttcaccgttcctaaatctgtccctaaatgggatagtcgcctcaagtgcaatctctactactaccgaacaaactatttcatcatgatcgtcgttatacttggattgggagtccttacaaggcctttagcggatcttcgctcgcgctttttnccaggattaagtttggcatttttaaatgacagcttttcagggttccttttagtgagaaggcggcacggaccgtcanaagggtttttcccgagtaagttctaaatnggcccctttnnaaccntantngtttc

SEQ ID NO: 122977 - DNA, 573 bp, Arabidopsis thaliana
agaacacgcaggtctatcagtatgtgatgtggttcatcaagattccgagcagaaactagagaatactgctcacgaggcaaaaaacacaatggctagcactgatttcctggcacagctttcaacttctcttttcgaagaagacatggaaccgttcatggaagtagatggcaaagaagttgacaagtcatattatgatggtcttagctcactgttggtgaactctacaaatgatacaaaccgcgaggcttttcctaaccccaccgagcaagaaccttccattgcaccaactcatccaggagaggcaaccctggatgatcatgtgatgcttgagctagatggtacaatcgctttagatcctcatcctgagattgttgggggtgtaatctgctgtttattaaacgaagaggatcctgatattccgtgtaatgatgacattttcctgtccaacaactcccgtccgatgtcagtttcttctttagcccggcggaactttaaggataccaatagtccaataactacatgtgtaagagacgtctccgccagtaaggaaaaaagtgagggatattcactcca

SEQ ID NO: 122978 - DNA, 496 bp, Arabidopsis thaliana
cacacactgctcccaagtcctctcacttcttcttcttcctccgacaccgttgcttaacggttttccatttttgtcccttcaagatgatctcatggcacgacctctacacggtcctcaccgccgtgattcctctctacgtggccatgatcctcgcttacggctctgtccggtggtggaaaatcttctcacccgaccaatgctccggaatcaaccgttttgtcgccatcttcgccgtccctctcctctcttttcacttcatctccaccaacaatccttacgcaatgaatctccggttcatcgccgccgacactctccaaaaaatcatcatgttgtcacttttagtcctatgggctaatttcactcgctccggtagcctcgagtggagcatcacaatcttttccctctccacactttccaacactcttgttatggggattcctctcttgatcgccatgtatggcgaatactctgggttcctcatggtccaaatcgtcgt

SEQ ID NO: 122979 - DNA, 648 bp, Arabidopsis thaliana
  unsure (1)..(648): unsure at all n locations
atgatatgccgnnnnnnnnnnnnnnnnnnnnnnnnnnnnnnnnnnnnnnnnnnnnnnnnnnnnnnnnnnnnnnnnnnnnnnccacgcgtccgaaaacctgaagtaaagccatctaaggaagtcacagagattctgatttataaaattgaccaaaacaagtcacagaggagaccccggaaaccaaacagtcgacgattacgaagatgaggatcactgtcatgaccgccggtgaacaaatcatcactctcgatgtcgattctcaggagactgttgagaatgttaaagccttgctcgaggttgagtccaatgttccgattcagcagcagcagctgttgtataatggaaacgagatgggaaattccgataaattgagtgccttgggtgttaaggatgatgatttattgatgatgatggtttccaatgcctcatctggtgccactagtgcggcggggaatgatttgggcatgaatcctgatgggtcagctttgaaccctgcagcctttcaacaacacattcgtggggattctaatcttatgggacagttatttcagaatgatcctgagcttgcacaagtgatttctggaagcgatttaaataagttacaggatgttttgcgtgcacggcatcgtcagcgatctgttttacagc

SEQ ID NO: 122980 - DNA, 687 bp, Arabidopsis thaliana
agcccttctgagcccatgtatttcgcttttctgcttgtcactagtatactgtttgctgcttatcttgttgtgacgactgttttgagtgaggtgtttatactgcccagcatactcaaatatgttcttgtggctatcatggtgttacttttgttgtcgcctcttgcggttcccatcaagatgacacttttccgttcaaatgccaagagctctccactggggtcttcagacaatctagccaaagaggaaggtactcatgaagaaccgttgctgacaccttctacctcagcttcaaaccttgggcctatctttgagggagatgatgagtcggatatggaaatacttcttgctgaagcagaaggtgccgtgaagaagaagagaaaacccaggagaggtgaggatttcaagtttggccaagtttttgtcaaggcagatttctggctcctttggtttgtctacttcctcggcatgggttcaggtgttacagtctcgaacaacttggcacagatcgggatttgcttttggtattaaagggacacaacaatacctcctgtgtccttttcaagtttcttcaactttcataaggccggtcttgccttcaggtgccatttctgagcactttgtgaggtcaagaacgcttccaagaacactatggatgggagccgcgcagctagttatggtgttcacatt

SEQ ID NO: 122981 - DNA, 648 bp, Arabidopsis thaliana
agaatcatgttccctgttcttgaatctgttgatcgagggatgtgtaaaagtgcaaatgaagaacatgggagagaattaccaatgatgaatggtatcaaagaagatatcaaatctattggagttttggattctgggatttgttcagaagctctctttagtcttgcttctcgtttcaaatcattgcagatgatgtgtaaaacacattttgaagaggaagagaaagatttattgccaatggtggaagctgcagaaatggggaaagagaagcagaagaaattgatgaatcaaagcttagaagttatgagtgggactcattctaactcgtttgatttcctactagaaggtctcactccacaagaagctatgcagtatattgacttgctcatgacatttggtgatccaaatcttatctcatcttttctctgaaaaaatgttgttgactgattttatcctttttaggctcactttgtgaaaaactgttgttgtgtgtggggttgtgaattttgtgtatatagagtcagatttgtcgattcaggtgttgctatgttttctcaaaaaaaaaaaaaaaaaaaaaaaaaaaaagggcggccgctctagaggatccaagcttacgtacgcgtgcatgtgacgtcataatcttctgatagt

SEQ ID NO: 122982 - DNA, 693 bp, Arabidopsis thaliana
  unsure (1)..(693): unsure at all n locations
tgatacttcccagctctccacgactcactattgggaaagctggcacgcctgcaggtaccggtccggaattcccgggtcgacccacgcgtgcgcaaaaccgaaaaaaacactaattgtgctttccctttagattcatttgtattttcttttggagcttttgaacaatggagtcatcacaagcaacgacgaagccaacgagaggagcaggaggaaggaaaggtggagataggaagaagagtgttagtaaatctgttaaagctggtcttcaatttcccgttggtcgtatcgctcgttacttgaagaaaggtcggtacgctctccgatacggttccggtgctccggtttacctcgccgccgttctcgaatacctagccgccgaggtacttgagctagctgggaacgcagcgagagataataagaagaacaggataaaccctaggcatctatgtttagcgataaggaacgatgaggaattggggagattgcttcatggagttactattgctagtggtggtgttcttccaaacattaatccagttcttcttccaaagaaatcaacagcttcttcctctcaagcggngaaacctnctgcnccaaatccnccnagaagngttnntaagaangancgatgtccttttnggaaatccgngcttgntgagannagagagagacacctgttttgnttaggtttnt

SEQ ID NO: 122983 - DNA, 654 bp, Arabidopsis thaliana
cgtatcgctcgttacttgaagaaaggtcggtacgctctccgatacggttccggtgctccggtttacctcgccgccgttctcgaatacctagccgccgaggtacttgagctagctgggaacgcagcgagagataataagaagaacaggataaaccctaggcatctatgtttagcgataaggaacgatgaggaattggggagattgcttcatggagttactattgctagtggtggtgttcttccaaacattaatccagttcttcttcctaagaaatcaacagcttcttcttctcaagcggagaaagcttctgctaccaaatctcctaagaaggcttgataaagaatagtatcgatgttgctttttggttatattcggatcttagatgaagaagaagaagaagaagaaacaacttgttttttgttttagaggatttgtgtaggtatctgaaatcttcttctctttgttttggtttgtcttatgtaaaaaccatgggaagatgattatgtttgttaacgcaatttgtaatggaaaataattaagttctgggattagtaaaaacatccgtctaattttggcgggcggcccctttaaaggaacccaggctacggaagggggccatgcacggcctaaatctcctttaaaaggtgtccccta

SEQ ID NO: 122984 - DNA, 487 bp, Arabidopsis thaliana
acccaagcgtccggacgcggagaaggctactgataagactaatgtccatctctcctcggaccatgagcgttgtccggtggaggaagtggctcttgttgtgcctgagacggatgatccaagcctaccggtgatgacattcagagcttggttcttgggtctgacctcttgtgttctgctcatctttctcaacacgttcttcacataccgtacgcagccactcaccatctcagccatcctcatgcagatcgctgttttgcccatcggcaagttcatggctcggactcttcccaccacttctcacaaccttcttgggtggagttttagcctcaatcctggtccttttaacatcaaggagcatgtcattatcaccatctttgctaattgtggcgttgcttacggtggtggtgatgcttactctattggggctatcactgttatgaaagcttacgataaacagagccttagcttcatctgtggtctcttcatc

SEQ ID NO: 122985 - DNA, 561 bp, Arabidopsis thaliana
gcgtccgatcaccagctatcatgcgcccacctctccaccgtgctctccatcatcatcattccatataggaggcattcacttgtagaagcgtcgtctctttcacactaaaattcatcgatgacggatcctcccagacccgacccgtttcctgttacccgactcgattccgacgccggtgctctcttcgtcctccaatcaaaaggcgagtggtggcacgccggatttcatctaacgacggcgattgttggtccgacgatattgacattaccatatgcgtttagaggattaggatggtggttagggtttgtttgtttaacgacgatgggactcgttactttctacgcttattacctcatgtctaaggttcttgatcactgtgaaaaatccggccgccgtcacatccgtttccgggaactcgccgccgatgttcttggatctggattgatgttttatgtagtgatctttattcaaacagctatcaacactggaattggtattggcgccattctacttgcaggtcaatgtcttgatataatgtattcgagtcttttcccgcaagga

SEQ ID NO: 122986 - DNA, 729 bp, Arabidopsis thaliana
gcgagatgctgatcaggtcacaggcaatcctttgttgctccatgatgaaaaggggcctttggattcaatagccatggaattggcattgtgctagaatcttcaccatcagctcctccattgacagatgatgatatagctacagtagacgatggtccaattcattacccatcaatcgattcaacaccagtcgatctcccatctgctgcttctcttccagcttcaacagaaggtgaaaggaaagaagacgggaacactggaacgtgtgcgatatgtctcgatgctccatctgaagcagtctgtgtcccgtgtggacatgtcgcgggatgtatgtcttgcttgaaggagatcaaatccaagaattggggatgtcccgtctgtcgagccaagatcgatcaggttattaagctgtaccgtgtctgaaaacaggtatcaacaacaacatgggattatctatatccttcattgaactattgaaactatatctctctatttacacagctaaaatcaataccatgttttctttttatcaaaagctaaaacaatatgtttgtaatttggaacttgataaaaaacagttccagtattttgtatatatgtttttggacaaaaggaagaatgtatcaatgtaaagtgtggtaatatattctgtaaaaaaaaaaaaaaagggcgaccgctctagaggatccaagcttacgtacgcgtgcatgcgacgtcatcagtcttctatag

SEQ ID NO: 122987 - DNA, 398 bp, Arabidopsis thaliana
ggagataataatcacaaactacaaaagtagaaagaagaaaaaagaacaaagtatcagttcttgaatatttgcatcaatggaggaatccaaaacacctcacgttgcgatcataccaagtccgggaatgggtcatctcataccactcgtcgagtttgctaaacgactcgtccatcttcacggcctcaccgttaccttcgtcatcgccggcgaaggtccaccatcaaaagctcagagaaccgtcctcgactctctcccttcttcaatctcctccgtctttctccctcctgttgatctcaccgatctctcttcgtccactcgcatcgaatctcggatctccctcaccgtgactcgttcaaacccggagctccggaaagtcttcgactcgttcgtggagggag

SEQ ID NO: 122988 - DNA, 657 bp, Arabidopsis thaliana
ttaggtgcactatagaagagctatgacgtcgcatgcacgcgtacgtaagctcggaattcggctaagtcgaggtctctctatctctctctttcgtacacttcgcgcttctcttcctgtcagaggcgtttctcatggctcctcttactctctccgttgatgtgaagagctcttcagcgacctctcatgatgtttcgaagagggtaatgcagagtccacagctcaaaataaacaaaggcttttttgcatctgttaatacacaagaagataaaccctttgatttcttccgcactctctttgaggggtttatagcaggaggtacagctggagttgtagttgaaacagctttatacccaattgatactattaagactagacttcaggcagctcgtggaggtggaaaaattgttttgaagggtctttattcaggattagctggaaatatcgctggtgtcttaccggcttcggctttatttgttggagtttacgaacccacaaagcagaaactgctgaagacctttcctgatcatttaagcgcagttgctcacctgactgcaggggccatcggtggacttgctgcatctctgattcgagtgcctacagaggttgtgaagcaaagaatgcagaccggacagtttacatcatctcccagtgcttgtc

SEQ ID NO: 122989 - DNA, 534 bp, Arabidopsis thaliana
acgactcactattgggaaagctggcacgcctgcaggtaccggtccggaattcccgggtcgacccacgcgtgcgctcattctctcttcttctccttcttccttctcctccaccacaaagcggtaggtttctctcttcaacaatcgtctccccattaggcacattgttgagggcagggtagtctcgtgagttctcttctcctgagtgtaactgtggttaaaagcttagccaagatgcagggggagagggccagtcttggctatttatcagaggccttgaactttgagcatggttcttcttcaagtaatggtgtgatagatcattgggagaatattcacagtcttggtgataatgacttgcaggattacatgattgcaaattctgaatcaaatacttcgcttgcaaactcagtttatcacgagcaacagggtttacgcagatttagccttggtgaggctagctctagtggcacgaaggatgaagcttccagtcacaatgagcaacgaatggaaacaagatgctttgacggacgagga

SEQ ID NO: 122990 - DNA, 692 bp, Arabidopsis thaliana
atgaactgccggcactaatccgactcaattagggaaagcacgtacgcctgcaggtaccggtccggaattcccgggtcgacccacgcgtgcggttctctgcttttgtctcccccaaacaaaaggataaagaaagttgcagaaaacaatctctctgttctttgagctttccctttgagctctcacacgagcggcttcttttgtcatctcaccttttccttcattctttcttccttcaaattctggtttttttcacagatcgttttctcagattttgactctttttggtgttgttgttgttcttctccttcgtgaagtggaagaagaatataacaaaactgggttttttatatctggaattctgaagaaattcttcacggatttgatctgtttaaactataaaagtcttgatttttataaatcagctaaaaataagacacggtttagggtttatggtttgactagaaacaacaatactgaaatgggttgtgaggtttcaaagttatgtgcattttgttgtgtttctgatcctgaaggatctaatcatggtgtcacagggttagatgaagataggagaggtgaagggaatgatttgcctcagtttcgtgaattctcaattgagacgttgaggaacgcaacatcaggatttgctacagagaatatagtatcagagcatggtgaaaaagcttcaaatg

SEQ ID NO: 122991 - DNA, 556 bp, Arabidopsis thaliana
  unsure (1)..(556): unsure at all n locations
gatatgctagcgtctactacgactcactattgggaaagctgatccgcctgcaggtaccggtccggaattcccgggtcgtcccacgcgtccgaagcgctcttacttctggacgaagcaattgattacctaaagttgctgaaacgagacttaatctccacagaggttaagaaccaaagctccaccactcacaagtcaccaatcttgttgcttaaagagacaacatggggaacaagaaatctgctagacagataaggcgtgaaagattctgacgagttaaaacgtgtgaagtgggtttttgggtacgtatcctctgcaccagctttttagctgtagatagtggactacttttaagtattatatatgctgctgcagatttcaaaaagtgaaagaataaaagaagtgattttgtttttgttatttggtggggaatggttaattgttagtatagtttaagattttntttgngaggagtgtggtggttggataatttttttttgtggttggaggtgtgagttttttgtattgttttggtgttaagagaggtattcgctcccca

SEQ ID NO: 122992 - DNA, 444 bp, Arabidopsis thaliana
  unsure (1)..(444): unsure at all n locations
gctctgaaaatactcgngagcgtagtccctggtgcaaaaggaaacgaagcgctcttacttctggacgaagcaattgattacctaaagttgctgaaacgagacttaatctccacagaggttaagaaccaaagctccaccactcacaagtcaccaatcttgttgcttaaagagacaacatggggaacaagaaatctgcagacagataaggcgtgaaagattctgacgagttaaaacgtgtgaagtgggtttttgggtacgtatcctctgcaccagctttttagctgtatatagtggactacttttaagtattatatatgctactgcaaatttcaaaaagttaaagaagaaaagaggtcactttcttcttctctctgtgtggaatgaaaagccaaagtcgtcatggtcattgatggacaatgattatcttttttggctgagtgtgga

SEQ ID NO: 122993 - DNA, 595 bp, Arabidopsis thaliana
  unsure (1)..(595): unsure at all n locations
tgannnnnnnnnnnnnnnnnnnnnnnnnnnnnnnnnnnnnnnnnnnnnnnnnnnnnnnnnnnnnnnnnnnnnnnnnnnnnccacgcgtgcggaggagcatagagagcttctaggccgtgttaactcagatgatacaatacgaaggataagggaatggagacaatctggaggaatgcagccaagtatgcgcaatgctgctcaagtggttcacgatacattgccaagcccttctgtttcagcttctatgaagacgcacaaaccaaaccagccaattccttctcaaccattcgctagttcttcaccttcttttcatcctcaagctgatcccactcacccgtttgcttcatcgacagctaaacgaggacctgttcctattgtcaagggcaaaaaaacacaaaccagtttttcctggctcgtcttccacaaaacatgccccataccatccttcagatcaacctccacgaggacaagtcatgaacagattaccatctgttcctgccagttcaagtgaacccacaaacggaatcgatcctgaatcttttttaggaagaagagttagaacaaagtggcctgaggacaatacattttacgacgc

SEQ ID NO: 122994 - DNA, 706 bp, Arabidopsis thaliana
atgtttgcatatcttcatcttcttcttgagatgaagttgaagttgtcatcaatctccatgaatcataagaatgtgcttctcatcaagctcatctccgctattctgatatcttttttcgcgttccgtctcttcattctccactccagcgagttttctccaatctttgcgtcggtcaccggaaaattcgaagctcggtttctgccgccggagattatcgtaccggaaaatgaagatctgattcctcaagatattgaagtagagaagtgtgatcttttcgccggaaaatggatcccagattcagtaggaccaatctacacaaacaaatcatgcggatcactcattgacggtcaccaaaattgtatcaccaatggccggcctgacttagattttctctactggaaatggaaacctcatgactgtttgttaccacgttttgaccctagaagatttcttcaacttatgaggcataaatcttgggcatttattggtgactccatatctcgtaaccacgtcgaatcactgctttgtatgctctctacgattgaagaaccggttgaagtataccatgacatggagtacaaatcaaaacgttggcatttccctttacataaccttactgtatccaacatatggtcgccatttcttgttcaagccgctattttcgaagattctaacggtgtctcgaccgcttctgttcagctacatc

SEQ ID NO: 122995 - DNA, 388 bp, Arabidopsis thaliana
gcgtccggaacattcttgcggaacgagcgacctacagttccagagagaactccatcaatggcttcaagggaactgcttcagctaagagaaagacaaactgtctctggcttaagggaagggttccataacgggagggaaaatattgtccatgaaaatactagcaacactgataatgataatatcaatacttccacaaatgctcttgcaattgcaatcactgctgggaattctcagcgtgtaaccgatgagagttcaacttcttccagacaagggaatgatagtcccattttgcctgataactcagaaagcaacctagcaaatgcggatagagactgggaagaggataccaatcaaagaaggatctggcaggaaaatgtcccagtagatg

SEQ ID NO: 122996 - DNA, 357 bp, Arabidopsis thaliana
acgaaaatcacgtttccaaacgtggattttgcaagcccagcaaaactgaagcggcagattttacgtcaggaaaggagaggtcaacgaactttagagctgatccgacaagaaaaggaaactgatgagcagatgcaagaagcagccattcagaagtcaatgagctttgaaaactcagtcatagggaaatacagtatatggaggagagactatgagagcccaaatgctgatgctatcttgaagcttatgagagaccagatcataatggcaaaagcatatgcaaatattgccaaatcaaaaaatgtaaccaatctgtacgttttcttgatgcagcagtgtggagaaaataaacgtgttata

SEQ ID NO: 122997 - DNA, 265 bp, Arabidopsis thaliana
ctcttcctccatcggtggaaacttgttacccttgttcaaccgctcctcacgctaaagctccctctcctcctgagattattgctcctgttcctcttggaatttatgatggtggtcaaaagaatgttgtcaagattacgtgtgtcttttgctgaaccggtagaagaagtcagaccaattgaaaccattatagagcatgatcatgatctagacgaagattatgatgaagaaagtgtgggcgatgatgatggtgttgttgttgtggttg

SEQ ID NO: 122998 - DNA, 508 bp, Arabidopsis thaliana
  unsure (1)..(508): unsure at all n locations
cgatatcagacaaaaatgtacaagaaattaagatcagtccagggataatgctgttgattttcaagagagctgcgagtcatgttcctttgaagattctatcaatcgaagatggcactcttctgaagtccttccatcatttgcttcaccgaaataagaaagttgatttcattgaacaattcaatgaaaagcttctagttaagcaagagaacgagaatctacaaatacttgacgttcgaaatgctgagctgatagaagttagcagaactgacttcatgacaccatcagcattcatattttttgtatgagaatcagttgtttctaacattcaggaaccgaaatgtttctgtgtggaatttccgcggagagcttgtgacctcgtttgaggatcatcttctttggcatccagactgtaacacaaacaatttttccatacaagnggtcaagtcttggccacccnaatttcaaggaggttctgagggcccttggttnnagggaatcngggncggtt

SEQ ID NO: 122999 - DNA, 898 bp, Arabidopsis thaliana
  unsure (1)..(898): unsure at all n locations
attcaatcgctctttcgtaaaaatggcgagttttgaggaaagctctgatttggaagctatacagagccatctcttagaagacttgttggtttgtgatggtttcatgggagatttttgacttcgatgcttcttttgtctcagactttggtgtatagaaccacacgttcctaaacaagaacctgattctccagttcttgatccggattctttcgtcaacgagttcttgcaagtggaaggggaatcatcatcatcatcatcaccagagctgaattcatcgtcatcaacatatgagactgatcagagtgtgaaaaaggcagagaggttcgaagaagaagtagatgctagacattaccgaggagtgaggcgaaggccgtgggggaaatttgcagcagagattcgagatccagcaaagaaaggatcaagaatctggctaggaacatttgagagtgatgttgatgctgcaagagcttatgactgtgcagctttcaagctccggggaagaaaagccgtgctcaacttccctcttgacgccgggaaatatgaagctccagcgaattcaggaaggaaaaggaagagaagtgatgtgcatgaagagcttcaaagaactcagagcaattcatcttcatcttcctgtgatgcattttagcatattaagagtgtgagcagtttccttaagttgtataaagtaattgtacagaggaaacgaattgtgtaggtttagtgtgcttgcaagttgcaacaaatgtgtatggatgttctgtttcttcatgtccctaagatttagaaacatcttcttatttccaaaaaaaaaaaaaaaagaaagnnnnnnnnnnnnnnnnnnnnnnnnnnnnnnnnnnnnnnnnnnnnnnnnnnnnnnnnnnnnnnnnnnnnnntnnnn

SEQ ID NO: 123000 - DNA, 769 bp, Arabidopsis thaliana
atacgactcactatagggaaagctggcccgcctgcaggtaccggtccggaattcccgggtacatctttcgcgtaacatttgttctaataagaaatttgtctcttgctttaacaagaagcaagactagccttatctgtacctttctttctgaattaaagaaccctttaagattcatatgattttcttaattcttttttatatatgtagatttgtttcttaaacactatatttatgttttacaataattgttttatatgttttcaacttctttgtagatttgcttcttacacacactaatgttttatctttgcagagaaacttgacatttatggagtctgtgaagaccaaatcctccaccgcgaggagcgttgagctaccgcctcgccgtggaaaggtgaagcgagagatctttggtttcttagccaattccattgtttccgccgccgtgaaagctggtggatcgtttaggaggaacggcggaggtggtggtggtggctcttcttcctaaccaccactcctccagggagtggatacacctccgaccagaacaacgaatccacttaaacaacaaacagacataaagacataattatgaaagtgccaccaccatggcactcttgagaagaaagctgagtggttctgttcgtttttgaaaacagaacgctacttttttctccaagtccggttcggttttatggtggtttgttttcttatgtgtggtacgacccggtttaacttcgtttttttgtgggttaaactgggaatacgt

SEQ ID NO: 123001 - DNA, 453 bp, Arabidopsis thaliana
attctgaatacgtttgatgaacgtatcagttcatttgctgaacaaaagttcacgcgagatggtattgatgttcagactggaatgcgtgtaatgtctgtgactgataaagatatcacagtgaaagtcaaatcaagtggagaactcgtaagtattcctcatggattgatattgtggtccactggagttggaacccgtccagttatcagcgacttcatggagcaagttggccaaggaggcagacgtgcggtggcaactaacgagtggttacaagtgacaggatgtgagaatgtatatgcagttggcgattgtgcttccatagctcaacgaaaaatcttgggggatattgcaaacatattcaaagctgcagatgcggacaactcatgaaccttgaccatggaagagttagaaggcgtggttgatgatattattgtgaggtatccgcaggtggagctc

SEQ ID NO: 123002 - DNA, 518 bp, Arabidopsis thaliana
acccacgcgtccgcccacgcgtccgtgaatctctaaaaacagtagagagagaaaccttcttcttctttcttcttcttctacaaaatttcacaaaacgagagagaggagagattcaaacaaacgaatcaacaggtgagaaattcgaaatctttgcgagctcgtctcgcccagaatctcgatttctccacctttcctcttcaattcatcttccaaatccctaaaaaaaagactcaaactttttaattttggtccaaaaaagactcaaactttcttcatcaatggcggagaaaatcacgagagagacgtcgttacctaaagagagaagcagcccacaagctctaatcctgggacgatacgaaatgggtaagcttctcggccatggtaccttcgctaaagtttacctcgcacgtaacgtgaaaacaaacgaaagcgtagcaatcaaagtaatcgacaaggagaaagttctcaaaggaggtttaatcgcacacatcaaacgcgagatctcgattcttcgacgt

SEQ ID NO: 123003 - DNA, 1239 bp, Arabidopsis thaliana
  unsure (1)..(1239): unsure at all n locations
aaaaactggaattgcactccccatnnnnnnnnnnnnnnnnnnnnnnnnnnnnnnnnngctgtgccgtaccggtctcgaattcccgggtcgacccacgcgtccgcaaaaaactctccactcaactctctctggtcagctgtctcttccccattctctagggttttcaagctcaacctcaagctccactacgatctcttcttcttctctaatctcagttgaaagatgcaaggtgtgattcgatccttcgtctccggtggaaatgttgtgaaaggctctgtgctgcaacatctccgtgtgattaacccggcgattcagccttctgtgttttgttcacgctctgaatcaactcaacctgcacgtatggaggaatctggattcgagagcacaactatttccgatgtcatgaaatccaaaggcaaaagtgctgatggatcttggctttggtgtactactgatgacactgtttatgatgctgttaaatccatgacacaacacaatgttggtgccttggtggttgtgaaacctggtgagcaacaagctcttgctggtatcattacagagagagattatctacggaagatcattgtgcaagggagatcatccaaatcaacaaaagttggagacattatgactgaagagaataagcttatcactgtgacaccggagaccaaggtcttgcgtgctatgcaactgatgacagataaccgaatcaggcatattccggtaatcaaagacaagggcatgattggaatggtggccataggagatgttgtccgtgcagtggttcatgagcatagagaggagcttcaacgcctaaatgcgtatattcagggaggttactagatcttgaataatggaaagaaaagagttccctgttgtgtcgtctggtcttgtgctgctgaatctgaaaagcttccagatcagtgtaaatatgcagtcctcgttgttattgttgttgttgttgtgtttgatgttttgtgttgtttcgttgtttaacttgtcaaaactaaggccttgtgctgcttctcttcttgcgcttacttagcaagagaataaaaccaaaaactctgatctctttatgaaagatatgatgtttgtttttgttatcaaaaaaaaaaaaaaaaaaaaaggnnnnnnnnnnnnnnnnnnnnnnnnnnnnnnnnnnnnnnnnnnnnnnnnnnnnnnnnnnnnnnnnnnnnnnnnnnnnnnnnnnnnnnnnnnnnnnnnngagagtatcat

SEQ ID NO: 123004 - DNA, 562 bp, Arabidopsis thaliana
  unsure (1)..(562): unsure at all n locations
agatttttnnnnnnnnnnnnnnnnnnnnnnnnnnnnnnnnnnnnnnnnnnnnnnnnngtaccggtccggaattaattcccgggtcgacgagctcactagtcggcggccgcccttttttttttttttttttttaatgatggattgatggtggagaatggagatgttgtccgtgcagtggttcatgagcatagagaggagcttcaacgcctaaatgcgtatattcagggaggttactagatcttgaataatggaaagaaaagagttccctgttgtgtcgtctggtcttgtgctgctgaatctgaaaagcttccagatcagtgtaaatatgcagtcctcgttgttattgttgttgttgctgtgtttgatgttttgtgttgtttcgttgtttaacttgtcaaaactaaggccttgtgctgcttctcttcttgcgcttacttagcaagagaataaaaccaaaaactctgatctctttatgaaaaaaaaaaaaaaaaaagctcgagccgaattccgagcttacgtacgcgtgcatgcgacgtcataactcttctatagtgtgtcctaa

SEQ ID NO: 123005 - DNA, 689 bp, Arabidopsis thaliana
  unsure (1)..(689): unsure at all n locations
taggtgccactatagaagagtctatgacgtcgcatgcacgcgtacgtaagctcggaattcggctcgagtgtctcttcccgattctctagggttttcaagctcaacctcaagctccactacgatctcttcttcttctctaatctcagttgaaagatgcaaggtgtgattcgatccttcgtctccggtggaaatgttgtgaaaggctctgtgctgcaacatctccgtgtgattaacccggcgattcagccttctgtgttttgttcacgctctgaatcaactcaacctgcacgtatggaggaatctggattcgagagcacaactatttccgatgtcatgaaatccaaaggcaaaagtgctgatggatcttggctttggtgtactactgatgacactgtttatgatgctgttaaatccatgacacaacacaatgttggtgccttggtggttgtgaaacctggtgagcaacaagctcttgctggtatcattaacagagagagattatctacgggagaatcattgtgcaagggngatcatccaaatcaacaaaagttgngacattatggcctgagggnataanctttncctggggcnccggggnccaaggnttgcggncatnnaactggtngccantanccggtncgggaatccnggaaccaaaanagggngtttttgaanggnccaaggnantt

SEQ ID NO: 123006 - DNA, 1145 bp, Arabidopsis thaliana
  unsure (1)..(1145): unsure at all n locations
gaaaaatttcgcttttctctctacttcaaaacttttgataatcttctttaaactttcttcttcgatctctctttgttaactttctttcgttacgtctctctcgttctcgttatttcttattctcagatcttggattcacgaccatctcgatcgttgaccgtcgaatttgggttcggctaaaaatccaatctttttttttccggtgagaagctcgagagagtatataatttaataaagggtacgtacgattttggttgagtgttttgatgatgttgacccaatttgttggggtgtgaagtatacttatggaactgattgtcacaatacaagaagaacaacatcatcaacaaacaagaataataagatgacactttatattcgtcgtgaatcttccaagctatggaagagattttgctctgagatatcgacggagattggtcttcttgctgagaactggaaatatcttctcgctggtcttatctgtcagtacattcatggtttagctgctaaaggagttcattatattcatcgcccgggaccgacacttcaggatcttggcttctttcttcttccggagcttggtcaagagagaagctacataagtnaaaccgtgttcactagtgtgtttctttcgtttttcctgtggactttccatccattcattctgaaaaccaaaaagatatacaccgttttgatatggtgcagagttctagcattctnagttgcctgccagtttctccgtgttataacttttctattcaactcagcttcctggccctaaactatcactgccgtgagggcctctaaaagtttctagggttgccatggcccaaaagcgctcttagggttctcgagattaacccgcatggggtgatgtatggatgcggagacctgattttttcatcgcacatgatattcactctagtctttgtccgtacttaccagaaatatggcactaaaaggttcataaagctgtttgggtggctcactgcaattntncagagcctcttgatcattgcntctcgtaaacattacagtgtcggntgtagttnttgcaatggaatactnngnaaatttggggggggggtcntttttngcaaagaatttcccngatttccccanttgggctctnntgtttttncccc

SEQ ID NO: 123007 - DNA, 584 bp, Arabidopsis thaliana
  unsure (1)..(584): unsure at all n locations
cnnnnnnnnnnnnnnnnnnnnnnnnnnnnnnnnnnnnnnnnnnnnnnnnnnnnnnnnnnnnnnnnnnnnnnnccacgcgtgcgtgtgtcttctttcttctccttctcacttacttaacccataagccatcaatcccaaacacaccattacaatggcttcttctatcttcttcttcttccttatcttcctctccgtcgtctccgccgtcaaactacctctctctcccttctcccactccgaccaatcaccaaaagacccttacctctctctccgtcgtctcgctgaatcctcaatcgctagagctcataaactcaaacacggcacctcaataaaacccgacgaagatgctctctcctccaccaccaccgcatccgccaccgtcgtgaaatctcctctctctgctaaaagctacggcggatactcagtctctctcagcttcggcacaccgtcgcaaacaatcccattcgttttcgataccggaagcagtctcgtttggctaccttgtacctcaagatatctctgctccggttgcgatttctccggtttggatccgactctaatccctagatttatccccaagaact

SEQ ID NO: 123008 - DNA, 720 bp, Arabidopsis thaliana
  unsure (1)..(720): unsure at all n locations
cgcctgcaggtaccggnccggtantcccgggtcgtccaccgcgtccggaagagctggatgctgccagtttgcgtgaacacgaggagttcacgaaagtgaagaacatagctacgattgagcttgggaagtatgagattgagacgtggtacttctctccttttcctccagaatacaatgactgcgtgaagctctttttctgtgagttttgcctcagttttatgaagcgcaaagagcagcttcaaagacatatgaggaaatgcgatttgaagcacccccctggggatgaaatctatcgaagctctactttgtcaatgtttgaggtggatggcaagaagaataaggtctatgcacagaacctctgttatctggcaaagttatttcttgaccacaaaactctttactatgacgttgatttgttcctgttctatattctctgggaatgggatgatccgggatgccacatgggtggatacttttcaaaggaaaaacactcagatgaagcttacaaccttggcttgcatccttacacttgctccatattaaaagaagggctatggcaaattcttaatagccttctcctatgaactcttaaagaaagagggcaaagtcggtacaccggaaaggcccgtctctgatctaaggttaggggggtacaaaggttactgggctcgggttttatttgacattttgaaaaagcaccagggaaacatatctattaag

SEQ ID NO: 123009 - DNA, 545 bp, Arabidopsis thaliana
  unsure (1)..(545): unsure at all n locations
cgacccgtctaaagaaatgggatcgtctgcggatacagagacggcgatgataatcgccacaccggcgtcgaaccataataatccggcaaccaacggcggagatgcgaatcagaatcatacttctggtgcgatactcgctctcacgaattcagaatcggatgcttcgaagaagagaagaatgggggtgcttccgctcgaggttggtactcgcgtgatgtgtcaatggagagacggaaaataccatccggtgaaggttatcgagcgccgaaagaattataatggtggtcacaatgattacgagtactacgttcattacacagagtttaatagaagattggatgaatggattaagcttgaacagcttgaccttgattcagtagagtgtgctttagatgaaaaagttgaagacaaggtgactagcttgaagatgaaatctatcgaagctctactttgtcaatgtttgaggtggatggcaagaagaataaggtctatgcacagaacctctgttatctggcaaagttatttcttgnacacaaaactcttta

SEQ ID NO: 123010 - DNA, 560 bp, Arabidopsis thaliana
  unsure (1)..(560): unsure at all n locations
gacgacagaatggggcaacaaaaaaaaaaagcctagaggaatagaatcggtctctttctctataatctctctctctctctgacttgtttgtgttctctcaaatcctctgataagaatcaatggccaaggaattagcagagaaagctaaagaagcttttctagatgatgacttcgatgttgctgttgacttatactccaaagccattgacttggatcccaattgcgccgccttcttcgccgatcgtgctcaggccaacatcaaaatcgataacttcactgaagctgttgtagatgcgaacaaagccattgagttggagccaacgttggcaaaagcctatctcagaaagggcactgcttgtatgaagctagaagaatatagtactgctaaagcagccctggaaaagggagcttctgttgcaccgaatgaaccaaagtttaagaagatgatagatgaattcagtcttcgtatttcagaggagggaagcattttggtaagccgttgcacccnggtttctttaaggtttcaanacccttgcacgnagntatncncnccgtccatc

SEQ ID NO: 123011 - DNA, 390 bp, Arabidopsis thaliana
gatcgttaacatccaatctctcggtatattccttccttccattgtggcaataagtaacaaaccttgccctctacttcattccctccttgttttgatttcatcgtctttgttagctctcctctgtttttttttcttagtcaatcgatggcgaaggagcttgctgataaggctaaagaggctttcgtagacgatgacttcgatgttgctgttgacttgtactccaaagccattgacttggatcctaattgcgctgagttcttcgctgatcgtgctcaggcctatatcaaactcgaaagcttcactgaggccgtggcagatgcgaacaaagcaattgagttggatccttcattgaccaaagcttacctaagaaaaggaactgcctgtatgaag

SEQ ID NO: 123012 - DNA, 521 bp, Arabidopsis thaliana
agctctcaacgactcactattgggaaagctggcacgcctgcaggtaccggtccggaattcccgggtcgacccacgcgtccggctaaagacctttcttcaccattcccaattttccgttcttgtttctgattgaatctagatattgattaagctatggatgtcaatcggaaagctcacccggattgtcgatattcttcaaatcctttccatgaatgtgcttcagattgtttagagaagatctctcaaggccgtggaaataagaattcaaagaagcaaggtactttctctgttctcacactatgtttgatccgttactctatgagtatgcttctgttgtgatggatatttctgtctttgtccttctttaggtattgcttcaaggataattcttggagggttgtctgttatgacagttatagtttgatcaaggctttttagctttcgatggatctgcaaagttgtttcctttcttttctcattgtgatttggttgttacaggttcaaagattcttagccttccg

SEQ ID NO: 123013 - DNA, 521 bp, Arabidopsis thaliana
cgactcactattgggaaagctgacacgcctgcaggtaccggtccggaattcccgggtcgacccacgcgtccgctttgcttttgttcccttttctcgtctctgcagcttccttgttgtcaacttctggaagcctttgattgattgcaacttctatctccattctcctgctcatttaatattccaattaatagtcaatctcgtcgaatcttcaattttttaaagcttttggtcaaatcaaatgttatgcaaagacagaccaaaacctcctcttcttcttcttatatacttcctctcctacaaaatctctatttacttccatcttctctgctaaagacctttcttcaccattcccaattttccgttcttgtttctgattgaatctagatattgattaagctatggatgtcaatcggaaagctcacccggattgtcgatattcttcaaatcctttccatgaatgtgcttcagattgtttagagaagatctctcaaggccgtggaaataagaattcaaagaagcag

SEQ ID NO: 123014 - DNA, 550 bp, Arabidopsis thaliana
  unsure (1)..(550): unsure at all n locations
tgatacttcnnnnnnnnnnnnnnnnnnnnnnnnnnnnnnnnnnnnnnnnnnnnnnnnnnnnnnnnnnnnnnnnnnnnnnnccacgcgtccgggacctttgaagaagaagaatcgcgatttcgagctctatggtgtccgtaaaccctagacctaagggttttccagttttcgattcctcgaatatgagtttaccaagctccgatggatttggttcgattccggccacgggacggaccagtacggtgtcgttttctgaggatccgacgacgaagattcggaagccgtacacaatcaagaagtcgagagagaattggacagatcaagagcacgataaatttctagaagctcttcacttattcgatagggattggaagaaaatagaagcctttgttggatcaaaaacagtagttcagatacgaagccacgctcagaaatactttctcaaagttcagaagagtggtgctaacgaacatcttccacctcctcgacctaagaggaaagcgagtcatccttatcctataaaggctcctaaaaatgttgcttatacctc

SEQ ID NO: 123015 - DNA, 553 bp, Arabidopsis thaliana
  unsure (1)..(553): unsure at all n locations
nnnnnnnnnnnnnnnnnnnnnnnnnnnnnnnnnnnnnnnnnnnnnnnnnnnnnnnnnnnnnnnnnnnnnnnnnnnnnnnnnnnccacgcgtccggagaaattggggattagagattcgaagagttgtcgtagcgagatcgagtttttggaagaacagattgtgaatcatgatggtgatttggagccaacgggatcggttattaatggttttgtggcgattacaagatactgtaggttcttgttgtttggatttgaagaagatggaatggagtggtggattgagaataatccgaagaagcctcgaaaagggttcgttgcacaggagattggagacacgtttataactgtgccaaaggattttgtttgtccaatctctcttgatttgatgacagatcctgtgattatttccactgggcagacttatgatcggaactctatagctaggtggattgaacaagggcattgtacttgtccgaaaacaggacaaatgctaatggattcgaggattgttcctaatagggcgttgaagaatttgattgtgcaatggtgtact

SEQ ID NO: 123016 - DNA, 454 bp, Arabidopsis thaliana
cccacgcgtccgcccacgcgtccgcggacgcgtgggcttaaaggtggagctttcttcgaatttctccgatcagctcaagaggcaattgtgttaccaccatttgttgctttagctgtgagaccaagacctggagtttgggaatacgtaagagttaacctccatgatcttgtcgttgaggagcttcaagcttctgaatatcttcaattcaaggaagagctcgtcgatggaattaagaatggaaacttcactcttgaacttgactttgaaccattcaacgcggcattccctcgtcctacgctcaacaagtacattggagatggcgtttggagttcctcaaccgccatctctcggctaagctcttccatgacaaggagagcttgcatccgctgctcaagttcctccgcctccattcccacgagggaaagactctgatgcttaacaataggatccagaa

SEQ ID NO: 123017 - DNA, 1034 bp, Arabidopsis thaliana
  unsure (1)..(1034): unsure at all n locations
gactcactatagggaaagctgctacgcctgcaggtaccggtccggaattcccgggtcgacccacgcgtgcgggaggttaaaccccaatctgtacgaagaaggcaaagtctgtcttagccttctcaatacctggacaggcaggggaaatgaagtctgggatcccaaatcatctagcatccttcaagttcttgtttcactccagggattggtgttgaattcaaagccttatttcaatgaagccgggtatgataagcaggtcggaactgcggaaggagaaaaaaaactcactgggatacaacgagaatactttcttgctaaattgtaaaaccatgatgtatcttatgcggaaaccaccaaaggattttgaagaactcatcaaagatcatttcagaaaacgcggatattacattttgaaggcatgtgacgcctacatgaaaggatatctcataggttccctcaccaaagatgcctcggttatcgatgaacgcagcagcgctaattcaacttcagttggttttaagcttatgctggctaagatagcaccaaagcttttctcagcactgagcgaggtaggagctgactgcaatgaattccagcatctgcagcagcaataacacaatcctaaaaggagctggatacaccgatcgttgccaatgaaccaagtgaaggtttgcggcttctttactattacaagtttcaaattcagatatttctgaaacgtgtgtagtagagtttttttggagttatacaagaattaagcgatactaagttgtaaccccatctggtcgaacaatatcgacaaatgaatttgttttggttggtcatgttttggggcctacttaaaagttttaggggtgcacttcaacacctgtttcttttgtcatgggttgtcaaattacttttctaacaaagattatttaagtaaagttgtttcgctttggtttaaaaaaaaaaaaaaaaagnnnnnnnnnnnnnnnnnnnnnnnnnnnnnnnnnnnnnnnnnnnnnnnnnnnnnnnnnnnnnnnnnnnnnnnn

SEQ ID NO: 123018 - DNA, 535 bp, Arabidopsis thaliana
  unsure (1)..(535): unsure at all n locations
cacaaacctcctctcatcttcaccataaccgaaaaaccaaacaaaaaatccttacataatcagatcttgatattatggatcatatcatcggctttatgggcacaacaaacatgtcacataacacaaaccttatgatcgctgccgcagccactaccactacgacctcttcgtcttcctcttcgtcctccggaggctcggggactaaccagctaagcaggtacgagaatcagaagagaagagattggaacactttcggacagtatctacgcaatcaccgtccaccactttctctctcccgttgcagtggtgctcatgttcttgaattcctcaggtacctcgncccaattnggcaagactaaggttcacacacaactatgtncgttcttcgggcaaccaaaacccacccagaaccatgtgcctgtccactcggncaagcgtnggggtagtntggnnggactnattggccgtcttagagngtgctttttnaaggnacggtggtttccagagntgnaccctttttggtnaagggncgntc

SEQ ID NO: 123019 - DNA, 545 bp, Arabidopsis thaliana
agctctctacgactcactattgggaaagctggtcacgcctgcaggtaccggtccggaattcccgggtcgacccacgcgtgcgctggcttttgcaacatggattccacgagaaagccctagcagctgttgaggctagtgaaggacgaaccgaactaattgataaggtgggagctgggtatcttgatcatttgattgtggaaagaaaatatgctgaagcggcatctttatgccccaaattgttacgaggatctgcttcagcctgggagaggtgggttttccattttgctcaactacgccagctgcctgttcttgtcccatatatgcctacggataacccaaggcttaaggatactgtgtatgaggttgctctagttgcactagcaaccaatccctcataccacaaggagcttttgtcagcggttaaatcttggccacgttctgtatattctgctttgactgttatctcagcaatagagcctcaactgaacacatctttaatgacagatgccctcaaagaggggctggcagagctgtttgtatttgat

SEQ ID NO: 123020 - DNA, 725 bp, Arabidopsis thaliana
gggtcccgcccggggatttcccgggttgacccacgcttccgaaaagatttttttttttaacgcgactattttggaaaatccaacgataagctttataatttttctacttatgagtggatgtgtgaagagcagggaaaaagtacgaaaggaaaatatgagtgaggagaagaggaagcaacacttcgtgctagtacatggtgcgtgccacggcgcatggtgctggtacaaggttaagcctcttctcgaggctttgggccatcgtgtaaccgccttagacctagctgcttccggtatagacacaaccaggtcaatcactgacatttctacatgtgaacaatattctgagccattgatgcagctaatgacttcattgccgaatgatgagaaggttgtactcgttggtcatagctttggaggtttgagtttagccttagccatggataagtttcccgataaaatctctgtctctgtcttcgtgactgcattcatgcccgacaccaaacactcaccatcgttcgtcgaggaaaagtttgcaagcagcatgacaccagaaggatggatgggctctgagctcgaaacacttggttcagattaattccggcttgcctgggttcttccccacccgacttcttgaagccccgtttctaccaacttttcttctggtggaggaaactttgagccttggaatttggcttctaaaagaagggccccggtcccactggggt

SEQ ID NO: 123021 - DNA, 586 bp, Arabidopsis thaliana
  unsure (1)..(586): unsure at all n locations
acggacgcatgggccagagtgtattggtagattttgatttacgtacgccaacactctttgacaacaagtattatgtgaacctcaaggagaacaaaggacttatccagagcgaccaagagttattctctagccctgatgcttcagacactcttcctttagtccgagaatacgctgatggtcaagggaaatttttcgatgcgttcgcgaaggcaatgataaggatgagtagtctttcacctttaacagggaaacaaggagaaataagattgaactgtagagtggtgaattcgaaatctaaaatcatggatgtggtagaagatgctcttgaatttgcaagctcaatgtgaggaaatgtttttctttaacaataaataaattatcaatgttgtcaagatgttatcttttttccttacttccttgtttgttttgtgttacttatttaaattctatataactattaaaccttgaatccataaattatttttaccaaaaaaaaaaaaaaagnnnnnnnnnnnnnnnnnnnnnnnnnnnnnnnnnnnnnnnnnnnnnnnnnnnnnnnnnnnnnnnnnnnnnnnnnnnnnaatcg

SEQ ID NO: 123022 - DNA, 639 bp, Arabidopsis thaliana
gctggtacgcctgcaggtaccggtccggaattcccgggcaacaatacacttctcttgacgcctatctctttctcaccaccaccattaccttcgtcacttctctcttccaagcaatttaaaccttcaactaatccagaaatgcaaatgctaagaaacttaagcacgaggacgaggagtcgtcgcggcggatatgagcgtgtaagcgatgattccaccttcagcctacttggagcaaagctaaggaggtcaacgagcgttccatactatgctccatcgataaggcttggtggagattttcctgtgattttggaaaagcttccacgccaaaaaccaactaaaacagtggtgacaagcaaattaagccatccaatcttcagtttatttgatggttatcgccggcataacaagaagaaagcgacggctaaaccggagttctctagataccatgaataccttaaagaaagtggaatgtgggatttgagatctaataagccgggcatctactttaaggagatggatataacaccatatatgttagggttgggcctcatttattatattatttgggacaattcttaaggatccgaatgatcgaactataagagctattttctttttcttccccttggaattttttaa

SEQ ID NO: 123023 - DNA, 534 bp, Arabidopsis thaliana
  unsure (1)..(534): unsure at all n locations
cnnnnnnnnnnnnnnnnnnnnnnnnnnnnnnnnnnnnnnnnnnnnnnnnnnnnnnnnnnnnnnnnnnnnnnnccacgcgtgcgtgacgttcatcatctccgggccgataccagtgtgcgtttggatcgggttgacatgagcctcgacagggtgattcagcaagtgggttccatgaaaattgggggaggtggcttgatatcagaggccatgaagagagccgaggctatggagattgagaccaacgacgattcggagaaatttggggttggattggaattgggaaaggttaaggttaagaagatgatgttcgaatctcaaggaggggtttttgggatcagtggaatgggcggtgttggtaaaaccactcttgccaaagaacttcaacgggaccatgaagtccaatgtcactttgagaaccggattttgtttctgactgtatcacaatctccgcttcttgaggagctgagggaacttatatggggtttcttatctggttgtgaagctggaaatcctgttcctgactgtaattttccg

SEQ ID NO: 123024 - DNA, 558 bp, Arabidopsis thaliana
  unsure (1)..(558): unsure at all n locations
atgatactccagctccctacgactcactatanggaaagctggcacgcctgcaggtaccggtccggaattcccgggtcgtacccacgcgtgcggaaaaagaagatcccattacttccacagacttaatctggaacagagattttatggatcaaatgaagaaattgtttgatgatcctaatgattcttctctcgacccatctccttcaaaggaaaagtcttctgggtttctgagctttagcagagttatgagtcttgacagtatggatgttgatttaagtaaagagcttgcatcgtcttctaaatccgttgtgaaaaatcgtcttgacacctccaagtcagaagctaaaaagcaaatgagtaaggctattgtgtctcctaaatggaagctggcacctacacgtcgtgagcaagagaaatgggatagagcaacgaaggctgcaactggtggcagtgatgtgatgtttagggagctgagacggccacgtggtgacccagaagtacaagctgctaaagacagggaacaatattttaagctgaaaaataagattcaggttctca

SEQ ID NO: 123025 - DNA, 581 bp, Arabidopsis thaliana
  unsure (1)..(581): unsure at all n locations
nnnnnnnnnnnnnnnnnnnnnnnnnnnnnnnnnnnnnnnnnnnnnnnnnnnnnnnnnnnnnnnnnnnnnnntttattttattttgcatcatcatcatcaatatcattcatcatcatcagacatcaggtgcgtcataagctccacaaaaaactcatccatggcgattcttagttacatctcagcaacatcaaccacaccaccaattcctcaagatcaatctcccaattctcgtctaccaaccaaaatcattctacccaataagaaacctgagaaatggtccaccggagttgctcccggagagtacggtggtcctccgactaccaccaagctccgaaagtactggggaggtgaaaaagaagatcccattacttccacagacttaatctggaacagagattttatggatcaaatgaagaaattgtttgatgatcctaatgattcttctctcgacccatctccttcaaaggaaaagtcttctgggtttctgagctttagcagagttatgagtcttgacagtatggatgttgatttaagtaaagagcttgcatcgtcttctaaatccgttgtgaaaaatcgtcttg

SEQ ID NO: 123026 - DNA, 891 bp, Arabidopsis thaliana
  unsure (1)..(891): unsure at all n locations
nnnnnnnnnnnnnnnnnnnnnnnnnnnnnnnnnnnnnnnnnnnnnnnnnnnnnnnnnnnnnnnnnnnnnnnnnnnnnnnnnnnccacgcgtccgtttccatttaaaactctcttcttcttttttgttctctctctctcttcatggaagctcaacaccttcatgccaagcctcatgctgaaggagaatggtccacaggcttctgtgattgcttttctgactgcaaaaattgttgtatcacattctggtgtccatgtatcacctttggccaagtcgccgagattgtagatcgaggatccacatcgtgtggtactgctggagctctatacgcgttgatagccgtagtaactggttgtgcatgtatatactcatgtttctatcgtggaaagatgagagctcaatataatattaaaggagatgattgtactgattgccttaaacatttctgctgtgagctttgttctttgacccaacaataccgtgaactcaagcaccgcggttacgatatgagtcttggatgggcggggaacgtggagagacaacagaatccaggaggtgtggccatgggtgctccggtcttccgaggcggcgtgacccgctaaggattatttctttatgtaattcatttgtcttttatatgtagtgataacgcggggtttaatcctcggtttgtgttgttaatatgcttgttgtgatttgaacaaaaaaaaatgcttgttgtgaaagtttagacatacagtatatgaatgtttcttcattgtatattccactatttggttacaagaattaaattacaacgtcgnnnnnnnnnnnnnnnnnnnnnnnnnnnnnnnnnnnnnnnnnnnnnnnnnnnnnnnnnnnnnnnnnnnnnnnnnnnnnnnnnnnnnnnnnnn

SEQ ID NO: 123027 - DNA, 535 bp, Arabidopsis thaliana
  unsure (1)..(535): unsure at all n locations
caaaaanctttatctttcctncctttgaaatctcccggagaaaaactatagagattttccgtttcccgctttaatacagtgccccaattcgcgcgacacatagagtgtagagacgctttcacgagcgtttccgacgtcggactttcagctcatcatctccacatctttaacggtaaagattaatcatgcctgaaattcatttgggtgctcatacaataagatcccatggagtaacagtcgcgaggttccacatgcatgactggctcattcttctgctgctaatagtcattgaaattgttcttaatgtcatcgaaccctttcatcgttttgttggagaagatatgctcactgatctcagataccctctgcaggacaacacaattcctttctgggctgtcccgttgatagctgttgtgctaccttttgctgtcatttgtgtttactacttcattagaaatgatgtttatgacctgcatcatgcaatactagggcttttgttctctgtacttataaccggtgtcataaccgatgctat

SEQ ID NO: 123028 - DNA, 419 bp, Arabidopsis thaliana
agaaaagtctgtttttttattgagatttttttgtttctatagattctatcgaaatgccgatgtttcagccgttaaagagagatgggttaataggatttgaaggtggtggtgatgggcaagtcttagatctggatactgcagtgaaagatggagttctcggtggtgttaatggtggtggtgttggagttgttgatgagaaattggatctgaagaagatgataaaggagctagatttacaagatataccttctgttttcatttgtcctatctccttagagccgatgcaagatcctgtgactttgtgtactggtcaaacctatgaaaggttaaacattcacaaatggtttaacctaggtcacttgacttgtcctactacaatgcaagagctttgggatgatacggtaactcctaataaaact

SEQ ID NO: 123029 - DNA, 433 bp, Arabidopsis thaliana
aaccgtcaccttgttatacacatttaatggagtttacactagggacagtgaaatgagttcttcattgactttgacttgcactgacggtgctcctgccttaaaacaaagaaccatcggtctcgctaacacccacttgtcgattccctcgcagctcatctccatgtaccagcttcctcataagatagctctttgtttgccttccaccgaacgaagtcagtctcataatggtgacctttggatcggtaaaggggaatattattatctgccttacgataaagatgtctctaagatctttgcctccacgcctctgatcggtaatggcaagtccggcgagtacttaatcgatgtgaagtccatccaaatcggtgcaaagaccgttcctataccctatggagccacaaagatcagcactttggctccttacaccgtattc

SEQ ID NO: 123030 - DNA, 453 bp, Arabidopsis thaliana
gttgttacaggttcaaagattcttagccttccggggagttttggtaagaaaaagacggagtcacagccaccgtcacccctgagtacaaggaactatcagaatggtgctgctaataccccaaaggttcgtcaatcaagaccttcaccagtagctatgaagaagacgccagttccagaagcgaacaaatctttacactctttatcgtctgatggaatctctattgacctcaacggtcagaatgattcttttaaccataagcaggagaagccatcgcgaactgttcctctatccccaaacagcatggctgatcgtgggaaacccttatcaccacgacctcaagggcatgaacacagtggcaagaatgacacagccagtgagattagtttgtttaatgttgtaagccctccaagatcatgcgccaatgatgatgatgatgatgatgatgaaaacaat

SEQ ID NO: 123031 - DNA, 548 bp, Arabidopsis thaliana
  unsure (1)..(548): unsure at all n locations
agaagagacaaaggggagagagagaaaagaagagcgaacaaattccttctttttcccctctttctctctctctcccactctctcatcttcttcttcttatgattttcaacttattacaacaacaacaacaacaaaataatcttgcaaagtttcagtctcaggtggttcacagttaatgctacttgcaatgatgaatccatcccaatttcgataacctctactgaggcatccaaatgttgaacggaaaagaagagcctaagcagaagaaaggttggtcagagtcgctgctagaatttcggtcagggtttggggaaaagatgaaagttgtgtcgaagaaacgttggaaatctcttggtcctcttcatctgaaaagcaaatcagttgcacggttttgcttcttttcgaagttgaagtcaaacaaccatggtccaggccgtgcaccagtgtatctcaatgtttatgacttgcctcctattaacgggtatttcttttgggcaggccttggtatattnaactctggngtagaagttcatggngtagtgtatgct

SEQ ID NO: 123032 - DNA, 542 bp, Arabidopsis thaliana
ctagaagagctatgacgtcgcatcgcacgcgtacgtaagctcggaattcggttcgagcctccggccaaccttaacccttaagcgaacggtgttcctttgcggattgcgatcgttccgtcgatcccttcatcgcccgatctaaatctctaatcgtgtcggagattaaaagcagaggttttgtggtgaatcatgtctgatgtcccttcttgttctagcggtaatgatacaaacaacaatgattcgagtaacttcgaatgtaacatctgcttagacttggctcaagatcctattgtcactctctgtggtcacttgttctgttggccttgtttatacaaatggctccatctccattctcaatctaaggactgtcttctgttcgcaaagccgggaatcgaagaacaccaattgggttcctttggacacagtgaaggtaaatggtgctgcgtgtccctagggaccaaggttcattccgggggcttataagtcgcctaagcgtgccttttggtgaaaagaaacctagtgcaggccgacgcgtctgggtc

SEQ ID NO: 123033 - DNA, 487 bp, Arabidopsis thaliana
gcgggacccggcccgaattcccgggctttccagaagcaaaaacaagataagatctcttcagattcctacactccaacaaatataagtttcattagattctttcttagctagagaatgaaactgattgagaagacgatgagcatgaaccagtttaggactatggaggaggagaagcaagacggtggtgagcttttccataccatcgaggtagctaaagttgaccggaacaacgtgtctcagccgccgccggctgctactgcagcactgctagaagttcccggtgatgaacttaacctaattccaccgttgaacttttcgatggtcgataatggtatattccggtctggattcccggactcggcgaacttctccttcatcaagactcttggccttcgctcaatcatatctttgtgtccagagccatatcctgagaacaacatgcagttcctcaaatccaatggaattagtctttttcagtttggcattg

SEQ ID NO: 123034 - DNA, 427 bp, Arabidopsis thaliana
agaaagggatacaaaaacagaagtctcatcctcatccgcatgtcaaatcaacaaaaatcgatgttcgctcagtttttccggcgtcgattgcattcaccggattcggagtcgtcgatggtaaaggatgacgaattatttcagagtttctcttgtgacacgacttgcttcacgtgtgtctatttttgacacgtgtaatggccataaatttatccttgtttccttggtgtgatatcatttgggctttttagtgggcttgtaaacttgcatatagatatacaaatttgaataaaatttagttcacttgtgaaaaaaaaatatcagcaaaatcggatctcttttaaatgtcaatatgatctaaacaacgaactttaacagatatgtatttccccctcctttgcctctgcaaatctctcatctttttcttgtt

SEQ ID NO: 123035 - DNA, 545 bp, Arabidopsis thaliana
  unsure (1)..(545): unsure at all n locations
cngcccaccagganccccgtgatncactagggcctaggtatgaaagggaccttngttnccgcaaattanggatcccnatagctgccttacaggtatgggnacctcggattcgggcaaatcccttatggatcaatccagatcttcctcctctgttacctgttattcgtcagatctttctttgtttgttgatttgacatgcggatgaggatgagacttctgtttttgtatccccttcccactgtattatgcagtatccggtgagaatcaataaaaatcgatgttcgctcagtttttccggcgtcgattgcattcaccggattcggagtcgtcgatggtaaaggatgacgaattatttcagagtttctcttgtgacacgacttgcttcacgtgtgtctatttttgacacgtgtaatggccataaatttatccttgtttccttggtgtgatatcatttgggctttttagtgggcttgtaaacttgcatatagatatacaaatttgaataaaatttagttcacttgtgaaaaaaaaatatcagcaaaatc

SEQ ID NO: 123036 - DNA, 465 bp, Arabidopsis thaliana
gttatgatttacttttctatccttatataattatgatgatcatttccttgcccagaaagtcgccgagaaagttaaaagtagaacggcggagaaaaaaaaaacgaagaggaagaggagagatggagtcgcagaagaagatagctcatgagatcggaggtatgaagaacgatgctcttcgctttggtcttcacggcgttaagagcgatatccttagatctcatcctctcgaaacggcttacgaatctgggaagcaatcacaagaagaaatgaagaggagagtgatcacgcatacttatggagctgctcttcctttgaagatggatcttgatagacaaatcctttctcggtttcagagacctcctggaccaattccttcatcaatgcttggccttgaagtctacacaggagctctagataattttggttttgaggattacttgaatgatcctcgcgaatccgagacgc

SEQ ID NO: 123037 - DNA, 827 bp, Arabidopsis thaliana
ccagtgcatatatgattatttatctgaggcgaagattcctctcttcatcttgatgcgactactactggtccaactttcattggatcggttgatttgaggccgttgttcttacattttggtgtcccacctgttcttttagtactgttttcctttttgtttctggcaatcagaaaacataaaggcaatcagtcatccttctcaataacatacaaagatttggttttcaagagaatcttctatagaaagctagacgtttacttctgtcttattaaggagaagtactggttctttcatttatatcttggctggtttgggaattgcatccaaatttcttgcagtgggtgtcagcctggagctgcagaaaagtgagttgatgttagagattgtaggatcttactccaaaaagccagaaaaggtccttgcgactctctaacttgaaagttgtttcctttttttgaatctgagctggttttggaattttggtgtcaagatttggaatttgaatctgtagtaagattcaggtttagtgggggagggaacaagttggaagcttttgctagttttgtcaaaggtgtcactaaagtactaactatcagaaaacattttcagccagaagcttggtgatgtatcttcagattttcaacaacccatctcatggcttagctcatttatgctactctagtcgggtttcgtgtagggtaagactgagtcgtgtccttgccatgccaccgtcttcagtcctcttgcatatggacgaaagcaatgatcttcccaagcccaagaagggtttttgtctgagtgaagattcgagaaacagtttaaacagt

SEQ ID NO: 123038 - DNA, 410 bp, Arabidopsis thaliana
actttgtctctgtcgcaatctcaaccatatggagaaagacatggcaatgatgggagacaaactgatactgagaggcttgaaattttatggtttccatggagctattcctgaagagaagacgcttggccagatgtttatgcttgacatcgatgcttggatgtgtctcaaaaaggctggtctatcagacaacttagctgattctgtcagctatgtcgacatttacaagttagttttaattactaatatgagaggatttgctagagatagttaactaaattctcccctttactcttgaccaatccatttttattgtgacctcatccaaaaatgacaagctttgcttatataacaatttgtcatcactatctgtgtcactgagtgatgcattgattataggatatgaaatgatt

SEQ ID NO: 123039 - DNA, 1202 bp, Arabidopsis thaliana
gtcaagctgagtctcggagtgaaaagggtccggtttagtgaagccaagtaagcaaagccccttgtttttgacggacattatatctcctcctcttctcttctataaattgggcacctttttccaattttacgcacagtcacggagatagatagtaagagagagctatggcggaggagcacttcgacgttctgactaaatccggtgagaagaccggtgtgtccaaacccaggggagaggttcacagagatggagattaccatcgtgctgttcatgtctggatttttgtggagactactcaacagctacttctccaacttcgatctgatgataaagattcttggcctggtcaatgggacatctctagtgctggccatatatcagctggtgatacatcgcttctatctgcacagcgggagcttgaggaagagcttggcgtaaaactcccaaaggatgcatttgaaaagatcttcgtttttctgcaggaatgtgtcacaaacgatggcaaattcataaataatgagttcaatgatgtgtatcttggtactattctgcatccaatcccattagaagcctttactcttcaaaaagaggaagtctctgctgtaaagtacgtaccttacgaagaatacagaaactttctgtctaaggaagatcctgcttatgtgccatatgatgttaatggagagtatggaaaactatttgacataatcagacagaggtgccaagtgaacactgaggcccgtagtttatctctgcagaagcaactccagagatattctccagtcaccctcgaagccaagttgacagaactttctgaagcagatcagaaagcgttgggtctaattgtgaaggctgcaaaaattatggacgatatattctatgagcaggtttggaacagcaatccagccctaagagattggctgaaggatcatgccaatgcatcaaaactggacaaactaaaatgggattacttcacgatcaacaaaagtccatggtcgtctcttgatgaaaatgaagcattcttgagtactgcggattcagctgtaaagttgcttcctggagcaacaaaagccatagctggctggaagggtcttgaatatagagcagcctttccagtgactaaaccacctggtgccaatttctatcctcccgatatggataaaatggagttcaccttatggctcaatggccttacggaagag

SEQ ID NO: 123040 - DNA, 466 bp, Arabidopsis thaliana
acccacgcgtccgctctcttcgtcttccctcccgagaaagctcaacggagccctagactggttttatcactctcgccaacaccaaccacgctttttctctctttacctccatttttgtattcgtcaccggagtagatggatacgagagaaatcaacggttttgcctccgccgcgagatcgatatctcttcctacgcagcctaattacagtagcaagcctgttcaggaggcgttgaaacatttggcatctataaacctcagagaattatgtaatgaggcaaaagttgagcgatgtcgtgcaacaagagacttagctagctgtggaagatttgtgaactatgtgttgaatccatgtggtcatgcctccttgtgcacagagtgttgtcagaggtgtgatgtttgtcctatctgtagaagtacgctaccaaaatttggagatagacttaggcttcgtctctattatgagt

SEQ ID NO: 123041 - DNA, 468 bp, Arabidopsis thaliana
cccacttgtctctcgaatcgtaacccataacgtctttgggtggcatccatcgctctctcatacaaaattcagatctgaagcacacacaagcttcggattccagatcaaatccggcgattcaagccgctttcccaaattcaccgtcgatctggagccgttacaggatccgccgcagaccacggcgtcctccggtaccggcaacggcaacggtaagatacgctaccgttcgccttcttccactgagctcctggagtctggtaaccattctcctacatccgactctgttgacggaggtaagatgacggcgaagcgtgggattggacggcacgaatctcttgctgacaagatccaacgccatcgtgggattatacttgtgatttcggttcccattgtgttgatcggtctcgttcttctgctaatgcctgcgagatcgatttctgattccgtcgttgaagagtattctgtgca

SEQ ID NO: 123042 - DNA, 536 bp, Arabidopsis thaliana
cttctttcctttatatttaaaaaccttcttcttctctctctgtacatcgtcacagcaaaaaaaaaacagaaggagaagaaacaaaaacaataatctcagcaaaaacaaatctctactcatcgaaatcgaaatcaaaatatagaaacgatgtcttgctccgtcgccgtatgtaattctccggtgttttcaccgtcgtcttctctattctgcaacaaatcttcgattctctcgtcaccgcaagaatctctttctctaacgctttctcatcgcaaacctcagacctcttctccttcctctccatccaccaccgtttcttctcctaaatctccatttcgtctccgtttccagaaacctccgtccggattcgctcctggtccattatcttttggatctgaatctgtttctgcatcctctcctccgggaggtgttttaaagaggaaacgacctacaaggcttgatataccgattggtgttgctggatttgtagctccgatttcttcatcggccgctgtggctgcgacgccgagagaggagtg

SEQ ID NO: 123043 - DNA, 443 bp, Arabidopsis thaliana
gcttgtgagcagagagagagagcgagcgaggaggctagagaatcgagaatcgatcttcgccgaaccaccttgtcttctcttagctcatcgaatctctccgtcgccgtcgattcttcccgccggtgaatctctgccttattgttttcttcaatttgatcgtcctgaattcatcgtcctatttagggtttcgatcacaatctgaagaggaggtcatggacgtttctgctagaaagtcacaaaaagctgggcgcgaaaagttgaggagggaaaaactgaatgagcattttgttgaactgggaaatgtactcgatccagagagacccaagaatgacaaagccacgattctgactgatactgttcagttgttgaaagagctcacatctgaagtcaacaaactgaaatctgagtacaccgcattgacagatgagtcccgcgagttgaca

SEQ ID NO: 123044 - DNA, 512 bp, Arabidopsis thaliana
  unsure (1)..(512): unsure at all n locations
nnnnnnnnnnnnnnnnnnnnnnnnnnnnnnnnnnnnnnnnnnnnnnnnnnnnnnnnnnnnnnnnnnnnnnnnnnnnnnnnnnnccacgcgtccgctgaatctgagctatctctggatcagcttgggatccgccacgtcacttctgacagccgccggagatgaacctcacgtgaccgttcttcagatcggatcttctgtgtgtaaccgtcgaggaggactcttcttcttcttcttcttcttcttcttcttcttcctcgctcacattgttcagtcttgaaacactctaatggcgacaatgagcaaagctcaaaggaccaaacccacttctggatctcagcgtcttgttctgttctgtatagttgtgttctcattcctcctcctcttctcttcggtgatctccaccggcaaattgggattgccttatcaacaaaccctaatcgactatttcgtgtggtctcctcgtggtaagagacagcattcgttgtcggagaagtacttgtattggggaaaca

SEQ ID NO: 123045 - DNA, 781 bp, Arabidopsis thaliana
  unsure (1)..(781): unsure at all n locations
nnnnnnnnnnnnnnnnnnnnnnnnnnnnncccacgcgtccgcccacgcgtccgctcatttccattacccaatcccgctccttttctctgattttgaatcgaacccttaatacccagaaatctcacggttccgaggagtgggtttttgggggttagggttttcgagagatgttgaatgtcaggttcattgatgaatctgttttctctctgcttcaagccattcgggcacgtctgtgataattccgaagctggatcgggtggtggtggtggcgtttctggtggaaccggcggtgaaggcaaagacggattgctttggttccgtgatctcggtaaatattgcggcggagatttctccatggctgtgattcaagccaatcaggttcttgaagatcagagccaggtcgaatccggtaattttgggacttttgttggtgtttacgatggtcatggtggtcctgaagctgctcgttatgtctgtgatcatctctttaaccattttcgagaaatatcagcggaaacacaaggagttgtgacgagagagacgatagaaagagcctttcatgcgacagaagaaggattcgcttccattgtgtcagagctgtggcaagaaataccaaatttggcaactgttggcacttgttgtttggttggagtgatatatcaaaatactctttttgtggcaagtcttggagattcacgggttgttcttggaaagaaaggcaactgtggcggactctctgctattcagctgtcgactgaacacaatgctaacaatgaagata

SEQ ID NO: 123046 - DNA, 551 bp, Arabidopsis thaliana
  unsure (1)..(551): unsure at all n locations
gcaggtaccggtctcggattcccggctcgacccacgcgtcgggtttttcattccagaatagccctaatccaaattcgaaatctttcttctgattttgatctttccgatcatgtcatcggtctgtgttaacgaagcattaaccgatgacgagctgagatgggtattgtcgagactagacagtgataaagataaggaagtgtttggtttggtctgcaagaggtggctaaatctgcagagtaccgaccggaagaagctagcggcacgtgctggtccacatatgctccgccgtctcgcttctaggttcactcaaatcgtcgaattggatttgtctcagtcaatttctaggtccttttatccaggagttactgattctgacctcgctgttatctctgagggattcaagtttctcagagttcttaatcttcacaactgtaaaggtattacagatactggattggcctcaattggaaggtgtctttctttactgcagtttttggatgtatcaaattgaggaaagctttangtaaagggtttcacctttttcanaagnt

SEQ ID NO: 123047 - DNA, 528 bp, Arabidopsis thaliana
  unsure (1)..(528): unsure at all n locations
nnnnnnnnnnnnnnnnnnnnnnnnnnnnnnnnnnnnnnnnnnnnnnnnnnnnnnnnnnnnnnnnnnnnnnnnnnnnnnnnnnccacgcgtccggctttacttgtaccacacgatccttatagctcatcatctaatggccaggtaatccgccagagaagaagaagaagaagagaatagattagggtttttcattccacaatagcccgaatccaaattcgaaatctttcttctgattttgatctttccgagcatgtcatcggtctgtgttaacgaagcattaaccgatgacgagctgagatgggtattgtcgagactacacagtgataaagataaggaagtgcttggtttggtctgcaagaggtggctcaatctgcacagtaccgaccggaagaagctagcggcacgtgctgggccacatatgctgcgccgtctcgcttctaggttcactcaaatctggcgagtgggatttgtctcacccaatgtctaggtccttttatccaggaggtactgattctgacctccctgttt

SEQ ID NO: 123048 - DNA, 633 bp, Arabidopsis thaliana
  unsure (1)..(633): unsure at all n locations
agagagacaaatgcctataataagccattcataatcttcttgcttcttgttcagaataatggggaatcttttctgttgcgtgcttgtgaagcaatcagatgttgcggtcaaggagagatttggcaaattccaaaaagtacttaatccaggtctccaatttgttccatgggtcatcggtgattacgtcgccggtacactgacccttcgtcttcagcaactcgatgttcagtgtgaaaccaaaacaaaggacaatgtgtttgtgacagtggttgcatccatacaatacagagtcttagctgacaaggcaagtgatgctttttacagactcagcaatccaaccacccaaatcaaagcctacggtctttgaatgtgatcagagcatgtgttccaaagctgaacttggacgatgtgttcgggcagaaggattaaattgccaaatctttggaaggggcgctgggcaaagccatggcttcttttggtcccgaaatccttaaaccctatttttgcactggcggcctgtcaacaggttaacgggcccttccggnttacggccggggggggtttnnngtgnaccggcgnaaggagggtttgaatttttgccaagnggggnnngggtaaaccttgggttnntnt

SEQ ID NO: 123049 - DNA, 861 bp, Arabidopsis thaliana
  unsure (1)..(861): unsure at all n locations
tccacccacccaaatcaaagcctacgtctttgatgtgatcagagcatgtgttccaaagctgaacttggacgatgtgttcgagcagaagaatgaaattgccaaatctgtggaagaagagctagacaaagccatgactgcttatggttacgaaatccttcaaaccctaattatcgacattgagcctgatcaacaggttaaacgtgccatgaacgaaatcaacgccgcggcgaggatgagagtggcagcgagcgaaaaagcagaggctgagaaaatcattcagatcaaaagagcagagggtgaagcagagtcaaagtacctgtcgggactcggaatcgctcggcagagacaagcgatcgtggacggtctgagagacagtgttctagggttcgcaggaaacgtgccagggacgtcagccaaggatgtgttggacatggtgatgatgactcagtactttgacccaatgagagatatcggagcaacttctaaatcctctgcggtgtttatccctcacggtccaggcgccgtctctaacgtggcagcgcagattcgaaatggattattacaggccaacaatgcctcctaatcactcaagtcaaattgtctttggtcgtctctttacacacttttgtatcttcttattaaaaaggtaaatttgacttttaatgtaatggtgtgctgattgtgatttgtcattatgtatggacctatctcttttgtgagtggcgtgataaaaaaactttggatttgtttttaaaaggcaacataaatttctgtttgcgagtgnaacaaaacaaaaaaaaaaaaaaaagggcggccgcttctagaggatccaagcttacgtacgcgtgcatgcgacgtcag

SEQ ID NO: 123050 - DNA, 1235 bp, Arabidopsis thaliana
  unsure (1)..(1235): unsure at all n locations
cnnnnnnnnnnacccactatacggtataagctggtacgcctgcaggtaccggtccggaattcccgggtcgacccacgcgtccgttttcttctttctgcaaattttattttcccgagaaaatcatcactgagaaaaatgctcgctgtgtttgagaagacggtggcgaatagccctgaagctttacagagtccacactcgtctgagtctgctttcgcgttgaaagatggatctctcgctactcatttcgcttccgtgaatcccaactccgtcacgcttaacttcggatcttctggatttgttgcttactctcttgataatcctgatcctcgtgttcctagattatttgctgtggtggatgatattttctgtctcttccaaggacacattgagaacctaccgtttctgaagcagcagtatggactgaacaaaatcacaaacgaggccatcattgtgattgaggcttacaggacactacgtgatcgaggtccttaccctgtggacaaagttgttagagatttccatggaaagtttgcgtttatactcttcgatagcgtcaagaaaactgtctttgctgctgctgacgccgatgggagtgtgccgttcttctggggaaccgatgctgaagggcaccttgtgttttctgataacaccgagatggtgaagaaaggttgcgccaaatcttatggtcctttccctaaaggttgtttctttacgtcgtcgggtggattgaggagctttgagcacccaaagaacgagttgaagccagtgccgagagtggacagctcaggtgacgtgtgtggtgcaaccttcaaggttgacgctgagactaagagagagggtaccaaaatgcctagagtcgatagctcccaaaattgggccggtcatatctaaaccggaaatcatacacaaatcacaagctcagcatcttctccctcttgtcttgtcccctctctttcgttacatgtttgagttacattgagaaaataatttcaaaccacaatgttctaaacgcgtttatgtacatgtttgaggtgggatttggaaaggatgtcgagttttgtgaaactttggaattacgagactactagacttttgtttctctgtttacgtttcttaaatcaataaataaataagtttttaaaaaaaaaaaaaaaaaaaaaagggcggccgctctagaggatccaagcttacgtacgcgtgcatgcgacgtcatagtcattctatagtgcgcctaa

SEQ ID NO: 123051 - DNA, 506 bp, Arabidopsis thaliana
  unsure (1)..(506): unsure at all n locations
cccccctctgggtcgactgtatcgataagcttgatatcgaattcgcggccgcggcgaatagccctgaagctttacagagtcctcactcgtctgagtctgctttcgcgttgaaagatggatctctcgctactcatttcgcttccgtgaatcccaactccgtcacgcttaacttcggatcttctggatttgttgcttactctcttgataatcctgatcctcgtgttcctagattatttgctgtggtggatgatattttctgtctcttccaaggacacattgagaacctaccgttttctgaagcagcagtatggactgaacaaaatcacaaacgaggccatcaattgtgatttgaggcttacaaggacactacgtgatcgnngggtccttaaccctgtggacaaaggttggtangaagaatttnccatgggnaaagtnttgcggngtaaanctccttncgntanncggcaaagaaaanctggncctttggcttggntgcntnantccca

SEQ ID NO: 123052 - DNA, 453 bp, Arabidopsis thaliana
  unsure (1)..(453): unsure at all n locations
catttttcnttctttctgcaaatttaattttcccgaggaaatcatcactgagaaaaatgctcgctgtgtttgagaagacggtggcgaatagccctgaagctttacagagtccacactcgtctgagtctgctttcgctttgaaagatggatctctcgctactcatttcgcttccgtgaatcccaactccgtcacgcttaacttcggatctnctggatttgttgcttactctcttgataatcctgatcctcgtgttcctagattatttgctgtggtggatgatatttnctggtctcttccaaggncacattggaggaacctaccggtttctgaaagcagccagtatcggcctgaaccaaaaatcancaaagcgggggccatcattgtaaatttgagggtttaaaaggccaccncgggggttccccgggcctttaccccctggcataaaagttttt

SEQ ID NO: 123053 - DNA, 558 bp, Arabidopsis thaliana
cccacgcgtccgcacacgcgtccgcagagagcacgcgattctagatcgatccaacggtgagagacgccggagtttttatccccgcggcggagtaaaccatttcttcttcccgatgtatcagtgaagttaagtagtcgagagaggggataatgatggaagtggaaggatcgatgaatcgtgctcctgatcaatcatccttcctacgatcaagacgatccaaagctctgtatcagtgtaagcagcagaaactcccagcttgtgagccagtcttaacaccaatatcggttataacagtgtttatgttaatgggttttgttttcattcccattggtctcattactcttcgtgcttctcgtgatgctattgaaattatagaccggtatgatgttgagtgcattcctgaagaatatagaaccaacaaactgttgtatataactgattcatctatcccaaagaattgtacgcgctacttgaaggtacaaaagtatatgaaagctcccatttttatctactaccagcttgataactactatcaaaaccatcgccggtatgtaaaga

SEQ ID NO: 123054 - DNA, 558 bp, Arabidopsis thaliana
agcgtctacacgactcactattgggaaagctggtacgcctgcaggtaccggtccggaattcccgggtcgacccaccagagagaaaaaaaactgaaacatcccaaatggatcatcatcttcaaccataacaacacgaaacccttcttctccaaaatccccaaaaccttgaaacaaagtctcaaaatttcacttcgtggatccgaatgtctcagaacccatcactcttcttcctcttatgtctagggttaggtttttgcgttgacctgggtcaatccctgaaagttcctttcagcgttaacgatgttcttccgatgctacctcgtcaagtctcatggcctgttttgaacagtttccacaacgctgtggatttgttgccggtttttattgggtcagttactcctaataatgtatctattgagtggaaaggtgcttgctttaatggtaatgaagctcgtcttgatatcaccggtagcgatcgtgacgtccctggacttggtggtggtgttcttcatctcacaacatccaaggcacatactttgcatgtatgatcttatgtgt

SEQ ID NO: 123055 - DNA, 374 bp, Arabidopsis thaliana
gagggttgcacacgacacggttccatgagaatcaatccacagagcgtctcttttgatactccaaatctgctttccctagcctactctgatttagctgctgaggactatccgttgggcaatacgaaaagcttagccaaggctccaatcatccttggagtcgatgacgatcaaatcgcccgaatgcgagccccaactaactatttgtcagaggatgatgttgttcgccgatttggcaatgtggtgaagctcatgaagggcatacaaaatgttcagcaacttcacttgcattctgatacactcgaggtgctttcaatgtgctgtgaatcgatgccggtgttcaacaacgtcaaaacgttaggcattaagagtgacta

SEQ ID NO: 123056 - DNA, 1360 bp, Arabidopsis thaliana
  unsure (1)..(1360): unsure at all n locations
ttaggacaactatagaagactatgacgtcgcctgcacgcgtacgtaagctcggaattcggctcgagaaacacagagccaaagaaaagcttcattacctcactaatcactctccgttcaaacaacatcaaagaagacacatacttcgtctcagaactcaaacccacggagcaaaaatcacttcaagaactcaaagaaaagctctcagcttcatcctccaaagcttcttcaatgtggggagtctcactcctcggtggagacgacaaagctgacgtaatcctcctcaagttcctcagagcaagagatttcaaagtagcagactctttgagaatgcttgagaagtgtttggagtggagagaagagttcaaagcagagaaattgacagaagaagatctgggttttaaagatttggaaggtaaagttgcttacatgagaggctacgacaaagaaggacacccagtttgttacaatgcttatggtgtgtttaaagagaaagagatgtatgagagagtgtttggtgatgaagagaagcttaacaagtttctgagatggagagttcaggttttggagagaggtgttaaaatgcttcattttaaacctggtggtgttaattccattattcaagttacagatcttaaagatatgcctaagagagagcttagagttgcttctaatcagatcctctctctttttcaagataattaccctgaattggttgctactaagatattcataaacgtgccttggtacttcagtgtgatctactcaatgttcagcccattcctgactcagagaacaaagagcaagtttgtgatgtccaaagaaggcaatgcagcagaaacactctacaagttcattaggccagaagatattccggtgcaatacggtggtcttagccgtcctactgattcgcaaaacggaccgccaaaaccggcgtctgaattctccatcaagggtggtgagaaagttaacattcagattgaaggcattgagggtggagcaaccataacatgggatatagtagttggaggatgggatttagagtacagtgcagagtttgttccaaacgctgaagagagttacgcgatcgttgtccgagnaaccggagnagatgnaagctaccagatggagctgtttgcaaccctttcactacagtagaagctgggaagnccattcccnctggttngacaanacnccccnctcgccaanaagaaagtggtgncttnccggtacacctgtccgggaatntttttnaaccgggtnaacctttaccgggttttccaaaaatnggggggttctttanaacaactttttnggggggttttanggggttcttcctnggggttnnancagggtttttcg

SEQ ID NO: 123057 - DNA, 497 bp, Arabidopsis thaliana
ttgacgtcgcatgcacgcgtacgtaagctcggaattcggctcgagatctctttctctgcaacataatcaaaatcacgacaacaaaaaagaaaaactctcaagaaacaatggatgcttcattgtctccattcgatcaccaaaaaactcaaaacacagagccaaagaaaagcttcattacctcactaatcactctccgttcaaacaacatcaaagaagacacatacttcgtctcagaactcaaacccacggagcaaaaatcacttcaagaactcaaagaaaagctctcagcttcatcctccaaagcttcttcaatgtggggagtctcactcctcggtggagacgacaaagctgacgtaatcctcctcaagttcctcagagcaagagatttcaaagtagcagactctttgagaatgcttgagaagtgtttggagtggagagaagagttcatagcagagaaattgacagaagaggatctgggttttaaagatttggaaggt

SEQ ID NO: 123058 - DNA, 559 bp, Arabidopsis thaliana
gctctctacgactcactattgggaaagctggcacgcctgcaggtaccggtccggaattcccgggtcgacccacgcgtgcgcccacgcgtccgatttggtgtacctgttcagttacagaggttctggatttgggcaaagagacaaaaccatacctatcgtcccaatcgcccccttacgcctcaagaggaattacaaccggttggacaaataagggaagcatctaataaggcaaacactgcagaactcaagctttttttggaagtagagcacctggatttacgtcctattcctcctcctgaaaaatcaaaagaagatattcttcttttcttcaagctttatgaccccgagaaggcagtattaagctatgctggcaggctgatggtgaaaagttccagtaagcctatggatataactggaaaactgaatgaaatggttggctttgctcctgatgaagaaatagaactttttgaggaaatcaagtttgaaccttgtgttatgtgcgaacacttggataagaaaacttcattcagattgtgtcaaattgaagatggagatatca

SEQ ID NO: 123059 - DNA, 400 bp, Arabidopsis thaliana
catttctctctgactacttcatttcctcttcccaacagttaacaaaagttctgattcgattcaagccaagatccacgtataaagatatgttcatgcgtagaggtttggtatacaacaatatatacatataatagtttgtcgttatgcctggctccctgtatgccacgagtggataccgattttggttttaaaatcggctgccggtggcgtacaaggagtcaagcatgaccagaagcatatggtaactcaattgcatctacaactaaatatgaaatatctagttatgtatatggtttgtgttctataagatgttttcttcgaattttgatttttgtgttccatttgaataagcatacagaaataaaaccaagttttgtagttttttgctttctttctgatt

SEQ ID NO: 123060 - DNA, 594 bp, Arabidopsis thaliana
  unsure (1)..(594): unsure at all n locations
aggcaagcaagtggtatcatcaacaaacaaagcacttctcttttgattcgattctctctttaccttgaagcttcaatatcaaccaaatcttttttctcaaaatctcaaagaatctctcaaactcagtctcctatctgtctctctgcaaactattaccaaccagataatttagatatggaagctactcagaaacatatgattcaagaaggatcttcaatgttttaccatcaaccatcttcagtcaaacaaatggacctttctgttcagacatttgattcttactgcacacttgaatcctcttcaggcaccaagtctcatccttgtcttaacaacaaaaacaactcttcttcaaccacaagcttttcctctaatgaaagtcccatttctcaagccaacaacaacaacttatcaaggtttaacaatcattcccctgaagaaaacaataactctcccttgagcggttcttcagcggcaaacaccatcgagacagagcttnagtctcattgcttaaagatttggngactgcaattnttgggggcctgatgtagncaacaagntttatcagtcaanggcgggttttgggcaggagcattg

SEQ ID NO: 123061 - DNA, 546 bp, Arabidopsis thaliana
  unsure (1)..(546): unsure at all n locations
tgatactccagctctcnnnnnnnnnnnnnnnnnnnnnnnnnnnnnnnnnnnnnnnnnnnnnnnnnnnnnnnnnnnnnnnccacgcgtgcggttttgaaagtgttcctgaaagctccattacaaaactctcgaggtctgagattaagcaggaattagtgaacgctcaaagaaagcacttggaacaaatgatactgcccaatgttttggaactagaggaggttgatccctttttcgatcgtgactcagtggatttttctctacgcatcaaaaaacgccttgaggaatcaaaaaagctgcagagagatcttcagaatcgtatcagaaaacgtatgaaaaagtttggtgaagaaaagctttttgttcaaaagactccagaaggtgaagctgtcaagggatttcctgaagcagaggtgaaatggatgtttggagagaaagaggtggttgttccgaaagctatccagctccatctacgccatggttggaaaaagtggcaggaagaagcaaaagccgatttacaacagatacttttggaagatgttgattttg

SEQ ID NO: 123062 - DNA, 469 bp, Arabidopsis thaliana
tggtgattcattaaccacttcatgataattataatcttccttctcttctgacgattgaattacatcttcttctgatagctgttctgatttttttctgtatacaaagtaaattcaaagtggacaaacatcggtattttaatctcctctcgataatgaagtgtttcttgttctctggtggggataagagaggggaacagaagacccctatttcggtttcattgacctctatcttctctgaccgcgaaataaaccgaagcgggtcagagttcaactctcgtgatgtctctgggacgagcacagaatcatccatggggaggaagaactcgtaccctccggtgtctactagagcaagtaatctcagagagttcagcattactgatctcaagtctgcaacaaagaactttagccgatctgttatgattggagaaggcggtttcggctgtgtcttcaggggcacagtgaggaactt

SEQ ID NO: 123063 - DNA, 535 bp, Arabidopsis thaliana
gatactcagctctacacgactcatatatggaaagctgtccgcctgcaggtaccggtccggaattcccgggtcgacccacgcgtgcgatcaaagtgtaaaaagaagaagaaaaaaaagagaacgaagaagatagaaaaatggaatgcagaaaacacaaccaccaaggcaacagaggagtttgtccttgttgtttaagagataaactctctcgattacctaatactacgtcgtattacatcgttcacagatcttcttcttcttcatccaccaccgtttcgtcttctccgtcgtctccggcggtgaaggatcatcggagagctggttcgatgtcgatgtctttcgctgttagggaagctttaaatggtaatctgatcgaagctttaggtggaggattaatgaaaagcagatctatggctcatgttcccaaggattatattgttagggatttgccgaagaagaagacggagaatttgaaatctaccaccgttaagaagaggactgggttttggactaagttgcttcatctaaaaggaaa

SEQ ID NO: 123064 - DNA, 547 bp, Arabidopsis thaliana
  unsure (1)..(547): unsure at all n locations
tgatacttcnnnnnnnnnnnnnnnnnnnnnnnnnnnnnnnnnnnnnnnnnnnnnnnnnnnnnnnnnnnnnnnnnnnnnnccacgcgtgcgagaaaagaaaaaattgcaaagagaggaagaacaaagaaacttgaatggagaagagaaacgagagacaagtgattctttttcctctaccattacaaggttgcataaaccctatgcttcagctagcaaagatcctttactcaagaggtttttcgatcaccatcatccacacgcgcttcaacgcgcccaaatcttcagaccatcctctcttcactttcttacaaatccgcgacggcttgtctgaatctcagactcaatctcgtgatcttttgcttcaactcacgcttctcaacaacaattgtcagatcccatttcgagagtgtttggctaaactcattaaacctagttcagattcaggaacagaggatacgaaaattagctgtgtgatcgatgattccggttgggtttcacacaatccgtggcggagagtttaatcttcctcgatttgcctctgtgctta

SEQ ID NO: 123065 - DNA, 360 bp, Arabidopsis thaliana
agaacaaccaaatttgtttccgtcttctgctaacatatcctctttttcatctgggaaccctaatttcttgactaacttagggttttatttatccatttgagatactctgtaattgaaaggttgaatttttagaagagacatgggaggttcgtcggagacaaagatcttacaagaactcatactttacgcggcgagcgctgctttcagctgcttggttctctttgcgggtcttcgtcatctcgatcctaatcgtgaggcttctaaaaaagctctcgagcataagaaggaaatctctaaacgtttgggtcgtcctcttgttcagaccaatccatacgaggatgtaattgcatgtgatgtgat

SEQ ID NO: 123066 - DNA, 523 bp, Arabidopsis thaliana
tcgccgagcactaatacgactcacttagggaaagccggtacgcctgcaggtaccggtccggaattcccgtgtcgacccacgcgtccgcacggctgcgagaagacgacagaagggggaagaagagaagaagaagaaccttacaattgcttttgtaaatattgtaggtagtttaaggacgtcactacctacatacatggatttatgtggaactcagatgctgcgcctctcatcgcctcatttcaaaacccttcatttggtgaggcatgcacaaggagtccacaatatagcattagaagagaagggagagaaacctgaatcagaaaagctttttgacgcccacctttctccaaagggtttgcaacaggtttcggaaaggcgcaaccaaatccttgaatcaggattacttaacactgtcgagttagtgataacctctccgctgtgcagagcaatggaaacttcaataggaatatttaggggacaaggatatgtaaatatatccgaagactttgcaaaagctaacaac

SEQ ID NO: 123067 - DNA, 474 bp, Arabidopsis thaliana
agcggacgcgtgggcggacgcgtgggttttcactacttcttcgtctctctctctctctctctctctctctctctgtatcccttgtgtgtcggtgatcagatctcgtgccgacgaaaacgtgcgtctaaagcaatgctgttcgcactctgctatcttcaattcctcgatttatcttgaactgcgattgtttgttgttgtttcgatttcgttgggggtaattgggtgaattagagaggtgaatgagaaattcgcctgcgattctgtctctgtcggtgatcgattgccggagcagaaccaggtcggattctagcttcgccatttggagtagtggtcgatggggccaatgcggctgatctgaatttctatttccctccccccaattcagatcgaattctagggttcttctaattcctgggtttttagtctgtgtttcaattgagtcacgatgcagcaagataatcgcagaaagaataa

SEQ ID NO: 123068 - DNA, 443 bp, Arabidopsis thaliana
atactctcttttgatggctggaggagagaaaagaagaggacttagtaaatcttgtgctcttcccatagtgattgctgggatagagagatatgcattcaaaggagttgcatcaaacttagtgacatatctaactgatgtagtgaagatgagcaattcaagagcagccacgactgtgaacacttggagtggcttcactttcatgttgcctctcttctctgctccttttgccgattcttattgggacagattcttcaccatccttgcttcttcttctctctactttgtgggtctagtgggattgacatttacggcatttgctgggtcacgttcgactacaaaaacaatctctctttacttcctctacacttcactttccctcgtcgctctaggccttggcgtcttaaacccatctctacaagcctttggtgctgaccagctcgact

SEQ ID NO: 123069 - DNA, 532 bp, Arabidopsis thaliana
  unsure (1)..(532): unsure at all n locations
atgatcatgccgnnnnnnnnnnnnnnnnnnnnnnnnnnnnnnnnnnnnnnnnnnnnnnnnnnnnnnnnnnnnnnnnnnnnnnccacgcgtccgccttcctcgccaatcttcatcttcctcatgttttctctaattctccatggaagaaagtctgtggaattacagaaatggcgtaatttaagagttacagtgagcattgtgcaaaatgcatttccttttaccaccaaatcgttctcttctacaatagctaaagattcgagtccaaagggaagtactttcacagtctcttatctcgttgaatcattgggtttgactaaaaaacttgcagaaacaatctcaaagaaagtcaccttcgaagacaagatgctgagaaatctcttcgtccaaagcttcagtttttaaagtctagaggagcttcaagctctgaggtcatagagattgtttcgaatgttccaacaatcttggataagaaagagggaaagaaaggtaacagaattcgaaatatatcggttttgagagaattgggagtacc

SEQ ID NO: 123070 - DNA, 499 bp, Arabidopsis thaliana
  unsure (1)..(499): unsure at all n locations
aatcagaactaatatgttttcttttcattatgatcacctgacaattacatagcacaaaaagttaagaacacatgtttgttccgattcaaaattatagtacctatatagaagaaataaaccaaccaaccaatccacgcctctcaaaaaccggttctaaccggccaatcttgccggtttagattaccggactcggaagtttccgtgctttcgtagtataccatttttgtcatagctaacattctcaccctatattgttttagttatttacattttcctccccatttggtttactcacatcacagaacacccatttgggattctcatcactaaacaactcacgcgcacgcatgtgaccataaggatctgcgtaaccttgttgggtcatatatggtgggggtggagctcctggccaancctggaccgaacctggncaanacggtctgacgacctggncgaacggnttgaaacgtgnggggtgcctgnccagaagtgtnccgaa

SEQ ID NO: 123071 - DNA, 568 bp, Arabidopsis thaliana
  unsure (1)..(568): unsure at all n locations
agaaacacccattnggattctcatcactaaacaantcaggcgcacgcatgtgaccataaggatctgcgtaaccttgttggttcatatatggtggtggtggagcttcttgtccatacccttgaccgtaaccttggntcatatacgantcttgcacgtatccttggttcgaatacggttcttgtacatacgattgcgatgattgaccttgcatcatgtaatgttgttgaccgtatacttgtccttctgggtagtaatacatcggctgtggaggataaccgtaaccgttatactccgatttcttcacatccatagcaccaccgtctcctccacctccacctcctcctccaccgccgccaacagcaacttctttcttcttctcaccaccaccgtcgactttcttttctccaacatctttaatctctttcttttcaccagcaactttgtccttcttctcaccgccagctggagccgccgctgcagctgccactggtgctccgtcatcctttttggccggaacaacttccaccgtgcgtttaagcttctcgttaagataaggagtgagttgttt

SEQ ID NO: 123072 - DNA, 388 bp, Arabidopsis thaliana
ctttctttctttcttgttggtctctcttacttctttcttattcatctaaaacaatttcgatccatttacacataaatatatgtaactggccgtagaagaaacacattgaaggaagagatggctcataggagattaatcatgacgatgacaaagatgatgatgatggtgaccatgatgatgatgatggataaaacatgcatatgtgcggacatttccagaggcagttttccaaagggctttgtctttggaactgcttcttcggcttttcagcatgaaggagcggtgaaggcagaaggcagaggtcctacgatatgggacacattttcccacacttttggtaaaatcaccgattttagcaatgctgatgtcgctgttgatcagtatcatc

SEQ ID NO: 123073 - DNA, 417 bp, Arabidopsis thaliana
cccaagcgtccgcggacgcgtgggttcgacttttcctctctctcttatataaattatatattttgctttggttttttttttttcaccggatcgatcgagaagagagaaaagttcatcttcttcttgttctgattgtttgacaagttttacgacaatggcggtttacggcgagaagaagcattggtggctccgcaacaagaagatcgttgataaatacatgaaagaagcaaagagtttaatagcgagtcaagatccaaacgacgtgaaatcagctctaaatcttctggaatctgcactctctgtatctcctcgttacgaactcgctctcgaactcaaagccagatcccttctttacctccgtcgatacaaagacgtcgccgatatgcttcaggattacattcctagtcttaaattagc

SEQ ID NO: 123074 - DNA, 558 bp, Arabidopsis thaliana
  unsure (1)..(558): unsure at all n locations
ccnnnnnnnnnnnnnnnnnnnnagctactacgcctgcaggtaccggtccggaattcccgggttgacccacgcgtccgcccacgcgtccgctttttggattttggtgaaaaagtttaatttgtctctttctctatttatctccggcgtcaatttcacggcggctacacgacggttatcgatgtcattgactgtaccggagttcgatttcagattgacgccacagtttggtttctcacagtcaccgatcggggagcgtaatttcgcggatgttgataatctggagaactgtattaagtatttgaatcagagcttagtcacctctggattctctgcttcgcttgacctcttcgctaccgatcctgtttcgattgctagaacttgcaattgcgtatacgctttgattcaacagaggcaacgagatgtggaatttagagaatctgctaatgatcagagacaacgacttttatccgatatggcgagactcgaagcaaaagttgaaaggcttgagactcaattgcaagctaaagaaagggaacttggttcggtgacaagaacgga

SEQ ID NO: 123075 - DNA, 548 bp, Arabidopsis thaliana
agctctctacgactcactattgggaaagctggcacgcctgcaggtaccggtccggaattcccgggtcgacccacgcgtgcgtctagctcttcgatttcacgtcactcttcactcaataaaaaagctactgcttcaaagctctacttcttcaatttactctcattcgtttgcgttgatgtagcaaaacaaaaaccaaaatggttcccgtctcgttctgcttcttctttctccttctcttgctctctgctggagagagttcatcgcaattagtttctggtccacacatcaccgatgttaacatactcttacctcccaagatgaagaatccggttgagtatcgccttcaaggaagtgatggctgcttcaaatggtcatgggatcatcatgatattctatcagtcacacctgagtttaattcgagcagtcattgttcgaccagcgcgcgtctcagatcgatttctccgtatagtggtagaaaggagactgcagtttatgccactgatatacagactgggatggtgattcgctgcaaggtctttattgacaac

SEQ ID NO: 123076 - DNA, 552 bp, Arabidopsis thaliana
  unsure (1)..(552): unsure at all n locations
nnnnnnnnnnnnnnnnnnnnnnnnnnnnnnnnnnnnnnnnnnnnnnnnnnnnnnnnnnnnnnnnnnnnnnnnnccacgcgtccgctccgatcatgtcgtcgaagaaagcgaagacgaagaacgaggcgagtagcagccgtggtggcatcggcggagagagtatagtcgctgattgtggacgaaataaatcaacttgcggttactgtaaatcttctacccgctttagtatttctcacggtttatggacagagagactcaccgttaatgactatcaagctcttcttgacagtggatggagacgatctggctgctatctttacaaacctgagatggagaagacttgttgcccttcttatacaatccgcttgaaagcaagtgattttgtcccttctaaggagcagcagcgagtgcgtagaagaatagaaaggtttttggatggtgaactagatgcgaagccgagtgagcagacagaagatcaagatgtctctttctcccgtgaagtttcagtgtcagtgaaaaaatcacttggagcttgctaaagagaaaaaaaca

SEQ ID NO: 123077 - DNA, 559 bp, Arabidopsis thaliana
  unsure (1)..(559): unsure at all n locations
tgatacttcnnnnnnnnnnnnnnnnnnnnnnnnnnnnnnnnnnnnnnnnnnnnnnnagcccacgcgtccgcgccttgacccccgcgcccgccgtttcttcagcctctcgccgctaattaacgccgtctctggttgctaccaccgccgtaaccctaacggcatttttaatggcgtcgtgtgatgacgatttctctctacttggagacgatcagtcaaaccctaatcaacatcaccaccaccaccaagttcttcatcacacgccctacgctcctagacgattcaacccgaaaccatcgaatcagatccttttaccgcatcaccagaggaacggcgacgaggacgacgagaacgatgtcgttgtagaagcgtcttctgctttccacggtcacggtgttaatcctttcacggcggacgaaaattcgaatccgtatgatgataataacgcagctgtagacgaagacgaagacgaagatctcggtgccaacagatctagaatcggaggtgttcgtgttgagaagaggcagagtcaggaggagctaagtgacggaggaacaacaaa

SEQ ID NO: 123078 - DNA, 519 bp, Arabidopsis thaliana
cacttagggaaagctgctacgcctgcaggtaccggtccggaattcccgggtcgacccacgcgtccgcccacgcgtccgatttgttcgccggaatatgctcccttctcttaacgtcgatcacctgttcttctctttccctctctctctatttttctcaactaggaatcaaccatgaatctcccatcattctcacttctctcttctaattctttcatggaagtttcaggttagaagaagattccgggcagattatctgttgattcgaagaataccgaatacgcgtttgaaatttctgaagaattatgggatacttggacttggccttgtcgtattccaaccagccgcagactgttgaagctccagcgagcggaggaggtctcagccagaatggaaaatttagctatggatatgcaagctccgctggcaagagatcatctatggaagacttttttgaaactaggatcgacggtatcaatggagaaatagttggtctagttggagtttttgatggccatggtg

SEQ ID NO: 123079 - DNA, 547 bp, Arabidopsis thaliana
  unsure (1)..(547): unsure at all n locations
cnnnnnnnnnnnnnnnnnnnnnnnnnnnnnnnnnnnnnnnnnnnnnnnnnnnnnnnnnnnnnnnnnnnnnnnccacgcgtgcgcgttacacctacccctcaacaaacgttggcatcattgaattcaacaaagtacacaaacaagttctttctgctgctcttcatctttcacaaggttgtggctattgggtttgtaggcttccttgtcttcagaggcgttcaaggtctaattggatcaaatggtagcgtcaaaaggaaagagaaaaagatcctcagattcttacttccacaagtcgaagctgcatcgctcttgagcatcattcttgcattcctttggcaaatggcattcaggatttggcctgatttcatgattcacttcatactttggagtacgtttttgatgtctttatcctcaggaatcctcttactgtgtttccagatgccagccactgatgctgttggggtttgcctcattgccttctcaattggcaatggtttatatgcttgctgggtcactcgtagaatcaagttctgttctaagattttgg

SEQ ID NO: 123080 - DNA, 1031 bp, Arabidopsis thaliana
  unsure (1)..(1031): unsure at all n locations
ctctccnacgactcactattgggaaagctggcacgcctgcaggtaccggtccggaattcccgggtcgacccacgcgtgcgagaacaaccaatctccactcttgtcctctctgaatcaacaatggcctatggacgcattctctcaagtgacaacgaaggcaacttcagaggacctttgacactctctctcaaacaaggatctttgttggtgatgagagggaacagtgcagacatggcaagacatgtaatgtgtccatcacaaaacaaaagagtaagcatcacattctttcgtattcgacctgacacatatcataaccattcacaacccaacagtcctcgcaacgacggtgtcatgacaatgtggcaaccctaccaaatgacaccaactccattcctcaatggttatgatcattcaattgacatgatgccaaaacttggagccctacgtcctacaatggtcatgatggcaccaccaccggttcaaccaatgatattaccaagtcccaatgtgatgggaaccggtggtggtaccggtgttttcttaccatgggcctctgttaatagctcaagaaaacatgtgaagcatttgcctccacgcgcgcagaagaagcgattacttccgcttcctcctgctgcttcttcttctccagctggaggatccacctctgagcctgtgatcactgtaggttaatcctattcgacttcttcagcaaaaagaaaaaaaaacttggaattggtctttttctaagcaaagctctgtttcttctctgttctgtttccttttttgttctttcaaattcagtttaggttaactcaggttttatagatagaattaagtttgttacatcccccgaggcatgtgttttctactttgtggacgattttattatcagtatattctcaaaatgttaccttttaaaaaaaaaaaaaaaaaaaaaaaaaaaaaaaaaaaaaaaaagggcggccgctctagaggatccaagcttacgtacgcgtgcatgcgacgtcaaagtctnnctataagtcacctaa

SEQ ID NO: 123081 - DNA, 579 bp, Arabidopsis thaliana
  unsure (1)..(579): unsure at all n locations
gctcccnnnnnnnnnnnnnnnnnnnnnnnnnnnnnnnnnnnnnnnnnnnnnnnnnnnnnnnnnnnnnnnccacgcgtgcgcatgggctctcgcttggacataccgtagacagaatttgttacgggaaattgtcaagtaccgtgcagatatagtttgtctacaagaggtacagaatgatcattttgaggagttttttcttcctgagctggataaacacggataccaaggtctttttaagaggaaaacaaatgaggttttcatcggtaatacaaacacaattgatgggtgcgctactttcttcagaagagacaggttctcacatgtaaaaaaatatgaggttgagttcaacaaggctgcacagtctttgactgaggctattatccctgtttcccagaagaaaaatgctttgaatcggttggtcaaggataatgttgctttaatagttgtactggaagcaaagttcggtagccaggctgctgacaatcctgggaagcgccagctcttttgtgtggctaacacgcatgtanacgttccttatgaattgaagatgtaagctgtgcaggttcacacattattgag

SEQ ID NO: 123082 - DNA, 424 bp, Arabidopsis thaliana
ctttgaagtgaaatcggtttcgagagacagtgagacgaaaatgttaaggattttggggagaagagttgtttcagcttcgaaagagcttactagtattcaacaatggcggatccgaccaggaaccgattctcgtcccgatccttttcgaactttccggggactacaaaagggtttctgcgtgggcattttaccggacggagtcgacagaaattcggaggctttttctagcaattcgatcgccatggaagggatcttatcggagcttcgttcccatatcaaaaaggtattggccggaggtggagaggaagcggttaagaggaacagaagcagaaacaagcttttgcctagagaaaggattgatcggctacttgatcctggttcttcctttttggagctctctcagcttgcaggacatgaattgtat

SEQ ID NO: 123083 - DNA, 671 bp, Arabidopsis thaliana
  unsure (1)..(671): unsure at all n locations
aanttttttgccacacaaccnttttgggcctttgtccccccacgggnggccccggtcccccancccccntggggggaaccccnaggccttgaacccnaattggggnggaccaacaacccagtcccancggcttngggncattaatggactcaataccttcaacgccaccctctgcgtgtgagggccccccttaaccggaccctttgtacgtatgtctagcttccagccgtatgaggttccaatggaaaggctaatggaacgccagtgagtactacccatagcaaagaagggtattagaaacagaggttttcttctattatcaatcgtgggtgctttgtgtgccatcttctgggtgttggtagccacagttcgagtctcaggtagaagtcttctcttgaaagactagtggtggttctcttgaactcttaactactggtaagttagaagaagaaaccatgatccacattagtgttcatgggattattgacctatctataatatatgaaactttgaatatgtacagagtttgaaagagtaaagtacaataattcgtgataaaggagtttcttttccttctcaaaaaaaaaaaaaaaaaaaaagggcggccgctctagaggatccaagcttacgtacgcgtgcatgcgacgtcaaagctctcntataagtcacct

SEQ ID NO: 123084 - DNA, 775 bp, Arabidopsis thaliana
  unsure (1)..(775): unsure at all n locations
atgatactccagctccctacgactcactatagggaaagctggcacgcctgcaggtaccggtccggaattcccgggtcgacccacgcgtgcggtagcatttgcttcaccctcatcaggtgtgatgcctgattccaccaatcctactatgagtgtgaatgcccaaggccatgaaatccaaaatggtggtggaacaacaagccagttctcatcggctttgtgggcattaatggactcaataccttcaacgccagcctctgcgtgtgagggtccccttaaccgaacctttgtacgtatgtctagcttcagccgtatgaggttcaatggaaaggctaatggaacgccagtgagtactaccatagcaaagaagggtattagaaacagacgttggcttctattatcaatcctgggtgctctgtgtgccatcttctgggtgttggtagccacagttcgagtctcaggtagaagtcttctcttgaaagactagtggtggttctcttgaactcttaactactggtaagttagaagaagaaaccatgatccacattagtgttcatgggattattgacctatctataatatatgaaactttgaatatgtacagagtttgaaagagtaaagtacaataatncgtgataaaggagtttcttttccttctcgattgtccttgtttttttttctgcatatcttctgggtttcaatattcacaaagtagaaaaananaaaaaaaaaaaaatggatgtctaggagttgtttacttttgagtgttctgtacaaa

SEQ ID NO: 123085 - DNA, 1117 bp, Arabidopsis thaliana
accttctggctcagtgtggagagcatctggtgaaaggtgatatccaccagggtccagctgtgattggattagctatggttgctatgtctgaggaattgggtctggatatggagatccgttctttggagcgcgtactacagtatggagagcagttctttcgacgtgcagtgcctttggctcttggtctcctatgtatatcaaacccaaaggtgactgttatggacactttgagcagactaagccatgacacagattcagaagttgcaatggcagcaattatctcccttggattgataggcgctggaaccaacaatgcaaggatagctggcatgcttagaaatctctccagctattattacaaggatgccagccttcttttctgtgtgcgcatcgctcaagggtttgtgcatatgggaaagggtctcttaactctcaatcctttccactccgaacggccccgcctcccgccaaccgcacttgctggtatagtgacattgttgcatgcatgccttgacatgaaatccattatactggggaaatatcactatgtgctctacttccttgttttggcgatgcagccaaggatgatgctgacggtggatcagagcctgaagcccatctcggtgccagtgcgggtaggacaagcggttgatgtggttggacaggcaggccgacctaagacaatcactgggttccaaacgcactcaacacctgttctccttgctgctggggagagagctgaactcgcaaccgagaagtacattccgttgtcgcccatattagaaggtttcgtcatattgaaggaaaatccagactacagagaggagtaaatccaaagttgcaagcatttgaagaaagagagagagcctttgaatactttcactacggttgtcaaaagttttttagtttattcccgtctgttcccaggaaatggttcacaatctctccttttaaaagaaaaaatagcttcattgcaatatataggaacttcttgtgcactactttaatatcgcattctaaaagctggataagtttccaaaaaaaaaacacaaagggcaggccgctctagaggatccaagcttacgtacgcgtggatgcgacgtcaaagtcttctaga

SEQ ID NO: 123086 - DNA, 523 bp, Arabidopsis thaliana
  unsure (1)..(523): unsure at all n locations
gcacatgtaaaccacccaaacgcagctaggcttcgcggtttcagcagtgatcgcggtttgcattttgtncttgagtacgctccctatggcagcctcgcttctatgctttttggatcagaggaatgtctagagtggaagataaggtataaagtggctctaggtatagctgatggtctgagttatcttcataatgcttgtccaagaaggatcattcaccgtgacatcaaagcttctaacatattgctcaaccacgattacgaagctcagatttcagatttcggacttgcaaaatggctcccagagaactggcctcaccatgttgtattccccattgaaggaacattcggatatctagctccagagtatttcatgcacggcattgttgatgagaagattgatgtgtttgcctttggagtattgcttctagagatcataaccagtcgccgagctgttgatacagcaagcaggcagagcattgttgcatgggcaaaaccttttcttgagaaaaatagcatggaggaca

SEQ ID NO: 123087 - DNA, 1055 bp, Arabidopsis thaliana
  unsure (1)..(1055): unsure at all n locations
cagctannnnnnnnnnnnnnnnnnnnnnnnnnnnnnnnnnnnnnnnnnnnnnnnnnnnnnnnnnnnnnnnnnnccacgcgtccgatttatttttccctttcactgtagatccttttttccgactcacacactttcgatattttcttttgttttcttcaaaaaagacatattttttttgctgggactatcaattggggtccgtcgccacgccacgcgccgagctcgcaatatatcgaaagcaacgatctaggaaggatcttaaaaatcctacttggccacaaatttttgctatttttattattttccgtgtttaatttctgattcagacaggaagattaatattaagcactagttgtgcaaattcacaattttttttttgtggatggaaacaaatttctggcacacgtattccaatccaaatcgacaatatacgcgtctctgatggatatgttttggattcagtgagaaacagagattgattttggttttctttaatcatggtggagccttatgagacacgtaacaacggtgaagcatcccagatgatcagatatcagagttataaccatcacaattccagactaccatcttcattatcatcgccattgcttgatttgagagtgttctatgtcagaatcagtaatttcaaggtggatcattcgacacctgaggttctcaccattactcatattcctttggatccagattcacttctggagattaatggtgttagaatgagcatgtactctgaaggagtttcttctcagcttaggcgtgatcgtgttgataagaaatctgaagttgctacttttatcagcacggataatatcagggttatctggtactgtgaagtttgagggtttacgataaagatgagcctggttttgtctggaacgcntgagatgtctgggnagtaatgggtttcactggggannctaagcaagcgtgaacggtgganatgaattgtgaactgagatcnctgcagagcngggtccttggagggnaacanattggnggtcgngtacctnccattgcaccattgngccngcccgggc

SEQ ID NO: 123088 - DNA, 543 bp, Arabidopsis thaliana
  unsure (1)..(543): unsure at all n locations
aggacgcgtgggcaagaagatagagataaagacttgacctttttcaagtcttccttggtgttaatactctgcaaattcttgagggtagtttggaggaagagatcgtgtttaatattgttgtttaatcagagaaagatgggtctttctctttctttgctcttgtctgcttggaaagaagttgtgacgacccagttcttcagtttcaagaaccctgtcgagagttttcttgaaaccagatctttcagcttaaaacttaaagaaggaggcttgacttcaagaaccaacagtttcaagagtgagaacccgcaggaaaagtctccgaagacgggtatggagcggtctttgagcttcaacagctgggagattgtgacagaaggtgtagccctttagccggttgagccaagggaagnttnngggnggntttttgancccgccggaggcctttctccgaaacaatttttaattggagggaccttttnngggaancccaataacgggggccttctttttnncccccttcggctttttnggtctttttnccaa

SEQ ID NO: 123089 - DNA, 537 bp, Arabidopsis thaliana
gctctctacgactcactattgggaaagctggcacgcctgcaggtaccggtccggaattcccgggtcgacccacgcgggcgctgatttccaacgattttttctcttccatggctttttttcgctgatcggtaaatcaaacgtttgtttcggtttcgatggtggaagctacgtcgaatttgacgccgactcagagatatgcggccggcgcattgtttgcgatcgctttgaaccaagcgcaaatcaaccagactcagccgctgggaaccccggcggcggaagacgacgacggaggcgatgaagagcgaagaagcaattgcagtagcggagattctgtctccgatgaccccagcctttgggtacacgagacgtctggccttcttcgccccgttttcagatgtcttgagattgattcaccggcttggcttggtctcgagcaaacagcttgctcttctccggctaagcaccacatcggggcgttcacgaggttactctcagaagaagcgaatgatgcttctgccgagatggtggagcaagaga

SEQ ID NO: 123090 - DNA, 576 bp, Arabidopsis thaliana
ggacaaccttatccttaaaatctcaccggtactccaactcccgttcaccggagctctgactctctgtaaagaagaagggagaaatagataatgagcagtagaaacggcaatgagagattaagaacagtgtggacacctgaaatggatcagtatttcatcgagcttatggtggaacaagttagaaaaggcaacagatttgaagatcatttgtttagtaaacgagcttggaagttcatgtcttgttccttcactgccaagttcaagtttctttatggcaaagatgttttgaaaaacaggcataagacattgaggaacttgtttaaatctgtgaataatcttttgatagaagatggttttagttgggatgatactagacagatggttgttgctgataactgcgtttgggatgagtatcttaagattcatcctgattcgagatcttttcggataaagtctataccttgttacaaagatctgtgcttggtttactcagatggaatgtctgagcacaaagcttaggagagtattagtgagggagaatccaagacactgattcaagaagatgatgggtacaac

SEQ ID NO: 123091 - DNA, 377 bp, Arabidopsis thaliana
attctgcattcctcgcaatgcattggattacgagattctctgctttcttctcccgccgcattagccatgattctcctttctccttcgctccaattccttttctccggcggcacctatccgatcatctcacccctacgccgacgaattcaaaccccaacaaaactcccattactcctccttcagagaatctccaatgttccgtaacgccgaacaatgcagatcttccggcgaagattccggcctctgtaaccctaatctccgtccacgtagccatcactctcgacatgattacctccgtggctcaatcgcagccgtcaattcgatcctcagcactcatgtgcctaagcgtctctcagcttctgtctctcgagtctcaa

SEQ ID NO: 123092 - DNA, 490 bp, Arabidopsis thaliana
  unsure (1)..(490): unsure at all n locations
cctgcaggtaccggtccggaattcccgggttgacccacgcntgctagaacctgaaactgaaactgaaacacttctctctctctctctttctcgcttccacgaatcgagagttctacaaattcgcttcctagggtttctcaattcttctaatttcttcatttctatggcgagtcaatgagcgaaatggcggctagctccgcaatctctcgtctcgacatcaaactccgacgattcggcgttggcgcacgtaaccatgaattgcgcctaactaagtggttcaaaggtgatcaagccggagctccgacgagaagattcacctgcttcgcagatatgttggcaccgattcgccgctctgagaagtcagaggaacggcgttttgatcagaaagatgagtgctcacggtgccggaatcaaaacttcttcctctgcagtgccatttgcttctcctaaacctcggtttttgtctaagccagaaaagttctctcctcgc

SEQ ID NO: 123093 - DNA, 534 bp, Arabidopsis thaliana
  unsure (1)..(534): unsure at all n locations
ctttttcttttttttttttaaaagaaaacataatatatcacaatcccacataaatcaccgagttagtctgaaaacaataaaagaaaaacaaacaaactcgaagcacttcttgtaacctcgagtccaaaagaaagaaaaaaaagtagtgttaagctcaaaactaataactaaagaccagagacaatgtgaaaggtcaaaaacacaagcaagtaatgcatctgtacaaacaaagccgaatctactaccgagctgttggctgcaatactgattcatcaatggatacataactctgtggtccagccaggtcaagcattcccatgttgagcggagacgaattgagccgagcccctggggaaactcgtctggtataccgcctctttgcagccaacgcttccttctcgatcctaatcgcgtcttggatatctttttgcaccccggacatcgagggcccaggtcccgggggggttnnnacaaagaangttttncgnaatttcccnttggttggggnngganctttcccggaagggggggtgg

SEQ ID NO: 123094 - DNA, 1184 bp, Arabidopsis thaliana
tgatactccagctctctacgactcactattgggaaagctggcacgcctgcaggtaccggtccggaattcccgggtcgacccacgcgtgcgcggacgcgtgggcggacgcgtggggtccattactgcagcatttcttcgtatgcagtttcatgattgctttgtcaggggttgtgatgcttccctcttgatcgacccaagacctggaaggccatcagagaaaagcactggaccaaatgcaagcgtgagaggctacgagatcattgatgaggctaagagacagctcgaggctgcatgtccccgaactgtctcatgcgcagacattgtaactcttgccacaagagactcggtcgcattagctggtggtccaaggttctcagtaccaacaggaagacgtgatggattaaggtcaaaccccaatgatgtgaacttacccggaccaacaattccggttagcgcatctatccaattgtttgcagctcaaggtatgaataccaacgatatggttacacttattggtggtggccacagcgtcggtgttgcacattgcagtctcttccaggacaggctttccgaccgtgcaatggaaccctcattgaagtctagcttgaggaggaaatgcagttcccctaacgacccaacaacgtttttggaccaaaagacttcatttactgtggataacgcaatctatggagagatccgaagacaaagaggaattctaagaattgatcaaaacttgggtcttgatagatcaaccagtgggattgtgtctggttatgcatcaagcaatacactcttcagaaagagatttgccgaagcattggtgaaaatgggtaccattaaggttcttaccggacgttctggagagatcaggagaaactgcagagtcttcaacaactgaggacgttgattcttgcacacattctttacaattattcacggagagatccaaagactgagcggaatcctacgttttttcttttctttgctttttttcttacaaatcaaatcggaaagtgtgtttgttccggtatcatgttttatttttccctaaaaattgattcgcgtgtttcattttcatgaactatatattgttctaatttgatattaacttcaaacccacgcgtccgcggacgcgtggacgagaaaccgatagcgcacaagtagtgtgaacaaaaatattaaaa

SEQ ID NO: 123095 - DNA, 821 bp, Arabidopsis thaliana
  unsure (1)..(821): unsure at all n locations
nnnnnnnnnnnnnnnnnnnnnnnnnnnnnnnnnnnnnnnnnnnnnnnnnnnnnnnnnnnnnnnnnnnnnnnnntcgaccacgcgtccgaagatttggttttgcattcctcttctctctcgccgctctcaatatgcttcgatttctattctcctcttcctcttgattttgtcttcttctctttgctgcggagagattaagaaacccaagggttttaagcaagagacgcggcgaggaagctatccagaactctctgaaacatccattcctttttctcatggacgtagtgttgccggaaactgccgtggtaaccggtggttcggttatcggagattatggatttaatgtggatccttttctcgttgaggcgttgcacaactctcgccatcgtctcacgattttgcggatggaacttgatgttcaaaggttgttgcagaaccctgaacagcagcagtttgagttccagcattttcctacttcgtatcttcgtcttgcagcccatcgtgttgctaaccattatgggctagctacagctgtccaagagagtggtgctgatggacatgaaaacagaatccttgtgacgaaaactacagagagcaaatttcctgctgttcggttgtctgaaatcccggtggctaaacaatcagataatggtaagtttgagagcaggatagttttcatcaagactcgaccttctaaaggatctggatatgggcgctggtgatctggaaaagattcgtggtcctcttagaagtgttgaagagaggaaagatgagtatgacanggctcgagacgcatattcagggtcttactggtcttagtt

SEQ ID NO: 123096 - DNA, 507 bp, Arabidopsis thaliana
cgggctccgactaacaatttggctatgtcgacggagaagattaggctaaggttgattgaggaaggagtaagtgagctagctattcaggactgtgagcaaatgatgaagtctgagttctcagcacttcagagccagctggtgcttcttaaacagaagcagtggcttctcattgatactcttaggcagttggagacagaaaaggtagatcttgagaacacagttgtagatgaaagtcaaagacaggctgataatggatgttccggtgaattaagacacgagaagttcagtgaaggcactgccactgagtctgatgatgataatgaacgaggtgatgcccccgaggtggaatttgatgaggaagaaaataccttttttgatacacgtgattttctttcttcaagttctttcaagagtagtggttctggttttcgtacatcatcaatttcgtccgatgaagatggctttgagtctgaagatgatattgatccttccatcaagtctattgga

SEQ ID NO: 123097 - DNA, 1332 bp, Arabidopsis thaliana
  unsure (1)..(1332): unsure at all n locations
ctcaaacttctcatccatattataatccaacttgccaataattttttcaactgttacagattactacatcaacgaaatattaaacatttaaccatatataaaagttggagatatatgatataagcttttcttagcagtcccacccttcctctctcgagagagctccattccaatcaaagcaagaaacacacttcggaagatggagatcactaacgttaccgagtatgatgcaatcgcaaagcagaagctgcctaagatggtgtacgactactatgcatctggtgcagaagaccaatggactcttcaagagaacagaaacgcttttgcaaggatcctctttcggcctcggattctgattgatgtgagcaagattgacatgacaaccaccgtcttggggttcaagatctcgatgcccatcatggttgctccaactgccatgcaaaagatggctcaccctgatggggaatatgctactgctagagctgcatctgcagctggaactatcatgacactatcttcatgggctacttcaagtgttgaagaagttgcttccacagggccaggaatccgattcttccagctctatgtatacaagaacaggaatgtggttgagcagctcgtgagaagagctgagaaggctgggttcaaagccattgctctcactgtagacaccccaaggctaggccgcagagagtctgatatcaagaacagattcactttgcctccaaacctgacattgaagaactttgaaggacttgacctcggaaagatggacgaggccaatgactctggcttggcttcatatgttgctggtcaaattgaccgtaccttaagctggaaggatgtccagtggctccagacaatcaccaagttgcccattcttgtcaaaggtgttcttacaggagaggatgcaaggatagcgattcaagctggtgcagccggaatcattgtatcaaaccatggagctcgccagcttgactatgtcccagcaaccatctcggcccttgaagaggttgtcaaagcgacacaaggacgaattcctgtcttcttggatggtggtgttcgacgtggcactgatgtcttcaaagcactttgcactttggggcctccgggatatttatttggaagaccagtggtatttctcatttggcaagcttaagggcagaggcttggagttaggaaaggtgcttaaatattgcnacggtgattggtttggctttcccatggaacttggttgggtttcgggcccccaaaggaaatctcccggaccccatttcccccgattgggcanttcacgnccttanccaggttttggggggaaaaccancatnt

SEQ ID NO: 123098 - DNA, 472 bp, Arabidopsis thaliana
  unsure (1)..(472): unsure at all n locations
attcttgtcaagggtgttcttacaggagaggatgcaaggatagcgattcaagctggagcagcagggatcattgtgtcaaatcatggagctcgccagcttgattatgtcccagcaacaatctcagcccttgaagaggttgtcaaagcaacacaaggacgagttcctgtcttcttggatggtggtgttcgacgtggcactgatgtcttcaaggcacttgcacttggagcctctggaatatttattggaagaccagtggtttttgcactagctgctgaaggagaagccggagtcaaaaaggtgcttcaaatgttgcgtgatgagttcgagctaaccatgggcactaagtggggtgccggtcactcagtgaaatcaacccggtaaccacatttgtcacggaatgggacactccacgccatttgcccaggtttttaaaaaaaaannttaggggggggccctcaaggggncnntcttt

SEQ ID NO: 123099 - DNA, 646 bp, Arabidopsis thaliana
tacggctgcgagaagacgacagaagggtacggctgcgagcagacgacagaagggtacggctggcgagaagacgacagaaggggttgtcaaagcgacacaaggacgaattcctgtcttcttggatggtggagttcgacgtggcactgatgtcttcaaagcacttgcacttggagcctccgggatatttattggaagaccagtggtattcttattggcagctgaaggagaggctggagttagaaaggtgcttcaaatgctacgtgatgagttcgagctgaccatggcactgagtgggtgtcggtccctaaaggaaatctcccgtaaccacattaccaccgaatgggacactccacgtccttcagccaggttatagagaggaaaataaccaacaagcagagaacagcagcaacacagaaccaaaatattggctaaacttattcatactctgattgtacttggcttctactctgctaaatatctcaagacttgtttctccctctatcagatcacaaaccaagcctagtgattctgtaatactatttggctacttctttcttaaggccattcttatttctaaattccatgtacttacattcccacagatcaatttcttgtgattcccagataatacgatgaacatatgcat

SEQ ID NO: 123100 - DNA, 604 bp, Arabidopsis thaliana
  unsure (1)..(604): unsure at all n locations
gagaaatgagagaacgttaataatcattgcttttctcgagaaaataatatttttaattgaatcgagaaactcttcaaagttgaattaagaagaatattacctcaattgagatttgagagacacgcatagagagattgattattgcatcgaatcaagcttggtttgttagtaatggcgggaatagctttagttttagatctactgaagaaatctcaatctaagaacactctccactcatcttccttctattccgcctccgccgccgctgtttctgctgccgcctctgctccttttgcgtctaggtttctcttcggttcttttgagcctagagttgcgtattgtgatgctgctgctgcaatagatgatgattaccttggtgctatacggaaaaanntcttcggatgttttgcagcgtnaaccccttgcgnatatttctaggtccaaggaatacaatatccagccaaaaccagtttttntcggccttttgaagttcaagggcactttcaatgncttcagtgagncccctcngnangtttatttnccccttttgngcctaaacggntnaagggtgntgntgattcctannatcttagagaaacncntg

SEQ ID NO: 123101 - DNA, 446 bp, Arabidopsis thaliana
atctctctcttcctttcgtgaattttctctctctagggtttcgatgtcaattttttccactgagcccgcgatttgaactgaaccgtcaccgtccatcaccatctccggtggatttcgtaggcatctacggagcttacttgtttcaaagaaccttggatgttgtttccgattctccgaaagctctgtgttctttagtttgatacctcagatattggatgcccttgatataacttaggtagcttcttacagaggaaggatatgttaggttaagttctgttcatttgcccttggatggttgctacgatggacttaaatgcttcaccccaacccgaagaagatgacgaaccgtatgtgagacatctagaagactattcttctcgggatgaacggatagagtctgctgttgaaatcgctagacggagagaaagaaacgaatgagatatgac

SEQ ID NO: 123102 - DNA, 627 bp, Arabidopsis thaliana
actcaggtcttccaaccaagtcacaggatgccaacaatgtgcatagaggatgctgggttaacagagatgaacataatgaatgattggcaagagcagacgaaaaaagccattgaagaagcaaccacctcatggtacaatgataaacctctaagaagaaaagaagaagacgaggaagatgatgatgaagacgaagaagctgtgatgaaagctagagctttcgatgattggaaggatgataatcctcgcggtgcaggtaacaagaaactcacaccttgtggctgagactagagaccgagacacacattatttaacactttctccctctcttttgtttcttatttccaaaacctcttcgttcacttactataatgtctgtaatgtaatcatctttctactcttaagccttagacttacagattttggattcacggattcactttcattttcagttgggaatattatttttaaatacgccggctactaaagataccatgtatatatctagtaaaatatacgtgtggctggatctgagcccaaaaaaaaaaagaaaaaaagaaagggcggccgctctagaggatccaagcttacgtacgcgtgcatgcggcgtcatagctctatctatagtgc

SEQ ID NO: 123103 - DNA, 1012 bp, Arabidopsis thaliana
actcacgttaggggaagcacgtacgcctgcaggtaccggtccggaattcccgggttcgacccacgcgtccgccacaagataacgcagtggtggcgaaagacggatctggcatttttaagacgataaaagaagcgattgatgctgcttcggggagtggtaggttcgttatatatgtgaagcaaggcgtttacagtgagaaccttgagattcggaaaaagaatgtcatgttgagaggtgatggtatagggaagacgattattaccggaagcaaaagtgttggaggaggaacgacaacctttaactcagctactgtcgcggcggtcggagacgggtttatagctcgtgggatcacgtttcgaaacacggcgggtgcaagcaacgaacaagcggtagctctaagatccgggtcggatctgtcagttttttaccaatgcagtttcgaagcttaccaagacacactctacgttcactccaaccgtcagttttaccgcgattgcgacgtttatggaactgtcgattttatcttcggaaacgcagccgcggttctccagaactgcaacattttcgcacgtcgtcctcgtagtaagaccaacacaatcacagctcaaggaagatccgacccgaatccaaacacggggattattatccacaactctcgggtcacggccgcttcggatcttcgacccgttttgggatccacaaagacttatttgggtagaccttggagacaatattctaggacggtttttatgaagacttctcttgatagtttgattgatccacgtggctggctcgagtgggatggtaatttcgctttgaagactttgttctatgctgagtttcaaaatacgggtccgggtgcttcaacttcgggtcgggtcacatggccagggtttcgggtccttggttctgcttcagaggcttccaagtttactgttggtcctttcctcgccggtggctcttggattccttctagcgtgccgttcacttctggtctctagtgaatatatgg

SEQ ID NO: 123104 - DNA, 389 bp, Arabidopsis thaliana
gacgaactgaagaaaaacctctcggaagaagatgagcaattggaaaactcttctccttcgcatcggcgaaaagggacctgagtacggcacttcctccgactacaaagaccacatcgagacttgtttcggtgtcattcgtagagaaatcgagcgttctggagatcaagttttgccttttctactacaatgtgctgaacaattgcctcataagattcctttgtatgggactttgattggtttgttgaacttggagaatgaagattttgtccagaagctagtagaaagtgtccacgctaatttccaggtcgctttagattctggcaactgcaacagtatccgtatattgcttcgctttatgacttccctgttgtgcagtaaggttattcaac

SEQ ID NO: 123105 - DNA, 455 bp, Arabidopsis thaliana
acaaaaccattcctctcctcaaaaccattaatctctcttctctctagcataacctctctcagatggcttctaactatgataagcttacttcttcgagagtagccatcatcggtgctggtgttagcggattagcagccgctaagaacttagttcatcacaacccgaccgtattcgaagcctcggattcagtcggaggtgtttggaggagctgcacttacgagacgactaaattacaatcggctcgagtcgattacgagttctccgactttccatggcccaataatagagatgacacaactttcccaccttaccttgagatattagattacttggaatcttatgccaaacattttgatcttctcaaattcatgaagtttggctctaaggtcatcgaagtaaggttcatcggtgatggcgaaactcctcagatggttgaccttggtgcttacggcaac

SEQ ID NO: 123106 - DNA, 537 bp, Arabidopsis thaliana
acgactcactattgggaaagctggcacgcctgcaggtaccggtccggaattcccgggtcgacccacgcgtgcggtaaattaaagtcttctctacttcaccataaaaaatgcttgcgcacaagtctcttctctcctttaccacccaatgggctacactaatgccatctccgtctacttttctcgcctctcgcccccgtggaccggccaagatctcggccgtggcagcaccagtgaggccggctctaaaacaccaaaacaaaatccacaccatgccaccggagaaaatggagatattcaaatctttagatggatgggccaaggatcaaatcttgcctcttctcaaacccgttgaccaatgttggcaacccgcttctttcttacccgacccggccttacccttctccgagtttaccgaccaggttcgtgagctgagggaaagaacggcctcactgccagacgaatacttcgtggtgttggttggagatatgataacggaggacgcgtggcctactaccagaccatgaccaacaccctggt

SEQ ID NO: 123107 - DNA, 569 bp, Arabidopsis thaliana
  unsure (1)..(569): unsure at all n locations
agcgctcgctgttggttgtcctaatctggttaaattgaaggtgaagaaatgtaaagttgtgactggagagattggagattggctgcgtgaacaaaggaggacactagtggtgagtatggatggtgatgaaaccgaagcagtggtggtggtggatggtgaggttgaaaccgttgtggaggagccaagggtggctcaagcaggtggaattgtggcagagattggttcaagtaatggtggtggaggaagtagattagcgatgattaggtcaaagttagggtttcttgctggaagaaacttggtaacttgcacattcagaagatggtctcacaatgataatgctagtagttctacttgatcagctataactatgaaagcggtaattgtcaaaaaaaaaaatctttttaaaagaaagttctatctgtattttgtaatcctcgttcgttttcatgtgtgcaagccttggtgattagggtagtcattacaatggagaccatttattgtagtgactattgatttggtgncatatttgttttctctgtttggaatctcaacattagtcatttgatggc

SEQ ID NO: 123108 - DNA, 1046 bp, Arabidopsis thaliana
  unsure (1)..(1046): unsure at all n locations
cgtctgcagtaccggtcctgaattcccgggtcgacccacgcgtccgaagctcaaatccttttgtctgaattgtgatactgctgtccccatttttctgcaagttgggaaatttctgtcaaagttttgtgggtctgttaaaaagatctgagctttgaacatggggagctcaatggaggagaaagtggtggctgtgatcatggtcggtggtccaaccaaaggcactcgatttcggccattgtcgctgaatattccaaagcctctgtttcctattgcgggacaaccaatggtgcatcatccaatttcagcttgtaaaagaattccaaatttagctcaaatatatcttgttggcttctatgaggaaagggaatttgcactttatgtttcagccatctctaatgaacttaaagttcctgttagatatctgcgagaagacaaaccacatggttcagctggtgggctgtatcactttagaaatcttattatggaagatagtccgtctcatatcttcctgcttaactgtgatgtttgctgcagtttccccttgcccaaaatgctcgaggctcacaggggatatggtggaattggaactcttcttgtgatcaaggtctctcctgaatcagccagccaatttggagaattggttgcagatccagttactaatgagctgcttcattacaccgagaaacccgaaacttttgtcagtgatcgaattaactgtggtgtttatgtatttacacctgaaatttttaatgccataggagatgtttctactcagaggaaagatagagcaactctaaaacgtgtttccagcttcgaagctcttcaaccggcaacaaggatcccgncagattttntaagactggttcangacatcctttcacctctagctgggaaggaacagctatatacttatgaggctatggatttttggggnaaatcaaatctcctggantgtggttaggtgttcaggacttatcttnccantncggttaaatntcccaactttttggtngtggtgtggnnaagggggnccnttttanttgggg

SEQ ID NO: 123109 - DNA, 536 bp, Arabidopsis thaliana
cgtccgaccaaatctgacaaagaggtaaagacgacaggtctcgcgcttatccttaaaggactgtggtgaatggtgagtgtgacttggagggaccccatcaccgcggcagtgacagcttcttagatctcgataaccacaactaacctgtcacagtttcgattagatcttctcaaaaacttcacctttttttgtttttccagtttctcagaggagatcttccttcaaagctcaaatccttttgtctgaattgtgatactgctgtccccatttttctgcaagttgggaaatttctgtcaaagttttgtgggtctgttaaaaagatctgagctttgaacatggggagctcaatggaggagaaagtggtggctgtgatcatggtcggtggtccaaccaaaggcactcgatttcggccattgtcgctgaatattccaaagcctctgtttcctattgcgggacaaccaatggtgcatcatccaatttcagcttgtaaaagaattccaaatttagctcaaatatatcttgttggcttctatgag

SEQ ID NO: 123110 - DNA, 793 bp, Arabidopsis thaliana
ggaagagctggcccgcctgcaggtaccggtccggaattcccgggtcgacccacgcgtccgcccacgcgtccgcaagttcttcgtgaggggacaaagaagactgtctttgtcaacttcatggacctttgcaagacgatgcatcgtcaaccagatcatgttatgcaatacttgcttgctgagttgggtactagtggttcgcttgatggccaccaaaggttggttgttaagggaaggtttgcacctaagaattttgaaggaattttgcggcgatatatcactgacgacgtcatttgccttggttgcaagagcccagacaccattctctccaaggagaaccgtctcttctttctgagatgtgaaaagtgtggatctcaacgatctgtggctccgatcaaaacagggtttgttgctcgtgttagtcgcaggaagacttgagaaattagaaggtgaagtgaccttggtatggagtttggagctattctactgcttctgtatgagtttatgagttgaagaaatacttgtcttgttttttttattttgttttggaatatgattatgacttgacttttaaaatgggataggatcaaaaccttttactctgtcaggttcatgtggtccccttgaaggttgatttagtaaatccatggacttcttttttgtgttaaaaaaaaaacaaaaaaaacacccacaaaaaaaaaaaaaaaaatataaaaaaaacaaaacccaaagggcggccgctctagaggatccaagcttacgtacgcgtgcatgcgacgtcatagctctcgtatag

SEQ ID NO: 123111 - DNA, 890 bp, Arabidopsis thaliana
  unsure (1)..(890): unsure at all n locations
aggctctaatacggactcatttgagggaaagctggtccgcctgcaggtaccggtccggatttcccggcttcacgaagcaacctcgtttactctctacgccaatttcagcgcttagacatccctttttgcaatcatggctgatgaaatcaatgagataagggaagagcaagaacagctcgcaccctttgatccttccaagaagaaaaagaagaagaaggttgtgattcaggaacctgtcgaggacttagcagagtcttcacagactgagaaatctgattcattgcctgttaatgatggtcttgagagttcatttactggaatgaagaaaaagaagaagaagccaactgaatcaagcttattgaacaacgaaagtgttgatgctggggaagatttggatgagattgctaatgacgagcaagagggggaagaaggaatagttctacagcaacgttacccctgggagggaagtgagagggattacatatatgacgagcttcttggtagagtctttaacattctccgtgaaaataatccggagcttgctggagataggcgtcgtacagttatgaggcctcctcaagttcttcgtgaggggacaaagaagactgtctttgtcaacttcatggacctttgcaagacgatgcatcgtcaaccagatcatgttatgcaatacttgcttgctgagttgggtactagtggttcgcttgatgggcagcaaaggttggttgttaagggaaggtttgcacctaagaattttgaaggaattttgcggcgatatatcactgactacgtcatttgccttggttgcaagagcccagacaccattctctncaaggagaaccntctcttctttcttagatgtgaaaagtgtggatctcaacgatctgtgg

SEQ ID NO: 123112 - DNA, 507 bp, Arabidopsis thaliana
  unsure (1)..(507): unsure at all n locations
aaaacaacccctgcgccgcttactctctctcagattcctcccgaagcaacctcgtttactctctacgccagtttcagcgcttagacatccctttttgcaatcatggctgatgaaatcaatgagataagggaagagcaagaacagctcgcaccctttgatccttccaagaagaaaaagaagaagaaggttgtgattcaggaacctgtcgaggacttagcagagtcttcacagactgagaaatctgattcattgcctgttaatgatggtcttgagagttcatttactggaatgaagaaaaagaagaagaagccagctgaatcaagcttattgaacaacggaagtgttgatgctggggaagatttggatgagattgctaattccgggcaaaagggggaagaaggatagttctcaggaacgttcccctggggggaagtagggggttccnntnttgnggnctnttggngggctttaactttcccgngaaannncggggtttcttgnnnnagg

SEQ ID NO: 123113 - DNA, 892 bp, Arabidopsis thaliana
  unsure (1)..(892): unsure at all n locations
nnnnnnnnnnnnnnnnnnnnnnnnnnnnnnnnnnnnnnnnnnnnnnnnnnnnnnnnnnnnnnnnnnnnnccacgcgtccgcggacgcgtgggctcgttgttgtctcatggagagcacggagcagccgaggaacatctccggatcgatgcagagccctagatctccgtcttcgcatccgtatctgtcagtctccgtcacagatcctgtcaaattaggcaatggcgtacaagcttatatctcttacagagttatcaccaagactaacttgccggagtaccaaggacccgagaagattgttattagacgatacagtgatttcgtctggttacgggatcggctttttgaaaagtacaagggcattttcattcctcctcttccagagaagagtgctgtagaaaaattccgctttagtgccgaatttattgaaatgaggcgagcagcattggatatatttgttaatcgaatagcattacaccctgagcttcagcagagtgaggatcttaggacctttttgcaagcagatgaagagacaatggacagattcaggtttcaggaaactagtatattcaagaagcctgcagatctaatgcaaatgtttagggatgtccagtcaaaagttagtgatgctgtccttggaaaagaaaaacctgttgaagaaactactgctgactacgagaagcttaaacattacattttcgagcttgagaaccacttgactgaggctcagaagcatgcgtatcgcctagtcaagaggcatagagagttgggtcaatcactgttggattttggcaaggctgtaaaacttcttggggcttgtgagggtgaacctacaggaaaagcattttccgatcttggaactaaatctgaactgttatcgattaagctccaaaaa

SEQ ID NO: 123114 - DNA, 241 bp, Arabidopsis thaliana
acccacgcgtccgctcacgcgtccgcggacgcatgggattggtaactcgggggatatccatcaagctgtggcttcagcaatggttgataaggacttggtggcatccgctgtgttgtcggggaacagttactttgagggacgtgttcacccgttggcagcatctatctatctagcttccacaccgcttgttgtagcctatgctcggtctggtactgttgacattgactttgagacacagccc

SEQ ID NO: 123115 - DNA, 471 bp, Arabidopsis thaliana
aatttagaaagtagagaaatgagcaaaagcaagaagaagaagattctctctttgatccactttcctccattgtcgtcgcagagagagtggagatattcggattcagtttatgaagtagaacttgggtctaaaggattcagtttcataaaccctaataagtatctgttgtctgattaacttataggaaagatcatttttttttttgtttctcttagtgacggattggtctagaaactagtatgcaaattgtagcttctgggagagaaagtttgtatttttagtaacggatttattttgggagagtttgatttgtaaggattaggatgggttttttcaagaaattagctggtgtgtttggatttggccaggaagtattgaaaaatgaggaagatgatattgatgttcacggtgacggaggtaatcagcagagatttcgtgaaactggattaccaaggaaaggatttggagttc

SEQ ID NO: 123116 - DNA, 470 bp, Arabidopsis thaliana
aaaaaccctcctctcttcatcgacatctctctttcactgcttcaatggcgtcttttgagcgttttgacgacatgtgtgacctgagattgaaacctaagattctccgaaaccttctctccgaatatgttcccaacgagaagcagcctctcaccaactttctatcactctccaaggttgtatcaaccatctccacacacaagctcttatctgagtctcctccagcttcaattgaccagaagcttcatgctaaatcgaaatcagccgttgatgattgggttgctagattatcagctttgatttcttctgatatgccggataaaagctgggtgggtatttgtttgattggagtaacatgtcaagaatgtagctcagatcgtttctttaagtcatactctgtttggtttaacagtttattatcacatcttaagaatccagcaagttctagaattgtccgagtggcttcatgtacc

SEQ ID NO: 123117 - DNA, 515 bp, Arabidopsis thaliana
cggacgcgtgggcggacgcgtgggcaatctctctcttctctctctctgaagaaaaataaataaaagatctaactttgacggctctcttaatcttactcactccggttttaagtcggaatagactgatgggagcttgatggttattgttagatcagatgtggatttaaagccttcgctgaactaacaagtctatggaagaagcaaagacccttgttttacactgtatgttgtgaggaatttgtctgattttgggtgataaaggtgaagtctttgagtttgtaattttgagataagattggatggtgggaagagaggatgcgatggggaatgatgaagctcctcctggttctaagaaaatgttttggcggtctgcctcttggtctgcttcacggactgcatcacaagttcctgagggtgatgagcaaagcctgaacattccgtgtgctattagttctgggccgagtcgaagatgtccagctgctcctttgacacctcgttcacatcataacagcaag

SEQ ID NO: 123118 - DNA, 396 bp, Arabidopsis thaliana
aactaaatccaattgaccgaataaaatccagtaaaccgatccataaaccaaaattggaagaaaacaatgcctgtttaataggtgttgaaactttgctgaaaaaaaacgaagcgagcaccctctaaaatgccttcgatttctctggcgccattgatttagttttctctctctgactacaaagtatccattcgttcaaaccagtttcttcccattttcgatttctgtcaaaattcaccaaccaactccaaaaactctgttattgaataagtttcttgatcttaaaacaaacgatctcaaagaatggcacgacacgatcctaatccatttgctgatgaagagatcaatccttttgcgaatcatacaagtgttcctcctgcgagcaactcttatctcaag

SEQ ID NO: 123119 - DNA, 636 bp, Arabidopsis thaliana
  unsure (1)..(636): unsure at all n locations
atgatatcgccgggcactaatccgactcactttagggaaagcacgtacgcctgcaggtaccggtccggaattcccgggtcgacccacgcttatcattctcttcttctgcatcgtctgcttcatcactattgaaggcactcgcttcaaccgtcgctcttctcagctcactcagagatgtcgttctcgctgagaaagctactggttccgattctggttttggtactgtttctggatctgtgcgttgaatccggattctctcagtcaacgccggcgcgtgacgatcacgtgcatcatcacggtggtgggtgtagtcattctcatgaccacgaccacgaccacgatcatgatcatcatgtgaagaagacgacggcgaaggtggagatgaagttgccggaggagcttgctgaagaggaggatatgagattatgtgggtttgggccttgtcttcatgatcacgatcacgaatcaagttccactcttacgggggttgctctgtggcttaatgcatgtgggatcctccctttaagtaagcttggcccaactaacttccctgntttncttcccataatgtttntcaaaggggagncntcaaaantggtccgttnttctttggcnnntttgggaaganaatttntc

SEQ ID NO: 123120 - DNA, 557 bp, Arabidopsis thaliana
  unsure (1)..(557): unsure at all n locations
tgatacttcnnnnnnnnnnnnnnnnnnnnnnnnnnnnnnnnnnnnnnnnnnnnnnnnnnnnnnnnnnnnnnnnnnnnnnnccacgcgtccggttcctttaatccgtaaaaaaaaacaaaaaaagttttgatttttctctgtgagtttgagtagtagtaattaatagaaacaatggaggttgattcaagcaaggatccgaaagtctaacgggtcaaaaccaaaaaattccggatggagtcggcacgacttgtgggtgactacgcacttggcccgagaattgggtctggttcgtttgcggtggtgtggttagcgaagcatcgatcttctggtttagaagttgccgtcaaagagattgataagaaacttcttagccctaaagtaagagataatcttcttaaagagatttcgatccttagcacaatcgatcatcctaatatcatccgattctacgaagcaatcgagactggagataggatatttcttgtgttggagtattgtagtggaggtgatcttgctggctatatcaatcgccatggcaaagtacctgaagctgttgt

SEQ ID NO: 123121 - DNA, 809 bp, Arabidopsis thaliana
ggtacgcctgcaggtaccggtccggaattccggggtcgaccccacgcgtcggattctcttaatctctatttcctctcaaaaagtgtagttttgtgacaaaaactgttttttaaagttagctataagaagatgaggaagatcatagggtttagaatcgggagacgagtctcaagatggatctttcgcaaaacccggatccaacgttcaggatacaaccggatacactcgacccagcaagcttgcatgctgatgagaccattagccaaactcaaaagttggggccaacgtctcaagcaaagtttcagacgcaggtctacgagaagatccgcatacatacccgttgatcataagaaagccgacccggttccaaggggacacttagctatctacgtgggtcaaaaagacggcgactgtcatagagttttggtacccatcgtttactttaaccatcctttgttcggtgagctgcttcgagaagccgaaaaagagtacggattttgccacgaaggaggtatcactattccttgtctgtattcagatttcgaacgggtcaagacccggatcgcatcggggtcaagttctcgggtatttccatggggccgtcattgccgcaattgaagacaattatggaaatagttcttaggattttcaagcttttattttctttgtagatattgttccctttcatttaccattttctaatcttgttactttttgtcaaaaaaaaaaaaaaaaaaaagggcggccgctctagaggatccaaggcttacgtacgcgtgcatgccacgtcatagtgttctaaggtaacg

SEQ ID NO: 123122 - DNA, 464 bp, Arabidopsis thaliana
acttcttctttaacgtttatactttatatacatcgaaagcatttcttctttgtccgttcacatcattttcgaatttgtgttttccctagaaattgtctttttttttttctttcttatagagaaaatcaagaaaatgtaaaaaagattgatatatttatttattctcgttcaaatgaatcactctttatttgactcgttagtccatgtctcgcctcactctcttaatctctatttcctctcacatctctcaaaaagtgtacgttttgtgacagaaactgttttttaaagttagctataagaacatgaggaagatcatacggtttagaatccgcagacgagtctcaagatggatctttcgcaaaacccggatccaacgttcaggatacaaccggatacactcgacccagcaagcttgcatgctgatgacaccattatccaaactcaaaagttggggccaacgtctc

SEQ ID NO: 123123 - DNA, 465 bp, Arabidopsis thaliana
agtgtcaaattctgagatctgtaaaagatgagcgacggagacgacgctgctagacgccgtaccgcggcggtgactgattaccggaagaagctccttcatcacaaggagctcgaatcccgtgtccgaacagctagggagaatttaagagcagctaagaaggaattcaacaaaactgaggatgatttgaagtctcttcaaagcgttggccagattattggagaagtactacgtcctcttgataacgagcgattgattgttaaggcaagtagtggccctcgttatgtggtgggttgtcgtagcaaggtggacaaggaaaagcttacttctggaactcgagttgtcctggatatgactacgctgacaattatgcgagcccttcctcgtgaagttgatcctgttgtttataacatgttgcatgaagatccaggcaacattagttactcagctgtgggtggtttaggtgat

SEQ ID NO: 123124 - DNA, 499 bp, Arabidopsis thaliana
  unsure (1)..(499): unsure at all n locations
actcactatagggaaagctgccacgcctgcaggtaccggtccggaattcccgggtcgacccacgcgtccggctgatgcgatttgctctgttttcatggcgggcgcctcatcaccggcgagtttgagagcttctcgtagccgtcggctggggaaggagacgaatcgatccgatctattcaaaaaacctgcagttccattcgcattcgcgctaattcttgctgatgcaatcctagtcgcacttattatcgcctatgttccatacacgaagatcgattgggatgcttacatgtcacagtgggtttctcgggggagagagagactatgggaacttgaaaggcgatacagggccattggtttatccagcaggtttcctctatgtttactctgcagtgcagaacttaactggaggggaagtctaccctgctcagattctttntgggtgttctctacattgtcaatctggggatcgtcttgatcatctacgtgaagactgatgtgg

SEQ ID NO: 123125 - DNA, 996 bp, Arabidopsis thaliana
  unsure (1)..(996): unsure at all n locations
cgcgcnnnnnnnnnnnnnnnnnnnnnnnnnnnnnnnnnnnnnnnnnnnnnnnnnnnnnnnnnnnnnnnnnnnnnnccacgcgtccgcccacgcgtccgcccacgcgtccgcccacgcgtccgctaaacctagaaaaacgaaaacacacgcggagttgttgttcctcctctacggtaacgggaatatcgtagttattgtaattttggaaagctataatggcgaagagagagattagtagcactctgagaaatctaaagtttatgcaaaggtcttctctgaaagtagagaagaagaaggctgatgaagaagagcctaatgggagttttccttcccttaggactgttgcaaagaagtgtgtggtcataacagattgggatcctcagccaggagcattgttaggacgcatgtcttttcagtctttcaatccctctatcgagaaattacatgaagaggcaataaacggtggaaatccctcaagctctagcagtaatggaggaaaaaagtcttttagtgaaccggagagttcaaaggttgagccaagtggggaaacagatggtgacttgaaaagaaaacagtctgaggtagtctccgaggaacaaaaccgtcctaacaagtccccaaggagctttgacaaaccatcaccgagcaataaaaagggcaatggttttaagaaacccaagagcaagaaggtggactggagcgttttgaggccaccaaaacctcaaaccaaatagggtttaaattagctaactacagcaatctatatgctattagttacatcggttcatatgttctagtagatcgtttgttgctctgtctgtatcgtcattcccgtggtgttgcaacccgttggataaattatagccaaaagttttgaatttgtttgggttaaaagtgctcgtgttgtctaaaaaaaaaaaaaaagnnnnnnnnnnnnnnnnnnnnnnnnnnnnnnnnnnnnnnnnnnnnnnntcagctcaatcnnnnnnnnnnnnn

SEQ ID NO: 123126 - DNA, 320 bp, Arabidopsis thaliana
actcctctttgttgtaactgccgtcgctaccgacactcgtgccgttggagaattggcaggtatagccgttggagccacggtcatgctcaatattctagtcgcagggccatcgactggtggatctatgaatcctgtgagaactctaggaccagccgttgcatcaggaaactataggtcactatgggtgtatctggtggctcctacacttggtgccatatctggtgcagcggtctacacaggtgttaagcttaacgatagcgtgactgacccgcctcgtccggttaggagctttcgtcgttaagtgagtgagagacttgttt

SEQ ID NO: 123127 - DNA, 538 bp, Arabidopsis thaliana
  unsure (1)..(538): unsure at all n locations
acccacgcgtccgaattcaacaagataagcctctcttctacttttgtgaaattttccgtaatcaaatccgtaatcagatttccccatcaatcgataattttctctcgccgcgttttctatttttctcgctcttcccttttaattttcatcccattttcttgaaggagatttctaattattctgtgatctaaagtctgaagctttgtttggttgcatctcgatgatgatgatgatgatggttgattgtaaatgggtagtttcggtttggttgtagcagaagctaagtttgtcaagttaataagagtattttagttttttttttgttaaatcgatttgtgggttcatcatcctacgatcgaaagtttccatctttgataattttgagattctggggggttttaacctagaatttctaggttttttttttttgggtttgttgatttccgtagcctaggaagaaaaccgtccttaggggggggaaaaaaaaaaccattcaaaccggattttaggganncgantggnggcnttggngngggaa

SEQ ID NO: 123128 - DNA, 473 bp, Arabidopsis thaliana
atcaagatctgacattgttatgtgcttgaattcttcatcaagctcgtcagaaaaacaccaaaaggtttcaaatttatctgaaattcgtgaaaccctaaaaagggttatgtcaaggtagaagagacagaacaaagatagatatggtaaggaagcagaagtacgggaaggtagtgttggtttcttgcatcgcgcttctagcaaccggactcattgccgactttctctgggctacttctcatcgattctcctccgccgcaatctccgccggattatctctaccttcttcacttaccaccgtaatcgttcctggccaggagaaagatacaaagaagaagaacgatagtgtgaaggaaaggaaactgtctaatacgtttcaagatttgcctgctcctgaattgaaatgggagaagatggcagcttcacctgtacctcgtctagacggagctgcaattcagattagggatcttctttat

SEQ ID NO: 123129 - DNA, 771 bp, Arabidopsis thaliana
  unsure (1)..(771): unsure at all n locations
agcgtctctacgactcactatttggaaagctggtccgcctgcaggtaccggtccggaattcccgggtcgacccacgcgtccggttctttctatgggtacaagtggagggaatcagtccgcactccctgatatattccagccaaattttggtaatcaggctccaacctcaacaatgaatggttcgaaaaaagaagataccagagccttcgatttcatttctgatcatcttacatcagcccgcgacacaaagagagtatcttgatggttgcttacaaaattccgccttccagtgttaaatgctatttcatgagatgtggacacaagggtgcaggaagctaaaacattaatttatgagagctgtatagacttgaggagaaaatggagatagctttataattcatatggtaagggtttttgcttcttttatctgtttcctcgttttgtctttggtttttcttcttctttggagtccattgttcttggcatgaacatgtagttgtagagttgctttttgtttgttactagatgtgtttattttgttccgttgctatatattatatctgaagagacttgtgtctgtgtatcgaacgtagacaagaaaggaaatgaaactgagaaaggaaatgcatctgaatagtttaaagacttcaagtcaagtcccaaaaaaaaaaaaaaaaaaaaaaccaaaaaaagnnnnnnnnnnnnnnnnnnnnnnnnnnnnnnnnnnnnnnnnnnnnnnnnnnnnnnnnnnnnnnnnnnnnnnngatcaat

SEQ ID NO: 123130 - DNA, 528 bp, Arabidopsis thaliana
acgactcactatagggaaagctggcacgcctgcaggtaccggtccggaattcccgggtcgacccacgcgtgcgaaaagtttggattcctccaataaagaacatgacttcgtcttcttcttctcctatcacgtttactcttcttctgcttctctctcttcttgtggcactaaacccaaatccgtcgttagcctccaccggtagcaacatcaacacaaacgacatcgtgacgcagtacagcacatacgttagaacgcgtgcaacgtaacgcgatacaaccgcctctgcgtccgaacgctatggccgtttgcaatcgtcgctcgaaacaacaccagcaagtgggctcgagctagcgtcgcggttaccataaccgacaccaaacgggtgctgaggctcttgctcaaaacgcagcgttcagcagttggcgaaagcgagcgaaatcgcgtggtcggattgccgagagctcttcgtggactctctcgacaacctatacaagtcgctcgccgttctgcggacactgaacgcggatg

SEQ ID NO: 123131 - DNA, 556 bp, Arabidopsis thaliana
gtggggccgtgctgcccacaacaatctccgacttcgtcttcctcatctatcatcgtcgtcgtcaaccttatttatctcttaatttatcattaaaaccaaaaaaccaaaaaaaaagccttagctttcgtttcttcaatcccagcaaaaaaaatggctcaggttcaagctccttcttcacattctcctcctcctcctgctgttgttaacgacggggctgcgacggcttctgctacccctggaatcggcgtcggcggcggtggagacggagtcactcacggtgctctttgttctctctatgtcggagatctggatttcaatgtcaccgattctcagctttatgactatttccaccgaggtgtgtcaggttgtatctgttcgtgtttgtcgtgatgctgctaccaatacttctcttggttatggttatgtcaactacagcaacaccgacgatgcggagaaggcaatgcagaagttgaactacagttatctcaatgggaagatttcgggttactactcttctcgggcctcttctgcccgtagaagtggggttgggaatttg

SEQ ID NO: 123132 - DNA, 701 bp, Arabidopsis thaliana
  unsure (1)..(701): unsure at all n locations
cggcatactaatacgactcactttagggaaagcacgtacgcctgcaggtaccggtccggaattcccgggtcgacccacgcgtccggcgtaaggttagcaatccttctttcattgccgcacagtcgaagtttgaggaactaacttcatctactggttcaaacaaagcaatgacgctgtcttctaaagatgatgttttgggtgaagaaggcaaaacagatatagattcaccagacactacaaacacactaaaggatcactctttggaagatgttactccagctgagcttagtggatccgagtgtggcaccgaactctctgtaacttcttctcttgacacacttgagaagaagtcagacgctgagggtgcagagcccagggtagaagctaagcttttagaggatgacacttttaaaacagaccaagcagagttgatagaaattgatgttaaagacgcaacgtcaatgggtactgtagaggaccctaaggagaaagttgagaatgctaaggacgaagttgaaatttcagcgacacatcatgaaccgggtcattagttcacccgattccaaaaagagacgggctgaagatgaatcagggcctcaagcttacgncttatctnagggagctttaactccgatgacaatcactgnatctnagggcancaccggcaaggcnanggatcttntttnagtgtaagcnaagna

SEQ ID NO: 123133 - DNA, 436 bp, Arabidopsis thaliana
atcaacacaaactgaagaaccaaacctcacaacgctccagaagcatccctgtcttgtctcttaaatccacattgaagccacttaaacgcctctccgtgaaagccgccgtcgtttctcaaaactcgtccaaaaccgtgacgaagttcgatcactgtttcaagaaatcatcagatgggtttctctattgtgaaggaactaaagttgaggatatcatggagtcagtggagagaagacccttttacttatatagcaaacctcagatcactagaaacctcgaggcttataaagaagcattggaaggagtgagctctgtgattggttacgctatcaaagctaataacaatcttaaaattttggagcatttgagaagtttaggctgtggtgctgtgctcgttagtggaaatgagcttagacttgctcttcgtgctggtttcga

SEQ ID NO: 123134 - DNA, 393 bp, Arabidopsis thaliana
cgcacacctttcttaaatccctccagccatggcggcagttactcgatttctctcccaaccttcatcaatccgcggaaccctaaatcagtaccaattgaatcagacttcactctcaagaatcccatttttgtctctcaagtcaacattgaagccacttaaacgcctctccgtcaaagccgccgtttcccaaaactccaccaaaaccctcacgaaagaatctgcttcctctttcgaccactgtttcaagaaatcatcagatgggtttctctattgcgaaggaaccaaggttcaagatatcatggaaacagtcgagaaacgacccttttacttatatagcaaacctcagatcacgagaaaccttgaggcttataaagaggctttggaaggagtgag

SEQ ID NO: 123135 - DNA, 540 bp, Arabidopsis thaliana
  unsure (1)..(540): unsure at all n locations
cagctannnnnnnnnnnnnnnnnnnnnnnnnnnnnnnnnnnnnnnnnnnnnnnnnnnnnnnnnnnnnnnnnnnccacgcgtccgatcaaatgtttgaattcttccatctctcataattcttaagtggtcgtggtgtgtactatctcctaagctctctgtttttttttttgtttgttcattggctatatttcaggtcttcttcttcttcttcaagaatgagctaatactcacagaagaagaagatttttctttggatttttcactactgaggcattgttgtgaaattggatggtagtagcattggaatggcagaacaaaagagtagtaacggaggaggaggaggaggagatgttgttatcaatgttccagttgaggaagcatcaaggcgttccaaggaaatggcttcaccagagtctgagaaaggagttccctttagtaaaagcccttctcctgaaatctctaagcttgttggtaggcctaacaagcctcctagagctccaaatcagaacaatgtgggtctaactcagaggaaatcttttg

SEQ ID NO: 123136 - DNA, 608 bp, Arabidopsis thaliana
  unsure (1)..(608): unsure at all n locations
acgactcactattgggaaagctggtccgcctgcaggtaccggtccggaattcccgggtcgacccacgcgtccgctttttcaatcaacacacattcaaatttggcgacatgaagttctgcgcgatattcgtgttattcatcgttcttgcaatcaacggctacgattgcaagatagtccaatttatatttggagattcattgtctgatgtaggcaacaataagaatctacctaggagtttagcgacggcgaatctgcccttttacggtattgattttggcaatggtttgcctaatggaaggttcactaatggccgcactgtttcagacattataggtgataaaattggattgccaagaccagtagccttcttggatccatcaatgaatgaagatgtaatacttgaaaatggagtgaactatgcttcaggaggtggtggaatcttgaacgaaactggtggttatttcatccaaagattttccgctgtggaagcaaatagaatttttccaagggccacaagatgtagttttggcaaagtaggggaaaagagcggcaagtctttcaagtcncgangncgccgtttggagaatncctcttacaccttttnancc

SEQ ID NO: 123137 - DNA, 647 bp, Arabidopsis thaliana
cgcgttggcatatctaaacttaaacctaaattagaaaaattaaatggctaactacatgggctccgtggagaagtcgctgcttctgcgtctccatcttgtcttcttgattcagcagcatcgccattctgcctctatcgtcaagtttcttcctccttttgaagggtctcttccctttgagctcgaaaccgcgtatattggtatcggtgaggaagaggaagtgcaactgttctactacttcatcaagtctgagaggaatccaaaagaagaccctcttcttctctggctaagtggaggacctggctgctcttccatctctggccttctttttgagaatgggcctctggctatgaagctcgatgtttacaatggaactctcccttctttggtccctactacatattcttggacaaaggcctcgagcatgatattcttggatcagcccgttggagctggcttctcctactcaagaactcaactttttaataaacctagtgattcaggagaagccaaacggattcatgagtttctgcaaaagtggctaggcaagcatcaagaggtttcctccaaccctttctatgtcgccggtgattcttattccggtatggttgttccagctaccgttcaagaaatctccaaaggaaattatc

SEQ ID NO: 123138 - DNA, 937 bp, Arabidopsis thaliana
acgactcactattgggaaagctggtcacgcctgcaggtaccggtccggaattcccgggtcgacccacgcgtccgtcttgtttacgttcaggacaacgtcgggagaggctggggttacgggatctctgccgcgactatggtggttgcagccattgttttactctgcggaacgaaacggtaccgtttcaagaaacctaaaggaagcccttttacaacaatatggagggttggtttcttggcttggaagaaaagaaaggagagttaccctgcgcatccaagtcttttgaacggttatgacaacaccacggttccacacacagagatgcttaagtgtttagacaaagccgcaatttccaagaacgagagctctcctagctcgaaggacttcgaagagaaggatccgtggatcgtttcgactgttacacaagtcgaagaagtgaaactcgtgatgaaattggtaccgatttgggcaacgaacattcttttctggacgatttactcccaaatgacgactttcacggtcgaacaagcgacgtttatggaccgaaaactcggatctttcactgttcctgcaggctcttactctgctttcctcatactcacaattctcctcttcacttcccttaacgagagagtctttgttcctttaacaagaaggctcacaaaaaagcctcaaggaatcacaagcctacagagaatcggagtagggctagtattctcaatggctgcaatggctgtagccgcggttatagagaacgctagacgcgaggcagcggttaacaacgataagaaaataagcgcgttttggttggttccacaatatttcttagtcggtgcgggtgaggcctttgcttacgttggacagcttgagttctttataagagaagcaccagagaggatgaaatcgatgagcaccggattgtttctaagcacgatat

SEQ ID NO: 123139 - DNA, 400 bp, Arabidopsis thaliana
gggacttgtagacatatttaggagttggcggtggtggagacttgtaaacataagtcggggtaggaggaggcggggacttgtagacgtattttggagttggcggtggtggagacttgtaaacataagtcggggtaggaggaggcggagacttgtagacataggttggagtaggaggaggcggcgacttgtagacgtatgttggagttggcggtggtggggacttgtagacataggttggagccggcggtggcggtgacttgtagtcgtatgccggagccggtggtggtggagacttgtagtagtaaggaggatggtaaggagccggtttgtggcattctccgtaaggcttctttggtgcataagcaaaggacttagcatatagcacaacctcgtactttgt

SEQ ID NO: 123140 - DNA, 1305 bp, Arabidopsis thaliana
ctaatacgactttattagggaaagctggtacgcctgcaggtaccggtccggaattcccgggtcgacccacgcgtccgctctttttttttttttggtgtcacgaaaacgaacgaatcagtgtcggctcttgggttccgaacaaaaacaacattgtacgtcggatccaaaaaacgcgcgttatataaacgcttaatttctccaggattcttcttctgcttccgccattgctcgaaaatcgcgtcttctgacaatgtgctgaaactgagtcatcgtccgagttagcaaagtgaaacttcgaagtttctcttacactaatctcaggtttgggattttgtaagaaaccgcgtttacaaaatgttcaagttgaagcaatggttgatttatttggtgtgttcgttagtaataatgaacacagaaggactgtttgtcaatattacatttgttcgaaacgcagtcgctaaaggggccgttggtttagatggaagtccaccagcttatcatttggatagaggttctggaactggaatcatagttggttgatacagcttgagggaggaggatggtgcaataatgtaacaaatggcgtgagtcggatgcatactcgattaggttcatccacgcgtccggtggagaaccttgctttctcagctattcttagcaataagaaacaatataatcctgatttttacaattggaatagagtgaaagttagatactgtgacggggcatcattcacaggagatgtagaagcagtgaaccctgctactaatcttcacttcagaggtgctcgagtttggttagccgttatgcaagagctgctagctaaaggcatgataaacgccgagaatgctgttttgtctggctgttctgctggcgggttagcttcgctgatgcattgtgatagtttccgtgctctattaccgatgggaaccaaagtaaaatgtctttcagatgctggtttttttctcaacacaagagacgtctcaggagttcaatacattaaaacatacttcgaagatgttgttactcttcatggatcagcaaagaacttgccgaggtcatgcacatcaagattaactcctgcaatgtgtttctttccgcaatatgtggctcgccagattagaactcctctgttcattcttaatgccgcttatgactcttggcagataaagaacattttggctccgcgagcagctgatccttacggaaaatggcaaagttgtcaactagacatcaagaattgccatccaagtcagatcaaagttatgcaagatttcaggctagagttcttgagtgcagtgatag

SEQ ID NO: 123141 - DNA, 518 bp, Arabidopsis thaliana
aaccacgcgtccgcccacgcgtccgcccacgcgtccgcccacgcgtccggtgaaagaagatgaagattgaggaggatctaggtttcatcaacatactcaaacgagcaacaaagcttctatgtggtaacatcaatcttgttctcttcctcttcctttgctctctccccctcttttgtttcttgatcttcttcgagctttcactccaaaccactgtctcactcgcttctcaatacctcgttcgacaactcactaattgggattactactacgttcctcaagatgcttccgtcttggagaatctgattccattgcttatccagacatttctactctacttgttcccgtacggcctcatagacctcttcaccaccaccacaatagtctctgcatcttggactgttcacacgtcgggggagggaaccgttaaggttcggtcaattggttcggggaacggtagggttttgtcaaaacagacttgaaggttgtctgatcacctctctgtacgtccttctcttgtc

SEQ ID NO: 123142 - DNA, 469 bp, Arabidopsis thaliana
aggacgcgtgaggtgttggtataccaattcttacgtcaacgtcaatgaagaaacgactccatatttacgaataaaaaactgtagtagatctgtactctccctttttctttgtagagaagaagagaactgtgaaagaagatgaagattgaggaggatctaggtttcatcaacatactcaaacgagcaacaaagcttctatgtggtaacatcaatcttgttctcttcctcttcctttgctctctccccctcttttgtttcttgatcttcttcgagctttcactccaaaccactgtctcactcgcttctcaatacctcgttcgacaactcactaattgggattactactacgttcctcaagatgcttccgtcttggagaatctgattccattgcttatccagacatttctactctacttgttcccgtacggcctcatagacctcttcaacaaccacacaatagtctctgcat

SEQ ID NO: 123143 - DNA, 496 bp, Arabidopsis thaliana
ctcactatagggaaagctgccacgcctgcaggtaccggtccggaattcccgggtcgacccacgcgtccggaggagaaagaaagatagaagatcatggggaagatagaggagtacaagccggtaatggcgatgacgatgattcaactatgttatgcaggagtgactctctttgcaagagctactttggttcatggattaagccctcgggtttttatcctctataggcaagcctttgccaccattttcatcttcccatttctttacttatccaggagaaaatcaaagatagctatatcttctttggatctaaagagcttttctttaatattcttggtctcgcttataggcattacaatcaatcaaaatctatatcttgaaggtctttacttaacttcatcatcaatgggaagtgcagtgggtaacatcatccctgcaatcaccttcctcatctcatttctcgccggatacgagaaactgaatctccgagatataagag

SEQ ID NO: 123144 - DNA, 519 bp, Arabidopsis thaliana
  unsure (1)..(519): unsure at all n locations
atgannnnnnnnnnnnnnnnnnnnnnnnnnnnnnnnnnnnnnnnnnnnnnnnnnnnnnnnnnnnncccacgcgtccgcattaatccaacctcacgaagaaaaccatttgttttcttagagagagccaagaatattaaaagagatatagagaaaagatttgctttaataatgccaacgtcgatacagtttcagagatcctccaccgccgcagaagcagccaacgccaccgtaagaaactatccccaccaccatcagaaacaggttcaaaaagtgagcctcacgcgcgggatggctgatgtgccggagcacgtggagctttcccacacgcacgtggttggtccttctcagtgcttctccgtcgtggtacaagacgtggaggctccggtttccacagtctggtcgatcctaagccgcttcgaacaccctcaagcgtacaaacacttcgtgaaaagctgccacgtggttatcggagacggtccagaggttgggtcggtgagagaggtcagagtcgtatctggt

SEQ ID NO: 123145 - DNA, 800 bp, Arabidopsis thaliana
  unsure (1)..(800): unsure at all n locations
nnnnntgcttcgccggcctaatacgacttctatagggaacgctggtacgcctgcaggtaccggtccggaattcccgggtcgacccacgcgtccggtgaagagattgtgagaacaaagacgacaaatgggcgattgagcgaagaagaaaccttcgttctctctcggaaatgacgaagaggaagaaggaagtaatagatgtcgattgctccgagaagaaagattttgtgattgattggtcttccgctatggataaggaagacgaagttcccgagctcgagattgttaataccaccaaacctactcctccgccaccgccaacgtttttctccgacgatcaaaccgattctccgaaactcctaaccgatcgtgacctcgacgagcagctagagcgtaaaaaagcgatcctgacattaggtccgggcttacccgacaagggtgagaaaattcgactcaaaatcgctgatctcgaagaggagaagcagcgtagagttttagaaggctcgaaaatggaggtggacagaagttctaaggtcgtgtcttcgactagctcaggttcagatgttttaccgcaaggaaatgcagtttcaaaagatacctctagagggaatgcagactcaaaagacacctctagacaagggaatgcagattcataagaagtctcacggtccaacattttcttgcggttttcagtataccaaaagtatggagcatccgttttttttttttggtcaacacggattctcagtcaaaggaagcctttggtaaagaactagaagatctgggatgtgaaaggaggaaca

SEQ ID NO: 123146 - DNA, 585 bp, Arabidopsis thaliana
  unsure (1)..(585): unsure at all n locations
nnnnnnnnnnnnnnnnnnnnnnnnnnnnnnnnnnnnnnnnnnnnnnnnnnnnnnnnnnnnnnnnacggctcgaggcaatacaagagaagcaattagaaaggcttaaccataattagagattcacaaccaaagcaaaatggcatcatacaagctcttccgcattgcttttctagtgtgcctctcttcctctatgatgatcaacacttgctcagcctcacgccgccttctccaacaacaacctcttcctcaaatcccaaatctgcctattccaacaatgggactacctccattgccatcgacgttgccacaaccgtctttaccaactctccccacaatgcccactgcaatgtctccatttccaatgccatcagctttgccacaaccaaatcttcccaccattcccacggcaatgcctccaatgccaactttgccttcatttccaacaacaattccttctcttccgactaatattccatccattccttctcttccaactaatctcccatccattcccttttttgcgggtaggtttccatcatttngggttttttttcccggcttttnaaaaattnggggccttnnatt

SEQ ID NO: 123147 - DNA, 519 bp, Arabidopsis thaliana
  unsure (1)..(519): unsure at all n locations
catcagctgtgccgcaaccaaatcttcacaccattcccgcgtcaatgcctccaatgccaactttgccttcatttccaacaacaattccttctcttccgactaatattccatccattccttctcttccaactaatctcccatccattccctctctgccgactagtctcccatccattccgttcttctctcccccgccttctgcaactacttcgagtccttgaactatcatcacttcatgtgattgatgatgtatattttattataagattgttgtaattagttgtttcattgtggtgtgtttttgtttgtttaattacgcatacccccgtttgatgatttgtattttgtacctttaatttccttttgattattaatatgttgtattttaaattaaaaaaaaaaaaaaaggnnnnnnnnnnnnnnnnnnnnnnnnnnnnnnnnnnnnnnnnnnnnnnnnnnnnnnnnnnnnnnnnnnnnnnnnnnnnnnnnnnnnnnnnnnnnnnnnnnnagctgtatcat

SEQ ID NO: 123148 - DNA, 374 bp, Arabidopsis thaliana
tcccaactaatctcccatccattccctctctgccgactagtctcccatccattccgttcttctctcccccgccttctgcaactacttcgagtccttgaactatcatcacttcatgtgattgatgatgtatattttattataagattgttgtaattagttgtttcattgtggtgtgtttttgtttgtttaattacgcatacccccgtttgatgatttgtattttgtacctttaatttccttttgattattaataatgttgtattttaaatttgtcttgtgggtttgttaaaagtgcttcacttgggtccttttactcatagtaaatatataatatcattggtgacgtatgataaaaaaaaaaaaaaagggcggcc

SEQ ID NO: 123149 - DNA, 467 bp, Arabidopsis thaliana
ggagaaagtttatcagtcatacaaatcccgaccaacaacaacaaaaccctaaaatcaagcttcgaaaatgggagagatgatgtacaagctcttcgcttcagcgtcactactaaccctaggattgtatcatctcatctgcactttcttccatctccttaaatctccccaatcctacgccgcgaaacccttttacccttttccacgtctctcctccgtcaccggaaacaaccaccacaatcacaaccgcctccaaaatctaccactgttcatcctcatactctctctattcgtcgctttccttcacgaaaccctaatctccttctactccgatcctctcgtcaaaggaagtactcctgttcaccgattctcatctctcaattccgccgccgtgttcttcctcttcctcatcatcgccatttactatctcctctccgattcaacctcgttaatccctctcccttccgatc

SEQ ID NO: 123150 - DNA, 468 bp, Arabidopsis thaliana
aaccgtacatcactcttcatcattgcttgtatcctctaccaaaacatctgccacctccaggtcctccgtcttgatgaattcgcacgctgcttcgcctctgagatcaaagatttcagttccatactcgccgagcatctcaaaatccgtcgtgaactgaagattgtcagtcaccggttcagacgattcattcttttgtcattgtttttcgtcactgccactcagttcatggcattgctgactaccatcagagctagtgttccctttaatatctacgaagttggcgagctcgcgttatgctccacaagcttggtgtcaggactattcatatgcttgaaaagtgcaacacaaatgactcacaaagctcaatcagtaacgagcatcgccacaaagtggaacgtgtgcgcgtctctagatacatttgatgttctttatgacggagagactcctaaatgtccaacaactacacaa

SEQ ID NO: 123151 - DNA, 783 bp, Arabidopsis thaliana
  unsure (1)..(783): unsure at all n locations
ggaannncccgggnncgaccccacgcccgtccgcggtgattatccaatgtacagggtactcaagattncttctgagtgcttattctgaataccggnnaggctatcctcgggttcagcggagactanntctcttctctgcggcggagttacctgttganntagaggcannagctaaagtcnnttgaaactaatnnatgtttactntncttggcttactaaaatcctggtaccccatccccaagatatttctcttgagaaggaaactcattgaagatgcttaagatcaactaggatttacgtggttctatgaccgaatgcaaaccggaggtttatatgtactggctttggaaagaatattcaccgattgggcttctaactgtttgccggtaggctgctctcattgaccgagaagatcctatgtatgcatggtggattgtcaccggaattggaaaacttggggcagattcgggagattcaaaggcctacagagattccagacaatggtcttctttgtgatttactttggtctgatcctgatcagaagaatgaagggtggactgatagcgatcgaggtatctcctgcacgtttggagccgatgtagtcgctgactttttggataagaatgatctcgatctcatttgcagaggccatcaggttgtggaagatgggtatgagtttttcgcaaaacggaggttagtcacaatattctcagctccaaactatggaggagagtttgacaatgccggtgcattattgagcgtggatcaatctctcgtttgctc

SEQ ID NO: 123152 - DNA, 700 bp, Arabidopsis thaliana
  unsure (1)..(700): unsure at all n locations
atgannnnnnnnnnnnnnnnnnnnnnnnnnnnnnnnnnnnnnnnnnnnnnnnnnnnnnnnnnnnnnnnnnnnnnnnnnnnnnccacgcgtccgagttgatcctgtgcttcttcagttaacgaaaactggcaaggcaacagaagaagcaaaacgtgcaaatgagtttttcctctcactggcagcttgcaatacaattgtgccaattgttagcaatacatctgatcccaatgtgaaactggtagattatcaaggggagtcccctgatgaacaagcattggtctatgcagcagctgcatatggtttcttgctcatagagagaacctctggtcatatagttattaatgtgcgaggagaaacgcaaagtgcagatttaatgttttgggattgcatgagttcgatagtgaccgaaaaagaatgtcagtgatactgggatgccccgacatgtcggtgaaactctttgtaaaaggtgcagactcatccatgtttggtgtcatggatgaatcctacgggtggcgtcatacatgagnccaagntacaaacttcantgcttactcatctgttggtttgggaccactttttgtttgggatnagaganctgaccgnttcaaaaggtttgcnaatggcatntttcatttaggggcaacnnccccttnnttggtggggtnggttcttngaaagttntngannttgggcnnctttc

SEQ ID NO: 123153 - DNA, 491 bp, Arabidopsis thaliana
  unsure (1)..(491): unsure at all n locations
acgcttgtgttccttaatcctccttggatcatcctcctaattactcagtgatcatgcatagattccttgtaaagctatcttcttcttcttcaccattctctaatcaattgagaagcttgaagaaccagcgtctgattctccctctattaccttcttcaaaaccttttacctcctcctctgtgtcaccacctccaagtcccttgaacgcttctaatcgatttgggtatccttattccgccgatttgtttcgaaatttgtcacctttaaacccaaattcgaggattttaggagtcaatgggattactagtagtagatgtatcagcagtgaagcggtcagagaaatcgattgagtacgntgttctgattgtccggagctggacccggccggtttaacntgctgcctatanngnttgaaacaantttctnaggggaggnccatttgacctnacctggntgtgnnccgtttaagaaagggnaanaagtttggnggc

SEQ ID NO: 123154 - DNA, 563 bp, Arabidopsis thaliana
  unsure (1)..(563): unsure at all n locations
ggaacacagtcgatgaattttcctctccgcctggaagattgtggagctcccagttgttgttaacaacggtctagagattcgtgtctcttgaaattcgatctgagtttcaccttcaaggttttaatcaggaatgaagcattcaaaggatccgtttgaagcagcgattgaggaagagcaagaggaatcgccaccggaatcacccgttggcggaggaggaggaggtgatggtagtgaagacggacgaattgaaatcgaccagactcaagatgaagatgagagacctgtggatgttcgccgtccgatgaagaaagctaaaacctctgttgttgttactgaagctaagaacaaagataaagatgaagatgatgaagaagaggaagagaatatggatgttgagcttactaaatatccaactagtcctgatcccgcctaaaatggccaaattcaaanccntattntcggaatcactgngggtccaatgagtagntatnaatnttttaggggtntccacttaaaggccccagttangagttntttnaaggggnnctgnnngcaaaaaggtt

SEQ ID NO: 123155 - DNA, 531 bp, Arabidopsis thaliana
  unsure (1)..(531): unsure at all n locations
atgatttnnnnnnnnnnnnnnnnnnnnnnnnnnnnnnnnnnnnnnnnnnnnnnnnnnnnnnnnnnnnnnnnnnnnnnnnnnnnccacgcgtccgcacacttattttctcttgccctcttttctttttccttttgaatatttctgggttactaatatttaatttgttggttcttcggtttctccgactctttccccttgaacctagcttaacagaaaatcaaagagagaggaaaaatgagtggaggtggtggagaaatggaagagagactgttaaatgggtcagagacagaacaaaggagagagagtctctacttgagaaaaaaagatttggagtgaagtaaggaagatgtggagaatagctttaccatcaactttgttcagagttatgtcgtttggatgcgtagtggtggctcaagccttcattggccactccagtgaaacgggtctcgctgcttatgctctccttcaaagcactttcattcgcttcatctacggtattatggcaggtatgtcaagtgcgacagagacgtt

SEQ ID NO: 123156 - DNA, 720 bp, Arabidopsis thaliana
  unsure (1)..(720): unsure at all n locations
gccnnnnnnnnnnnnnnnnnnnnnnnnnnnnnnnnnnnnnnnnnnnnnnnnnnnnnnnnnnnnnnnnnnnggggccacgcgtgcgcccacacgtccggctacacataaactgctgaccgatcccaaaggttgaaagattctttggcgctaaaaaatccccagttcccaaatcggcgtcctcgtttgaaaccctaattcctgaatcgaagcagatcctgatcgaatcgaaggtgttcgaatgatagctacccagtaaattcagaaccctaattaacaatgggcggtacggacgcgaaggacattctcgggttgccgaagactccactgtctttaactcaggagaagaaatctcgaccccagaaagagtcccatagaaaacccgatggcatttctcgcgaggtttatgcgcttaccgggggcgttgcacctcttatgccttcaattgatttaaagcgccgtcctcctgcagatgagaaggttgcttggaaatggctttccttcacaaattctgctaggaaagatgatttgcagctttaccattgggttagagtggttaatgatgttccaccaacaggtgactattcctttgccaaatataacaagtcagttgatattttgaaatacacagacgaggagtatgagaatcatttaacggattctgtgtggaccaaggaagagacagatcagttgtttgaattctgtcaaaattttgatctccgc

SEQ ID NO: 123157 - DNA, 682 bp, Arabidopsis thaliana
  unsure (1)..(682): unsure at all n locations
gctccacacgactcaattatggaaagctcgcacgcctgcaggtaccggtccggaattcccggttcgacccacgcgtccgacagagagagaagagggaagacaaagggaagagggaggagagagaaggcaccaccctttggccctggagagaccaaagatggtcgaagagagacaactctgagatcatcatcatcatcctgcaaaaactaacgagaaatcgattttcaaaaatataatcaagatcgatttctagggatattttgatctctaaatcctctcaccaacattctcttgcttgccctacccgcttgctggtttcatccagaaacataataatacattgtttgcattataaggaattcctttatacagtatcaagagatccacaagaagctgttagatcccagagattaacactgtgatgaaaagggttttgtgaaaatcaattttcaaacctggaaaatgatgatcaaggacccttatatccgacaattttcttctttcttctgtacattgnaatatatagaaaattaacattttttctctttctttcttttttttctttagatattaggttaggttatatagaagagaaagtttgtttctgggaaatgggttttttggattttggtttgtaatttagggaaaaaaaatctttagtatatagtgtttgctggaaaaa

SEQ ID NO: 123158 - DNA, 683 bp, Arabidopsis thaliana
  unsure (1)..(683): unsure at all n locations
cctcgnttccgatgttnccggcccggttccggcattttgccnttaanggagccaagaattgttttnnananggaaaggcngattcncncccttgngttagnaacaaccnccgaggtgcntgacgggttcagtgtgggggttaaacttcaggggncgtgtaacagtcgcatcagttaagaactttcagctcattgcagcaaacccaaccacagcctcagcctcaagcctcaaccgcaacctcaacccctaactcagccgcaaccgtctggtcagaccgatggtcccgacaagatcatattgccgtttgggaaagtgggaaaagacatgttcacgatggatttccggtatccgctctctgcgtttcaggctttcgctatctgtttgagcagtttcgacacaaaacttgcttgcgaataagtcaaaaactcagctttgtatgtaatgttatcagatttgctttggagattcttgttttgtggtgttttattttcaccgagaatctcataattagatttgtttcaagctttcattgcttatgctgtttattggtgcaaccaaaaagtttattcgagtttggtttttctccatagtttgatttgtattcataacggtcaaaaacataaaacgaaaataacaataaatcattaagaagcattggttattgaaataaaaaaaaaaaacaa

SEQ ID NO: 123159 - DNA, 529 bp, Arabidopsis thaliana
  unsure (1)..(529): unsure at all n locations
atgannnnnnnnnnnnnnnnnnnnnnnnnnnnnnnnnnnnnnnnnnnnnnnnnnnnnnnnnnnnnnnnnnnnnnnnnnntgacccacgcgtccgcaaacaaaaatcaaccatggtttcgaaaccgctattctccctattgcttctcacggttgcattggttgtgtttcaaaccggaacccttgtcaacgctgaagattccgagccttcgagttcaacgagaaagcctctggtgaagattgtgaaaggtaaaaaattatgcgacaaaggatgggaatgcaaaggatggtccgagtattgttgcaaccatacaatctccgatttttttgagacatatcaattcgagaatctattctctaagcgtaacagtccagtggctcacgccgtcggcttttgggattaccgatcattcattactgcggctgccgagtaccagcctcttggtttcggtactgctggtgagaaacttcaagggatgaaggaagtcgctgcgtttcttggccacgttgggagcaaaacctcatgcgggta

SEQ ID NO: 123160 - DNA, 515 bp, Arabidopsis thaliana
  unsure (1)..(515): unsure at all n locations
gnnnnnnnnnnnnnnnnnnnnnnnnnnnnnnnnnnnnnnnnnnnnnnnnnnnnnnnnnnnnnnnnnnnnnnnnnntcgacccacgcgtccgaggccgcgtggggtgttactcagtgcggtcgttgggtccttgataggatacttggtagtcctcatatgcagaccacctcctgagtttaatagattcaccattgttatgactgcttttggaaatactgggaatcttttgttagctattgttagctcggtgtgtcacacgaagacgaacccttttggaccgaattgtaactcgagaggggtttcgtatgtatcgtttgcgcaatgggttgctgtgattcttgtttatactgttgtgtatcatatgatggagccgcctttggagtactatgaggtcgttgaggaagaaggggttgagatagaggagatcattgtggagaatcatgatgctagtaggcctcttctagtagaagctgattggccagggattgaggacacagagacagagcattgcatga

SEQ ID NO: 123161 - DNA, 662 bp, Arabidopsis thaliana
atctcccttcaacaatggcggaacaatctcaactcaagaatctcaccatcatcctcctcctcctctgcttatccttccaatcactatccttcgccgccgaatctcacctaaccgtcgatttctactccaaatcatgccctaaattcctcgacattatccgcgaaaccatcaccaacaaacagatctcaactccaacaaccgccgccgcagctctccgcctcttcttccacgactgtttccccaacggctgcgacgcctccgtcctcgtttcttccaccgctttcaacaccgccgaacgcgattcatcaatcaatctctctctccccggagacggattcgacgtagtaatccgagctaaaacagctctcgaactcgcttgtcccaacacagtctcttgctccgatatcatcgccgtcgcggtacggtgatctcctcgtaaccgtcgggtggcaccttactacggaatcttcccttcggccgtcggcgattcacgaacttcgaaatcatctctcgtctccgatctcctcccgctcccgtcgatgcagatatcgaagctcatcgatcaattcagctccagaggcttctccgttcaagaaatggttgctttgagtggtgctcacaccatcggattctcacattgcaaggagttcacgaaccgggtc

SEQ ID NO: 123162 - DNA, 524 bp, Arabidopsis thaliana
  unsure (1)..(524): unsure at all n locations
nnnnnnnnnnnnnnnnnnnnnnnnaaacaaatggtgcaagaaggagctttaactgctcttgcttcagtggctgattcatcgacccacgcgtccgctttcaaaagtactatgatactgtcatgccttatctcaaaactattttgatgaatgcaactgacaagtctaagcggatgcttcgtgccaaatccatggagtgcatcagtcttgttggaatggcagttggaaaggacagattcaaggaagatgctagacaggtcatggaagtgctaatgtcattgcaaggttctcagatggaggcagacgatccaataacaagttacatgttacaggcatgggctaggctttgcaagtgtctaggtcaagatttcctcccatacatgaaggttgtgatgcctcctttgcttcagtcagctcaacttaagccagatgtaacaattacatctgctgattcagaagatgaagcagaggattctgatgatgaaagcatggagaccattatcctgtgcgacanacgaatagggatc

SEQ ID NO: 123163 - DNA, 424 bp, Arabidopsis thaliana
aaccacgcgtccgcccacgcgtccgaaattatctccgagcattctcaagttgggtgattcggtacggattactgatttgggagagaaaaaccctagattggaattagattctgggttcttgggctaaaggtttcttcatctccttcgaatcatccttttagggagcaagacgatgagtagaaaccctttcctggatcctactcttcaagaaattcttcaagtgattaaacccacacgagcagatagggatacgaggatcacagtcattgatcagttgcgtgacgtcttacaatccgtagaatgtttaagaggtgctactgttcaaccatttggatcctttgtgtcaaatctcttcacacgatggggagacttagatatctctgttgacttattcagcggttcttccatcttgttcactggaaag

SEQ ID NO: 123164 - DNA, 987 bp, Arabidopsis thaliana
  unsure (1)..(987): unsure at all n locations
catatgggagaatgctcgancacctgctcctcaggaaggctttgagataaagaggaaagggaatcaggagtttcctgctagtatacggttggagatgaactacgtccctgaaaagttcaagctttctactgcattgatggatgtcctcgggattnaggttgaaacccgcccaagaatcatcgctgcaatttggcattacgttaaggcgaggaaactgcagaacccaaatgacccctctttcttcaactggtgttgctgcacttcagaaagtttttggagaagaaaagttgaaattcactatggtctctcagaaaatatctcatcacttgtcgcctccaccacctattcacttagaacacaaaatcaagctctcaggaaataatccggccgtatcagcatgttacgatgtgctagtggatgtacccttcccgatccaaagagatctgaccaatttgctagccaacgcagagaagaacaaagagattgaggcttgtgatgaagcaatatgtgcagccataaggaaaatccatgagcataggaggaggcggggcatttttcttggggttcagccaattcgccagttgaattcataaacgccctgatcgaatctcagagcaaggatctaaaggtcgttgcgggagaagccagtcgaaatgctgagagagaacgtcgatcagacttcttcaaccaaccttgggtcgaagatgcagttatacgttacttgaaccggaggccagcagctgggaacgatgggccagggagttggtgagtttcttgacgatacaagtctcttcatctgtttgagcatttttagtagaagatattgttgagattagtctggtttaaaagtgaactagtgtatctgtaatcttgtgtatgttgaaacattactactttatataattagctttgttttgtaaaaaaaaaaaaaaagggcggccgctctagaggatccaagcttacgtacgcgtgcatgcgacgtcatag

SEQ ID NO: 123165 - DNA, 1924 bp, Arabidopsis thaliana
  unsure (1)..(1924): unsure at all n locations
nnnnnatccgactcatttagggaagagctggtccgcctgcaggtcccggcccggaattcccgggtcgacccacgcgtccgcggacgcgtgggtgattttggttgaatggagatatcagagagagttcgagctcgattagctgttctctcaggtcatttatcggaaggaaaacaggattctccagcgatcgagcgatggtgcacgtcggcggatacgagtgtcgcaccgcttggatctttgaagggaacactgacgatcgtcgacgaacgcaccggaaaaaattataaagttccggtctcagatgatggtaccgttaaagccgttgatttcaaaaagatagtgacggggaaggaagacaaggggcttaagttatacgatccaggttacttgaacacggctcctgttcgatcttcgatttcttacatcgatggagatgaagggatccttcgttaccgtggctaccccattgaggaaatggctgagaacagtacttttctggaggtggcttatcttctcatgtatgggaatctgccctctgaaagtcagctatctgattgggagtttgcagtttctcagcattcagctgtgccacaaggagtattggatatcatacagtccatgcctcatgatgcacacccaatgggagttcttgtgagtgccatgagtgcactttctatctttcaccctgatgcaaatcctgctcttagtggccaagacatttacaagtcaaaacaagttcgtgataaacagattgttcgcattctcggaaaggcaccaacaattgcagcagctgcttacttgaggacggcaggcaggcctcctgttcttccttcggccaacctttcttattcagagaatttcctctatatgctggattcaatgggcaataggtcttacaagcctaatcctcgtttggctcgagtgctggacatcctcttcatactgcatgctgaacatgaaatgaactgctctactgctgctgctcggcatcttgcctctagtggtgttgatgtgtacaccgcatgtgctggagctgttggggcgctttatggtccacttcatggtggcgcggtcgaggccgcgattaacatgttatcagagattgggagatgctaaaatattccagatttcattgaggcgtaaagacagaaaaaggaagatgtcagttttggacatcgtgtttcaaaaactatgacccccgagcaaaagttataaaaaaactggcagatcaagtgttctccattgttggtagggatcctctcatcgaggtagcagttgctctagagaaggcggcactgtctgatgaatattttgttaagagaaagctgtacccaaatgttgatttctactctggattaatctatagggcaatgggattcccaccagaattcttcacagtcctgttcgcagtcccgcgtatggctggatacttgtcacactggcgtgagtcgttagatgatcctgacactaggatcatgagaccccaacaggcctatactggagtgtggatgaggcattacgagccagtgagagaacgaacgttatcaagtgattcggataaggataagtttggtcaagtttccatttcgaatgcatcaagaaggcgtttagctggatcatctgccctttagtctcaatcctaatactcaccaataaagaagaaaacattgggatacctctgggaaaacaagagagtcttctcaacaacatgtgttgttttctttctcttattcttaaacacttaataatacaaccctattcttattgtttgtctgttattttaaaatgttatgatttaataataataatcttgaaaaaaaaaaaaaaaaaaaaaagggcggccgctctagaggatccaagcttacgtacgcgtgcatgcgacgtacatagctgttcgatagtctcacgcgttcattaccgtcgc

SEQ ID NO: 123166 - DNA, 578 bp, Arabidopsis thaliana
  unsure (1)..(578): unsure at all n locations
ttttgggagccgcccttcggngatatttgtttagggaagctttccccaatntggatccactctggattaactatagggcaatgggattccccccaggattcttcccagtcctgttcgccagtcccgcgtatggctggatacttgtcccactggcgtgagtcgttagatgatcctggacacttgggatccatgagccccctgcaggcctatactgcagtgtggatgaggcattacgagccagtgagagaacgaacgttatcaagtgattcggataaggataagtttggtcaagtttccatttcgaatgcatcaacaaggcgttgagctggatcatctgccctttagtctcaatcctaacactcaccaataaagaagaaaacattgggacacctctgggaaaacaagagagtcttctcaacaacatgtgttgttttctttctcttattcttaaacacttaataatgcaaccctattcctattgtttgtctgttattttaaaatgttatgatttaataaaaaaaaacccaaagggagaccgctctagaggatccaagcttacgtacgcgtgcgtgccacgt

SEQ ID NO: 123167 - DNA, 410 bp, Arabidopsis thaliana
tctctcgaaccatcgagtctcgaacccagagaggactttcctcagtgagtcctccgttccttagcttctcttccagatccaaactctcaccaaactttctcacaacacacacacaattcgattcgatccacactcttaaaatcccaaagatctctctgattttgaaattcgattcttccccagatcaacttgtgaatttttccacaattttggttcatgattttgatttcgtgaaggacttatggattcacacccttccctaatgggaaggtccattaccaattcgaaccgatcgagcttagatcttggtcgtccttcttcgtcttcttcatcttctccttcaccgttaaccaaatcgatctccgatgcaagtagtcaaagtctctcttcgatccttaacaatccacacg

SEQ ID NO: 123168 - DNA, 366 bp, Arabidopsis thaliana
tctgaatcgagaaggaatctgactcgtgtagatgagaatcggcggcgtcgaggttacgaaatttgcgtcggagatgatgtcgtcgtcgtcttcgtcggcggtggagatgttgaatctcaaagaagcttcgaattggtggtcagacgtaaacgaatctccgatttggcaggatcgtatcttccatgttctcgctgttctctacggaatcgtttccctcgttgctgtgattcaacttgtgagaatacaattgagagttcctgaatatggttggacgacgcataaggtctttcactttctcaatttcgttgttaatggagttcgtgctgtggtgtttgtcttcaggcgaaatgttcagtttatgcaacc

SEQ ID NO: 123169 - DNA, 551 bp, Arabidopsis thaliana
  unsure (1)..(551): unsure at all n locations
nnnnnnnnnnnnnnnnnnnnnnnnnnnnnnaccacgcgtccgcccacgcgtccgcccacgcgtccgcaaaaagacaattctttccacgcgttctcttcaattcgtaaatgtcttggcctttgtcgttttcaaacttcaacatcagcatcacgtgattggctaatacaaataaaattttctctttattttattattttgccacaagccgtgaaaagatggagaaaatgaatgtccgttttatgattgtgttgatggtaatgtctctggttctgggtttttcgtcggcagttgatttcagatggaggaaaactgcaggattctcagatagattcaccagagctgtttcttcagtcgtgttcccagttcatggcaacgtttatcctcttgggtactataatgtaaccatcaacataggacaaccaccaagaccttattatcttgatcttgatactggtagtgatctcacttggctccaatgtgatgcttcttgtgttcgatgcttggaggcgcctcatccactgtatcagcctaatagtgatcttattccttgc

SEQ ID NO: 123170 - DNA, 812 bp, Arabidopsis thaliana
  unsure (1)..(812): unsure at all n locations
accactcactatanggaaagctggcacccctgcaggtaccggtccggaattcccgggctctctcctacaaagatattgttgtttcattctcttctccatccacaaaaaccattccctctctcaactctctgaatatttttcttcttacgatttacaaatttccgatgctgtgacattaacgtctgagaacagagaaacacttcaaatctttgaattcgtagtgcgacggagacggaggagccatcagtttcgaaaatggcgtgcgaaggtggaggatctaacgtcagatctagctactacaccattctcgggattcgtaaagatgcctctgtttccgatatccgcactgcttatcgtaagctagctatgaaatggcatccggatagatatgctcgaaatcctggagtcgccggagaagctaaacgtcggtttcaacaaatccaggaagcctattctgttttgaatgatgagaataagaggtcaatgtacgatgttggactatatgatcctcatgaagatgatgacgatgacttctgtgatttcatgcaagagatgatctcaatgatgaacaatgtcaaagacgcgggagagagcttggaagacttgcaacgaatgttcacggatatggttggtggagatggcgtgagctatgactgtaacaataatccaaagggcaacaaaagaccacgtgtcaatatctcgaggagtagtgctgcgatgcgttaaggcttacttcttttgtgtatgagtgtcgtgttgtatcaaaatttcaattccatgttcaattgtctagaccataaaataaattatct

SEQ ID NO: 123171 - DNA, 582 bp, Arabidopsis thaliana
  unsure (1)..(582): unsure at all n locations
ctttactattttcttccttaccaaatatagcaacaacaaaaaaacgttttctgtgatggaggtcccgattataaacagaataggcgattttgacatggggataaactcgataaacgacccgtcgtatttatctcgagctttggcagtctccggtgtcggaaagttacatcaagcttatagtttttggaaatggggcgccttattgctacttgcattttttgcttcatttacatcgttaactacaagaatcaagactttagtctttagattaagaaatgtaaacgtgtctctaccttcccaaactcttttatgtaattacgacagcgactccgattggtctttctcgtcagactcttcagacgaagagaaagatgaggacgataacaaagaagatgactcggtcaatggcgattcacgcgttcaaagatttggttattaccatgatgatgatgataagggtattagtggaagtttcccctggttgcggcggcgcagtggtagcttcggagatttgttagatttaggctcaagcggagtcgtnaagcttttggggacaatccttaatntcaacgngggaaggaa

SEQ ID NO: 123172 - DNA, 521 bp, Arabidopsis thaliana
  unsure (1)..(521): unsure at all n locations
nnnnnnnnnnnnnnnnnnnnnnnnnnnnnnnnnnnnnnnnnnnnnnnnnnnnnnnnnnnnnnnnnnnnnnnnnnnnnnnnnnnccacgcggtgcggttcttcaccaccacacacagccacaatcttttgaattttcctcctcatcatcgtctctctccgatccatggcctttaacaatttcacccgcctcgatgctcactccgccgccgagaaagccgtctctgtaatcggattaggttacgatctctgctccgatgttcgtttctccgcttgtaaaaccacacccgacggttccaggttagtcgaaatcgacccgactcggaaccgtgacttaatcttccccggtggtatcgtcgttaacaacgtctcgagctcgattaagtgcgataaaggcgaacgtactcgattacgctccgatatactctcttttaatcagatgtcggagaagtttaatcaagatatgtgtctctccgggaagattccgtcagggatgtttaataatatgtttgcgtttagtaaat

SEQ ID NO: 123173 - DNA, 494 bp, Arabidopsis thaliana
caatacgactcactttagggagaagctggtacgcctgcaggtaccggtccggaattcccgggtcgacccacgcgtgcggcgcagagaaactttgcaatttgcaacacattcattaacccaatctcttctttagctcaaacatatctacacaagaagataagaagcttaagattctctccacaaaacaaaaatagttatcagattcacaaacaaagccatcaaatttcatcattgatttgttcaataagaaatgggaagcaaatggcgaaaagcaaaggtggctttaggtctcaatttatgtctctacgttcccaaaacgcttgaagattcttctcctccaagaagatccgacgacgccgtttcactttctccggttattgttcaaagaccatcaacgccgactccttcctcctctggtctccgattacctcgttccatgagcaaatcctcatcaaagaaaacttgtgcgatatgtttgacggcgatgaaagctg

SEQ ID NO: 123174 - DNA, 818 bp, Arabidopsis thaliana
  unsure (1)..(818): unsure at all n locations
cccacgcgtccgcggacgcgtgggcaacaattcacacaatttctcgtttttttttgtttatcatcaaaagttttaatctaaattacgtatcaaattccgagcaagatgactattcttgttgaacattttgttcctgattcaagagtggatgaaaagaaagtgatagaggagagggataatgaattggtgttggatggaggttttgtggttccaaaatcaaaggaaactgatgcattcgatgctcctgatatgaatttcttgggccattccttcagggattatgagaatggtgaaagcgagagacaacaaggtgttgaggaattttacaggatgcaacacattcaccagacctatgactttgtgaagaagatgaggaaagagtatggaaaacttaacaagatggaaatgagtatatgggaatgttgtgagttattgaacaatgttgttgatgaaagcgatccggatcttgatgagcctcaaattcaacaccttctccaaaccgctgaagccattcgaagggactatcccgacgaagattggctccatctcactgccctaatccatgatcttggcaaggttctccttctgccagaattcggtggtcttccccagtgggctgtcgttggcgatacatttccagttggatgtaccttcgactcagccaatattcaccacaagtatttcaaaggaaaccatgatatcaacaacccagagtccaacacataaaatgggggttcccctgagggatgttggtttagacaatgttctcatgcttggggcatgcggctaatgatttgggggnagagatgncggccntc

SEQ ID NO: 123175 - DNA, 712 bp, Arabidopsis thaliana
cggaaacccggggcgccgcacgcgtccgaacgttttcaggcgaccaagggaagacttacatgttgagaatctccaatgttgggttatgaggcactttcaatttcagaatgcaaggccatacaatgaaagtagttgaagttgaaggctctcatgttattcaaactgattatgattctcttgacattcacgttggccagtctttagcagttcttgttactttaaaccaatctcctaaagattattacatcgttgcaagcacccggttcataagaagcaagctttctgttatgggtttgttgcgttattctaactctcgcgtcccagcttctggtgatcctcccgctcttccacctggagagcttgtttggtccatgagacaagctagaaccttcagatggaacttaacagcaaatgcagctagaccaaaccctcaaggatctttccactatggaatgatcagtccaacaaagacatttgtcttctcaaattcagctcctttgattaatgggaagcaaagatatgcagtcaatggagtctcttatgtgaaatcagagacgcctcttaaactcgctgatcactttggcatctcaggagttttcagcaccaatgccattcaaagcgtcccatcaaactctccgccaacagttgcaacatcagttgttcaaacatctcaccatgacttccttgaaattgtatttcagaacaatgagaa

SEQ ID NO: 123176 - DNA, 1029 bp, Arabidopsis thaliana
cccacgcggaaagaagtaacaaaaccaaagcaaaaaatggtgaagatcgaagttggaagtgtgggagactcattcagtgtatcatctcttaaagcttacttgtctgagttcatcgcaactcttctcttcgtattcgcaggcgttggctctgctgttgcgtttgccaaactaacctctgatggagccttggacccagctggtcttgtagcaattgcaattgctcacgcgtttgctcttttcgttggagtttccattgcggctaacatttctggtggtcaccttaacccagccgtgactcttggccttgccatcggcggaaacataacactcatcacaggtttcttctattggattgctcagtgtcttggctccatcgtcgcttgtcttctcctcgtctttgttactaatggcaagagcgtaccgacccacggggtctcagccggtttaggagcggtcgaaggtgtcgtcatggagatcgttgtgacctttgcattggtctacaccgtttacgccacagcagctgatccaaagaaaggatcgctagggaccatcgctccaatcgccatcggcttcatagttggtgccaacatcctcggctgctgggtccattcagtggtggctccatgaatccagcaaggtcgttcggaccagctgttgtcagtggtgacttgtcccaaatctggatctattgggtgggaccacttgtgggtggtgcactcgcgggacttatctacggtgatgtgttcatcggttcttatgaagcggtagaaacacgtgagatccgagtgtaattgactgggttttgtgattgcttgatggttggttgatgttttgtttgcgtgtgtatgtttggtgtccactttcttgcaagattgtatgtagagaaaagaaaaaaagttatgtcctgttaataagaaaatgtatatacatttcacttcatctcaaaaaaaaaaaaaaagggcggccgctatagaggatccaagcttacgtacgcgtgcatgcgacgtcatagctattctatagttcgcc

SEQ ID NO: 123177 - DNA, 674 bp, Arabidopsis thaliana
  unsure (1)..(674): unsure at all n locations
ccggcactatacgactcactatagggaaagccggtacgcctgcaggtaccggtccggaattcccgtgtcgacccacgcgtccgcccacgcgtccaaaaatggtgaagatcgaagttggaagtgtgggagactcattcagtgtatcatctcttaaagcttacttgtctgagttcatcgcaactcttctcttcgtattcgcaggcgttggctctgctgttgcgtttgccaaactaacctctgatggagccttggacccagctggtcttgtagcaattgcaattgctcacgcgtttgctcttttcgttggagtttccattgcggctaacatttctggtggtcaccttaacccagccgtgactcttggccttgccatcggcggaaacataacactcatcacaggtttcttctattggattgctcagtgtcttggctccatcgtcgcttgtcttctcctcgtctttggtaactaatggcaagagcgtaccgacccacggggtcttagccggtttaggagcggtcgaaggtntcggcatggagatcggtgtaccctttgaattggcctacaccgtttggcaaagaagttgcccaagaaggtaccgtagggccatggtcaatcgcatgggtcaaagtgggcaaaacctggttgtggccattaagggggccaaancaaatca

SEQ ID NO: 123178 - DNA, 568 bp, Arabidopsis thaliana
  unsure (1)..(568): unsure at all n locations
cggacgcgtgggcgtcaatggatagttgagtcggctgttattaacgacggcgacgagttagggttcatacttcctaaagcggccatggagttacatgagatctcaaagctcgacaataagaagcatccagagagaattgttgaatcgaagatgaagaagagaatgaaaccttattctctcacgtctcttaacaatctcgacgatggttgccttatgcatatcctcagcttcctatctccaattccagataggtataacacagcactcgtttgccacagatggagatatctggcgtgtcaccctcgcttgtggctccgtgttgaccgttttgtcaagggatttatctcagcctggagttttcctcaacattgagtcagctgtatctgcagcaagacccggcgataccattttaatagtagccggtgggaactatcgcgtttctaatattcagattaaaaggcctcttttcctgggccggtgggggcgggttcctgtgtgaccccccgggttttctcggggtcaaaaagtccctgggctntnttggcctnaaggttgngattaaaagagc

SEQ ID NO: 123179 - DNA, 1146 bp, Arabidopsis thaliana
gtccatcttccaattgatcaaaacacccacacctcttcttcttcttcgcataaaccttaaaaaccatttccacgatcttcttcttcttcttccctcaaatatagcttaggatttccttaatttcctctacccaagctccatggctgctttcaatttcttcctctcttcttaattctctcaggtaggggagatttgagtagtagtagattgttagatttgtaattcagctattggtgaagaggaagggagagagagatgtgttgaattggttgagtttggtggaggaaagaagaagaagaaatgaatgtgagccatgcatcggtacatccagtggaagatcctcctgcagctgcgacggaagtagagaatccgcctcgggtgaggatggatgatatggaaggaatgcctggaacattgcttggtcttgcattgcgtttttttcagttcttgtttgcggctgctgctctttgtgtcatggcttctactagtgattttccttccgttaccgccttctgctacctagttgcagctactggtctgcagagcttgtggagtcttgcactagccatggttgacgtctatgccattatggtcaaacgctctctacagaaccgtcgacttgtgagcttgtttgcaattggtgatggggtgacatcgacgctgacttttgcagcagcttgtgcatcggcaggcataacggttctaatagacaacgatctgaatagcggcgcacaaaaccactgtgttcagtttgaaacatcaacggcattagctttcataagctggttcgctgctttgccttcgtttctcttcaatttctggtctcttgcatccccttgacacgatactgctcagcaagatgtgttttcatggtgtgtttttcggtgtatagtgactgatttttcttcttctttcttgttttgggtttggaaccaactttcttcaaacccaatacttggaaactgggaattgttttgtagacgacgaccttattcattttgttgtacaatgaaactatctggtcggctttgttgtaaaaaaaaaaaaaaaaaaaagggcggccgctctagaggatccaagcttacgtacgcgtgcatgcgacgtcatagctctcgtataggtcacgaaatccaaccggggcgcggc

SEQ ID NO: 123180 - DNA, 428 bp, Arabidopsis thaliana
cttataccgttctaaaaaaaatcttgctgctatctctctataagtccactcctccttcaagcaaagcaccttcctcttctttttgctcctctgagattggtttaagattaaaccagacccatctaagggatctggaacaagcttcgtctctggttccactctgatcatcagagtattaaaaatggagtctttcttctccagatccacctccatcgtctccaaattgagtttcttggccttatggatcgtcttcttgatttcttcatcttcttttacttcgacagaagcatatgatgcgcttgatccagaaggcaacattacaatgaaatgggatgttatgagctggactcctgatggctatgttgccgtggttacgatgttcaacttccagaaatacagacacattcaatctccaggatggacatttg

SEQ ID NO: 123181 - DNA, 481 bp, Arabidopsis thaliana
  unsure (1)..(481): unsure at all n locations
ctncgccgccgcatnagggaccnggcctgaattcctgggtngcccactgcgtccgactcctccttcaagcaaagcaccttcctcttctttttgctcctctgagattggtttaagattaaaccagacccatctaagggatctggaacaagcttcgtctctggttccactctgatcatcagagtattaaaaatggagtctttcttctccagatccacctccatcgtctccaaattgagtttcttggccttatggatcgtcttcttgatttcttcatcttcttttacttcgacagaagcatatgatgcgcttgatccagaaggcaaccattacaatggaaatggggntgttaatgaggctgggcctcctgatnggctattgttccccgtgggttaacggtgttccaaacttcccggaaatttcagggcacaattnaaattttcccggggttgggaccattaagggttggaantngggcaaagaa

SEQ ID NO: 123182 - DNA, 608 bp, Arabidopsis thaliana
  unsure (1)..(608): unsure at all n locations
ccccccctcgatgtcgacggtatccataagcttgatatcgaattcgcggccgcctcaacttcttgttcatgttctgtgtagtaatttgttgctaccttttattttgttttctgtgagattatttcgtgttgatttcaaacttgaacaagaaaagtggatagatattgtctcttgggttgaagccaaagaaggaaatgataatatatacatacacacacactcacacaaaaatcaaagaaggaagttttataggattatatatatagctagagagtctcatttcttgtatgtttctgtttaatcttctcttttgtctcctttttttatcagtatatgtctgtatgtatttatatatatagatctgaatataggttgtcgatttctaacttattccgcctcttcttattcctttggtttttgctttaagattttttttttgggggatgatgaccaaagacatggtacctcaccagcatcagcaaccacaacaagacgggaatatggcggatctacatcagctncgggggccagnaagggccctcngggaaaaaccgnagcagggggccaatacnccccncaccgnacnggggcacacacacngtggggnc

SEQ ID NO: 123183 - DNA, 530 bp, Arabidopsis thaliana
  unsure (1)..(530): unsure at all n locations
nnnnnnnnnnnnnnnnnnnnnnnnnnnnnnnnnnnnnnnnnnnnnnnnnnnnnnnnnnnnnnnnnnnnnnnnnnnnnnnnnnnccacgcgtccgctctttctcccctctctctctacttctagtttttttttttgtgtgatgatgaacaaagacatgttacttcaccagcatcagcaaccacaacaagacgagaatatgtcgaatctaacatcagcttccggggatcaagcaagtgtctcttctggaaatataactgaagcaagtggttctaattacttccctcatcatcagcaacagcaagaacaacatcaacaacagttagttgttccagattcgcagactcaaaagaagaggagaaaccaaccagcgaatccagacccagaatcagaagtgatagctctatcaccaaatacactaatggcaacaaacagattcgtgtgtgaaatctgcgacaaaggttttcagagagaccagaatctacagcttcatagaagatgtcacaatctgccatggaagctgaaacaaagat

SEQ ID NO: 123184 - DNA, 569 bp, Arabidopsis thaliana
  unsure (1)..(569): unsure at all n locations
atgannnnnnnnncgnnnnnnctacgactcactatttggaaagctggaccgcctgcaggtaccggtccggaattcccgggtcgacccacgcgtccgctaatttcgttgccgtctctccaagcaagaagaagcctctcagttctcacagcgaagatgcctacagtaagcgtgaagtggcaaaagaaagtgttggatggtatcgagattgacgttagtctgcctccttatgttttcaaggctcagttgtatgatttgactggagttccaccagaacgccaaaagatcatggtcaaaggtggtctcttaaaggatgatggagattgggctgctattggtgtgaaagatggtcaaaaattgatgatgatgggaactgctgatgagatagtgaaagctcctgagaaggccattgtttttgcagaggatctacctgaagaagcgctagccactaatctgggttacagtgctggccttgtcaatcttggcaacacgtgttacatgaactccacggtgcagtgcttaaaatctgtcccagagttgaaatctgcattatccaattactcactcgctgc

SEQ ID NO: 123185 - DNA, 547 bp, Arabidopsis thaliana
acgactcactattgggaaagctggtccgcctgcaggtaccggtccggaattcccgggtcgacccacgcgtgcgcccacgcgtacgctattttttattcagacgaacctagacaccattccaatggatgagcaggtccaagaacctctttctgatcaggtgtttatcaacttccgaggagatgagctgcgcgaaatctttgtcaaccatctagagctgcaattaagaaacgcagggatcaacgtcttcatagacactaaagagcagaaagggagaagactacattatctcttcacatggatcaagaagtcaaaaatcgcgcttgctatcttctccaagaggtactgtgagtcatagtggcgtttggatgagcttgcgacgatgaatgaacagatgaaggaaatgatactcgtggtgattccaatcttctataacgtaagatcggacgatgtacaaagagcagccaatcccgatggagaaggcactcttgatggagagatatccctttcttttaaagcactgaagcataaccatgcaggggagcctgag

SEQ ID NO: 123186 - DNA, 511 bp, Arabidopsis thaliana
  unsure (1)..(511): unsure at all n locations
taggacgnnnnnnnnnnnnnnnnnnnnnnnnnnnnnnnnnnnnnnnnnnnnnnnnnnnnnnnnnnnnnnnnnncttgggttttttttttttttttttttttttttttttttttttnggagaggcgcaaacttggcatcgggccactgattggcctgaagaattaaagaatcgtttctttgtaatgtattttaaaggacaaagggagacaacaaagtctctcaccatctttattcactgggtttttattcagacgaacctagacaccattccaatggatgagcaggtccaagaacctctttctgatcaggggtttatcaacttccgaggagatgagctgcgcgaaatctttgtcaaccatctagagctgcaattaaaaaacgcagggatcaacgtttttatagaccctaaagagccgaaagggaaaagactacaattttttttcccagggatcaagaagtaaaaattcgccttgctatttttttcaaaaggtcctgtgagtcaaaggggggt

SEQ ID NO: 123187 - DNA, 589 bp, Arabidopsis thaliana
  unsure (1)..(589): unsure at all n locations
cannnnnnnnnnnnnnnnnnnnnnnnnnnnnnnnnnnnnnnnnnnnnnnnnnnnnnnnnnnnnnnnnnnccacgcgtccgatctgaagatgatgaagatacatggtcaggaggagatcctactgtgttgagaggtactgatttgtctgccacagattcttatcctttaaagaaacagaagctggggagcgaagttgctggacgaaaaaagactttgtttaggagtcaaagtgctcaaagtcgttcatttagagtccctcagagtgaaaaagaggatgagtcacttgagggagttaatataaaccgattaaagaagagcgttgcttcatttcaagaagataagtatccacctggaaagaagttttgctcagatgcatctcctcgtggaactagcatgagaaagttttccccaccttttgtaccaaatgcctggagacgactatctatgcctgtggagctaaagaaagctcggttggatttctctgaggaaaaagatgatgaagaaacagggaaatgggaatctgaaatgactcatgaacgtgagctgcgagatgatgattatgtttctggtgatgatggggaaaataatg

SEQ ID NO: 123188 - DNA, 710 bp, Arabidopsis thaliana
ttattacgccaggctctaattcggctcgctataggaaaaggtggtactcttcacgggccggtccgaaattcccggttcggcccacgtttcagaaaaacaaaaccatctcaaagtttcttgagaagaaaaaaagggtcaagaaagatgcctaaagacaggaatatcggaatcgccatggatttctcagagagcagcaagaacgctctgaaatgggcgatcgagaacttagcagacaaaggagacacgatttacatcatccacactctaccactctctggcgatgaatctcgtaactccctctggttcaaatccggttctcctctcataccgttggcagagtttagggaaccggagattatggagaaatacggtgtcaaaaccgacatcgcatgtcttgatatgctcgacactggttcgaggcagaaagaggtgcatgtagtgaccaagttatactggggagatgcaagagagaagcttgttgatgctgttaaagatcttaaactcgattctattgtcatgggaagcagaggactcagtgctcttcaaaggataaagatggaaagtgtgagcagctttgtgatgcggcttgtgccttcccctgtcttggttgtcagggttctccgttccttaaaatctaaaaacaaaaaaaaagggcgacgcgctgtccagttatacaggttcccgaggcgcgcgtcacgcgtgcgtcataa

SEQ ID NO: 123189 - DNA, 631 bp, Arabidopsis thaliana
  unsure (1)..(631): unsure at all n locations
taggtgcaactactagaagagctatgacgtcgcatccccgcgtacgtaagctcggaattcggctcgaggaaaaacaaaaccatctcaaagtttcttgagaagaaaaaaagggtcaagaaagatgcctaaagacaggaatatcggaatcgccatggatttctcagagagcagcaagaacgctctgaaatgggcgatcgagaacttagcagacaaaggagacacgatttacatcatccacactctaccactctctggcgatgaatctcgtaactccctctggttcaaatccggttctcctctcataccgttggcagagtttagggaaccggagattatggagaaatacggtgtcaaaaccgacatcgcatgtcttgatatgctcgacactggttcgaggcagaaagaggtgcatgtagtgaccaagtttatacttggggaggatgcaagagaggaggctttgtttgatccttgttaaaggtctttaaccccggttctttttgtcaatggggagccaggggccccaaggtgccntttaaaagggtttttttggggagggttacaggcttttttgtcccacaagggggctttccccttaaccctttttaaggtttccggntaaccgntttncctt

SEQ ID NO: 123190 - DNA, 757 bp, Arabidopsis thaliana
  unsure (1)..(757): unsure at all n locations
ancaggatttcgganccccatggatttcncangngcaccagaaccctntnaaatgggcaatccgggaacttagcaggcaaaggagacacggtttacatcatccacactctaccactctctggcgatgaatctcgtaactcccctctggttcaaatccggttctcctctcatacccgttggcagagtttagggaaccggagattatggagaaatacggtgtcaaaaccgacatcgcatgtcttgatatgctcgacactggttcgaggcagaaagaggtgcatgtagttgaccaagttatactggggagatgcaagagagaagcttgttgatgctgttaaagatcttaaactggattctattgtcatgggaagcagaggactcagtgctcttcaaaggataataatgggaagcgtgagcagctttgtgatccaacacgcgccttgccctgtcaccgttgtcaaggataacgaataaacgattctcactacaaaaaaaaaaaaaaaaaaaaactgtctttatcttataagtcctaccaaataatcatcgcaatttatgctttttagtttttattaataaaagaatctttatgttggttttatttgtaatttgactacaacaaaaaaagaacccagagtgttttcatcttctaaaaaaaaaaaaaaaaggnnnnnnnnnnnnnnnnnnnnnnnnnnnnnnnnnnnnnnnnnnnnnnnnnnnnnnnnnnnnnnnnnnnnnnnnnnnnnnnnnnnnnnnnnnn

SEQ ID NO: 123191 - DNA, 513 bp, Arabidopsis thaliana
  unsure (1)..(513): unsure at all n locations
gactcactananggaaagacggtacgcctgcaggtaccggtccggaattcccgggtcgacccacgcgtccgttgggacttgggagggaagaagatctcgttccctctaagccatgaatcgtcgtaatcgtggctcttcttcttcttcttctagggtttcgaatacttatgggaaccgccagttctctgataacccgaggactggatccggcggcggagttaatgaatcctttcagagaagatccgatgcaccgcacaaacgaaacaatgaaaaagacgaatcaaaacataaagacgaagatcctgctgacgtttcattgattgtaggaacttgttcttctatgtgcccagagagggaaagagtcacaagagaacgcctgcgtgatcttgcagtgtttgagaggctttatgggaacccctcaaaatcatccacagagatagctgtcaaaaggtttgcagacccttttcagcgggggttgtccaggcctcggatgtaagaccgctcccagtttag

SEQ ID NO: 123192 - DNA, 463 bp, Arabidopsis thaliana
cccacgcgtcaagctgcttcacattgcctcacaagatcagccacacatcgtcccaatataagacaaatactgaggctactaagagatgaaaacgaagccgggaaatggattatggaagaagaaggaaatgaagattgcttcgatgacgaggtttacccgaattccagcacagaattacacttaaaccttgcgatgcttgaggtggaagacgatgaaactgcatcaatcagcagcatggagagaagtaacaacagccttttttcttctacttgttcatctagggagcttcaaacataaggaattatgcttttagctaatagagaggttaggtacttaggttagaggtttgtttcttagtgtatggagtttacttgataactttatgttagacctgagctccctgctgttatctggaccagaaaattcattcccaagacgaatcattctcaatatcaactatgcc

SEQ ID NO: 123193 - DNA, 669 bp, Arabidopsis thaliana
  unsure (1)..(669): unsure at all n locations
atgannnnnnnnnnnnnnnnnnnnnnnnnnnnnnnnnnnnnnnnnnnnnnnnnnnnnnnnnnnnnnnnnnnnnnnnnnntgacccacgcgtccgtctgctcggagcaaaagttgtagcttctatgctcatgtttgcaacagtttgtggtatcttaatggcacttttcctaaacacggcgggaggtgcttgggacaatgcaaagaaatacatagagaccggggcacttgggggcaaaggaagtgaagctcacaaagcagctgtgactggtgataccgtgggagatccgttcaaggacacagccggtccatccattcacgtcctcataaaaatgcttgcgactataactctcgtcatggctccggttttcctctgaaagtgaaccgttacttatccatcccggcttatttactctcttgcacatatacaaatagagagggagagaggttggttataaaatgatttacatggattaatggtttttgtgtttcatttcatctgaataaatgagataattctgtttttgagtttagagacactctttaaggaattctagagacattttaatcaaaaaaaaaaaaaaaacaaaagnnnnnnnnnnnnnnnnnnnnnnnnnnnnnnnnnnnnnnnnnnnnnnnnnnnnnnnnnnnnnnnnnnnnnnnnntcattcg

SEQ ID NO: 123194 - DNA, 600 bp, Arabidopsis thaliana
  unsure (1)..(600): unsure at all n locations
nnnnnnnnnnnnnnnnnnnnnnnnnnnnnnnnnnnnnnnnnnnnnnnnnnnnnnnnnnnnnnnnnnnnnnnnnccacgcgtccggtgagagcagccatattaagcactgatgctttcttaacaaatgctcggggttatccttgcttgtccaaacgccaccaaaagttaatagcaggattttttgatcatgctgcccaggttgtaatttgtggaaagcctgttcataatcttcaaaagcctcttgattctagctcggagggtacagagaagaatcctctgcgcatatatttggactatgttgcttatctgttccaaaagatggaatcactttctgaacaggaacgcatcgagctgggttacagggattttttgcaggcacccctgcagcctcttatggacaacctcgaagcccaaacctatgagacgtttgagagagactctgttaaatacatccaatatcaaagagcagttgagaaagccttggtggacagggtacctgatgaaaaagcatccgagttgactactgtcctgatggttgtgggggcaggaaggggaccccttgtgagggcatcgttacaggcagctgaagaaactgatcgg

SEQ ID NO: 123195 - DNA, 584 bp, Arabidopsis thaliana
  unsure (1)..(584): unsure at all n locations
atgatactctcnnnnnnnnnnnnnnnnnnnnnnnnnnnnnnnnnnnnnnnnnnnnnnnnnnnnnnnnnnnnnnnnnnnnnnccacgcgtccgtacaaatctaagcttctgtcgttgacttcgaaaactgatatctataagtcaaaatccccattctcaatcgctcatcgtcttgtagaactaattgactaaacaatggcggacaacacaggatccgagatgaaatcaggttcgtttatgttagagaaatccgccaagatctttgtcgctggacataggggattggttggatctgccattgtccgcaagctccaggatcagggtttcaccaatttggtccttcgaacccattcagagcttgatctcactagccaatcagatgttgaatctttctttgctacagagaaaccagtttatgtcatcctagctgctgctaaagtcggtgggattcatgctaacaacacatacccagctgatttcattggggtcaatctccaaatccagaccaatgtgatccaactctgttatacacacggtgggaagaaactcctctttcttggttcatcttgcatttaccccaaattt

SEQ ID NO: 123196 - DNA, 464 bp, Arabidopsis thaliana
tttctatttgccctcttgtttcatgtttggtcctgtcaatcttccctttctttcttctcagctatttgcaacaaagaaggcagactctatgtcatgttggacactattggatttgtacctaaaccccagcaccgatgccccattcccgttgattatgaccctgataaggtgctcctaccaagtgataaaaccgcagatacaattgtcagaaatttgacctacgtaacagaggatgaatcctctaagtctcagtttcctctatttggcggaaacataagctggtctgaacgagaagaaagcttcaaactgaaacctgagatgaaggtccattgcggattcatgccacgtggtggtgctgaaatgtcatctctggataaagaatacgtaaagaagtgcagatttgttgttgccacggtgattttcgatgcatatgatgaaccccaccagccatcaaacataagcaa

SEQ ID NO: 123197 - DNA, 548 bp, Arabidopsis thaliana
  unsure (1)..(548): unsure at all n locations
taaaaaaaatacaaagtctctctccgccgccggaaaaatggttgagccagctagtccagattccgacgaagggatctcgctgctcgagtttcacggtaacggtgaccgttcctggcagttaaatttcgatgatttccaggtttcaccggaacacaaggagaagaaatctccgagtaaactacacaactgtcttggttgtttgggtccggaagacaatgtggcagattattaccagcagcaagtagagatgcttgagggctttactgaaatggatgaacttgcagaacgtggctttgttcctggaatgtcaaaggaagagcaggataatttggctaaaagcgagacatttggcgattagaatatcaaacatttgcaaacatgcttctttttgctgctaaagtctatgcttctgtcactagtggctcttttgctatcattgcctctacattggcctctcttcttgaacctctttctgggttaaccncgggttnccgccttttnnntnagannccaccngttnagttncnttggagancgggtgnaccnta

SEQ ID NO: 123198 - DNA, 655 bp, Arabidopsis thaliana
  unsure (1)..(655): unsure at all n locations
aacngggcncnacgtgncccgggntggccaaacccnctttccgnaggccccctggttgggacttangggcccangctttaacccngngacccttcttacaaacaggggtggcaaccggttcactttccnattgggtccacactgctgctcttgtttctgctcctagcaccaaactatccccaacatttttggtggcttgttgactgctggaattgtagccttttccggcacgtgttatatggtagcgctgcgggaggacagaaagttttcgacattggcaccattcggaggctttgcgttcattgctgcatgggcaactttacttttctaaacaatctcataaccatctatattgtcaagtttgtggtcaagcttatcctacatatgaactcactgttttttttttgtttacctaagagattgcttaataacaattctgtgtcgacaaccattaagcatcttcctttacttgttcagtttgttgctaaagggattatgtaaatgacgaccatattaatgtaatcttattaccatacaatttatcaaaattctacattacaagaaaaaaaaaaaaaaaacaaaagggcggacgctctagaggatccaagcttacgtacgcgtgcgtgcgacgtcataactcttctatagtgcacct

SEQ ID NO: 123199 - DNA, 603 bp, Arabidopsis thaliana
tatactgactcaaatagggaaagctgccacgcctgcaggtaccggtccggaattcccgggtcgacccacgcgtccgcgcacgcgtgggcggacgcgtgggcggacgcgtgggcagaggacgacgatcgatggatcctcggatgtggcacaaagtcgccgctatttccggtatggctgctcttggtttgggaacttatggtgctcatgtctttaaaccagagaacccttcttacaaacaggtgtggcaaacggcttcactttaccatttggttcacactgctgctcttgtttctgctcctagcaccaaatatcccaacatttttggtggcttgttgactgctggaattgtagccttttccggcacgtgttatatggtagcgctgcgggaggacagaaagttttcgacattggcaccattcggaggctttgcgttcattgctgcatgggcaactttacttttctaaacaatctcataaccatctatattgtcaagtttgtgggcaagcttatcctccatatgaactcactggtttttttttgtttacctaagagattgcttaataacaattctgtggcggcaaccattaagcatcttcctttact

SEQ ID NO: 123200 - DNA, 677 bp, Arabidopsis thaliana
atataagctcccaatctctggattggctcaccagaaatcgaaaccataccgcgcaactcacccatacaccatcgtgccattagaagattattctcagaaacagcttttgcacaagcaacaagtaccaacttcaagtctccccttgatattgcctccactatcaataacaaatctttagcatcatcaggccacatggagagttcatggcagatagcatcatcgatactctcagctatctctggcagtggctgcaacattattgaacctcttacattgtccatcacaaataagcaagtaagaatctttgaacatcaaccattatcctcaaatgaccttttatttatctgatcttcataacaaacaccttgtgtaggttaagaagtgatcttctcggtggaagtcgataagggatttggttttgcaagtgagagcgcacgcctggatccaaccaaagctcgcagctgaagcaaaaggaagaatctttttagttgctgtagtgaagaaaataacacatcacatacgacgtcgttttaggcttaaaccgaataagacccgatcaccgacttgacacatctcgcttaaagtctctggtcaaatgggaaatagtgtaagaagcaatctaagagacatcagaggacgacgatcgatggatcctcggatgtggcacaaagtcgccg

SEQ ID NO: 123201 - DNA, 513 bp, Arabidopsis thaliana
  unsure (1)..(513): unsure at all n locations
nnnnnnnnnnnnnnnnnnnnnnnnnnnnnnnnnnnnnnnnnnnnnnnnnnnnnnnnnnnaaagaaccacgcgtccgggaggatggtgacgaaagaatccattgaagtgatagctcagagcattggactctccactctttctccggacgtctcagccgctcttgctcccgatgtcgagtatcgcgtccgagaggtcatgcaggaagctatcaaatgcatgcgtcatgctcgacgcaccactttaatggctcatgatgtcgattctgctcttcatttcaggaatttggagcctacctctggctccaaaagtatgcggttcaagagagctcctgagaacagagatctatacttcttcgatgacaaagatgtcgagctcaagaatgttatcgaagctcctctaccaaatgcacctcctgatgcatctgttttctctcattggttggcaattgatggtattcaaccttccattccacagaattctcctctccagccatatctgaccctaaacgatcgg

SEQ ID NO: 123202 - DNA, 671 bp, Arabidopsis thaliana
gaagagagagacggcgatggcggctacaggatctggacggtctcaattcatttccagttccggcggtaaccgaagcttctccaattctccactcatcgagaactctgattctaatcagattattgtctctgagaagaagagctggaagaatttctttgcttacttaggccctggttttcttgtttcaatcgcatatattgatcctggaaactttgagactgatctgcaagctggagcacactacaagtatgaattactttggatcatattggtggcctcatgtgcggctttggtgattcaatctctggctgctaatcttggttctctcgaggaaaatccctcgttccgcttctggtatcaaggaagcttgcaggttttacttgatagaaagtggattggctctaatggtggcctttctcataaacgtctctgtaatatcagtaagcggggctgtttgtaatgcccccaacttaagccctgaagatcgagctaattgtgaggatttggacttaaacaaggcttcgtttctgctacggaacgttgtgggaaaatggagctcaaagctatttgcaatcgcgcttcttgcttctggtcagagctcgacgataaccggaacttatgctggacaatatgtaatgctgggctttcttgatctcagactcgagccatgg

SEQ ID NO: 123203 - DNA, 747 bp, Arabidopsis thaliana
acgactcaactagggagagctacgccgcctgcaggtaccggtccggaatacccgggttgacccacgcgtccgaggacgcgtgggcggacgcgtggggcttgatcataagcaagagcggcttcctcggctttgtcaaatgtcccgagccaaaccctaattccattcctcgttgagtctcttatctccgctgcaaatttcccccacggccttttcctcactcctctgtatgatctttcttcatcaattccaaccttttcttcttcttcggagttagaaacgtcgccgttttgaatttcttccttaatcatcatctccggtgactcaaatgagaaaaagtcatcggagtaatcataattagggcaaaagaaggcttgaggttcagatgattgatccaagaaacagctctcgttccataagagtgattcttgtgatgagctccaagaacttggagatgaatacatggaagattgggaatattccataagtttttttttttttttttttttgcgagttctccttctcctttcaaaagttatctcttcctgttgtggcaataagtttatttcaaaacctaatcctatatatataagaggcccgggatttataagatatatgaaagtgggaagtattttattgttttaaaacaaaaaaaaaaaaaaaaaaaaaaaaaaagaaaaacccaaagggcgaccgctctagaggatccaagcttacgtacgcgtgcgtgcgacgtcataatcttgtata

SEQ ID NO: 123204 - DNA, 523 bp, Arabidopsis thaliana
aatacgactcactctagggaaagctcgtacgcctgcaggtaccggtccggaattcccgggtcgacccacgcgtccgattctcaaagtgctctctttttaaaccaatctgctctcttccacttactctctctatctcttcccatctcgtttcttttttggtcattaaaagagaaacctttgctctgaatcttgaaaatggattctttgatcaaactcttcttctgcctctttatcttcttatgtacttcgctcttatttggagaaatcaatggagtggagggttcaaatcaaaatcatcacttgtatccatttaggccaacgaagctctttgtgttcggagattcttatgccgataccggaaacattaaaaaggctttctctagctcttggaaattcccttacggtatcactttccccggaaaacccgctggccgtttctccgatggccgtgtggcaacagattttctaggtatctcttcatcttcgaaagtaaaaaaacttatcatccttaaaacttatattg

SEQ ID NO: 123205 - DNA, 811 bp, Arabidopsis thaliana
attccaattctcaaagtgctctctttttaaaccaatctgctctcttccacttactctctctatctctctcccatctcgtttcttttttggtcattaaaagagaaacctttgctctgaatcttgaaaatggattctttgatcaaactcttcttctgcctctttatcttcttatgtacttcgctcttatttggagaaatcaatggagtggagggttcaaatcaaaatcatcacttgtatccatttaggccaacgaagctctttgtgttcggagattcttatgccgataccggaaacattaaaaaggctttctctagctcttggaaattcccttacggtatcactttccccggaaaacccgctggccgtttctccgatggccgtgtggcaacagattttctagctaaatttgtggggataaaatcaccaatcccatacttttggaaagattacgcgggaaagaaacgattacagtacggaatgaattttgcgtacggaggaacaggagtgttcaacactcaaactccattgcctaacatgacaactcaaatcgacatcttccagaacattctcaccaccggcgacatctactatcctcccgagcttacttcatccgtggctctcgtcagtgtcgctggcaacgactactccaatttcatcgccctaaaccgccctgcctctgaattcccagcattcataaagcaagttgtggatcaaacagaggtgaatttgagacggatccacgctttgggagtgaaaaagattgcagtaccatccctgcaaccgcttggttgtctccctcccttcacattcg

SEQ ID NO: 123206 - DNA, 561 bp, Arabidopsis thaliana
  unsure (1)..(561): unsure at all n locations
nnnnnnnnncnnnnnnnnnnnnnnnnnnnnnnnnnnnnnnnnnnnnnnnnnnnnnnnnnnnnnnnnnnnnnnnnnacccggccacgcgtccggtgcagagaaatcaagaatggatttgcagagaggctttgtgttcttgtctttggttctatcttttatgataatcgaaacgacggcgtatcgagagagacagctgctgctgctgcaaccaccgcaagaaacggcgatagataccgcaaacgcggtggtgacggttcaagatcgaggtttgaagacgcggcgaccggagcataagaacgcatacgcaacgatgatgtacatggggacgccaagagactacgagttctacgttgcgacacgtgttttgatcagatcgttgagaagtcttcacgtggaagctgatctcgtcgtcatcgcttctctcgacgttcctctccgatgggttcaaaccttggaagaggaagatggagctaaagtggtgagagttgaaaatgtggataatccatacaggagacagaccaacttcaacagtagattcaagcttactctaaacaagctcta

SEQ ID NO: 123207 - DNA, 552 bp, Arabidopsis thaliana
  unsure (1)..(552): unsure at all n locations
atgatacttctcnnnnnnnntacgactcacnatagggagagctgacacgcctgcaggtaccggtccggaattcccgggtcgacccacgcgtccgcgaagcatccttcaaggaagcattaaggaggaatgtggcagcaaatcccggggtgtgttccatatcttctagcttggattccgatactgcggaaatctccacgacgtttaagatcgagctaggggatagtaacgccgttgagagatgcagcgtattgcaacgcttccatagtttcgagaagtggatgtgggataatatgctgcatcctagtgctttatctgcatttaagtatggtgctaagcaaagcagtccgctttttcgcatatgcagaatctgtgcggaactacactttgtcggagatatttgctgtcctagttgcggtcagatgcatgctggtccagatgttggtgagttgtgttttgctgagcaaggggcctcacactcggggataatttgagaagaggagatactggctntatcttgcgtagctcaatcttgtctcctcttagaataagact

SEQ ID NO: 123208 - DNA, 656 bp, Arabidopsis thaliana
  unsure (1)..(656): unsure at all n locations
ctacnnnnnnnnnnnnnnnnnnnnnnnnnnnnnnnnnnnnnnnnnnnnnnnnnnnnnnnnnnnnnnnnnccacgcgtccgatcctctcaaatctcaaactctcttcttcccatcactctctcgctctctcttcaatctcatctcaatcatgacagagcaagagatctgcgtgagggttacaagagcggcggcgaaacgaaaagcttcgacggcgatgggtattgacggagatcgggtcaacaagaagagagttgttctcggtgagcttctaaacgtctccaatgtcaatctcttggctaatctcaatcagaagaaagaaacccagaagccaaaaaggaatcttaaacctcctccggcgaaacagattaagtcagctccggtggctattattgacctagaatcaaaatctgacattgattctcgatctgatgatcctcaaatgtgtggaccttatgttgctgatatctacgagtatcttcggtcaacttttaggtgaagccaaagcaagaggaccttttacccagattacatagagaaagttcagaaagatgtaacaccaagtatgagaggtgttttggttgattggttagtggaagttgctgaagagtataaacttggatctgaaacactttatctcactgtctcacatattgata

SEQ ID NO: 123209 - DNA, 585 bp, Arabidopsis thaliana
ctaattcgataaactatagggcaagctggcacgcctgcaggtaccggtccggtattcccgggtgcgacccgggcgttcgaaaggtcatcacccattctcactcgcagaatatttgttctcatctgattcctccgatctgccatgtctcggcttttctaacgctaagaagtttcacagacgcggcgaaggagagggaggaaggagatagatctctttttccgtcgcgataataataaaaaataaacgtgtctagaggctgttactgaagagttgattcatacggagagaggatagaaatggcagatgggatatcgagcttttggggtcctgtgacttctactatagagtgttgtgagatgaactacgcctactcatcctacattgctgagttctacaacactatatccaatgtccctggaatcctattggctctcattggtcttgtcaatgcattaaggcaacggtttgagaagaggtttagcattcttcacatttcgaatatgatacttgctatcggcagcatgctctaccatgccaatttgtaaaaacgtgcaacaacagagtggtgataccccatgggggggg

SEQ ID NO: 123210 - DNA, 542 bp, Arabidopsis thaliana
  unsure (1)..(542): unsure at all n locations
tcactactaggacgcgttgtacgtcgcaacaccctatagtgagtcgtattatacagaaccgcactcgcagaagatgtgttctcatctgactcctccgatctgccatgtctcggcttttccaacgctaagaagtttcacagacgcggcgaacgagggggaggaaggagatagatctctttttccgtcgcgataataataagaaataaacgtgtctagaggctgtcactgaagagttgattcatacggagagaggatagaagtggcagatgggatatcgagcttttggggtcctgtgacctctactatacagtgttgtgagatgcactacgcctactcatcctacattgctgagttcgacaaacacttttaatccaatgtccctgggnatncccattggcccncaattgggncttgtcaatgcattaaggcnaccgggttttaaaaagnggttttanaatttttcnaatttccgnaaatngaanctttttttnggganaattttttcccatgccnttttnaacnagggnaanaacaggggtttg

SEQ ID NO: 123211 - DNA, 651 bp, Arabidopsis thaliana
  unsure (1)..(651): unsure at all n locations
nnnnnnnnnnnnnnnnnnnnnnnnnnnnnnnnnnnnnnnnnnnnnnnnnnnnnnnnnnnnnnnnnnnnnnnnnnnnnnnnnnnccacgcgtccgcccacgcgtccgcccacgcgtccgcccacgcgtccgccgcctgctcttcgataattccgaggagcttcttcactcttcttatatctcatttctctctatctctctctctctctcgcattgcgattaacgaaattcgaaaaatgtctcgtcttctccaaacacccttcttaccttcagtttccctccccacaaaaacacgatcttccgttacgggtttccgggtaaagcccagaatcatcccaattcaagcaaagatccgagaaatcttcatgcctgcactaagttccacgatgaccgaaggcaaaatcgtctcttgggttaaatcagaaggcgataaactcaacaaaggagagagtgttgttgttgttgaatctgataaagctgatatggatgttgagactttctatgatggttatctagctgcaatcatggttgaagaaggtggtgttgctcctgttggttctgctattgctttgttagctgaaactgaagatgagattgctgatgctaaagctaaagcttctggtggtggtggtggtggtgattctaatgctcct

SEQ ID NO: 123212 - DNA, 512 bp, Arabidopsis thaliana
  unsure (1)..(512): unsure at all n locations
nnnnnnnnnnnnnnnnnnnnnnnnnnnnnnnnnnnnnnnnnnnnnnnnnnnnnnnnnnnnnnnnnnnnnnnnnnnnnnnnnnccacgcgtccgcccacgcgtccgcaaaaattagggcaaaattagcgtattgatgtgtttcacttttcttcttcttcttcttcatcgtgttcgtgtttgatttgcgactttctccaaggaaaatttagggttttcgatgaaggaacctttgcagaagaagaaggtggttgttcgtcacttgccgccttctctttcacagtccgatctcttatctcaaattgatcctcgtttcgctgatcgttacaattgggtttcgtttcgtcctgggaagtccagctataaaaatcagaagtattcacgggcctatgtaagtttcaaggcaccagaagatgtttatgagttcgctgcatttttcaacgggcatgtgtttgttaatgaaaagggtgctcagtttaaggctatagttgaatatgcaccttctcagcgtgttc

SEQ ID NO: 123213 - DNA, 509 bp, Arabidopsis thaliana
  unsure (1)..(509): unsure at all n locations
atgatactgccnnnnnnnnnnnnnnnnnnnnnnnnnnnnnnnnnnnnnnnnnnnnnnnnnnnnnnnnnnnnnnnnnnnnnnnccacgcgtccgaaaaaaaacaaacccgtgacgccattaacgaaggtcgagcttccttgacaccacacaatgcattctcctcgtaagctatttcacgcgcggtcatcactcgccacgcgccgatcaacggctcttgtcgtattaacttccctagctattggaatcgccggtttcacatttggactcgccgtaattcttataccgggtctccgattaaccggtcgtaattgcttgacgaacactcctccgaagacggtgcgagtcgtttgggacgtcgccggaaatagtaatggcgttgttagtggcgaaaagaagaggcataaggttatgggattcgttggtattcaaaccggatttggatctgctggccggagacgatcacttagaaagacatggatgccgtcagatccagaaggtcttcgacgttt

SEQ ID NO: 123214 - DNA, 1233 bp, Arabidopsis thaliana
  unsure (1)..(1233): unsure at all n locations
atgatactgcccaataccgactcacgcttagggcgaagctacgcacgcctgcaggtaccggtccggaattcccgggtctgacccacgagtaaacaaattataaacccattttccttcataaatttctaaaataaaaccccttaaactttcattcacatcatccaacccccaatgggtcgaatcttgaaccgtaccgtgttaatgactcttctagtcgtaacaatggccggaacagcattctccggtagcttcaacgaagagtttgacttaacttggggtgaacacagaggcaaaatcttcagtggaggaaaaatgttgtcactctcactagaccgggtttccgggtcgggttttaaatccaagaaagaatatttgttcggaagaatcgacatgcagcttaaactcgtcgccggtaactccgctggaaccgtcactgcctactacttgtcatcggaaggaccaacacacgacgagatagactttgagtttcttggtaatgaaacagggaagccttatgttcttcacactaatgtatttgctcaaggcaaaggaaacagagaacaacagttttatctctggtttgatccaaccaagaacttccacacttattctcttgtctggagaccacaacacatcatatttatggtagataatgttccaatcagagtattcaacaatgcagagcaacttggtgttccatttcccaagaaccaaccaatgaagatatactcgagtttatggaatgcagatgattgggctacaagaggtggtttggttaagacagattggtctaaagctcctttcacagcttactacagaggctttaacgctgcagcttgtactgtttcttcagggtcatctttctgtgatcctaagtttaagagttcttttactaatggtgaatctcaagtggctaatgagcttaatgcttatgggagaagaagattaagatgggttcagaagtattttatgatttatgattattgttctgatttaaaaaggtttcctcaaggattcccaccagagtgtaggaagtctagagtctaaaaaccaatgattctctctttgttgttgtttagtgcaaattaaattctctttgttgtttctttaataaattgatttgatttttcttcaaaaaaaaaaaaaaagggcagccgctctagaggatccaagcttacgtacgcgtgcgatgcgacgtcntagctcttctatagnnnnnnnnnacaatcnnnn

SEQ ID NO: 123215 - DNA, 672 bp, Arabidopsis thaliana
  unsure (1)..(672): unsure at all n locations
aacaagaacaatatggaggatccgacttatcaacacatagacgctcgttccaaagccaggtttgatggtactgctccagaaccccgtaagggaataagaagcggtcatatacctggaagcaaatgtatcccttttcctcagatgtttgattcttgtaacacattgttaccagcagaggagctgaagaaacgatttgaccaagaagatatctcactggacaatcctattatggcctcgtgtgggactggtgtaacagcttgcatcttggcaatggggcttcaccggctggggaaaaccgacgtgccgatctatgatgggtcgtggactgaatgggcgacacaaccagacttgcccatagagagtgttgaatcttcttcatgaaagtctccaccgtaaaggctagcgacaagattacaagccacagacggaaataattatcatgtttaagttgagggatttgtttgaagttaatcataatcctggctttaaatttgcctcaaccctcaagccgaagaggactgtatctatagaacttggaacttttccttttcgtttctggattcatcttctcagataacaaaaggttgttttctgtgttttctttctaataaaatcaagaaccgccccaggggatttcctcnaacgggtncttnaaccaggggtnccntgnaa

SEQ ID NO: 123216 - DNA, 474 bp, Arabidopsis thaliana
tttagaatcaagaaaccgacgtctctctcttcctcacctcctctttcttctctgcttcggatctctctcttctctctctctctctccctgattaaacctctaaaatcagggagtttttttcttctggtttcggattctcagaaaaattagcaagtctttgtcttttgctgctggttgcatagcccccattgaagctttttcctctcaatcttaatgttctcaagagggcttctgcagcaagcgaaatgggacaaagaaataggaatgttgatttagaaatggagcagcagcaatctcaagcttctctccaagcagagccttgcatccttttaggcagctttccgcaacaaccggataataataatatgcctgctatggttgcacacgttcctaatttagaacctcattctcttcaagacccaacttatgacaactcggccatgttctacgggcttcctcagtatcatcatcatc

SEQ ID NO: 123217 - DNA, 576 bp, Arabidopsis thaliana
  unsure (1)..(576): unsure at all n locations
ctttatcaacaacactctctctcttctctatcaacactttctttcatctctcgccggaaaaacccataaccacaacaatggccaccgaaacccaaatccgaatcggagtaatgggttgcgccgatatcgctcgaaaagtctctcgagcaatccacctcgctcccaacgccacaatctccggcgtagcaagccggtctttagaaaaagccaaagcctttgccaccgccaataactacccagaatcaaccaaaatccacggctcttacgaatctcttctcgaagatccagagatcgatgcgctctatgttcctctccccactagtctccacgttgagtgggctattaaagcagctgagaaagggaaacatatccttttggagaagcctgttgctatgaacgtaactgagtttgataagattgttgatgcttgtgaagctaatggtgttcagattatggatggtactatgtgggttcataatcctagaactgctttgcttaaagagtttttctgatctnaacggtttggcanttaaactgaagtttctgaagttttgnttttnatgttggtgnttggta

SEQ ID NO: 123218 - DNA, 464 bp, Arabidopsis thaliana
  unsure (1)..(464): unsure at all n locations
nnnnnnnnnnnnnnnnnnnnnnnnnnnnnnnnnnnnnnnnnnnnnnnnnnnnnnnnnnnnnnnccacgcgtccgtgatgcttgtgaagctaatggtgttcagattatggatggtacctatgtgggttcataatcctagaactgctttgcttaaagagtttctttctgattctgaacgttttggtcagcttaaaactgtacagagttgtttctcatttgctggagatgaagggggtcttaaaaacgatatcgcgtgtgaaacctaggtcttgacgggcttggtgcgctaggagatgcggggtggtacgcgatcagagcaactcttttagctaataactgtgagcttccgaaaactgtgactgctttcccccggtgcttgggttgaatgaagcatgagtgatactttcctgtggagcatctttgagttgggaagatggacgaactgcaactatatattgttcattc

SEQ ID NO: 123219 - DNA, 659 bp, Arabidopsis thaliana
  unsure (1)..(659): unsure at all n locations
ccagcactaatcgactcttatagggaaagctggcacgcctgcaggtaccggtccggaattcccgggtcgacccacggcgtgcggccacgcgtccggaagacgacagaaggggactcttcattgttttcttctctctatccctcttcatttcctctctgatcgccagtgatttaggcttctgcaacgaagagatggctttagtcggaggtgttggcgatgtccctgctaatcagaacagtggtgaggttgagagcctcgctcgtttcgctgtcgatgaacacaacaagaaagagaatgcacttcttgagtttgcgagagttgtgaaggcgaaagaacaagttgtagccggaacactgcatcacctgactctggagattctcgaggcaggacagaagaagctttacgaagccaaagtgtgggtcaagccgtggttgaactttaaagagttacaggagttcaagcctgccagtgatgcccctgctatcacttcctccgatcttggctgcaagcaacggtgaacatgaatctggatggagggaagttcccggagatgatccagaagtgaagcattttncttagcaggcttttcaagaccattcagcagaggtctaactccttgtnccttatnaacttnttgangtttntncattcnnaaantt

SEQ ID NO: 123220 - DNA, 710 bp, Arabidopsis thaliana
gctgtacgtacttctggaagatacataattgatacaattggagaaatgctggaaaagattcaattccattatcagcagcatcatcagccatgctttctatacttatccagtgaagttataaagatttttggttctgatccatcgtgtgctgtctacttgaagaacctgattgaaaccctctttgcacatacaacatgtcttatgacaagtatcaaggaagtcactgcgagaccagatatagccgatgactgctttttgttggcgtctagatgtcttcgctactgtccacatttattcattccgtctcctatatttccagctcttgtaaactgcgcaatgattggaatcacagtgcagcacagagaagcctgccactcgatattgacctttctaaccgacatttttgacctcgagaagtctgtgaatgaagaacagttcgtacggatcagggacaatatcattattcctcggggagctacaatcaccagaatattgatagcctcattagctggggcacttcccagttctcggctagatacggtaacatattcgctgctagctctgacaagaacatacaggttacaagcagtgagttgggctaaggaaagtgtaagcctgatacctcgaacagccttgacagataccgaatctaccaagttcttacaagcattgtccgatattgcttatggagcagatgtgaattctctgat

SEQ ID NO: 123221 - DNA, 480 bp, Arabidopsis thaliana
aacaatgatgaaggtgatggccggtcagctcccctagttaaacttggggatgcatcaatggcatcccccttcacagctaaacatgcgtcagttgccccagtgacagacataatccggcagggtcgtagcacacttgtgacgactcttcagatgttcaaaattctcggtctgaactgtctcgccacagcatatgtcctaagtgttatgtacttagacggtgtaaagcttggtgatgtccaggctacaatcagcggagtgttaacagctgcgtttttcctcttcatttctcatgcccgaccgcttcaaaccctctctgcagaacggccccacccgagtgtcttctccgtgtacctcttcctctctctgataggacagtttgctgttcacttgaccttcttggtctactctgtgaaagaagctgagaaacacatgcccgaggaatgcatcgaaccagacgcaagtttccatcctaacctggtg

SEQ ID NO: 123222 - DNA, 799 bp, Arabidopsis thaliana
  unsure (1)..(799): unsure at all n locations
cnnnnnnnnnnnnnnnnnnnnnnnnnnnnnnnnnnnnnnnnnnnnnnnnnnnnnnnnnnnnnnnnnnnnnnccacgcgtccgcgcatatacatacacttatatacgttatcaatatattttatttttaataagtccagtttttgtctgtgcatcgagtttaacaggcaatgctcgtgtctctctctctttatatgtttagattctttatctggaacttggaagctcttttgttagctatatctaatcggtgatctcgaagcttattcaatccctctttcttttttcgaatggcttcaaagtcggatgtgaatataatagagacatcctcaaaggttcatttctcaggatttcatcaaatggatggtttagcttcaaatagaccagagcaaatggctgaggaagaagaacatggtcaaccttttgtgatcggagttgctggaggtgcagcatccgggaaaacaactgtctgtgatatgattatgcagcaactgcatgatcagagagctgttgttgtaaatcaggattctttctaccataatgtaaatgaagtggagcttgtaagagttcatgattacaattttgaccatcctgacgntttcggtactggagcaattatttgttttccatggggaagttanggaaaggccaagcagtagntattccnatttatgncttcaaaaggttccaagnccaatgtttttccccctggngggnggatccttctncggtataattnttggaggatncctnatttncttgcccncgggngcggggttttttgcnctnagnntttttntc

SEQ ID NO: 123223 - DNA, 462 bp, Arabidopsis thaliana
cggacgcgtgggcggacgcgtgggcagtagcagatctgagttttggagagttcaaaggaagaagataactccaataccagagtgaaagcattcaggaaacatgcctcctcagaagattgaaactggtcatagcgacactattcatgatgtggtcatggattactatggaaagcgagtagcaactgcctcgtctgactgcacgatcaagataaccggagtaagcaacagcggtggatctcagcatctagctaccttaaccggtcatcgaggtcctgtctggcaagtcgcttgggcgcacccaaagtttggttcacttctcgcttcatgttcctatgatgggcaaattatattatggaaagaaggtaaccaaaaccaatggacacaagctcatgtcttcacagaccacaaagtatctgtcaactctatcgcttgggctcctcatgaacttggactctccttagc

SEQ ID NO: 123224 - DNA, 639 bp, Arabidopsis thaliana
  unsure (1)..(639): unsure at all n locations
gcgtttgaacatatatatatctaaacgtctgagaaaagaaacaacacaaacatagcttcaagtatggacctcaagctaaggcctagcttcttcatctcttttctgattctcattttacttctcaaaaatcttaattacggatctgcagctagtccgaaatgcatatccaccgagcggcaagctcttctcaccttcagagcagcactaactgatctttcgagtaggctcttttcttggtccggacctgactgctgcaactggcccggtgttctttgcgatgctcggaccagccacgttgtcaagattgatctcagaaacccgagtcaagatgttccgctctgatgagtataaaaagagggtccttgcgagggaagatacatccggcctttgactcaactccaacgtccttgagcctatctgggcttgagttcaaatgaatttcaatgnacctagnagattccctgaggttattgggccaaattggtaaggccnaaggggcctggaacctttcttcccccaacgggtttccnggggaaaancccaaacngnggccttggnaaatttgccgaacctggnggcccctttnaccngnatcnaaaancggtttgggncccccnggnaaatntncantngggggaa

SEQ ID NO: 123225 - DNA, 1040 bp, Arabidopsis thaliana
  unsure (1)..(1040): unsure at all n locations
nnnnnnnnnnnnnnnnnnnnnnnnnnnnnnnnnnnnnnnnnnnnnnnnnnnnnnnnnnnnnnnnnnnnnnnnnnnnnnccacgcgtccgtacggctgcgagaagacgacagaagggtacggctgcgagaagacgacagaaggggagaccaacaaataaacattaaacccaaatgatatattttggtagatcaatcgacaatcattatacaacaatgatgacaaaaacattggagattgatttgagatcagcagaagggcttaagctaaaccggagacccatcaagaaaaagactttcgccgtcgtaaaaatcgacgagaaatgtcgaaaatctaatcttgacgaatcgagaagaagcaatcctacatggaactataaatcagagatgcccatcaatggtaatgaacagtttatcttcattgaggtattttatcgaacaggttctgggcatgataaaaaaatcggagaagctaaaatcccaacgaatgatttcatgggaaggtattcacctgaaggtcacttaaacttcttgagctatagattgagagatgagtttggtgataagtgtgggatcgtcaatctttcgattttggttaaatcggatcccaccagagattacggcgcgtgttcgtcccaagcggcggttactggtttgtggaggccgagattagagacggcatcgattgatggatacggtggccggactgttaccggagttccggtttggggtctgtatcaacgccaattttaaaatcttttttttggggggggatgcacatattattaattcttcgtctttgttccatagattttcccaatttggaattgaggaacaaagatgtgtgattaatttttgttataatactcccgaaaccaaaattgaaaatagaaaagtcaaatttgttcgacgatgatatctaagaacttgttgttagnnnnnnnnnnnnnnnnnnnnnnnnnnnnnnnnnnnnnnnnnnnnnnnnnnnnnnnnnnnnnnnnnnnnnnnnnnnnnnnnnnnnnnnnnnnnnnnnnnnnnnnnnn

SEQ ID NO: 123226 - DNA, 536 bp, Arabidopsis thaliana
agctctctacgactcactattgggaaagctggcacgcctgcaggtaccggtccggaattcccgggtcgacccacgcgtccgcaacgaccgaccagccatggacattggcggtccaaccaatatccgccacgtggctcacgttaccttcgatcgcttcgatggcttcctcggccttccctctgagttcgagcctgatgtccccagaaaagctcccagtgcaagtgcaacggtgtttggggtatcgacagagtcaatgcagttatcatacgactcgagagggaactgtgttcctgtgatactgttgctattgcagagccggctttatgatcaaggaggcttgcaggcagaaggagtattcagaatcactggagagaacagcgaggaagagtttgctagggagcagcttaataaagggatcatacctgatgggattgatgtccattgtttagccggtcttattaaggcttggttcagagagctgccgagaggggtactggatcctctgccatcggagcaagtgatgcaagtgtgagtca

SEQ ID NO: 123227 - DNA, 415 bp, Arabidopsis thaliana
ctcttctctgcttccttcttccatcacattccccaaaaagtctcaacacagagcgagaagaagactcaggttttgcgagaggagagatagagagacttagaaagctcggtaagtccgaactttggtggttcggcggctctacgtcgtctgtaggtcagagtcgtcctggagctcgcccgttgtttctcgacggcggaggtggaagacaacgaccgacctgccatggacattggcggtccaaccaatatccgccacgtggctcacgttaccttcgatcgcttcgatggcttcctcggccttccctctgagttcgagcctgatgtccccagaaatagctcccagtgcaagtgcaacggtgtttggggtatcgacagagtcaatgcagttatcatacgactcgagagggaactgtgtt

SEQ ID NO: 123228 - DNA, 402 bp, Arabidopsis thaliana
ctctgacatctccgtgcaatcgggagagaactttttttgtgttggtggtggttggctttcgtacatgcaggatcagtatataaatcacattatgaatgaaacaggagcaactgttgtattaagagggcgcggttcaggaagccttgagaatcaacatggagatgaagcacagctaccgctgcatctattattatccggcagcaacccaaagagcatcgacgatccaaaacgtttagctgagaatcttatggatacaatcagtgtagaatttggggcttcaagggtttcctcaagcaaggtgtatggtgcacgtccaccaccacagcaactgatttctggagctccgggttctgaccaggagaaccaaaatttgatttcaacgtatggtttgatgacatcgat

SEQ ID NO: 123229 - DNA, 551 bp, Arabidopsis thaliana
  unsure (1)..(551): unsure at all n locations
gcatctttcttcaagctgcgccgctttctcactcttttttatctctcaaatttgaccttctccgttgttctttcgcatcgctcaggagcagaagcttcaatctttgataatgtcgaggaacaagggtttggctgagcaagatcttaaaaaattggatgtaactgtgctacatcctctgtctcctgaggtcatttctcgccaggccactattaatataggaaccattggtcatgtcgctcatggaaagtccactgttgttaaagctatttctggtgtccagactgtccgttttaaaaatgaattggagcgtaacattaccattaagcttggatatgcaaacgccaagatttacaaatgtgaggatgagaaatgccctagaccaatgtgctacaaggcctacggaagtggaaaggaagacactcccaattgtgatgtccccggatttgaaaactccaagatgaaactattgggggatggctcattcgttgattcccgggcacggtttttattgganaatgttattgggngcctcatggtggcctcttatnntt

SEQ ID NO: 123230 - DNA, 421 bp, Arabidopsis thaliana
aactcttttaccttctctccaagaaatcttcactttctctctagaaaaaagttggaagctgactcgataaagactctctttttcttcttcttcctgcaaatggcgatcgaggatcaagagaacacaatccgtgaaatcaaacctaagaacagaagaatcatgggagctggtggtccggaggaagaggagaaccggtggccgccatggttgaaacctttgcttaaagagcaattctttgttcattgcaagtttcatggagactctcataagagtgaatgcaatatgtattgcttagactgcaccaatggcccactttgctctctttgtcttgctcatcacaaggatcatcgcaccattcagataaggagatcttcttatcatgatgttataagggtgaatgagatacaaaagtatcttgata

SEQ ID NO: 123231 - DNA, 1232 bp, Arabidopsis thaliana
gggcttctatacatcaccggcgatattggtttacgcgtcggagagatggttgagagagaggaccgagtttctttggaactcagcgaagaaattatacagagcatggaacctggcgccgttttcagagactataattgcaggatcagctcaattgactttcacaaaacttcgacttgtatggtgacagctagcgacgatgactcaattcgtctctatgatgttgccagcgccacatgtctgaagacaattaatagcaaaaagtatggtgttgatcttgtttgcttcacttctcatcctactactgtcatctactcttccagaaacggatgggacgactctctgaggcttctctctttgcacgataataagtacttgcgctacttcaaaggacatcatgacagagttgtttcgcttagcttgtgttctggtggggaatgcttcatctccggttcccttgatcgtactgttttgctttgggatcaaagggtcgagaaatgccagggtctcttacgagtccaaggaaggcctgctgcagcatatgatgatcaagggttaatttttgcaattgcctttggtggctacataagaatgtttgatgcccgtatgtacgaaaagggtccttttgaaatattttccgttggtggtgatctttctgaggcaaacgttgtgaaatttagtaatgatggaaggctcatgctgcttacaaccatggatggttttattcatgtgcttgactcgtttcgtggaactcttctgtccacatttaagtgtgaaaccaagtagctggagaatctacattggatgcaagcctttaggtcctgaaggggatgtttgttgtttcaggttcaggtgatggtagtacccatgcatggggtgtaaggagcggaaaacaggtacatagttggatgggtttagggagtgagcccccagtattaaatggggcccaggaagtcccatgtttgtgacaggctcttccgaacttgcttttgttatacccgacttatcgaaattgccagcttatgccattcggaaataggacgactatcacgtctgtgccatgtaaatgaggcctcatttggccttttggtttcagactttgttgtgggttatgccggtaacttatcccttgcactctgattaatatatatttgggtcttgtaacatgaagataaaccccaagtctttctaatgttgtaattcgtgtaatttacaagtttgactgtttctgactg

SEQ ID NO: 123232 - DNA, 389 bp, Arabidopsis thaliana
aacacgcgttgttagggcttctatacatcaccggcgatattggtttacgcgtcggagagatggttggtgagtgttattgatgacacgagatttcaattctcggcggtgtaacgtgaagtcttaacaatttcattgtccaatggtggaatttacagagagagaggaccgagtttctttggaactcagcgaagaaattatacagagcatggaacctggcgccgttttcagagactataattgcaggatcagctcaattgactttcacaaaacttcgacttgtatggtgacagctagcgacgatgactcaattcgtctctatgatgttgccagcgccacatgtctgaagacaattaatagcaaaaagtatggtgttgatcttgtttgcttca

SEQ ID NO: 123233 - DNA, 552 bp, Arabidopsis thaliana
attctcttcccaaaacattccgtgaagaagatctttttaaagatcctaattttctagatcaagaacccggttcaagatcacctaaaccgggatccgaagctcctgatcaagatccgggttcgacccggtcaagaacacaaaatatgataccgccgatgtgggcactagcgccaacgccagcctccacaaacggaggtagtgctttttggatgttaccagtcggaggaggaggaggtccggctcacgttcaggatccatcacagcacatgtgggcgtttaatccgggtcattacccgggtcgaatcgggtcggttcagctagggtctatgttagtgggaggtcaacagttagggttaggtgttgcagaaaataacaatttggggatattttccggcggaggaggagacggtggtcgggttggtctcggaatgagtcttgagcaaaagcctcaacatcaagtgagtgatcaccctcctagagaaaaaaaccctcctatagatggttctccttgaaagaaatcatgatttctttggtttttaaaaagtgtgaatg

SEQ ID NO: 123234 - DNA, 533 bp, Arabidopsis thaliana
agaaggaaggatacgttgcaatctggcagaagcctttcaacaacgactgctatttgagtcgtgaggctgggactaaacctcctctttgtgatgaatcagatgatcccgataatgtttggtacacaaatctgtccccttgcatcagtcgcatacctgagaaagggtacggaggaaacgtccccttatggcctgcccgtctgcatactccacctgataggctgcagacgataaaatttgattcccacattgctaggaaagagctattcaaggcagaatcaaaatattggaatgaaataattgggggctatgttcgcgccttaaaatgggaaaaagatgaaactaagaaatgttttggacatgagagcaggctttggcggatttgcagctgcactaaatgatcataaactcgattgctgggttcttagcgtggttcctgtcagtgggcctaacacattgcctgtcatttatgaccgtggactgttaggagtgatgcacgattggtgtgaaccatttgatacatacccacggacata

SEQ ID NO: 123235 - DNA, 1080 bp, Arabidopsis thaliana
ctgcaagtctgacaaatgtcgattaacaatacatcatgctgttctttgcagtgagatgggagcccatttttctccatgtgggagatatttagcagcctgtgttgcatgcgttattcctcatgctgagacagatccaagtttgcagacactggtccaacaagactcagggcttgcaacttcccctactcgacatcctgtcacagcacatcaagtcatgtatgaacttcgtgtgtattctctggaaaaagaatcatttggttcggtacttgtgtcccgggcaattagggctgcacattgcttaacctctatccagttctcaccaacctccgagcacattctgcttgcatatggtcgtcgtcatggttctcttttgaagagcattgtgagtgatggagaaacaacatcacattttttcacagttttggagatttacagagtttcagatatggaactggtgagagtacttccaagctcagaggatgaagttaatgttgcttgctttcatccttctcctgggggaggtcttgtctatggaacaaaggagggaaaactaagggtcttccggtacaacacagctgctgcgtccaatctcactgcaccaaatagctctcccgatgagaacttggccgaggtgcagacctatgcgttagaatgctagacagggaagaatttgggtctcaaccattctatatacacactctcatagacagatcttgcattgcgggactatttaccttcctttgtttcttttcgggttattcttcccgttctgtttgctcgcggtgcttttagttgtcctacccgctgtgcgattccaaacctgagaagcttttttccattcacgagctggtggtatctttttcttattttcttatatactgttgagggccgtaggttgggatggcctatcttccatttgcaaacccttttctttaaaaaaacaaaaaagaaatgaagcaggtttctgagtttgttgtttaaaatgacttcagaaaaatgtaaaaaaaaaagatgtttttttgtttgataaattgatgttgtagtttgtaactaagattgtaaccacgttttttcctctgt

SEQ ID NO: 123236 - DNA, 695 bp, Arabidopsis thaliana
  unsure (1)..(695): unsure at all n locations
acaattaggggaaaagtcaagacaagtatggctaggtgtacaggcagacccactggcgcagtcagatgatctgctggcaaaagcatacaaccgaccctcagaggaagcagtagcaaagccatcttcataatggttcatctcaaagaatgcaattgtctcagggctactcgggaagaagcaagaagattcagtttcagattctccacctccaaaggctcggcgaaaaaggatagtgaggaagaaggtggctgcatctgcctcttaaataaccaacaaaacctctaaaatgtcacaattttcagagtccatggaagaacaacagtgaggttttgttgttcatttgaggcacacatgaaaaaggttttgttgccagaggaaggaagaagggatcccccaacttggaggaattgaaaaaaagctctatagcttctttttttttttttttactttatgactcgttctctctagttttaagtgcttttggaaagacatttctatttttaggtgtggtgataaagatgcttatctctggttaaaattctgtattttctcaatgtttctaataaatagccccatcttatacgttcgttgaaaaaaaaaaaaaaaggannnnnnnnnnnnnnnnnnnnnnnnnnnnnnnnnnnnnnnnnnnnnnnnnnnnnnnnnnnnnnnnnnnnnnnnnctaattcnnnnnn

SEQ ID NO: 123237 - DNA, 974 bp, Arabidopsis thaliana
aacgaaacgaactagagacagtttgattcgaaaatcttgtcggaaaatggaggatatcggcgaccaagaattaagcaattactgggaacctagctccttcctccaaaacgaagacttcgaatacgacaggttctttctttcgtccttttttttttccttactttgctttccatcttgagattttgatatttgtttctttaaaaaaaaagaagctggcctttggaagaagccatttctgggtcgtatgattcgagttcgccggatggagctgcttcgtcgccggcttctaagaatattgtgtcggagagaaacagaagacagaaacttaaccagagactcttcgctcttcgatcagttgttcccaatatcactaagatggataaagcctcaataatcaaagatgctattagttacatagaaggattacaatatgaagaaaagaagctcgaagctgagatcagagaacttgaatctacaccaaagagtagccttagtttcagcaaagattttgatcgtgatttacttgttcctgtcacatccaagaagatgaagcagcttgattctggttcttccacttctctcatcgaagttctcgaattgaaggtaacattcatgggagagaggacaatggtggtgagtgtaacatgtaataagaggacagatacaatggtgaaactgtgtgaagtctttgagtcattgaatctcaaaatcctcacttccaatctcacctctttctctggcatgatcttccacactgtctttattgaggcggatgaagaagaacaagaggtgttgcggttaaaaatagaaacaggaataggagcttataatgaaactcaaagccctactttgagcatcgactctctttactaataatactttttttcttccttttttggttcattttggcttctctctttacaataatgtatgtctctcttttcatttttatgatcaaaaacgtttgtttgtcc

SEQ ID NO: 123238 - DNA, 745 bp, Arabidopsis thaliana
  unsure (1)..(745): unsure at all n locations
nnnnnnnnnnnnnnnnnnnnnnnnnnnnnnnnnnnnnnnnnnnnnnnnnnnnnnnnnnnnnnnnnnnnnnnnnnnnnnctcgccacgcgtccggacttgatcttcttgccgttaccaaaaccaaaatccctaaatttgccctcatttccctctgattagatcccttaccccgacaaagacaccaaaattcttgagggcgagagagctgattgatgtctttggtatctggagccagggacatggggttcgacgacaacaacaacaacaagaacaacaaggatggagatgatgagaactcctcctccagaacaagagccgacgacgatgctcttagtcgacagatgagcgaatcttctctttgtgctaccgaggaggaagaagacgacgattccaaattgcaattgggtcctcagtacactatcaaagaacatctcgagaaggacaaggatgatgagagtctgaggaaatggaaggaacagcttctcggaagtgttgatgtcaccaacattggagagactcttgatccggaagtgaggattgatagcctcgccatcatatctcctggaagacccgacattgttctcttggttcctgagaatggaattccaaagggcatgttggtttacttttgaaagaagggagccaagtccaccttgaaattcacttttcatgtttacaccaacattgtctctggtcttaggtacaccaatacagtttggaagaccggtgtcaaagtggacagagc

SEQ ID NO: 123239 - DNA, 669 bp, Arabidopsis thaliana
aaaaattctttgctttgcaacaaaggcagacagacaaaaggctaattcggagctctcctccacatcttcttccaaaacacaaacaaacccccaaatttccagaaaaatcagatcattctttcatcaatctcgtcttctttaatcttaggtgggaattcatcagctcaaaaacgctgcacccgatcgttttacgactcaaatcagagaagctgattcttttccaatcattccaatttccatttcttccttgggaggttttacaccaaattagccgtcgaaaggggtgcttctttgatctaatttcgatggcgggattagagaaaaacgctgatttctcagggaagacgacgaaatcggctacaacgacgtcgttcttcaacaggtcgcttacaattcacggaagaacactggtggattcgggccccaaatcccacaatctcaatccttctctcaatcgtaccacctccattaccaaattctacacccccgtagaatcgatgggaacttctcttaaaggcaaagtcaaagacctttgtagattattcgagacttccaaacccgttaaacctgccttagctgagattcctcagaagcagaaatccggtaaatcccttttacccgaatcgcggatatcgcctttttcgagcttaaacaactcggtcatccgtc

SEQ ID NO: 123240 - DNA, 509 bp, Arabidopsis thaliana
acctaatcatcactcggctgcttcctgacgcagcaggaactgcttgtggtcaacgtctagagaaagtgtacggatctcagtattgtgatatcctccgtgtgccttttagaacagagaaaggaatcgttcgcaaatggatatcaaggtttgaggtctggccgtatctagagacttttaccgaggatgttgccgctgaaatctcgaaagagttgcaggggaagcctgacttgatcattggaaactacagtgatggtaatcttgttgcatccttgttagcacacaaacttggtgtcactcagtgcaccatcgctcatgctttggagaagactaagtacccggattctgatatctactggaagaagctcgacgagaagtatcacttttcttgccagttcacggctgatcttatcgccatgaaccacacagatttcatcatcacaagtactttccaagaaattgctggaagcaaggacactgttggtcaatatgagagccacagatctttcaca

SEQ ID NO: 123241 - DNA, 1441 bp, Arabidopsis thaliana
cacgcctgcaggtaccggtccggaatacccgggtcgacccacgcgtccgcccacgcgtccggagaaagagagagagagagagagagagagagagagttatcagagatagcaaaaatggaggctttggtttgccggaaattgggagatccaactgcgacgaatccaggtagtccagaatctccggtagaagtaagcaagactcatccgatcccgtctttgaattcagacacgtcggtgagagtcagagttattgctacgagcttgaattacgcaaattaccttcagattctcgggaaataccaggagaaacctccgttacctttcattccgggctctgattactccggaatcgtcgacgcgattggtcccgccgtcaccaaattccgcgttggagatcgtgtctgttctttcgccgatctcggttccttcgctcagtttatcgtcgctgatcaatctcgtttgttccttgtaccggaaagatgtgacatggttgctgcagctgcgcttcctgttgcgtttgggacttctcatgtagcacttgttcatagagctcgtttaacatctggtcaggtcttattggttctaggtgctgctgggggcgttggccttgcagctgttcaaatcggtaaggtttgtggagccattgtcattgcagttgctagaggaactgagaagattcaactgttgaagtcaatgggagtggatcatgttgttgatctaggccctgagaatgttatttcaagtgtgaaagagtttttcaaggcaagaaagcttaaaggagttgatgttctgtatgatcctgctggaggggaactaaccaaggagtccatgaaagttctgaaatggggagcccagattctggtgataggtttcgccagcggcgaaatacctgtcattcctgctaatatagcacttgttaagaactggacggttcatggtctttactggggtagctacaggatccatcagcccaatgtccttgaagattccatcaaagagttattgtcatggctttcccgaggattgatcactattcacatctctcatacctatagcctctcccaggccaatcttgcattcggggacctcaaagacaggaaggcaattggaaaagtgatgattgctctcgaccacaagactgccctgtcttcaaaactatagactctttatggccgtaggagaaaacagcttatgtattctagaaataaggttattgcaatggccatgtaagctgaaccatcttgcatttatatctggcatataatccacattctgatttgaaatttcaataaacgttatcgaattgcagtttgattttctctagaaattagtgtagttataaatcctttttgtataaaaaaaaaaccaaagggcgaccgctctagaggatccaagcttacgtacgcgtgcatgcgacgtcatagtcttctatagtgtacct

SEQ ID NO: 123242 - DNA, 1033 bp, Arabidopsis thaliana
gggccccccctcgtggtcgacggtatcgataagaccccttgctatcgaattcgcggccgcctgaaacagattctaaatttatctccggtgagaaagagatagagagcgttgattccggcgaaaagatgtctgaattcgaagatcacgagggaaacggtacggttgctgacgcgatttacgacgaagagaatggtggccgcgacggcgaaatcgaggatcaattggactcgaaacccaagagagaatcgcgtgaccatgaaagagagacatcaagaagtaaagatagagaaagagagaagggtcgtgataaggacagagaaagagactctgaagtctctcgccgaagcagggatagagatggagagaaaagcaaggagaggagtagagacaaagacagagatcatcgtgagcgtcatcacagaagtagtcgtcacaagggatcatagcagggagcgtggtgaaagaagagaacgtggttggtagggatgatgatgattaccgtcgaagccgtgatcgtgaccattataggcggagagatgattagaggaggaagacgcagtcgtcgatctcgatctcgttcaaaggatagatctgagcgcagaacaaggtcacgatctccatcgaaaagtaagcagcgagtcagtggattcgatatggcacctccagcctctgcaatgttagctgctggtgctgctgttacaggccaagttcctcccgctccaccaactcttcctggggctggaatgtttcccaacatgtttccattgccgactggacagtcatttgggggactctctatgatgccaattcaggctatgacacagcaggcaactaggcatgctcgcagagtctatgtcggtgggctttcccctacggcaaatgaacagtctgtggctacattttttagtcaagttatggctgctggtggtggaaacactgctggtccaggtgatgcacgttgttaatggctacataaaccacggggaagaagtttccctttgtggggaggcgccgtacttttgtagcggcaagt

SEQ ID NO: 123243 - DNA, 557 bp, Arabidopsis thaliana
gcgattgggtaccgggcccccccctcggggtcgcgggatcgataagcttgatatcgaattcgcggccccccggcgaaaagatggctgaattccaagatcacgagggaaacgggacggttgctgacgcgatttacgacgaagagaatgggtggcccgcgacggcgaaatcgaggatcaatttggactcgaaacccaaggagagaaatcgcgtgaccatgaaaggagagacatcaagaagttaagatagagaaagagagagggtcgtgatagggacagagaaagagactctgaagtctctcgccgaagcagggttagagatggagagaaaagcagggagaggggttgagccaaggacagagatcatcgtgagcgtcatcacaagaagtagtcgtcacagggatcatagcagggaccgtggtgaaagaaaagaacgtggtggtagggatgatgatgattaccgtcgaagccgggatcgtgaccatgataggcggagagatgatagaggaggaagacgcagtcgtcgatctcgatctcgttcaaaggatagatctgagcgc

SEQ ID NO: 123244 - DNA, 547 bp, Arabidopsis thaliana
agctctctacgactcactattgggaaagctggcacgcctgcaggtaccggtccggaattcccgggtcgtcttcttcttcttctttgtacccagaaagaaagagagctccaacaatggctgcttgcgctactcactcctctctcatgctagcatacgccgccgcatccactcgttcccaggaccttacccctactccatctcttttctcttttgccagctccagacccaaccacttgagcttcccgcttcttctccttgggggttccagggaccggagatgtgctgctattgacagagcttccaaccacaagtttattgtctccgccgtggccgctgaggctgacctcgacacggaggaggacctggagcagaccgccaccgccgtccttgatccgcccaagcctaagaaaggaaaagccgctttggttctcaagagagatagaacaaggtctaagaggtttttggaaatccaaaagctaagggaaaccaaaaaggagtatgatgtcaacactgctatctctttgcttaaacaaactgccaacacaag

SEQ ID NO: 123245 - DNA, 431 bp, Arabidopsis thaliana
cacgagagtttcggcatctctgatattctccccctctcgcgtttcagattcattcgttaagaaagcagatcgacatggcagctcaaggaggtgattcatatgaggaagcgttggctgctttgtcgtctttgatcacgaaacgaagtcgtgctgataagagcaataaaggggatcgctttgagttagtctttgattatctcaagctacttgacctggaagaagacattttaaagatgaatgttattcatgtcgctggtaccaaaggcaagggatccacatgtacctttacagagtctattattcgaaactatggctttcgaactggactcttcacttcacctcacctcattgatgtccgggaaagatttcgtttggatggtgtggacataagtgaagagaaatttttgggatatttctggtggtgctataac

SEQ ID NO: 123246 - DNA, 1358 bp, Arabidopsis thaliana
  unsure (1)..(1358): unsure at all n locations
cnnnnnnnnnnnnnnnnnnnnnnnnnnnnnnnnnnnnnnnnnnnnnnnnnnnnnnnnnnnnnnnnggcggttccacgcgtccgccgtctcatcacaatcacatcatcatcgtcttcgtcttcttcttcgtcggcacatactttgtcttctcatctcctccattattttgatcttatcgcaacagatctctcatctccttcacttgttgactgtttataccacaggacaatggctgacaaagatgaagcagcgacgcgtggaaatgattgggaagttgtttctcttactgcttcagcttacgctgctgctcctggtcctaaaccagtagtggactcgaaagatgatgatcacaaggaagttactccttgttacgaagctgagacatctcatcccttatacatgtctcgccactttgttttcccaccaactggtcagcttgagaatactagtgaccttaccgaggctagcttaacggggtctcattgcaaggaagggagtgatttgagtctgaaagggttggatttatcagatgatttcggaggacttgagttttccgaggataaaggcaagaaagaagaaaacatttacacgacagctttgagttctctggacgatgaaagagctatcggtggctcacacgtgtatgaacctgttgaagaaccgaccgagcctgtttctccttctgatgttacacttgatctgaatcctattaaagatgatgaggtagcaaactcgccacctagcgaagaagcttggtggaaaagaagcgttgcctctttgattgcccaagcgaaagaaactaatacagtttggtccatctgcatagccgcagctgtaatgggaattgtgattcttggccaacattggcaacaggagaggtggcagattttgcagcaaaagtgggaatcaagcattggaaacgagaaagctggaagattgatggggccaatctctcgactaaaacaagcatttgtcgggggacagcggcgggattcattcatccgagccagcgcccaaaacgaccgttaaatcaaaacaaaaaggtgaattactttgatgatgacgataagaacaagagtagcttctttggggtcgaaaaacatggatgtctggtgtgtgaatgtgtttggtacttctcttcaggtcatggtttttgtacatatttctttggtgtgaaacaatcatttacccatttcattatctcaatgccctattactctctttctctgtttatatcataatcagatactcagtgtctcctgttatgtttttgttggtcgaattgaaaactctttattttggttaaaaaaaaaaaaaaaagggcgaacgctctagagggtatcagctttcgtgcgcgg

SEQ ID NO: 123247 - DNA, 501 bp, Arabidopsis thaliana
  unsure (1)..(501): unsure at all n locations
cccagcggggcccaaaaaaaaaaaagcttcttccgggtaacnnnnnnnnnnnnnnnnnnnnnnnnnnnnnnnnnnnnnnnnnnnnnnnnnnnnnnnnnnnnnngacccacgcgtccgctaagagtagggcggaggctaaaaggactaaatatatgtttacaccaagtgaatctaatgatgtttcagacctacatgagaatttgctaagccacagggacgcaatgcattcctcctttgccggtggggatactcgttattcagattatgacccccctaatatttttggaagatatggtatcagatcattctgaaatctgcaactgattcttctgatatgcaggaggatactccctgatgacattcccttgctgtcaggagctgggcgtcattccgagcgacgcaatactttttgttgacatacgtcctggagaagatgaaagaacacccaccagcgaagaacattattaagaagtcaatttattggcgacttttcttcccttt

SEQ ID NO: 123248 - DNA, 596 bp, Arabidopsis thaliana
gcgtccggattttgtttagtttctgttgaagagatctgagatatttgaacgaagcagagtgtatatgaaatcaaatctgtgaaaatttctttgaatttgaattgactttggacttgtgagagaagttagatcttcttcttcgtgagctatgccatttacgatgaagatccaaccgattgatatcgattcttcaccaaccgtagctagagctgaatcaggaaacaaaccggtgctcaaatctcgtctcaaacgtttgtttgatcggccgtttacaaacgtattgagaaactcaacaactacaaccaccgagaaaccattcgttgtcaccggtggtgaagttcaatgcggcggagtagtgacggagttcgagccgagttctgtttgcttagcgaagatggtacagaacttcattgaagaaaacaacgagaaacaagctaaatgtggacgtaatcgttgtaattgctttaacggcaacaacgatggttcttccgatgatgaatcagatctattcggtggttcaatcgagggttgccacgcttctgatcatctcaagagtttgattccgtgcaccatcttccgagagaggaatctgttaa

SEQ ID NO: 123249 - DNA, 917 bp, Arabidopsis thaliana
  unsure (1)..(917): unsure at all n locations
nnnnnnnnnnnnnnnnnnnnnnnnnnnnnnnnnnnnnnnnnnnnnnnnnnnnnnnnnnnnnnnnnnnnnnnnnnnnnnnnnnccacgcgtccgcgattatgttcggatactcaccagtccagctccctatgctagataaggacggttcaggagggattgtcgcactttctcaatctccatttgctggaagagttccatcaaactcagctactgcaaaaggcgaaggcaaacaacctgttgcagaagaaggttcatccgaggatgcatcagaacgaccaacgggagacaacagcaacctcaataccgctttctctttcgacttttctgccataaaacctggaatggcagcagatgtgaagtttggaggatccggggcacgtcccaacttaccgtgggtctcaaccactggttcaggcccacacggacggacaatctcaggtgtcacataccggtacaacgcaaaccagatcaaaatcgtatgcgcttgccacggctcgcacatgtcaccggaggagtttgtacggcacgcaagcgaggagtacgttagcccagaatcatccatgggaatgactgcagcgtcagctcacacctgaaaagtcaccaccggaaaaaaagatgtctgaaatcttgtaaacaaatggaagggtttgtaatgagtttctttttggaacatacattttattatgtttagtcggatcaaactctcaagccaaagttttttaactgagctttctgttatgttgttgtaatctctctacttcatcacaattccttatgtaatcctcttctttcctttttgttttttggttgaaaggaaattatatataaaaaaaaaaaaaaaagnnnnnnnnnnnnnnnnnnnnnnnnnnnnnnnnnnnnnnnnnnnnnnnnnnnnnnnnnnnnnnnnnnnnnnnnnn

SEQ ID NO: 123250 - DNA, 1508 bp, Arabidopsis thaliana
  unsure (1)..(1508): unsure at all n locations
gcaaaatccacgagagaaacagatagaaagttgcaaaagtgcgttcgatttttgcttcttcttctgtttcggattcggatttggatttggaatctgctcctttagcagaaccagaggaaatggtgacgtacgtaagcccgttgttctacggattcggagggatagtcgtcgccggagtggcgctgctcgtggctttccaggagaagcttgtgtacgtcccagtgcttccgggtttaagcaagtcttatccgatcactcccgctaggctcaatctcatctacggagatatttggcttcaatcatccgatggtgtacggctccacgcttggttcatcaagatgttccctggaatgtcgaggtccaaccattttatttttccaggggaacgctggaaacatcgctcatcgtctggagatggtccgcatcatggtacaaaaattgaagtgcaatgtattcatgctttcatatcccgcccgtccggcaagtgaaggctatccttcacaacaaggtatcataaaagatgctcaggctgcattggatcacctttctggaaggactgacattgatacatctagaatagttgtatttggaaggtcccttgggggagctgttggagctgtgcttaccaaaaacaatccagataaggtatctgcattgattctggaaaatactttcacatccattcttgatatggctggcgttttgctgccgttcttgaagtggtttattggaggaagtggtacgaaaagcctgaagcttcttaattttgttgtacgttctccctggaaaacaattgatgctattgctgagatcaaacaaccagtgcttttcctctctggactgcaagatgagatggtccctccatttcacatgaaaatgctgtatgcgaaagcggctgcccgtaaccctcagtgcacatttgtggagtttccaagtgggatgcatatggatacatggctgtctggtggtgaagtttactggaaaacaaacttgcaatttctcgaaaagtatgcgcctgagaaaaggaaagaagatacaggaaggtaacgatcaacgatgctgtgtttagaggaagattcgactcacttatttcctattgcaacctgaaacgacggtattgtttgttataagcatgtgtatacgtatgttgcatttgggagtgacagatacaacttgttcagagagtgagatattggacaggaacttttgtaagcagaaccagctagtggagatggcaagtgtaagctaatcagatgcatttgcttcgtctcagttttccttcttttttttgggttatttttttttccaattgttgttggtgtttctcatctgatcgtaactatttcctctggatgatcatggctttgtagatgattgagaaaagtgaaaaaagacatggttatatgattatatctaaaaaaaaaaaaaaaaagaannnnnnnnnnnnnnnnnnnnnnnnnnnnnnnnnnnnnnnnnnnnnnnnnnnnnnnnnnnnnnnnnnnnnnnnt

SEQ ID NO: 123251 - DNA, 779 bp, Arabidopsis thaliana
  unsure (1)..(779): unsure at all n locations
tgatacttcnnnnnnnnnnnnnnnnnnnnnnnnnnnnnnnnnnnnnnnnnnntaaggcaactctctctgatgaagtatcacctcgcgtccggggtgttccattgaggattgagattggtcccagagacctagaaaatgatcaggtcagaactgtgagacgtgacaacggagttaaggaagatatcccaagaggtagcttagtcgaacatgttaaggaactgcttgaaaagatccagcaaaacatgtatgaagttgctaagcaaaagagggaagcatgtgttcaagaggtaaagacttgggatgagtttatcaaagctcttaacgaaaagaaactcattttggctccctggtgtgatgaagaggaagtggaaagagatgttaaggcacgtacgaaaggtgaaacaggagcagctaaaaccctttgttctccatttgatcagcctgaactccctgaaggcactctctgctttgcttcaggaaaacctgcaaagaaatggacctattggggcaggagttactaagtgttcatcatgttttgattcaattcatgaaaatttacttttggcttgtaaagactctctcaagtgcattgtgctttgatctgatattttgaccaaaagctatttgagttattttgactgtgattgcactaagaattataaagagttgtttgattcaaaaaaaaaaaaaaagaaggannnnnnnnnnnnnnnnnnnnnnnnnnnnnnnnnnnnnnnnnnnnnnnnnnnnnnnnnnnnnnaacgnnnnnnnnnnnnnnn

SEQ ID NO: 123252 - DNA, 792 bp, Arabidopsis thaliana
  unsure (1)..(792): unsure at all n locations
gccgtgagttcctttggcaggaaggtcacactgcattcgccacaaaagcagaagcagatggagaggtccttcaaattgtggagctttaccgtcncatatatgaagaatatcttgcagttccagttgtgaaaggtatgaagagtgaaaatgagaagtttgctggtggactttacactacaagtgtagaggctttcattccaaacactggtcgtggtgtacaaggtgcaacctctcattgtttgggacaaaactttgcgaagatgtttgagatcaactttgagaatgagaaagcagagacagaaatggtgtggcagaattcttgggcctacagtaccaggacgattggagtgatgattatgactcatggagatgacaaaggcctggtactccctcctaaagtcgcatctgtgcaagttgttgtgattcctgttccctacaaagatgctaatacccaaggaatttatgatgcttgtactgctactgcatctgccttgtgtgaagccggtatccgtgctgaagaagatttaagggacaactactctcctggntggaagtattcagactgggnaatgaagggtgttccatttgaggattgagattggtcccagaggcctagnaaaatgatcaggtcaganctntgagacgtgacacggagntaaaggagntatcccagaggnanttagngaccatgtaaggactcttnaaaantccccaaacatgttnaagtctanaaaanggganatttcagggnagnttggtggttcaagnttncgaagacnatttggcccnggg

SEQ ID NO: 123253 - DNA, 1024 bp, Arabidopsis thaliana
  unsure (1)..(1024): unsure at all n locations
caggtacccggttccggatttccggggtcgaccacgcgtncgcacacagggctacgcagctcctgaatacatcatgaccggtcatttaacagcaagaagtgacgtatacagctttgggagttgtgttgctagagcttttgaccggacggagatcagtagacaaaaagagatcatcgagggaacaaaaccttgtggactgggctcgtccaatgctcaatgacccacgtaaactatctcgaatcatgggacccgagacttgaaggtcagtactcagagacaggagcaagaaaagcagcaacattggcttacccatgcttaagccatcgacccaagaaccggccatgtatgagtgccgtcgtctctatactcaatgatcttaaaggcctatattgatattcctatggggactttcactttacacgggccaaccactccggccaataaaggaagatgatgggcgtgttggtaataagcccacgtaagagtagtcatcatcatcatcatcaacaacaacaaagtaatcatccccggtcgtctcccatctccgacaaccaagtctccatctcccacggccaagtcgccgaggaattcaacggaaaatcaccggagaacgttgagaaatggagtgaattcgccgttgagaagtgaggcaggtggggaacggtactaagtttttctagtcacaccaactcttaaaattcattttttttcctttaatctaatgtaaataattcatacgtttcgtcttttcgtaactgtaagaatatataattatatcctttttttttgtgaaaaattttgagcttactttgggtttttttggtaagttctttttgttttgttttgtnnttntgttttgtttgatcaaattcaaaagccaagaacaagaagagcggttccaantatgatattcttttgtttatgaacaaaaaaaaaaaaaaagggcggccgctctagaggatccaagcttacgtacgcgtgcatgcgacgtcatagttttttataggtcacctaaaattatccg

SEQ ID NO: 123254 - DNA, 641 bp, Arabidopsis thaliana
  unsure (1)..(641): unsure at all n locations
accaaacatcagaagccctagagcttgagccgtcgaaaatgtcgaagcgaggacgtggaggaacctctggtaacaaattcaggatgtcactgggtcttccggtggcggcgacggtgaactgtgccgataacaccggtgctaagaatctctacatcatttccgtgaaaggtatcaaaggtcgtcttaatcgattaccttctgcttgcgtcggagacatggtgatggccaccgtcaaaaagggtaagcctgatctcaggaaaaaggttcttcctgccgtcatcgttaggcaacgcaaaccatggcgccgaaaggatggtgttttcatgtacttcgaagataatgctggagtcattgtcaaccccaagggagaaatgaaaggttctgcaattactggtcctattgggaaagagtgtgctgatctttggccaaggattgctagtgctgccaatgccattgtctaatgatcagatcaatcaattgcttgtatttgatggatatgtctagatacaaattttgagaattttgggagcaagatatttttattttctggcaatatgtatccggcattcaaatggtttgggaattttgcaacggccggaatcctgacccngggggcccaagtctaaanggcccacccgggg

SEQ ID NO: 123255 - DNA, 418 bp, Arabidopsis thaliana
  unsure (1)..(418): unsure at all n locations
agnccctcagggaaaaaggttccttccctgcctgttgattcgttaggccaacgtaagccatggcgccgaaaggacggtgttttcatgtactttgaagataatgctggagtgattgtgaaccctaagggagaaatgaaaggttctgcaattactggacctattgggaaagagtgtgcggatctctggccaaggattgctagtgctgctaacgccattgtctgaagatcatttatcacttttgctggttatgtatctgtcttcaacgaaacgcgaaatagttggtgttttgagtgttttaagtagagacgacaatcttttgtgagcttcagacatatttccagtttctaagagattttgcttagatttttccagtttctgattttgtgaaaatcaattgctcagaggtgactattaatag

SEQ ID NO: 123256 - DNA, 887 bp, Arabidopsis thaliana
  unsure (1)..(887): unsure at all n locations
atgatactgccnnnnnnnncacgactcactttagggaaagctcggccgcctgcaggtaccggtccggaattcccgggtcgacccacgcgtccgcgcgtccatttttttttctcaattcgtcttcaaaaattcgttagatagagaagaatctaaaagtctctctcggtcatcggaatatcttcttctcaggaattcgacgagactattcgaaatcggaaatcgcgctttgaatctgaaactcagaatttagaggacgcttactccaaagaatctagggtgttaactttctaagaaaaggagtttgttaaaacaatgaagtataaagatgagaagtacgagaaagctgagaagggttcaaggattttgcccaagacagttttactgattcttctttgtggactttcgttctatcttggagggttgtattgtgggaagaacataattgaagttagtgatgttgcaaaagctgaatcttcttccttagatgttgatgactctcttcaagtcaaatctgtttctttctcggaatgtagcagtgactaccaagattacactccttgcactgatccaaggaaatggaagaagtatggtactcacaggcttactttcatggagcgacattgtcctcctgtgtttgatagaaagcagtgtctggttcctcctcctgatggctataagccaccgataagatggccaaagagcaaagacgaatgttggtacaggaatgtgccatatgattggattaacaagcagaaatctaaccagaattggctaaggaaagagggtgaaaagttcatttttcctggtgggggtacaatgtttccacatggagtcagtgcctatgtcgatctgatgcaagatttgatccctgaaatgaaagatgggac

SEQ ID NO: 123257 - DNA, 393 bp, Arabidopsis thaliana
agattctatacatcctttgtttcctcaactttcgagatactcatttgtcaaatagtgacacttggcccatcatttgtttattcaatgaattaaccaaataaagttctattttctaactttttcattaatggcagaagcttgtttgctgctcttgtctactgacttatttattcaatctcatgttgctaattttgtaggtgttaactttctaagaaaaggagtttgttgaaacaatgaagtattaagatgagaagtacgagaaagctgagaagggttcaaggattttgcccaagacaggtttactgattcttctttgtggactttcgttctatcttggagggttgtattgtgggaagaacataattgaagttagtgatgttgcaaaagctgaat

SEQ ID NO: 123258 - DNA, 544 bp, Arabidopsis thaliana
  unsure (1)..(544): unsure at all n locations
nnnnnnnnnnnnnnnnnnnnnnnnnnnnnnnnnnnnnnnnnnnnnnnnnnnnnnnnnnnnnnnnnnnnnnnnnnnnnnnattgccacgcgtccggtttcaggtcacctgttgcacaatctctgctcagccctaaaagcttactcctttcaactttctggaggccttctcgtagcctagcgtcatagatggatttgatggagaagaacttggagttagtggagattcagaaactagaaggccacaccgatcgtgtttggagcgtagcttggaaccccgtttcttctcacgccgacggtgtttcaccgattcttgcttcttgcagtggcgataacactgttcgaatctgggaacaaagctctctctctcgctcctggacttgcaagacagttttggaagagacgcatacaagaactgtgaggtcgtgcgcttggtcaccctcaggacagttattggccactgcaagttttgatggtaccactggcatttggaagaattacggttctgagtttgagtgtatttccactttggagggacatgaaaacg

SEQ ID NO: 123259 - DNA, 781 bp, Arabidopsis thaliana
  unsure (1)..(781): unsure at all n locations
atgannnnnnnnnnnnnnnnnnnnnnnnnnnnnnnnnnnnnnnnnnnnnnnnnnnnnnnnnnnnnnnnnnnnnnnnnnnnnnccacgcgtccgcggacgcgtgggaagtcctctcttttccgaaggatctgactttatcccggaattctgacgccgaagcttaaatggaaaaagaagatgagctccagaagttaaacggtcaagtttcagctccacgagacggagatgtagaagatgacgatccactagtgttgagttctcaagctttggcggcgcttcgggaatttctagcagaccagaacaagactgttgcgagcacgccaccggcgtcttccgtcgccggaggagaagaatccgataaagtggagctggttacggaggattggagactcagccagttctggtacgaacctgaaactgcagagactgtagcagatgaagtggtcactctctctcaaagaattccaggctgcagagtcgcttgcattgcttgccctactctctacgtttttctcaagaaaaaagatccgagtgtccaggtgcaattgctggagtacgatatgagattcgagagatatggaaaanagttcactttctatgattacaacgnaccagaagatctgccgtttaactggaanattncttccatataatcgttgcagntccccctacttgagtagggatncctggaaanggtngtcaaacaattttnttccctgaaacccngtaggtttaattnttgttctnntccaggggggtcnaagggcatncantgngtttt

SEQ ID NO: 123260 - DNA, 507 bp, Arabidopsis thaliana
  unsure (1)..(507): unsure at all n locations
atgannnnnnnnnnnnnnnnnnnnnnnnnnnnnnnnnnnnnnnnnnnnnnnnnnnnnnnnnnnnnnnnnnnnnnnnnnnnnnccacgcgtccgaaaaatggaagaagaaaagagattggagctaaggctagctcctccttgtcaccaattcacttccaacaacaacatcaatggatctaaacaaaaaagctcgaccaaagaaacatcattcctttccaataacagggttgaggtagctccagtggtgggatggccgccggtgagatcatcccggagaaacctaacggcacaactaaaggaggagatgaagaagaaggagagtgatgaagagaaggaattgtacgttaagatcaacatggaaggagttccaataggaagaaaagtcaacctttcagcttataacaactaccaacagctttcacatgccgttgaccaactcttctctaagaaagattcgtgggatctaaacagacaatacactttggtctacgaagacactgaaggaga

SEQ ID NO: 123261 - DNA, 795 bp, Arabidopsis thaliana
  unsure (1)..(795): unsure at all n locations
nnnnnnnnnnnnnnnnnnnnnnnnnnnnnnnnnnnnnnnnnnnnnnnnnnnnnnnnnnnnnnnnnnnnnnnnnnnnnnnnnnnccacgcgtccggccctaatcccggctgctcgtcgggggaaaataacccggcagggattgagcaacagcgtgagtcccaaagtgagagacagtgtgaatcccaaagtgagagagtgagtgttttagcgacagagagatatggccggattaacgagaacggccggtgcttttgcggtaactccacacaagatctccgtttgcattctcctgcagatatacgctccttccgctcagatgtctcttccttttcctttctcttccgttgctcagcacaaccgcctcggcctctacttgctctctcttactaagtcttgcgatgatatatttgagccgaagctggaaaagctcatcaaccagttgagggaagttggtgaagagatggacgcgtggctaactgaccatttaactaatagattttcctctttggcttcaccagatgatctattaaatttctttaatgacatgcgaggaatacttgggagccttgattcaggagtcgtgcaagatgatcagattattttggatcccaacagcaacttgggaatgtttgttcgtcgttgcattttggcattcaaccttttatcgttcgagggagtttgtcatcttttttcaagtattgaagattactgcaaagaagcccattcaagctttgctcagtttggtgcacctaataataatctggagtcattaatacaatatgatcagatggatat

SEQ ID NO: 123262 - DNA, 521 bp, Arabidopsis thaliana
  unsure (1)..(521): unsure at all n locations
atgannnnnnnnnnnnnnnnnnnnnnnnnnnnnnnnnnnnnnnnnnnnnnnnnnnnnnnnnnnnnnnnnnnnnnnnnnnnnnccacgcgtccgaatccctaaagtctcaatctttaagcaaataaacaaaaaagctcctatcttttttattccaatggctccaacactcttgacaacccaattctcaaatccagctgaagtaaccgactttgtagtctacaaaggaaatggtgttaagggtttatcagaaacaggaatcaaagctcttccagaacaatacattcagccacttgaagaacgactcatcaacaaattcgtcaacgaaacagatgaagccattccagttatcgatatgtcgaaccctgatgaggacagagtcgctgaagctgtttgtgatgctgctgagaaatgggggttctttcaagtgatcaatcatggagttcctttggaagttcttgatgacgtcaaggctgcgactcacaagttcttcaatctccctgttgaagagaagcgcaagttca

SEQ ID NO: 123263 - DNA, 629 bp, Arabidopsis thaliana
gatgcattgcaggtttaagcataaactttctattccctggacagcgataacaccgtgggtgttagttctggttattacgttggttgttggttatattttatatgaagccatcaaccgaattgcgacagttgaagaggattgtcagaagatgagggaactcaaagctcgtgctgaggccgctgacattgcaaagtcacaccacgcgtccgctgtttctcatgagatacggactccgatgaatggagttttaggaatgctgaaaatgctgatggacaccgatcttgatgcgaagcagatggactatgcgcaaactgctcatggcagtgggaaggatcttacatcactaataaatgaggttcttgatcaggcaaagattgaatccggaaggctcgagcttgaaaatgtgccttttgatatgcgttttattcttgataatgtttcatctctcctctctggcaaggcaaatgaaaaaggaattgagttggccgtttatgtttctagtcaagttcctgatgttgtagtcggtgatccgagtcggttccggcagatcattacaaacctggttggaaactcaatcaaattcacacaggaaaggggacacatatttatctcagtgcaccttgcagatg

SEQ ID NO: 123264 - DNA, 648 bp, Arabidopsis thaliana
  unsure (1)..(648): unsure at all n locations
nnnnnnnnnnnnnnnnnnnnnnnnnnnnnnnnnnnnnnnnnnnnnnnnnnnnnnnnnnnnnnnnnnnnnnnnnnnnnnnnnnnccacgcgtccgaaaaaaaaagtttctagaggcttcgttagcctaattcattaactaggttctcctagtttctgctgctaattcccaaatctcagcgaaatcaaacttctctgctctgcttagctctcagctagctgaaatctctctcaatccgtgtagcttagcttccctaatccaaccatggcaaagttcggtgaaggtgacaagagatggatcgtagaagacagacctgacggcaccaacgtccataactggcactggtccgaaaccaattgccttgaatggtctcgcaacttcttcaccaaacaattctccggcgttgatatcctctccggcgaaggtaatcttttcatcaaggtcagtaagatcgagaaagtcgaaggcgaggcttatgtgaatgtgaggaaggggaagattatccctggctacgagcttaacgtctctttatcttgggaaggtgaggctaaagattccgatgggaagacgcttttgaaagctgatggattggtcgatatgccttatatctccgatgagaatgctgatgaagatccggagattaggttttc

SEQ ID NO: 123265 - DNA, 544 bp, Arabidopsis thaliana
agctctctacgactcactattgggaaagctggcacgcctgcaggtaccggtccggaattcccgggtcgacccacgcgtccgggatcataaaagcaaagcaaaggattagttcaattgcaattctctaattcaaagtttggatccctaactgtaaaatccctaattcgagagagagagagagagagagagagagagaatgggaagtaaccgtcctaagaatttccggcggcgaggggacgacggcggcgatgaaattgacggtaaagttgctaccccctcgtcaaaaccgacttcgactctttcctcctcgaaacctaaaacactctcagcctcggccccgaagaagaaactcctaagtttcgccgacgacgaggaggaggaagaagatggagctccccgtgtgacgataaagcctaagaacggcagagaccgtgtcaaatcctcttcccgtctcggcgtttcgggatcttctcacagacactcttcaaccaaggaacgtcgtcccgcttcttctaacgtgcttcctcaggccggctcttattcg

SEQ ID NO: 123266 - DNA, 704 bp, Arabidopsis thaliana
  unsure (1)..(704): unsure at all n locations
acccacgcgtccggaataaagaaaaagaggctagaatgggtccaatctcaagttcttggagcgttaacaaattcttctcaatagttttcgttgttttcgccatctccggcgagttcgtcgctggatactatcgaccaggcccatggagatatgctcacgccactttctacggtgacgagaccggtggtgaaaccatgggtggtgcatgtgggtacggaaacctttttaacagcggctacggactgtccacggtggcgctaagcacgacattgttcaatgatggttacggatgcggccaatgttttcagataacatgttcgaaatcaccgcattgttactctggaaaatcaacagtggtcacagccaccaatctttgccctcctaattggtaccaagactccaacgctggtggttggtgcaatcctcctagaacccatttggatatggctaaaccagctttnatgaaactggcttactggagggccggtatcatcccagttgcataccgaagagtgccatgccaaaggagtggaggtatgaggtttcaattccaaggtaattctnatnggcttctnatcttcgtaatgaacggttggtggcgccggagccatcaagagcattggccgttaaaggtagccggncggatttgggtaagcatgggccacaattgggggngccttttaccaaggtttttccccnnctct

SEQ ID NO: 123267 - DNA, 451 bp, Arabidopsis thaliana
tcgtccacgcgtccggaagttttatgaggaccgagagaactaagtttaagaaaaatgttgaaaaaagcgtattagcagagggacaaacgctttttagggttttagatttcctctgagagagaattttcgaaagcttgagagagatttccaactacgttagccatggcgagcaccaaagttcaaaagattatgacccaacctatcaacttgatttttaggtttcttcaaagtaaagctaggatccagatttggctatttgagcagaaagatttgaggattgaaggaagaatcactggttttgacgaatacatgaatctagttttggatgaggctgaagaagtgagcatcaagaagaacaccagggaaaccacttggaaggattttactcaaaggagacaacataactctgatgatgaacacgggaaagtgatgtctgtctcaaacaactttt

SEQ ID NO: 123268 - DNA, 757 bp, Arabidopsis thaliana
  unsure (1)..(757): unsure at all n locations
nnnnnnnnnnnnnnnnnnnnnnnnnnnnnnnnnnnnnnnnnnnnnnnnnnnnnnnnnnnnnnnnnnnnnnnnnnnnnnnnnnnccacgcgtccgcagagaatgaaatactgcatactctttcattcttggctggtgttatgacatggtcacagatcactgatttgccattttctttgtactcaactttcgtgatcgagtctcggcatgggttcaacaaacaaacaatatggatgttcattagggacatgatcaaaggaacattcctctctgtcatactaggcccacccattgttgctgcgataattttcatagtccagaaaggaggtccttatcttgccatctatctgtgggcattcatgtttatcctgtctctagtgatgatgactatatacccggtcttgatagcaccgctcttcaacaagttcactcctcttccagatggagacctccgggagaagattgagaaacttgcttcttctctaaagtttcctttgaagaagctgtttgttgtcgatggatctacaaggtcaagccatagcaatgcttacatgtatggtttctttaagaacaaaaggattgttctttatgatacgttgattcagcagtgcaagaatgaggatgaaattgtggcggttattgcacacgagcttggacattggaaactgaatcacactacatactcgttcattgcagttcaaatccttgccttcttacaatttggaggatacactcttgtcagaaactccactgatctct

SEQ ID NO: 123269 - DNA, 397 bp, Arabidopsis thaliana
acccacgcgtccgttttttttttttttttaaacaaaacaagaaagacagcacgtataataataacatccagaagaggttcaggttaaagtgcatcaaaaccactaaaattaccaaagtgacattcactttcacaagaaaatgtttccaaaatggaaaaaggaaaaaaaaaacaatggaagtgtaaacaacatcagaagatataccttgaaagaacataagccaatggcaatcatgataatggctaacttgataagagcaatacgagactaataatgatgtaggatcatcatcatgaatcacaggaaataaggaacacctgtccttggccctctcatttgattgttctcttctgtctccgtgaagaacttcactttccctttccatgttgtcattgaa

SEQ ID NO: 123270 - DNA, 553 bp, Arabidopsis thaliana
  unsure (1)..(553): unsure at all n locations
tgatactctcnnnnnnnnnnnnnnnnnnncagcacatccctactaggaactctccctcggaccgtccggaattcccggtcaccccgcgtccgcccacgcgtccgttcaacacctgaggtgcgcgaagatagacacttcttcatcctctccgtaattctcaaaattagggttttcttccggcagctctctcagttgtactgcaagcattcttttctagatatttaagatgtcaaggacgaggactgctgcttctgaggctcatgactccatggaatctgaggaaagggtagaccttgatggtgacaatgatcctgaggagattctggaggaggaagttgaatacgaagaagttgaagaggaggagattgaagagatagaagaggagatagaggaggaggttgaagtcgaagaagaggaggaggaggaggatgctgttgcaacggaagaggaagaagaaaagaaaaggcatgttgaacttcttgcacttcctccacatggttcagaggtttatcttggagggattcctactgatgctactgaaggggacttaaag

SEQ ID NO: 123271 - DNA, 715 bp, Arabidopsis thaliana
  unsure (1)..(715): unsure at all n locations
cagctannnnnnnnnnnnnnnnnnnnnnnnnnnnnnnnnnnnnnnnnnnnnnnnnnnnnnnnnnnnnnnnnnnccacgcgtccgatctcctgtccttttttcatatataataattcatcataaatatttattgatttgattctatctcttatatatattttcgatctctcctgaaaagagaaaaaagttggaaacttcgacgaatgtgtttataaatctttttattttctatctgtcttgatttagttttatcttttttggaatcggtctgaagttggacaaaagaatccgccattttctcctcggtctctctgctcttctcttcagtatcggatctgggtctccttcgctttcgtttcaagattattttgggagacgaggaggcgttagctgtaattcattgtatacttgctttggctattaaagccgtcacacaaaaaaagtaaaagcaacacacacacataaatagacacacttttttacgtatatgtgtgtcttctttcgtctctgttgggaatagatcttgtcctaagagatcacttcgaggctggtctaaagtgagaaactttggttcttgttttggtttctggcttctcgtctattctgcttcagttaatgtcgtggtagttcctcttcctttttcttatttctatattattatccttctttctttctttttttatttatcttttttcacttatgcctttttttcttt

SEQ ID NO: 123272 - DNA, 786 bp, Arabidopsis thaliana
accatggccttcttccaaatggaagttttacgtagcgttgtccttatttgggggtggctccaatctaccaaggggtgtgcagtaaatggttaatggggaagctttctgccgggaaaaaagcgcgaaaaccaggggttcaagctaattaacttgtaaagtctgccttgggttatattgcacgtgaaaatgttcttccaaaacaccctccatctgttcaaagaaacgtgtctccgtcgtatgaaagccttgtggatggaagcgggagattcatccccaacagaaaagtattggagttaaggcagaagttgatcaagtttatggaaactcatatctacccaatggaaaacgagttctccaaacttgctcaatcagatatgcgatggaccgttcaccctcaggaggaaaagttaaaggaaatggcaaagagagaaggcctatggaacttatttgttcctgtagatagtgctgctagagctagaagagaactggcggctaccgagaataaacataacctctcgggcaagtcttttgatcaattgtttggtgagggcctcacgaacctggagtatggttacctttgtgagatcatgggtcgttctgtttgggctccacaggtgtttaactgtggtgcaccagatactggaaacatggaggtgatactgcggtatggtaacaaaagaacaaatttctgaatggcttattccgttgctcgagggaagaattcgttctggatttgctatgactgagccacaagttgcatcgtctgatgcaaccaatattgaatgc

SEQ ID NO: 123273 - DNA, 605 bp, Arabidopsis thaliana
  unsure (1)..(605): unsure at all n locations
agcaaaaacaaaaatgggtgagaaagatattccaaggaacttgaaggaagaagaagaagaagaagaagagaaccaaagtgaagaaaccaaaagtttgatctcttcacttccttcagacatagattgctcagggaccaagttgtacaagtaccaaggatgttggtacgacaaagatattctccaagcaatcctcaatttcaacaaaaactttcagccacaagaaacggatataattgttgcttctttccccaaatcgggtacgacttggctcaaggcactcacattcgcactcgcgcaaagatcaaaacacacttcagacaatcatcctctgctaactcataatcctcatgagctagtgccgtacctcgagctcgatctttatctcaaaagctcgaaaccggatttgaccaagttgccatcatcatctccgagattgttctcaacccacatgtcctttgatgcgcttaaaagtaccgttgaagagtctccttgcaagatcgtgtacgtgtgcaggaaccgtgaagacgtattggtatcacttttggtgtttcgaaaactccatgagtggagaanacantttaagtctcgaggctttgttcgagtct

SEQ ID NO: 123274 - DNA, 1094 bp, Arabidopsis thaliana
gtccgtttccaaccaattctcttctttcttgtgtgttcacattcaaagaaaatggataatcacacagctaaagacattggtatgaagagaagtgcttctgagctggctctacaagagtatctcactacaagccctctagacccttgtttcgacctcatgaaccgggattacacttgtgagttaagagatagtcttttgtggtctgagggattgtttccggctggaccttttcgcgatgcacagtcctcaatctgcgagaatctgtcagctgatagtccagtgtcagccaataaacctgaggtaagaggaggagttaggagaaccacaagtggatcttctcatgttaactctgatgacgaagatgccgagacagaagcagggcaatctgaaatgactaatgatcccaatgatctgaaacgtattagaaggatgaactcaaacagggaatcagcaaagaggtcgaggagaaggaagcaagagtacttggtagatcttgagactcaggttgattctttgaaaggcgataactcaacactgtacaagcagctcatagacgcaacacaacagtttcgtagcgctggaacaaataacagagttctcaaatcagatgttgaaactctgagagtcaaggtgaaactagcagaagatttggtagcgagagggtcactcactagcagcttgaatcaacttctacaaactcatctaagtccaccatcacactccatcagcagtttgcactacacgggaaatacctcgcccgccattacagtccacagtgaccaatctttgttccctggaatgacactttttggacagaactcaagccctggacttggtaatgtatccagtgaagctgttagctgcgtctcagacatctggccatgactctctttcttcagaacatgtaatgatccctcagcgaatttcctggatgtggttcgctatagaactaggaacctataatgaaagcagcatgttcggttaaataaatcaagttttgtccaccaaacaaaaaacaaaagggcggccggtttaaaagaacccagctaacgtacgggtgcctgcgacgtcatagctcttctatagtgtcacct

SEQ ID NO: 123275 - DNA, 1584 bp, Arabidopsis thaliana
  unsure (1)..(1584): unsure at all n locations
cccacgcgtccgtcatcttcttcttttcttcttcttcggttgctaaatcgaagatggcgactgctctggtttctcctcttacttcacaactcaaccatgaagctgtctgttccaagtttgtgttacccaaatcgccgttcatgtcgggatctaagctcttttcatcgaacatgccttgctctactgttcctagacgcacaagaagatcacactgctttgcttctgctaaagatatgagctttgaccatatccctaaacaatttcgtggagacaatctcaaagacggagtgatgcagaacttcaagaacgtaccacaatatttttacgggcttaattcagctcaaatggatatgttcatgacagaagatagccctgtccgtaggcaagcggaaaaagttacagaggaaagcatctcgtctagaaataactatttgaacaatggaggaatatggagtatgtccggtatgaatgcagcagatgctagaagatatagcatgagtgtccagatgtacagaggtggaggtggcggcggaggatctgaaagaccaagaactgctcctccagatttgccttctttgctattggatgctcgcatatgctaccttggcatgccaatcgtacctgcagttactgagttactcgttgctcaatttatgtggttagactatgataacccaacaaagcccatctacttatatataaattcacccgggacccagaatgagaagatggaaactgttggatcagaaacagaggcttatgccatagccgatactatttcttattgcaaatcagatgtatacactatcaattgtggcatggcttttggtcaagcagcaatgcttctttctctcgggaaaaaaggttatcgtgccgtacaaccacattcatcaacaaaattatatctgccaaaagtaaacagatcgagtggagctgccatagacatgtggataaaggccaaggaacttgatgcaaataccgagtactacatcgagctgttagctaagggaacagggaaatccaaagagcagatcaacgaggacatcaagcgacctaaatatctccaagctcaagcagccattgactatggaattgcagacaagatagctgactcgcaggacagttctttcgagaaacgggattacgatgggacccttgcccagagagctatgagacctggaggaggcagtccagcagctccagccggactaagatgatcaattcccaccagaaagaaagagggttgaatcctaatttcctagtcactctggaatatgtagctcttacaatctataagcaaacacatgtggtagtaacatacaaaaaagtgttggcaaaaagggaaataacatcaaaagttatctaggtggaaagttatttgtattatacatgtatctctctagatgcaggtttctcacactctgaaaaaaccgagttttgggttttcgggattttcagaatgaagggnagaatcggttgaggttgtaaggcaatgcgtnaaattcttctgttcgagtatcagtgtggtagactctgaatttctcccaccaatgtcttccgctgtctctcctcaccgaggcatgt

SEQ ID NO: 123276 - DNA, 634 bp, Arabidopsis thaliana
  unsure (1)..(634): unsure at all n locations
acgagaaggcttccttctcctcagaaatctcattgaggaccagacgggcggttcgagtggttatgtcgattggattctacaacttcaccgccaagttcaacaaaactaagatagctcacaatgacaactcgggtgctaggatgccacctctttgtaaccattgaagaactcttgagctcaaaaatcttctacttaagcaggatcatggcggccttcttccttgggccataatgtgttgttttggataaagaagtgctactttttgatttttcttcatttgtttttctatatagaccttttttctcaagattaggcttttatttgcctaaccagaatggttatctccgtaagattagtcgttttttaaatcttttgttgcctttttttttttgtcctcattcgattttttgttgatgtgcgtctgttctagatttattttgggagttgcagttcatgaatctgtcctaattagggttattaacaagaagatgctactgttaaaattttaaaatatttttatgaataaataatgttgtgaaaaaaaaaaaaaaaaagnnnnnnnnnnnnnnnnnnnnnnnnnnnnnnnnnnnnnnnnnnnnnnnnnnnnnnnnnnnnnnnnnnnnnnnnnnnnnnt

SEQ ID NO: 123277 - DNA, 399 bp, Arabidopsis thaliana
cccacgatctctcctctcctctcgtttgattccaaaaaaaaaagctcatcgacgaacgaacgatggcggaaagtggcggtggcggtggctgttgtccgccgatggatctgatgcgttcagagacgatgcaacttgttcagctcattgttcccatggaatctgctcatctcaccgtctcttaccttggagatcttggcctcgtccaattcaaagaccttaattcagagaagagcccatttcaacgtacttacgcagcacagattaaaagatgtggagaaatggcacggaaaatacgtttcttcaggggatcaaatgtcaaaagcaggagttccagccaaggaaatgcaagggaaagaaaatgacattgacttggttgatgtttgagggtaaaagcttggg

SEQ ID NO: 123278 - DNA, 491 bp, Arabidopsis thaliana
gaaggcgggcacccctgcaggacccggcccggaattcccgggtcgacccacgcgtccgcccacgcgtccgaccaaaatgaaccaaacgagacgtaagagacgacctgattcatctctctctagactcgattctctttcgccggaaatgctctttccggccaaatctccgtcgctaacttcttctcgcatcagaaacatcttcttattactcatcttttgtttcatcatctacatcatcttctcctacggcaccaatttccgccgtgaacagatttcatcaatcgctcgatcgttatctgtgttctccactcgtcgccgtcacttactcttctcgatcgccgcttctcacgactcttggctccgtcgtagctcgtacgttcgtctctggtactctcctgaatctacacgcgccgtcgtgtttctcgatcgcggtggattggagtccgatctaacttctcctcctgggattgtctctaaagacgtttctaggt

SEQ ID NO: 123279 - DNA, 546 bp, Arabidopsis thaliana
  unsure (1)..(546): unsure at all n locations
ccacgcgnccgaagagaatggggaaagagtgctactacttgtcatgtttactcaagtttcatcttctacttggtgggattcagcttgttgattcaggatctaccatcagatttcttcctggtttccaaggccctcttcctttcgagctcgagaccgggtacattggtgtgggtgaggcagaggaagatcaaatgttctactacttcatcaaatctgagagtaatccagagaaagaccctcttcttctctggttaagtggaggtcctttctgttcttcgttcactgctcttatttatgagaatgggccaattgctttcaaggctgaggaatacaatggaagtatcccctctttggtctctaccacatatgcatggactaaggtggcgagcattctctatttggatcagcctgttgggactggcttctcctactccagaaatccacttgctgatttaccaagcgacacaggggtagctaagccggtcaacgagtttcttcataagtggctagacaaacatcctgagttcttatccaatccgctctatg

SEQ ID NO: 123280 - DNA, 569 bp, Arabidopsis thaliana
gactcactattgggaaagctggcccgcctgcaggtaccggtccggaattcccgggtcgacccacgcgtccgattcagaaaccctagagttcttcagcgagcgaactctgtctgcgatttcttgttgattctaaatggatctctcgcgagaagtcgatgactttatcaaagagacaatcgatcactctttagggcttccgatatccatggacgttctccagaaaaagctctacacggcggaagaatctcagcgtcgtctccgtgaacagtatctatctctggtttcgagattgaaagagaaagaaaaagtaatcgatctcgttagatccgaagcgagtatgaatgcccagtcgctgaagaaattcgtcgaagagaatcagaaattgggaagcgagcgcgaggatttggtgaatcagtgtaagaagtgggaaaaagaatgctttctttatcatcaagatcgtgaatcactcatggagttcgggaacgaaactgacgaaagggctagagaagcagaatctagggttcgtgaattggaggaagaagttagaaaaatgtctgatgaaatcaaga

SEQ ID NO: 123281 - DNA, 982 bp, Arabidopsis thaliana
agcttatcactacttaggagctgtccctgcggtccgtccgattccggtcgccaccgtcgcagaataactgtgagttagaaacagttgcttatgagttcttcacaaaggcatatcttctgtatgaagaagaaatttcagattcaaaggcacaagtaacagcactacgtttaataatagggacactccagaggatgcgtgtatttaatgttgagaacagagatactctgactcacaaggcgacagggtattctgcaagactcctaaggaagccagatcagtgtagagctgtttatgaatgtgcgcatctcttctgggctgacgaatgcgagaacctgaaagatggagagagggttgtgctttgcctgaagagggcacaaaggattgcagatgctgttcaacaaatggccaacgcatcccgtggtaccagtagcactgggtcggtgtctctatatgtcgaactgctgaacaagtatctctacttcctggagaaaggaaaccaacaagtaacaggcgatacaatcaagagcttagctgaattaatcaaaagcgagacaaagaaggttgagtcaggcgcagagccattcataaatagtactctacgttacatcgagtttcagagacagcaagaagatggtggcatgaatgagaaatacgagaaaatcaaaatggaatggtttgaatgaatttatttcttgcattctgttaggcaaatcatcaataatcaatggcttctcgtcttgttgcagaagcatgaagagtaatcttgagaaataaaacttgtatcattacttttcatttcctagttacacgctctaccaataaacatgtttgcaaagtttaaaacagtaacatacaaaatatggtcagctgaagaaatggtgggaatgaaaactgattcaaaacaaaaaaacaaaaaaaagggcggccgctctagaggatccaagcttacgtacgcgtgcatgcgacgtaatagctcttctat

SEQ ID NO: 123282 - DNA, 1099 bp, Arabidopsis thaliana
  unsure (1)..(1099): unsure at all n locations
ccnnnnnnnnnngctctatacgactcatataggaagctggtcgcctgcagtaccggtccggattcccggtcgaccacgcgtccgcccacgcgtccgaaaagactcttctcttctctcttcctctttccttcacacaactctctcattctactctctgttttttttctttaatcataacatttttttgaagaacagagattctttttgtttgtgtaagagatgggaaattgtcaagcggttgatgcggctgcgttggttctacaacatcctgatggcaagatcgatagatattacggtcctgtatccgttagtgagatcatgcgtatgtatcctggtcactacgtttctcttattattcctttgccggagaagaatattccggcgacaacaacaacaacagatgataagagtgagagaaaggttgtgaggttcacgcgcgtgaaacttctccgaccaacggagaatcttgtacttggtcatgcttatcgtctcatcacttcacaagaggttatgaaggttttaagagccaagaagtacgcgaaaacaaagaaacaccaaagtgaaacgagtaaggagaagaagaagccatcatcggagaagaagattgatgaagaatccgacaagaatcagaatctggaaacgaaagatgagaagcaacgttcagtgttaacgaattcagcttcatcgagatcaaaaacatggaggccatcattgcagagcatctctgaagctacgagttgatgtttgggttttacgtgagggacaagaaacgtagtctctgtgtgtgaatcattcagaagatggaatctgaagaagaaagagatataaacattattgaataaactcttctcttatgttcctttctggttataatttacataggagatgaaaattttatagattaagatgtaaaaagaactatgcagagattaagaactaagtcccttttttgtcctgttaatgtatatatgtgctccatgtgaagaaatcaatcaaaaaatagattgtaaaaaaaaaaaaaaaaaaagggcggccgctctagaggatccaagcttacgtacgcgtgcatgcgacgtcataagttttttataggttacct

SEQ ID NO: 123283 - DNA, 311 bp, Arabidopsis thaliana
cccccctcgagggcgactgctatcgataagctagctagcgcatccgcggccgcggtggggcaagagatgggaaattgccaagcggctgacgcggctgcgttggttctacaacatcctgatggcaagatcgatagatattacggtcctgtatccgttagtgagatcatgcgtatgtatcctggtcactacgtttctcttattattcctttgccggagaagaatattccggcgacaacaacaacaacagatgataagagtgagagaaaggttgtgaggttcacgcgcgtgaaagttctccgattttttttttt

SEQ ID NO: 123284 - DNA, 656 bp, Arabidopsis thaliana
  unsure (1)..(656): unsure at all n locations
nnnnnnnnnnnnnnnnnnnnnnnnnnnnnnnnnnnnnnnnnnnnnnnnnnnnnnnnnnnnnnnnnnnnnnnnnnnnnnnnnnccacgcgtccgcccacgcgtccggaaaaggcttcacgcccgatttcttttttccccagaaaaaggcttcacttccgttcgttgttcttcatcggtctgcgccgcctcgcacatcgtttcacctttctcagaatctctcttcccgtcgattagtttcctcagaggttgcgatttgttgagaaccttgatttagactatgaagtctcttaatgatcttcctgcgcccaaatcaaccactaccacgtattatgatcattctaatgatgcttggttcaaaaaccgagtcactgaatccgagacggtgaaatcctccagtatcaaatttaaagtggtgcctgcttacctgaatcgtcaaggtttacgtccgaagaatccagaggattttggcgatggtggtgctttcccggagattcatcttcctcagtatcctcttcttatgggtaagaataaatccaataagcctggagctaagactctccctgttactgtcgatgctcagggaaacgtggtctttgacgctatagtgaggcagaatgagaactcgaggaagattgtttattctcagcataaggata

SEQ ID NO: 123285 - DNA, 506 bp, Arabidopsis thaliana
  unsure (1)..(506): unsure at all n locations
tcccggctggggccaatctntgagaggggttaancatgcaatgcagcaactttggccttcnggatgtgtatcnctaaggccatcaccagggcaatactgatcagtgatgcaatggagacaggacccgttcagatcaactctgcgccagctcgtggaccggaccacttccctttccagggacttaaggacagtggaatagggtcacaaggtgtgacaaatagcatcaatttgatgactaaagtgaagaccactgtcattaacttgcctacaccttcttactctatgggttagtttcccttttttttttatgttcttcatcttagaatcaaaatcaatcatgtcatgtttgtattggattcaatcgaatactgcgaataaagggagtgattagcgtaactattatggtttgtaatctctatgtaaccaataagaggatattatgaaagatgagtgagaggtttggttgtgttgtgttaaaaaaaaaaaaaaaaaaaaaaagggcggct

SEQ ID NO: 123286 - DNA, 895 bp, Arabidopsis thaliana
  unsure (1)..(895): unsure at all n locations
nnatgatatnnnnnnnnnnnnnnnnnnnnnnnnnnnnnnnnnnnnnnnnnnnnnnnnnnnnnnnnnnnnncaagaacacaacaccacgcgtccgcggacgcgtgggttttcccgtgtaaccaaaaaaatcaaaaagattactctctctttaatatctgggtttatactacagtccttctttggtgcaaagatcccaaaaaatcaaaatcgaaagagagaataaatcaaaaggaagaatctttatctgctttctctcgatgaggatccggaaacgacaagtgcctcttcctttatcgtctctattaccagttcctctatcagatctctactttaaccgctcaccgacggccaccgcgagatactttcgcggtggttataaagacggcggtgatgattttggttctcttcagctttcgcttccgccgccgtcgcagatttctgatcggcttattcaaagagatttgataaagaagaaggaggaggtcaaggctttggatgatgataatggtgatgtagacgtcaagagtcgtactgatgcatcgggcagcaagaatgttaatccccgaggagaatccgtctcttcaatacaagttgtcgagaagaatgaaaaggttgtgtctttgaggaagagaagaggctttatcaactttgaggattacgaagatgaggaagatgaagaagctagtggcggtggaggccgtattaataaagggaaaaaagaaagcgaaaaagagcggtgggtgggttagaggaaggatcacggtgcagccgtgttaacggtagaggatggagatgttgtcagcaaacgctggtggggtattctcttttggaacctcatctcgggaagggaggggtagggccttgaccaagagtgggggggggttggggggagaaa

SEQ ID NO: 123287 - DNA, 757 bp, Arabidopsis thaliana
tgtacacgactgagtatagggaaagctggtacgcctgcaggtaccggtccggaattcccgggtcgacccacgcgtccgcccacgcgtgcgaaattgttgaatcaaagcagagaagaagaagaagacgatcatgaatccagattccgattatcctcatctccctaacatcaagatccaccatccttcatctcctcgtcactctcaccaccactcttcctccactccttccgccgctactcctaccccaaccgccggtgctcgccgtaagatcggagtcgccgttgacctttccgaagaaagcgctttcgctgttcgctgggctgtcgatcattacatccgtcccggagacgccgtcgtcattctccacgtttctccaacctccgttctcttcggcgccgattggggacctctccctctccaaactcctcctcctccttccgccgctaccgatcccggagctcagccgaagcctagtcaggaagatttcgatgcgtttacttcttccaaagtagcggatctagcgaagccgttgaaggaagctgggtttcctcataagagccatatagtgaaagatcacgatatgagagagaggccttgcttagagactgaaaggcttaatctaagcgccgggataatgggaagcagaggatttggtgctgagaagagaggaagtgatggccagccttgctctggtagggaatattgtggtcaccattggggttggcccggtggtggtggtagatatcctgatgatcgg

SEQ ID NO: 123288 - DNA, 618 bp, Arabidopsis thaliana
caggtctactacgactcactattgggaaagctggcacgcctgcaggtaccggtccggaattcccgggtcgtacccacgcgtgcgcttcctctcgatcggaaaatagtcaaaagtttctataaattgttgaatcaaagcagagaagaagaagaagacgatcatgaatccagattccgattatcctcatctccctaacatcaagatccaccatccttcatctcctcgtcactctcaccaccactcttcctccactccttccgccgctactcctaccccaaccgccggtgctcgccgtaagatcggagtcgccgttgacctttccgaagaaagcgctttcgctgttcgctgggctgtcgatcattacatccgtcccggagacgccgtcgtcattctccacgtttctccaacctccgttctcttcggcgccgattggggacctctccctctccaaactcctcctcctccttccgccgctaccgatcccggagctcagccgaagcctagtcaggaagatttcgatgcgtttacttcttccaaagtagcggatctagcgaagccgatgaaggaagctgggtttcctcataagatccatatagtgaaagatcacgatatgagaga

SEQ ID NO: 123289 - DNA, 532 bp, Arabidopsis thaliana
  unsure (1)..(532): unsure at all n locations
cttcctctcgatcggaaaatagtcaaaagtttctataaattgttgaatcaaagcagagaagaagaagaagacgatcatgaatccagattccgattatcctcatctccctaacatcaagatccaccatccttcatctcctcgtcactctcaccaccactcttcctccactccttccgccgctactcctaccccaaccgccggtgctcgccgtaagatcggagtcgccgttgacctttccgaagaaagcgctttcgctgttcgctgggctgtcgatcattacatccgtcccggagacgccgtcgtcattctccacgtttctccaacctccgttctcttcggcggcgattgggggactctccctctccaaaatcctcctcctccttccggcggtaacggttccggagtcagcggagctagtaaggagatttcgtgngttantttttcaaagnagggattaggaanggtgaaggantggggttccnaaaantcanaagggaagtcggtntggaaaggttgttanntgaaggtaatc

SEQ ID NO: 123290 - DNA, 535 bp, Arabidopsis thaliana
  unsure (1)..(535): unsure at all n locations
nnnnnnnnnnnnnnnnnnnnnnnnnnnnnnnnnnnnnnnnnnnnnnnnnnnnnnnnnnnnnnnnnnnnnnnccacgcgtagcgacacatcccaagaatccgccggcgtcgacaatcttcgccggagccatcgtcctcttccatcatctgcttaatcattttttgccctaacaccaaaaattatcgatctttttttttgtctactatatacctagatatataggtttttttgtccttctctttggatcatttccacgacgaaacggagaagaggggacgattttgccagccaagaaacaaagaattgttaaggaactgaagattataaccttctgaaggataatgaagtctaagaagaagcttagcttgagacaaagcaaagcttccaataggaacgttaacgaaaccaaacctcttcatcatctcttcccaaatctcaaacctccgatgtctttgctttctctccgtctcttccgccgccacaacatccaaaatctccttaccgaaccaccgtagctctagggttagtctctctc

SEQ ID NO: 123291 - DNA, 1441 bp, Arabidopsis thaliana
aatcacttcctctctctctctctttttcttatacaacactcaagaagcgagacacagaggagagagttagtcttcttctctgtttttgtctctttggctatatatattcaaacattgtgtgaacagaacacaaatcaacacaacacacacaactttgtgttctttaagttttgtttcagagatcaatggccgggactggattgtttgctgagattcttgatggagaagtatacaaatactacgctgatggtgagtggaaaacttcttcctcaggtaagagtgttgccatcatgaacccggccacgaggaagacacagtacaaggttcaagcatgcacgcaagaagaagtgaacgcggtgatggaactggcgaaatcagctcagaaatcgtgggcgaaaactcctctttggaaaagagctgagcttcttcacaaggctgcagcaatccttaaggacaacaaagctcccatggctgagtctcttgttaaagaaatcgctaaacccgccaaagattctgttactgaggttgtgaggtctggagatttgatctcttattgtgctgaagaaggtgttaggatcttaggtgaagggaagtttcttctctccgatagcttccccggtaatgaccgtactaagtactgcctcacttccaagattccactcggtgtggttttggctattcctccattcaattatccagttaatctcgctgtatcggagatcgctcctcctttgatcgccggaaactcccttgtcctcaaacctccaactcaaggagctgtttcttgccttcacatggtacattgctttcacttagccggtttcccaaaaggtcttatcagctgcatcaccggaaaaggatctgagatcggcgatttcctcactatgcaccctgctgttaactgcattagtttcacgggtggtgataccggaatctcaatctcaaagaaagctggtatgatccctcttcaaatggaacttggaggtaaagatgcatgcattgttctagatgatgctgatcttgatttagttgcttccaatatcatcaaaggaggattctcttacagcgggcagagatgcactgcggttaaggtagtcctagtgatggaatcagtagcggatgagcttgttgagaaagtgaaagctaaagtggccaaactcacggtgggaccgcccgaagagaactccgatatcacggcagtggtgtcggaatcttcagctaatttcattgaaggattggtgatggatgctaaggagaaaggagcaacgttttgtcaagagtataaaagagagggtaacttgatttggccgttgcttttggataatgttagaccggacatgaggatcgcgtgggaggaaccattcggtcctgttgtgccggtcttgaggatcaattctgttgaagaagggattaatcattgcaatgcaagcaactttggcct

SEQ ID NO: 123292 - DNA, 600 bp, Arabidopsis thaliana
  unsure (1)..(600): unsure at all n locations
cgnnnnnnnnnnnnnnnnnnnnnnnnnnnnnnnnnnnnnnnnnnnnnnnnnnnnnnnnnnnnnnnnnnnnnnccacgcgtccgtacggctgcgagaagacgcagaagggggctgaagcagtaagcactcaaccaaaaaaccaattgcgtaaacactttcccttgaatacagagatcacattcgatcagcgagctgatttctcacaagggatatcaaaatttctggtgaagtgggattgtaaaattcggcgttgaaagatatataaagagtggaaggttctggagtcgtttcaattcatggatgatggtactcctaagaagctaaacatattacctgatcactttagtgctcctagtcccacagcagaatcttctcagcacgatactccatcatcttcgcagccaaaggacgatagttctctgagagtaggccttatagccagtcacggactcgcagaaacctgaaaagagcagcaactatgttgaatttgttcactcttcgccgtctgccttgggtttcagatggtcaagagaaggtcgagctatcagcagcggagttagaatcacttagatcagaactttctgatatggaagaaagaga

SEQ ID NO: 123293 - DNA, 521 bp, Arabidopsis thaliana
aaaaaaacttatcggaaacagaaaaaagaagagagtgagctatcaatcgatcattgattgattgcagagaagcagcgaaagagacatttccaaatctaatctcaatccaatccaattcagggttgttgctaccttcacgaatgacgacgacttctgtttgcccgttctcgaaagctgctcgtcctgacgatgggtcgactcgaaaacaaggcgaaattaccgcttctggttgtcctttttctaaagctgctcgtcccgacgatgcctctgctcgaaagcaaggggaaacgacggcttctggttgccctttttctaaatctgctcgtcctgacgaaaatgggagtaaaggatgtcctgaacaagaaggaaacttgaataaggactctactgattctgcaacggtacctgccaagtgcccttttggctatgactctcaaacattcaagcttgggccttttagctgtatgttatgtcaagcacttctatatgagagcagtagatgtgtgccttgcacacatgtg

SEQ ID NO: 123294 - DNA, 770 bp, Arabidopsis thaliana
  unsure (1)..(770): unsure at all n locations
tactcactctagggaaagctggtccgcctgcaggtaccggtccgcaattcccctgaaggccgcatcttcatcgctttcactccaacactctccgccactcagcctatccttccgccgacgctggcggtggccttgtcgtctatcccacgtatggtcgtcaccgttgctccgcgattgcgatcgacgctccgtcgtctctgactggcgtgacgccgattcgttggggttacacgagtgttcaaggattccgagatgagatggaagacgacatcgtaatccgttctgatgctgtcgatagcttctcctacgcagcggtcttcgacggccacgctgggtcgtcctctgtcaaattcctcagggaagagctgtataaagagtgtgttggtgcattgcaagctggatcgttgttgaatggaggcgatttcgcagcaatcaaggaagctttgattaaggcctttgaaagcgttgaccgcaatttgctcaaatggctagaagctaacggtgacgaagaagatgaatcaggttcaacagccactgtaatgatcatcagaaatgatgtttccttcattgctcatattggtgattcgtgtgcagtcttatctcgatcttgggaaatccgagggatttgacctgattatcaccgtccctatggaagcagtagggcagctttttcaggaagtgaaaaggggcaaagaagcaggttggatggggtttncaattgaaaggatttttggggcaaaanctnnatnccggnncttttgggncacccg

SEQ ID NO: 123295 - DNA, 505 bp, Arabidopsis thaliana
  unsure (1)..(505): unsure at all n locations
atgatcttnnnnnnnnnnnnnnnnnnnnnnnnnnnnnnnnnnnnnnnnnnnnnnnnnnnnnnnnnnnnnnnnnnnnnnnnnnnccacgcgtccgcccacgcgtccgcccacgcgtccgcggacgcgtgggacgtctcttcttttcttgtcgattttccccagataatcagttgaaaacacacccaaattcatcttcgaatcaataatggatataagtaatgaggctagtgtcgatcccttttcgattggaccatcatctatcatgggtcgaaccattgctttcagagtcttgttctgtagatcaatgtcacagcttaggcgtgatctctttcggttcttgttgcattggtttcttagatttaagctgaccgtttcaccgtttgtgtcgtggtttcatcctcggaaccctcaagggattttagcggggggttacaatcattgcctttgggttgaaacgatacacgaatgtgaaaataaaggcggaaatggcttaccggaaaaagtt

SEQ ID NO: 123296 - DNA, 672 bp, Arabidopsis thaliana
tcgtcctcgcgtccggttttaggttttttttttcttcttctcggaggtttgtagaatcaacaaaaatggtggaagaccacaagcacgaggaatcgatcttggagaagattgttgagaagatccatggccacggtgactcgtcttctctgtccgattccgacgacgataagaaatctacatcgtcttcgtcgtcgtccttcaagtcaaagatttaccgacttttcggaagggagaaacctgttcacaaggttctcggtggtggaaaacctgctgatatattcctttggaggaacaagaaggtatctggtggagtcttgggtgctgtaactgcgtcttgggtcttattcgagttattcgaataccatctcctcgcttttctctgtcactttgcgatttttgctcttgcagcattgttcttgtggtctaatgcttgtacattcatccacaagtcaactcctcacatcccggaagttcacatccctgaagatcctattcttcaacttgtttctggattaaggattgaaatcaatcgtggtttgacccttcttaggaacattgcatcaggaaaagatgtcaagaattttatcctggtaattgctggcttgtgggtttttgccattattggcagctgctacaacttcttgacattgttctacactgctactgtccttc

SEQ ID NO: 123297 - DNA, 415 bp, Arabidopsis thaliana
actgaaaccttatcttctccgcccatggccgccttctccgtcaacgggcagcttatcccgacggcaacaagctccactgcttccacctctctctcttcccgtcggaaatttctctctccttcctcgtctcgtctccctcgcatctccactcaatctcctcgtgtcccatcgataaaatgcagcagaagcttacctaaccgagatacagagacttcctcaaaggattctctccttaaaaacctagctaaacctctagccgtagcctcagtctcctccgctgcttcattctttctgttccgaatctcgaatcttccgtcggttctgaccggtggtggaggaggaggagatgggaatttcggtggatttggtggtggacgtggtggtggagatggaaatgatggtggattttggggga

SEQ ID NO: 123298 - DNA, 817 bp, Arabidopsis thaliana
  unsure (1)..(817): unsure at all n locations
ctccttctctctttctctcttcctccaatggcgaaactaacaacagactctcctctctgccggaaaatcgtccgttctttcttaaattttcttgattccgttgaggttgctccaggtgttgacgaagaaggtcttgaggttgctagagaatgtttaagagaagcttttaaacttaattcagattcttcaagagatgatgatgatgatagctttaaacctatttcacttgttaatttgtttacttcattggacaacaatgaaaccataccaccaccaccaccaccacctgttgctgctactactcaggatcctagttcctccggttctcatgtctccgtggatacgtgtaaagagcctagttttactgggacttctagagatgaactgtttggtcaactctttggtgcgcttgagaaagtacggtattttaggaatacacctgatggagatgatgatcctgctcagctggagaaagctacaaggatatttcatgattgtgtcaatgaaatggaaaagtctggatgtcagacgtttgatgtgaatagcttggcggaaacactcaagtgtcaaggtaacaaagctatgcagtccaatctttatcttgaggcagtcgagctttattcttttgcaattgcactgacggataagaacgctgttttctactgcaacagggctgctgcatatacacagatcaacatgtgctcagaagcaatcaaggnctgtnttaaatccattgagattgatccaaattatagtaaggcgtatagtcgtcttngggntagcatatttatgctcaaggggaantatgnccgaggct

SEQ ID NO: 123299 - DNA, 529 bp, Arabidopsis thaliana
cccacgcgtccggaatttggtaccgacactattattcaggattttcagtttgaagagattgatgaagttctgaaatattacccgcacggttatcacagtgtagataaagaaggcaggcctgtgtatattgcgccgcccgggaaaggttgatctctaaccaaactgatgcaatgttacttacgcttgatcgatatacttagagatcatgtgtaaggtagttcgagaggaggttttattgctcaagtttccctgcctgcacttattgctgccaagacagtattattgattcaagcacacactatttttggacgtccaaggatgtgggacctgaagaacttcacaaatgtctgctcgtgagcttattacaaggttgcagaagattgatggagacaattatcctgagaccctccaccaaatgtttatcatcaatgcagggcccggattccgtctgctttggagcactgtcaagagttttctagaccccaaaacgacttctaagattcatgtactcggctgcaagtttcagagt

SEQ ID NO: 123300 - DNA, 585 bp, Arabidopsis thaliana
  unsure (1)..(585): unsure at all n locations
nnnnnnnnnnnnnnnnnnnnnnnnnnnnnnnnnnnnnnnnnnnnnnnnnnnnnnnnnnnnnnnnnnnnnnnnnccacgcgtccgctttcatccataaacttctatttttctcatcgcaaacttgaaccgtcgtaaccctaaatcgccatcttcatcatcggcaaatcgaatctccgattatatatcaaatagcttaccaaatccgacatgacccaggccctcgttttcggaggactataatgatcggactcttcgtgtcccgtctcgattgcatggggtttgagctatgccggagcttcgccgtggagtccgccgtggccgtgttactgatgctgtagctcccaatcagcttccgcaaacacctacagaaaagaaaccgaagaagagtaccgttaaagctccaaaaccggttgccggcggagttacaggagttgcagagaggccgaggactagattagcggcgaggaaattaaaggaggaagataaagagatacctcaggagattccggttgttgtgccgtctaaggatagcgatatcgataaaaccagggttaaaaggtagtccgttgagaagagaaagaagat

SEQ ID NO: 123301 - DNA, 602 bp, Arabidopsis thaliana
  unsure (1)..(602): unsure at all n locations
nnnnnnnnnnnnnnnnnnnnnnnnnnnnnnnnnnnnnnnnnnnnnnnnnnnnnnnnnnnnnnnnnnnnnnnccacgcgtccgggattttgagtctttctccgaagtcgccggaatcgtattcgccgatccaattgtcgcatagaaactgtcatctccggcgagagactgatctctgggattgatacagaactcgtaggatgatcgatttacgctataaagaatgctacttgctcatctgtcttatcgtcttcataaattttgtgacttgttatagcgatgagagactgtttggtggaaaaactttatatgctgggaaggaactttggaaagagacactgccattgaaatctggatctcgagtttacaaattacaagggcttaagtcgaactcttggtatgaagtcaagatatcatacccagcttctataccggctctattttcgctgcaattactgaagaacggtgtaatgggtttgaaggttaaccatatgaggagattactaaacactgagaagttgatcttcaaaacagaaagtattgaagaagttgataacaaggagggattgtatgttttggtgacggtggaacctgaaggaatcgt

SEQ ID NO: 123302 - DNA, 872 bp, Arabidopsis thaliana
cactatagggaaagctggtacgcctgcaggtaccggtccggaattcccgggtcgacccacgcgtccgagaaaaagaacaaaaacctaatttcaagaaattcaataaatatcatcctccggataagttgttattgtacgtttaccaaattcaagaacaagaaaaaacttttcctttgaaacaaagaaacatggatttcttcaccgatcaagtaaagaagaaattctccgacaagaaaccggagagctctgatccggagccaaaccacaacaaaaacaaacccggtcacacggagccaacaacacataaacccggtcacggcgagccaacaacacataaaccggtctccaacaccgatccaacaacacacagaccggctacgaacgctgagctcatggctagtgccaagatcgtagccgaagctgctcaagccgctgctcgtcacgagtcagacaagcttgacaaagccaaagtcgccggagccaccgctgatatcttagacgccgcttctagatacggtaagctcgatgaaaagagcggtgttggtcagtaccttgaaaaggctgaacaatatcttcacaagtacgaaacttcccactctcactcctccaccggtggaactggaagccacggtaatgttggaggacacggtggtggagctggagcaccggcggctaagaaagaagatgagaagtccggaggtggtcatgggtttggagattatgctaagatggctcaaggttttatgaagtgagtaatgttttagtttctaaaaataattatgttagtaattatcttctataattactgttttagtaagctgttgttttttctgaattattattaactgttggatttgtcatttgtgtatgat

SEQ ID NO: 123303 - DNA, 949 bp, Arabidopsis thaliana
  unsure (1)..(949): unsure at all n locations
ctcgtgggtcgacacaagactctatactgagtcgaaataacgacagaagggggaagaccaaaaactagtggacaaagaaaaagaacaaaaacctaatttcaggaaattcaataaatatcatcctccggataagttgttattgtacgtttaccaaattcaagaacaagaaaaaacttttcctttgaaacaaagaaacatggatttcttcaccgatcaagtaaagaagaaattctccgacaagaaaccggagagctctgatccggagccaaaccacaacaaaaacaaacccggtcacacggagccaacaacacataaacccggtcacggcgagccaacaacacataaaccggtctccaacaccgatccgacaacacacagaccggctacgaacgctgagctcatggctagtgccaagatcgtagccgaagctgctcaagccgctgctcgtcacgagtcagccagctagccaagctaaagtcgccggagccaccgctgatatccttnacgccgcttctagatacggtaagctcgatgaaaagagcggtgttggtcagtaccttgaaaaggctgaacaatatcttcacaagtacgaaacttcccactctcactcctccagcggtggaactggaagccacggtactgccggcgccgctggaacccacggtaatgttggaggacacggtgctggagctggagcaccggcggctaagaaagaagatgagaagtccggaggtggtcatgggtttggagattatgctaagatggctcaaggttttatgaagtgagtaatgttttagtttctaaaaataattatgttagtaattatcttctataattactgttttagtaagctgttgttttttctgaattattattaactgttggatttgtcatttgtgtatgatggaggaaattatgatgttaaagatcatgtatcatgttgttgacc

SEQ ID NO: 123304 - DNA, 813 bp, Arabidopsis thaliana
  unsure (1)..(813): unsure at all n locations
gtcgtcggttaaaatggaaaagaaggagacgatgagaaggatcggatcccattggttttcacggaggagcagcagaaatacgtcgatgagcttggccgaaaagcgacaaacctcagccgttcgatccaagatctgcggctcagattgcctccaccggatatctcccagcgtctacctgaccttcatgctcactcccttgcgtccaatgccgctctcactcttcagcttgattcgcactccgctactcgtgaacaggcacacatgagagagcagacactgctggaagaaaatagtgcatatgagaatgcaatatcaacctgtgagacaaaaatagaagagaagaggaatgaagcagattctcttcttagaaagttgaaggagctagaagctgtagaggaaaacttgaaaactgagcaggataatgcacaagcttctctagatgtaaggcagtccaaaagctctagtgaaactnttattcagcctgatgggaatggaaaagatggagcagatacagaggccatgaagtcctttatgctagagaagttggagagcaaaaagaccgatatgagtttaatggaagaaaaagttcaggatttagagaggagttnggctgttatacaggaaagagcactgaagcagccttctccagctcagaggagaagaagncacnggaataaacaaccttcatagncttatcgagcaattagcttcaaaagnaggcaccaagcagagggggttttttngtgnagantcatcctaaatnagnntggagttngngnggcttnaaccaanttntttggggaggttttgaaa

SEQ ID NO: 123305 - DNA, 564 bp, Arabidopsis thaliana
  unsure (1)..(564): unsure at all n locations
nnnnnnnnnnnnnnnnnnnnnnnnnnnnnnnnnnnnnnnnnnnnnnnnnnnnnnnnnnnnnnnnnnnnnnnnnccacgcgtccgcggacgcgtgggcggacgcgtggggaaaattcaagaaaagagtgggatattctgtcaaatggaggtatggttcaggaaatggctcatatagccaatggtcatgaacctggaaactgtgtctccttgctccgagtcaatagtggaaactcgagccagagcaacatgttgattctacaagagagctgtacagatgcatcaggatcgtatgtgatttacgcgccagtggatatagtggcgatgaatgtggttctaagcggtggagatcctgattacgtggcgttgttgccgtctggttttgctattttaccggatggttcggttggaggaggagatgggaatcagcatcaggaaatggtttctactacttcttctgggagttgtggtggttcgcttttaaccgttgcgtttcagattcttgttgactctgttcctacagctaaactctcacttggctcggtggctacggttaatagtctgatc

SEQ ID NO: 123306 - DNA, 689 bp, Arabidopsis thaliana
cccacgcgtccgttttcatggtagacccaactctctcatttcttactctctgattcatctctctctctctcttcatttccatggaaggaaggtgatgagctttctcaatctctctttactgattcttaatgaaagtcatctcctttctctttggtatcccttttcttcttctctgcttaattcctgaccaaaaattgtgacaagatctttcaatccaaaagctatatacattaagagctcaggtcactatctgacgggatccgtgacaatagtggttactggagtcaaaagcagctccttgaatcttgagtgttaagtagataggtaaggtaaccgttcatggcctcgaagtatggttctggagttctcccagaaaataagaaggaaaagggcgataaggaaaccccggaaacatcttattccagtcaaagtgtctcagtaaacactttggcagatcaagtatcttcaactttgtcttttgctccaagcagcgacagtaaaactggaggtgaagttaaatttaatgaaaagtctgatcagagcgggaagagtaacacatgtagaccaagcacaagcagtgatatcagtgatgagagcacatgtagcagctttagtggtaacaacaagcctcacaaggcgaatgacgtgagatgggaagcaattcaagctgtccgaacgaaacatggcgt

SEQ ID NO: 123307 - DNA, 591 bp, Arabidopsis thaliana
  unsure (1)..(591): unsure at all n locations
gattccgggtcgaccacgccgtcgcacttcactctctctcttcaaaaagaaaaacaaaaatacaaaagccaaggaaagccattattacaaaagcaataacacactgtaaaaaagccactcacgaacactcctcagtaaccagagagagaagaagaagaacaacaagccatgtcttaactcttaactaatctcttcttctccctccatttcaccaaccaaaaaccctaaaatccttaaaatcacaagtttcttcagcaatgatgcttcaaagaagctgcattgtacttttcttctctctttttctgttggttccacaaatggttttctcgatgctcaacagaactcttcttctcataccacatcctgacccggaactagtcgcttatcaagttcagtggaaagtaaatgcatctataacaaggcgtcaagctctagacacgacggaccaggccggttcgaccccgtgtatcaccggtaacccaatcgatgacttgtggaaatgtgacccaaactggcccaataacagnacaggtctagcagattgtggtatcgggttcggacagtacgcgttgtgaggcaaaggtgtcagtt

SEQ ID NO: 123308 - DNA, 780 bp, Arabidopsis thaliana
  unsure (1)..(780): unsure at all n locations
nnnnnnnnnnnnnnnnnnnnnnnnnnnnnnnnnnnnnnnnnnnnnnnnnnnnnnnnnnnnnnnnnnnnnnnnnnccacgcgtccgcggacgcgtgggcaagaaacaaaatgggatacgaaaggctcggaccatccggagcaactggttcggtcaccacctccactactacagctccaatccttaaccaagtctccacgtcagagcaaccggagaacaacaaccgaagaagcaaaaagaagcttgtcgtatcatcaatcgtcttagccatctcacttatcctcgccgccgcgatcttcgccggagtcagatcacgtctcaagttaaaccaatcagtcccaggcctagctcgtaaaccgagtcaagcaatctctaaagcttgtgagttaactcgtttccccgagttatgcgttgactcactcatggactttcccggctcactcgccgcttcctcctctaaagatctcatccacgtgactgtgaacatgacgctccaccacttcagccacgctctctactcctctgcttccctctccttcgtcgacatgccgccacgtgctcgctcagcttacgactcttgcgtcgggctacttgacgattccgttgacgggctatcacgcgctctttcctccgtcgtatcctcctccgctaagccgcaagatgttacaacgtggcttagcgcggctttaacaaaccatgacacgtgtactgaaggattcgacggcgtcgacgacggtggagtgaaggatcatatgacggcggcgttacagaatctttctgag

SEQ ID NO: 123309 - DNA, 543 bp, Arabidopsis thaliana
cagctctatacgactcatatatggaaagctggtacgcctgcaggtaccggtccggatttccggggctcgtgctcgtgcagctgaatatccctgctctgattcgtcaaatccatggaagatgaggatgatccaaccacaaagaacagcaacaacacagatgattttgctatagagcctcgtgaagggattatatttgaatccgaggatgcagctaagatgttctatgatgattactctagacgattagggtttgtaatgcgtgtaatgtcttgccgaagatccgagaaagacggaagaattcttgcccggagattcggttgtaacaaagaaggtcattgtgttagtattcgtggtaagtttggatcagttaggaaacctagaccgagtacaagagaaggttgcaaagctatgattcatgttaagtatgaccggtctggcaaatgggtcattaccaaattcgtcaaagaacataaccatccactcgttgtttcacctcgcgaggcttgccataccctggacgagaagggatagagaatttaagaa

SEQ ID NO: 123310 - DNA, 799 bp, Arabidopsis thaliana
  unsure (1)..(799): unsure at all n locations
nnnnnnnnnnnnnnnnnnnnnnnnnnnnnnnntgggacgcctgcaggtaccggtccgcctacccggggcgaccacccgtccggtttctaccgtctttcttcagttcttcacaactctcgatttcgtccccttccttgctcattgcgtcaagacaatgtcgcttccgattctgatttcattcccaaagactccgcttttgaggttacggattcagctgagagtaatagattggtttccgatacggaggtttcggaattagagacgaatgatagatttgtgggtggtgaggagacgaaaagtggaggagaagaagcggaggttagtaatggagtaacggaaggtaaggaggaagatcagaagaagagcaagtttaggattgtggtgttgatgatggcactatgggcggctataaagagagctatagagaaggtaatggagtgggaatggttaagctggtggcctttctctcgccaggagaagcggctcgagaaacttattgctgaggctgatgctaatccaaaggacgcagctttgcagggtgctttattggctgagctcaataagcatattcctgaggctgtagttcaacggtttgaacaaagggaacacacagtggatagtagaggagttgctgaatatattcgagctcttgtcattacaaatgctatctcggagtatcttcctgatgaacaaacggggaagccatctagtcttcccgcactgctgcaagagctgaagcatcgtgcatcaggcaatatggacgaatcatttgtgaaccctggtatatctgagaagcaac

SEQ ID NO: 123311 - DNA, 360 bp, Arabidopsis thaliana
tcttttgctctgaaataaaaagagtgagagaagaaggaagaagaagataaaggattcaaaaaaccctaaacactccaatgtcttcttctactcttcaagcttctctttttcttcgtcctcctctccatacttcttcgtttaagctttacccttgtctattctcttcttcttcattgagtttttgtccacaatctctctcaagtttctaccgtctttcttcagttcttcacaactctcgatttcgtccccttccttgctcattgcgtcaagacaatgtcgcttccgattctgatttcattcccaaagactccgcttttgaggttacggattcagctgagagtaatagattggtttccgata

SEQ ID NO: 123312 - DNA, 704 bp, Arabidopsis thaliana
  unsure (1)..(704): unsure at all n locations
gaaggccgnagtcctgttgtggtatcggaaggagctaatacaatggatgtaggaagatctgttttggttcagaaagagccaaggacaaggcttgatgcaggaacttggggaactatgggtgttggtttaggttattgtattgctgctgctgttgcttctcctgatcggcttgttgtcgctgttgaaggagactctggttttggcttcagcgccatggaagtcgagacattggttcgatacaatcttgctgtggtgattatagtcttcaacaatggtggtgtctacggcggtgatcgaaggggacctgaagaaatctccggtcctcataaagaagatccagcaccaacatcatttgttcctaatgcaggctaccacaagctcattgaagcctttggaggcaaaggttatattgtggaaacacccgatgagcttaaatccgctctcgctgagtcgttcgccgcaagaaaacccgcggtggtaaatgttattattgatccttttgctggtgctgagagtgggagattacagcacaagaactaaaaagctttgtggagagtccctttaaataatgttgaagttgtttgttgtgaacaaaaaggatatacgttttagttttctgtttttcactattgtaaaccggatcataaaccggtccattttaaaccataattgaataaaaacacgtttccggttcaaaaaaaaaa

SEQ ID NO: 123313 - DNA, 719 bp, Arabidopsis thaliana
  unsure (1)..(719): unsure at all n locations
ctctatacgactcatatatggaagctgtacgcctgcagtaccggtccggattccgggtcgaccacgcgtccggacttggaaaagattaatagcaaatgggttctttaatgtcaggatgggactctcgagtaagggatcccaaatcagtgagaaggtgcaagtcgctcacaagagaagaaatcgacactttttggaaaacgaagaagaagaatgaagaagaagaacatgttcaagccttttccaagttggtaactcaggaaggtgcacaaagccaagcgaaagagaagaagagtgtagatgatctttttgagaaccaaagcaagagtagtggatggtggagaaaaacctactgggcgttcttgaatgagccgagggaggaagagggtcgaccgaacaactacgtgtcgcaattcaaagttgctcacatcgccaaaattgcgggctcgtaatgacgctataatcaccggctaatcacatatatatctcgtgtgaaatgcgattagtcgtctgccgttgtggtttaatcaccggctaatcacatatatagtatgttggccgtgttagtatgtgaatgtgtaagtagccatgtancaanggggaccggtttaatgaaaaatggggtttccttaaaagggcccgaagnattttttggtnnaagggggantccttntcnggcggaatcccnancccgggggcccaattttaangggccccccngg

SEQ ID NO: 123314 - DNA, 502 bp, Arabidopsis thaliana
  unsure (1)..(502): unsure at all n locations
agaagaagaacatgttcaagccttttccaagttggtaactcaggaaggtgcacaaagccaagcgaaagagaagaagagtgtagatgatctttttgagaaccaaagcaagagtagtggatggtggagaaaaacctactgggcgttcttgaatgagccgagggaggaagagggtcgaccgaacaactacgtgtcgcaattcaaagttgctcacatcgccaaaattgcgggctcgtaatgacgctataatcaccggctaatcacatatatatctcgtgtgaaatgcgattagtcgtctgccgttgtggtttaatcaccggctaatcacatatatagtatgttggccgtgttagtatgtgaatgtgtgagtagagcatgtaacaaagggtgtacgattttaatgtaagaatgtgttttactttatatgtgtcatgtatgtatttttttggttgtgtgagggtgtaatttacttttcaatggatctccttaagtctttnccttgatg

SEQ ID NO: 123315 - DNA, 556 bp, Arabidopsis thaliana
cggacgcgtgcgcgtacgcccacgcgtccggaagattatcaatggcgtctccatcatcgtcaccgacaacaagaatctggttccgtacagtgatcttaatcgctttaatggtggttctcttctacgttggccgtcctctctactggaagatctctgccacaatccacgacatccgccacaacaaacaatccgtcagagaaggtatttctcagatcgtacacgaagcgcagagatcagtgggatggtatcacgacgaatcggattcagggttccgagaaggtcacaacaagaaatcgggaatcgccgtctctcggaggcttcttttcgccggagatcagtgagaaattttctccgatccaaattttcgaaatatcaagttctgatggagtctcttgttataaattatatatttcatgtttttaggtcaacaattagcgtatcgttttgtgatgataatgttaaatcggttaaacaagttatggattttgtttggcataaaaaaaaaaaaaaaaaaaagggcgaccgctctagaggatccaagcttacgtacgcgtgc

SEQ ID NO: 123316 - DNA, 495 bp, Arabidopsis thaliana
cggatggatcgttcttcaagcgtttgcagaaattgttagatccgttgcagcagagacttgcagatggatgccatttggcaagaaacacgagagagtgcatcttggaagctggttttagtggaggagttgaagtacagaccttttctatgtatagcttcccttggatgacaagacctcatatctatggactagcttacaactaaaactatcatctttattcaattacactaaaatgattggctttgaatgttttgattcgctgattgctgttattactaaataatatggagaaaaaatgctaattatgtgtaattaaaaagatttgattttgtggacagaatctgaagtagagaaaaacatatcttcatgttactcttatgctctgttttggtatatgagtaatttgagcttttgataagttaaaaaaaaaaaaaaaaaaaaaaaaaaaaagggcgaccgctctagaggatccaagcttacgtacgcgtgcagtcg

SEQ ID NO: 123317 - DNA, 607 bp, Arabidopsis thaliana
  unsure (1)..(607): unsure at all n locations
nnnnnnnnnnnnnnnnnnnnnnnnnnnnnnnnnnnnnnnnnnnnnnnnnnnnnnnnnnnnnnnnnnnnnnnccacgcgttcgcggacgcgtgggatcaagatcaccaccacaaggcaaaatctaaactctctctgcaaaatttctgctaacttcttcctcccattttcttgccatggaaatcgattccgccaccaacggaaactctgacaccgtcatgacggaatccgccgctacgatcactccgtcgccggtcgtcgtctcgtcttcgagatcgaatcaatttacggaatctctcaagcttgagcaccagctcctccgcgttcctttcgagcattacaagaagacgatccgtaccaatcaccgttctttcgagaaagaggtctcaaccattgttaacggcgtcggagaattggctgattccgattggtctaaagacgataccgtttcgcgtcttacttgccttgttactcgattacaaggcctcaaacgaaagttggaagaagggagcaatgtggagaatttgcaagcccagaggatgtcgtgctcgcatcgatcattggattcagagatgtggaaaatattactgaatggaataataccaaactg

SEQ ID NO: 123318 - DNA, 773 bp, Arabidopsis thaliana
  unsure (1)..(773): unsure at all n locations
tgcnnnnnnnnnnnnnnnnnnnnnnnnnnnnnnnnnnnnnnnnnnnnnnnnnnnnnnnnnnnnnnnnnnnnnnnnnnnnnnccacgcgtccgaagatcgtgagacttcaatcttcgtatgaagttcggttaaagaagagtccaaagttatcacctttggctgttctcggctgtattaacagaaaacttggacactgtgtttcaagaaaccgtatcattcaagtaaaaaaggtagaagctattgtattccggatcaaagcaacctccagacgtttcttgaaagcattccctagctttttggaggaaactgatatctacaaacgacgtgagctactcgaggagacaagtaatttagcggctgagcctgctccttcagctcctagtccttctcccgggattataactgaagcttcacctcgaagcagcgggtctttccctgcagtaaccaatgcaaagaagagaagaccacctttagtccctcctgtaccttctcctgataagggcagtactagtcctgatatctctaagaatcagccacaagataataaacagtcaaaaggatcaaaacatgtatggctgtatgtggttatcgcggttgcttctttcgtcggtttactgattatagtagcggttatcttcttctgccggaaaagagctgtcaagagcataggtccttggaaaactggtcttagtggacaattgcagaaagcttttgttaccggggtacccaagctcaatcggtctgagcttgaaacagcgtgtgaagatttcagc

SEQ ID NO: 123319 - DNA, 509 bp, Arabidopsis thaliana
cagctctatacgactcactataggaagctggtacgcctgcaggtaccggtcccggaattcccggggccgcccacgcctccgcggtcttgaaagcattccctagctttttggaggaaactgatatctacaaacgacgtgagctactcgaggagacaagtaatttagcgggctgagcctgctccttcagctcctagtccttctcccgggattataactgaagcttcccctcgaagcggcggggctttccctgcaggaaccaaggcaaagaagagaagaccaccttgaggccctccgggaccttctcctgataagggcagtactagtcctgatatctctaagaatcagccacaagataataaacagtcaaaaggatcaaaacatgtatggctgtatgtggttatcgcggttgcttctttcgtcggtttactgattatagtagcggttatcttcttctgccggaaaagagctgtcaagagcataggtccttggaaaactggtcttagtggaca

SEQ ID NO: 123320 - DNA, 613 bp, Arabidopsis thaliana
  unsure (1)..(613): unsure at all n locations
nnnnnnnnnnnnnnnnnnnnnnnnnnnnnnnnnnnnnnnnnnnnnnnnnnnnnnnnnnnnnnnnnnnnnnnnnccacgcgtgcgcccacgcgtgcgcccacgcgtccggtgtattcaatgagtttatcgagattataaattaaattgttccccgggttttttgataataaaaagttacacgcttttggttaaaaatccattgcattataaaattcaattatgatacaatgccacgtcactggaccacaatgttgccgtacgttatattgttgccggagtaaggtacacgtcgtcacggtgtcaggccgtttctttaaagagttgtcacgcatttaacggcgcgtgcgtctcacgtgacactctccttgtttgttggtgatttgttcattgattacagaaccaatcgtcggtacctaccaataaccgggcgatgtggatgggcaatctcttttggattactaagcggctcaccccggtggctccactggttacccttcatcacctcgacgggggcgaaccgattttcccaaacatgacacgtgttgatgccttgaagcatctacaagtcccggcaaagctagactctgctggacttatgcaacagtcgatatgc

SEQ ID NO: 123321 - DNA, 579 bp, Arabidopsis thaliana
cagctctacttcgactcactctagggaaagctggcacgcctgcaggtaccggtccggaattccacgggtcgacccacgcgttcgtccaatctgaagatcaatcataaccttaaaccatctctcataattttagtatttctattctcaccaccaaaactcgttgatacatcacaccccaactgttgttactcatgtcctacagatcgatttaccgcactcttcgaccggtactatcatcttcggtacaatcctccggtttaggaattggaggattcaggggacatctcattagccacttgcccaatgttcggctattgagctctgacacgtcatctccggtaagtgggaataaccagccagaaaatcctatccgaacggccgatggtaaagttatatccacttattggggtatacctcctactaagatcactaaaccggacggttcagcttggaagtggaattgttttcagccatgggattcatacaaaccggatgtgtccattgatgtaactaaacatcatacacccttcaatttcactgacaaattcgcatattggaccgttcaaactctgaaaatac

SEQ ID NO: 123322 - DNA, 609 bp, Arabidopsis thaliana
  unsure (1)..(609): unsure at all n locations
nnnnnnnnnnnnnnnnnnnnnnnnnnnnnnnnnnnnnnnnnnnnnnnnnnnnnnnnnnnnnnnnnnnnnnnccacgcggtgcgagggaaaatttagtagcaaacttctcgattccttgattcgtgggaaaaagaaagtctagatttttgtggattttgattttgtgattccgtgattgtatgaacttgagccgttttgcttcgagattaagaatggcggaagaaatctcaaagacgaaggtgggatcttcttctactgcttcggtggctgattcatctgctgctgcgtcggctgcaacgaatgcggccaaatcaagatggaaaattttgtggcctaattcgctccggtggattcctacgtccaccgattacatcatcgccgccgagaaacgtcttctctccatcctcaagacgccttatgtacaagagcaagtcagtattggttcaggaccaccaggttctaaaatcaggtggtttaggtctacgagcaatgagtcacgttacatcaacactgttacatttgatgccaaggagggagctcctacactcgtcatggttcatggttatggtgcttctcaagggtttttcttccgtaattttgatgctcttg

SEQ ID NO: 123323 - DNA, 979 bp, Arabidopsis thaliana
ctctctctctctctctccatctcttgtctttgccttttacgaagcttcccttcccttagtttatacattactctcagctctctttatttcactcagcttcacgttgaagacgagtttctctatttgccagatctgttatctttcacatttctggtgattgcttctctaatttcgttctgggttttactgcggccgcctgaaatttacctcatttcttcgtgggttttatctgaattccgttaattcccaagttctagtgtatgatctcgttgaaatcgagttaaaaatctgatctttactcttgattctgcagatctgtttgaagaaagctatgacttgtgtttgataaagagagaagcaaaaaaaggaacagtttttatataaagatatttgctttatttgtttgttcttaattgttgccacgaaaatggcaatgccaccacctggaaatgttactactccgtctgagaaattgcagtttcctcctccggcaaattggatcccagacgagcgagatgggtttatctcctggcttcgtgcggagttcgctgcggctaacgcgatcatcgattcgctttgtcagcatctacaagcggttggggatcacaacgagtacgaatccgtgatcggaagcattcatcatcgtcgcttagcctggtctcaagtgcttactatgcagcagtttttcccagttgcagatgtttcttacaatcttcagcagattgcttggaaaaggcaacagcaaatgccacctcaaaggcattacaattctgatcaagttgggaaatttggagcaaggagatcagggcctgggtttaacaagcatcatggtggtggtgggggttacagaggagctgattcgatggcgagaaatgggcataatttcaatggcgttaacagtgatcgtgttgagcatcgggaggaagctaagttggcaagtgatgttaaggcattgtctgttgcagaagagaagagagat

SEQ ID NO: 123324 - DNA, 500 bp, Arabidopsis thaliana
gggacccggcccccccctgcggtaggcgggatccctaagcaggggccgcccttgggggccgcggcttccttcccctaagttaatccattactctcagctctctttatttcactcagcttcacgttgaagacgagtttctctatttgccagatctgttatctttcacatttctgatctgtttgaagaaagctatgacttgtgtttgataaagagagaagcaaaaaaaggaacagtttttatataaagatatttgctttatttgtttgttcttaattgttgccacgaaaatggcaatgccaccacctggaaatgttactactccgtctgagaaattgcagtttcctcctccggcaaattggatcccagacgagcgagatgggtttatctcctggcttcgtgcggagttcgctgcggctaacgcgatcatcgattcgctttgtcagcatctacaagcggttggggatcacaacgagtacgaatccgtgatcggaagcattcat

SEQ ID NO: 123325 - DNA, 481 bp, Arabidopsis thaliana
cggacgcgtgggctctctttggtcaaaaaccctagatctctccctctctctctctctctctctccatctcttgtctttgccttttacgaagcttcccttcccttagtttatacattactctcagctctctttatttcactcagcttcacgttgaagacgagtttctctatttgccagatctgttatctttcacatttctgatctgtttgaagaaagctatgacttgtgtttgataaagagagaagcaaaagaaggaacagtttttatataaagatatttgctttatttgtttgttcttaattgttgccacgaaaatggcaatgccaccacctggaaatgttactactccgtctgagaaattgcagtttcctcctccggcaaattggatcccagacgagcgagatgggtttatctcctggcttcgtgcggagttcgctgcggctaacgcgatcatcgattcgctttgtcagcatctacaagc

SEQ ID NO: 123326 - DNA, 657 bp, Arabidopsis thaliana
  unsure (1)..(657): unsure at all n locations
aaaagtggggttggccttggggcncaatggngaaagtnttcaanngcnaatttacttttnanganggnncccctttggtntggnccaccaagggaggcttactgnttaagnncgccnccaaattnaaggggtgaacaccaaaggcccaatcttggacatggacgacggcaactctctcttcaacctcacccaaaacggaaccctatacttcacaagtgcaaaccccggccactgtaccaagtaccagaagctcctagtctccgtcggcacctactccgccgaagcagaggccttgtctccgtcttctgccgccgacgctccctcttaccaaaacgccttcgggtccattcctctctctcagaaatcgtctgcttcctcctcgctcatttctgctttctccactgtcgctgcttcgctggcttgcgctgtcgtcggtgcaatcatgtgatggaatttttgaatatctttatttattaaagcaaacagtcattgcttcttttttgttttgtttttgttatcatctcttaattatttattcttcttcattggctcccaaaaaaaaaaaaaaaaaaaaaaccaaagnnnnnnnnnnnnnnnnnnnnnnnnnnnnnnnnnnnnnnnnnnnnnnnnnnnnnnnnnnnnnnnnnnnnnnnnnnn

SEQ ID NO: 123327 - DNA, 528 bp, Arabidopsis thaliana
  unsure (1)..(528): unsure at all n locations
nnnnnnnnnnnnnnnnnnnnnnnnnnnnnnnnnnnnnnnnnnnnnnnnnnnnnnnnnnnnnnnnnnnnncccacgcgtccgcgccacgcggccgatcaagatgggagtgatgagtttgagcaagacgatggtggtggtggtattacaggtgatgatattgttgggacaagagattggtaaagtgtcgtcgactctatacaaagttggggacttggacgcttggggcatcccaattgatgctaaagtctattccaaatggcccaaatctcactctttcaagatcggtgactccctcttgttcttgtacccaccaagcgaagactcactgattcaagtgacgccctccaatttcaagagctgcaacaccaaagacccaatcttgtacatgaacgacggcaactctctcttcaacctcacccaaaacggaaccctatacttcacaagtgcaaaccccggccactgtaccaagtaccagaagctcctagtctccgtcggcacctactccgccgaagcagaggccttgtctcc

SEQ ID NO: 123328 - DNA, 686 bp, Arabidopsis thaliana
  unsure (1)..(686): unsure at all n locations
aggttaaaggtagattttngtagcgatnttggcatttntnttttaagcctaaggccctgtcttttgttatagatatccaagcttataaaacggaaaaggttcaggtttactaaatggattctctcccctttatctctgttggtgttatctactcatgctacatctatattagtgatggcttgtttttatgtatgtgaagtgctccgctcccctatataggtatgttgaggatgcaaaggtggcaagttctactttgatctatttttctcgaaattttcatctacagtcctcttttcattggagatgtctctatttctggttctatgctctgcattttcctatggtttaaatgctaatcacttcggctcgagatctactctttctacatgaattcattatcttcatataggaatttggatgatgctaggacgattctgtttcgacctgttcgcctagatttattggcaacgagggatggatgtaatcagcttttcttcccttatctgttttccctttctggttatgtaatctgcatcttctctatggtaatctcttctgcttcagatgaaatcattatcttcacataggagtttgtcttcacataggagtttggatgttgcagtggaagttctgtttcggcctgcttgcctacatcgccctatatctgttacatcatgagtttatga

SEQ ID NO: 123329 - DNA, 753 bp, Arabidopsis thaliana
  unsure (1)..(753): unsure at all n locations
tccnnnnnnnnnnnnnnnnnnnnnnnnnnnnnnnnnnnnnnnnnnnnnnnnnnnnnnnnnnnnnnnnnnnnnnnccacgcgtccgggctggtaaaggtgggaaagggcttctagctgcgaagacgacggcagcagctgcaaacaaagacagtgttaagaagaaatccatctctcgctcttctcgtgctggtattcagtttccagtgggtcgtattcatcgtcaactcaagcaaagagtttcagcacatggaagagttggtgccactgctgctgtttacactgcatcaattctagaatacttgactgctgaagtactcgagttagctggaaatgcgagcaaggatctcaaagtgaagagaattacaccaagacatttgcagcttgcaatcagaggagatgaggaacttgacactctcatcaaaggaaccattgcaggaggaggtgtgatccctcacatccacaagtcccttgtcaacaaagtcaccaaggattgagtttcgctctctgagtcctaagtctctattatactatgtgctcttttctagacgccctcatgtgtatatgggttcattgtatctcttaggtctctcgttttagactcatactcttgttattttgctaatgcttacatgattgaggataaaaaaaaaaaaaaaaaaaaaaacaaaaagnnnnnnnnnnnnnnnnnnnnnnnnnnnnnnnnnnnnnnnnnnnnnnnnnnnnnnnnnnnnnnnnnnnnnnnnnntacaatcc

SEQ ID NO: 123330 - DNA, 1032 bp, Arabidopsis thaliana
tctcaatcctctctctccaatggcttccttatccttcgtttcctcttctcaccttacgctacgcactccttctattgccctacgcagcactggctcttctcctcgaacctccgtttcattctccgtcaaggctcaatccgtcgcgctttcacaggacgatttgaagaagctcgcggcggagaaagctgtggaggcaattaaacctgggatggttctagggctcggaaccggatccaccgcagctttcgctgttgatcagatcgggaaactactctcttccggtgaactctacgatattgtcggtatcccaacgtcgaaacgaacggaggaacaagcacgggtcgttagggattcctcttgttgggttagatacacatccgagaatcgatctcgctattgacggagcagacgaggtagatccgaatcttgatttagtcaaaggtcgtggaggggctcttctccgtgagaaaatggtggaagctgtggctgacaagtttattgttgtggctgatgataccaaactcgttacagggactcggtggaagtggattagctatgccggtggaagttgtccaattcggctggaactttaatttgattagattgcaagacctcttcaaggaatttggatgtgaatcaaagcttagagttggtggtgatggcaagccttatgtggctgataacagtgattacattattggtttgtattttaagactcctttgaaggatggattcgttgcggctaaagagattggaaagtttcaaggagtggtggagcatggtctgtttctcggaatggctacttctgtcattatcgctggaaagaatggcgttgaagttatgtccaagtgaggttaaaagttcgatctgtctcttcttctttgattggcgaatttttctccccccaaaatttccagggggttttgtggaaaaaaaaaaaaaaacaaatagggttggcgctttagattataggatccgggccaggtacgcgtaaatgcaaagtcggagtgttcaaaggaacgaaattcaccc

SEQ ID NO: 123331 - DNA, 1033 bp, Arabidopsis thaliana
  unsure (1)..(1033): unsure at all n locations
cnnnnnnnnnnnnnnnnnnnnnnnnnnnnnnnnnnnnnnnnnnnnnnnnnnnnnnnnnnnnnnnnnnnnnnnnccacgcgtccgcctctctctccaatggcttccttatccttcgtttcctcttctcaccttacgctacgcactccttctattgccctacgcagcactggctcttctcctcgaacctccgtttcattctccgtcaaggctcaatccgtcgcgctntcacaggacgatttgaagaagctcgcggcggagaaagctgtggaggcaattaaacctgggatggttctagggctcggaaccggatccaccgcangctntcgctgggttgatcagatcggggaaaactactctctttccggtgaactctacgatanttgtcggtatcccaacgtcgaaacgaacggagggaacaagcacgggtcgttagggaattcctcttgttgggttagatacacatccgagaatcgatctcgctattgacggagcagacgaggactcggtggaagtggattagctatgccggtggaagttgttcaattctgctggaactttaatttgattagattgcaagacctcttcaaggaatttggatgtgaatcaaagcttagagttgatggtgatggcaagccttatgtgactgataacagtaattacattattgatttgtattttaagactcctttgaaggatggattcgctgcggctaaagagattgggaagtttcaaggagtggtggagcatggtctgtttctcggaatggctacttctgtcattatcgctggaaagaatggcgttgaagttatgaccaagtgaggttaaaagttcaatctttctcttcttctttgattgacaaatttttctcctttgtaaaattatcaattgagtttttatgtgagatcatttccttttcgtgaattcgacaaaatcagnnnnnnnnnnnnnnnnnnnnnnnnnnnnnnnnnnnnnnnnnnnnnnnnnnnnnnnnnnnnnnnnnnnnnnnnnnnnnnnnnnnnnnnnnnnnnnnnnn

SEQ ID NO: 123332 - DNA, 476 bp, Arabidopsis thaliana
gtccgaaaaaataattaagagagaaaaaaacaaaaaacattttccatctctctctctctctctctcgcctgcttcaagaaatggatcggcaaagttccgatgacatcatgaaatttctcgacggcatggctagctccgacgatgttctttttggcttcctcgacgaaggaaaccactcaccggaggattataacttcgccgccggcgacgaatccgaagttgacaacgataccaccgattgtaattcagaagagaacagaaaattttggcaagaacacgaacaacttctccaggcgacactgtataggacaagttcaattgagacaaagataagacaagcaactaaggaagcgttgaaagtagttagatcaaagggtttggtatgtgtctgccggagaccggttaccgacggttgtcgtagctgtttacgcggcgaagtatctagcctcctccgagaagctggctatgattgcgtc

SEQ ID NO: 123333 - DNA, 994 bp, Arabidopsis thaliana
  unsure (1)..(994): unsure at all n locations
nnnnnnnnnnnnnnnnnnnnnnnnnnnnnnnnnnnnnnnnnnnnnnnnnnnnnnnnnnnnnnnnnnnnnctcgcgggtcgacgccacgcgcccgtccgctgcgagatgacgacagaaggggatcgaaacaaaaaataattaagagagaaaaaaacaaaaaacattttccatctctctctctctctctctcgcctgcttcaagaaatggatcggcaaagttccgatgacatcatgaaatttctcgacggcatggctagttccgacgatgttctttttggcttcctcgacgaaggaaaccactcaccgaagtatctagcctcctccgagaagctggctatgattgcgtcatttccaaatctaagtggagaagctctcatgagatccctgcaggtgagcatgaatacttggaggtcgtggacaaatcggtttcaaagaaaggcgagatccgggtggtgatcgaactatgttttagggcggagtttgagatggcgagaggcagtgaagagtacaagcgactcatcggaatgttaccggaagtgtatgtcgggaaaacggagaggctaaaatcattaataaagatattgtgcaccgcagcgaagaagtgtatgaaagacaagaagatgcacatgggtccttggagaaaacacaaatacatgcaggctaaatggtttggaacttgtgagagaaaatctgtgtcgccagtatccgaaactgaggagaatatgtttccggtggcaaagcagagggtttctatgttgaattatggtctttttggtgctggaataggccgtccgaccgttgtagcggttgtgtgaaacatctatatagacgtacgaatacgataagttaggaggaaataaagtgaaatgagtttcactttgaaattttgcatgatattgtctcagttagaattttgtgtgtccaaaacagggtaatttctgggactattatggtatacaaagcggtattttaatnnnnnnnnnnnnnnnnnnnn

SEQ ID NO: 123334 - DNA, 780 bp, Arabidopsis thaliana
ggggttccgggaaatttacccggggggtcgcaccccaacggggtccaggtttttgatttggacttgtgggattgggacacctgtaaaaagagcccaaaacgaaaatggctggaagattgagcggtgttgcgtcacgaatcatgggtggaaacggcgtcgttgcccgatccgtcggttcttctctccgtcaacgcgccggaatgggtctccccgtcggcaaacacatcgtccccgataagccgctatcggtaaacgacgagctgatgtgggacaacgggactgcgtttccagagccttgcatagatcggattgctgataccgtcggaaagtatgaagcattggcatggttgagtggcggattagggttctttgttggtctcggtctgctcgctgttttgaacgacaaagcttctaaggttccatttacaccgagagtgtatccatatgacaacctgagagttgagcttggaggagagccatagagacccatctaagtgatctgctcatcaaaacaggaagcgtgttttcttcactgctttgttctttaaaatgtttgttgtttcctgcttagaacttgaagacaaaagaataaaaagaagactttgtttttattatatgcgttgtctgtgtaattaacagtgtccagtgagagagatccataatataagacctctggttcaggaaatcatgagttgtgatttgtaaaaaacaaatcgaaagagtaggtcggccgctctagaggatcccagcttacgtacgcgtgcatgcgacgtggtagct

SEQ ID NO: 123335 - DNA, 643 bp, Arabidopsis thaliana
  unsure (1)..(643): unsure at all n locations
aaaaagggggcgggggacgcgtaacattctctctctatctgtaattttttttgtttttggatcgaaacctgaaaagagcgaaagtggctggatgattgagcggggttgcgtcacgaatcatgggtggaaacggcgtcgttgcccgatccgtcggttcttctcctccgtcaacgcgccggaatgggtctccccgtcggcaaacacatcctccccgataagccgctatcggtaaacgacgagctgatgtgggacaacgggactgcgtttccagagccttgcatagatcggattgctgattccgtcggaaagtatgaagcattggcatggttgagtggcggattagggttctttgttggtctcggtctgctcgctgttttgaacggcaaagcttctaaggttcctttacaccgagagtgtatccatntgacaacctgagagttgagctttgnngaganccattagagnccccatctaaagtaatcttcttatnaaaaacaggaagcgtgtttcttcaactgnttttgnccttaaaaatgtttgtngtntcctnctaaaacctttaaggcaaaagggttaaaaanaggcttttttttanaaaatcgngttgncccgaaaaaanaagtncccgtnggnnnnccctnaa

SEQ ID NO: 123336 - DNA, 895 bp, Arabidopsis thaliana
ctgcaggaaccgggccggccgggtcggcccacgccgtccgtttactcttctccatcaggggtccgatcccatctccaattttaaaccctagaaatcaatctcaaaagcaagcgtgcttcattaatggcgagcttcattctctccaggtcattactcgttctactcctgtctctcaccgcattactctccagcatctcgatttcggaagctacctcatcgttctcgttcacaagctccggtaaaaatgcgagctttgagtccgaagactttgccctgtacggcgacgctaagctcgtcgacggcggatcttcgattcagctgactgactcagtgagtcacggtggtgggcgagtcatctataagaaacccattgagtccatgaacaatataaaattcgagtatttcaccggattctctactttcttctctttctcgatttctcctagtcgtggtgggagactcggatttgtagtgtttcctgttaatgaaacgtttaatccctcttttttcaagaaaattccatcctttaacgtttccccaaattggaaatttctatttccccgtatttgttgagggccctccgtgtcctaaaagatttcaatttccccatccccaaacttgaaaaaaccagaaaggtttttttcccccttaaattaataccacactgtggccaactcctaaaaccccgtaaaaaaacaaaaagcttaaaccgttctccttgatggcgacccattttctccccacattttaaaaagaaaaattcttgtcctctactccgtagggaaattaattcctttttgaattaaaaagaacctccctttgacctcttcccccctcttagaccccttaaaaggacacttaagagagccctaaaaacacattgggtggggggttc

SEQ ID NO: 123337 - DNA, 1039 bp, Arabidopsis thaliana
  unsure (1)..(1039): unsure at all n locations
tggtcacgcctgcaggtaccgggccggaatacccgggtcgagccacgcgctccgcaaatctctctttctctcaaactctctcaacaacaacaatggcgtctcttcaacaaactctattctctcttcaatccaaactcccaccatcctccttccaaatcgccagatctctcccactccgaaaaaccttcccaatccgaatcaacaacggtggaaacgccgccggagcaagaatgtcagccaccgcagcatcaagctacgcgatggcattagcagacgtcgcgaaaagaaacgacacaatggaattaacagtcacagacatcgagaagctcgaacaagtcttctcagatccacaagtactaaacttcttcgcgaatccaacaatcaccgtcgagaagaaacgtcaagtcatcgacgacatagtgaaatcgtcgtctcttcaatctcacacatctaacttcctcaacgtcctcgtcgacgcgaatcggatcaatatcgtgacggagatcgttaaggagtttgagttggtttacaataagctaacggatacacaattggcggaggttaggtcggtggtgaaattggaagcgccgcaattagctcagattgcgaaacaggttcagaagttaaccggagctaagaatgttcgggttaagacggttattgatgcgagtcttgtggctggttttacgattcggtatggtgaatccggttcgaagcttattgatatgagtgtgaagaaacagcttgaagatattgcttctcagcttgaacttggtgagattcaattagctacttgagatttgggaaaaattgtataagagaaaaatttgagaatcttttttttttgtgcaagtttaattttttttctcctcatcttctttctctattaatcaatcatataatatacagtactgatgatataataatgattctgagtttattatcaaaaaaaaaaaaaaaaagnnnnnnnnnnnnnnnnnnnnnnnnnnnnnnnnnnnnnnnnnnnnnnnnnnnnnnnnnnnnnnnnnncagctcaatt

SEQ ID NO: 123338 - DNA, 499 bp, Arabidopsis thaliana
  unsure (1)..(499): unsure at all n locations
nnnnnnnnnnnnnnnnnnnnnnnnnnnnnnnnnnnnnnnnnnnnnnnnnnnnnnnnnnnnnnnnnnnnnnnccacgcgtgcgcccacgcgtccgccgcaattagctcagattgcgaaacaggttcagaagttaaccggagctaagaatgttcgggttaagacggttattgatgcgagtcttgtggctggttttacgattcggtatggtgaatccggttcgaagcttattgatatgagtgtgaagaaacagcttgaagatattgcttctcagcttgaacttggtgagattcaattagctacttgagatttgggaaaaattgtataagagaaaaatttgagaatcttttttttttgtgcaagtttaattttttttctcctcatcttctttctctattaatcaatcatataatatacagtactgatgatataataatgattctgagtttattatctttgtaattgttaaatttagtgaattcgaatagtatgtttgcggatt

SEQ ID NO: 123339 - DNA, 769 bp, Arabidopsis thaliana
  unsure (1)..(769): unsure at all n locations
nnnnnnnnnnnnnnnnnnnnnnnnnnnnnnnnnnnnnnnnnnnnnnnnnnnnnnnnnnnnnnnnnnnnnnnnnnnnnnnnnnnccacgcgtgcggccacgcgtccgatcgtgatcttaaagctagcaacattcttttggaccaagaaatgaatccgaaaatcgcagattttggattagctaaactctttgactcaggccaaaccatgacacatcgattcacaagcaggattgcaggaacttacggatatatggctccggaatacgcaatgcatggacaattctctgtgaaaacagatgttttcagcttcggtgtattagtcattgagatcattacaggtaaaagaaacaacaatggtggatcgaatggtgacgaagatgcagaagatcttcttagttgggtgtggagaagctggagagaagacactatactaagcgtgatcgatccgagtttaaccgcaggatcaagaaatgagatcttgagatgcatacacattggtcttttatgtgtgcaagaaagtgcagcgactagaccaacaatggctacggtttctctcatgctcaatagctattcttttaccctcccgacgcctttgaggcctgcgtttgtgttggagagtgtcgtcataccttcaaatgtttcttcttcaacggaagggttacaaatgtcgtcaaatgatgttactgtttctgagttttctcctcgttaatctgtaaatgttttgattcttctctgaaaacctttgaaatgggttttgtttgtgtgatttt

SEQ ID NO: 123340 - DNA, 838 bp, Arabidopsis thaliana
  unsure (1)..(838): unsure at all n locations
ctttatagctcctctctatcgtctcgtctctataaataaacgagaagctcacaaattccacaaaaatccactctaactatgaaacaattagggttttgaaatttacctaaatctctccgtaatcatcgatcaaaacgatgctcgagtgtcaatcaatgatggagaaattatcaccgttcgtagacgtcgcctctctggaaatcgagtctctgcgaagaatcaaacgcccgaaacgcttctctgaagaagaatcagaagaaaccgagaatacgacgaattcatcaaacgcggtattcggattccctaacttaccagaagaaccgaatcgcgatatggatcaaagcgttttgtgcagaatctgcgttcgattaccagatgggagaagaatacagagaagtttcttaaagagtgaatctgttcagcttctttggtcgttttgttattcgcagattggtgatgaatcttctgagagaaagcggcgttttaaattgattcaagggtttcctggggattataagaatctttattttggatctaatactacttttgaacaatctgggcttgctaattccttggtttctgttacttggctctgaagaatcttctttcgatctgtaattagaaaaataatttctttcttctaccaagtttatgtttactcaatttctcgaatttgtacttggaaattgcaaatttcatttggttttcttgaatcgttgttagatatttccgatcaaatcgtttttaaaaaaaaaaaaaaaaagnnnnnnnnnnnnnnnnnnnnnnnnnnnnnnnnnnnnnnnnnnnnnnnnnnnnnnnnnnnnnnnnnnnnnnnnnn

SEQ ID NO: 123341 - DNA, 558 bp, Arabidopsis thaliana
tgatacgtcagctctatacgactcactatagggaaagctggtacgcctgcaggtacccggtccgaatttccggggtcgacccacgcgtgccgcagcggcaaaaaagttctgaaaatgcagtttctcgagtatcatttggtgcagatcataaaagagctgaggtgatgggtaaaccaatggagaacagagaccaggtgaggcaaacagaatcagctgagaagagtcaccgcaaggaaaatgtgaccaagagtgagaaaccaagggatcaagaaggggtaaagaagactgaagcaaaggataaagacagaaataaagagaagaaagaggaaaaaacagagtcgataaataaaactcgtcaggagaaaccaaaattgatacgagggcccaagttagaggaaagagaaaaggactctccggatttaagaaattgcaagctgcctgacgtttcacggacaagcatcaagaaccttcacaccgagggaaatcttggcaaacggaaggatcatatgacaaatggattcctgtatgaaaatggaaccacgccacacaagttacaga

SEQ ID NO: 123342 - DNA, 574 bp, Arabidopsis thaliana
  unsure (1)..(574): unsure at all n locations
nnnnnnnnnncnnnnnnnnnnnnnnnnnnnnnnnnnnnnnnnnnnnnnnnnnnnnnnnnnnnnnnnnnnnnnnnnnnnnnnnccacgcgtccgcccacgcgtccgcggacgcgtgggattgatttgtctactccaaattcgcaagaaaacgtgaataaatttgagaaatcacagaattatttgatattttgtaaattaactaattattgatatagaagaacaaattaatacaatggactaatgtcatagagcaatttttttttgctaaacttcaggatttaactcattcttcttcttgttcaagtggttgctgattctgaaatctcttcttcaataacttaggtcttggtttcataggcttcaagtacttagattgaaatctaaccatctctttcaaaacactaatcagcttcctctctatttcttcaccgtcaggttcaatagctcctaagcaccgtgccacagcctccgccgtagttacacatcctccgaatggttccttccttagcacaagctctgaatcgtagatggttcctccactcactgatgcgtctatttccgtatccaaacacac

SEQ ID NO: 123343 - DNA, 546 bp, Arabidopsis thaliana
  unsure (1)..(546): unsure at all n locations
atgatctnnnnnnnnnnnnnnnnnnnnnnnnnnnnnnnnnnnnnnnnnnnnnnnnnnnnnnnnnnnnnnnnnnnnnnnnnnnccacgcgtccgggacaatgatcggcatgctcattcgatttgacagtaacccaggagtaactccagaatggctaggcagtgcattgatcgctgttgctattgctactttcataagtctgtccatggtatacctgctggcctatattcatctctccggtgcaaaaaagtcgattgtcacagcattatgcattatcactgccctctctcttgctcttgtatcttctggtgttcttcctgcatttactgaggatactgcaagagcagtaaatgtagtacatgttgtggatacaagcgggcaagatcaagtggcgtttatatcactattctcaaacactcctggaaacctaaacatggaagcagagcaaatcaaagaagggttcagatgtggtagagagaataagattgattttgtcagttttaaacctaaatccaatggggtgacaaaaaggacccagaggtggttgg

SEQ ID NO: 123344 - DNA, 779 bp, Arabidopsis thaliana
  unsure (1)..(779): unsure at all n locations
cgtctgcagtaccggtccggaattcccgggtcgacccacgcgtccgcagaacaattccctatctagaagagagataaaaccgagatggttttggagatagaatcttttgttcttcttttgtccctccttgctcgatttttgttgcgtgtcacgcgataacaaaaaactgatatagctaaatcttccatccattcagaggcttctaaatctgatctgacatggaacaagtgtttgctgattggaattttgaagataattttcacatgtccactaataaaagatcaatcagaccagaagatgaattagtggagctattgtggagagatggtcaagtggttttacaaagccaagctcgtagagaaccgtcagtccaagtccaaacccacaaacaagaaaccctaagaaaacccaacaatatttttcttgacaaccaagaaacagtacaaaagcctaactacgctgctctagatgatcaagaaaccgtctcctggatacaataccctccggatgacgtcatcgaccctttcgaatccgagttctcctctcatttcttctcttcgatcgatcacctcggaggtcctgagaagccacgaacgatcgaagagacagttaagcatgaggctcaagccatggctccttctaagtttagatcctcggttataacagtcggacccgagtcattgcgggcagcaacccagtccaacaaatatttcatcanggccacctacacttttccggttttctaatgaagtgataggaagccaagaaacgttcgaaaa

SEQ ID NO: 123345 - DNA, 755 bp, Arabidopsis thaliana
  unsure (1)..(755): unsure at all n locations
atgatcctgccnnnnnnnnnnnnnnnnnnnnnnnnnnnnnnnnnnnnnnnnnnnnnnnnnnnnnnnnnnnnnnnnnnnnnnnccacgcgtccgtggcaagaagaaccttagcctctctttcttctttctctctctctctctctgtgttactgttctgtttcaactttactccctcagtttcagaacaattccctatctagaagagagataaaaccgagaaggttttggagatagaatcttttgttcttcttttgtccctccttgctcgatttttgttacgtgtgaagcaataaaaaaaaactgatatagctaaatcttccatccattcagaggcttctaaatctgatctgacatggaacaagtgtttgctgattggaattttgaagataattttcacatgtccactaataaaagatcaatcagaccagaagatgaattagtggagctattgtggagagatggtcaagtggttttacaaagccaagctcgtagagaaccgtcagtccaagtccaaacccacaaacaagacaaccctaagaaaacccaacaatattttttcttgacaaccaaggaaccagttcataagcctaacctaccggtgctcttggttgttcaagaaacccgtntcctgggtacaatnnccnncggttgcgggattgcccctttggatccgggtttccctcatttttcttnnntcggcatttggggcnttgggcngncgtcgnggcantaggttgggtagcntggctnagttt

SEQ ID NO: 123346 - DNA, 381 bp, Arabidopsis thaliana
gattgttttcacagatccatcgtctccatgagatctctgtgaataacattacttctctttctcaaactcagactctcaataacacaaaaacccagatctttctctctcttcaccacagaaaaaaatcgaaactttatttttgcttgatgaagagcaaaatccaccaccagcccaatggtagcaacaatggtgttgtttcaagtaacgataatggctgccgaagtgagtctccaagcccacctttatctccaaaccgccgtgtcctccgtcgtcaacggcggcaaactttactcagagcttcttctttctctctccggagaaatcttcgttacttgcttctccttcctatgatttacgcttctgggcttctcatgtgtgttg

SEQ ID NO: 123347 - DNA, 536 bp, Arabidopsis thaliana
  unsure (1)..(536): unsure at all n locations
ctttctctctctgtctttccttgttcaaccctcgagagattacggatagtgaaagagaagctacaaaatttcccaatttatcaaaaaatagaaatttcttacttttttcaaaattcatttctccccaaaaaaaatatcttgtgaaaactgcaactgtgatccatggcggaggatatggctgccgacgaagttacggctcctcctcgtaaggttcttatcatctccgctggtgctagccactccgtcgctcttctctctggtgacattgtttgttcttggggtcgaggagaggatggacagttaggtcatggcgatgcagaggatcgaccttctccgactcagcttagcgctttagatggccaccaaattgtttccgttacctgtggtgctgatcacactgttgcttattcacaatcaggcatggaagtctacagttggggatggggtgattttgggagattaggccatggtaactcaagcgacttgtttactccgctaaagaattcacggtttcgcncaagagntctttggggngt

SEQ ID NO: 123348 - DNA, 641 bp, Arabidopsis thaliana
  unsure (1)..(641): unsure at all n locations
atttctcactctctcgtcttcttcgtctgagctatcaaactccagtcaatggcgatgatgacgacgacgacgacaacattcttccatccactacttcctgctaacacttacaaatccggagctgtagcttcttcctttgtctcagttcctcgttcgtcgtctctccaatttcgctcacttgtgtcagattctacgtcgatttgtggtccaagtaagttcaccggaaaaaacagaagagtatcggttaccgtttccgccgccgcaacaactgaacctctcaccgtcctcgttaccggtgccggtggaagaacaggacaaattgtgtataagaaattgaaggagaggtcggagcagttcgtggcaaggggtttagtgaggacaaaggagagtaaggagaagatcaatggagaggatgaagtattcattggagatattagagatactgcatcaattgctcctgctgttgaagggattgatgctttggtcattcttactagcgctgttccgcagatgaagcccggttttgatcctagttagaggagggagaccctgaggtcttttttttaaatgatgggcgttttnnagnaccanggtttcctnggtttggccanaagattccggtagccggtgcttaggcttca

SEQ ID NO: 123349 - DNA, 761 bp, Arabidopsis thaliana
  unsure (1)..(761): unsure at all n locations
atgatttgccnnnnnnnnnnnnnnnnnnnnnnnnnnnnnnnnnnnnnnnnnnnnnnnnnnnnnnnnnnnnnnnnnnnnnccacgcgtccggatgctttggtcattcttactagcgctgttccgcagatgaagcccggttttgatcctagtaaaggaggaagacctgagttcttctttgatgatggagcttatccagaacaggttgactggattggtcagaagaatcagatagacgctgctaaggctgcaggagttaagcagattgttttggttgggtcgatgggaggaacaaacattaatcaccctctcaatagtattggcaatgctaacattctggtctggaagagaaaggctgagcaatacttggctgattccggtattccatacaccatcatcagggctggaggtctgcaggacaaggacggtggcattcgagaattacttgtgggaaaagatgacgagctacttgagacagaaacaagaacaatcgcaagagctgatgttgcagaagtctgtgttcaggcattgcagcttgaggaggcaaaattcaaagctcttgacctggcctcaaagcccgagggaacaggcaccccaacaaaggatttcaaggcgcttttcactcaagtaaccactaagttctgattaagtatttttttgttccctttgtcattgtagcaaagtcctagaattgacactgagagggatgagttctttatgtgtctgaaccggctctttctatttctaaagatgtcttgccctag

SEQ ID NO: 123350 - DNA, 757 bp, Arabidopsis thaliana
  unsure (1)..(757): unsure at all n locations
nngcctgcggtaccggnccggaattcccgggttgacccacgcgtccgccacgcgtccggctgcgagaagacgacagaagaggaaaggagatcagtttgggagaaagcagcaaagaagaaaaatggcagcaacatttgcaacaccatcgacggtgataggcctcggaggatcatccatcaccaccaaacccttctcttcatcctttttaaaaccaacattaagcgccaagaaccctttgagactcgccggtgcatcgggaggaagagtcacttgctttgagaggaactggttgaggagagatttgaacgtggtaggatttgggctgatcggatggctagctccgtcgagcattccagcgataaatgggaagagcctgacgggtctcttcttcgatagcatcggaactgagctcgctcacttcccgactcctccagctctcacttcacagttctggttgtggttggttacgtggcacttaggcctcttcctctgcctcactttcggacaaatcggattcaagggcaggactgaagattacttctaaggataactattcttgttttcgtttgtactatatgctctctcttggttatgtgtaatattatcaatcaaaacaaagctttctttgctatttgatgtttcattctaaaaaaaaaaaaaaaaaaaaaaaaaaaaaaagggcgggcgctctagaggatccaagcttacgtacgcgtgcattgcacgtcatagctcttttnnnnnnnnnnnnnnnnnn

SEQ ID NO: 123351 - DNA, 784 bp, Arabidopsis thaliana
caaagatcaaaaaacgccgctcctcttcacacagttccatcttcttcaacttcagaggtgaaaaatgagtcgtggtaacgcagcagcagctaagggaaagaagaagggagtttccttcactatcgattgttctaaacctgtggatgataagattatggagattgcttctttagagaagtttcttcaggagaggattaaggttggtggtaaagctggtgctcttggtgattctgtttctatcactcgtgagaagagcaagatcactgtcactgctgatggtcaattctccaagaggtatcttaagtacttgacaaagaagtacttgaagaagcacaacgtgagggattggcttagagtgattgcggcgaacaaggaccgtaacctctatgagttgaggtacttcaacattgccgagaacgaagctgaggaagaagattaaaaccggttttggtctagtgctatatcctctgttcctctatttctgttggtttggttttgattcttcagttttgtgttagatattattatgtagtttgattgaagtaatactctttgcttttgttgttgcgtacttgagattttctatggagtctatttcttccaaacagtaatgatgtgaaattggactaatatgatttagggtttgattaaaaaaaaaaaaacaaaacccaagggcggccgctctataggatccaagcttacgtacgcgtgcaggtgacgtcaagatactctataggtgtccccttatttcccccccccgcgcgcccgaggcggccgactaagg

SEQ ID NO: 123352 - DNA, 423 bp, Arabidopsis thaliana
aaaagacgccgctcgtctcttcagagaatttcaccttctagggtttgttcaagagaagtcttgggaaaatgagtcgtggaggtgcagctgttgccaagggaaagaagaagggagtttccttcaccattgattgttcaaagcctgtcgatgacaagatcatggagattgcttcccttgagaagtttcttcaggagaggatcaaggtcggtggcaaagctggtgcacttggtgattctgtcacaatcacacgtgagaagagcaagatcactgtcactgcagatggccaattctccaagaggtatttgaagtacttgacaaagaagtacctgaagaagcacaatgtaagggattggctcacagtgattgcagcaaacaaggaccgtaacccctatgagttgaggtacttcaacattgctgagaacg

SEQ ID NO: 123353 - DNA, 621 bp, Arabidopsis thaliana
  unsure (1)..(621): unsure at all n locations
nnnnnnnnnnnnnnnnnnnnnnnnnnnnnnnnnnnnnnnnnnnnnnnnnnnnnnnnnnnnnnnnnnnnnnnnnnnnnnnnnnnccacgcgtgcgcccacgcgtccgaaactgttgaatctttgtatttatttacatctcctttgacctttaataagaatctgagtggttggtctctgatttgatgagatgactgttgagctgatgatgagcagctacagcggcggcggaggaggaggtgatggttttcctgcaatcgccgcggcggcgaaaatggaagataccgctttgagagaagctgcttctgcagggattcacggtgtggaggagtttcttaaactgatcggtcaaagtcaacaaccaacggagaagagtcagacggagataaccgcggtgactgacgtcgccgttaacagcttcaagaaggtcatttctctactcggtagatctagaaccggacacgctagattcagacgagctcccgcgtcaacgcaaacgccgtttaagcaaacgccggtggttgaggaggaggtggaggtggaggaaaaagaagccagaaacaagctccgtgttaacataacagaaaacagagcaatatcacggtggtggatctgcgtttagag

SEQ ID NO: 123354 - DNA, 900 bp, Arabidopsis thaliana
  unsure (1)..(900): unsure at all n locations
aggtgacactatagaaagactatgacgtcgcatgcacgcgtacgtaaggctgggatccctctagagcgggccgcccttttgttttttgggcggcaaaatggggtaaagaaattaggggaaaccggggtggtcaaacctggcttaccattaaattttttggcagaaccagcaaaggcttatctaattggcttaggaaacgagcttggacctaccctaagtcggggagaatggatttgtctgagcacagtaaatccaaccgacctatggcgagacgccacttcgccggaaacctaaggatttagagagagaaccgcatatcgttgactctcctcctttttcactctcttcatttattcttcccctcatcatcatcatcatcttcttctttaaccaaaaacacaacttacaagaaaactgttgaatctttgtatttatttacatctcctttgacctttaataagaatctgagtggttggtctctgatttgatgagatgactgttgagctgatgatgagcagctacagcggcggcggaggaggaggtgatggttttcctgcaatcgccgcggcggcgaaaatggaagataccgctttgagagaagctgcttctgcagggattcacggtgtggaggagtttcttaaactgatcggtcaaagtcaacaaccaacggagaagagtcagacggagataaccgcggtgactgacgtcgccgttaacagcttcaagaaggtcatttctctactcggtagatctagaaccggcacgctagattcanacgngctcccggtcaacgnaaacgccgttaagcaaacgccgttggttaggaggagttgaggttnggagagagccgaacaagtccgtttacaacagaacaggcatttacggtggtggnctcgttgc

SEQ ID NO: 123355 - DNA, 549 bp, Arabidopsis thaliana
  unsure (1)..(549): unsure at all n locations
cgnnnnnnnnnnnnnnnnnnnnnnnnnnnnnnnnnnnnnnnnnnnnnnnnnnnnnnnnnnnnnnnnnnnnccacgcgtccgcccacgcgtccgcccacgcgtccgctgagcagcacaagtctgcgagatttggattagatctgattcaggttggattgatcatcgttcggagctccgggaaacatggcggcgacgagacaattacgaactctccaatctcagcctgaaaacaaggtatgtgtcgattgcgctcagaagaatcctcaatgggcgtcggtttcgtacggaatcttcatgtgtttggaatgctccgggaaacaccgaggcttaggcgttcacatatccttcgtcagatccgtaaccatggattcatggtctgcgatccagattaagaaaatggaagctggtggtaacgaacggctcaacaaattcttcgcgcaatacggaatcgctaaggagacagatattatctccaagtacaattcgaacgctgcttctgtgtatcgtgaccggatccaagctttagctgaaggtagaccatggaatgat

SEQ ID NO: 123356 - DNA, 563 bp, Arabidopsis thaliana
cgtttattccaattattttagggaaggctggtccccttgcaggacccggcccggatttccggggtcgacccaggcgtccgaaaccatcattttctgaatctgtcaaaccaaaagagttcatggagactttgctgcagaagcttaaagactcactagccatagcacttgtccatttctatcctcttgcaggtcgtctctctactttgaaaaccgacaattcaagatctcactctgtgtttgtggattgtaataatagtcctggtgctagatttatccatgctgaatcagatctaagtgtgtcagacattcttggatccacatatgttcctttggttgttcaatctctctttgatcatcacaaagcattgaatcgtgatggttacaccatgagtctcttatcaatcaaggtaacagaactggtagatggagtgttcataggattgtctatgaatcattcccttggagatggaagttccttctggcagttcttcaactctttgtctgagatcttcaattcacaagaagaaaccattgggaataacaaccacaacaacaacaacgca

SEQ ID NO: 123357 - DNA, 839 bp, Arabidopsis thaliana
gctctctacaactcacttagggaaagctggtccgcctgcaggtaccggtccggaattcccgggtcgacccacgcgtccgcagaacaaaccaaccttctagattcttctccttccttcttcaactctctctcacttctccagatatggttacatctccgacgaactcaacaatcaaatttctctgtagctatggcggcaaaatcctacctcgttatcccgacggtaaactccgttacaacggtggtcacactcgcgtcctcgccgttcctcgctccgtctcattttccgagttagcgtcgaagatggcggagatgtgcggcggcgtcggcggatctataaccgtaacgatccgatgtcagcttccgacggaagatctcgacgcgctcgtttcaattacttccgatgaagatctagtgaatctaatcgaagagtacgatctcgtttcctcttcatctccgatgaaaatcagagtcttcttaaatccaccaaaatccgccgccggatctaaaaaatctcctcctccgttagcgttaccgtcatcaaccaccacgtcatcatcttccacaacttcctctacttcatcaagtcctagatctccgtctctatcaaaaccaccgctacctccgtctccaccgagaataacgacggttacgaagaatccgtgttatggttgttatgttcaccgtaattccagaaatatctaccttgttcacaacggcaatcactggcaataacgtgaagaatcttcgaatatccgattaaaaaaaaaaagaatcttcgttttttttttctaatgtaaaaaagagcgagagattataatagaagggtgaacgtgatct

SEQ ID NO: 123358 - DNA, 510 bp, Arabidopsis thaliana
  unsure (1)..(510): unsure at all n locations
cagaacaaaccaaccttctagattcttctccttccttcttcaactctctctcacttctccagatatggttacatctccgacgaactcaacaatcaaatttntctgtagctatggcggcaaaatcctacctcgttatcccgacggcaaactccgttacaacggtggtcacactcgcgtcctcgccgttcctcgctccgtctcattttccgagttagcgtcgaagatggcggagatgtgcggcggcgtcggcggatctataaccgtaacgatccgatgtcaagcttcccgacggaagatctcgacgggntcgtttcaattaactttccgatgaaaggattctagctggaatcttaattcgaaggggtaccgatctccgttttccttcttcaatcttcctccggtggaaaatcaagaggtgtttcttaaaatcccccccaaaaatcccgccgccgggttttaaaaaaaaantccntccccccggttaggnggtancccgtnattaaacccacc

SEQ ID NO: 123359 - DNA, 527 bp, Arabidopsis thaliana
cctgcaggacccggcccggatttcccgggtcgacccaggcgtccgcccacccgtccggattctgattctgatgaatcgctgggagactgggcaaatttggaaacaatgaggagttgtcatcccatgttttttgcaaagagaatgactgaggttgcttcaaatgatcctgttgattggatggatcagccgtctgctggccttgctatccagggacttttgagtcatatcttagtggaagattattcagatatccaaaagaaacttgctgatagcaattctacaactaacggaaacaaggatgcagaaaacttagtggacaagcttgaagacaatagtaaggcaggtggtgacgaatctgagatagattcatcacaggatgaaaaagcaagaaatgtggtggcgttttacaagctggagatgataagaattcagcttatcacagcacaaggggatcagactgaagttgaggtggaagatgtcagaaaagcacaacctgatgctattgctcatgcatcagctgaaatcat

SEQ ID NO: 123360 - DNA, 821 bp, Arabidopsis thaliana
gaaaacaatttcccccaggaaccagctatgccctggttacgccaagttctaaaaggccccacataaggaaaagctggtacgcctccaggtaccggtccgaaattcccgggttcgacccacgggtccgccctaatctcacaatctcctacgagatctatcagtctccacgaagatgaaggttgttgccgcatacttgctcgctgttttgagcggaaaagcttcaccaaccagtgccgatatcaagactatccttggatcagttggtgctgagacagaggattctcagattgagcttttgttgaaggaagtgaaaggaaaagatttggctgagttgattgctgctggaagggagaagttagcttcagtgccgtctggtggcggaggtggtgttgcggttgcttctgctacatctggaggtggaggaggtggtggtgcttctgctgctgagtccaagaaagaagagaagaaggaagaaaaggaagaatccgatgatgacatgggtttcagtctattcgagtaagctggtagtagcatgaaaagtccggttttgttgtcctcttttaatattgtaaccttttgaaatctatatgttgttgttgtttagtttgtattcgatcatcttttttagacattgctgaaattctcaagagtttttgacccgaaaaaaaaaaaaaaaaaaaaaaaagggcggccgctctagaggatccaagcttacgtacgcgtgcatgcgacggcaaagcttcttctatagtggccaccctaaatttcaaattaaactgggccggctgttttaacaaacggatcttgaaactggggaaaaa

SEQ ID NO: 123361 - DNA, 825 bp, Arabidopsis thaliana
  unsure (1)..(825): unsure at all n locations
nnnnnnnnnnnnnnnnnnnnnnnnnnnnnnnnnnnnnnnnnnnnnnnnnncccgatcttagtttcgacccacgcgtccggtctgcacaacaccctaatctcacaatctcctacgagatctatcagtctccacgatgatgttggttgttgccgcatacttgctcgctgttttgagcggaaaagcttcaccaaccagtgccgatatcaagactatccttggatcagttggtgctgagacagaggattctcagattgagcttttgttgaaggaagtgaaaggaaaaagatttggctgagttgattgctgctggaagggagaagttagcttcagtgcccgcctggtggccggacgtggtgttgccggttgcttctgctacatctggaggtggaggaggtggtggtgcttctgctgctgagtccaagaaagaggagaagaaggaggaaagggaggaaccccatgatgacatggggttccagtctattccaagtaacctggtagtaccatgaaaagtcccggctttgctggccctcttttaatattgtaaccttttgaaatctatatgttgttgttgtttagtttgtattcgatcatcttttttagacattgctgaaattctcaagagtttttgacccgtatcaaataacacgtcggcaaaagggggcggcgatttagaggatccaagcttacgtacgcgtgcatgcgactgcataactttttctatagtgccaccctaaatttaaattccactggcccggcggtttttaccaacgttctttgaactgggcaaaaacccctggggggtttacccccaaccttaaattcgcc

SEQ ID NO: 123362 - DNA, 689 bp, Arabidopsis thaliana
cggacgcgtggggtctaaaaaccctaatctcactccgcctcctgcgagatccatcaacacttccgcaaaaatgaaggttgttgctgcgtttttgcttgccgtcttgagcgggaaagcttccccaaccactggcgatatcaaggatattcttggatcagttggtgctgagacagaggattctcagattgagcttttgttgaaggaagtgaaagggaaagacttggctgagctaattgctgctggaagggagaagttagcttcagtaccatcaggaggtggtggtggtgttgcggttgcttctgctacatctggaggtggaggaggtggtggtgctcctgctgctgagtccaagaaagaagagaagaaagaagagaaagaagaatccgatgatgacatgggtttcagtttgttcgagtaatgcggtatacttggcatttggttttgctgtaccctttcgaaatctttatgtcgttgtttagtttgttgtattcgactatcttcttagactttgctgaaattctcaagagatttttttactcaaacatcagtccacttgtgattggcatttatatttcaaactatcgccttagttacatcttcaaaacacaaaacacaaagggcggccgctctagaggatccaagcttacgtacgcgtgcatgcgacgtcaagatcttgtagagtgcaccta

SEQ ID NO: 123363 - DNA, 554 bp, Arabidopsis thaliana
  unsure (1)..(554): unsure at all n locations
aaggacgggccagagcgacccgtacacacatatggaacaacaaaccacgagactgacctccctccacgaagatgaaggttgttgccgcgtacttgctcgcggttttgagcgccaaacccttcaccaaccagtgccgatatcaagactatccttggatcagttggtgctgagacagaggattctcagattgagcttttgttgaaggaagtgaaaggaaaagatttggctgagttgattgctgctggaagggagaagttagcttcagtgccgtctggtggcggaggtggtgttgcggttgcttctgctacatctggaggtggaggaggtggtggtgcccctgctgctgagtccaagaaagaagagangaaggaagaaaanggangnatccgatgattgacatgggtttcagtctattcgagtaagctggtagtagcataaaaagtccggttttnttgnccncttttaaaattgnaaccctttnaaanncntatgttggtgtngttaagtttgaatncgncanctttttagcattctgaaatcnaaaggttttnccc

SEQ ID NO: 123364 - DNA, 593 bp, Arabidopsis thaliana
  unsure (1)..(593): unsure at all n locations
accggtatttaatggctcggacccacgcgtgcgactctccgcaaaaatgacacagttgcagcngcgtgcgctccctccgtcttgagcgggaaagcttccgcaaccactggcgatatcaaggatattcttggatcagttggtgctgagacagaggattctcagattgagcttttgttgaaggaagtgaaagggaaagacttggctgagctaattgctgctggaagggagaagttagcttcagtgccgtctggtggcggaggtggtgttgcggttgcttctgctacatctggaggtggagtaggtggtggtgcttctgctgctgagtccaagaaagaagagaagaaggaagaaaaggaagaatccgatgatgacatgggtttcagtctattcgagtaagctggtagtagcatgaaaagtccggttttgttgtcctcttttaatattgtaaccttttgaaatctatatgttgttgttgtttagtttgtattcgatcatcttttttagacattgctgaaattctcaagagtttttgacccgaatgtcatttgcactttgttgttagcgattaagcttctatctcaatcgcctttgtc

SEQ ID NO: 123365 - DNA, 520 bp, Arabidopsis thaliana
cctaaattacttaaaaagatctctcttatttgaattcttcttattgtttagattccaggtcaaactgtgatccattatctttgctactaaactaagttcttttctctgatcgaatcaaaaagttttcaactttctaaatttttttagttctaaggaaaaaacctctccgagaatggttttatcggtgaagcaaacactctctccgaaaatcggacttttccgacgaaacccttcatcctcactaggaagatctcctgtttctctctcgtttccatcgacggagcttccaaaacgcaccgttttagccgtgtcaaagccgcttcatctctcttcttctctgagagctaagtctccggtagtgagatgtgaagcttatgaagctgaccgatcagagcctcatccgatcggtgatgatgctgcggcggcggaaacgaaatcagaggcggctaagaaattgaagatcgggatttactttgctacttggtgggctttgaacgttgtgttcaatatctacaacaag

SEQ ID NO: 123366 - DNA, 1067 bp, Arabidopsis thaliana
  unsure (1)..(1067): unsure at all n locations
tgcttcgcgcacggtccatacgactcactttagggaaagctggtacgcctgcaggtaccggtccggaattcccgggtcgacccacgcgtccgcccacgcgtccgcaaggagggcatttaccagattatgctccacaccctgctattgtcttgaaaatggaagatggaactggtcttctccttccgattatcgtcttggagatgcctagtgtgttacttatggcagcaatgaccaatgtccaaattgcaagaccaaccatgtatcaagtggtgaaggaaatggtggacaagatgggttacgaagttagacttgttagagtcaccaaaagagttcacgaggcatattttgcccagttattcctttcaaaggtgggtaatgcctcggagtgtgtcagctttgatcttaggccttcagatgcaatcaatatagctgttagatgcaagatacctatccaagtgaacaagtaccttgcatatagtgatggaatgagagtcattgagtcagggaagatatcaacaccggcaccagcttcagatggtttattatttactgaacaagaccgaccaaatggtcaggcttgtcttgatacgaaagagttcaatattttgagcaaaatgatgcaagccgttgatgaagagcgatatgatgaagccgctgagtggagagacaagcttggtcagtttcgggccaaacgtaacttgaggaaatacacatgagagagctcgatcaacaattattggctgtgtacataaactaagaagaaagtcattggtcggaatcaaagtggaggaagaagcctgaagtgtcgtctctgtatgatggagatcgaagaatgcttctgcactttacccatttccctaaaaaataaacaaaaaaaaatgtataatgtatgtatgtagcgtgatgtgctacatatcacttattaatctatgcaaacttaagctcactctaattactttttaagtttccttttaaaaaaaaaaaaaaagnnnnnnnnnnnnnnnnnnnnnnnnnnnnnnnnnnnnnnnnnnnnnnnnnnnnnnnnnnnnnnnnnnnnnnnnntcaat

SEQ ID NO: 123367 - DNA, 567 bp, Arabidopsis thaliana
  unsure (1)..(567): unsure at all n locations
ggatctctcaagtgaagaatctctctctatctctatcttcttccattgatcctttcctctctctggcttgtttcagagctcttcgatcttcttcttgatcgatctacgtgccactgtttataccattcacgatctaatccggtttcaattattactcacgaaatcgaaggaagatgagatcggttcaagcaccagttgtttgtcctgcaattcgaccaagacaagtaggtgcatgtgcttcactagtcaactacactggtctgaaacctagaagccaattttggggtaatcggacaaaaggtgtcaagtctcagggcactaccacaacaatcactcttagattgtgcaacaagagtatcaagtgtgttttcagctctcactctgatggtaatggaagcactgctgaaaatttcaatgaaaatgatgaggaatatgttaactctagtgtagtggaagctggnaagttagttggggnttagtaggngtttccnnnnttttggtttgatttagnccttttaggtttncaaaggttgggngcttttttgggggnttttaaaatgntnaggt

SEQ ID NO: 123368 - DNA, 677 bp, Arabidopsis thaliana
  unsure (1)..(677): unsure at all n locations
atctctctctatctctatcttcttccattgatcctttcctctctctggcttgtttcagagctcttcgatcttcttcttgatcgatctacgtgccactgtttataccattcacgatctaatccggtttcaattattactcacgaaatcgaaggaagatgagatcggttcaagcaccagttgtttgtcctgcaattcgaccaagacaagtaggtgcatgtgcttcactagtcaactacactggtctgaaacctagaagccaattttggggtaatcggacaaaaggtgtcaagtctcagggcactaccacaacaatcactcttagattgtgcaacaagagtatcaagtgtgttttcagctctcactctgatggtaatggaagcactgctgaaaatttcaatgaaaatgatgaggaatatgttaactctagtgtagtggaagctgttgaagtaaaaagtggagcagatggttttatggtgaagatgagggatggtaggcaactacgatgtgtccataacaatcctcaaggagggcatttaccacattatgctccacaacctgctattgtcgtgaaaatgggagatgggactgggcttctcctttccgattattgtctttggngnatncctagtggngttacttnntggcnncaattcccnattnnccaaattnnaaggccc

SEQ ID NO: 123369 - DNA, 580 bp, Arabidopsis thaliana
gatacgtcagctctatacgactcactatatgggaagctggtacgcctgcaggtaccggtccgggatttcccggggtcgacccacgcgtcccgtgcaggagccaccaccgaagattactccctttgtggaatacgaagaagagcttgaagatgatgacgatgatctctcgctttcgtcagattccgatatcgctgaagctcttgattggctagacggtaaagacgatgacgagctaattggtggtggcttttctcttcatgctcgtcgtcctaatgctcacggtggacatggttcacgccctaactctagtgctcttcagcctatttcaaataaggcccagaagcttactagtcacgttcgtgcttctcctttggagggatgggaaggaagagttaaagttgggatgtcgaattctgtgacaactgcgattcgtggaagtcttagagatacagaaattgggagaagtaggaatactgataaagcggaccgggcaactgttgaacaggctcttgatccaaggacgcgtatggtattgtttagaatgcttaaccggggtgtgtttaacgatgttcatggatgt

SEQ ID NO: 123370 - DNA, 1330 bp, Arabidopsis thaliana
aggtctctacgactcacatattgggaaagctggcacgcctgcaggtaccggtccggaattcccgggtcgacccacgcgtccgctaagccagcttgaagcgttcagcctcgagggaaaccggttcaccggtccgatcccgagctcgatatctaatttgactctgttaactcaactcaaactcggcaataatctcctaaccggaactataccgctaggggtcgctaatctcaagctcatgtcgtatctcaaccttggaggtaaccgtctcactggaaccattccagatattttcaaatccatgccagagctccgatctttaactctctcccgcaacggattctccgggaatcttcctccgtccattgcatcactcgcaccgattcttaggttcctcgagttaggccataacaaactctccgggacgattccaaactttttatcacacttcaaggcgctcgacacattggatctctccaagaatcggctctcgggtgtcataccgaagagtttcgccaatctgaccaagatattcaatcttgatctctcccataatcttctaccgatccaattccctgtcttgaacgttaaaggcattgaatctttggatctcttcttcaacccagtttcacttgaatacgatcccgaaatgggtgacttcgtcgccgatcatcttctcgttgaagctagcaaaatgcgggatcaagatgagcttagacgattggaagccagcgcaaacattctactatgatttcatcgatctgtcggaaaacgagatcacagggagtccagcaaggttcttgaaccaaacagagtatctagtggagttcaaggcagcgggtaacaaactacgattcgatatggggaagctaacgtttgcaaagacgctgacaactttagatatatcaaggaacttggtatttgggaaggtgccggcaatggtggctggactaaagacattgaacgtgagtcacaaccatctttgtggaaagcttccagtaacaaagttcccggccagtgcgtttgtgggtaatgactgtctttgcggctctcctctttctccttgtaaagcttaagcggcaagaaagctacaactggtagttggatatttaccgtgaccaataaagtttagctccaaataaaatttgtattaaaaagattacaacaaataaagtagttttatgttatgaagaagcttcattctaacaatatgtattagtgaaagtactcaaagtagtatttaagttctcaaaaaaaaaaaaaaaagggcggccgctctagaggatccaagcttacgtacgcgtgcatgcggtttcatagctcagctatagtg

SEQ ID NO: 123371 - DNA, 831 bp, Arabidopsis thaliana
  unsure (1)..(831): unsure at all n locations
cgcggnnnnnnnnnnnnnnnnnnnnnnnnnnnnnnnnnnnnnnnnnnnnnnnnnnnnnncggaatggaagggtcgaccacgcgtccgcatgaactcttcctttactctcttcatctttaccttcgtcatcttcctccaatgtctaaatcccaccggagctgccacgtgtcatcctgatgatgaagcgggtcttctagctttcaaagcgggtataacccgagatccttcgggtattctcagttcttggaagaaaggtaccgcttgttgttcttggaacggtgtcacttgtctcaccactgaccgtgtctctgcactctctgtcgctggacaagccgatgttgctggaagcttcctctccggcactctctcgccgtcgttggctaaactcaagcaccttgatgggatttacttcaccgatctcaagaacatcactggttcttttcctcaattccttttccaattaccaaatcttaagtacgtatacattgagaataaccgtctctctggtactcttccggctaacatcggtgcgctaagccagcttgaagcgttcagcctcgagggaaaccggttcaccggtccgatcccgagctcgatatctaatttgactctgttaactcaactcaaactcggcaataatctcctaaccggaactataccgttaggggtcgctaatctcaagctcatgtcgtatcttaaccttggaggtaaccgtctcactggaaccattccagatattttcaaatccatgccagagctccgatctttaactctctcccgcaacggattcttcgggaatcttcctccgtccattgcatcactcgcaccgat

SEQ ID NO: 123372 - DNA, 615 bp, Arabidopsis thaliana
  unsure (1)..(615): unsure at all n locations
atgatactccagctcccnnnnnnnnnnnnnnnnnnnnnnnnnnnnnnnnnnnnnnnnnnnnnnnnnnnnnnnnnngtcgaccacgcgtccgagcaatttctgaaacttttagtcatcatcagctcaatttcggatctccggagttgtatttttactcctttgtcggaggtaaaatggctcagtcgtcgttggtggcggcggcggggagaagcggaagggttatcggcgattatgcggtgggtcgacaaatcgggtcggggtcgttttccgtggtttgggaagggaggcatcttgttcatggcaccgtcgttgctatcaaggagatcgctatggctcggcttaataagaagttgcaagagagtctcatgtcggagattatcatcttaaggaagattaatcatcctaacatcattcgctttatcgacatgatcgaggctcccgggaagataaatttggtgttggagtactgtaaaggtggtgatctgtctatgtatattcacaaacatggaagtgttcctgaagctactgctaagcattttatgctgcagttagcggctggcttacaagttcttcgtgacaataatatcattcaccgcgatttaaagcctcagaatc

SEQ ID NO: 123373 - DNA, 546 bp, Arabidopsis thaliana
cccacgcgtccgataatcggcgccaagtacttcaagcacgacggcaatgtgcctgccggcgaagtccgatcaccgatcgatatcgacggacatgggacgcacacgtcatccaccgtagccggcgttttagtcgcaaacgcgagtctctatggcatagcaaacggcaccgcccgcggcgcggttccgtcggcgaggttagcgatgtacaaggtttgttgggcgagatccggctgtgctgacatggacatactcgccggattcgaagcagcgattcacgacggcgtagaaattatctccatctctatcggcggtccaatcgccgattactcttccgattcgatatccgtcgggtcgtttcacgcgatgaggaaaggaatcctcacggtggcgtccgccggtaacgacgggcctagctcaggaactgtaacgaaccatgagccgtggatattgacggttgctgcaagtggaatcgatcggacgttcaagagcaaaatagatctcggcaacggcaaatccttctctgggatgggaataagcatgtttagt

SEQ ID NO: 123374 - DNA, 604 bp, Arabidopsis thaliana
  unsure (1)..(604): unsure at all n locations
tctcccnatttgtctncttgngccaaggtccccggggnttgccgatttanccgttccctgaccccagggagaggctttcncactactgctgatattcactcccttttcagagatgttcaccagaaatggatagaaggtgggaactatgaactgtgcatagaagatgttcgagacgagatctgggacatggtgaaaccgtctgacccattaaagatcactctgggtgatctcttgggatgtaaacaaggtggaaccgttgcgagcatgcttatagatgtgcgtggcttctgggctcatgacaaccgtgagaaccttcttcaagaagaagaagaaccacctgaggaagagtctcagtgataatgttattttctatgtctacctaaaaaaaatgctaaatcattgagatcaaaagtctcgcactagtaaacagtctcatctcatgtgtgtgtatctttgtaagcttattagttggtgacgtttaatgaaatggctgtttatatccaaacttgtcttaaaaaaaaaaaaaaaaaaaaaaaaaaaaaaaaaaaaaaagggcggccgctctagaggatccaagcttacgtacgcgtgcatgcgacgtcat

SEQ ID NO: 123375 - DNA, 539 bp, Arabidopsis thaliana
  unsure (1)..(539): unsure at all n locations
nnnnnnnnnnnnnnnnnnnnnnnnnnnnnnnactagataaagatatgagtggatcgctgtgcaaacaagaacttaaagaatatgctgatgggaccctaactgagattttcattgaaagagtgttcgatgagcatgtccgccgtggtaaaatcgtggcaggcaattcccgggaaatggactttgacagtttcctcgattttgttcttgctttggagaacaaagatactccagagggtttgacgtatttattccgttgccttgatctccaagggagaggctttctcactactgctgatattcactctcttttcagagatgttcaccagaaatggatagaaggtgggaactatgaactgtgcatagaagatgttcgagacgagatctgggacatggtgaaaccggctgacccattaaagaatcactctgggggatctcttgggatgtaaacaagggggaaccggtgcaagcttcttattaatgtgcggggttttgggcttatgcaaccgggaaaacctttttaaaaaaaacaaaaacccgtt

SEQ ID NO: 123376 - DNA, 917 bp, Arabidopsis thaliana
gccgagcctaatacgacttacttagggaaagctggtacgcctgcaggtaccggtccggaattcccgggtcgacccacgcgtccgcccacgcgtccgcggacgcgtgggttatccttttaccctcatcatcctccactatttacagttttgccactctgactttatgctagcttcttccggtgactggcgataacacgagagagccttcgccttctccaagcttcatactcttccgacgatgaagattagaagacatgaagaacggtacccggagaaagttatcagagaaagcgatgtcgtttcacggcagaggaccaacgccggtatcaaatccaggcgagcttcgaagaccgaaaacgttaccggagttattctccaccggtcaaagcatcaccggaccggaaacggtttcacttccgccacgtttgacgaaccttttacttaccgggaccggacaaggaagttaaggagccgaacaaataataatctcgccggaatccaccgtgggtgattaaatcgacgccgccgttcgtcagtacgttaaagaagctcgccggccatttttaccggaatctgaaccgcacgatttgatcttattactcgcagtttagtctggaaagtattgaaagagacgagaagttgatatcgctagggtcgaaaactttttcttatgtgggcggaagagaccggagggtttatcgctggggttaatcgtcgaatctggtctaaggagcagagaaggtgctaaactggtttcatggctcaatttatggctttagaagttttatcattgaattatgcttttaaattagtccatcttagaaaggatataaaactctggttatattcttttgaatgaatcttaatagggggtaaggtttaccatttttccagatgttttgaaaaataaaaaaaaa

SEQ ID NO: 123377 - DNA, 939 bp, Arabidopsis thaliana
  unsure (1)..(939): unsure at all n locations
cccacgcgtccgcccacgcgtccgctcttatccttttaccctcatcatcctccactatttacagttttgccactctgactttatgctagcttcttccggtgactggcgataacacgagagagccttcgccttctccaagcttcatactcttccgacgataaagattagaagacatgaagaacggtaaccggaaaacaacgccggaaacagagaagtctcaccggagaaagttatcagagaaagcgatgtcgtttcacggcagaggaacaacgccgttatcaaatccaggcgagcttcgaagaccgaaaacgttaccggagttattctccaccggtcaaagcatcaccgtaccggagacggtttcacttacgccacgtttgacgaaacttttacttaacgtgacggtacatggaagtttaggagccgtacaaattataatctcgccggaatccaccgtgagtgatttaatcgacgccgccgttcgtcagtacgttaaagaagctcgccggccatttttaccggaatctgaaccgtcacgatttgatcttcattactcgcagtttagtcttgagagtattgtaagagacgagaagttgatatcgctagggtcgagaaactttttcttatgtggtcggaaagagaccggagggtttatcggctgtggtttatcgtcggaatcttgttctaaggaagcagagaaagtggctaaaactggttttcattggctcaaatttatgggcttctagaagtttttatcattttgaattattgctttttcaaattagttccattctttagaaaaaggatataaaaaacatctgtgtatattatttctatgtagaaatgaaaatcattaaaaaaaaaaaaaaaagnnnnnnnnnnnnnnnnnnnnnnnnnnnnnnnnnnnnnnnnnnnnnnnnnnnnnnnnnnnnnnnnnng

SEQ ID NO: 123378 - DNA, 428 bp, Arabidopsis thaliana
gtttaggagccgtacaaattataatctcgccggaatccaccgtgagtgatttaatctacgccgccgttcgtcagtacgttaaagaagctcgccggccaatttttaccggaatctgaaccgtcacgatttgatcttcattgctcgcagtttagtcttgagagtattgtaagagacgagaagttgatatcgctagggtcgagaaactttttcttatgtggtcggaaagagaccggagggtttatcggctgtggtttatcgtcggaatcttgttctaaggaagcagagaaagtggctaaaactggttttcattggctcaaatttatgggcttctagaagtttttatcattttgaatgattgctttttcaaattagttccattctttagaaaaaggatataaaaaacatctgtgtatatcatttctatgtag

SEQ ID NO: 123379 - DNA, 1023 bp, Arabidopsis thaliana
  unsure (1)..(1023): unsure at all n locations
nnnnnnnnnnnnnnnnnnnnnnnnnnnnnnnnnnnnnnnnnnnnnnnnnnnnnnnnnnnnnnnccacgcgtccgcccacgcgtccgaaacctctcttcctctcgccgcctccttcctcctcctcatctccttctcctccgccgtagacacttcccgtctcttcctcaccgtcgtcaacaactgtcccttcactgtctggccagccattcaacccaacgccggccaccccgtcctagagaaaggtggcttcgctctcccaactttcactcaccgctccttcaacgttccaaccacacactggtccggtcgcatctgggccagaacctggtgtgcccactacaacggaaaattctcctgcctcaccggagactgcggaaaccgcctggaatgcaacggtctcggcggggcaccaccagcttctctagctcagttcgacctccaccacggtggtcaccacgacttctcctcttacggtgtctctctcgttgacggttacaatgttccgatgaccgtgactcctcacgaaggccatggtgtctgtcctgtcgttggttgtcgtgaagatctaataaaaacgtgtccggctcatcttcaggtccggtcacacagtggacacgtggtggcttgtaagantnggtgtgaggctttccatacagacgagctgtgttgtcgtggtcatggcaatagccctaacacgtgtaaagcttcgagccattcgctgttctttaagcatgcgtgtccttcgagtttcactttttgctcatgcatagtccttcgcttatgcatgactgtgcttctcctagagagctcaaagtcatcttctgccactaatgtttcggccatgttctagggttattgtcgtaacatcggactgatcttctaatgcttttgtttggttagtctgattttgattggtttagtatgcgatttcccggttcagttatgtagtccaactatgaaattatgtattatcttgaaattgctctctttaattctctttttttatttcgattctgtaatgct

SEQ ID NO: 123380 - DNA, 754 bp, Arabidopsis thaliana
  unsure (1)..(754): unsure at all n locations
cgaaacnnnnnnnnnnnnnnnnnnnnnnnnnnnnnnnnnnnnnnnnnnnnnnnnnnnnnnnnnnnnnnnnnnnnnnnnnnnnnnnnnnnnnnnnncggccgccttaagttatatttttttttttttgctttacagctcaaattagtcatcttcttcttcctctgtctcaattcttcctcctctcggatccatttttagaggagtctagtttcttacttgaacatagacatggaatcaactaataactgacaaccaagaggctgttcttttcaaatgattggtagtagttatattatgcttggacagtgccatgatgggcatctgtgagatgaaaagctgctgctcatggcttcttttgatctcgttgctttgctcactatctaatgaaagtcaagcgattagtcctgacggcgaggcgcttctgagcttcagaaatgcagttactagatcagatagtttcatccatcagtggagaccggaagatccagatccatgtaactggaacggagtgacatgtgatgcaaaaaccaaaagagttataaccttgaatcttacttattacaaaataatgggacctttacctcctgatattggaaagttggaccatctaaggcttttaaatgcttcacaacaatgccttttatggaggcataccctacagccttggggaaaatggacaccattggaacgaaatttcacttgccaaagtgacctacttcccttgggcccaaatcccagcctgaaaagggggaga

SEQ ID NO: 123381 - DNA, 656 bp, Arabidopsis thaliana
ctcactattgggaaagctggtacgcctgcaggtaccggtccggaattcccgggtcgacccacgcgtccgatttgaacaagtgtgattgtttgtgacacagatttggatcggcgaatcttttgatgataaagattacttcatttctggttattctcgaagagtagaggtctcaaaagaaatggagtctaaggaaattagatcctcctctgtctttgagagatcgatgcgttttaatggactctttcaagataagctgagagttgttgagaaacagaatcaaccaccaaaacggtttaaccaaaaggagtctaattctggtttcacagtgattccaacgaagcaactttgtcgagtttatctccagaaaccgaatttgttggcttccaagggtataattgatgcactagctaagcctcctcataggatttttggtaggagatatgatcagcaaaacttcaagtcaaagctgagacatcttcacacaacaagtattgatcctctgaaacacaaatttggcaaggaagagaattctctgagatatttcactcctcttggtttcagtagtggttctcgtttaggagataggaagaaagggaaagacctttcctttcaggaggagaaaccaaaggaaatgaagaaactttgtgatcagaaaa

SEQ ID NO: 123382 - DNA, 820 bp, Arabidopsis thaliana
  unsure (1)..(820): unsure at all n locations
cgggccggaattcccggatcgaccacgcgtccgggaaagacccggcttttttctgaaatggtacagagaggctgagctgatccatggccgatgggcgatggcagcggttcttgggatcttcgtcggccaggcctggagcggtgtggcatggtttgaagctggagcccagccagacgcgatcgctcccttctcgttcgggtcgcttcttggaacccaattgcttctcatgggttgggtggagagcaaacgatgggtcgatttcttcaacccggattctcaatcggttgagtgggcaacgccatggtcgaagaccgccgagaatttcgcgaactataccggcgatcagggataccccggtgggagattcttcgatccgttgggtctcgccgggaaaaaccgcgacggtgtttatgagccggactttgagaagctggagaggctgaaattggcagagattaagcactcgaggctcgcaatggttgccatgttgatcttttactttgaggccgggcaggggaaaacgcctctcggtgctcttggtttgtgagaaaacggcatgatgtttttgattctgtagatacaatttctcttccaaaaacctaatgtttctcttcttcaatgtgacatttgggaaaagatcatcaaaccattgctataaatgtaaaatgaaatcatgaggcttgttcgtagataaaaaaaaaaaagggcggccgctctagaggatccaagcttacgtacgcgtgcatgcgacgtcnnnnnnnnnnnnnnnnnnnnnnnnggcaatcgnnnnnnnnnnnnnnnnnnnnnnnnaaagtatcat

SEQ ID NO: 123383 - DNA, 1042 bp, Arabidopsis thaliana
  unsure (1)..(1042): unsure at all n locations
ccgcaatcctttcctttcattgtagttaaacaaagattacgattatggccacatcagctatccaacaatcctccttcgccggccaaacggctctcaagccctccagcgacctcatccaaaaggtgggcgtcttgggcggtggccgtgtgaccatgcgtcgtaccgtcaagtctactccccaaagcatttggtatggaccagaccgtcccaagtacttgggaccattctcggagaacacaccgtcttacttaactggagaataccccggagactacggctgggacaccgctggactctcggctgacccggagacattcgctaagaaccgtgagcttgaagtaatccacagcagatgggctatgttgggtgctctcggatgcacattccctgagattctctccaagaacggtgttaaattcggagaagccgtgtggttcaaggcaggttttcagattttctcagaaggaggtcttgattacctcggaaaccctaacttgatccacgcgcaaagcatcttagccatctgggctgttcaagttgtgctcatggggttcattgaaggctacagaatcggaggtggacctctcggagaagggcttgacccgctttaccccggaggtgcgttcgacccattgaacttggctgaggatccagaggctttctctgagctgaaggtgaaggagctcaagaacggtcgtcttgccatgttctctatgtttggattctttgtccaagccattgttactggtaaaggtcccattgagaacttatttgatcatttggctgatcctgtggctaacaacgcctggtcttacgctactaactttgtccccggaaagtaattatcttatgtatttgcttcataatctctctgctttgtaaactcgtgaatgtgtaatattgacgtttgatgtgaatttggcacttaatgatgtttcttgggtgggtacttttttttgaatcgtgatgaaagattttgtttcacagatgcaggtgagtttgttttggcaccnnnnnnnnnnnnnnnnnnnnnnnnnnnnnn

SEQ ID NO: 123384 - DNA, 1100 bp, Arabidopsis thaliana
taggtacacactatagaagagttatgacgtcgcttgctcgttctgctccgaaaaacagagagagagaacaacaaccaaacactcatttctccacatcttgagagaaaaaaacagagcaagtatattagagatctcatggcgatggcggtctccggagctgtcctcagtgggcttggttcttcgttcctcaccggaggcaagagaggtgccaccgcattggcaagcggcgtaggcactggagctcagagagttggcaggaaaactcttattgtcgctgctgcggctgctcagcctaagaaatcttggatccctgccgttaaaggtggtggcaacttccttgaccctgaatggctcgatggctcgctaccaggagatttcgggttcgacccattgggtttggggaaagacccggcttttctgaaatggtacagagaggctgagctgatccatggccgatgggcgatggcagcggttcttgggatcttcgtcggccaggcctggagcggtgtggcatggtttgaagctggagcccagccagacgcgatcgctcccttctcgttcgggtcgcttcttggaacccaattgcttctcatgggttgggtggagagcaaacgatgggtcgatttcttcaacccggattctcaatcggttgagtgggcaacgccatggtcgaagaccgccgagaatttcgcgaactataccggcgatcagggataccccggtgggagattcttcgatccgttgggtctcgccgggaaaaaccgcgacggtgtttattaaccggacttttagaaactggagaggcttaaattggcagagattaagcactcgaggctcgccaagggtgccatgttgatcttttactttgaggccgggcaagggaaaacgccttaaggtggttttggtttgtgaaaaaacggcataaaggttttgaatctggagaaaccaatttttttcccaaaacctaaaggttttttttttccaaggaccatttggggaaagatccaccaacccttgcttttaaaaaaataaaaaaaaaaaaacccacaaaacggccggtttaaaagaatccaggctaaggaaggggggcatgcaacgtc

SEQ ID NO: 123385 - DNA, 1083 bp, Arabidopsis thaliana
  unsure (1)..(1083): unsure at all n locations
nnnnnnnnnnnnnnnnnnnnnnnnnnnnnnnnnnnnnnnnnnnnnnnnnnnnnnnnnnnnnnnnnnnnnnnnnnnnnccacgcgtccgctttttttgtgttcttgtttagaagaagcaatggccacttcagcaatccaacactcttctttcgctggccaaacgaccctaaagccatccaacgatctcctccgcaaaatcggagcctccaatggcggtggccgcatcatcatgcgtcgtaccgtcaagtctactcctcagagcatctggtacggaccagaccgtcccaaatacctaggaccattttccgaaaacacaccatcatacctaaccggagaataccctggagactacggttgggacaccgctggtctctcagccgatccagaaacattcgcaaagaatcgtgagctcgaagtgatccacagtagatgggcaatgttgggagctttaggctgcaccttccctgaaattctctcaaaaaacggagtcaaattcggtgaagccgtgtggttcaaggcaggatctcaaatcttctcagaaggagggcttgactacctcggaaaccctaacttgatccacgcgcaaagcatattagctatatgggcgtgtcaagttgtgctaatgggattcattgaagggtacagaatcggaggtggtcctcttggggaagggcttgacccgctttacccgggcggggccttcgacccgttgaacttagcggaggatccagaagcgttttcagagttgaaagtgaaggagcttaaaaacggtcgtcttgctatgttctcaatgtttggattctttgtccaagccatagttaccggtaaaggtccgatcgaaaatctgttcgatcacattgcagaccctgtggctaacaatgcttgggcttacgccaccaacttcgtccccggaaaatagagtttgatcggataatttatgtaaattatatcttttaaacatttatcaatgcattaaagttatccctaaaaaaaaaaaaaaaaagannnnnnnnnnnnnnnnnnnnnnnnnnnnnnnnnnnnnnnnnnnnnnnnnnnnnnnnnnnnnnnnnnnnggcctcaatt

SEQ ID NO: 123386 - DNA, 1055 bp, Arabidopsis thaliana
gaaaaaccggcccacactctctcttcactcctttcctttcattgtagttaacgaaaagattacgataatggcaacatcagctatccagcaatcctccttcgccggccaaacggctctcaagccctccaacgaactcctccgcaaggttggtgtctccggtggtggccgtgtgaccatgcgtcgtaccgtcaagtctactcctcaaagcatctggtacggaccagaccgtcccaagtacttgggaccattctcggagaacacaccgtcctacctaaccggagaataccccggagactacggctgggacaccgctggactctcggctgacccggagacattcgctaagaaccgtgagcttgaagtaatccacagcagatgggctatgttgggtgctctcggatgcacattccctgagattctctccaagaacggtgttaaattcggagaagccgtgtggttcaaggcaggttttcagattttctcagaaggaggtcttgattacctcggaaaccctaacttgatccacgcgcaaagcatcttagccatctgggctgttcaagttgtgctcatggggttcattgaaggctacagaatcggaggtggaccactcggagaaggacttgacccgctttatcccggaggtgcgttcgacccattgaacttggctgaggatccagaggctttctctgagctgaaggtgaaggagctcaagaacggtcgtcttgccatgttctctatgtttggattctttgtccaagccattgttactggtaaaggtcccattgagaacttatttgatcatttggctgatcctgtggctaacaacgcctggtcttacgctactaactttgtccccggaaagtaattatcttatggatttgcttcaaaatctctctgctttgtaaactcgggaatggacttattggtgttccatgggaatttggcccttaatgcttaaaaaaacaaaaaaaaaaaaaaaaaaaaaagggcggccgctttagaggatcccagcttacggaaggcgtgcatgcgaacgtcatagctgttctatagtg

SEQ ID NO: 123387 - DNA, 933 bp, Arabidopsis thaliana
  unsure (1)..(933): unsure at all n locations
nnnnnnnnnnnnnnnnnnnnnnnnnnnnnnnnnnnnnnnnnnnnnnnnnnnnnnnnnnnnnnnnnnnnnnnnnnnccacgcgtccggaagacgacagaagggatggctcgatggctcgctaccaggagatttcgggttcgacccattgggtttggggaaagacccggcttttctgaaatggtacagagaggctgagctgatccatggccgatgggcgatggcagcggttcttgggatcttcgtcggccaggcctggagcggtgtggcatggtttgaagctggagcccagccagacgcgatcgctccctcctcgttcgggtcgcttcttggaacccaattgcttctcatgggttgggtggagagcaaacgatgggtcgatttcttcaacccggattctcaatcggttgagtgggcaacgccatggtcgaagaccgccgagaatttcgcgaactgtaccggcgatcagggaaaccccggggggagatttttgaacccgctggggttccccgggaaaaaccccccccgtgtttattacccggccttttaaaaactggagaggcttaaattgcaaagattaagcactcaaggctcccaaaggttgccatgttgattttttacttttaggccgggcaggggaaaacccctctcggggctcttggtttgtgagaaaacggcaggatgtttttgatcccccccagacaattttttttccaaaaacctaatgtttctctttttcaatgtgacatttgggaaaagatcatcaaaccattgctataaatgtaaaatgaaatcatgaggcttgttcgtagataactttattatcccacctcccaaaaaaaaaaaaaaacaaaaccaaannannnnnnnnnnnnnnnnnnnnnnnnnnnnnnnnnnnnnnnnnnnnnnnnnnnnnnnnnnnnnnnnnngctccta

SEQ ID NO: 123388 - DNA, 546 bp, Arabidopsis thaliana
acaggtccggaattgaccgcacccgtccaggcacaacaaccatatcactcatttctccacatcttgtgtttactaaaaacagagcaagtatattagagatctcagcggcgatggcggtctcccgagctgtcctcactgggcttggttcttcgttcctcaccggaggcaagagaggtgccaccgcattggcaagcggcgtaggcactggagctcagagagttggcaggaaaactcttatttgtcgctgctgcggctgctcagcctaagaaatcttggatccctgccgttaaaggtggtggcaacttccttgaccctgaatggctcgatggctcgtaagtctattctcttttatatctgagttactagcatgaacaatgctgaattttcattcatatctctcataaactagcttggacaatagattatgataattcaaggtcctgattactcatttggttctaatttgttagctgaatctcaagagagcatgaaaagcccgaattgtttgttacccagttattgagtcaaatgtgtgtgatattcgca

SEQ ID NO: 123389 - DNA, 565 bp, Arabidopsis thaliana
  unsure (1)..(565): unsure at all n locations
ctctatacgactcactatatgggaaagctggtccgccttgcaggtcccggtccgaatttccgggtcaaccacgcgtccgtccggaaaaaaaaacaaaaggttccggttgcaaaagccacccgccggtgccgctgcgagagacgacagaagggggaaaaacagagagagagaacaacacccaaccactcatttctccacatcttgagagaaaaaaacagagcaagtatattagagatctcatggcgatggcggtctccggagctgtcctcagtgggcttggctcttcgttcctcaccggaggcaagagaggtgccaccgcattggcaagcggcgtaggcactggagctcagagagttggcaggaaaactcttattgtcgctgctgcggctgctcagcctaagaaatcttggatccctgccgttaaaggtggtggcaacttccttgaccctgaatggctcgatggctcgctaccaggagatttcgggttcgacccattgggtttggggaaagacccagctnttctgaaatggtacagagaggctgacctgatccatggccgatgggc

SEQ ID NO: 123390 - DNA, 585 bp, Arabidopsis thaliana
agcagacatgttgctcttcatcgtagttatcgtcgctgattcaccaacaacaacaacatcacaagaaagcgtcctcttttataggaccctctgtccctgtttctctctccagttttattgtagaattcgctgtcattttcacaacgactcacttctttcagctctctccattcggcgctctcttctggaattgaagaatcaagattagcaatggcccatacatcagaatctgtgaatcctagagatgtttgcattgtgggtgttgcacgtactccaatgggtggctttctcggatctctttcatctttacctgccacaaagcttggatctttagctattgcagctgctttgaagagagcaaatgttgatccagctcttgttcaagaagttgtctttggcaatgttcttagtgctaatttgggtcaagctcctgctcgtcaagctgctttaggtgcaggaatccctaactctgttatctgtactacagttaacaaggtttgtgcatcaggcatgaaagcggtaatgattgctgctcaaagtatccagttagggatcaatgatgtagttgtggcgggtggtatggaa

SEQ ID NO: 123391 - DNA, 532 bp, Arabidopsis thaliana
ggctctatacgactcacttagggaaagctggcccgcctgcaggtaccggtccggaattcccgggtcgacccacgcgtccgcccacgcgtacgaaacactcatttctccacatcttgagagaaaaaaacagagcaagtatattagagatctcatggcgatggcggtctccggagctgtcctcagtgggcttggttcttcgttcctcaccggaggcaagagaggtgccaccccattggcaagcggcgtacgcactggagctcacagagttggcaggaaaactcttattgtcgctgctgcggctgctcagcctaagaaatcttggatccctgccgtaaagggggggggcaacttccttgaccctgaatggctcgatggctcgctaccaggagatttcgggttcgacccattgagtttggggaaagacccggcttttctgaattggtacagaagaggctgagctgatccatggccgatgggcgatggcagcggttcttgagatcttcgtcggccaggcctgaagcggtgtggcatg

SEQ ID NO: 123392 - DNA, 480 bp, Arabidopsis thaliana
  unsure (1)..(480): unsure at all n locations
ctctcttcaatcctttcctttcattgtagtttaaccataagattacgattatggccacatcagctatccagcaatcctccttcgccggccaaacggctctcaagccctccagcgacctcctccgcaaggttgggcgtctccggcggtggccgtgtgaccatgcgtcgtaccgtcaagtctactccccaaagcatctggtacggaccagaccgtcccaagtacttgggaccattctcggagaacacaccgtcctacctaaccggagaataccccggagactacggctgggacaccgctggactctccggcctgacccggagacatttcgctaaggaccgtgagcttcgaagtaattccacagcagatcgggctatgttggggtgctctcggatgcacattcccctgagattctcttccaagaacggggttaaattcggggnaagcccttttggtttnaaaggnngttttntaaattttttt

SEQ ID NO: 123393 - DNA, 465 bp, Arabidopsis thaliana
  unsure (1)..(465): unsure at all n locations
atcctttcctttcattgttgttataacaaagattacgattatggccacatcagctatccaacaatcctccttcgccggccaaacggctctcaagccctccagcgacctcatccaaaaggtgggcgtcttgggcggtggccgtgtgaccatgcgtcgtaccgtcaagtctactccccaaagcatctggtaccaaatttatcctctctccctcttatatgtcttaagtaatccttagttgtttagatctgtctaatcaccaaatgcaatataattttgtaacaggtatggaccagaccgtcccaagtacttgggaccattctcggagaacacaccgtcttacttaactgggnggaatancccggngnctncggcttggncaccgctggactttttggtgacccggggcatttgntaagaccntgagntttangaatcccagcanatgggnnatttttggggcttngg

SEQ ID NO: 123394 - DNA, 412 bp, Arabidopsis thaliana
cccacgcgtccgcggacgcgtgggcggacgcgtgggctttgattctttctgcgccgagaaacagagagagagaacagcaaccaaacactcatttctccacatcttgagagaaagaaaacagagcaagtatattagagatctcatgggcgatggcggtctccggagctgtcctcagtgggcttggttcttcgttcctcaccggaggcaagagacgtgccaccgcattggcaagcggcgtaggcactggagctcagagagttggcaggaaaactcttagttgtcgctgctgcggctgctcagcctaagaaatcttggatccctgccgttaaaggtggtggcaacttccttgaccctgaatggctcgatggctcgctaccaggagatttcgggttcgacccattgggtttgggga

SEQ ID NO: 123395 - DNA, 433 bp, Arabidopsis thaliana
ccccgccctccttcccttccttggtgtttttccaaagattacgattatggccacagcagcggtatccaacaatcctcctgggcgccggccaaacggctctcaagccctccagcgacctcatccaaaaaaggctgggcggcgtctttggggccggtggccgtgtggccatgaccatgtctttgtaccgtcaagtctactcccccaaagcatctggtatggtatggaccagaccgtcccaagtacttgggaccattctcggagaacacaccgtcttacttaactggagaataccccggagactacgtgctgggacaccgctggactctcggctgacccggagacattcgctaagaaccgtgagcttgaagtaatccacagcagatgggctatgttgggtgctctcggcggcacgctccctgaaattctctccaag

SEQ ID NO: 123396 - DNA, 699 bp, Arabidopsis thaliana
  unsure (1)..(699): unsure at all n locations
gccnnnnnnnnnnnnnnnnnnncgccccctttgacgttgcacttgcagttctgcagcaccggtccggaattcccccacgcgtccgcgcaactgatcaaatagcgtaaaattgaaattcaaattttcgccggagctccgtcggataaaacaataagcgacgtgcggcgatggaatctcacggttccggtctccggcgagttctgttattgtcgttctgtgtcgctgggatctgggcagcttacatataccaaggcattcttcaagagaccttgtcgacgaagaaatttggtgaagatgggaagagattcgagcatcttgcatttctgaatttggctcagaatgtaatctgcttggtttggtcttatataatgattaagctctggtccaacggaggttctggtggagccccatggtggacgtattggagtgctggcattactaataccattggtcctgctatgggcattgaagctttaaagtatattagttacccagctcaggtccttgcaaaatcttccaaaatgattccagttatgctgatgggctccttagtttatggcataagatacactttgcctgagtatctttgcacctttcttggttgccggaggagtatctatgtgtgccctttttaagacaagctctaaaaccatcagctagctagcacatcccaatgcaccccttaggtacgggctttgc

SEQ ID NO: 123397 - DNA, 510 bp, Arabidopsis thaliana
taatcgactcactattgggaaagctggtacgcctgcaggtaccggtccggaattcccgggtcgacccacgcgtccgccaacgcgtccgatcgcgtaaaattgaaattcaaattctcgccggagctccgcccgataaaacaataagcgacgtgcggcgatggaatctcacggctccggtctccggcgagttctggtattggtcgatctgtgtcgctgggatctgggcagcttacatataccaaggcattcttcaagagacccttgtcgacgaagagtttgggtgaagatgggaagagattcgagcatcttgcatttctgaatttggctcagaatggtatctgcttcggcttggtccttatataatgattaagctctggtccaacggaggttctggtggagccccatggtggacgtattggagtgctggcattactaataccattggtcctgctatgggcattgaagctgcaaagcatattagttacccagctcaggtgcttgcagaatctt

SEQ ID NO: 123398 - DNA, 781 bp, Arabidopsis thaliana
aaaagccataaccaagattcgtcaagaaatcaacacacaactatctccaagaaccaatgattttgattcattcaatgctcaagagttaaacaagttggtgtatgtacatggagcattgtgtgaagcccttaggctatatccaccggttccatttcagcacaagtctcctacaaaatccgacgttcttccaagtggacacagagtcgatgcgagttcgaagattgtgttctgtctttactcattagggagaatgaaatcagtttggggagaagatgcatcggaatttaaaccggagagatggatttctgagagtggaaggtcggttcacgtgccttcttttaagttcctatcgtttaacgccggtccaaggacttgtttggggaaagaagtggctatgacgcaaatgaagacagtggctgtgaaaatcatacaaaattatgacattaatgtcgttgaagggcacaagatcaagccagctccttcggttattctccacatgaagcatggtcttaaagtcactgtctctaaaagatgtttgtcttgaatgttttaactagaatgtagaaactgtggcagttgacgaagatgatttctatgatatgaagacatctcaaatcatgcatcctgaaatataatgttattgttaaacataatttctaaaatttaagtaaaatatataaatgttggtaagaaaaaaaaaaaaaacaaaaagggcgaccgctctagaggatccaagcttacgtacgcgtgcgtgcgacgtcatagctctctagtagtgtca

SEQ ID NO: 123399 - DNA, 1000 bp, Arabidopsis thaliana
  unsure (1)..(1000): unsure at all n locations
nnnnnnnnnnnnnnnnnnnnnnnnnnnnnnnnnnnnnnnnnnnnnnnnnnnnnnnnnnnnnnnnnnnnnnnccacgcgtccgctctgcgtcgttctagggtttttgttactctttgcttcgaagatgggaaaggcaaagaaacctcaaaagtttgctgtcgtgaagaagatgattagccacaaagctttgaagcattacaaggaagaggttctgaatccaaacaagaaggacctcacggaacttccgagaaacgtaccgagtgttcctgcagggcttttcttttcttacaactctacattggttcctccttaccgtgttttggtggatactaacttcatcaacttctctatccagaataagatcgatcttgagaagggaatgagagactgtctgtacgcaaattgcactccttgtatcacggattgtgtcatggctgagttagagaagttaggtcagaagtatcgtgtagctctaaggattgcgaagatcctcacttcgaaagactaccttgtatacacaaagggacatatgctgatgactgtctcgttgacagagttactcagcataaatgcttcatagtggctacatgtgatagagacttaaagcgaaggattcgaaagattcctggtgtgcccatcatgtatgtgactaatcgcaaggactcaatagaaaagttgcctgaagctacacttggtggagctcccaggtactgataatttattaaagaccctattaattccatgaagcccttaagcctccagccttaattgggatcgggttacgcgcttaatccacttaattggaaagggtaaggtgttaacccatttggtccccaaggtgggttccccggtggtaaattgaaaccaaggttatttaaaaccccaccagaattcttatttaaaaaaaaaaaaaaaaaacccaagggcggcccgtttaaaagaatccaggctaaggaaggggtgcatgcgacgtcataactcttctattagtgtcacccta

SEQ ID NO: 123400 - DNA, 473 bp, Arabidopsis thaliana
cccacgcgtccggtcagtttgactaataaatttcagatggctgtttctctgacagcttgtaatcgttggctattgacaggaacaccaacccctaacacaccaaatagccagctttcacatatccaacctcttttaaagtttcttcacgaggaagtctatggagaaaatccaaagttttgggaagctggcatccttagaccatttgaagcagaaatggaggagggtcgtttgcgtttacttcagctgcttcagagatgcatgataagctctagaaagaaagatctgcagatgattcctccgtgtatcaagaaggtgacataccttaatttccttccagggcatgcaagaagctacaatgaactagtggagacagttaggcgtaatatcttattagctgattggaatgatgcgtctcatgtagaaagtctgcttaactctaaacagtggaaatttcggagcattaccattagtaa

SEQ ID NO: 123401 - DNA, 733 bp, Arabidopsis thaliana
gaagaacgataaacacagagctttctgttctttcgacatatcaaccgtttccttccttaatttgcgttcgttgtgaaaccatagatccaggtgaattctggaaaacatcttgaagcgaaatcgagacatcgttggaggatcaaaacgttaattcgattgatcgatgaatcctagaagggagcctcgtggtggtagaagttctctctttgatggcatcgaagagggaggaattagagctgcttcttcttactctcatgagatcaatgaacatgagaatgagcgtgccttggagggattgcaagatagagtcattctcttaaaacgactatctggcgatataaatgaagaggtcgatactcataaccgcatgcttgacagaatgggcaatgatatggattcatcaaggggatttctctcaggaaccatggaccgctttaaaacggtgtttgagacaaagtcaagccgaagaatgctgacgctcgtggcatcgtttgttggtttatttctagtcatatactatcttactcggtaaaattggcaaacccggagtattcctgaacattcatccatgatctcatgatattcccagtctctctctgttggctcctacgatctaattgtcaccaaccagtgtaatgatgtatgcctccagtgttatagtgtgctctagtgcttgggatgaggacacatttcataaaacttataaaaagtttaatatatttggattttatag

SEQ ID NO: 123402 - DNA, 318 bp, Arabidopsis thaliana
gcgtccgaaaacaaaaaatgttgtcgagattgttcaaggcaggtgaaaaggttttgtcgaatctcgttagcaagaaagacatttacatggcgtcgaggaatcaggagaaatctcccagagtgcgagagctttacgacctctgcaaagcagactttcactggcaaagctccttctcctgcttccatggctatccaaaagctatgctctgctgttggcctcagctctagctcctgcagatgtctggctcttgaagaggtatctcaagacgatgatcgaggctatggagtttctggggttagccgtttcaatagagtagga

SEQ ID NO: 123403 - DNA, 1441 bp, Arabidopsis thaliana
aataccgactcactatagggaaagcctggacgcctgcaggtaccggtccggaattcccgtgtcgacccacgcgtccgaagcggacatatcttgaaacacatggcagcgatttctccatggttatcttctcctcagagcttttcgaatccccgcgttaccattacaggtcctctcaatctctctcactctcacagtcttcactgattcatcgtagtttacaaaattcatattcttggagctaattctttccagattccagaagatgttcatcaatttctgcggcaatctctgttcttgacagctccaacgaggaacaacatcgaatttcgtctagagatcatgttgggatgaagagaagagacgtcatgttacagatagcttcctctgttttcttccttccattggccatttcacctgcatttgcagagacaaatgcatcagaagctttccgtgtgtacacagatgaaacgaacaaattcgagatatcaatcccacaagattggcaagtcgggcaagcagaacctaatggattcaagtcaatcacagctttttacccacaagatacttcaacttccaatgtgagtatagcgatccctggactaggtccagacttcaccaggatggaatcattcggaaaggttgaagctttcgcccaaacattggtcagtggattggataaaagctggcaaaaaccagtaggagtgactgcaaagctaatcgatagcagagcttttaagggattctattacatcgagtaccccttacaaaaccctggagaagctcgcaagcatttgtactctgcaattggaatggcaacaaacggatggtacaaccgtttatacactgtcccaggccagtttacagatgaagaatctgctgaacaaagctctaagatccagaagccagtcaagtctttcagattcatctgagaatgtcattcatatctatcagcggaactaaattatagaattgatcaaacaatttgtttactgaacaattacttttttgcaatgaaattctgagaaaagagcctactccatactttgaagtaagcttcagtaaacaatcccagtgtgttcagatggaagaagagagaaccctaaatatgcacaatcacagaaaaggacatgatgaacatgttttacttacaatgcaggacttaaagacaaaggctatatacctatcaatgttactcactacactcctgcacctgaaggaagtgtagtggtattacgacttcagacttgaaaagaatcagattttgattctaccatatgtatatgcttgtgtatgtgtgtataaatatatgcatattgtacaccaacttattactactggtcttcccctccaagggaaaccagctatggtgccttcaaactcaacccaagctcgagccagcagcttttttgtggctgtgttttatacacattgatggatgggt

SEQ ID NO: 123404 - DNA, 520 bp, Arabidopsis thaliana
  unsure (1)..(520): unsure at all n locations
cgcgtccgccccggacatatcttgaaacacatggcagcgatttctccatggttatcttctcctcagagcttttcgaatccccgcgttaccattacagattccagaagatgttcatcaatttctgcggcaatctctgttcttgacagctccaacgaggaacaacatcgaatttcgtctagagatcatgttgggatgaagagaagagacgtcatgttacagatagcttcctctgttttcttccttccattggccatttcacctgcatttgcagagacaaatgcatcagaagctttccgtgtgtacacagatgaaacgaacaaattcgggatatcaatcccacaagattggcaagtcgggcaagcaggacctaatgggttcaagtcaatcacagcttttttacccacaagaaacttcaacttccaatgtgagtatagcgatcactggactagggcccgactttaccagggttgggtttnttcgggaaggnngnngtttncncggaaaatttgccaggggttng

SEQ ID NO: 123405 - DNA, 396 bp, Arabidopsis thaliana
tccttttgatgaagacaatctcatcccttgtttcggctttggcgattcaacaactcatgacgaggaagtgttcggtttccatagcgacaattctccatgtcatggcttcgaagaggtcttagcatgttacaagagaattgcacccaacttgcgtctatcagggccaacgtcgtatggaccgctcatcgatgctgctgtcgacattgtggagaagaacaacggacaattccatgttctggtgattgttgcagatggacaggtaacgagaggtacggatatggccgagggagaactcagtcaacaagagaaaacaaccatcgacgcgattgtaaatgcaagctcgtatgctttgtcgattgttttagtcggtgttggagacggaccatgggaagacat

SEQ ID NO: 123406 - DNA, 834 bp, Arabidopsis thaliana
  unsure (1)..(834): unsure at all n locations
gccggcannnnnnnnnnnnnnnnnnngggtaaccgccccttgacgaggggcaccccgggttcccgagaattttcccacgcgtccgcccacgcgtccgcacacatctcctattgcaaacgaacataaaacactacctaagagatcaatatggctggagtgatgaagttggcatgcttgctcttggcctgcatgattgtggccggtccaatcacatcgaacgctgcgctaagctgtggctcagttaacagcaacttggcagcgtgcattggctacgtgctccaaggtggtgtcattcccccagcgtgttgctccggcgttaaaaacctcaacagcatagccaagacgaccccagaccgtcagcaagcttgcaattgcattcaaggtgccgctagagccttaggctctggtctcaacgctggccgtgcagctggaattcctaaggcatgtggagtcaatattccttacaaaatcagcaccagcaccaactgcaaaaccgtgaggtgatgagctagcaacggtgagatgatgctactaccggaagtttcgaatccttattatataatggatgagattaatattaaataagatgttcgaatgtttgtttttagagtttttaatttcttgtctttttctattgtggtgttcttgttatatgggtttgtctgtactatgttcgcaggcaacaacgttatatgaaattttcagagtacttgaagttaaaaaaaaaaaaaaaaaaaaccaagggcggccgctctacaggatccaagcttacgtacgcgtgcatgtgacgtcaagatcttctatagtgtcgtccnnnnnnnnnnnnnnnnnnnn

SEQ ID NO: 123407 - DNA, 675 bp, Arabidopsis thaliana
  unsure (1)..(675): unsure at all n locations
atgatacttcagctctctacgactcactatatggaaagctggtccgcctgcaggtaccggtccggaattcccgacccgacccgcgtatggcaaacgaacataaaacactacctaagagatcaatatggctggagtgatgaagttggcatgcttgctcttggcctgcatgattgtggccggtccaatcacatcgaacgctgcgctaagctgtggctcagttaacagcaacttggcagcgtgcattggctacgtgctccaaggtggtgtcattcccccagcgtgttgctccggcgttaaaaacctcaacagcatagccaagacgaccccagaccgtcagcaagcttgcaattgcattcaaggtgccgctagagccttaggctctggtctcaacgctggccgtgcagctggaattcctaaggcatgtggagtcaatattccttacaaaatcagcaccagcaccaactgcaaaaccgtgaggtgatgagcttgcaacggtgagatgatgcttcttccggaagtttggaatccttattatataatgggtggggttaatattaaataaggtgttcggatgttttttttttgggggtttaaattcctgctttttctttgtgggggcctgtaaatggggttnctttaccttttcggggaaaacggttttgattcgggtttggt

SEQ ID NO: 123408 - DNA, 523 bp, Arabidopsis thaliana
  unsure (1)..(523): unsure at all n locations
cccacgcgtccgcgcggccgcgtcgaccccacgcgtccgcccacgcgtccgattgcaaacgaacataaaacactacctaagagatccaaatatggctggagtgatgaagttggcatgcttgctcttggcctgcatgattgtggccggtccaatcacatcgaacgctgcgctaagctgtggctcagttaacagcaacttggcagcgtgcattggctacgtgctccaaggtggtgtcattcccccagcgtgttgctccggcgttaaaaacctcaacagcatagccaagacggccccagaccgtcagcaagcttgcaattgcattcaaggtgccgctagagccttaggctctgggtctcaacgctggccgtgcagctgggaatttctaaggcatgtggggtcaatattccttncaaaattaggaccggaccactngaaaaancgtgggnnnttnggcttcaacggtgggntgttntccttnccggagtttgganccttntttnnatggggggggtttttttaaaaa

SEQ ID NO: 123409 - DNA, 567 bp, Arabidopsis thaliana
  unsure (1)..(567): unsure at all n locations
agttggacgcgcattatcttctcgttatcctcctctagtatcgccgnnnnnnnnnnnnnnnnnnnnnnnnnnnnnnnnnnnnnnnnnnnnnnnnnnnnnnnnnnnnnnnnnnnnnccacgcgttcgtacggctgagaagacgacagaagggggagctctgtttttgaaagaagttttacagagtcgatcgtctaaagcgttgttgaagcacttgttagtggtgctctgtttcaagctggataaacccaatcctattgggatttggctggattttataccatattttagcatgattgtttgataaacgcttgataaattgcctcttgttgtcacctttgctacgaaaatgtctctggtttgctctttatcttgtgtagctcccttgccacagactaaacagtcgcgtccaagttttctgaaactcgaaacatgtaccttaagtttatcttctcccgctggctatcctaattttaccaccggtattaggaagcatatcagttacttgttcactgaaccgatcaagcttcctaggctagcagagagtcggatattagttagtcaggagtc

SEQ ID NO: 123410 - DNA, 665 bp, Arabidopsis thaliana
gagagagaagaagaagcaaagatataacccccaaaagtatcaattagtttccattttcgccgctaagattctgttttcgaacatttacaccctcaagaatcgccgccatgtgtggaggagctataatatccgatttcattccaccgccgaggtctcgccgtgttactagcgagtttatttggccggatctgaagaagaatttgaaaggatcgaagaaaagctcgaagaatcgttcgaatttcttcgattttgacgctgagttcgaagctgatttccaaggtttcaaagatgattcgtctatcgattgcgatgatgatttcgacgtcggtgatgttttcgccgatgtgaaaccattcgttttcacttcgactccaaaacccgccgtctccgccgctgcggaaggttcagtttttggtaagaaagttactggcttggatggggacgctgagaaatctgcaaataggaagaggaagaatcagtaccgagggattaggcaacgtccttggggaaaatgggctgctgagatacgtgatccaagggaaggtgctagaatctggcttggaaccgttcaagacagctgaggaagctcctagagcttaacggttgctgcagcgcggagaatccgtggttctaaagctaaggtgaatttccctgaagaaaacatg

SEQ ID NO: 123411 - DNA, 684 bp, Arabidopsis thaliana
  unsure (1)..(684): unsure at all n locations
nnnnnnnnnnnnnnnnnnnnnnnnnnnnnnnnnnnnnnnnnnnnnnnnnnnnnnnnnnnnnnnnnnnnnnnnnnnnnnnnnnnnnnnnnnnnnnnccacgcgtccgctttccgtcacgaatcgttctctcgtcgtcatcaaaatctgttagccgaatcagatagagaaaagaagaaagaatggtgggaagtggagctccacagagaggaagtgcagctgcaactgcaagcatgcgtaggaggaagccgaccagcggtgctggtggaggaggtgcctctggtggtgcagccggatccatgcttcagttctacaccgatgacgcacctggtctcaagatctcccccaatgttgttcttatcatgagcatcggtttcattgctttcgtcgctgtgcttcatgttatgggcaagctctactttgtcaaatgatgacaaagataatagttgaagacaatgccaccctaagtgactgctagtgatccaaatattatacagtggtttcaagttaatgttttaattttgtggtttattaccagagtataaacgatctttcacaattccagtttctttacattcaaattttcaatattcttcacacatattaaaaaaaaaaagnnnnnnnnnnnnnnnnnnnnnnnnnnnnnnnnnnnnnnnnnnnnnnnnnnnnnnnnnnnnnnnnntcacg

SEQ ID NO: 123412 - DNA, 613 bp, Arabidopsis thaliana
  unsure (1)..(613): unsure at all n locations
gagtttcttttgtcaaattagagagaagctcttatgaccttaggagaagcagtcgtcaaagcaccggtgcatcaataacgagctcgagcctagagatctctgtcccattctcttcgtcattcatcactctatctgcgtttcgttgagcgataatggatgccgcttgctctacccagcttatcgatggggatggtgtctttaatgtttctggggttgatcatttcatcaaggaggttaaattggacgaatgtggtctttcatacgcggttgtctcgattatgggtccacaaagtagtgggaagagtacgctcttgaatcatttgtttggaaccaactttagagaaatggatgcatttagaggaaggtctcagacggctaaggggatttggattgctagatgcgctggtattgagccttgcaccgttgtgatggatttagagggtaccgctgggagaaaaccgtgttaaggattatacctcttttcgggaacanagtcctcttttttnctttcagtcnaanaaaaagtctttaaanantgngggcaagnaattggcgggacaagcgnaaaaaaccntttaaagctntttcccggnanaattngtttttncccggg

SEQ ID NO: 123413 - DNA, 713 bp, Arabidopsis thaliana
gagaattgaatctgtagtcgaaagaaaagagttgggaaaaaaatggacgcaagcatgatggctggacttgatggtcttcctgaagaagacaaagccaaaatggcctccatgatcgatcagcttcagctccgtgatagtttgaggatgtacaattcattggtggagaggtgtttcgtggactgtgttgatagcttcacacgcaaatctctgcagaaacaagaggagacttgtgtgatgcgttgcgctgagaagttccttaagcatacgatgcgtgttggtatgcggtttgctgagctcaatcagaacgcaccaacccaagactgatatagtctgctttttctgtttggttttttcgtacggtttacgagtccgaaaccagaataaaccggttgtttagttgttcaggttactactccgatactgttttttgaacttcttgtactgtgaaattcttttgaatatatccagttcttatattgatgttgatctgcattccaatggagtctagaaaacatcatattatatcatttaaataaatacattacctttactgggcggccgttttagaggatccaaccttaccttcccatgcttgcgacgccatagctctttttttactggaacctaaaattcaatttactggcccgtctttttttcaaaccttccagacctgggaaaaacccctgtccgttaccccccctttaattggactt

SEQ ID NO: 123414 - DNA, 460 bp, Arabidopsis thaliana
  unsure (1)..(460): unsure at all n locations
cgtcacttaatctccgacggaggaaaagtagccaccgcttgacgaatcattcatcaacacacgcagagagctctgaatctcgaggaagaagatggtgaggatcattcctatggctgcttcctccattcgaccttccctcgcctgcttctctgattctcctcgcttccccatctccctcctctccagaaatctctctcgcactctccatgttcctcaatcacagctttttggtttaacttctcataagcttttgagaagaagtgtaaactgtttaggagttgctgaatctggtaaagcagctcaagctactacacaagatgatcttctcacctgggttaagaatgataagagaagaatgcttcatgttgtttatcgtgttggcgatatggaccggacgataaagttttatactgaatgtcttgggatgaggttttaacgaaggggggatttcccannggtg

SEQ ID NO: 123415 - DNA, 1062 bp, Arabidopsis thaliana
  unsure (1)..(1062): unsure at all n locations
tgatactccnnnnnnnnnnnnnnnnnnnnnnnnnnnnnnnnnnnnnnnnnnnnnnnnnnnnnnnnnnnnnnnnnnnnnccacgcgtccgtgcggctgcnanaanaccacanaaggggaaaaccaacacaactagataattaatatctgaatgatttttttaaaaaaatatgggaataaaaagagctaaagcttctctctctcttctctctcacaaaaccttcagagagggaaagctttttgtctccacctacaagaattttccgatgatagccgttccaaataatttgggcttttgcccggtatcttctagctcttttagtggagatgaccggttcccgtacggcaaatcctgctttcataagaggttttggccgcttgtatccttgctcgtagtcaatcagttttatgctgattgctttgatattttagttttgtttttcaataaatctcaacagatttgagatggtaattagttttaggtgctagttacttaagattaatttctgtcttgtgtctttagaaacttcgatttgcagaaatctatcaagcgattatgtcttcgggttgaaagattgaagaatattccgatgcttattatgattcctttttgctgtgtcttttaaatggagcaccgttcagttttatttcggtggttacaaggattcattgtgcgatgtttcggcgatgcattcctcaccggattcggtgttcatcggcggcgaaggttgatgtcggtacacttccgatgactcttcatcttgtgttgcagttgtaatatcacgtggacacgtgtattggatagagtccaaatgtcaaaacatctttatgccgtagatgttaatcttatgggctatgttgggcctaacttttctttctgcacatatcgttgtaagctttaatgctttgtttcctcttttggtggttaatataatacacttatgagaagnnnnnnnnnnnnnnnnnnnnnnnnnnnnnnnctaattcccttannnnnnnnnnnnnnnnnnnnnnnnnnnnnnnnnnnnnnnnnnnnnnnnnnnnnnnnnnnnnnnnnnnnnnnn

SEQ ID NO: 123416 - DNA, 309 bp, Arabidopsis thaliana
gctcaggagagtttaccattatcctcaagccaacgcattctctgatttctcttctttgaaacggcgcctttgtttttgagctattccgatcgattttgaaatcgattttgagctgaaaaaaagttgctctgctttttaagtcagatggaagtaaatgtgttggaagttgcttcgagatcgacgatcatactgatgatttagttgataccgttaatgccacataggccgtcgaatttctatttttcgccttttagcttgagcaagtgtggatttcgtcgaggtttttgattgatggagggtttcgattct

SEQ ID NO: 123417 - DNA, 547 bp, Arabidopsis thaliana
  unsure (1)..(547): unsure at all n locations
cnnnnnnnnnnnnnnnnnnnnnnnnnnnnnnnnnnnnnnctgcaggtaccgggccggaattcccgggcaaaagaagccaaaacttctttttgcagatgacctacaaaacgaaactttagaagctgtcccaaatataggtgagattcactgatcgatctccttttttttttgtcacttatatccaccaatttgcaaactcttatggtttattcagaagaagccaacaatgaaagaaaggcaccaacagagataaagaagaatggagaaagtagtgagaagaagagcccagaactggtttgtatggaggaggaacttcaaaagtggtcagctgaatcatttattgatttaactgcttctggtgagcctctcagatctcaaataatattggattgattgcaatatttttgaatttagatacatacatatatgcaaatgttttaggttacataagattccagttctgctttgtcataggtgatctttgagttatggtatcaattatgggaaacatgttgtttctaatcccattcttggtctattatggtat

SEQ ID NO: 123418 - DNA, 727 bp, Arabidopsis thaliana
ggggcggaccacaggcgtccgttttgttaaagctaagtgcctctttgcagcgaaagctcaaccaacaagacgatgattatctcagagaacaatcgcagagagatctgcaaataccttttcaaagagggagtatgctttgctaagaaggatttcaatctcccaaagcatccgttgattgatgtaccaaacctgcaagtgattaagctcatgcagagtttcaagtccaaggagtacgttagggagacatttgcgtggatgcattattattggtttctgactaatgaaggaattgagttcttgagaacttatcttaaccttccttccgatgttgtccctgctactttgaagaagtctgctaagcccggtggtcgtccctttggtggcccacctggtgatcgccaaagaggaccacctcgctctgatggagaccgtcccagatttggtgaccgtgatggataccgtggaggcccacgtggtggtgatgagaagggtggagctccagctgatttccagccgtctttccaaggaggtggtggtaggcctggttttggccgtggtgcaaggcggttacagtgcagcagcaccatcttggttcaagggttcccttgcaaaaaatttgttgtcatattgcgacgatggaaggacagttttgttttttgttctagttctgtttgtgtaatgcaaatctggaatctataatctatctattaccttcaccttggtttaa

SEQ ID NO: 123419 - DNA, 588 bp, Arabidopsis thaliana
  unsure (1)..(588): unsure at all n locations
atgatactccagctctctacgactcactatanggaaagctggcacgcctgcaggtaccggtccggaattcccgggtctgacccacgcgtccgctctcgtaacagtagaagcagagtgcaaatctcactgactactaccaaggcaccaatcaccatgaccatgatgatcattacagtgttcttaacagtgattgcagcggttctcgcaatccttgtcaagaattctcaaaccggttctggcatcttcgcaccgcctgaaatctccggttcgcgtgatgttttcccgtcggcgaaagtggttaacttaaccggagcctctggtcctgagagtatagctttcgatccagcaggtgaaggtccgtacgttggtgtctcagatggtcgtatcttgaaatggcgcggtgaaccgcttggatggtcagatttcgctcacacatcgtctaacaggcaggagtgtgctcgcccatttgcaccagagtgtggagcatgtctctggaaggccattacggtcagcggtttcgatcaggtaaccggagatctctacatagcggatgcctactttggccttcatgttgttggtcctgctggt

SEQ ID NO: 123420 - DNA, 749 bp, Arabidopsis thaliana
cattcttctccccaagctgcctctctggcttttccccatcttcctgggttctccggattgcgatcttggtaactagatattgaatttagggtgccaatcaaatcgcagctgctagggggggatattaggcggagaagaaaatgggggttatgtccagacgggttttgcccgcctgtggtaacctctgtttcttctgtccttctttgagggcaacgtctaggcatcccgttaaacgctacaagaaaatgctcgctgaaatcttccctcgtaatcaggaagctgagcctaatgatagaaaaatcggcaagctgtgtgagtatgcgtctaggaatcctttacgaattccaaagattacagagtaccttgagcaaaaatgttacaaagaattgcgaaatggaaatattggttcagtgaaagtcgtcttatgcatttataagaaactgctttcatcatgtaaggagcagatgcctcttttttcgtgtagtttgctaagcattgtcagaactcttttggagcaaacaaaagaggaagaagttcagatcttgggttgcaatactcttgtcgactttataagtttacagactgtgaattcgcacatgttcaacttagaaggtctaatccctaaactttgtcaacttgctcaagaaatgggtgatgatgaaagatcactccaattacggtcagcaggaatgcaggctttggcattcatggtatctttcattggtgagcattcgcaactatcaatggac

SEQ ID NO: 123421 - DNA, 734 bp, Arabidopsis thaliana
cggacgcgtggggaaaaatttgatatttgaagcgaatcaacaacaacagtcgggttcgtgaaaaaaaaagatttgatcggctaaacttggtcgctttcaggtttatcgtggaaggacttgtcaatggcagacgtacctggatacctgcgcacttgtttggatatggggaagatagctttcttagcaatccttgtatctacagggattgtgttgcagattctggcttgtgctctgttcaataactggtggccaatgctaagtgttataatgtatgtgctcctcccaatgcctttgctcttctttggtggatcagacagtacatctctattcaacgagtcagataatagttggatcaatgcagccaagttcttgactggtgcatcagcagttggaagcgtcgcgataccatcgattctaaaacacgccggactcatcggttggggcgcattagcccttgatctctcatcctacgttgtcttcctcgtggctattttgggttacatttgcataggagatgccagtgacaactattacagctacatttaaaaagacacacacaaattcatcatcatttgtttaaacctcaacaaagtctcagccttttatcacttccccgttcgattgatgcttcgaaacgaaaacatcttgtttctatggaatgactcactgattggattttcacaagttaagaagttgtgtgtcaagtgtatgtatgaatgattttttttttgggg

SEQ ID NO: 123422 - DNA, 435 bp, Arabidopsis thaliana
cccacgcgtccggaggaaagaaaaataagataccactcaccaaaaacttcctcaaaactaacaaatggatactaataaagcaaaaaagcttaaagttatgaaccaactcgttgaaggccatgacttaacaactcagcttcagcaactcctctctcaacccgggtccggtctagaggatctagtggctaaaatcttagtgtgtttcaataacaccatctccgttcttgataccttcgaacccatctcctcctcctcatccctcgccgccgttgagggatctcaaaatgcttcatgtgataacgacggcaagtttgaagattccggcgatagtcggaaaagattgggacccgttaagggtaaaagaggatgctacaaaagaaaaaagagatcggagacgtgtactatagagtcgactatacttgaggacgcattttc

SEQ ID NO: 123423 - DNA, 808 bp, Arabidopsis thaliana
ccggcccccattggacggccttggcagtacccttccggaattcccgggtcgacttcacgcgtccgccgacaatggcgatagctatggcggttgtttctttcccatctctgctcaacaaaacaaccttatcctcttcactcttcactcccactttcctcccggcgaaatcctcttcacttctcatcaaatcatcaccaaaaaccagattcgtggtttcatcatccatggaagctggaatcggagtaatggggtcaaaactcgggatgatgagtttcttcgaagaagacggcacagtagttccagtaacagtcgtcggattccgcgaaggtaacatcgtaacccaaatcaaaaccctagccacagacggttacgacgcggttcaaatcggttaccgtcgtgtacgcgacaaaaagctaactaaaccggaaaccggtcatctccaaaaagccggtacaatcccaatgagacatctccaagagttcagattaacaaacatcgaaggattcgaaccgaaccagaagcttgtgttcgatgagatattcaaagaaggtgatctcgttgatgtagctggaaccacaattggtaaagggtttcaaggaggaatcaaaaggcatcatttcaagagaggtcagatgactcatgggtccaagagtcatcgagctttgggttcgaatggtgctgggactactccgggaaagagtttataaagggaaaaaagatgccctggaagaaatgggaaggggacccagggaccccaggaattagggaagcccttaagaaatggttaaaaggctggattaaggggggc

SEQ ID NO: 123424 - DNA, 1160 bp, Arabidopsis thaliana
  unsure (1)..(1160): unsure at all n locations
cccacgcgtccgcccacgcgtccgcccacgcgtccgcccacgcgtccgcggacgcccggccgccgccaatggcgatagctatggcggttgtttctttcccatctctgctcaacataacaaccttatcctcttcactcttcactcccactttcctcccggcgaaatcctcttcacttctcatcaaatcatcaccaaaaaccagattcgtggtttcatcatccatggaagctggaatcggagtaatggggtcaaaactcgggatgatgagtttcttcgaagaagacggcacagtagttccagtaacagtcgtcggattccgcgaaggtaacatcgtaacccaaatcaaaaccctagccacagacggttacgacgcggttcaaatcggttaccgtcgtgtacgcgacaaaaagctaactaaaccggaaaccggtcatctccaaaaagccggtacaatcccaatgagacatctccaagagttcagattaacaaacatcgaagggattcgaaccgaaccagaagcttgtgttcgatgagatattcaaagaaggtgatctcgttgatgtagctggaaccacaattggtaaagggtttcaaggaggaatcaaaaggcatcatttcaagagaggtcagatgactcatggttccaagagtcatcgagctttgggttcgattggtgctggtactactccgggaagagtttataaagggaagaagatgcctggaagaatgggagggacgaggacaaagattaggaagcttaagattgttaaagttgataaggagcttaatgttgtcatgatcaaaggtgctttgcctggtaagcctgggaatcttcttcgtattactcccgctaaaatcgtcggagttaacattcccaagaactagtagagaagagactctgttttgttttgtaatgttgacttgtgtttatccattccttgaaaatttgtatcgaattttcaaggaatggataaatcacagtttctttcttagaattggagtttttgtataagtcggaagtatttctatgctaatgttcttgaattgtgnaaaaaaaaaaaaaacaaaaaaaaaaaaaaaaaaaaaaaaaaaaaagggcggccgccctaaaaaaaaaaaaaaataaaaaagggggggccccctttttttttttttttttt

SEQ ID NO: 123425 - DNA, 604 bp, Arabidopsis thaliana
  unsure (1)..(604): unsure at all n locations
gaagataagagtgtggcacagagctttatcctctctcagagtttcttctcctctgtgaatctccgacaatggcgatagctatggcggttgtttctttcccatctctgctcaacaaaacaaccttatcctcttcactcttcactcccactttcctcccggcgaaatcctcttcacttctcatcaaatcatcaccaaaaaccagattcgtggtttcatcatccatggaagctggaatcggagtaatggggtcaaaactcgggatgatgagtttcttcgaagaagacggcacagtagttccagtaacagtcgtcggattccgcgaaggtaacatcgtaacccaaatcaaaaccctagccacagacggttacgacgcggttcaaatcggttaccgtcgtgtacgcgacaaaaagctaactaaacccgggaacccggtcattttccaaaaagccggtacaatcccctttggggcatttccaagggttcaggttttacaaacatccggggggttggnccccgacccnaggttttttttcggtggggttttttaagngggggtttctgtggtttgntggccccattgggaagggtttntggggggtnaagc

SEQ ID NO: 123426 - DNA, 1361 bp, Arabidopsis thaliana
  unsure (1)..(1361): unsure at all n locations
nnnnnnnnnnnnnnnnnnnnnnnnnnnnnnnnnnnnnnnnnnnnnnnnnnnnnnnnnnnnnnnnnnnnnccacgcgtccgctctgctaaagtttcagatcttggtcttcggtctattggtcgtagctgcccttctctcgggtctctttcactgtggaacgtttctaccattactgacaatggacttttggagattgctgagggttgtgctcaacttgagaagcttgagctgaaccgctgctctacaatcactgacaagggtttggtagctattgctaagagctgccccaacttgactgagctgacattggaggcttgttcaagaattggagatgagggtttgctagccattgcaagatcctgctccaagctgaagtcagtctcgatcaagaactgtcctcttgtcagggatcaaggaatcgcctctctactgtctaacaccacctgttccttggcaaaacttaagcttcagatgctgaatgtcactgatgtgtctcttgctgttgtgggtcattacggcttgtcgatcactgatcttgtgctcgctggattatcacacgtgagcgagaagggattctgggtcatgggaaatggtgtcgggctgcaaaaattaaactctctgaccatcacagcctgccaaggagtgactgacatggggcttgaatctgttggaaagggctgcccgaacatgaaaaaggcgatcatcagtaaatcccctttgttatctgacaacgggttggtctcttttgcaaaagcttctttatcacttgagagtcttcagcttgaagaatgccacagggttacccaatttgggttttttggttcccttttgaactgtggtgaaaagttgaaggctttctctctggtgaactgtttgagtattagagatctcaccacaggattgcctgcttcatctcattgcagcgctctgcgctctttgtctattcgtaactgccctggctttggtgatgcaaatcttgcagccatcgggaagttgtgccctcagctcgaggatattgatctgtgtgggctcaaggggataacagagtctggtttcctacatctgattcagagctctcttgtgaagatcaacttcagtggttgtcccaatttgaactgatagagtgatctctgccatcactgctcgtaacggggtggactcttgaagtcttaaacatcgatggatgttccaatatcactgacggcagcctgggctcccattgcagnaacngccagattctcagtgatttggntatttcggaaatgngaaatctcagntcaaggggtcaaagnattggccnccnntgnnaagcnaaactngagncccntnanttcagggtgccttttggtnagcaagngttc

SEQ ID NO: 123427 - DNA, 640 bp, Arabidopsis thaliana
  unsure (1)..(640): unsure at all n locations
angccccggggcntcctngggggccggnctctgnangtccacccggngnttcctttggaacccggttcggnacttnggcaaacccgcgatatttccgggattgccacccctaaccgatcatgtggacccaaggattagaagagtttgatcaagaggccgagaagacaaatcgattgttggctagaattgctgatgatgcatctgccaatcttaaagagctcgagtctcactattactcttctgctcagagattgactctagacatctgatattagaatgcctggagacaccagaggaaacagataaaacaattggttcataaaccagaggaaacggccatcgaaggatatgcagtttgaagtcatggacaacgttttggactatcctttcccacattgatcatatttcctctctcaattcgcatattacttagcaatcttaaatgttccagtctgatgaacaagcgtttgatgttttcatcaatcattagtgatttttttgctgttatcctcttgtatgttttgataattacgtgaaattacattctcttaaaaaaaaaaaaaaaagggcgaccgctctagaggatccaagcttacgtacgcgtgcgtgcgacgtcataactcttctatagttgtaccta

SEQ ID NO: 123428 - DNA, 634 bp, Arabidopsis thaliana
  unsure (1)..(634): unsure at all n locations
ctcaatacgactcactttagggaaagctcgtacgcctgcaggtaccggtccggaattcccgggtcgacccacgcgtgcaaaagaccggcgataattatgaacaaaggcggtggatccggtggcggatccggtggaggaagcggtccaacggccgccgccgccgccgcggctttacagaagcaaaaggcgttgttacagagagtggagactgacatcacatctgtcgtcgataacttcacgcagatcgtcaatgtttcaagggtgagtgatccgccggtgaagaactcgcaggagacatacatgatggagatgcgagcttctagaatggttcaagcagctgattctcttttgaaactcgtatcagaacttaagcaaacagcgatattttcaggatttgcatcactaaacgatcatgtagaacaaagaatagaagagtttgatcaagaggccgagaagacaaatcgattgttggctagaattgctgatgatgcatctgccaatctttaagggctcggggcncactattancnttcttnctcagagnttggctctnggcatctggtattagnattcctggggcacccggggacnggtaaacaattgtnntancccgggancgcctcgaggntcntgc

SEQ ID NO: 123429 - DNA, 660 bp, Arabidopsis thaliana
  unsure (1)..(660): unsure at all n locations
nnnnnnnnnnnnnnnnnnnnnnnnnnnnnnnnnnnnnnnnnnnnnnnnnnnnnnnnnnnnnnnnnnnngatccacgcgtccgaaaaaaactctcttccaaaaatggcaattagggtttcccacaagtctttcctcgtcgcacttcttctcatactcttcatttcctctcctactcaagcacgaagcttacgagaagtagtaaggaatataacgctattggttgtggagaagagtcaagagagtcggaaaataaggcacgaaggtggaggaagtgatgttgatggattgatggatatggattataattctgcgaacaagaaaagaccgatacacaatcgctaataaacacacatgaacttatcgaattcttgtgagatatcctgagatccaaagatatcccgagattttatcttttactaaacataaattataagaagtgagaatgtattttatataagaaaagaagtgagaatgtaaactattattatttataggaacatataaatataaacgactttgtatgcatgtgtacagtattatctcgagggaaaacagttctatacaataatcatagcttgtgtgtgctagctttatgtatggattgcatcatggttttctgtttgtgaaataaaactctataatatattatgtgtaaaaaaa

SEQ ID NO: 123430 - DNA, 1051 bp, Arabidopsis thaliana
  unsure (1)..(1051): unsure at all n locations
acgactcactatagggaaagctggcacgcctgcaggtaccggtccggaattcccgggtcgacccacgcgtgcgcttatttgtgtggcgaagagaagagataacattcctaagcaaatctcttctctctcccattcgtctccaaagagattacagttttgagcatttctcatctctcgaagctcttctctgtgtgtgtggcgatggctgctaattcgataatggcttcctccaaacccctaatctccctgtcatccaaccaacaaccaaaccgagtccaaattcccaaattcgccaaacttccccaaattcccaaatccctcacttcctccaccgatctccgtagcaaagcactatcactctcctccgccaccgccaaatccttagctttaatcgccgctttcgctcctccgtcgatggcggaggcgatggagaaagcacagctcttcgatttcaatctcacgcttccgatcatcgttgttgagtttctcttcttgatgttcgctctcgacaaggtctattactctccgcttggtaacttcatggatcaaagagacgcttccatcaaagagaagctcgcgagtgttaaggacacttcgactgaagtaaaggagctcgatgagcaagccgccgccgtgatgagagcagctagggctgagatcgccgccgcgcttaacaagatgaagaaggagactcaggttgaagtcgaggagaagctagcggagggaaggaagaaggtggaggaagagctaaaagaagctttggcgagcttggagagtcagaaagaagaaaccattaaagctttggattctcagattgctgctcttagtgaagacattgtcaagaaggttcttccttcttaaattatattttttgttaaactgtcggtaattcctctggccttctctctatcctcaaaaactttaatttaaccaagaaaattaacctgggaaaaacctctttctttccttccttctctgtttcttggattgtncgtcggtcaaagnaggacaattttttattttgnaggttataaaaattagcncnctctgc

SEQ ID NO: 123431 - DNA, 634 bp, Arabidopsis thaliana
  unsure (1)..(634): unsure at all n locations
caaagagattacagttttaagcatttntaatctctcgaagctcttctctgtgtgtgtggcgatggctgctaattcgataatggcttcctccaaacccctaatctccctgtcatccaaccaacaaccaaaccgagtccaaattcccaaattcgccaaacttccccaaattcccaaatccctcacttcctccaccgatctccgtagcaaagcactatcactctcctccgccaccgccaaatccttagctttaatcgccgctttcgctcctccgtcgatggcggaggcgatggagaaagcacagctcttcgatttcaatctcacgcttccgatcatcgcttcgttggggttcctcttcctttgatgttcgctctcggccaagggcttttacctctccgcttgggaacttcatgggtcaaagggggcgcttccctcaaaggggaggctcgcgggtgtttagggcacttcggctgaaggaaagnagtcgatgagaagccgcgcgggntganacagctngggtgaaatngccggcggggtaaaaagatgaaaaggggncncggttaaatcgggnaancntcgggggnagnaaaagggggggangnnaaaaantttggngcttgnggcaaaannacctngc

SEQ ID NO: 123432 - DNA, 694 bp, Arabidopsis thaliana
taggtgacactatagaagagtctatgacgtcgcatgcacgcgtacgtaagctcggaattcggctcgaggcactctcacccttccgttcatcgtatggtgagtctcccttcttgatgttcgctctcgacaaggtctatgactctccgcttggtaacttcatggatcaaagagacgctcccatcaaagagaagctcgcgagtgttaaggacacttcgactgaagtaaaggagctcgatgagcaagccgccgccgtgatgagagcagctagggctgagatcgccgccgcgcttaacaagatgaagaaggagactcaggttgaagtcgaggagaagctagcggagggaaggaagaaggtggaggaagagctaaaagaagctttggcgagcttggagagtcagaaagaagaaaccattaaagctttggattctcagattgctgctcttagtgaagacattgtcaagaaggttcttccttcttaaattatatttttgttaactgtgtaattctctgtctctctatctcaaaacttatttacaagaaattactgtaaatctcttcttcttcttcttctctgtttcttggattgttcgtcgttcaaagaagaacaatttttattttgtaagtttataaataattagctcccctttgtccctttagatgattaaagtacaaaaaaaaaaaaaaaaagggcggc

SEQ ID NO: 123433 - DNA, 496 bp, Arabidopsis thaliana
aggtttttgctttatcgtaggcttccttcatttgcacgaacaacaacaacaacccttctctgcaaatctatggagcctgcgataacagcgacttcttcttcttctttcggtggtggctcttctcgtctcgccgctttagcccagcaacttcgccaatacaagcccccaccttcttcatcgttcgatgactccgaggagatgcagacagatcaggagaccgctgggaaagtcgtttctcaggttgggtttcaggaatctattgctcctctttcgaaagaccctgataggtttaaacccaagagagccgctgtgttgatctgtctctttgaaggagatgatggtgatttgcgtgttattcttactaagagatcttccaaattgtctactcactctggagaagtttcattgccaggtggtaaagcggaggaggatgataaagatgatgggatgactgctaccagagaggctgaggaagagattggattggacccttctc

SEQ ID NO: 123434 - DNA, 1352 bp, Arabidopsis thaliana
  unsure (1)..(1352): unsure at all n locations
acccacgcgtccgggtttagtcacactctcattctcgtttgtgtttttgattggcggagaattggtgatagataagcttcttcttccctcttctcaacttggtggatctgtcatcgatggcctctttgatgctcaacggggccattaccttccccaaaggtttaggttcccctggttccaatttgcatgccagatcgattcctcggccgaccttactctcagttacccgaacctccacacctagactctcggtggctactagatgcagcagcagcagcgtgtcgtcttcccggccatcggcgcaacctaggttcattcagcacaagaaggaggcttactggttctacaggttcttatccatcgtatacgaccatgtcatcaatcctgggcattggaccgaggatatgagagacgacgctcttgagccagcggatctcagccatccggacatgcgagtggtcgatgtcggcggcggaactggtttcactactctgggcatagtcaagacagtgaaggccaagaatgtgaccattctggaccagtcgccacatcagctggccaaagcaaagcaaaaggagccgttgaaagaatgcaagatcgtcgagggagatgctgaggatcttccttttccaaccgattttgctgacagatacgtttctgctggaagcattgagtactggccggacccgcagaggggaataagggaagcgtacagggttctcaagatcggtggcaaagcgtgtctcatcggccctgtctacccaaccttctggctctntcgcttctttnctnatgtntggatgctcttccccaaggaggaagagtacattgagtggttcaagaatgccggtttcaaggacgttcagctcaagaggatttggccccacagtggtcccgtggtgttcgcaggcccggcctttatcatgggatgttctgtcactggtgttaaacctgcctccggtgactctcctctccagcttggtccaaaggaagaggacgtagagaagcctgtcaacaaccccttctccttcttgggacgcttcctcctgggaactctagcagctgcctggtttgtgttaatccctatctacatgtggatcaaggatcagatcgttcccaaagaccaacccatctgatccttctcttctaggacatgatcattgtatcattgtaaacccctcttgtggtaaagaaagattcgagtcctatctatgaacatgcggaatatcattaaccttctttctttacatgtattactagattttcatgttgagatatctatgctacttgttaaaaccctatgggccaccgctctagaggatccaagcttacgtacgcgtgcaggcgacgtc

SEQ ID NO: 123435 - DNA, 1868 bp, Arabidopsis thaliana
  unsure (1)..(1868): unsure at all n locations
nnnnnnnnnnnnnnnnnnnnnnnnnnnnnnnnnnnnnnnnnnnnnnnnnnnnnnnnnnnnnnnnnnnnnnnnnnnnnnnnnnnccacgcgtccgcccacgcgtccgcggacgcgtgggcaactacatactgcaaggcaagagctaagtcatgccttgtatcagcatgattctgcttgtcgtgtgattgctagacttaaaaaagaaagagacgaagcacgccaattactggccgaggttgagagacatatacctgcggcccctgaagctgtgacagctaatgctgctctgagtaatggtaaacgagctgccgttgacgaggaactgggtcctgatgcaaagaaattgtgtcctggaatttcagctgaaattattacggaattgactgattgtaatgctgctctttcccagaagcgataaaagcgacagattcctcatacattggcgtcaatagatactttccacgcgtccgctcagctatcaagccacccacttcacaagaccaacaaaccaggcatttgttcgatggacattctacattctaaggatgtcattgctactggaggagttgatgcaactgctgttctctttgatcgcccttctggacaaatcttgtcaacactgactggtcactcgaagaaggttacaagcgtaaaatttgtaggcgactctgatcttgttttgactgcttctgctgacaagacagtccgtatctggcggaatcctggggatgggaattatgcttgtgggtatacattgaatgatcattctgcggaggtgcgagctgtaactgtgcatcccacaaataaatactttgtctcggcatctcttgatggtacatggtgcttctacgatctgtcctctggctcatgccttgcacaggtatcagatgattcaaagaatgtagattacacggctgctgcttttcatcccgatggtctcattctcggaaccggaacttctcaatctgttgttaagatttgggacgttgaaagtcaggcaaatgtggctaagtttgatggacacattggggaagctacagctatatctttctctgaaaatggttacttcctcgcgacagctgcagaggatggtgttaggttgtgggatctgcgcaagttaaggaacttcaaatcatttttatctgcagatgcgaactctgtggagtttgatcctagcggatcttatctcggtattgctgcatcagatatcaaagtataccagacggcaagtgtgaaagctgaatggaaccttatcaagacactcccagatctctccggcactggtaaagctacgtgtgtgaagtttggttcagatgcacagtacgttgcagtcggttcgatggaccgtaacctacggatatttggtcttcctggtgatgaaaaagccaacgtcgatgatgactctgcgcaagactcgtgaacaatccgtaaaaaactcagacagaacattccaaatgtccatctccagtgttatctcgctcaaatttctcaagttctgttgtatcttacagtatttgcagcaatgggggagaatttcataggtgcgggtcatgagtgagtggtgattgtgatcatcctcgctacctcttggaattcaaacaatgacactcacaaaccctcgagttttcttataggctcttttaatcgctttgtaccttcaatatatgtaccaaaaaatgtgttctttctgttgccaaatgaattcagacactaatgaagatcccaaaccgatggtgctaaaccgcatttggtattatttaatctgttctagacaaaaaaaaaaaaaaaaaagnnnnnnnnnnnnnnnnnnnnnnnnnnnnnnnnnnnnnnnnnnnnnnnnnnnnnnnnnnnnnnnnnnnnnnnnnnnn

SEQ ID NO: 123436 - DNA, 892 bp, Arabidopsis thaliana
  unsure (1)..(892): unsure at all n locations
nnnnnnnnnnnnnnnnnnnnnnnnnnnnnnnnnnnnnnnnnnnnnnnnnnnnnnnnnnnnnnnnnnnnccacgcgtccgcccacgcgtccgcccacgcgtccgccgcgtttttgctttgtagcgccggaccggagaagataaaacccttgctccgccccactcacaggaagttctacatcgacctgagttctcgtacttcgtcgtatcactcgttcttcctacgatgaactgtgcaatttcaggagaagttcccgtggagccagtggtttcgacgaagtcaggattactcttcgagagacgactaatcgaaagacatatatcggattatgggaagtgcccggttactggcgaaccacttaccattgatgacattgttcccatcaaaactggggagatcataaagccgaaaacattgcatacagctagtatccctggattgctcggaacgttccagaatgaatgggacggtttgatgctatcaaattttgcactggagcaacaactacatactgcaaggcaagagctaagtcatgccttgtatcagcatgattctgcttgtcgtgtgattgctagacttaaaaaagaaagagacgaagcacgccaattactggccgaggttgagagacatatacctgcggcccctgaagctgtgacagctaatgctgctctgagtaatggtaaacgagctgccgttgacgaggaactgggtcctgatgcaaagaaattgtgtcctggaatttcagctggaattattacggatttgactgattggaatgctgctctttcccagaagcgaaaaaagcggcagattcctcaaacattgggcaatagatctttggggggtcncnagntttaagccnccntttaaagcccacaaccngggtttttgtc

SEQ ID NO: 123437 - DNA, 657 bp, Arabidopsis thaliana
  unsure (1)..(657): unsure at all n locations
aatcattttaatctgcagatgcgaactctgtggagtttgatcctagcggatcttatctcggtattgctgcatcagatatcaaagtataccagacggcaagtgtgaaagctgaatggatccttatcaagacactcccagatctctccggcactggtaaagctacgtgtgtgaagtttggttcagatgcacagtacgttgcagtcggttcgatggaccgtaacctacggatatttggtcttcctggtgatgaaaaagccaacgtcgatgatgactctgcgcaagactcgtgaacaatcctatttgcagcaatgggggagaatttcataggtgcgggtcatgagtgagtggtgattgtgatcatcctcgctacctcttggaattcaagcaatgacactcgcaaaccctcgagttttcttataggctcttttaatcgctttgtaccttcaatatatgtaccaaaaaatgtgttctttctgttgcctaatgaattcagacactaatgaagatcccaatccgatggtgctaaaccgcatttggtattatttaatctgttctagacaaaaaaaacaaaaaaagnnnnnnnnnnnnnnnnnnnnnnnnnnnnnnnnnnnnnnnnnnnnnnnnnnnnnnnnnnnnnnnnnnnnnnnnnnnnaatcg

SEQ ID NO: 123438 - DNA, 915 bp, Arabidopsis thaliana
  unsure (1)..(915): unsure at all n locations
nnnnnnnncgcgnnnnnnnnnnnnnnnnnnnnnnnnnnnnnnnnnnnnnnnnnnnnnnnnnnnnnnnnnnnnnnnnnnnnnnnccacgcgtccgtggcgattgcgatgttaccggcgctcttctcttctccttcgattctaaccagcagaatcagatgcggagccaccgcaaacagcggcggcgcaatctcatctacttcttctaattccgatcctaggagaggtgttcccttgtataagcccaaatcatacgaggttctagccactgacgccgccaattctctagctttcgctctccaggattcaaaatctcgtttggaaatcgattttccacctttacccagtagcatttcttcttacaagggttcttcagacgactttattgatgctaatatacaactggccgtgactgttgttcgcaaacttcaggagaaaatcgagaccagagcatgcattgtttttcctgacaagcctgagaagcgcagggcttcgcaacgcttcaaagcggcatttgattcggttgatggcataagtattggctctctagatgatatacctggtacttctgtcaccaatttctttaggtccataaggagtaccctggactttgattttgaagatgaaaacgaaggaacttgggagcccaaggagccaccgaccctttatatatttatcaattgcagcactcgggaactctctttcatagagaagtttgtggaaacctttgccagttcaaccccagctcttctgttcaatcttgagctagatacttttgcgtgctgacctagaggcttcttggctttccccctaaagatctgcactaccaggctctttctcatttattcccgtctttatacccccaagagtttcaagaagtgggagggaccattggttgactcacgggcactttcaaat

SEQ ID NO: 123439 - DNA, 660 bp, Arabidopsis thaliana
cgttccggaattcccggttcacacccaccgtccgaaaatcgtctcatatattactactttttcacctacaatatcattggagatgtggagtctatggcctttaatgatggaagcactcgtggattgggctattgactttttcccaaatatattggtcccgttgcacaactatatatccagggggactgggcattatcttacttgcaaggaaccagattaccagcaaaatctttggaatgtgatatctgtgcttatggcgaataaaaatattgatgacagtgacctcgagccagctccgaagctattagggatagtgcttcagacatgcaagggccaggtggatcaatgggtagaaccctacctgagaatcacacttgatcggctacgcggtgctgagaaatcttccttcaagtgccttctggttgaagtggttgcacatgccttttactacaatacccctttggcacttggcatactgcaacgatttggtatcgcaacagaaatttttactctatggttccaaatgctgcaagagaagaagaagagtggtgcacgttctaacttcaagagagaacatgataagaaagtttgcatcttggggttgacatcacttttcagccttccagctggtcaagtgcctggagaggtcttgccacatgt

SEQ ID NO: 123440 - DNA, 430 bp, Arabidopsis thaliana
aactgcatcatctgctgactcgatacattctgctgctgcagaaattgatgaggccattgaatcacatcgagcttcaatgcgcttatcaggacgcttggcgtgtttgtcaccccaattttaaacaacccttctcttctctcgaagatgcttgcgagagattattaccttatcatgtcgtagcagattacgaagcagaagaggatgatagaatccttgattcagacccaacaggccaggccttgtcccgctctcaacaatgggataacaacattgctgcgaaagttgctgaattcacggcaacgtttgagaagcaagcactagcttttaacataataactcgaaagagagctatgggagaattcagatctgaggaaaggttgatggtagaacaagctttgctacaagatgaaaggaaagcgttgattgaact

SEQ ID NO: 123441 - DNA, 541 bp, Arabidopsis thaliana
taatgattttccaggaggaccagatgggtttgagctggtttcaaggttctgttaccacaacggagaaatcttaatcgacgtctcaaacgtctcgactttgtactgctgctctgtttttctaggcatgtcggagaagttctgtttctctaatctcttccttcagacagagaagtttctagaagaagtgttctatgggtcttggagcgacatcgtttcgtgtctcaagaactgcgagcaagtgttcttccaagcagattcgtatggtcttgtagataaactcattttcgcagctttgaacaaaatctctcagaattcagacgatttttcttcttcttcgctttcttccttcgcctcttctctttctcctgagatggccaagaacacgtcagaatcagacggtaggtatatttcgcggtctgttgcttgcggaagaagcaacgagtggtggttcgaagatatgacaaatctttccccgaagatcatattgaagctagttatgatcattggagcttacaaaaccaacataaaaagcttagtccta

SEQ ID NO: 123442 - DNA, 510 bp, Arabidopsis thaliana
cagacgcgtggggtttcgagattcggagatctgcaagggagaagatgatcgtttgcgtcgccgtcgtcggccaccagaacaatccgctttacatacaaagcttcacggatgctgacgatgctctcaagctccaccacattgttcattgctcccttgatgtcatcgaagagcgagtgaacaatccgaaaaagtctggtacaacactgaacgaggcttttcttggcttgctctatcctactgtgaactacaaagtgtatggttacttgactaataccaaggttaaatttatattggtcactactgatttggatgttagagacaccgatgtgagaagtttcttcaggaagttccatgctgcttacgttgatgcagtctcaaacccctttcatgtccctggcaaaaagataacctcgagaacctttgcgcaaactgtaagcaacatcgttggatcgtacggtttgaactgaccttctcttataagttgctttttgtacctcaaacttgtgtttt

SEQ ID NO: 123443 - DNA, 463 bp, Arabidopsis thaliana
gactaaggtgaatccatggcgtccaagattgtctcagccatagtatttgtgtttaacctcattgcctttggtttagccgttgctgctgaacaaagaagaagcactgcaagggttgtgcaggacactgaggtgcaatataactactgtgtgtatgactcggacagagctacagggtatggagttggagcctttttgttctcagtggctagtcaaatccttatcatgctcgttagccgttgcttctgttgtggaaagcctctcaagcctggcggttcacgcgctcttgccctcattctcttcattgttagctggatgttcttcttgatagcggagatatgtctattagctggatcggtagagaatgcataccacacaaagtacaggacaatgttcatggacaatcctcctgattgtcaaactctacgtaaaggcgtctttgcagcaggcgccttattcgtcttct

SEQ ID NO: 123444 - DNA, 862 bp, Arabidopsis thaliana
gctctatacgactcatatatggaagctggtacgcctgcagtaccggtccggattccgggtcgaccacgcgtgcgaaaaaaaggaaggcgaatcgtagacgggaaattgttcttttgccgctctcggacgaatcgtctgtttccatttttggtgatataatacaaatagtgtattagtagtttgattctcttcaccacggtgtcggtacgattgaagctcctccctccaagagccttcgtacagagacgtttctgctgaaatttcaagcaagtgtgtttgtcagatggagcggtatgaagtcttggagcagatcgggaaagggtcctttggctctgctcttcttgttagacacaaacaagaacgcaagaaatacgttttgaaaaagattcgtctcgcccgccagtctgatagggctcgacgatcagctcatcaggagatggagctcatttctactgtccgcaatccatttgttgtcgagtacaaagattcatgggttgaaaagggttgctatgtgtgcattgttattggatattgccaaggcggggacatgacagataccatcaaaagagcatgtggtgttcattttcctgaggagaaattatgccaatggcttgtccaactattaatggccctcgattatcttcactccaaccatattcttcaccgcgatgtcaagtgttctaacatattcttgacaaaagagcaagacatacggcttggtgactttggactcgctaagattctaacttctgatgaccttacatcctctgttgttggaactccaagctacatgtgtcctgagcttcttgctgacataccttacggatcaaagtcagacatttggtcgttgggatgctgcatg

SEQ ID NO: 123445 - DNA, 709 bp, Arabidopsis thaliana
cccgaagggggttgttgtcaatttttaaaaaagagccattgtttccaataaaagcaaaccttttcgactgttctttagttttaacggaagttgaccgatttccttttaagagatcaaatcagtttctcgacggttaaagaataagttcgcagcaaaagcaaactgggacaagtaagcatgttccttgattgtgaaagccgcaattttggagttcaaagataatccccgagcagaccaagaaaagatttgcaaggcaaccgacgtccggtgcctaattttcctcctccaccaccttcggccgcctccaccagttttaatcagcagcgatttgcctagaaaaaatgtcaagtggaagagcaacgccgcctagaagacgaggaagagacagacggtctggtcaaaggggtcacaggaaagctaacttgccagtaagattaccagattcagcttaagagttggcgtccgtcttcttcttcttcttcatggtcactctcatcaccaacatcacattccggtttgaccacacagtatggttattttttttgtttctctatttgattctaaggattcaaaatcaattttctgatgtatatagatacaccaacattttgtacttggataataatttatagtaaaaaaaaaagaaaaaaaaaagggcggccgctctagaggatccaagcttacgtacgcgtgcatgcgaagataatag

SEQ ID NO: 123446 - DNA, 618 bp, Arabidopsis thaliana
  unsure (1)..(618): unsure at all n locations
tttntggtcacgntgccgtcctttggntcaancggtnccaccgtagggtagtcccgcaaaaccaactggccgtagcntntccntggatgggaagaccncattttgtngtccagggattctccgagcggaccaaggaaggatttgcaaggcaacgacctccggtgcctaattttcctcctccaccaccttcgccgcctccacccgttttaatcagcagcgatttgcctagaaaaatgtcaagtggaagagcaacgccgcctagaagacgaggaagagacagacggtctggtcaaaggggtcacaggaaagctaacttgccagtaagattaccagattcagcttaagagttggcgtccgtcttcttcttcttcttcatggtcactctcatcaccaacatcacattccaattttaccacacagtatgtttattttttttgtttctctatttgattctaaggattcaaaatcaattttctaatgtatatatatacacgaacattttgtacttggataataaattatagtttcgaattaaaaaaaaaaaaaaaaaaaaaaacaaaacccaaagggcggccgctctagaggatccaagcttacgtacgcgtgcatgcgacgtca

SEQ ID NO: 123447 - DNA, 763 bp, Arabidopsis thaliana
ggtgcgcctgcaggtaccggtccggaattcccgggtcgacccacgcgtccgtagatctctctttcttatacatccatatcaccgatgatgcctcgccgtgacgtcctcttcctctcactcctcctcgtcatcgccaccgtctccgctgtcgcattagccgacgatgaagcagattgtgtctacacattcttccttagaaccggatcaaccttcaaagccggtacagattcgatcataagcgctagagtctacgacaaatacggagactacatcgggatccgaaacctagaagcatggggtggtttaatgggaccaggttacaactactacgagaggggtaatctcgacattttcagtgggaaagcaccatgtcttccgagcccagtctgttcattaaatctgacctctgacggctccggtgaccaccacggttggtatgttaactacgtggaagtcacgacagccggagttcatgcaaagtgctcgtaccaaagctttgatgttgagcaatggcttgcgtccgatacatcgccgtatgagctcagtgctgttcggaataactgtccagtttcgcttagggaaagtgtcggtcgggtcgggtctgagatccggaagactctctcttggatcgtgtgagagtagtgaatgaaatgtcaaatgtgtatgtgtgtgtgtaacttggagagttgttctttgttgtcttgtgaacgtgtgatggcaataatgaaaatgattcgatcgaataaaagttccgttctttgtt

SEQ ID NO: 123448 - DNA, 592 bp, Arabidopsis thaliana
ccgtccgaccacgcgatccgcataaacaaaaaaaagattctctcgatcaaacttgccggcgtccatggaagatttcggccgtcaacgaccatacggagacggagggatgcagatccagccttaccacggtaatcaaggcggtgatttcaggagctatagcgcatcgtacgggacgagggagaacaatatatacgatgtgaaaaaggagaaatcgatagcaagatccaagtcttggggaataacggatccggagctccagaggaagaaacgggtcgcgagttataagatgtatggtgttgaaggcaaagtcaaaggctcttttagaaacagtttcagatggcttaagcagaggtacacacaggtcgtctatggttggtggtgattcttttttcatctttttctataatttttacttttttactttgtttttcttcttcttgagctttgttttgaattttgattttctcaagtaattatgattgtgctctctctctctctttcttatgtatctttgtgtttgtgtgttgtaatcttgaatgtaactgtggtggcttcatcgcaacaaaattatatatgatcatttattagtatc

SEQ ID NO: 123449 - DNA, 842 bp, Arabidopsis thaliana
  unsure (1)..(842): unsure at all n locations
tacgactcactatanggagagctggcacgcctgcaggtaccggtccggaattcccgggtctacccacgcgtgcgtgcggctgcgagaagacgacagaaggggaagaggatgaccaaaatgacagagagtgtagcaaacagcatactgtctggagtccttaaagtttctggattcttcacaagttcagtggcaaacaccaaagtaggaaagaaattcttcagcctgcttgctggagaagccatccttgcatctctcgacggatttaataaggtctgtgacgctgttgaagtagctgggaggaatgtaatgtcaacctcttccactgttacaaccgaactcgttgatcacaagtatggtggtaaagcggctgaggcgacaaacgaagggctcggtgcagcaggatatgcgcttggcacagcctgggttgctttcaaaataagaaaggctattaacccgaagagtgtactcaagccttcgacgcttgcaaaaaccgccattagatctgcagcttcacaaaaaaaagcctagtaaggctgcctgatgaagcaaaacagactcattggtcctgtttgtttggatcgtcctgttgtcttttgataaataagttaaactaaaaaaaggtgtggattagtagttgttgtgaagtgtttatgtttctctatgagaatcatgtaatgtctctgatttgattcggaatatgtgctgtatgtgtaagtggtcaaatcaagattcccttgaaaaaaaaaaaaaaaaaaaaaaaaaaaaaaaaaaaagcggccgctctagaggatcccagcttacgtacgcgtgcatgcgacgtcataacttcttctatagtgtcc

SEQ ID NO: 123450 - DNA, 1039 bp, Arabidopsis thaliana
  unsure (1)..(1039): unsure at all n locations
tgatacgctagctctatacgactcactatatggaaagctggtacgcctgcaggtaccggtccggattcccgggtcgacccacgcgtccgcccacgcgtncgtacggctgcgagaagacgacagaaggggggaaggcggcgaagctgattgcaactggctcaggacatttgataaaagggattctttggtgtggagatgtgactatggataggcttatttggggaaatggtttcatgaaaaggaggttgtcaaaggctgagaaggagagtgaagttcaccctgacaccttgaaaagaatcagaagagtgaagaggatgaccaaaatgacagagagtgtagcaaacagcatactgtctggagtccttaaagtttctggattcttcacaagttcagtggcaaacaccaaagtaggaaagaaattcttcagccttcttcctggagaagtcatccttgcatctcttgacggattcaataaggtctgtgacgctgttgaagtagctgggaggaatgtaatgtcaacctcttccactgttacaaccgaactcgttgatcacaagtatggtggtaaatcgggtgaggcgtcaaactaagggctcggtgcagcaggatatgcgcttggcacagcctgggttgctttcaaaataagaaaggctattaacccgaagagtgtactcaagccttcgacgcttgcaaaaaccgccattagatttgcagcttctcaaaaaaaagcctagtaaggctgcctgatgaagcaaaacagactcattggtcctgtttgtttggatcgtcttgttgtcttttgctccccccgttaaaattcaaggaggtgtggcttagtagttgttgtgaagtgtttatgtttctctatgagaatcatgtaatgtctctgatttgattcggaatatgtgctgtatgtgtaagtggtctaatccacattcctttaagtagtattataacaacagaacgaacccatagagcggccgctctagaggatccaagcttacgtacgcgtgcatgcgacgtcatagtcttgtatagt

SEQ ID NO: 123451 - DNA, 1007 bp, Arabidopsis thaliana
  unsure (1)..(1007): unsure at all n locations
ttcattgatcttctccgatttgaaatcgccggcgaaaatggaatcctccggcgacaagcaaacttcttctctttaccctactgttgacacatccaatcccgaagctcctataaaccctagctcatcatcttctactaacaatctctatccttctctcgatatgaatgatctcgctcgtaatctcttccctgaacaaccagagacgagttctattccggtttcagctcctcccgctgcgacggaggaagtaattttgaaaatctccggcgcgattcttcatttaatcgacaaatcttacagcgtcgagctcgcttgcggtgatcttgagatcatccgtattgttcaaggagagaatgttgtcgctgttctcgctagtgtctccgatgagattcaatggccgttgactaaggatgagaactctgtcaaggtcgatgagtctcattacttcttcacgcttcgtcctaccaaagagatctcacatgattcaagcgacgaagaagacggagatggagggaaaaacactaacgagatgttgaactacggacttacaattgcttctaaaggtcaagagcatttactggtggagcttgagaagatcttggaggattatagtagtttctctgtgcaggaggtgtcagaggaagcgaaggaagcaggtgaaaaggttttggatgtgacggtggcgagagagacgtctccggtggagcttactggggaaaggaaagagattgtggagaggcaatgttctgcttattggactactttggctccgaatgtggaggattatagcgggaaggcggcgaagctgattgcaactggctcaggacatttgataaaagggattctttggtgtggagatgtgactatggataggcttatttggggaaatggtttcatgaaaaggaggttgtcaaaggctgagaaggagagtgaagttcaccctgacaccttgaaaagattcagaagagttaagaggntncccaaaatnccaggganttttagcaaac

SEQ ID NO: 123452 - DNA, 661 bp, Arabidopsis thaliana
acccacgcgtccggcactcttcttcttccctgtcgccgcatcaaagagaactgaagcaataggcttttgaagctctctgcataaacatgactttcaagcgcaggaatggtggcaggaacaagcataaccgtggtcatgtgaaaccaatcaggtgttccaactgtggaaagtgttgccccaaggacaaggcgattaagagatttatcgtaaggaacattgttgagcaggctgctattagagatgttcaagaagctagcgtctacgaaggttacactctcccaaagctttacgctaagacgcagtactgtgtctcgtgtgctatccattctcacgttgtgagagtccgatcccgcaccaaccgtagagttcgtaccccaccacctcgttttgccagacgcaaggaggatacacccaagcctgcacaacctggtcaggctcctcgccctgccggtggtgctcctgctgctcctcgtgcctgaagacttcaagaagctggcaatccgaaacttcttatattctaggttcaatctctcttttgtctgaaatttttgaagatggttttctacatttggtaaagatgatttcgccatattggagctttaaacgtttcagaccattttaccagttgatttgaccaagatttttcctcttaaaaaaaaaa

SEQ ID NO: 123453 - DNA, 550 bp, Arabidopsis thaliana
aggtgcactatagaagagctatgacgtcgcatgcacgcgtacgtaagctcggttttcggctggtttgttcttcctcgattcaacactcgatgctgtgacaaagcccagattttggccggaaagttttgtgtgtttccggcgaagaatgcgaagaaaccggaagaatctgtaacggaatctaagctaaaagttaaagtacgatgtcggtgtacgacgctgctttccttaatacagagctttcgaaaccgacatcgatttttggtctccggctatgggtcgtgatcggaatcttacttggatctctaattgtcatcgcactctttcttctctccctctgcttaacttctcgccggaaaaatcgaaagccgagagccgatttcgcctccgccgccatcgctacaccgccgatttcaaaggagattaaagagatcgttccggcgcagaatcagtctgttccggcggagatccaggtcgatatcgggaagatcgagcatcgagtggtgttttcagatcgagtgtctagtggtgagagtagaggaacagcgagtgc

SEQ ID NO: 123454 - DNA, 373 bp, Arabidopsis thaliana
caaagcctttctctttaaattcgttatcgttttttttattttatcaatggaatctttttatttgttctgttcttcctcgattcaacactcgatgctgtgacaaagcccagattttggccggaaagttttgtgtgtttccggcgaacaatgcgaagaaaccggaagaatctgtaacggaatctaagctaaaagttaaagtacgatgtcggtgtacgacgctgctttccttaatacagagctttcgaaaccgacatcgatttttggtctccggctatgggtcgtgatcggaatcttacttggatctctaattgtcatcgcactctttcttctctccctctgcttaacttctcgccggaaaaatcgaaagccgaga

SEQ ID NO: 123455 - DNA, 509 bp, Arabidopsis thaliana
  unsure (1)..(509): unsure at all n locations
nnnnnnnnnnnnnnnnnnnnnnnnnnnnnnnnnnnnnnnnnnnnnnnnnnnnnnnnnnnnnnnnnnnnnnnnnnnccacgcgtccgagcgtattaccctgggttgtgtgagccagtttctcaaggtggacttggatttgattattatgtgaatctttctgcgtcagaaatgtgggtttctctcctcgacaatgtaccggataatgaatggagcatgagcaagattgtcagtacattggtggctaacaaagagtatgcagacaagatgctcagctatgccgaaaatcacaaccaatccatatcaggagggcgttcatttgctgaaatcttattcggtggagtcgataatggttctcctggaggaaaagaattgctagacaggggaatttcactacataagatgattagactgattacttttacaagtggtggccgtgcatacctcaatttcatgggaaatgaatttggacttcctgagagggttgagtttccaacgcagagcaataactt

SEQ ID NO: 123456 - DNA, 620 bp, Arabidopsis thaliana
ggactggattttctatgctagcgtttcggtacctctatggatttgtcaaactttccttagcctctgctcttatgctttgtttggagttttggtacttgatggttctggttgttgttaccggtctccttcctaacccgttgataccagtcgatgccatctccatttgcatgaatatagaagggtggactgccatgatttcgatcgggtttaacgctgcgattagtgtgagagtatcgaatgagctgggtgcaggaaacgcagcgttagccaaattctcagtgatagtcgtctccataacttcaactcttatcgggatagtgtgcatgattgttgtcttagccacaaaagacagcttcccttatcttttcacttcaagcgaagctgtggcagcagaaaccacgagaatagccgtcttgttgggcttcactgtcctcttgaacagcctccagcccgtcttgtcaggggttgcggttggagcggggtggcaggctctggttgcatacgtgaacattgcgtgttattacattatcggactacctgctggtcttgttcttggattcacactagacctcggcgttcagggaatatggtgaggtatggtagctggaatatgcttgcag

SEQ ID NO: 123457 - DNA, 623 bp, Arabidopsis thaliana
acccacgcgtccggcaagaactggcatattccattgactttccctagtgaggctgttatatcagcctacttaaatccgcaagtggatctgtcgactgagaaattctcatggggcaaacctgatctttcagtacttagaaagctatgctgggaaaagtttaattggaacggcaagaaaacagatgatctactactaccagtcttgaaggagtatgaaaagcgcgagacgcaacttcggattgaagctttctattcctttaatgaaagatttgcaaagatccgtagtaaaagaatcaacaaagctgtcaaaggaattggtggaggtctgtcgtcagatgtggccgatcatactctccaggaaggtccaagaacacgaaataagaaaagagttgctcctcatgaaactgaagataacaacacctcagacaaagatacacctatagccaatgagaaagtgaaaaacaaaaggaagcgcgtagaaaaaccatctagtagtagaggtagaggcagagcccagaaaagaggacgaggaagaggaagagtccaaaaacatctccttgagctatccgacggcagttctgatgatgatgatgatgacaaggtagttggaatggaggcaaaact

SEQ ID NO: 123458 - DNA, 545 bp, Arabidopsis thaliana
aggttcatcaaaaatcattcccaacacatttcttcttcgttgtcaaaaatacatcagaacgttctgatttcgccgcgtgactcttatctccgtcaacgccgataaattctccggtaaagtaaccgccgcgatgtcgtttcttttccgtaagaacggtagtagttcacggaggaagatcaaagaaaaactccgtggtcgtcactcagatcgaggtgggaagagagaagaagatgagagatacggcggctccggctccgatttacctccaccaccgtctccttggggatttctcttcccggaggattttgtaagaatcgacgggaatctcaaagctattttccaactctagaagcttcttccagtaaatcacatctaatccttcatcatctacaataacagctttgagagttggaaaatagcgggaaaattagaaaaaaccctaaacctagaagaagaggagacaaatccggtgacggatttagaagaactggagcagatcaagacgataacgatgatggtgatgatgaagtaggagatgaatctat

SEQ ID NO: 123459 - DNA, 419 bp, Arabidopsis thaliana
actcttatccaaagagggacacacagaaggagagtgatagagagcgagacgcgaagctctaaaaaatggcgataacacctctgcgaatcacgaacccattcccatctctccgctttattcccgccggaaagcccaatgctttaagaatcttcaccgtccacgctaccgacgttgagtccacggaggatactcaacccgacccggaaactacacagtccgaatccggcactgatccggaccaattcgagtctcgtctctcaaacatcagactcagataccgaagcgggacgggtaagaaagcagaagtgagaaaatcgaagaaagggtcaagtgggtctccgtcgaaaggtacgggaatatatttgccgccggtaagcttaaaagaagcggtttcaggtggtttgaaagtggaaccaggg

SEQ ID NO: 123460 - DNA, 835 bp, Arabidopsis thaliana
  unsure (1)..(835): unsure at all n locations
atgattttnnnnnnnnnnnnnnnnnnnnnnnnnnnnnnnnnnnnnnnnnnnnnnnnnnnnnnnnnnnnnnnnnnnnnnnnnnnnccacgcgtccgcccacgcgtccggacgaagtgatgaaaatcatgccggttcaaaaacaaaccagagccggtcagagaacgagattcaaggccttcatcgtcgtcggagatagtaacggtcacgtcggattaggagtcaaatgctccaaggaagttgcgacggcgatcagaggcgcgatcattctcgcgaaattgtctgtggttccgatacgaagaggttattggggtaacaagattggaaaaccacatacggttccgtgtaaggtaaccgggaaatgtggatctgttactgtacgtatggttccagctccgagaggttctggtattgtggcggctagagttcctaagaaggttcttcaattcgctggaattgatgatgtctttacttcttctagaggatccaccaaaactcttgggaaacttcgtcaaggcaacatttgattgtcttgcagaagacatacggattccttacaccggaattcttgaaagagacgagattctcaaaatcaccatacgcaagagcacactgatttcttgcttatacctcctggcgtcaagatcagcgaggttgttgtagacaaaagcgtagagtaataccactttatcttgttacatgagacttgagtgttgtcaaaagctcaagtcagattttgttccaaccttggttttttgatttgtcggttataatgtctttagtaatctagatacgtatctgttttacactttgaattcaatcatacgaatcttcttat

SEQ ID NO: 123461 - DNA, 446 bp, Arabidopsis thaliana
accacgcgtccgctgaatcaaatctcctagctcttctacgcaaaatcgagtgcatcgacaatggcggaacgtggtgtcgaacgtggtggagatcgcggcgatttcggacgtggattcggtggtcgcggcggtggaagaggtggtccgagaggtcgtggtcgccgtgcaggtcgtgctccagaggaggagaaatgggtgccagtgactaagcttggtcgtctcgtaaaggaaggtaagatcacaaagattgagcagatctacctccattctctcccagtcaaggagtaccagatcatagatttactcgtcggtccttcattgaaagacgaagtgatgaaaatcatgccggttcaaaaacaaaccagagccggtcagagaacgagattcaaggccttcatcgtcgtcggagatagtaacggtcacgtcggattaggagtcaaatgctc

SEQ ID NO: 123462 - DNA, 514 bp, Arabidopsis thaliana
  unsure (1)..(514): unsure at all n locations
nnnnnnnnnnnnnnnnnnnnnnnnnnnnnnnnnnnnnnnnnnnnnnnnnnnnnnnnnnnnnnnnnnnnnntacccacgcgtgcgggggagagagagtgactttttttgtttgcctttgttaatggcttgtgtgtgagattcattgaattttttgaaaattctgacgaataaaaaccatatctaccaatcacaaaccctagatttttgttatcttcttcatccgaagattctctttgatctgtgtctccttccttctgattctcccatttcatttcattgattcttttgattcgattctattcgagctcaattttgtagatcagaacccagaatcgaatttgggataacttgaacaatatccttggtaacttgttgatctgaatttgagtgaagaagacatcgaattcaagtttggtgtgggagattttttttaatggagtgatgatgatttaaaggggaaggtaaagggaacgatgactggattgggtgttcgatccagtagctatggttcctt

SEQ ID NO: 123463 - DNA, 620 bp, Arabidopsis thaliana
  unsure (1)..(620): unsure at all n locations
gttcatccagatcatgaataaagtcttcgagcatgcaggagatctggtaaatattaaagtggcacataatctgatgcgtttgattgctgaaggatttggagaggacgatgatgatgcagacagcaagctcagattatcagctgtggaatcgtacttgcagcttattagcgaaccaaaacttccatccctgtttcttcaggtcatttcttgggttttgggagaatatggcacagctgatgggaaatattctgcctcctatattagtggaaagctgtgcgatgtggcagatgcatactcaagtgatgaaactgtaaagggttatgctgtttctgcactgatgaagatctacgcatttgaaattgcatctgggagaaaggtggatgttttgccggagtgccaatctttgattgaagagctattgggttcacattcaaccagatcttcagcgccgagcatatgaacttcaggtccctgcnctagancccncctttttgngcatanccccctagggctatttcgggacncttgggttcaagctttntttttccaaggggtttcccaaattntggggggggcaccctttttttttggnggggccccggnnttttaaaccnttcnta

SEQ ID NO: 123464 - DNA, 1438 bp, Arabidopsis thaliana
  unsure (1)..(1438): unsure at all n locations
nnnnnnnnnnnnnnnnnnnnnnnnnnnnnnnnnnnnnnnnnnnnnnnnnnnnnnnnnnnnnnnnnnnnnnnnnnnnnccacgcgtccgtacggctgcgagaagacgacagaagggtacggctgcgagaagacgacagaagggtacggctgcgagaagacgacagaaggatacggctgcgagaagacgacagaaggggatattgtcgagtccgaacatctcgtagctctccttgcagttgttccgaagtattcccaaaaagactggctagcatgttatgagactttgaccgattatgtggttcctaggtcctcgaagaaattgtttgaggataatgagtatgccctttacaccgtcactctctttactcgtgtcgcagataatttcaggattgctgctcgtgagaaaggattccaagtccgtgattttgaacaaagtgttgaagcacaagagactcgtaaacaagagctagcaaagttggttcaggatcaggaaagtttgagaagctctcttttgcagtggtgctacaccagttatggagaggttttcagctcctggatgcatttctgtgctgtgcgtacattcgctgagagcattatgagatacggtttacctcccgcgttcttggcatgtgtcttatctccggctgtgaaaagtgaaaagaaagtacgctccattcttgaacgcttgtgtgattctaccaacagtttatactggaaaagcgaggaggatgcaggagccatggctggtttagctggtgactcagagacacatccttatgtctccttcactatcaaccttgcttaaaaatatgatgagagatgcttttgatgccacttctcctctggtcttctcatctgttatatttgtttgtggtctatagatttcacatttatttttcgtaacatattttgattttcataaataaggtggaactcaagagagatgttgctgtaattttatttggccggagtcttttagattccggcgagtttcagacacttgtggaagacagaagggttatacagttgttaaagcctttttgtcattttgtgacatggttgatttatttatatcatcactctgtttcgtttttgtctgaaaaatgtttttggcttctattggtattttcaaaccgatgttggaatgatctggagattagcatttagcaatcatgcaaactggtaacatttgtggctgagtgaagatgccccaattgggcagctgatgttttatacttttaactaaaaattgatattcttactactttagtttcttgtaagttgtaacatattacagtatctatcttttacatagtagagtttttctaatctcaaaaaaaaaaaaaaaaaaaaaaaacccaacnnnnnnnnnnnnnnnnnnnnnnnnnnnnnnnnnnnnnnnnnnnnnnnnnnnnnnnnnnnnnnnnnnnnnnnnnnn

SEQ ID NO: 123465 - DNA, 659 bp, Arabidopsis thaliana
cggacgcgtgggatttgattgaagtacagatccatcggagaagaagacagagagattgaagatcaatgacttcgagatattgggtggtgtctcttccagtgaaagactctgcttcttcgttatggaatcgattacaagagcagatctctaagcattcctttgatactccagtttatcggtttaacattcctaatcttcgtgttggaaccttagattctctactcgctctcggcgatgatctgcttaagtcgaacagctttgtggaaggagtttcgcaaaagatcaggagacagatcgaagaattggagaggatttctggtgttgagagcaacgctcttacagttgatggagttcctgttgattcttatctcaccaggtttgtgtgggatgaagctaagtacccaacaatgtcacctctgaaggaggttgtggacaatattcagtctcaggttgcaaaaattgaggatgatctcaaggttcgtgttgctgaatataacaatatccgtggtcaactcaatgccattaaccgaaagcaaagtggaagcttagctgttcgtgacctctcaaacttggttaagccagaagatattgtcgagtccgaacatctcgtaactctccttgcagttgttccgaagtattcccaaaaagactggctagca

SEQ ID NO: 123466 - DNA, 406 bp, Arabidopsis thaliana
tcgcgttttcaacaatggtcgaacttttgcagcagttcgaggatattggaacacatggaacaaaagtaattatatacaacttgtggcttaatgatgaaggaatctatgagctgagttttgacgacgatgatgtggatatacggctccgagatgaaaatgcccaggacgggaaacggttgcacgctaaaacattggaagtaagatctcatatttcgtaccgctatcgacattctctaagggcttacatttccatgttatatctcaaaaagttcaaaaacttcaaaattattcttcggggagtctctgtggcgcaattcaacattgctgatgaattcagacatcctgagacaataatgtacaaaccccaagcagctgcagtggattatgctgccactggaattaaagt

SEQ ID NO: 123467 - DNA, 550 bp, Arabidopsis thaliana
  unsure (1)..(550): unsure at all n locations
acgactcactatanggaaagctggcacgcctgcaggtaccggtccggaattcccgggtctacccacgcgtccggcttagcgtgcaggagaggatcagcatgtttgaaaacaagcagaaagagaactctggagagaaaacagctgtggcaaaatctactgagctgaaaagactttcttctgatttatcatcttctgcaggcatggaaaaggttgtggtacgaagatggagtggtgctagtgacatgagcatcgatttgggaaatgacaggaaggatgatacgggtgatagtccactgtgcactccctcgtcatcttcagtgtccaaagatggaagtggtgcatcctcaaaacaatttgtcggctacaataaaaaagagcagaatggattgagccatgctgcgaatcctcataggaatgacgatgaatgtacttccaacaatggtggtgactgggggatggtgaacanattctcaaattcaggtgtacttcttaccaagacaggcggtgactggatggccatttgacgatatcaatgagactcaggaatttc

SEQ ID NO: 123468 - DNA, 532 bp, Arabidopsis thaliana
  unsure (1)..(532): unsure at all n locations
nnnnnnnnnnnnnnnnnnnnnnnnnnnnnnnnnnnnnnnnnnnnnnnnnnnnnnnnnnagcgtcgttgagaggttatacgaaggaaggaggcagaggatagagagatagcgaggctaatggatcagtgactcactgagtcagattttaccgattcattgcctccattgaagcctcttttctcagattctacgcttcactgtctcttctccatgtgcgtctcctcctcctccgtttcttcagatcttgctttccggtgacggttttaatcttcttctctctggtaacacgtataaagcatggcttacctgatgtagacatgtagtgttaggctaaagactcctcttttcacttctgtcttgttgagtttgtgttggtttaaggctttaagccaaaggcgttgttggtctgacaagatggcaatggcggtgtttaaggctcctctaaaaggggaatttcatggggctagaaagatggaagggaagcaatataagcaccatctgcttcagcaacagtctacagggagaagacgtg

SEQ ID NO: 123469 - DNA, 1121 bp, Arabidopsis thaliana
  unsure (1)..(1121): unsure at all n locations
gattctccaggnnnnnnnnnnnnnnnnnnnnnnnnnnnnnnnnnnnnnnnnnnnnnnnnnnnnnnnnnnnnnnnnnnnnccacgcgtgcgcttggttgctattggaactcatgaccttgatacattgcagggtcctttcacatacgaggctttgccgccaacggatataaattttgtacctttgaagcaaacaaagagcttcagggctgacgaacttattgaattctacaagtctgatatgaagctgaaaaagtttctacacataatcgagaattcacccgtcttccctgttttatacgacagtaagagaactgtgctgtcattgccacctattatcaatggtgcacattcagcaattaccttacagacaaagaatgtcttcattgaatgtactgcaactgatttgacgaaggccaagattgttttgaatacaatggttacaaccttctcagaattttgtgccagaaaatttgagattgagcctgttgaagttacatacgacgatgganagtcatacatctatccggatntagctgtctatgaatatggaagtcctctctctttcattacagactcaattggagtctctttaaaggtggaacaggttacaagtctgctgtcccgaatgcagctgcaagctgagcaagcaaaatctagtgataaccagtgtgccatcaaagtacatgtaccccccagcaggagcgacgttctccacccttgtgatgttatggaggatgttgccattgcctatggtttcaataacattccaacaagaaagcctgcttcgataaaaccactgactttgaatgagctcactgatcttctaagaatagagattgcgatgtgtgtgtacacggaggtggtaacgtggctactatgctcacataaggaaaactttgcgatgctaaatagagaggatgttaattcagccgtcatagttgggaacccgcggtctgctgattttaaggccatgaggagggctctcatgcccgnntnattgaagacagttggtcacaacaataaataccctaanccaattaagatttttaaaatcagtgatgttggtcatgtttggatgaggagcaaagacggttgggttcatcccaatcngtcgccatctt

SEQ ID NO: 123470 - DNA, 736 bp, Arabidopsis thaliana
tggttgttttcaagaatggttgatccggaaaggcataggatagtggttaccatagatgatccaaacccaccattctttgcccggcaagggaatcctaatgtgcctgctgtgacacttgccatggatgacaccatagccgatgttcacccgtgaaagtttgagctttccttgtttgagacacaggttttggttaatacccctcaaggtatactggagatctcttcgggttggttaggacggcataacatttataatattcttgctgctgtggctgttgggattgctgttggagctcctcttgaggatattgttagaggtgttgaggaagtcgatgcagtcccaggaaggtgtgagttgattgatgaggaacaagcttttggtgttattgtggatcatgcaaacacacctgatggcttgtcaaggctgctagattcaattcgagagcttaaaccgagaagaatcattaccgttattggttgtgagggtgagaatgaaagagggaaaagaccgcttatgacgaaaattgctactgaaaagagcgatgtgacgatgttgacatctgataatccgaggaatgaagatccattggacatcttggatgacatgttgtctgggattggatggacgatgcaagagtatttgaaacatggcgaacacgattactatccgcctttggcaaatggtcatagactcttccttcacgatatgagacgtgtagctgtacgttgtgctgttg

SEQ ID NO: 123471 - DNA, 552 bp, Arabidopsis thaliana
  unsure (1)..(552): unsure at all n locations
tggtccgtactagttgtccgaacccggagaagccccaatcgctgatgcaactgtctaggagccgccacgctgcgaagaagctctagggtttgttcgtcttcttcctcggtttcatcagaactcaaaaggtacttggtaggagcgagaagaaagtttctggagaattgctgaattgtttctttcaatggttttgtttctaagatggtaatcaagattgttgacggtgctctgaagatctgttgacctgctcagagtttgcttaaaaagtttgagaaaaaatggacgatgataatgggctcgagctcagcttgggtctttcttgtggaggatcaacaggaaaagctaagggtaacaataataataatgctggaagctcctcagagaactacagggcagaaggaggcgatagaagtgctaaagtggnttattgcctttaanaccttcctgcatccaactttcaaagacctgcagagccgagttctggttctcagacaagtgattcgggtcaacagcctccacaaaatttcttcaatgatctctcaaaagctccta

SEQ ID NO: 123472 - DNA, 433 bp, Arabidopsis thaliana
gtactagttgtccgaacccgaagaagccccaatcgctgatgcaactgtctaggagccgccacgctgcgaagaagctctagggtttgttcgtcttcttcctcggtttcatcagatggtaatcaagattgttgacggtgctctgaagatctgttgacctgctcagagtttgcttaaaaagtttgagaaaaaatggacgatgataatgggctcgagctcagcttgggtctttcttgtggaggatcaacaggaaaagctaagggtaacaataataataatgctggaagctcctcagagaactacagggcagaaggaggcgatagaagtgctaaagtgattgatgactttaagaacttcctgcatccaacttctcaaagacctgcagagccgagttctggttctcagagaagtgattcgggtcaacagccttcacaaa

SEQ ID NO: 123473 - DNA, 688 bp, Arabidopsis thaliana
  unsure (1)..(688): unsure at all n locations
gnnnnnnnnnnnnnnnnnnnnnnnnnnnnnnnnnnnnnnnnnnnnnnnnnnnnnnnnnnnnnnnnnnnnnnnccacgcgtccgcccacgcgtccgtacggctggaagacgacagttcggctctcttagaagctggtgccacagctttgggtattaccattatggatgaaatggcttacagtataaacggagaaaatgcgcattatgggactccgagaaacccgattgctttcgatagagtgcctgggggatcatcgagtggctcagccgtagctgtagctgctcgtcttgtggatttttctattggaactgataccggagggagtgtacgagttccagcatcttactgtgggattttcggtttccggccatcccacggtgcagtttccactgtcggacttactccaatggctcagagcttcgacacagttggatggtttgctcgggacacagccactttgaaacgtgtaggttgcgttctcctgcagcagcatcacttgaaccccatcggaccctctctactgattatccgcgggatgactgntttaaagctgtgtaggtgtaccccaatgatcncttgggnnaagcnntggttggatccntnggnaaaaacgtttggggggaacactttngtaaaanaggnggatcttgggngnaaattggcaaaatttncaagctaaaaatttatt

SEQ ID NO: 123474 - DNA, 614 bp, Arabidopsis thaliana
  unsure (1)..(614): unsure at all n locations
nnnnnnnnnnnnnnnnnnnnnnnnnnnnnnnnnnnnnnnnnnnnnnnnnnnnnnnnnnnagaagcgttactcccccgtcatctaccttctcagaaagggagctgcatcaatggcgaccaataatgattttggagctttcattgagaaagttacaatctctccaacttctacttcctcgtcgcctccttctctacagggtcttactttcgccattaaagacatttttgatgtggaaggacgcgttaccggttttggtaacccggattggttaaggacacactcggcagctacttctacagctccagtagtttcatctctcttagaagctggtgccacagctttgggtattaccattatggatgaaatggcttacagtataaacggagaaaatgcgcattatgggactccgagaaacccgattgctttcgatagagtgcctgggggatcatcgagtggctcagccgtagctgtagctgctcgtcttgtggattttcctattggaactgntaccggagggaggtgtacgagttccagcatctnactgtgggatttcgggtttccgggccatccannggtncagttttccactgtgggncttantcccantggttnaa

SEQ ID NO: 123475 - DNA, 615 bp, Arabidopsis thaliana
  unsure (1)..(615): unsure at all n locations
nnnnnnnnnnnnnnnnnnnnnnnnnnnnnnnnnnnnnnnnnnnnnnnnnnnnnnnnnnnnnnnnnnnnnnnnnnnntggggttccacggaagaactaacacatgtcgggacctcagtgctgtgaaaacccgccaactcttaacccggtttccgggtcgggtcatgtcgagaagctgggtgggcttgatgcctacgtctccggctctgccgagtccaagctctgcgtcctcctcatttctgatatttttggttttgaagctccaaacttaagggcgcttgcggacaaggttgcagcttctggattctatgttgtggttcctgattactttggtggagatccttataatccctctaaccaggacagacccatccctgtctggatcaaagaccatggctgtgataagggctttgaaaacacgaaaccagtacttgaaaccataaagaacaaaggcataactgccattggagccgcagggatgtgttggggtgcaaaagtagtggtggaactgtctaaagaagagctttttcaagcagctgggtggcttcatccctcttttgcaaaggtggtgaatcaaggngggaggcccaatncaatttgggnnaatngcaatnctc

SEQ ID NO: 123476 - DNA, 769 bp, Arabidopsis thaliana
  unsure (1)..(769): unsure at all n locations
aagaactaacacatgtcgggacctcagtgctgtgaaaacccgccaactcttaacccggtttccgggtcgggtcatgtcgagaagctgggtgggcttgatgcctacgtctccggctctgccgagtccaagctctgcgtcctcctcatttctnatatttttggttttnaagctccaaacttaagggcgcttgcggacaaggttgcagcttctggattctatgttgtggttcctgattactttggtggagatccttataatccctctaaccaggacagacccatccctgtctggatcaaagaccatggctgtgataagggctttgaaaacacgaaaccagtacttgaaaccataaagaacaaaggcataactgccattggagccgcagggatgtgttggggtgcaaaagtagtggtggaactgtctaaagaagagcttattcaagcagctgtgttgcttcatccttcttttgtcaatgttgatgatatcaaaggtgggaaggctccaattgctatattaggagctggaattgatcaaatgtccccaccagcactctgggagcaatttgggggagattctatcttccaaacccgaggtgaatagntacgtgaagatacaaccgaaagtgtcanacggatggacaggtagntacaacaatcgatgaaccagagncgnttatgnagcagagagcnacanggggtncttgntgggttgggnccccaacaaatctttgggaagaagaagggtttgcttttatcanttttaaagatat

SEQ ID NO: 123477 - DNA, 424 bp, Arabidopsis thaliana
aggtttacgtcgctctcatcccagggcgagaaagatggtgaaacggagtaaaaagagtaagagtaagagggtgaccttgaagcagaagcataaggtcctgaaaaaggtgaaggagcaccacaagaagaaggcaaaggatgctaaaaagcttggccttcaccgtaagccaagagtagagaaagacccaggtatacccaatgactggcctttcaaggaacaagagcttaaagcccttgaagttcgacgtgcccgtgctcttgaggagattgaacagaagaaagaagctcgcaaagaaagggccaaaaagaggaaacttggtttggttgatgatgaggataccaagacagaaggagagaccatagaggacttacctaaagttgtcaatgttcgagataactcggagagggctttctacaaggagcta

SEQ ID NO: 123478 - DNA, 1022 bp, Arabidopsis thaliana
  unsure (1)..(1022): unsure at all n locations
gatcttnnnnnnnnnngatcctccagctacattcgactcactttatggaaagctgcgcacgcctgcaggtaccggtcccgagctcgcgtgtggagccgcgcaagaagacgattctctctcttgagttgaagaaatgaagcacaacaatgttatccccaatggtcacttcaaaaagcactggcagaattatgtcaagacatggttcaaccagcctgccaggaaaaccagaagaagaattgcgaggcaaaagaaggctgtgaagatcttccctcgtccaacttctggacctctccgccctgttgtgcatggtcagactcttaagtacaacatgaaggtcagaaccggtaaaggattcactcttgaagagctcaaggctgctggtatcccaaagaagttggcgcctacaattggtattgctgttgaccatcgtcgcaagaaccgatctttggagggtcttcaaacaaatgtccagaggctgaaaacctacaagaccaagttagtcattttcccgcgtcgtgcccgcaaggtcaaggctggtgactctacaccagaagagttggctaatgctacccaagttcaaggagactacttgcctattgtacgtgagaagcctaccatggaactcgtcaagctgacttcagaaatgaagtctttcaaggcttttgacaagatacgccttgagcgcactaacaagaggcatgccggagctagagccaagagagccgcagaggctgagaaagaagagaagaagtgaggtcgttcttcttaggtagaagaaacttttatcttatcaacttttggaactgaattttgtgtatcagactgtcttttctttcatcagtttttatccttaaatctttgattttgctgctaccttgcttctcttgatttatggaaaagaccgtatctcacaaaaaaaaaaaaaaaaagggcggccgctctagaggatccaagcttacgtacgcgtgcatgcgacgtcaaagtcttctatnnnnnnnnnnnnnnnnnnnnnnnnnnnnnnn

SEQ ID NO: 123479 - DNA, 854 bp, Arabidopsis thaliana
  unsure (1)..(854): unsure at all n locations
atttcnttttttttggccagggccccccgctatggctnctggagcttaaacttcacttttcgtccaagccgctaaaaatgaagcacaacaacgttatcccgagctcacactttcgcaagcactggcagaattatgtcaagacttggtttaaccagcctgccaggaagacaaggagacgtgttgctagacagaagaaggctgtgaagatcttccctcgtcccacctctggtcctctccgacctgttgttcatggtcagacacttaagtacaacatgaaagttagagctggaaaaggattcactcttgaagagcttaaggttgctggtatcccaaagaagttggctccaacaatcggaatttctgttgatcaccgacgcaagaaccgttctttggagggtcttcagtccaatgtccaaaggttaaagacttacaaggctaagttggtggtgttccctcggccgttcccgtcaagtcaaaggctggtgattctactccagaggagcttgccaatgctactcaagttcaaggtgattacatgccaattgccagtgtcaaggcagctatggagctagttaagctgactgcagatttgaaggcgttcaaggcttacgataagattcgtttggagcgcacaaacgcacgtcatgctggtgccagagccaagagggctgccgaggctgagaaagaagagaagaagtaaaattcgttgctttatagagcttaatcattcttgaattcttgttcttctggtttttgattttgtgcacgactctgttttctttttggtgcggtttatcaatacatagatctcaaaggtttctggtggagaacctcaacaaaaaaaaaaaaaaaga

SEQ ID NO: 123480 - DNA, 719 bp, Arabidopsis thaliana
  unsure (1)..(719): unsure at all n locations
nnnnnnnnnnnnnnnnnnnnnnnnnnnnnnnnnnnnnnnnnnnnnnnnnnnnnnnnnnnnnnnnnnnnnnnnnnnnnnnnnnnccacgcgtccgcccacgcgtccgcccacgcgtccggacgattctctctcttgagttgaagaaatgaagcacaacaatgttatccccaatggtcacttcaaaaagcactggcagaattatgtcaagacatggttcaaccagcctgccaggaaaaccagaagaagaattgcgaggcaaaagaaggctgtgaagatcttccctcgtccaacttctggacctctccgccctgttgtgcatggtcagactcttaagtacaacatgaaggtcagaaccggtaaaggattcactcttgaagagctcaaggctgctggtatcccaaagaagttggcgcctacaattggtattgctgttgaccatcgtcgcaagaaccgatctttggagggtcttcaaacaaatgtccagaggctgaaaacctacaagaccaagttagtcattttcccggggtcgtgccccgaaaggtcaaggctggtgactnttcaccagaaggggggtttggctaaatggtcccccaaggtttaagggggcttctttcccccttttttccggggggaggccttcccttggnctggtaaagttgcttttaaantagggttttaagggttttaaagntcnntttngggcnttaangggnttcggg

SEQ ID NO: 123481 - DNA, 677 bp, Arabidopsis thaliana
  unsure (1)..(677): unsure at all n locations
ctaatcgactaaccttagggaaagctcgtacgcctgcaggtaccggtccggaattcccgggtcgacccacgcgtgcgcgcttttcgtccaagccgctaaaaatgaagcacaacaacgtgtatcccggagctcacacttttcgcaagcactgggcagaattatgtcaaagacttggtttaaccagcgctgccagggaagacaagggagaccgtgttgctagacagaagaaaggcttgtgaagagcggccctcctcccacctctggtcctctccgacctgttgttcatggtcagacacttaagtacaacctgaaagttagagctggaaaaggattccctcttgaagagcttaagggtgcgtggtatcccaaagaagttggctcccaacaatcgggaatttctgggtgatcacccgacgcaaagaccccgttctttgagaggggtcttcaagtccaatgtgcccaaaaggttcaaggacttacaaggggttgagttggtggtgttcccttggccgttcccggcaagtnaaggctggggatttttcctcanagggggtttccaatgnttnctaagttcaangggggttaaatnccaatttcnagtttaaagnanntttggggttnttaagttcctncanttttaagggntaaggttcggaanatttttttnggggnnaang

SEQ ID NO: 123482 - DNA, 456 bp, Arabidopsis thaliana
cgagccccgccttgggggggcttccagtccatttgtccaaaggttaaagactttcccaaggcctaagttggtggtgttccccccgccgttccccgtcaagtccaaggctggtgattctactccagaggagcttgcccaatgctactcaagttccaaggtgattacatgcccaattgcccagtgtcaaggcagctatggagctagttaagctgactgcagatttgaaggcgttcaaggcttacgataagattcgtttggagcgcacaaacgcacgtcatgctggtgccagagccaagagggctgccgaggctgagaaagaagagaagaagtaaaattcgctgctttatagagcttaatcattcttgaattcttgttcttctggtttttgattttgtgcacgactctgttttctttttggtgcggtttatcaatacatagatctcaaaggtttctggt

SEQ ID NO: 123483 - DNA, 632 bp, Arabidopsis thaliana
  unsure (1)..(632): unsure at all n locations
gtctgatttaggcgacctatagattagcttgacgtcgcatgcacgcgtacgtaagctcggaattcggctcgagaaaaaaatggcaacagaaggaaaaaaccccatcaacatgaactctatgtcttcaagtcttgcaagaaccggtcaatgggttttttctcaagatattccgaccgatgttgttgttgaagtcggagaagccaatttctctcttcataagttcatgttagtggctaagagtaactacataaggaagctaataatggaatccaaagatagcgacgtgacaagaatcaatctctcggatatacccggaggtcctgagatatttgagaaagctgccaagttctgttacggtgttaacttcgagatcaccgttcagaacgtggcggctcttcattgcgcagccgagtttcttcagatgaccgataagtactgcgacaacaaccttgctggtcggacacaagacttcctttctcaagtagctctctctagcctctctggagctatcgttgtcccaaggctttcgggattctccttcctatttctcggggtctttggattgccccccgtgtgtggcggtgctgtgctaaggnttnaacggggaatnttccatgtgncncnccnantta

SEQ ID NO: 123484 - DNA, 411 bp, Arabidopsis thaliana
agaacagaggatttttctcggccaagttttctctagctcaggtgtttgatgtgaattttttgagggaggggaatgagttcaatgagcagaagcagaagtcgaagtagaagtcgtagtcgggatcggtttcgtagtcggagtccgagagacaggagaatgagatctgaacgagtttcttaccatgatgctccttctagaagggagagggagccacgtcgtgccttcagccaaggaaatctctgcaacaactgcaagcgacctggtcactttgcaagagactgttctaatgtttccgtctgtaacaactgtggtcttccagggcacattgcagcagaatgcactgcggaatcacgttgttggaactgtagagaaccgggccacgtagcctcaaactgttcaaacgaaggaatc

SEQ ID NO: 123485 - DNA, 532 bp, Arabidopsis thaliana
gcggtttcctcttctctgcatctcaccggttcgccggaaaactctacgccggcgccggattttgcaccaacgaaaacttctttaaactactttcttcattattcttctgctgagtttcaaaaactcagccatgggtaattgtatcgcctgcgtcaagtttgacccagacaactcaaaaccaaaccagaagaagaaacctccacggggacggcaacgaaacccatacgacgatcccgatggtttaagaactcacgcaccgttacgtgtgattcctatgagccatcaatctcagatcagcgacaagtacatcttaggacgagaactcggtcgcggcgaattcggaatcacgtatctttgtacagatagagagactcgtgaagctttagcttgcaaatcaatctccaagagaaagctccgaaccgccgtcgatgtggaagacgtccgtcgtgaagtcacgatcatgtcaactttaccggaacacccaaacgttgtgaaacttaaagcgacttatgaggataacgagaacgtgcat

SEQ ID NO: 123486 - DNA, 496 bp, Arabidopsis thaliana
  unsure (1)..(496): unsure at all n locations
gcacgcctgcagtaccggnccggaattcccgggtctacccacgcgtccgcagcctcttcttctaacaaaagcaaactgaaccaagaatggagtcgctgatcaagtcccagcacgctcagcaactggcgggtcacaagaatacgaccggtaaaactccgtccatggagatgataccggcgacgggacttgcgatgtcatcggacgaaagcatgatgctgaagctgattcaacaaactcactccccagatgctcgcgaagtccaagtgcgtggccttctctctctcgttgaagatattctcgatcgtgccactcttgactctgaagacaccaacgcctccatgcttccgttgcccactgaggataaactgatgcagtcaagcatgatgagcgttcttgatagtgtctcctatgctatcgatcgtgttgcctgcgagatagcctataagtctctgacgggatctgattcacacgaaatcacaatgtccgtgttcgaaca

SEQ ID NO: 123487 - DNA, 140 bp, Arabidopsis thaliana
aggttgacttgaggaaaaggttcttcatgagcttcatcctctctataataaacaaccatttctatagagaatccaccccatggttttaaaccgaaccggggaagactgtaccgttaatattaatatgaaattgatttctg

SEQ ID NO: 123488 - DNA, 722 bp, Arabidopsis thaliana
agaaggggaagcaaagatcaaagagaaaaatatcccaaaaccaaaaacagaggaagaaagaagaagaaaagatgccttcaagcacattctccgggactgttagcacgccgaagctgtcggtggcagtggacatgggaaacccttttctcaatctcaccgttgatgccttcctcaagatcggagctgttggagtcactaaatctcttgcagaagacacttacaaggccatcgacaaagggagtctctccaagagcactttggagcatgcgcttaagaagttgtgtaaagaaggtgtttactggggagctgctggtggagtgtacattggaacagaatacggaatcgaacgtatccgtggcagcagagattggaaaaacgcaatgttagcaggcgcggcgacaggagcagtgctctcagcggttggtaagaaaggcaaagacactattgtgatcgatgccattcttggtggcgcgcttgcaaccgcttctcagttcgttaacaatcattatttctactgattctccatcttcctttagggaccaatttggttcatatggtgtggattcctttgtttactctttaaataataataaaaaacaatgtagtgtttttgaaatgaatacattcgagtattgttgacgttaaaaaaaaaaaaaaaagggcggccgctctagaggatccaagcttacgtacgcgtgcatgcgacgtcgtagctgttctaa

SEQ ID NO: 123489 - DNA, 982 bp, Arabidopsis thaliana
  unsure (1)..(982): unsure at all n locations
aggtgcactatagaagagctatgacgtcgcatgcacgcgtacgtaagccaacttcaataaaggggaaccaacgtaaccctaattttgctttctcctctttgttcagaaaattttccctttactctcaaattccttttcgatttccctctcttaaacctccgaaagctcacatggcgtctcgaaactatcggtgggagctcttcgcagcttcgttaaccctaaccttagctttgattcacctggtcgaagcaaactccgaaggagatgctctctacgctcttcgccggagtttgacagatccagaccatgtcctccagagctgggatccaactcttgttaatccttgtacctggttccatgtcacctgtaaccaagacaaccgcgtcactcgtgtggatttgggaaattcaaacctctctggacatcttgcgcctgagcttgggaagcttgaacatttacagtatctagagctctacaaaaacaacatccaaggaactataccttccgaacttggaaatctgaagaatctcatcagcttggttctgtacaacaacaatcttacagggatagttcccacttctttgggaaaattgaagtctctggtctttttacggcttaatgacaaccgattgacggggccaatccctagagcactcactgcaatcccaagccttaaagttgttgatgtctcaagcaatgatttgtgtggaacaatcccaacaaacggaccttttgctcacattcctttacagaactttgagaacaacccgaggttggagggaccggaattactcggtcttgcaagctacgacactaactgcacctgaaaaaattggcaaaacctgaaaatgaagaattggggggtgaccttgtaagaacacttcaccactttatcaaatatcacatctactatgtaataagtatatatagtggcccaaaaaaaaagggggcnnttgggncngttngcggnatgggggntgnt

SEQ ID NO: 123490 - DNA, 656 bp, Arabidopsis thaliana
  unsure (1)..(656): unsure at all n locations
tcagcttggatctgtacaacaacaatcttacagggatagttcccacttctttgggaaaattgaagcctctggtctttttacggcttaatgacaaccgattgaccggtccaatccctagagcactcacggcaatcccaagccttaaagttgttgacgtctcaagcaataatttgtgtggaacaatcccaacaaacggaccctttgctcacattcctttacagaactttgagaacaacccgagattggagggaccggaattactcggtcttgcaagctacgacactaactgcacctgaaacaactggcaaaacctgaaaatgaagaattggggggtgaccttgtaagaacacttcaccactttatcaaatatcacatctattatgtaataagtatatatatgtagtcaaaacaaaaaaaatgaagaatcgaatcggtaatatcatctggtctcaattgagaacttcgaggtctgtatgtaaaatttctaaatgcgattttcgcgtactgtaatgttcggttgtgggattctgagaagtaacatttgtattggtatggtatcaagttgttctgccttgtctgcaaaaaaaaaaaaaaggacggccgctctannnnnnnnnnnnnnnnnnnnnnnnnnnnnnnnnnnnnnnnnnnnnnnn

SEQ ID NO: 123491 - DNA, 423 bp, Arabidopsis thaliana
gcgtccgacgaaaccctaattttgctcctcatcttgttcagaaaattactcaaattcctattagattactctctcttcgacctccgatagctcacatggcgtctcgaaactatcggtgggagctcttcgcagcttcgttaatcctaaccttagctttgattcacctggtcgaagcaaactccgaaggagatgctctttacgctcttcgccggagtttaacagatccggaccatgttctccagagctgggatccaactcttgctaatccttgtacctggttccatgtcacctgtaaccaagacaaccgcgtcactcgtgtggatttggggaattcaaacctctctggacatcttgcgcctgagcttgggaagcttgaacatttacagtatctagagctctacaaaaacaacatccaaggaacta

SEQ ID NO: 123492 - DNA, 1008 bp, Arabidopsis thaliana
  unsure (1)..(1008): unsure at all n locations
ttnaatatcaacgcctccaaaatttccgtgcttttgttttcgtagataacgaacaatggctgatgagattgtgccgccggcgactcaattagccgccgtatccttagaaaacgatggatctacggtgcaaagagctcaattctctaaccgggttttgattcgaacgattttggatcgacctgacggcggagctggactcgccggtcaaacggttcgaatcggtggttgggtaaaatccggaagagatcaagggaaaagaacgttttctttccttgcggttaacgatggatcttgtccagcgaatcttcaggttatggtggatccgtctctctatgatgtctctaacttggttgctacgggaacttgtgtgactgttgatggagttttgaagggtccaccgaaaggtaaaggtacgcagcagcagattgagcttaacgttgtaaaggtgattgatgttggaacggtggatgcgtctaagtatccacttcctaagactaagttgactcttgagactttgagagatgtgcttcatcttcgttctagaactaactcgatctcagctgttgcaagaattcgtaatgctcttgcttttgcgactcacagtttctttcaagagcatagtttcctttacattcacactcctatcatcacgacaagtgattgtgaaggtgctggtgaaatgttccaagcaacaactttgatcaattacactgagaggttggagcaggatctcattgataaccctccgcctactgaggctgatgttgaagctgcgaggctcattgtcattgagagaggtaatgttgtagcggaactgaaagctgccaaagcaagcaaggaagcgatcactgctgctgttgctgaacttaaaatagcaaaggagacttttgctcatattgatgagaggtcgaggcttagacctggactacctaagaaagatggaaacattgattattccaaggatttctttggtcgtcaagctttcttgacagtttccggtcaattaca

SEQ ID NO: 123493 - DNA, 633 bp, Arabidopsis thaliana
  unsure (1)..(633): unsure at all n locations
nnnnnnnnnnnnnnnnnnnnnnnnnnnnnnnnnnnnnnnnnnnnnnnnnnnnnnnnnnnnnnnnnnnnnnnnnnccacgggtgcgggtatggacaatctccggaaacttaatcttctctctgtctctctaaccataatctttgtctctcttaccatagccaccaacttacctttctttgaagtgaaatatcccaacaacaacccttttgggatgttactacggccgacaccgatcaagaaccaatccttgggtctaccggctcatgtcgggtcagatgagtgtcgggtttggaccaaagcatgttctgatgagattcttaggctgacttatcagccggataacgttgcgtggcttaaacgcgttaggaggacgatccatgagaacccggagctagcgtttgaggagtatgagactagtaggcttattaggtcggagctggaccgtatgggtatcatgtatagatatccgttagcgaaaacgggtattcgggctgggatcggatccggtggaccgccttttgttgcggttcgggctgatatggacgcactacctattcaggaagcagttgaatgggaacatataagcaaagttgcaggcaaaatgcatgcatgtggtcatgacgcacatgtgac

SEQ ID NO: 123494 - DNA, 893 bp, Arabidopsis thaliana
  unsure (1)..(893): unsure at all n locations
nnnnnnnnnnnnnnnnnnnnnnnnnnnnnnnnnngcctgcaggtaccgggccggaattcccgggtcgacccacgcgtgcgggcctcccaaacggtggtagcaatggcggtgttttggacaatggcgcgaaatggtttaggtcaggacttgacttaaattctggtcctggaggtcatgaaacagagggaagagacgaatcaacacttgtggcaaggcaattatcctcatctgcttccttacctttgaaggaggatcaagcaagaatgtatcaaatgtcaggtggtgttctgaagaggaaagaaccggaaggaggatgggatggatataggcagtcctcatggcaataacagtagctcagaatctcagtaggccacatgagcttttactaagagatgagagtgaatgtgatgccacaaggcttcattggctggcctgctctgtacaaatgaggcatgggtgagtcaatttgcgacttcacagtggtctcaatctttttaagaacacaaacctgacctcttggtttcaccatcatgtagatcttccaaaaacagtcctaaattcaccggagtggccattctctttcaaaaaagtcatcaacaaggttctcagcgaaagacccgcatccccccctccccccaaagagtttttaaacgtgaaaacacacttttaggtcatttttcacgcatgtgtgtatctctataccccggctcaaaaaactagcgataaaacaaatgttgggggcttttgagtgtgttcccaaaaaaaaaaaaaaaaaaaaaaaaaaaaaaaaaaaaaaaaaaaaaaaaaaaaaaaaaaaaagggcggccgctctagaggatccaagcttacgtacgcgtgcatgcgacgtcatactcttctataggnnnnnnnnn

SEQ ID NO: 123495 - DNA, 508 bp, Arabidopsis thaliana
  unsure (1)..(508): unsure at all n locations
tggttttttcagcgggngcttcccccccgggtcaacccccattttgggcccgggtgtcccagtcccgtctattcccccagcccttgttttggtggcctccccaaccggtgttcgcaattggccgtgttttggacaattgccccgaaattggtttaggtcaggccttgacttaaatttctggtcctggaggtcatgaaacagagggaagagacgaatcaacacttgtatcaaggcaattatcttcatctgcttccgtaccgtcgaaggaggatcaagcaagaatgtatcaaatgtcaggtggtgttctgaagaggaaagaaccggaaggaggatgggatggatataggcagtccttataacaataacaataacacactttaggtcatttttcatgcatgtgtatctttctctatacaccggctcaaaaaactagcgataaaacaaatgttagtggcttttgagtgtgttcaaaatgatttataaaagaagtcttcggcattgtggcctt

SEQ ID NO: 123496 - DNA, 748 bp, Arabidopsis thaliana
  unsure (1)..(748): unsure at all n locations
atgattcgccggcactaatacgacccctatagggaaagctggcacgcctgcaggtaccggtccggaattcccgggtcgacccacgcgtccgctcggctgcgagaagacgacagaaggggttgctgaagaattcgcttcacagatgtcgaactacactcgtgagaaagacttggagaaggaaacaggacttggaccgtgttttaatatctccgggaagggagatgtgacggtgccggagctgatttttgagtttaaaggtggagcgaagttggaattgccgttatccaattacttcacgttcgttgggaatactgataccgtttgtcttacggtggtttcggataaaaccgttaatccctccggcgggactggaccggcgataattctggggagtttccagcaacagaactatttagttgaatacgatttggagaatgacaggtttgggttcgcgaagaagaagtgtagcccgtgagttttcaggggtaaatttgacttttcacaacgatgagatcaatttttatgatttttaattccgttttccgaaataaaagaaaagggtttaaatgtttatagaaatatcagaaatatgtaagagtagtaaaattaataaattaaaaaaaaaaatcgtaatagttggatgctaaaaaaaaaacaaaagccatagnnnnnannnnnnnnnnnnnnnnnnnnnnnnnnnnnnnnnnnnnnnnnnnnnnnnnnnnnnnnnnnnnnnnnnngtcctaaa

SEQ ID NO: 123497 - DNA, 721 bp, Arabidopsis thaliana
tggggttttaataaccgaaaagcttgatttcccggatctaaccgtacccgatttcgtagtcggatgttcaattatctccacccgacaacccgctggtatcgctgggtttgggcgaggacccgtatcgcttccttcacaaatgaatctcaagagattctctcactgtttggtttctcgtcggtttgacgataccaacgtaaccaccgatcttgatttagataccggatcgggtcataattccgggtctaaaactccgggtctcacatacacgccgtttcggaaaaatcccaatgtctccaacaaagcttttcgcggagtattattacctcaatctccggcgaatctacgtcggaagaaagcacgtgaagattccgtataagtatctcgcgccgggaactaacggagacggaggatccattgttgattccggatctacattcactttcatggagcgacccgttttcgagctcgttgctgaagaattcgcttcacagatgtcgaactacactcgtgagaaagacttggagaaggaaacaggacttggaccgtgttttaatatctccgggaagggagatgtgacggtgccggagctgatttttgagtttaaaggtggagcgaagttggaattgccgttatccaattacttcacgttcgttgggaatactgataccgtttgtcttacggtggtttcggataaaaccgttaatccctccggtgtgac

SEQ ID NO: 123498 - DNA, 416 bp, Arabidopsis thaliana
tcgccctcgcgtccgattcatcgtctcttctctgctctgctttgctctagatcacaaattaaaagacttcattagtcttcctgtctccaccattaccttcttcctttttaactcagccacgacgagcagactattgttctgttttccttgtataaaaatggcgtcgatgatgtttaccgattgctcctccaccacgacgtcgcgtctcatccatttgaaccgaagcagcggtactttcctcctccgtcaatgcgtcggccaactccgtttacagaccactgcttctggccgtggctgctgcattcgctcctcttcttctcccatttcttccatttccgctgatacaaaatcagagggtggcgcaattgtaatagatggaaaggctgtggccaaaaagattagagatgaaatcacaa

SEQ ID NO: 123499 - DNA, 1056 bp, Arabidopsis thaliana
  unsure (1)..(1056): unsure at all n locations
tcgaccacgcgtccgcccaagcgtcagcggacgcgtgggcggacgcgtgggtgcaaattgttgacacgacttgtccttgggtgacaaacgtctggaacacggttgagaagcacatgaggggggaatactcatcagtaatccatggtaaatatcatcatgatgagacgattgcaactgcgtcttttgcaggaaagtacatcattgtaaagaacatgaaagaggcaaattacgtttgtgattacattctcggtggccaatacgatggatctagctccacaaaagaggagttcatggagaaattcaaatacgcaatttcgaagggtttcgatcccgacaatgaccttgtcaaagttggtattgcaaaccaaacaacgatgctaaagggagaaacagaggagataggaagattactcgagacaacaatgatgcgcaagtatggagtggaaaatgtaagcggacatttcatcagcttcaacacaatatgcgacgctactcaagagcgacaagacgcaatctatgagctagtggaagagaagattgacctcatgctagtggttggcggatggaattcaagtaacacctctcaccttcaggaaatctcagaggcacggggaatcccatcttactggatcgatagtgagaaacggataggacctgggaataaaatagcctataagctccactatggagaactggtcgagaaggaaaactttctcccaaagggaccaataacaatcggtgtgacatcaggtgcatcaaccccggataaggtcgtggaagatgctttggtgaaggtgttcgacattaaacgtgaagagttattgcagctggcttgattcggcattgtgatcgtattcaaatactatttgtcatgtcaagagtgtactaaaatatatgtagttgtatgatttgtctttataacttttgtaagaggttttgtaattcaaagtcaacatcctcgttatcttaaaaaaaaaaaaaaaaagnnnnnnnnnnnnnnnnnnnnnnnnnnnnnnnnnnnnnnnnnnnnnnnnnnnnnnnnnnnnnnnnnncacc

SEQ ID NO: 123500 - DNA, 903 bp, Arabidopsis thaliana
  unsure (1)..(903): unsure at all n locations
acccacgcgtccgcccacgcgtccgaaaatcgtccattgaagtgaacagtcagcatcgttttgcttgcttgtgcgtttctctcgaactctctccatggctgttgcgctccaattcagccgattatgcgttcgaccggatactttcgtgcgggagaatcatctctctggatccggatctctccgccgccggaaagctttatcagtccggtgctcgtctggcgatgagaacgctccttcgccatcggtggtgatggactccgatttcgacgccaaggtgttccgtaagaacttgacgagaagcgataattacaatcgtaaagggttcggtcataaggaggagacactcaagctcatgaatcgagagtacaccagtgatatattggagacactgaaaacaaatgggtatacttattcttggggagatgttactgtgaaactcgctaaagcatatggtttttgctggggtgttgagcgtgctgttcagattgcatatgaagcacgaaagcagtttccagaggagaggctttggattactaacgaaatcattcataacccgaccgtcaataagaggttggaagatatggatgttaaaattattccggttgaggattcaaagaaacagtttgatgtagtagagaaagatgatgtggttatccttcctgcgtttggagctggtgttgacgagatgtatgttcttaatgataaaaaggtgcaaattgttgacacgacttgtccttgggtgacaaaggtcttgggaacacggttgagaagcaccagaagggggagtacacatcagtaatccatggtaaatataatcatgaagagacgattgcaactgcgtcttttgcaggaaagtacatcattgtaaagaacatganagaggcaaattacgtttgtgattac

SEQ ID NO: 123501 - DNA, 855 bp, Arabidopsis thaliana
  unsure (1)..(855): unsure at all n locations
nnnnnnnnnnnnnnnnnnnnnnnnnnnnnnnnnnnnnnnnnnnnnnnnnnnnnnnnnncggacgcgtgggcggacgcgtgggcccacgcgtccgaaataaacctctcttcatcgaaaatgtggagactctctgtgtcaattttcctcttctcatgtctcttcgtttcttcgtcttcgttgggcgattcggaggcgacgtgttccggtatagttccgttacggtaccggtacgataagatctcgataaccgactttggaggcgttggagatggtcgaacggtgaatactaaggcgtttagggcggcgatttatcggattcagcatctgaagaggagaggaggcacgcttttgtatatacctccgggagtgtatttgacggagagcttcaatctcactagccatatgactctttacttagctaaaggtgctgtgattagagctgttcaggatacctggaattggccattgattgatcctttgccgtcttatggaagagggagagagttaccagggggacggtatatgagctttattcatggtgatgggcttcgtgatgtagtcatcactggacaaaatgggacaatagacggtcaaggagaagtgtggtggaacatgtggcgtagtagaacgctaaagtacacaagaccgaacttaatcgagttcaaggactctaaggagatcataatctccaatgttattttccaaaaattcaccctttctggaaacattcattcctgtgtattgcagcaaccgttgtcatcccatcacgtttacgatctttagctccacaaggattctccccaacacccgatgggatcgcgcctgattccagctacaacgtctgcataggaaact

SEQ ID NO: 123502 - DNA, 536 bp, Arabidopsis thaliana
  unsure (1)..(536): unsure at all n locations
agtcatcatccttccaatggctattacttgagaactcttctgattaaacatagcaacaacaacaactcttcttctcctctctttctcacttcaatttagcgatggctgcaactgcaatctcttctctttccttcccagctttgggtcaatcggacaagatctccaatttcgcatcttctcgtcctctcgcctccgcaattcgcatctgcacaaagttttctcgcctttctttgaattcgcgttccacttcgaaatctcttattcactgcatgtccaatgttaccgccgatgtgcctcctgtatcagagacaaagtcgaaattcctaaaagcttacaagcgacccatcccgagtatctacaacacggttttgcaggagctcattgtccagcagcatttgatgaggtataagaagacttatcgttatgatcctgtttttgcccctgggatttgtcactgtatatggtcagcccattggaggntatccggggtgtnaaggccgggtgcnattttaagggtncaatnagcctnatngggc

SEQ ID NO: 123503 - DNA, 662 bp, Arabidopsis thaliana
  unsure (1)..(662): unsure at all n locations
tacgactcactatttggaaagctggtacgcctgcaggtaccggtccggaattcccgggtcgacccacgcgtccgcccacgcgtccgaaaaaaaaacattttaaggtaatctcaaaaccaaaaagcctatcaatctttgtacttggatgttttgttgttgcaaggattgcagaggaaaccaacgagtttctaactttgattctctaacaggtgttttctttggagatcttgagtttggacctcagaatcaaagatatataaagatgaatgaggaagaagataaagatcaagatcgagtaacgagaggatgtagtcacactcatagctgtaaccctccaggcccagaggatgcttctcactcccacacatgcttccacgctcacactcatctcatcatctctgatcagcaagagaatgatcattctgacagtagcaacaagaaacggttatgtggtaatagagaggcagtgaggaagtacagggagaagaagaaggctcgcactgcataccttgaagatgaagtgatgagattgcaatctctgaatgagcaattccttagaaaacttcagagccaagaaatggtggaaactgaattgatcagactccgggctctttctgtagagatgcagngggnaattgaagttgaactttgtagtttctcgt

SEQ ID NO: 123504 - DNA, 724 bp, Arabidopsis thaliana
  unsure (1)..(724): unsure at all n locations
agctgtctctatggctgctgctgtgatgggtttggttctcttgggacgtagattgtataatatgaagaagaaagctcaaaggttccatcttaaagttacgattgacgataagaaggcgtcgcgggtgatgagtcaggctgctcgactcaatgaagtgttcacagaggtaagaagggtccctgtgatccgccctgctctaccatcgcctggcgcatggccggttttgagccttagatgagtacccgttttctacaatacctagacacagtggagaatcaatcatgcaatgtccatcactttatgtaccgtaagaatacaaatacatgtgtttatgtcgtacctatgcataagtagtagtttaccatcttatgaaatcgcgtatgtgagtcgtgtcccaaccgtgggatacactgcagagtgattaccgtagcgatttatgtatgttcagagactgaaaatcccagttggtaagcctttttttatgtttgatcttaagaatttcataagctatatgtgggttttgttatggatttcattggggtttcaagcttgtattctattatagagaggaggacatagtccacagtcgatataaccactacaatggaaataaagaccctacaaatttctactaaaaaaaaaaaaaaaaaaaagggcggccgctctagaggatccaagcttacgtacgcgtgcatgcgacgtcaaagtcttnctatagtgtcac

SEQ ID NO: 123505 - DNA, 493 bp, Arabidopsis thaliana
acggttacttttcttctgcatctagttttttttttgcatattcatcaccttctctcagttttcttctttcaatagaattatccagaaaacttttaagagatggcagctccgattcgattctttgaactgaacactggtgccaagttaccttgcgtcggtctaggaacctacgcaatggtcgcgacagcgatcgaacaggcgattaagattggttacaggcatatcgactgtgcttcgatttacggaaacgagaaagagattggtggtgtgttgaagaagctgataggtgatggttttgtgaagcgtgaggagttatttatcacttccaaactctggagcaatgatcatttacctgaagatgtgcctaaggcactggaaaaaacgttacaggacttacagattgactatgttgatttatatctgatacattggcctgcgagcttgaagaaggaatcactaatgccaacacctgagatgctcacaaaacctgata

SEQ ID NO: 123506 - DNA, 1017 bp, Arabidopsis thaliana
  unsure (1)..(1017): unsure at all n locations
gtcacatcgaactctaaaccacactgagatggcgaaatggtggcgaggcctgagatccgtgacggcggaggtggctgatcttccggcttcttcattcggtcgatcgattcgatgtattcatcagtatcagacgatccaggcgattccacgtgaagctacgggtcgaggagtatcggctcgggatcggacgattggtcgtattcccgccgtcgttttcccgcaatcgcttctagatactgatgcttcgaagcgaggcgtgtcgaggaagcagctattgacggcggataagaagcagatcaagtctattattgactctgttggtctcccattcttctgttctaccactttccagcttcagatccgagctggtcagggttcgtcgacgcttgttgaatcgggtcgagtactttcccctcaaggttcatagggccgaagaaacttggaaagatacttaatttagtattcgtatgggctgatgatggggagaggttgaaggttgatgttcctgttgttttcaaagggttggatcattgccctggtctccagaaagggggaaacctgcggacaatcccgaagcactctgaaactacctagggccagctgagcacattccaatctaaaaatccgaagtagatgtgagcaatctggacattgaagaccaaagtgttattgcaagacgttgtatttcatccatcattgaagctactgagcaagaatgaaaccatgcccgtgtgtaagattgtcgccacaagcccggtgaaagaaccagaagctgttcaagcataaaataagtctttgaaaagagtaatgtaatgtctctctgaagtttctgttccatacaaaaatgatcatttgtagaattctcagaggaaagaagcagatttttagaataaccctttttgtataaacctttcaagtggaagaacacttaaaccctctaaaaaaaaaaaaaaaaaaannaagggcgnccgcttctagaggatccaagcttacgtacgcgtgcatgcgacgtcggag

SEQ ID NO: 123507 - DNA, 1355 bp, Arabidopsis thaliana
  unsure (1)..(1355): unsure at all n locations
nnnnnnnnnnnnnnnnnnnnnnnnnnnnnnnnnnnnnnnnnnnnnnnnnnnnnnnnnnnnnnnnnnnnnnnnnnnnnccacgcgtccgcccacgcgtccgcccacgcgtccgcccacgcgtccgtacggctgcgagaagacgacagaagggggatccattcatgctaaatggtgcttagcttaccacaaggagaactttgcttacgagcactgggatgacattctagacatctgtaaccagtatgatgtggctctttccattggagatggtctgagacctggctccatttatgatgctaacgacactgctcagtttgcagagctccttactcaaggtgaactaactcgccgagcgtgggaaaaagatgtgcaggtgatgaatgaagggccagggcatgtcccaatgcacaagattccagagaatatgcagaagcagttggagtggtgtaacgaggcaccattctacacccttggtcctttgactactgatattgcccctggatatgatcacattacctctgccattggagctgccaatattggagccttgggtacagctcttctttgctatgtaacaccaaaagaacaccttgggctaccaaacagggacgatgtgaaggccggggttatagcatacaagatcgccgctcatgcagctgatctagccaaacagcatccacatgctcaggcatgggacgatgcgctgagcaaagcgcggtttgagtttagatggatggaccaatttgctctgtcgttggaccccatgactgctatgtctttccatgatgaaactcttccagctgatggagccaaggttgcacacttttgctccatgtgtggaccaaaattctgctctatgaagataacagaagacatcccaaagtatgcagaggagaatggttatggcagtgctgaagaagcaatcagccaaggaatggatgctatgagtgaagaattcaacatcgcaaagaaaaccattagcggagaacagcccggtgaagtaggtggagaaatatatttgccagagagctatgtcaaagctgctcagaaataaaaggcaaatgttttaaacaagaccttgcttacccaagtcttggtgcctgttggactatacctggataaaggcacaaactgttggtaagcttagtagtctctatgtcatgttacttttagaactatctatgttgtctgttcatttgagtcagagtcagcaataaagacaatctaagttgatgtttcaaaaaaaaaaaaaaaaggggcggccgctctagaggatccaagcttacgtacgcgtgcatacgacgtcannnnnnnnnnnnnnnnnnnnnnnnnnnnnnnnnnnnnnnnnnnnnnng

SEQ ID NO: 123508 - DNA, 1599 bp, Arabidopsis thaliana
  unsure (1)..(1599): unsure at all n locations
gccnnnnnnnnnnnnnnnnnnnnnnnnnnnnnnnnnnnnnnnnnnnnnnnnnnnnnnnnnnnnnnnnnnnnnnccacgcgtccgtgcggctgcgagaagcgacggaccgcggactcactcagtgtgcgcgattcatttcaaaaacgagccagcctcttcttccttcgtctactagatcagatccaaagcttcctcttccagctatggctgcttcagtacactgtaccttgatgtccgtcgtatgcaacaacaagaatcactctgctcggccgaaacttccaaactcgtctttgttacctggattcgatgttgttgttcaagctgctgctactcgattcaagaaggaaacaacaaccacaagagccactttgacgtttgatccaccaaccactaattctgagagagctaagcagagaaaacacaccattgatccttcttctcctgattttcaaccaattccatcttttgaagaatgctttcctaagagcactaaagaacacaaggaagttgtccatgaagaatctggtcatgttcttaaagttccctttcgtcgtgttcatttgtctggtggtgagccagcttttgataattatgacactagtggtcctcaaaatgttaatgcacacattgggcttgctaagctaaggaaggagtggattgatcgtcgggagaagctaggaacaccaagatacactcaaatgtactacgctaagcaagggatcataactgaggaaatgctctactgtgctactagggagaagctagaccctgagtttgtaagatcagaagttgcacgaggacgggcgattatcccttccaacaagaagcatttggagctggaaccgatgattgttggtagaaagttcttggtcaaggtcaatgcgaatatcggaaactctgctgttgccagctctattgaagaggaagtctacaaggttcagtgggcaaccatgtggggagctgatacaatcatggatctctcaactggtcgtcacatccatgagacacgtgagtggctcctaaggaattcagctgtgcctgttggtacggtgcctatttatcaagcacttgagaaagtggatggaattgctgagaatcttaactgggaggttttcagagagactctgattgaacaagctgagcaaggtgtagactatttcacaatccatgctggagttttgctgcgttacattcccttaactgccaagcgtttgaccgggatcgtttcgcgtggaggatccattcatgctaaatggtgcttagcttaccacaaggagaactttgcttacgagcactgggatgacattctagacatctgtaaccagtatgatgtggctctttccattggagatggtctnagacctggctccatttatgatgctaacggcactgctcagttttcagggctccttactcaaaggtgaacctaactcgccgagcgtgggaaaaanttttcaaggtatgaattaagggccagggnatgtcccaatgncaagnttncagggattttcagaagcngttgnagtggtgaccnngcncnttttcaccttggccttnanctctaaattcccnggatgccaatnncttcnatgggtcnta

SEQ ID NO: 123509 - DNA, 1573 bp, Arabidopsis thaliana
gctccctacgactcactatatggaaagctggtcacgcctgcaggtaccggtccggaattcccgggtcgacccacgcgtccgcccacgcgtccgcgaaattgctgatgtggttaaaatcccaataataaatgaagctgatcaaataagtacttgttgtctgatctgacgtggctagatagcttctccaacgctttatctcggaaactccgtgacaaaagatagtactttcatgtctgttttggtttcatccaaaagtatcaaatttgtgtgatcttctccagaagaaacttgaggaactttaagctaaacctctgtagttttcagattgattcgttggtggaaagcgtctaaattttgcgtaaatggcggcagctcttgtacgcagattctgccggggatcatcttttccggtctctggtcatggatataggatgctatcgacggttgaaaatgtatctgaaagtggtaaatcgatgaatctatactctgctattaatcaagctcttcacatcgctttagagaccgatcctcggtcttatgtttttggggaagatgttggatttggtggtgtcttccgatgtacaacaggattagctgaacgttttgggaaatctcgagttttcaacactcctctctgcgagcaaggcattgttggctttggcattggtttagctgcaatgggaaatcgagttattgcggaaattcagtttgcggattatattttcccggcttttgatcagattgttaatgaggctgcaaagttcagataccgaagtggaaaccagtttaactgtggaggactcactattagggcaccgtacggagcagttggtcacggtggacattaccactcgcagtcccctgaagctttcttttgtcatgtccctggtatcaaagttgttattcctcgaagtccacgggaagctaagggattattattgtcatccatccgtgatccgaatcccgttggctttttcgaacccaaagtggctatatcgtcaagcggtagaggatgtccctgaagatgactatatgatacctttatctgaggcagaggctatgcgagaaggttccgacataactcttgttggatggggagcacagctcactatcatggaccaagcatgtcttgacgcagaaaacgaaggaatatcgtgtgaattgatagatctcaagactctgatcccttgggataaggaaaccgttgagaccccagtgagaaagactggccaggcttcttattagccatgaagctcctgttacaggaggctttggggccgagatcgctgcaactatagttgagcgttgcttcttgaggttagaagcacctgtaagcagagtttgtggcctggacactcctttccctctagtgttcgaacctttctacatgccaaccaagaacaagatattggatgcaatcagatccactgtgaattactagcccatcttagcattgtacacatgattctctgtctcctatcttcgaaataattattgatgctggtggttcagacatgtaatggatcctgtaatcaccacttttgttatttaatctatgatcttgaaactctcc

SEQ ID NO: 123510 - DNA, 416 bp, Arabidopsis thaliana
attgagatctctccaacaactctactttgtctttactcaagtatgtcactaacaaagatagaatcacaaaaaggaaagagaaaatgagaggagaaatcgatgaagctaatcttgctcctgaaacttcacttattaacaaagagaatcaagactcatcggcgacaataacaactactctcttgctcaccacttttgtagccgtgtctggttcctttgtctttggctcagctataggatattcatcacctgttcagtcggatttaaccaaggagttgaatctctctgtggcagagtactcgctcttcggttcgattctgacaattggagcaatgatcggcgcagctatgagtggacgaatcgccgatatgataggcagacgagctactatgggtttctcggagatgttttgcattctc

SEQ ID NO: 123511 - DNA, 448 bp, Arabidopsis thaliana
aaagactcaaaaaagtctgcgtggatctccagccgttttcagacacttacccacaaaatattcctctcggcgatgatccctttctgctgaatttttggtcctttgtcgctcgactgttttcttcgtctactatttgttccttttggatattcttcggacttttcgttgatttgattttcaagagagagagtttgaacaaggaaggattgaactatggaagatgcatcagagactagctactggtgtcacatgtgctcccgatcggtgattccattgattcaagacgaaatcatcaaatgcaatttctgtcaaagtggttttgttgaagaaatggataataatgatgaccatcaggctgctgattctctctggactcctatcttgacggagatgatgaacaacaatcacgaccaacattctaccaatcaggaagactcagaatctattc

SEQ ID NO: 123512 - DNA, 526 bp, Arabidopsis thaliana
  unsure (1)..(526): unsure at all n locations
aagtgaaagtgacaagaaaaaagaaaaggaattaaacaagggtgctgaaagaaaagatctgaatgctgacaagccaggttctgatttaactcctgggaatgcgagagaggaagatgaagttcccaatagagagaagaatgtgcacaaagttcagttatgggctgagatcaggccatctcttcaagcaattgaggacttgatgagtgtccgtgtcaaaatgaagggggattccacaaatggcgagcaagaagctcagaaattgaattccttagcctcaactgatgagaccgagtcttcaaagggagtatgtgagaatgattccgaagacgagttctatgatgcggagagatcagatccanttcaggatggntcttcagatggcacaagtgtctccagcatgtctgctnctgctgatncagcttccctagaatctgcatgcccctggaaagacgancntgaagttcttagtcatgngcggtgacntatggctctgaaggggtaagcntggaagcatttgggggggcaa

SEQ ID NO: 123513 - DNA, 693 bp, Arabidopsis thaliana
agcccacgcgtccgcccacgcgtccgcaaaaggcttcgttatccccaagccatacgagagattacgagtaagtgatacgttagccaaagagtgtcaccaattgattcaatatcccaagaggaagaagaagaagcaagagaagaagaagatagaagcgatttttataaaaatggcggcggatgctctgagaatctcgagttctagttctggttcgttggtttgtaatcttaatggttcacaaagacgacctgttcttcttcctctgtctcatcgtgctacctttctgggtcttcctcctcgtgcttcatcttcttcgatttcttcttcaattcctcagtttctgggtacttctcgtattgggctaggttcttccaagctctcacaaaagaagaaacaattctcagtcttcgctgcagctgaagccgaggcgaagcgggctgtaccgcttaaagattaccgaaacatcggtattatggctcacatagacgcgggaaagacgacaacaaccgagaggattctttactacacaggaagaaactacaaaatcggtgaagtgcatgaagggacagctacaatggattggatggaacaagagcaagaacgaggaatcaccattacttcagctgcaaccacaacgttttgggataaacacaggatcaatattattgatacaccgggtcacgtcgatttcac

SEQ ID NO: 123514 - DNA, 1096 bp, Arabidopsis thaliana
ctctaatacgactcactatagggagagctggtacccctgcaggtaccggtccggatttcccgggtcaacccacgcggccgtgcgggtaccggatgtacccggcgccacgaaactagcagccactgcagatgtgtctgtgcttgtgatcggtgccgatcaatcaatcgaggcagagagccgagacagagtcgacctgcatcttcctggacagcaacaagagctggtgatccaaggggcggaagcagcaaaaggaccggtcttgctcgtcattatggccggtggaggtgtcgatattacattcgctaagaatgacccaaagatcgccggaattttgtgggttggttatcccggagaagccggtggtatcgccattgctgatatcatctttggccgttataatccaagtgggaaattaccgatgacgtggtatccacagtcgtatgtagagaaagttccgatgacaataatgaacatgagacccgataaagcaagcgggtatccgggtcggacttaccgattctacaccggagaaacagtatacgcattcggagatggactcagctacaccaaattcagtcacactttagtcaaagctccaagtctcgtttctctcggtctcgaagagaatcacgtttgccgatcatcggaatgtcaatcgctagacgcgatcggaccgcactgcgaaaacgctgtctccggcggtggatcggcgtttgaagttcatatcaaggtacgaaacggaggagatagagaagggattcacacggtgtttctattcacgacgccgccggcgattcacggatcgccgaggaagcatttggtaggattcgagaagattcgattggggaagagggaagaagcggtggttaggtttaaggtagagatatgtaaagatctgagtgtggttgatgagattgggaagaggaagattggtttgggaaagcatcttcttcatgtcggagatttaaaacattccttaagcattagaatctgattctatatttttatttgaggaagaaaaaaagaatattaatatgcttaagcgcggccgcgaattcgagatcaagcttatcgataccgtcgacctgagggtgtg

SEQ ID NO: 123515 - DNA, 1300 bp, Arabidopsis thaliana
tctctacgactcactattgggaaagctggtcacgcctgcaggtaccggtccggaattcccgggtcgacccacgcgtgcggaagagggcaagagactccaggagaagatccattgctcgctagtaagtatgcttcagggtacgttaagggtcttcaagagactgacggtggcgattctaaccgtctcaaagtcgccgcctgctgcaaacactataccgcttacgatgtcgataattggaaaggcgtagaacgttacagtttcaacgccgtggtgactcaacaagatatggatgatacgtatcaaccaccgttcaagagttgtgtggttgatgggaatgtggcgagtgttatgtgttcttacaatcaagttaacggcaaaccgacatgcgctgatccagatctgctctctggtgttatccgcggtgaatggaaattaaatgggtacattgtttcagattgtgattcagtagatgtcttgtataagaaccaacactatacaaagactccagctgaagctgcagccatatctatattggcaggtttggatttaaactgtggttcattcttgggtcaacatacagaggaagcagttaagtcgggtttggtaaacgaggcagctatcgataaagcgatttcgaacaactttttgacccttatgcgtttaggattctttgatggaaacccaaagaaccaaatctatggcgggttaggtcctaccgacgtttgcacgtctgcgaatcaagagctagcagcagatgcagcaagacaaggcattgttctactcaagaatactggatgcttaccgctttctcctaaatcgatcaaaacactagccgtgattggaccaaacgcgaatgtcaccaaaacaatgattggaaactacgaaggcacgccgtgtaaatacacaacaccactacaaggactagccgggacggtatctacaacatatctaccaggctgctccaatgtagcttgtgctgtagcggatgtagccggcgccacgaaactagcagccactgcagatgtgtctgtgcttgtgatcggtgccgatcaatcaatcgaggcagagagccgcgaccagagtcgcccttgcatcttcctgggcagcaacaagagctggtgatcccaagtggctaaagcagcaaaagggccggtctttgctcgtcattatgttccggtggggggtttcgattttaccatccgctaaggatgaccccaagatcgccggaatttttgtgggttggttaatcccggggaagcctgtggtttccccattgctgatatcatctttggccgttata

SEQ ID NO: 123516 - DNA, 969 bp, Arabidopsis thaliana
  unsure (1)..(969): unsure at all n locations
taatacgactcacttagggaaagctcgtacgcctgcaggtaccggtccggaattcccgggtcgacccacgcgtccgatcgaaacacaaagcaatgggctcttcttctccattaacaaggagaaacagagcaccaccatcctctgtttcctctgtttatctaatctttctctgtttcttcctctactttttaaatttctcaaacgctcaatcatcgccggttttcgcctgcgacgtagctgcaaacccttctctcgccgcctatggtttctgcaacaccgttttgaagatcgaataccgagtcgctgatctggtcgcgaggctcacgttgcaagaaaagatcgggtttttagtgagtaaagctaacggcgtgactcgtcttgggattccaacgtatgaatggtggtctgaagcacttcacggcgtttcttacatcggacccggcacgcatttttctagccaagttcccggagctacgagtttcccgcaggttatactcaccgccgcttctttcaacgtatctctgtttcaagccattggcaaggtcgtctcaacggaagcgagggcaatgtacaacgtgggattagccggactaacgtattggtcaccgaacgtgaacatattccgagatccaagatggggaagagggcaagatactccaggagaagatccattgctcgctagtaagtatgcttcagggtacgttaagggtcttcaagagactgacggtggcgattctaaccgtctcaaagtcgccgcctgctgcaaacactataccgcttacnatgtcgataattggaaaggcgtagaacgttacagtttcaacngccgtggtgactcaacaagatatggatgatacggnttaaccacccgttcaanagttnntntggttnattgggaattttggcgnggttttatgtgtnctacaaacaaggttacggnaaaccggcattnggtgntccanatcttnt

SEQ ID NO: 123517 - DNA, 852 bp, Arabidopsis thaliana
  unsure (1)..(852): unsure at all n locations
gccccccctcgatttcgacggtatacataagcttgatatcgaattcgcggccgccctctgtttcctctgtttatctaatctttctctgtttcttcctctactttttaaatttctcaaacgctcaatcatcgccggttttcgcctgcgacgtagctgcaaacccttctctcgccgcctatggtttctgcaacaccgttttgaagatcgaataccgagtcgctgttctggtcgcgaggctcacgttgcaagaaaagatcgggtttttagtgagtaaagctaacggcgtgactcgtcttgggattccaacgtatgaatggtggtctgaagcacttcacggcgtttcttacatcggacccggcacgcatttttctagccaagttcccggagctacgagtttcccgcaggttatactcaccgccgcttctttcaacgtatctctgtttcaagccattggcaaggtcgtctcaacggaagcgagggcaatgtacaacgtgggattagccggactaacgtattggtcaccgaacgtgaacatattccgagatccaagatggggaagagggcaagagnctccaggggaagatccnttgctcgctagtaagtatgcttcagggtacggtaaggggtcttcaagagacttnacggtggcgnttctaaccgtcttaaaagtcggccgcctgctgcaaacactataccgctttacggtgtcgataatttggaaggcgtagnancgttacagtttaacggccgtggtgnctaancaggtttttggttgtnacggtttaacccnccnttcaaagttttttttggtttaatgganttttgggcgngttttattgntttttcanacaa

SEQ ID NO: 123518 - DNA, 544 bp, Arabidopsis thaliana
  unsure (1)..(544): unsure at all n locations
ctctcggtctcgaagagaatcccgtttgccgatcatcggaatgtcaatcgctagacgcgatcggaccgcactgcgaaaacgctgtctccggcggtggatcggcgtttgaagttcatatcaaggtacgaaacggaggagatagagaagggattcacacggtgtttctattcacgacgccgccggcgattcacggatcgccgaggaagcatttggtaggattcgagaagattcgattggggaagaggggagaagcggtggttaggtttaaggtagagatatgtaaagatctgagtgtggttgatgagattgggaagaggaagattggtttgggaaagcatcttcttcatgtcggagatttaaaacattccttaagcattagaatctgattctatatttttatttgaggaaggaaaaaagaatattaatatgcttaagcttttgcaagttggaaaagaaaagtaataaaaaaaaccaattgaagatctctttaaaattaaannnnnnnnnnnnnnnnnnnnnnnnnnnnnnnnnnnnnnnnnnnnnn

SEQ ID NO: 123519 - DNA, 560 bp, Arabidopsis thaliana
  unsure (1)..(560): unsure at all n locations
cnnnnnnnnnnnnnnnnnnnnnnnnnnnnnnnnnnnnnnnnnnnnnnnnnnnnnnnnnnnnnnnnnnnnnnnccacgcgtccgcccacgcgttcgcggacgcgtgggcgaagaacgacgagctcgagattattgattttcaagtggagattgaatcagtgataatggacaatgagacgaaagcaaccaccttcagcaaatcaacagggcttcctaggaagagattctacagagcaagagctcatagtaacccacttagcgattctcacttcccaatccccatatctccagctcatgtcgactattcacttcacttccccaaattcgttgaagctgacaacaaattcatcaagaaggttgagtttgcggatatcggatgcgggtttggtggcctactaatctcccttgcgacgcttttccccgatacgctaatgatcggtatggagctcagagataaagtgacggagtacgttaaagaacggatcttagctttaaggagaacaagctcggagggacagtatgagaacatctccgttgttaggacaaactcgatgaagtaca

SEQ ID NO: 123520 - DNA, 962 bp, Arabidopsis thaliana
  unsure (1)..(962): unsure at all n locations
cccacgctttcgcccacgcgtccggcagtgactgctgctcaaggacctcaggatacccaggccctgaacggaagattggcagcacctagttcaccatttgatgatgactctgatgatgttgatgagcaacctcttgttagacacaggccaagacgtgcagcatccggatctctggctccacctaacgctgatcgttcccggagtgggagtcctgaagaagaacatgcaagtattaatccagcggagcgtggcagtgggtttccttctgagtggggaggcatttcatctgaggaacatgatgaagctgtcatgctcgaggcagccatgtttggtggcattcctgaaactggatataatcatcttccattcttacctcctcagccgagggcccaaccacgtccaccctcaccttcgctgacagctcagaggttgatacgggaacagcaggatgatgagtatgttgcgtccctgcaagctgaccgagataaagaaatgaagtccattagagatgctgaggcacgtcagctagaggaagaaactgcgagaaaggcttttntggaggaagaaaagaaaaaagaggaagaagctcaaagaaaactcgaggaggaacaggagctagaaagacaactagatgcaaaagaagcgtctttacctaaggagcctcaagctgatgaagagaatgccattacccttctaaatccggatgccggatggaacacgtcggggccgccggttcctttaaaatcttgcaaacttccaancccttttcaactttnttaggcattnccagagtngtgaaccccacaatttcaggcttggtgaggcctatccgnggnatnctttttgngttggggaagtnagnggccttaacggttttgggtttccccaacaagggnttttccttngtttntgnttagcctaanttnggggttcattnttttctgaactttttttaggnttgc

SEQ ID NO: 123521 - DNA, 497 bp, Arabidopsis thaliana
aggagcctcaagctgatgaagagaatgccattacccttttaatccggatgccggatggaacacgtcggggccgccggttccttaaatctgacaaactccaaacccttttcaactttatagacattgccagagtggtgaaacccaacacttacagactggtgaggccatatcccaggcatgcgtttggagatggggaaagtgagtcgaccttaaacgatcttggattgaccagcaaacaagaagcattgttccttgagcttatctagttttaagctcttggatatataaccagaattacatttgtcttctgcttagaaaactctttaattttcaagttattttttttatctttctttatacaaaagaaaaagtatttgttcagggtggaggattatatggtttccaaaaccgtcgtcgtttagtccaaaaaaaaaaaaaaaaaaaaaaacccaaagggcgaccgctctagaggatccaagcttacgtacgcgtgcgtt

SEQ ID NO: 123522 - DNA, 498 bp, Arabidopsis thaliana
ctatacgacttacttagggaaagctggtacgcctgcaggtaccggtccggaattcccgggtcgacccacgcgtccgctgctctcggctgataatagctggacatgataggaggatatatattgttgacgttggtagcatggagttattacattcttttacaccacgccaggagggacaggaaggtgaatctcctcctcatgagcctccaattacaaaactgtatactagctcaaatgatgattggttagctgctatcaattgctttggggacatatatgtgttcaacctggaaacgcagaggcagcattggttcatatcaaggcttgatggtgcatctgttgcagccgctggttttcatccgagggacaacaatgtgattgtgatctccacctcttcaaaccaggtctttgcattggatgtggaggctagagagttgagcaagtgggcattgctgcagactttttgtctgccaaagagctaccaaaattttcctggtg

SEQ ID NO: 123523 - DNA, 814 bp, Arabidopsis thaliana
ctactacgactcactatttggaaagctggtacgcctgcaggtaccggtccggaattcccgggtcgacccacgcgtccgcacgaaagacgttgcagaggagaaaattcaaaacccacctccggagcaaattttcgatgactccaaagcccttactgttgttgagaaacctgtagaagagcctgcaccggcgaaacctgcgtctgcatcgctcgatagagatgttaagctagctgatttgtcaaaggaaaagagattgtctttcgtcagagcgtgggaagaaagcgaaaagagcaaagcagagaacaaagctgagaagaagattgcagatgttcatgcttgggaaaacagcaagaaagcagctgtcgaagcgcaactcaagaaaatcgaggagcaactagagaagaagaaagcagagtatgcagagaggatgaagaataaggttgcagcgattcacaaggaagcagaagagagaagagcaatgattgaagctaagcgtggagaagacgttcttaaagcagaagaaacggctgctaaatacagagccactggaattgttccaaaggcaacttgtggatgtttctaatcttgaatttgcgaatcaaagtttcaagacttcgtaactgtaaagtgtaatcaaatttctctgttctctttaatggcttgtaatgttgtttgtatattgattttgtgtgtgacaatcagagtgaaaaatatgtttccttgttttccaaaaaaaaaaaaaaaaaaaaaaaaaaaacaaaagggcggccgctttaaaggatcccagcttacggacgggtgcatgcgacgtcat

SEQ ID NO: 123524 - DNA, 488 bp, Arabidopsis thaliana
  unsure (1)..(488): unsure at all n locations
cccacgttttcaatttggttttcttttttcctctctatttcttcggctgagaggcggcgactatggcggaggaacagaagatagcgttagaatcagaatctccggcgaaggttacgactcctgctccagcagatacaccggctccagctccggcagagattccggctccagctccagctccgactccggctgatgtcacgaaagacgttgcagaggagaaaattcaaaacccacctccggagcaaattttcgatgactccaaagcccttactgttgttgagaaacctgtagaagagcctgcaccggcgaaacctgcgtctgcatcgctcgatagagatgttaagctagctgatttgtcaaaggaaaagagattgtctttcgtcagagcgtgggaagaaagcgaaaagagcaaagcaggagaacaaagctgtagaagaggtttccaggttgttcatgcttttggggaaacanncaagaaannnancttt

SEQ ID NO: 123525 - DNA, 525 bp, Arabidopsis thaliana
atgatgatttaagtcttgcgatcaagaaaactcaaatcttaaaactttctggaaaaacaaaaatgtcaggaagaggaaaaggaggaaaagggttaggcaaaggaggagcaaagagacacagaaaggttctaagagacaacattcaaggaatcacaaagccagcgattcgtcgtcttgctcgtagaggaggtgtgaagagaatcagtggattgatctatgaagaaacgagaggtgtgttgaagatttttctggagaatgtgattagagatgctgttacttacactgagcatgcgaggaggaagacggtgactgctatggatgttgtttatgccttgaagagacaaggaagaactctatatggatttggtggttgatcaatttgagatctgggttttctggtgaatgatgatgatttaagtcttgcgatcaagaaattccagaaattgggttgaattttagggtttcgttttgtgttgtaattagggcagcattgtaatggattaatgataagtaccatttgctaat

SEQ ID NO: 123526 - DNA, 540 bp, Arabidopsis thaliana
cgcctgcaggtaccggtccggaattcccgggttgacccacgcgtccgcggacgcgtgggttgtcatggaatttatacattccactcctcaaagtacttgaatatcttccacgggggagtccttcggaagcatgcttgatgaaaatatttgttgccactgtggaaacaatactcagtagaacttttccgcctgaatcttccagggaactaaccagaaaagctagatcgagttttaccacaagatcagcgaccaaaaatcttgctatgtctgagcttcgtgctatggtccatgctctctttttagaatcatgcgctggtgtggaattagcttcacgcctactttttgttgtgttgactgtatgtgttagccatgaagcacagtctagtggtagcaagagaccgagaagtgaatatgctagtactactgaaaatattgaggcgaatcaacctgtatctaacaatcaaactgctaaccgtaaaagtaggaatgtcaaaggacagggacctgtggcagcatttgattcatacgttcttgctgctg

SEQ ID NO: 123527 - DNA, 571 bp, Arabidopsis thaliana
  unsure (1)..(571): unsure at all n locations
cgnnnnnnnnnnnnnnnnnnnnnnnnnnnnnnnnnnnnnnnnnnnnnnnnnnnnnnnnnnnnnnnnnnnnnccacgcgtccgcttaaagattcagtcaaaaaaaactttaatctttgttttcctgcaaaaagcaaaagtgtttctgtaataaaacacctttttgcagagaatgttaaaagattctctagttttaggctttatgtaaaaacgatttttttgctgggtgttctgtttttggatctgtgtttcttttttgggaagatccacccaatgaaaccaaatctcacattacaaaatgacaagaaattgtctcttcttcccaataattccaaaactttgatttagtaaaaaataaaataaaataactgggtgacttaacaaccagaaagattatgtattcttcaaagaagcaatcataacgcaattgattatatccccaaaagaaaaggtttttaaactccaaaaatgcagactccaaaatcaaggccaggatcattggagctgccacaaaagaagtctcctttaccagctcccaaagttgttaggagactcaaaccaagcggagcagaa

SEQ ID NO: 123528 - DNA, 365 bp, Arabidopsis thaliana
tcgccttcgcgtccgaaaaagaataacaatccgacgagaaagaggaaagatcaaatcatctaagtgctggtgccttgattctgcagttctccattttaatccaacaaaaaaagaagctgaatcgacggtatagattcttcaaagaagcaatcataacgcaattgattatatccccaaaagaaaaggtttttaaactccaaaaatgcagactccaaaatcaagtgattgtgattgtgtgtgataggccaggatcattggagctgccacaaaagaagtctcctttaccagctcccaaagttgttaggagactcaaaccaagcggagcagaatccgatccaaaaaccaagacaatatcgaaaactcaa

SEQ ID NO: 123529 - DNA, 449 bp, Arabidopsis thaliana
actctttctctctctcttcatcttcaacaaatcacgcaccatcataatcatcatcatcttcatcgtcatcaccaacttcttcatcatcaccatcaatggaattccccaaaccaaaccacccttcaccctaaaaatcgtttcatcttttttccttcttctaattttttttaggtttttaattaacttttgcttcaagttttcttctatagatttcttactcagaaaagtttcgaattcgaccctgtagcttagttgttgtttataatttcttgtgatcattcacagtacaaaaaaactaattcacccaccgacttcttcttcttcttctcttctctgtggcccatccttaaacccacactgcttttgcttttcctttttttttccgggaaatttgatctctttacctttcgtcattattagtagggaatgatcttttagttttttttttg

SEQ ID NO: 123530 - DNA, 323 bp, Arabidopsis thaliana
atttcttctatagatttcttactcagaaaacttgaagcaaaagttaattaaaaacctaaaaaaaattagaagaaggaaaaaagatgaaacgatttttaggtttttaattaacttttgcttcaagttttcttctatagatttcttactcagaaaagtttcgaattcgaccctgtagcttagttgttgtttataatttcttgtgatcattcacagtacaaaaaaactaattcacccatcgacttcttcttcatcgtcgcttctctgtggcccatccttaaacccacactgcttttgcttttcctttttttttccgggaaatttga

SEQ ID NO: 123531 - DNA, 546 bp, Arabidopsis thaliana
  unsure (1)..(546): unsure at all n locations
nnnnnnnnnnnnnnnnnnnnnnnnnnnnnnnnnnnnnnnnnnnnnnnnnnnnnnnnnnnnnnnnnnnnnnnnnnnnnnnnnnnccacgcgtccgcctaaaccctagctgagtagcttcttcctccccaattgctatttctctgcctccgtgtgctgagaaccagaacgaaaccctagcaaaatatcgccatgggtaaggtcaaaggaaagcatcgtttggataagtactatcgtctcgctaaggaacgtggattccgttctcgagcttcctacaagcttcttcagctcgacgccaagtactctcttctccactcagctcatgccgttctcgatctctgcgccgcccctggtggttggatgcaagtcgccgtcgagaaagttcccgtcggcagcctcgttctcggtatcgatcttgtcccgattctccctgttcgtggctgtgttactatgacgcaagatatcacaaggactgagtgtaaatcgaagatcaagcaagtgatggagcagcatggtgttagtgcttttaatttggttctgcacgatggg

SEQ ID NO: 123532 - DNA, 600 bp, Arabidopsis thaliana
  unsure (1)..(600): unsure at all n locations
ttttgaacgaaatagaaattgttgtagttttctataaatnattttttaataatctccaaatagagcaacgtatccacttatatatataaccttatctctttttttattggagaaaaaaaaagtacactgtgataatttgaactcatatatatacacactagttgtgtgtgcttgtcttaagaaaaaacaatgggttcaatggcagaaatcggttttgatgttatgcggagagttcatggaagcctacgagactatagtacctctctacgtcctccaagcgtttggtgttagcgtccactgcgtttctcctggtcgcaaaactggcgacaagtgcgtcatggccgctcacgatctccttggcctcgagatatacaccgaactggtggttgaccatctaacactaaacgctaacttcgatggcgtcatccccgaccaatacgacgccatcatcattcccggtggacgtttcacggaacttttgagcgccgacgagaaatgcgtgagtcttgttgctagattcgccgaactcaaggagctcatcttcacgagctgccacagncagctgtttcttncggcggcaggtcttttcaccggtggaat

SEQ ID NO: 123533 - DNA, 381 bp, Arabidopsis thaliana
cggacccatgcgcccagagctttattcttgccctagagataccgagcgggagattccagattgagagcagcttcgagtctctctctcctcgccgttccttttcgcttcttcaagtttcgttgccagagagattctaggtattgaagttatagaatggactttgatgagtatgagtacttagagaagacagttgaaaatcctcacctggagaatgaagttggtaatggtggtggtgatgagaaagtcaaatctgaagggaaagagaggagtaggagctcaaggcataggggtgacaagaagaaggagagggatgaagatgaggatggtcggcgttctaagcggtcgagatcgcatcaccgttcacgttctagggacagagag

SEQ ID NO: 123534 - DNA, 523 bp, Arabidopsis thaliana
aaaagcgtcactaggaagctgcgactatttgactgactctgaccgcacgcgactccttgtgagattctccgattgcttcgcctgagtttctgggttaactctccacgccgtcactttgatctttgcttttccgatctttagggtttttgtttagggaattgtcgaagactctgctctaacatgtctggaagaaaagaaacggttttagatttggccaagtttgtagataagggtgtgcaagttaagctcactggtggtagacaagtgactggaactcttaaaggctatgaccaattgcttaatcttgttcttgatgaagcagtcgagttcgttcgagatcatgatgatcctttgaagactacggatcagacaagacgccttggtttgattgtttgccgtggaacagcggtgatgcttgtctcaccaaccgatggcaccgaagaaatcgctaacccgttcgttactgcagaggctgtctaaagactttcttttaaagaatatgtctctctattagtttaacttg

SEQ ID NO: 123535 - DNA, 420 bp, Arabidopsis thaliana
tcgttgaactccttggtggcatggagcaactgctgataggttaatgatgatccaagactcccaaagtttatagagactcctcctcttgagggaagtgtttcatcaggaggtaatgggccaacaccgttgtgtcttcctctaggatgattacttgttgatgatctgtttcttcgacggacacagaaactcactgttattggtaacactatgagaatgagcataagcaatatagaccctccaactgcagcaagtataactattttcgtgtggcttaaccaggaagttttagaactcttcttctcttcatgttgtccgaaattgttgaaagttaagcccttttttgaataaaacaaagtgcaatccgacaacttccgctgcttctctgggccctgaagacaattgttgctcaatgaagctctg

SEQ ID NO: 123536 - DNA, 703 bp, Arabidopsis thaliana
  unsure (1)..(703): unsure at all n locations
acgtcaagcaagtgttagcttttgatctttcttatattcttctctgaaatagtaacacactgtgaagagtttttcctacatctgaattttgtctgatccaggtaacaaaacttgatctgatcccttccatagaaatattttcaaaagttttgtcctttttcttctgggtttgtttgattctccatgaaatagaaaacagattcggtgatcatactcaagctatatcgaaaatctgaaaatctgattattttcattatgtgtttgatcatatcatatcatcatgatctcagattacttttgattgattcagtcgcaagtctcatgttttgatcatagctgagaacaggaaaaagaagaaaatggcgtttgtgacaactgcggaagtttgtgacgcgaatcaagagctgattcggagtggtcagctacgagctttgcaacccattttccagatttatggccgtcgacaaatattctcaggaccagttgtcactgtcaaagtttttgaagacaatggcttaatccgtcaattcatcgaggagaaaggaaacggtagagttcttgtggtggatggtggagggagtcaccgttgtgcaatactcgggggtaaccccgtgttcaagctcagacaccggatggcagaatcgttttaccggttcattaagcgcggttgtnacggtttattncggttggntttnctnaccgc

SEQ ID NO: 123537 - DNA, 574 bp, Arabidopsis thaliana
  unsure (1)..(574): unsure at all n locations
ttccctccaaatttttaancaatgcntanccgtnattcntcgngganaaggnaccggtagagttcttatggtggatgttggagggagtcccccatgtgcaatactcgcaggtaaccccgttgttcaagctcagaccaacggatgggcaggaatcgttgtgaacggatgcatcagagacgtcgatgagatcaacggttgtgatatcggagtgagagctttggcctctcatccgataaaagcgagtaagaaaggacttggagaacaacgagttccggtaaatatcgcagggactcggatttgtgatggtgaatggctttatgcagatactgatgggattcttgtctcccaaattgagttatccgtttaataaaaaaggctttgatcagttaccaaaaaaaaaaacagaacgtggtttgtgttcatcttcttgttacttaagagattgttgaattataatggaaaataaatttttgttttgaatcaaaaaaaaaaaaccaaagggcggccgctctagaggatccaagcttacgtacgcgtgcatgcgacgtcatagactctcntatagttgcaccta

SEQ ID NO: 123538 - DNA, 1040 bp, Arabidopsis thaliana
ctctatacgactcactatatggaagctggtacgcctgcaggtaccggtcccggaattccggggtcgaccacgcgtgcgcccacgcgtccgcacgcacaacaaaaagcaagaatatataccactttgtgaacttcagagatcctatagcaatggcgaacctaccgattcttttggattactggccaagtatgttcgggatgagggctagagttgcgttgcgagagaaaggtgttgagtttgaatacagagaggaagatttctcgaacaagagccctttactcctccagagtaatcccattcacaagaaaatcccggttctggtccacaacggtaaaccggtatgtgaatctcttaacgttgtccagtacgtcgacgaggcttggcccgagaagaacccgttcttcccttccgatccttacgggagagctcaggctcgattctgggctgatttcgtggacaagaagttcaccgacgcccaattcaaggtatgggggaagaaaggtgaggaacaagaagcaggcaagaaggaatttattgaggcagtgaagattccttgaatctgagctaggagataaaccttactttggtggagatagctttgggtatgtagacatttccttgattacattctcgagttggttccaagcctatgagaagtttggtaactttagcatcgagtcagagagtccgaaactgatcgcttgggcaaagcggtgcatggagaaagagagtgtgtctaagtctctccctgactctgagaagattgttgcatatgctgctgagtataggaagaacaatctctgatttgaataatcttgttgttctcttgttgctaagctgtgttctgtttttgtctttgtttttttttttcccctaataatgcgagagagccttagtgaatgtgtgttgtggtttttatgcatcctaagtatggaatttaaataaaatttgtttcgaaaaaaaaaaaacaaagggcggccgctctagaggatccaagcttacgtacgcgtgcatgcgacgtcataactttttctatagtg

SEQ ID NO: 123539 - DNA, 975 bp, Arabidopsis thaliana
  unsure (1)..(975): unsure at all n locations
aaaaatggttggagaaatattgaataagagagagagagagagagagagagagagagatagagtttcagagttgacacaacattgaagtaaactaaactcctaacctctttatctatgtgtatatataaaactcaaaagtacatataatcttcaccattcacacatagtcacataccaaagcaaaaacatggatcgttgcacgtcgtcgtttttgcttctcacattggtctctaccttgtccattctccaaatctcctttgctcaacttgttccagcaatcatgacattcggtgactctgtagttgatgtcggcaacaacaactatcttccgacccttttcagagctgattatcctccttatggccgtgatttcgctaaccacaaagccaccggtcgtttctgcaacggcaaattagccactgatataactgctgagactttaggcttcactaagtacccaccagcttatctaagtcctgaagcttctggtaagaatcttctcattggtgctaatttcgcttctgcagcttcaggttatgatgacaaagctgctcttctcaatcacgcgatcccgttgtatcagcaagtagagtatttcaaggaatacaagaggaagcttataaaaattgcaggaagcaaaaaaggctgattcggtcataaagggggcaatctgtctcttaggtccaggaggcggtgattttcttcaaaactactatgtgaatccncctgctttacaaaggtttacactgttgatgcatacgggttctttccttatcggtaacttcctctaccatttttcaagcaagtgatgcggttgggggcaaggaaggccggtgtgccatctctgcctccaacaggntgnttcccgtgnagancccttttnggttccntgaaaagnntgttttcaagctaccnaggtgccaaacttncagnggtaacggtntgttaaggttagggaattcccgccttaaggtt

SEQ ID NO: 123540 - DNA, 726 bp, Arabidopsis thaliana
  unsure (1)..(726): unsure at all n locations
ccgcagtccggttcgattccgccgcccacgcgtcgtagccataccaagcaaactggtcgtgacgtgcgtttgtttacatgtcttactgtctctcaattcttgtcactgtcacatcatgacatcgggactctgtattgatgcggcacaacactatcttccgacccttttcatatctgattatcctccttatggccgtgatttcgctaaccacaaagccaccggtcgtttctgcaacggcaaattagccactgatataactgctgagactttaggcttcactaagtacccaccagcttatctaagtcctgaagcttctggtaagaatcttctcattggtgctaatttcgcttctgcagcttcaggttatgatgacaaagctgctcttctcaatcacgcgatcccgttgtatcagcaagtagagtatttcaaggaatacaagagcaagctaataaaaattgcaggaagcaaaaaaagctgattcgntcataaagggngcaatcttgtctcttaaggtgcaagggaagcagttntttttntttcaaaaacctacttatngtgaaanccccctggttttnccaaaaggtttncacctgtttgatggaatnccggggtctttncccttnatcgggtaaacttcctnttcnattttttccaagcaaagggtttttcnggtttggggccaaggaaggnccggnttggccaatttttgccnccaannangggtgg

SEQ ID NO: 123541 - DNA, 1024 bp, Arabidopsis thaliana
  unsure (1)..(1024): unsure at all n locations
tgccacatcagcaaacgcaatctcaagtttngtagattgcttatttnttcatcacacacttcaaactcgattttattttaattttcataagagaacaaccaagacaaaaagaacaatggcagcgagtgcatctccaatggcgagccagctaaggagcagcttctcctccgcttctctttctcagcgtctcgccgtcccgaagggcatctccggtgctcctttcggtgtttctccgaccaaaagagtctcttccttcactgtccgagctgttaaatccgacaagacaacattccaagtagttcaaccaatcaacggtgatccattcatcggaagtttggaaactccggtgacatcaagcccattgatcgcgtggtacctttccaacctccctggataccgtaccgccgtcaaccctctcctccgcggtgtggaagtgggcctggcccatggtttcttcttagtgggcccattcgtcaaagctggcccattaaggaacactgcttacgccgggtcagccgggtctttagccgcggctgggctggtagtcatcctcagcatgtgcctcaccatctacggtatctcttctttcaaggaaggagagccatcgatcgcaccgagtttgactttgactgggcggaagaagcagcctgaccagcttcaaacggctgatggatgggctaagttcactggaggattcttctttggagggatctctggggtgacttgggcttacttccttctctacgttcttgaccttccttacttcgtcaagtaaatgtagatcaaaatatatcgagtgtactttcaactctcttgcatcattgttttttactctttgtcttgatcaagaatcttgaaactcaggattgttaatgtatattactctttctttatcttattgacattaatttataaaacaaaaaaaaaaaaaaaaaaaaaggtcgtnnnnnnnnnnnnnnnnnnnnnnnnnnnnnnnnnnnnnnnnnnnnnnnnnnnnnnnnnnnnnnnnnnnnnnnnnnnnnnn

SEQ ID NO: 123542 - DNA, 672 bp, Arabidopsis thaliana
  unsure (1)..(672): unsure at all n locations
gccnaaanaaantcagnttaccaatacggnncattanggaattgaacccgggaataacccnattacngggaccttccaacncctggatccgnccncgtaaccctttccncccggtttgnaatggcctgcccatggttcttcttagtggcccnattcgtaaaagttgcccaattaaggaacactgttacgccgggtcagccgggtctttaagccgcggctgggctggtagtcatcctcagcatgtgcctcaccatctacggtatctcttctttcaaggaaggagagccatcgatcgcaccgagtttgactttgactgggcggaagaagcagcctgaccagcttcaaacggctgatggatgggctaagttcactggaggattcttctttggagggatctctggggtgacttgggcttacttccttctctacggtcttgaccttccctacttcgtcaagtaaatgtagatccaaatatatcgagtggaccttcaactctctctgcatcattggtttttactctttgtcttgatccagaatccttaaactcaggaatggtaaaggaaaatactccttcctttaaaaaaaaaaaaaaaaaaaaaaaaaaaaagggcggccgctttaaaggaacccagcctacggacgggtgccggccaccgcaagaatcttccaaaa

SEQ ID NO: 123543 - DNA, 556 bp, Arabidopsis thaliana
  unsure (1)..(556): unsure at all n locations
accaagacaaaaagaaagaacaatggcagcgagtgcatctccaatggcgagccagctaaggagcagcttctcctccgctgctctttctcagcgtctcgccgtcccgaaggcaatctccggtgctcctttcggtgtttctccgaccaaaagagtctcttccttcactgtccgagctgttaaatccgacaagacaacattccaagtagttcaaccaatcaacggtgatccattcatcggaagtttggaaactccggtgacatcaagcccattgatcgcgtgtggtacctttccaacctccctgggttaccgtaccgccgtcaacccttttccttccgcggtgttggaagtggggccttggcccattgggtttcttcctttggtgggccccgttcgttaaaggttgggcccatttaagggaaaattgttttaaggccggggtaaaccgggttttttaagccccgggttggggtaagtagggaaccccgaaagttgcccaaccaatttaagggtntttttttttttaaaggaaggggggccatngntcggaaccnngttt

SEQ ID NO: 123544 - DNA, 532 bp, Arabidopsis thaliana
  unsure (1)..(532): unsure at all n locations
aagagtaacaaccaagacaaaaagaacaatggcagcgagtgcatctccaatggcgagccagctaaggagcagcttctcctccgcttctttttctcagcgtctcgccgtcccgaaggcattctccggtgctcctttcggtgtttctccgaccaaaagagtctcttccttcactgtccgagctgttaaatccgacaagacaacattccaagtagttcaaccaatcaacggtgatccattcatcggaagtttggaaactccggtgacatcaagcccattgatcgcntggtacctttccaacctccctggttaccgtaccgccgtcaaccctcttcctccgcggtgtggaagtgggccctgggcccatgggtttcttcttagtgggcccgttcgtaaaggctggccattaaggaacactgtttacggccgggtaaccgggtttttgcccgggttgggttagaagccatcctaagatgtgcctaaccatttagggatttttttttaaggggggggcgtcattgttcgggttantttt

SEQ ID NO: 123545 - DNA, 537 bp, Arabidopsis thaliana
  unsure (1)..(537): unsure at all n locations
agacgagcactgacagacagtgcatatgcgtatggcgggccagctaaggagcagctgctcctccgcttctctttctcagcgtctcgccgtcccgaagggcatgtctccggtgctcctttcggtgcttctccgaccaaaagagtctctgccttcactgtccgagctgttaaatccgacaagacaacattccaagtagttcaaccaagcaacggtgatccattcatcggaagtttggaaactccggtgacatcaaagcccattgatcgcgttggtaccttttccaacctccctggatacggtaacggncgtcaaccctctcctccgcggtgtggaaattggcctggnccatggtttcttcttaattgggccattcntccaaactnggccatttaagaaantgntttacncnggtcanccgggtntttaaccccggtgggtggtatctccccacatntnctccccantnggtttttctttcaggaagaaaacatccatcccccaatttnatttaatggggaaaaanactgacncttcaca

SEQ ID NO: 123546 - DNA, 655 bp, Arabidopsis thaliana
  unsure (1)..(655): unsure at all n locations
tgaatattacgaccgaaggggagagcgagcgacgaattccaatggaaggaagaaagaagaaagcttcgtcttcctctccttgttcttcttcctcgttaacctctgagctttttggttccagagaaaacccttcttctccttcctcttctggtattctcggatccatttttcctcctccttctaaggttttgggaagagaatctgtgcgacaagagactgtgactggtggttgctggaacgagaaaacctccaagactggtggtaatgttgatagaaacagggaacaacaggagaatcatggttcaggttatcagcaggatcagagagtacaaccctgtcatctgagttcttccatctattacggtgctcctgatgtttatttccagcctcaaaattccaccagcaactctacgaacaagaaagatggaggcgaagatgattccggaagtgcctcaagaggaaattggtggcaagggnctctgtattactaaggagaggtcttacaacttaagcaaatgtatacnncaaaatcaagggccttggnccaaaaaggattgagacctgtggancgcggtttaggaactcccacctatatacaaaagntggagaagttgatgacntngctnaanaacagggngttgtttgccttcngggc

SEQ ID NO: 123547 - DNA, 602 bp, Arabidopsis thaliana
  unsure (1)..(602): unsure at all n locations
atttgtngaccgggcancggggacntggtcgggttccaccnggtcngggggtcncccctgncncngggtcntcccancttcttccggtgccctgntgttttttcccggccctcaaaattccccccagcaactctacggacaaggaaaggtgggaggcgaagatgattccggaagtgcctcaagaggaaattggtggcaagggtctctgtattactaagtagagatcttactacttaagcaaatgttataactacaaaatcaaggtacataggaacaaaaaaagaatagagtagctgtggatccgtcgtttttagtaacttctcatcttattattacaaaaagtatggaagaagtttgaatgtagcttagctgcagaaagcaggggagttgtttttgtcccttgtcgtggtttagtgattgacccgaccggttcagatttaattttcccttaattttatagttaaaccgttgatggttttgtacaaactctttaaaattccagtttccacgcatataaataaataaataacccttcctgtaatcctgttctagctctttgaaactctttgttatgtttgaatgttcaaatcggtctggttatt

SEQ ID NO: 123548 - DNA, 820 bp, Arabidopsis thaliana
  unsure (1)..(820): unsure at all n locations
cggacgcgtggtacgcattcgtcatttggtccctccacttagagagaagcagacagaacataactaaaatcgagaaaaatggcaaacagtggtgaaggtaaagtggtgtgtgtaacaggagcctccggttacatcgcctcatggctcgtcaagttcctacttagccgtggctacactgttaaggcctccgtccgtgatcccagtgatccgaaaaagacacaacacttagtttcactagaaggtgcaaaggaaagacttcacttgttcaaagcagaccttttggaacaaggttctttcgactctgctattgatggttgccatggagttttccacactgcttctccattttttaatgatgccaaagacccacaggctgaacttattgatcctgcggtcaaggggacgcttaacgttttgaattcgtgcgccaaagcctcttcggttaagagggttgttgtaacctcctccatggctgccgttggttacaatggaaaaccacgcacacctgatgttaccgtcgatgaaacttggttctctgatcctgagctttgcnaggcctccaagatgtggtatgtcctatccaagacttttggcggaagatgcagcttggaaactcgcctaaagggaaaggcttaggcattgtnactattaacccggctatggtgatcggtcctcttctacagncaactntgaacaagggtgcttgctgctattttaaactnaatnaanggngaaaggttttccaaacttgngtttggangggntaatttaaaaaaggggngccaatngggacatccnangatttgggggccccttaana

SEQ ID NO: 123549 - DNA, 1349 bp, Arabidopsis thaliana
  unsure (1)..(1349): unsure at all n locations
nnnnnnnnnnnnnnnnnnnnnnnnnnnnnnnnnnnnnnnnnnnnnnnnnnnnnnnnnnnnnnnnnnnnnccacgcgtgcgcacagcctttataactctttctggggtttttaattctctcaacgaacaaaaaaaaaaactcaactaatattctccatcctctttcttcagatttaagagaaaccttatcgttatattctctcttctcttttctttttgactcccacaagaagaaagcaaatttctttttctcaggattgcttgaaaactgtagaaatctttaaggtttttttacaccaataagagtcagagagagagagagagagagaaagagagatctattcataaaaaagacaggtaatctcaactccgaggagataactgatataacaatttgagagaataagaagaagaagaagaagaagaccaagctaaagaatggttgcttttttatcagcttggccttgggaaaactttggcaatctcaagtatcttctctacgctccattagctgcacaagtagtgtactcgtgggtctatgaagaagatatctcaaaggttctttggtgtattcatattcttataatctgcggtctcaaagcacttgttcatgaactatggagcgttttcaacaacatgcttttcggggctcgtactctaaggattaaccctaaagggatcgactttaaacagattgatcacgaatggcactgggacaattacataatcctacaagcaataatagtgagcctgatctgttacatgtcaccaccattgatgatgatgataaacagtcttcctctgtggaacacgaaaggactcatcgcattaattgtgctacatgtgactttctcagagcctttatactactttctgcacagatctttccatcgtaacaactacttcttcacacattaccactctttccaccactcatctcctgttccacatcccatgactgctggaaacgcaacgttattggaaaacattatcctctgtgtcgtagctggtgttccattgattggatgttgcttgtttggtgttggatcattaagtgcgatctacggttacgctgttatgtttgatttcatgaggtgtttaggacattgtaacgttgagatattctctcacaagctgttcgagattcttccagtcttacgatatctcatctatactccaacgtaccatagtctgcatcatcaagaaatggggaccaacttttgtctatttatgcctctctttgatgttttgggcgatacacaaaacccaaactcatgggaactccaaaagaagattcgtttgagtgcaggggaacggaagagagttgccgagtttgtgttcttagctcac

SEQ ID NO: 123550 - DNA, 457 bp, Arabidopsis thaliana
cccacgcgtccgccgtccggcttcttctaagataaatctctccccgattctctctttttctcgctagatactctttttcttcaattagggtttcttctcgcttgccttttaattctctccagctgatctgatctccgttaccgatggagtctactgctaacgcactcgtcgtcaaggtgagctatggaggtgtgcttaggcgtttcagggtgcctgttaaagctaatggacagcttgatcttgaaatggctggtcttaaggaaaagatcgctgctctctttaacctctctgcggatgctgaattgagtctgacttactctgatgaggatggggatgtggttgcccttgttgatgacaacgatctctttgatgttactaatcagcgtcttaagttcttaaagatcaatgtgaacgctggcgtgtccactaactctgctgctccagagagtagtgggag

SEQ ID NO: 123551 - DNA, 442 bp, Arabidopsis thaliana
accacacgtccgcttgttttctcctccttgccgttaagttccattgaagaagaagaagaagaaggtgtgattcaacgataaacctagcgagaaaacgaaccgcataaaatcgccattgaacgagacggtggtgttaatctatggttatggaggtttgcttgactttttgaggttggcttgacttttgaagttttgatctgaagaaaagaggtttcgttgtaattggtttatacatcatgtctgggtcgagtatgtataagacgaagctttgtattctgttcaataagactggtgattgttcgaggccgaattgtacttttgctcatggaaatgctgagcttcgtcgtcctggcgaatcttcttttacaggaagacgtcacaatatggatagtgacttaagagatagacgtcacaatatggatagtgacttaagagatagact

SEQ ID NO: 123552 - DNA, 527 bp, Arabidopsis thaliana
ccaggtctctacgactcatattgggaaagctggtacgcctgcaggtaccggtccggaattcccgggtcgacccacgcggccgcccccgcgtccgctacgacaaagtatccgaccaagaaaaccaaatccatcatcatcatcattctccacttccaaaaccatcatcattttcccgtaaaaccctaatcgccaccggctccgtcgtatctctcctcttaatcctctccgtcgtcgctttaaccgccggagctttcactcactctcctccacaccatccacctatctcctccgcctctctcaagtcactatgctccgtgactcgttacccagagacctgtttcaactctctatcatcttctctcaacgaatctgattcaaagcttaaccctgaatcaatcctcgagctttctcttcgagtcgctgctaaagagatctcaaacctctctatctctttccgatcaatcaacgatatgcctgaggacgcggcggttggtgattgtgtgaagctttacaccgacacgttgagt

SEQ ID NO: 123553 - DNA, 527 bp, Arabidopsis thaliana
tacgactcacattagggaaagctggtacgcctgcaggtaccggtccggaattcccgggtcgacccacgcgtccgcccacgcgtccggtactcagcaccatcaatggaccgcccggagacgatcgccgtcaaatgcgaacccatgaccgttgactctccttctcgacctctaaagcttgtagttttagctgaccttaatttcaatcctcctgagactgatgatcttgactcatccattccaatccctactcctcctcccatcactaggttgagtaacgaggaaagtcatcaagagggaggtatattaacatgcaaggaggtggaaccaggagaagtagaagccaaaaagatcagcaaggtgggaaaatgccgctccagaagtaagattgagtcttcctctgattgtggagttgatgcagatggtgatctggctaatcaaggggtccctgcatcccgggaagaaaaaatcagtaacctcaaaatgggtttgattcatgttgcaaggaagatgcccaaaaatgctcatgc

SEQ ID NO: 123554 - DNA, 923 bp, Arabidopsis thaliana
cgggccgacccacacgtccagccccggctatcagatcgtcttctttatcgctcctctaattatattcatctcgagagacgagagctaaagaactacttccaaaaaaatgccgattgctgagcttgctgtaatcaaaacagtgggtgggcctctgatagcggctgctcttggagttggagcccaagtcatttacgacggcttcagaaaaggaaaagatacatctatcataaaccgtctcggccgtacaatggaaagtatcagtccggtgcgggatcgaatcggtaagctcagtaatgtggaaggtaaaccatttagggaagtccacgaaagtcttacgcgtctccttgaagatgcgaaatctattattgagaaatattggaaactcagatggagcagacacgtttgcaggaagtacaggtacatcaaaaaactcgaatcgatagaacttgaattagtaagggtagcacgtgagatacaagtccaccaatggaccgatatcaaagaaatgaaggcgatacaagtccaccaatggaccgatatcaaagaaatgaaggcgatacaagtcgaccaatggaccgatatcaaagaaatgaaggcgatacaagtcgaccaatggatcgatatcaaagaaatgaaggcgatacaagtcgaccaatggaccgatatcaaagaaatgaaggccagatatctgaaaagcataataaatgaatcaatatctaaaatctggtgtttttctctctttcttcttccccacaatgattgaaaaactcttcttgttatgaataaagatggatgcccatttataagggccatcatctaagcccatcatctagatttttctaggggttttaccccttcccttgttccccctatatttaaagaaaccccctttatctcaatggaataacacactcatttcttct

SEQ ID NO: 123555 - DNA, 448 bp, Arabidopsis thaliana
ttcccaaatagtacttttttttttgtttggccttcttatagaaagaagaactcaaagcacagagagaagatgagcgaagaacaaccacacgccaatctagcggttcccgcgtttaaaactgagaaagagcccataacgcaaacacgaaatggtcaaagtagcgtttggcgtttcggtggaagtgataaggcagcgaaagcatccaccgtaacgcttagaggtgtcatctacatgctcttcgacaactgcggcaaagacgtcaataagaccattttacccctcggccacggtgacccttccgtctacccttgcttccgtacctgtatcgaagctgaagacgccgtcgtcgacgtccttcgctccggcaaaggcaattcttacggtctcggagctgggattctccccgcaagacgagccgttgctgattatatgaaccgagatcttccgc

SEQ ID NO: 123556 - DNA, 462 bp, Arabidopsis thaliana
cccaagcgtccgcggacgcgtgggcgaactcaaagctatctctctccctctatctctgaggcacgcattttcgtctgtgattctcgagctcttttggggtttctccgagatttttggtcggttcttcacgttttgtttatggcggtgattacgtgatgaaagtcaccggaaagccgtattcgacggcgacattaccggcctttgagtcggataagaatctcttctctcacggtccagatctcagagctattcaaagagctactactgtcactaaacgtcgagctaggaacccgagtttgactcgtcagcgaagatccggtccttctggtggcagacgaagccggccggagactcctttattggaatggaaggtggaggatcggaataaagggagaagcggcgttgtagaagacgacgatttcgaggtggataatcaccaggttgcgaggtcagagactactc

SEQ ID NO: 123557 - DNA, 409 bp, Arabidopsis thaliana
accacgcgtccgcatttccatacttggccttcactaagattagtttttgcacttctctctttctctcgatcgctgcttcttcgtcgctcaatctcaagctccgttccgttagttcttcgtcggagagacggggtggagagaatcctgctgcaagtggtagctgtttgatacttgagtcattttgtcacagcaacatgaatatgccgctgttggatattcaaccacgaacgttgcagtttgcagttgacctgaagaagcaaacttcctgcgtggtacagctaaccaatactacccatcattatgttgcatttaaggttaaaaccacatcaccaaagaagtactgtgttcgtccaaatgttggtgttgttgcacctaaatcaacctgtgaattcactgtcattatgcaagc

SEQ ID NO: 123558 - DNA, 538 bp, Arabidopsis thaliana
  unsure (1)..(538): unsure at all n locations
cagnnnnnnnnnnnnnnnnnnnnnnnnnnnnnnnnnnnnnnnnnnnnnnnnnnnnnnnnnnnnnnnnnnnnnnccacgcgtccgctctctggagccgccacgtctcagtgatccgactacgacacctttcttcactcttcttcttgcgtcttctctgctctcgtggtctctctgttatttaattttaatcgattgagatcgcttttagctctcgtctttgaattttacgggcagaaaatgggtgaagaagctcgagcgttagatatggaggagatcagtgacaacacgacgagacgaaacgatgtcgttcatgacttgatggttgatttatacccgcttagcagctactacttcggttcaaaagaagctcttcgcgtcaaggacgagattatctctgatcgagtcatcagattgaaatccaattatgctgctcatggattgagaacttgcgttgaagctgttcttctggttgagttgttcaagcatcctcatgttttgcttcttcaatatagaaactccattttcaagcttcctgggg

SEQ ID NO: 123559 - DNA, 495 bp, Arabidopsis thaliana
caacggtttgttcgaagaacgagaagcaacaatcaagaagctaacaatgctttctgcacatcgtttatctgattcagtaacgctggtttctcttgctcctctctctcaatttcttttgtcggttttaaattcatttcattttattataaattcgctaccgttttttttctgtcaccggagctccttcttccagatcgtgcttgatgtcccggatatgattttttagttccaaatcttgaatcttttgattggataagaaatgaggaagcttagtattagagactccttgaaatctttctttgagcctcatcttcatcctgataatggtgaatcactcaaaggaacaaaaactgaaattgatgagaaagtgaagaaaatcttgggaattgttgagagtggagatattgaggaagatgaatccaaaagactagtggttgctgagttagtgaaagacttctacaaagagtatgagtctttgtatcaccaatacgatga

SEQ ID NO: 123560 - DNA, 341 bp, Arabidopsis thaliana
  unsure (1)..(341): unsure at all n locations
cccacgcgtccgtgagaatgctattgaacttctcaaaacaattggggctttaaatgacgtggaagagcttacaccccttggtcggcatctttgcactctacccgtggacccaaatattggaaagatgcttctgattggagctatcttccagtgcgtcaatcctgctttgacaatcgctgctgctctggcgtatcgtagcccatttgtcttaccattaaataggaaagaggaagctgatgaagccaaacgatattttgctggtgattcctgcagtgatcacattgctcttcttaaggcatatganggatatcgggatgcaaagcgtggtggaaacgaaaaag

SEQ ID NO: 123561 - DNA, 1206 bp, Arabidopsis thaliana
actaaccacttccttatccacaccaatccagaacgttcctcaaaaagctccctccttttctctcaaaatggcgtctgcaaacgctctctcttccgcctccgtcctctgttcttcccgtcagagtaagttgggaggaggaaatcagcagcaaggtcagagagttagctacaacaagaggacaatcagacgttttagtgttagagctaatgtaaaggaaatagcttttgaccagcactctagagctgctctacaagctggtattgataagcttgctgattgtgttggtctcactcttggccctagagggaggaatgttgtgttggatgaatttggaagtcctaaggttgtgaatgatggagtcaccattgctagagctattgagttacctaatgccatggaaaatgctggtgcagcgcttattcgtgaggttgcgagtaagactaatgactctgctggtgatgggacaaccactgcgtctatccttgctcgggagataatcaaacatggattgttgagcgtcacttctggtgcgaatcccgtttcactcaagaggggaattgataagactgttcaaggtctgatcgaagagcttcagaagaaagctaggcccgtgaaaggtcgtgatgacatcagagctgtggcttctatctctgctggaaatgatgaccttatagggtcaatgattgctgatgccatcgacaaagttggacctgatggtgttttgtccattgaatcttcatcttcttttgagaccacggtcgaagttgaagaagggatggagattgacagaggttacatctcgcctcagtttgttacaaaccctgagaaactactagctgagtttgagaatgctagggtattgatcactgatcagaagatcactgcgatcaaagacatcatccctattttggagaagaccactcagcttcgtgctccgttgttgattattgcagaggatgttactggtgaagccttagctacccttgtcgtgaacaagcttcgtggtgtcctcaatgttgttgccgttaaagcgccaggatttggagaaagaagaaaagccatgcttcaagatattgcaatcttgacaggagctgagtacctagccatggacatgagcttactggttgaaaacgcaaccatagatcaattgggtattggccgaaaagtcacgattagcaaagattcgactaccctcattgcagatgc

SEQ ID NO: 123562 - DNA, 636 bp, Arabidopsis thaliana
aaaagatgctcttgcttaaacaccaacataaacaagaagagcagcagcaattgttacgacagcaacagcagctgtattctcaggtttttgctgatcaacagcgttctcagcaacggtttggagacccatcttatggtcagttgcaggcgtctcttgatgcgcttaggctgcaaccatcaaaagatatgtcacaagtcaatcagcaggtgcaggttcctgtttcccatgaggagcgaggcatcaacttagctgatttgctcccagtaacccatgccactaatcagactgttgcttctttcgaaaccccctctctgcacctgcaaaaccagctatttggtaatgttgaccctaggatggttctgcctgatcaaattgatgatacccataaaaaagagtcgaaatcagaatatgaaagaacagtttctgcagactatgtgaacagcttgtactcagaaaagcctgtcctttcccctggctatcatgctacacataatgtggaagaacctgtgagctatccaaacaatgaaagctccactgctactatgacagctcccgaaatagttgaaagtaagttgctggaggagcagtctaaggacatgtatgctggaaagggagaggtcagtattgagttatctg

SEQ ID NO: 123563 - DNA, 399 bp, Arabidopsis thaliana
cttgtctcacacagtttcttgatccaaccaaaaccaatgcgcatagcttctcaaactccttcacctcaaagcttcttcctttacatctgaatcgttgagttaactcggatttgttctgcatcctctgtttctgaatcgcgggccatccttattttgtctcgaattcttcaccaattgcttcgatcaagctgcattggttaaccagttgccctaaagatcagatctttgagcaaaattttgtcactgatcttctaaatccaaaccagacacagcaaaacaacctctgtagatgattcgagaaatctcaaacttacaaaaagatattataaacattcaagacagttattcgaacaaccgagtcatggacgtcggaagaaacaaccggaaaaacatgagctt

SEQ ID NO: 123564 - DNA, 553 bp, Arabidopsis thaliana
taggtgcaactatagaaaagctatgacgtcgcatcgcacgcgtacgtaagctcggaattcggctcgaggttacgatttccgtcaaagcaataggatcgatctacttatactaggtctgaagaagaagctggaaactgcatataaacgttcaggggggagaaaagtcactatcatctcccattcaatgggaggacttatggtttcatgtttcatgtatctccatccggaggcattttccaagtatgtaaataaatggattacaattgcaacacctttccaaggagcaccagggtgcatcaatgattcaatcttgactggagtgcaatttgtggaagggttagaaagtttcttttttgtgtcacgttggacgatgcaccaactgttggtcgaatgcccatctatatatgagatgatggcaaatccagactttaagtggaaaaagcaaccagagattcgagtttggccgtaagaaatctgaaaacgacgttgatacttctgtagaactggaatcatttggcttaatcgagagttttgatctattcaacgatgcatt

SEQ ID NO: 123565 - DNA, 614 bp, Arabidopsis thaliana
acaactaactaggagggaaggctgggccccctccaggtaccggtccggaattcccggttccacccacgggtccgggggaattaaatatttcggacccgaaacctgacccgctttgatgggctggattccgtgtccgtgctggggaaccaacgaccatgaaaacgccggcgaggtggcggatcgtgatcccgtgcttctagtatctggaattggaggctctattctgcgggctaagaagaagaattcaaagtctgaaattcgggtttggggtccgaatatttctagctaaccttgcctttaagcagagcctctggtctctctataatcccaaaactgggtatacagagccggtggatgataatattgaagtattgggccctgatgatgaccatggactctatccaattgacattctagatccctcttggtttgtaaaggctttgtcacttgacggaggtttatcactttcacgatatgatagaaatgctggttggatgcggttataagaaggggactacattattcagttatggttacgatttccgtcaaagcaataggatcgatctacttatactaggtctgaagaagaagctggaactgcaattacttcaggg

SEQ ID NO: 123566 - DNA, 653 bp, Arabidopsis thaliana
gaatatcgggcttgttttcagtccgtatggagggaaactggcggaggttgcggttaacgcgaagccgtttcgacatcgaggcaagcttttcaaggattcagtactctgtgaactggaaagaaaactctgcagagatagagaaggggtacttgaatcaggctaaggtgctttacagtttcatgaccgggtttgtgagcaagaatcctaggagttcttacttcaattaccgggatgtcgatatcggtgtgaatgatcatggggcgaatagttccaaggaaggagaggtgtatggaaggaagtatttcggagagaatttcgatcgattagtgaagattaaaaccgcggttgatcccgggaatttcttcaggaatgaacagagtatacctaccttgaaaagtaaggcataattgatatatgatcatttaatataaagattggcttcctataatgtaatgttttagtgaagcactatagaatatatggttttggatattgtatattgtatagtttctctgttcatggaactctacaacaagctcttttgtttaaaaaaaaaaaaaaaaaaaaaaacacaaacccgaagggcggccgctctagaggatccaagcttacgtacgcgtgcgtgccacgtcataaatcttctatagtgcacc

SEQ ID NO: 123567 - DNA, 369 bp, Arabidopsis thaliana
aggacgcgtgggcggacgcgtgggctctctctcactttcgaatatatcttaagataacagagacacatactcttaagtttggtgaagaataagaagacaatgacgaaggaagtggttggtgataagagatctttctccgggaaagactatcaagacccaccacctgaacctctattcgacgctactgagcttgggaagtggtctttctacagagctctcatcgctgagttcatagccactctccttttcctctatgtcactattatgactgtcatcggttacaagagccagaccgatccagccctgaatcctgaccagtgtacaggcgatggcgtccttggtatcgcatgggcctttggtggcatgatc

SEQ ID NO: 123568 - DNA, 649 bp, Arabidopsis thaliana
gtttctcggcaccgcttctttgtatagcacagaagtgaagagcaagcagacgaaaaaaatggcgactctgtcttcctatctgttatcttctcctcctctatgcaaatcccgattctcggcaacaagtctcgtctcaggaattgatttcatctctttctctcctcgaacaactctctcctcgtcatccactgtcttgccggcgattctttctctttccgttaaacataatcgccggagaaactcgcttcaagtgaaatcagtagctagcccaacggagacgatttcagaattcgatgagatggtctccggcacgaaacgaaagtattacatgctcggtgggaaaggaggagtgggcaaaactagttgtgctgcttctttagctgtgagattcgccaacaatggacacccaactctggttgtatctacagatccagcacattccttgagcgattcttttgctcaggacttgactggaggaatgcttgtccctgtagaaggaccccaagctcctttatttgctttagaaataaaccctcagaaggctttggaagagtttcgtaggcccccaaggatatttggaggaactggggtgaaagattttatggatggtatgggacttggaatgcttgtagaacagttgggggagctt

SEQ ID NO: 123569 - DNA, 625 bp, Arabidopsis thaliana
gactcatattgggaaagctggtccgcctgaaggtaccggtccggaattcccgggtcgacccacgcgtccgcccacgcgtccgcccacgcgtccggtttctggaaaatgaacacaaaaaaatatctgaaaatttcgatctaaaaagcataaacgaatccaaatttcaagaggagaagaaaaatcttcaagtccacgacgaaacttttcatcgatcttcaaattccagaaaaaactcgatgaatcttcaagctgtttcttgtagcttcggattcctttcgagtccacttggtgtcactcccagaacttcgtttcgtcgcttcgtaatccgagcgaaaacggaaccgtcggagaaatcagtagagattatgaggaaattctccgagcaatatgctcgtcgctctgggacttacttctgtgttgataaaggagttacttcagtcgttattaagggtttggctgagcataaagattcatatggtgcaccgctttgcccttgcagacactatgatgataaagctgctgaggttggacaaggcttttggaattgtccgtgtgttccaatgagagagaggaaggagtgccattgtatgcttttcttaacttctgataatgatttcgctggaaa

SEQ ID NO: 123570 - DNA, 790 bp, Arabidopsis thaliana
  unsure (1)..(790): unsure at all n locations
gcctgcaggtaccggtccggaatacccgggtcgacccacgcgtccgtacttactaagtaaaaagagaaaaaaaaaaaattaagatatggagggactcttgaagttgtcaactttggtgattgtgtgcatgttagtgaccgctccaatggcgtccgaggcagcaatctcgtgcggcgcagtcaccggcagcttaggtcaatgctataactacttgacccgaggcggtttcattcctagagggtgttgctctggcgttcagaggctcaacagcttggctcgtaccacccgtgaccgccaacaagcttgtcgttgtatccagggagcagcgagagccttgggttctcgacttaacgctggtcgtgctgctcgtctccctggtgcttgccgtgttaggatctcttaccccatcagtgccagaaccaactgtaacaccgtcaggtgatcaaaagaagatagacgttgaagggttttcatataatcgatgagagagtattaaaaataattaagatgtcacactatatacacactagtgtatccttttactgttattattgttgtgtttctagattttgtgttttcatgtctttctttgtatatgacggtccatttaattggtcgtctgtgttatgtactcctctaatgatatattgaatttacgatttatgtattaaaaaaaaaaaaaaaaggcagcccgctctagaggatcccagctcacgcacgcgtgcatgccacgtcnnnnnnnnnnnnnnnnnnnnnnnnnnnnnnnnnnnnnnnnnnnnnnnnnnnnnac

SEQ ID NO: 123571 - DNA, 755 bp, Arabidopsis thaliana
  unsure (1)..(755): unsure at all n locations
cccacgcgtccggagaagtttataatctggtttctgattttagttttctttccatttatgggttcatttgcttcttcttgcacgttatagttttcctaattgggtaagctccaaggtagcttcttcaatattaatttcatttttttcattttctgtagccatatgtttattttcccgagaaatattatccacacccagatctttaaatctcttttaactctgagtctctgatacttaaataccactcatgctgcttattagctccaccaaatctggaaaaccaatagattctttttatttcttctgcaaaaatctcagagctaccctaaaaattctctctttttgactcacttaccagatctccactagattttactcaattctttttcaaaaggtttaaacttttatagattccttgaagtgggtctaagcaatgcttcagagaaattccgatgatttcttctctaaccaaaataaaaatgaagtatcatttgatagtgatttttgtgttcttcttttgattctcttatctcttccttcccatcaataaacccaaaaaaattaatatcatttttgggatcttattgatcccaaaattcgctaaatccgttgacctttgtcggcatgatttgttcttacttaccgtaaaaaaaacagagctaggttttagttttcggacatggaggttatgagacccgtcgacggcacacggggtcaagggtggggacctgggtcatggaggaaaccnaagggcg

SEQ ID NO: 123572 - DNA, 474 bp, Arabidopsis thaliana
tcgtccaaacgcgctgatagctctagtaatgaagctgctgttgctgcaactagttattctgatgaacttgatttccagccttcatcagggaattccgaaaattggatggtgttatcggttaatggcgaaaaacccgctccacgctttaatcatgcagcggcgactattgggaacaaaatgatagtagttggtggagagtctggtagtggcttgttggatgatgtacaggtgcttaactttgattcatgtacatggtccaccgcatcttcaaaagtttacttatcgccgagtagtcttcctctcatgatccctgcttggaaaggccattgcttggtctcttggggtaaaaaagtgctgttggtgggtggaaaaacagatcctagcagtgatagagtttcagtgtgggcatttgatactgattcggaatgctggtcactaatggatgcaaaaggagacttaccggtcagtcgcagc

SEQ ID NO: 123573 - DNA, 1054 bp, Arabidopsis thaliana
  unsure (1)..(1054): unsure at all n locations
ggaggacaatggcagatggtgacgcgatttctatctttgtatcgagtcatgtatggattgatcataactccttgtctcattgcgctgatgggcttgtggacgcagtcatgggctcgaccgcgatcaccatctctaacaaccacttaactcaccacaacgaggttatgttgctaggacatagtgactcgtacatgagggacaaagctatgcaagtgaccattgcttacaatcattttggagtcggacttattcaaagaatgccgaggtgtcgacacgggtacttccatgttgttaacaacgactacactcactgggaaatgtacgcaataggtggtagcgcaaacccgacaatcaacagtcaaggaaaccgctatgccgccccaaaaaacccctttgctaaagaggtgacgaagagagtggacacaccggctagtcattggaaaggatggaattggagatcggaaggagatttgcttcagaacggtgcttacttcacttcttcaggagccgccgcgtctggcagctacgcacgtgcctccagcctttccgcgaaatcttcgtcattggtcggacacattacttccgacgctggagctctaccttgtcgcagaggacgtcaatgttcctcatagttactaccccaccaccaaaattcaaaaccatcttccattatattcagacaaaagtgtaaatttacacacatttgtcatttaaaaagccaattatcttttttttttgtcttttcggtgtgtgtgtttgtgtcgatttttctcaacctcgggtttgcttgcttcaaccgcaagttaacacaagaaaagggaaaagaaccaacctttcatgaaaaaagaaaaatcccccgaaggtgttgttgggttgtttggttctaatctgatcaactcagattgttcttcggctgtccccggcttctatccggagaaacaagggttttaccccctggttttcttttcctccttggaatttttgggggttatcaaattaatataggggctaaaaaaaatttggggaactttttacctttcnatnggtttaaaaa

SEQ ID NO: 123574 - DNA, 566 bp, Arabidopsis thaliana
  unsure (1)..(566): unsure at all n locations
cccacgcgtccgaaacaatggcgtattctcttcctacatttccccaagccttaccttgctcgtcaaccaaaacttcttcctccttggctaccttccgatctcctttcttaagattcaatggttccacttccttaatcccctcctctatctccatcacttcacgtggcacatcctccccgaccatcatcccacgtgctgccgcctcagaatccgactctaacgaagccctagccaacacaaccttccacggcctctgctatgtcttgaaagacaacatagacaccgaccagatcatcccagcaggagccgcttgcaccttcccatcgaaccagcaagagcgtgatgagatcgcgggtcacggtctctctggtctaccagactttcacaaaaaaagggttcatttgggccagggggggacaggtcaaaagtactnaattaataatcggngggggaaaantttggttggggtnggtaaggtgaaatgttcgggttttttttggggaanttgggntaaaggcatagtttnttngttttcggaagattttttttcggaattggttttaagg

SEQ ID NO: 123575 - DNA, 692 bp, Arabidopsis thaliana
ctccattggtgagctccacctcttctccgatgaggcttttccggcgaatccggccattgatcatctgcaaatctcaggtttcttccgacgatctccatcttccactgtcacttctagcacttttattccccaatttctattgcctttaggctgtagctgctccatctcaatttctgggttttgcacgagaacccttaatccctccttttttttttgtttctcgctgaaactttcatgagctactccacctggaacctatcactttctaacacggctccaaaatattccgaggtagcttcttcccagtacttttttcaaatctatcctgcaagatcaagtcacaaacactaggactgtttctccaatgaacaacgaagcctttcatctgttaagatgaactccgcagctcctaactcggatttcttgaatcttcatcacataaactccacatggaatcagaatctgcagctcaggtcaactgattctccacatctccacctggaatataagtctcctcaccgtatttccaggcgcctacagtggagttacctggacgatgttgaggagatcataacaggcatgaaagtcctttccagctcttgtatctggaatcgatctcttctttgagatttttagaattggtaaaagaacaagaaagctttagatgtgctgcgtagagctgtaactaaaga

SEQ ID NO: 123576 - DNA, 862 bp, Arabidopsis thaliana
cccacgcgtccgtagaaaaggaagaagacacgtcaacaatggaggttctgaagaagaagactctctcccagcagatttagagcgtgtgagggagataggaagagagaaagtgagcgagagacgatcacggccgcgctgaaatccacgaccacggccgcgctgaaatccacgaccacggccgctctgaagaagaagactctctccgtctcctcccttctcctcctccgtctaagagacaaggcatccccagacgccatgatctctctcactccctcgttgtttctgaacaagacggttgttcctggatgttccacacgcctctctctgcgccagcctagaactataattactcctcctgcttccttgagagtcttttcctctctcggatctaaccaggatcccaccggcagcgttttgattgagaccactgccacttcatcctcctctctcgagacctccgccgccgacattgttcccaaatccaccgtatctggtggagttcaggatgtctacggcgaggatgccgccaccgaggacatgcctatcactccttggtctctctctgtcgccagtgggtatacgttgttgcgtgatccacatcacaacaaaggccttgcctttagccacagagagcgtgacgctcactatctacgcggcctcctcccccccactgttatctcacaagatcttcaggttaaaaaaattatgcacactcttcgtcagtatcaagttcccttgcagaagtatatggctatgatggatctccaggagaccaacgagaggctgttttacaaacttctcattgatcacgtcgaggagttgctacccgttatctacactccaacggttggggaagcctgcc

SEQ ID NO: 123577 - DNA, 466 bp, Arabidopsis thaliana
ggcggtggtggtggtggaggtggagggttatctagagctgatgatgttgataattggggtgcagggaaaaggcaagcaccggttagatcatctacgtttgggtcgagttttggtgattcaggtcaggaagaacgtcgtcgtttggttttggaaccaagaaaggttgagtcaggaggaagtgagactccacctgttgttgagaagacgagtaagccgaatccatttggggcagctagaccgagggaggatgttttggcggagaaaggtttggattggaagaagattgactcagagattgaggctaagaaaggaagttctcaaacgagtaggccaacgagtgcacattctagtagaccttctagtgctcaatctaacaggtctgagagttcaggattgaataatgtggtgaaaccgagaccaaaggtgaatccttttggcgatgcaaagcctcgagaagtgttgttag

SEQ ID NO: 123578 - DNA, 532 bp, Arabidopsis thaliana
  unsure (1)..(532): unsure at all n locations
gaggagtaagacagatgacagtgaaaaagttgaagaaagctcacatgatgaagggacgcctgcagtttcacaacacgatgaaaccacacatcatgatgagattggtaattacaaggattatccttcagatgaggagccagcagctgaaggtgaaccaacaagtatattggatgaggctactcacactaatccagcagacgagcatgttgtggagagaaaagaggaatctacctcatctgaggattcctcttcccccacagatgaatctcaaaatgatggtagtgctgaaaaggaggaatcagacgaggttaagaaagtggaggattttgtaaccgagaagaaggaagagttgtcaaagggaagagtttgggcgtcttgttgcctctcgttgggcaggggngaaatctgataagccacctnaggagccgttttcccaagtgatgtnngggaancntggccacgccatnacttacatnagcagttaagtnntgntttttnnnatgtntnggtnccccgtttggannacgcctac

SEQ ID NO: 123579 - DNA, 705 bp, Arabidopsis thaliana
  unsure (1)..(705): unsure at all n locations
ccaggtcactacgactcattttagggaagagctgcgccgcctgcaggtcccggtccggaattcccgggtcgacccacgcgtccgctcgttgtgtaatttcccggcaacggaagagaggaggaggaagagtgtaagcaataaattcctcttcttctacgaaacatttgctcttctcctctttctcttctcttctcttctcctttgcttctccgattctcttcctttttttttattttgatccgactactcaagctttttttctgttcatggtttcctccatcatcgcagttgcagaaggcaaaaagatggagctagaacccaataaatcactatctgctgatatgccatctttgctgagtagatcatctgaagcttttaatggaggcactggatatcgttcttcaagtgatctcagcatgttctcaagctcattgcccacactttttcatgaaaagctgaatatgactgattcagatagttggctctcctttgatgaaagctcacccaatctgaacaaacttgtcataggaaactcagagaaagattctttggaagatgttgaacccgatgctttagaaatattgctgcctgaggatgaaaatgagctccttcctggcccattgatggnctaattttaccggggtgccttatgacttgacggcctcgaggngtatgntttcccggagggggtgngtggtgtganca

SEQ ID NO: 123580 - DNA, 706 bp, Arabidopsis thaliana
agcattaagtcctttaggattccagagctttttattggagttccagaaactgcaacagtaggatcactaaagaggactgtgatggaggctgtcagtgttttactcagcggaggaatacgtgttggggtgttaatgcatgggaagaaggttagagatgaaaggaaaactctgtcccagactgggatctcatgtgatgaaaatctagacaaccttgggttcaccttggagcctagtcccagcaaagttcccctacctttgtgttctgaagatcctgctgtgccaaccgaccctacaagtttgtctgaacggtctgcggcgtctcctatgctagattctggaattccacatgcagatgacgtgattgattcaagaaatattgtggacagtaacctcgaattagttccatatcagggtgacatatctgttgatgaaccttcatcagattcaaaagagcttgtcccacttccagagttggaagtcaaggcgcttgccatagttccgttgaaccagaaacctaagcgtactgagctagcccagaggagaactaggagacccttctctgtgacagaggtagaagctctttgttcaagcagttgaggaactcgggactggaagatggcgtgatgtaaaattgcgtgctttcgaggatgcagatcatcggacttacgtggacttgaaggacaaatggaagacgctagttcacaca

SEQ ID NO: 123581 - DNA, 426 bp, Arabidopsis thaliana
cggacgctgatttggaagcttactattctcactataatttaccggcgatggttcctcctccgccgccgggagtttctccgattccaattacttcagctcattccgtctatttgcctacccatgtctcaattggagctcgcgatgaggttaggacgcttttcgtcgccggacttcctgaagatgtcaagcctcgggagatctacaatctctttcgtgagttcccaggatatgagacttcgcatctccggagctcagatggagctaagcccttcgcatttgctgtgttctcggatctgcaatcagctgtagcggtgatgcatgctctcaatggaatggtgtttgatcttgaaaagcattctactcttcacattgaccttgccaaatcaaatcccaaatctaagcgttcaagaacagatgatggttggg

SEQ ID NO: 123582 - DNA, 361 bp, Arabidopsis thaliana
accacgcgtccgaatggcgactctttatagtcaagttccttctgtatcagcagttttctctctttacacatctttttccgcaatcacgatgctttttcgaacaatcctcagcgagattgtgcctaaaagaatcagagagtacatagctatgaaagctgtagacttcttctcttcttactttcaatctgatttcacttttgtgatagagcaacgttgggagtttgttgagaatcagacgttccgtgctgctgaagtttacgtacctacctgtctcgccggactttctacaggcaaacttcttgtgggttcaagtaatcttaagaatccagctgctgagccaaaacttggtatccctgtgaac

SEQ ID NO: 123583 - DNA, 586 bp, Arabidopsis thaliana
ggtacgtattctatctttgcttcctaaaaatcaatcaatttttttttcacagagtacgcaccaccagccaaattataagtgagagagaagataacgacgacaagaagaagaaggagaagctccaaaattgttcatttgcatttctccaacttgtaaaatcgagcacctgcatttgggggctttcctcttatctggaaacaaagagagccgccactgatggaatgagtttccgtgaatcatccacccaggtgaaaggaatcataatttggttggtcaactaataataaaaatgggtgaggcaagtgattcagattcgtctgatgagtctttgaaacacaatagcaccccaccactctttagcatctctggcttcttttgtgttgccaaaggaggagactctgatcccggtaggagccctacttctccccttgattttggagtctttggtggcctctttagccccaggtctttttcttcttcacccctccacccgaaaccaaatggctttctttcacaaagtcgggctttctcttctgagctccagcttcgaactaggcgatgatccattcagaagggactacattgt

SEQ ID NO: 123584 - DNA, 1140 bp, Arabidopsis thaliana
caccggaccttccgggtcgacccacgcgtccgccgtcatcacatcttattaactaaagagccttttacttgcgccacactctcaccgcaatggccgcctcgacaatggctctctcctctcctgctttgaccggaaaggccgttaagctatccccggcggcctccgaagtatttggaaccggccgaatcaccatgcgcaaagcctccaagcccaccggtccatccggcagcccatggtacggatccgaccgagtcaagtacttgggtccattctccggtgagcctccgagctacctcactggagagttccccggtgattacgggtgggacactgccggtctatccgccgatcccgagaccttcgctaggaaccgtgagctagaagttatccacagcaggtgggccatgctcggagccctaggctgcgtcttccctgagcttttggctaggaacggagtcaagttcggagaggcggtttggttcaaggccggttcacagatcttcagcgatggagggctcgattacttgggaaaccctagcttggttcacgctcagagcattttggccatttgggccacacaagttattttgatgggagccgttgaaggctacagagtcgcaggaaatgggccattgggagaggccgaggacttgctttaccccggtggcagcttcgacccattgggtttggctaccgacccagaggcattcgctgagttgaaggtgaaggagctcaagaacggaagattggctatgttctctatgtttggattcttcgttcaagccatcgtcactggtaagggaccgatagagaaccttgctgaccatttggccgatccagtcaacaacaacgcatgggccttcgccaccaactttgttcccggaaagtgagccaagttttatcagtttgtattttgcttttctttcagtcttttgaattcgagtgagagacatgaggagaaagagaaggttgtatgtgatggtttgagactttcagatgtaaatttgcaagactttgtatgatttgtcattaatcaaactcaattttctctaaaaaaaaaaaaagataaaaaaaaaaagggcggccgctctagaggatccaagcttacgtacgcgtgcatgcgacgtcatgcttgtttat

SEQ ID NO: 123585 - DNA, 1157 bp, Arabidopsis thaliana
  unsure (1)..(1157): unsure at all n locations
actatagggacagctggtacgcctgcaggtaccggtccggaattcccgggtggacccacgcgtccgcccacgcgtccgcccccggcgtcccaaaaaaaagaaaacacaaaaacaaagattataatggcttcctcaaccatggctttgtcctcccctgccttcgccggaaaggctgtgaagcctgccgcatcagatgtcctcggaagcggccgtgtgaccatgaggaagactgtcgccaagccaaagggtccatcaggcagcccatggtacggatctgaccgagtcaagtacttgggtccattctccggcgagcccccgagctaccttaccggtgagttccccggtgactacggatgggacaccgctggtctatccgccgacccagagaccttcgccaggaaccgtgagctagaagttatccacagcagatgggccatgctcggagccctaggctgcgttttccctgagctattggctaggaacggagtgaagttcggagaagcggtttggttcaaggccggttcacagatcttcagcgacggaggatttggattacttgggaaaccctagcttggtccacgctcagagcattttagccatttgggctcacacaagttatcctcatgggagctgttgaaggctaaagagtcgccggaaatggtccattgggaaaagcagaggacttgctttacccaggtgggagcttcgacccattgggcctcgctactgaccccgaggctttcgcggagttgaaggtgaaggagctcaagaacggaaggttggctatgttctctatgtttggattcttcgttcaggccattgtcaccggaaagggaccgttggagaacctcgcggaccacttggctgatccagtcaacaacaatgcatgggccttcgctaccaacttcgtccccggaaagtgagtttaatttgtgatcgagttgtgtgtatccggtttgttgcatcttggaaatgtgatgcagatttcatatcttgtaaattactttgtatgtgtgtgaaatatttaagaagctttatgatattgatggatcagtcacttactcttaaaaannnnnnnnnnnnnnnnnnnnnnnnnnnnnnnnnnnnnnnnnnnnnnnnnnnnnnnnnnnnnnnnnnnnnnnnnnnnnnnnnnnnng

SEQ ID NO: 123586 - DNA, 1064 bp, Arabidopsis thaliana
  unsure (1)..(1064): unsure at all n locations
aggggaggagagagccattgttgaggcggccattgaggttgagtagtgcagctttcccccgcggcatctgaagtccttggaagcggccgtgtgacaatgaggaagactgttgccaagccaaagggcccatcaggcagcccatggtacggatctgaccgtgtcaagtacttgggtccattctctggcgcgtctccccgtcctcccttaccggagagttccccggagactacggatgggacaccgccggactttcagctgaccccgagacattcgcaaggaaccgtgagctagaagttatccacagcaggtgggccatgctcggagccctaggctgcgtcttccctgagcttttggctagaaacggagtcaagttcggagaggcggtttggttcaaggccggttcacagatcttcagcgatggagggctcgattacttgggaaaccctagcttggttcacgctcagagcattttggccatttgggccacacaagttattttgatgggagccgttgaaggctacagagtcgcaggaaatgggccattgggagaggccgaggacttgctttaccccggtggcagcttcgacccattgggtttggctaccgacccagaggcattcgctgagttgaaggtgaaggagctcaagaacggaagattggctatgttctctatgtttggattcttcgttcaagccatcgtcactggtaagggaccgatagagaaccttgctgaccatttggccgatccagttaacaacaacgcatgggccttcgccaccaactttgttcccggaaagtgagccaagttttatctgtattttgcttcagtctttgcttcgtgagtgtgagaggagaaagagagcttgtttagatgtaaaatttgcaagactttgtatttttttcattaatcaaataactcgtttttctctccaaaaaaaaaaaaaaaaaaaaaaaaaaaaaaaaaaagaataaaaaaaaagggcgaccgctctagaggatccaagcttacgtacgcgtgcgtcgacgtcnnnctannnnnnnnnnnnnnnnnnnnnnnnnnnnnn

SEQ ID NO: 123587 - DNA, 1174 bp, Arabidopsis thaliana
  unsure (1)..(1174): unsure at all n locations
nnnnnnnnnnnnnnnnnnnnnnnnnnnnnnnnnnnnnnnnnnnnnnnnnnnnncctgcacgtaccggtccggaattcccggcacacgcaagttagtcataaaaaaaaaaaaaacacaaaaaagtttcaatggccgcctcaacaatggctctctcctcccctgctttcgccggaaaggctgtgaacctttcccctgcggcatcagaagtccttggaagcggccgtgtgacaatgaggaagactgttgccaagccaaagggtccatcaggcagcccatggtacggatccgaccgagtcaagtacttgggtccattctctggcgagtcacccagctaccttaccggagagttccctggagactacggatgggacacagctggtctatccgctgaccccgagacattcgcaaggaaccgtgagctagaagttatccacagcaggtgggccatgctcggagccctaggctgcgtcttccctgagcttttggctaggaacggagtcaagttcggagaggcggtttggttcaaggccggttcacagatctttagcgatggagggctcgattacttgggaaaccctagcttggtccacgctcagagcatcttagccatttgggctactcaagttatcctcatgggagctgttgaaggctacagagtcgccggagatggtccattgggagaagcagaggacttgctttacccaggtggcagcttcgacccattgggcctcgctactgaccccgaggctttcgcagagttgaaggtgaaggagctcaagaacggaaggttggctatgttctctatgtttggattcttcgttcaagccatcgtcaccggaaagggacctttggagaacctcgccgaccatttggccgacccagtcaacaacaacgcttgggccttcgccaccaacttcgtccccggaaagtgagcggctgcttattatgtgaatgagagcagagaaagagagtttgtttgtggtctattctatgtaaatttgtgaactttcctttgtggtatctttgtatagaaatcgaacctctttttctctaaaaaaaaaaaaaaaaaaaaaaaaaagggcggccgctctagaggatccaagcttacgtacgcgtgcatgcgacgtcatagctctaacagagtgtcnnnnnntagaaatcgnnnnnnnnnnnn

SEQ ID NO: 123588 - DNA, 1127 bp, Arabidopsis thaliana
cccactctagggttagttggtacgcctgcaggtaccggtccggaattcccgggtcgacccacgcgtccgtcacatcttattaactaaagagccttttacttgcgccacactctcaccgcaatggccgcctcgacaatggctctctcctctcctgctttgaccggaaaggccgttaagctatccccggcggcctccgaagtatttggaaccggccgaatcaccatgcgcaaagcctccaagcccaccggtccatccggcagcccatggtacggatccgaccgagtcaagtacttgggtccattctccggtgagcctccgagctacctcactggagagttccccggtgattacgggtgggacactgccggtctatccgccgatcccgagaccttcgctaggaaccgtgagctagaagttatccacagcagatgggccatgctcggagccctaggctgcgttttccctgagcttttggctaggaacggagtgaagttcggaaaaggcggttttggttcaaggctggttcaaagattttcagggccggagggtttgggactacttgggcaacccgagctttggccacgctcaaagcatcttagccatttgggctactcaagttatcctcatgggagctgttgagggctacagagtccccccggaggatggtccattggggagaagcgccgaggactttgctttaccccaaggtgggcagccttcgacccattgggcccccctgcttgaccccgaggctttcgcaaagttgaaggtaaaggagctcaagaacggaaggtgggatatgttctctatgtttggattattcgttcaagccatcgtcaccggaaagggacctttggagaacctcgcggaccatttgtccgacccagtcaacaacaacgcgtgggccttcgccaccaacttcgtccccgaaaagtgagcggcggcgtgagatgtgaatgagagcagaaaaagagagtttgtttgtggtgctattctatgtgaatttgtgaactttcctttgtgggatctttgaatagaaatggagcctctttttgtctagaggaaatagaaaagataagaaaaaaaaggtcggccgcctagaggatccaagcttacgaggcgtgctg

SEQ ID NO: 123589 - DNA, 961 bp, Arabidopsis thaliana
  unsure (1)..(961): unsure at all n locations
cccgcccaccaacaacaaatcttaaacgttttactttgtgctgcactactcaacctcaatggccgcctcaacaatggctctctcctcccctgccttcgccggtaaggccgtcaagctttcccccgcggcatctgaagtccttggaagcggccgtgtgacaatgaggaagactgttgccaagccaaagggcccatcaggcagcccatggtacggatctgaccgtgtcaagtacttgggtccattctctggcgaatcaccgagctaccttaccggagagttccccggagactacggatgggacaccgccggactttcagctgaccccgagacattcgcaaggaaccgtgaactagaagttatccacagcaggtgggccatgctcggagccctaggctgcgtcttccctgagcttttggctagaaacggagtcaagttcggagaggcggtttggttcaaggccggtttaaaatgtttttaagcgattggaggggttcgtttactttgggaaccctaggtttggttacggttagaggattttgccatttgggccaaaagtttttttattggggccgttaaggttaaagtcgagaattggccttgggggccgagggacttgctttcccccgaggtggcagcttcgacccattgggcctcgctactgaccccgaggctttcgcagagttgaaaggtgaaggagctcaagaaacggaaagggttggctaatggttccccnatgtttggattccttccgttcaaagccaatcggcaaccgggaaaaggnaccttttggaagaacctcggccnacaatttgggccgacccaagtcaacaacaacgnctttgggcctttggcaaccaactttggncccggaaagtgaccggntggttattnatgngaaatngnnccganaaaaaantttcggccgnaatntngnccngggaanaatcttnccnaggtncgt

SEQ ID NO: 123590 - DNA, 611 bp, Arabidopsis thaliana
  unsure (1)..(611): unsure at all n locations
caacaacaaatcttaaacgttttactttgtgctgcactactcaacctcaatggccgcctcaacaatggctctctcctcccctgccttcgccggtaaggcgtcaagctttcccccgcggcatctgaagtccttggaagcggccgtgtgacaatgaggaagactgttgccaagccaaagggcccatcaggcagcccatggtacggatctgaccgtgtcaagtacttgggtccattctctggcgaatcaccgagctaccttaccggagagttctcccggagactacggatgggacaacgccggactttccagctgaccccgcagacaattcgcaaggaaccggtgacctggaagtttatccacaagcaaggtggggcccatgtcttgggggcctaggatgcggttttccctgagctttttggctaggaacggagtcaagtttggagaggcggtttngttaaggccgttanaanttttnagcgattgagggntcgttactttggaacctaggttagtnanggtaaaggattttgcatttggccaaagttttttattgnncgttaggnnangngagaatggcnttgnngccggttttnccgngaatttccctgggc

SEQ ID NO: 123591 - DNA, 1203 bp, Arabidopsis thaliana
  unsure (1)..(1203): unsure at all n locations
nnnnnnnnnnnnnnnnnatgannnnnnnnnnnnnnnnnnnnnnnnnnnnnnnnnnnnnnnnnnnnnnnnnnnnnnnnccacgcgtccgcccacgcgtccccccgcgcccccgaaaaaagaaaacacaaaaacaaagattataatggcttcctcaaccatggctttgtcctcccctgccttcgccggaaaggctgtgaagcctgccgcatcagatgtcctcggaagcggccgtgtgaccatgaggaagactgtcgccaagccaaagggtccatcaggcagcccatggtacggatctgaccgagtcaagtacttgggtccattctccggcgagcccccgagctaccttaccggtgagttccccggtgactacggatgggacaccgctggtctatccgccgacccagagaccttcgccaggaaccgtgagctagaagttatccacagcagatgggccatgctcggagccctaggctgcgttttccctgacctattggctaggaacggagtgaagttcggagaagcggtttggttcaaggccggttcacagatcttcagcgacggaggattggactacttgggcaacccgagcttggtccacgctcagagcatcttagccatttgggctactcaagttatcctcatgggagctgttgaaggctacagagtcgccggagatggtccattgggagaagcagaggacttgctttacccaggtggcagcttcgacccattgggcctcgctacctgacccccaggctttccgcagagttgaaaggtgaaggagctcaagaaacggaaggttggctatgttctcctaggtttggattcttcgttcaacccatcgtcaccggaaagggaccttttggagaacctcgccgacccatttggccgacccagtcaacaacaaacgcttgggccttcggccaccaacttcgtccccggaaagtgagcggctgcttattatgtgaatcgacccagcagagaaagacagtttgtgttggtggtctatcctatgtaaaatttgtgaacttcccctgtgggatctgtgtctttgtatagaaatcgaacctctttttctctaactgtgttggcgttttatctgaagactcaattgaattgaaaaaaaaaaaaaaaaagcgcggccgctatagaggatccaagcttacgtacgcgtgcatgggacgtcatagtaattctagaggt

SEQ ID NO: 123592 - DNA, 714 bp, Arabidopsis thaliana
ccaagcactatacgactcactaagggaaagccggtacgcctgcaggtaccggtccggaattcccgggacccatttcttggcttacaacaacaaatcttaaacgttttactttgtgctgcactactcaacctcaatggccgcctcaacaatggctctctcctcccctgccttcgccggtaaggccgtcaagctttcccccgcggcatctgaagtccttggaagcggccgtgtgacaatgaggaagactgttgccaagccaaagggcccatcaggcagcccatggtacggatctgaccgtgtcaagtacttgggtccattctctggcgaatcaccgagctaccttaccggagagttccccggagactacggatgggacaccgccggactttcagctgaccccgagacattcgcaaggaaccgtgaactagaagttatccacagcaggtgggccatgctcggagccctaggctgcgtcttccctgagcttttggctagaaacggagtcaagttcggagaggcggtttggttcaaggccggtttaaaatgttctttaagcgattggaggggtcgtttactttgggaaaccctagctttggtttacggtcagaggattttggccatttgggccactcaagttatcttgatgggagctgttgaaggctacagagtctcaggaaatgggccgtaggaagaggccgaggacttgtttaaccc

SEQ ID NO: 123593 - DNA, 650 bp, Arabidopsis thaliana
  unsure (1)..(650): unsure at all n locations
gntagngccatntgncccnagntcgttncctagtttgnttaaccgatnantcgaaancgttgttaagccgttacaatcttcancatggaggcngattcttggaaccctagcttgttcacgctcagagcattttgccatttggccacacaagtttattttgatgggacccgttgaaggctacaagagtcgcaggaaatgggccattgggagagcccgaggacttgctttaccccggtggcagcttcgaccccattgggtttggcttccgacccagaggcattcgctgagttgaaggtcaaggagctcaagaacggaagattggctatgttctctacgtttgggattcgtcgttcaagccatcgtccctggtaagggtccgatagagaaccttgctcgaccctttggccgatccagttaaccacaacgcatgggccttcgcccccaactttgttcccggaaagtgagcccagttttatctgtcctttgcttcagtctttgcttcgtgagtgtgtgtcaggaggagaaagagagcttgtttagatggtaaaattatatggccagccgttgcattttttttcattattcttccccctcgtttataaatcaaatctttttttaaaaaaaaaaaaaaaaaaaaaaaaagggcggcc

SEQ ID NO: 123594 - DNA, 1072 bp, Arabidopsis thaliana
  unsure (1)..(1072): unsure at all n locations
taggtgacactatagaagaactatgacgtcgcacgcacgcctacgtaagctcggaattcggctcgagattaactaaagagccttttacttgcgccacactctcaccgcaatggccgcctcgacaatggctctctcctctcctgctttgaccggaaaggccgttaagctatccccggcggcctccgaagtatttggaaccggccgaatcaccatgcgcaaagcctccaagcccaccggtccatccggcagcccatggtacggatccgaccgagtcaagtacttgggtccattctccggtgagcctccgagctacctcactggagagttccccggtgattacgggtgggacactgccggtctatccgccgatcccgagaccttcgctaggaaccgtgagctagaagttatccacagcagatggggccatgctccggaggccctaggctggcgtttttccctgaggctattgggctaggaccggagtgaagttcggagaaaccggttttggttcaaggctggttcaaaaatttttttagaggcggggggggttgggctaattttggggaacccaggttttgtgcacggtcagaggcattttaggccatttgggccaactacaagttattctaattgggagcctgttgagggctacagagttcccaggaaatgggcctattgggagaggccgagggacttgcttttaccccagggtggcagctttcgacccattgggtttggctaccgacccagaggcattcgctgagttgaaggtgaaggagctcaagaacggaagattggctatgttctctatgtttggattcttcgttcaagccatcgtcactggtaagggaccgatagagaaccttgctgaccatttggccgatccagttaacaacaacgcatgggccttcgncaccaactttgttccccggaaagtgaggccaagntttatctgtaattttgcttcaggctttgctttcgtnagttttagagggggaaanagggtttntttagnntgnaaaatttcaaggntttgnaattttttaattaaccaaaaaacngggttttcttt

SEQ ID NO: 123595 - DNA, 578 bp, Arabidopsis thaliana
  unsure (1)..(578): unsure at all n locations
tcgtgggacgacacaagactctacagtgagtctcattgccggttccccagatcttcagcgatggagggctccgattacttgggaaaccctagccttggttcacgctcagagccattttggccatttgggccacacaagttattttgattgggagccgttgaaggctacagagtcgcaggaaatgggccattgggagaggccgaggacttgctttaccccggtggcagcttcgacccattgggtttggctaccgacccagaggcattcgctgagttgaaggtgaaggagctcaagaacggaagattggctatgttctctatgtttggattcttcgttcaagccatcgtcactcggtaagggaccgatacagaaccttgctgaccatttggccgatccagttaacaacaaacgcatgggccttcggccaccaactttgtttcccggaaagtgagcaagntttatctgaattttncttaaggcttttgcttcggnnagttttnnangggaaaaaanggcttttttanggnnaaaatttnaaagctttnantttttttcnataancaaaaaccgggtttttt

SEQ ID NO: 123596 - DNA, 848 bp, Arabidopsis thaliana
  unsure (1)..(848): unsure at all n locations
caaatnttaaacgttttactttgtgctgcactactcaacctcaatggccgcctcaacaatggctctctcctcccctgccttcgccggtaaggccgtcaagctttcccccgcggcatctgaagtccttggaagcggccgtgtgacaatnaggaagactgttgccaagccaaagggcccatcaggcagcccatggtacggatctgaccgtgtcaagtacttgggtccattctctggcgaatcaccgagctaccttaccggagagttccccggagactacgggatgggacaccgccggactttcagcttgaccccgagacattcgcaaggaaccgtgagctagaagttatncacagncaggtgggcaattgttcggaggncctaggttgcggttttncctgaggtttttggctaaggaacggagtcaannttnggagaggcggccttggtccaaagccggttcaccagatttttatgcgattggagggcttcgattactttgggagaccctaggtctctggtccacgctgagggcatttttggccatttgggcccactcaagttatcttgatgggagctgttgaaggctacagagtcgcaggaaatgggccgttgggagaggccgaggacttgctttaccccggtggcagcttcgacccattgggtcttgctaccgacccagaggctttcgcggagttgaaggtgaaggagctcaagaacggaagattggctttntttcttttgtttcttccttttctctcctttttttttgctttctctgttttttttgtgtgtttttttctctcttcttttcttttcaatgcattggttttgtttttatatttcctcta

SEQ ID NO: 123597 - DNA, 1089 bp, Arabidopsis thaliana
  unsure (1)..(1089): unsure at all n locations
acgccggcagcgtgaccgtacggtactggccgggatcgacgcgtccgcaaaaagaaggaaagcacaaaaacaaagattattttgtcttcctcaaccatggctttgtcctcccctgccttcgccggaaaggctgtgaagcctgccgcatcagatgtcctcggaagcggccgtgtgaccatgaggaagactgtcgccaagccaaagggtccatcaggcagcccatggtacggatctgaccgagtcaagtacttgggtccattctccggcgagcccccgagctaccttaccggtgagttccccggtgactacggatgggacaccgctggtctatccgccgacccagagaccttcgccaggaaccgtgagctagaagttatccacagcagatgggccatgctcggagccctaggctgcgttttccctgagctattggctaggaacggaatgaagttaatcggagacgcgggttggttcaagggccggtccacaatgttctttaccgccgaggattgccttcttgggcacccnngnttggncacgctcaganatcttaccatttgggcactcaagttaacctccatgggagctgttgaaggctacaggagtcgccggagatggtccattgggagaagcagaggacttgctttacccaggtggcagcttcgacccattgggcctcgctactgaccccgaggcttttcgcagagttgaaggtgaaggagctcaagaacggaaggttggctatgttctctatgtttggattcttcgttcaagccatcgtcaccggaaagggacctttggagaacctcgccgaccatttggccgacccagtcaacaacaacgcttgggccttcgccaccaacttcgtccccggaaagtgagagtgagcggctgcttattatgtgaatgagagcagagaaagagagtttgtttgtggtctattctatgtaaatttgtgaactttcctttgtgggatctttgtataaaatcgaccttttttctctaaaaaaaaaaaaaaaaaaaanaaaggcgccgctctagaggtccaagcttacgacgcgtgcagcgacgtcaagttttaatgtcact

SEQ ID NO: 123598 - DNA, 692 bp, Arabidopsis thaliana
  unsure (1)..(692): unsure at all n locations
cacactctacctgagctatgacaccgcatgcacgcgtacgtaagctcggaattcttttcgagcctggctgagctcacgctcagagcattttggccatttgggccacacaagttatttttgatgggaagccggagaaagctacagagtcgcaggaaatgggccattgggagaggccgaggacttgctttaccccggaggcagctttttcccattggggggggctaccgacccagaggcattcgctgagttgaaaggtgaaggagctcaagaacggaagagattggctatggtctctaggtttgggattcttcgttcaagccatcggcactggggaagggaccgatagaagaaccttgctgaccatttggccgatccagttaacaacaacgcatgggcattcgcccaccaactttgttccccggaaagtgagccaagttttatctgtattttgcttcagtctttgcttcgtgagtgccagaggagaaagagagcttgtttgagaaattgaacacccaggctttgtatttttttcattaatcaaagaactcgtttttctctcaaggatcaccaacaaaaaaaaatgtgtggaacaaaggnnnnnnnnnnnnnnnnnnnnnnnnnnnnnnnnnnnnnnnnnnnnnnnnnnnnnnnnnnnnnnnnnnnnnnnnnnnnnnnnnnnnnnnnnnnnnnng

SEQ ID NO: 123599 - DNA, 1111 bp, Arabidopsis thaliana
  unsure (1)..(1111): unsure at all n locations
tcgaacaaacaattctaaatccccaaaaaaaatctatgactagccaatagcaacctcagagattgatatttcaagataagacagtatttagatttctgtattatatatagcgaaaatcgcatcaataccaaaccacccatttcttggcttacaacaacaaatcttaaacgttttactttgtgctgcactactcaacctcaatggccgcctcaacaatggctctctcctcccctgccttcgccggtaaggccgtcaagctttcccccgcggcatctgaagtccttggaagcggccgtgtgacaatgaggaagactgttgccaagccaaagggcccatcaggcagcccatggtacggatctgaccgtgtcaagtacttgggtccattctctggcgaatcaccgagctaccttaccggagagttctcccggagactacggatgggacaccgtcggactttcagctgaccccgagacattcgcatggaaccgtgtactcttcgtgttcacggctcctggcccatgcctcggagccctaggctgcgtcttccctgagcttttggctaggaaccggagtctatgttcggagaggcggtttggttcaaggccggttcacagatcttcagcgacggagggctcgactacttgggcaacccgtagccttggtccacgctcagagcatcttaggccatttgggccactcaagttatcctcatgggagcctgttgaaggctacagagtcgccggaagatgggccattgggagaagcccgaggacttgctttaccccaggtggcagcttcgacccattgggtcctcgctacctgaccccgaggctttccgctgagtttgaaggtgaaggagctcaagaacggaaaggtttggctnatgntccccnatgntttggattctttcgttnaaagccatcgtnaaccggaaaagggacccttttgnagaaaccttggcgaccattttggccgacccagntaaanaaaaacgtttgggcctttggcacaaatttgtcccccgaaaantaagcgcttttntnttnnaattanggccannaaaaaagattttttttggcctttttnnaaattggnacttccttgggnnttt

SEQ ID NO: 123600 - DNA, 1099 bp, Arabidopsis thaliana
  unsure (1)..(1099): unsure at all n locations
actgccaggtactaatacgactcacgttaggggaagcacgtacgcctgcaggtaccggtccggaattcccgggtcgacccacgcgtccgtgaagtccttggaagcggccgtgtgacaatgaggaagactgttgccaagccaaagggcccatcaggcagcccatggtacggatctgaccgtgtcaagtacttgggtccattctctggcgaatcaccgagctaccttaccggagagttccccggagactacggatgggacaccgccggactttcagctgaccccgagacattcgcaaggaaccgtgaactagaagttatccacagcaggtgggccatgctcggagccctaggctgcgtcttccctgagcttttggctagaaacggagtcaagttcggagaggcggtttggttcaaggccggttcacagatcttcagcgatggagggctcgattacttgggaaaccctagcttggttcacgctcagagcattttggctaataaggcacggccagcaaaagtcaaagaggaaggcgacactccggctgcagatgcaaatgatgctgtcactattccacggcctattcctactattccacctcctcccggtcggcgtactttaccttctgagttgatccctgatgaaaatacaaagaatgctcctaggtatgacggggtgatatttgaagctctctctgctttagccgatggtaatggatctgatgtcagttccatttatcatttcattgagcccaggcatgaagtaccgccaaattttagaagaatccttagtacaagactgaggaggcttgcagctcagagcaaacttgcccacgcgtccgcggacgcgtgggcctttgccaccaactttgttcccggaaagtgagccaagttctatctgtttgtaatttacttttctttcaatcttttgaattcgagtgagagacaggaggagaaagagtaggtttgtgtttgtggtggatggtagagactttcagatgtaaatttgcaaagactttgtatgatttgtcattaatcaaataactcattgttctctnnnnnnnnnnnnnnnnnnnnnnnnnnnnnnnnnnnnnnnnnnnnnn

SEQ ID NO: 123601 - DNA, 771 bp, Arabidopsis thaliana
gctgtggataacttctagttcacggttccttgcgaatgtctcggggccctaggctgcgtcttccctgagcttttggctagaaacggagtcaagttcggagaggcggtttggttcaaggccggttcacagatcttcagcgatggagggctcgattacttgggaaaccctagcttggttcacgctcagagcattttggccatttgggccacacaagttattttgatgggagccgttgagggctaccaggagttcccagcaaaggggcccattgggagaggctcgagggacttgcttttcccccgggtggcaggctttcgaccccattgggtttggcgtcccaccccccaaaggcattctctttagtttaaggggaaggaggtccaaacacgcgacgaaaggccatgttcctccatgtttggattttttgttccagcccttgtccctggtaagggcccgatagagacccctgctgcccctttggccgatccagttaaccacaacgcatgggccttcccccccaactttgttcccccgaaagtgaaacaagttttatctgaattttgcttcagtctttgcttcgtgagtgtgagaggagaaagagagcttgtttaaatgtaaaatttgcaagccctttgtatttttttcattaatcaaataactcgtttttctctcccaaaagaaaaaaggaccaaccccaaagagcgaccgctctagaggatccaagcttacgtacgcgtgcgatgcgacgtcatagtcttctagagtgcacct

SEQ ID NO: 123602 - DNA, 645 bp, Arabidopsis thaliana
  unsure (1)..(645): unsure at all n locations
aggtgacactatagaagagctatgacgtcgcatgcacgcgtacgtaagctcggaattcggctcaccaaaaaaaagaaaacacaaaaacaaagattataatggcttcctcaaccatggctttgtcctcccctgccttcgccggaaaggctgtgaagcctgccgcatcagatgtcctcggaagcggccgtgtgaccatgaggaagactgtcgccaagccaaagggtccatcaggcagcccatggtacggatctgaccgagtcaagtacttgggtccattctccggcgagcccccgagctaccttaccggtgagttccccggtgactacggatgggacaccgctggtctatccgccgacccagagaccttcgccaggaaccgtgagctagaagttatccacagcagatgggccatgctcggagccctaggctgcgttttccctgagctattggctaggaacggagtgaagttcggagaagcggtttgggttcaaggccggttcacagatcttcagcgacggaggattggactacttgggaaacccgagcttggtccacgctcagggcatctatagattttgcanttnggaannaagntcccatgggggtntaaggaaantncgaatggcatggnaaaangttntncca

SEQ ID NO: 123603 - DNA, 588 bp, Arabidopsis thaliana
  unsure (1)..(588): unsure at all n locations
cagctctctacgactcactattgggaaagctggcacgcctgcaggtaccggtccggaattcccgggtcgacccacgcgtccgcccacccgccccgccgccggcgagaagacgacagaagggcataaaaaaaaaaaacccacaaaaaagtttcaatggccgcctcaacaatggctctctcctcccctgctttccgccggaaaggctgtgaaccctttcccctgcggcatcagaagtccttggaagcggccgtgtgacaatgaggaagactgttgccaagccaaagggtccatcaggcagcccatggtacggatccgaccgagtcaagtacttgggtccattctctggcgagtcaccccagctaccttaccggagagttccctggagactacggatgggacacacagctggtctatatccgctgaccccgagacattcgcaaggaaccgtgagctagaagttatccacagcaggtgggccattgctcgggagccctaggctgcgtctttccctaagtttttggcccaggaacggagtcaaaggttggtgggggggaattttgttcaaaggttggttnaaaatttttnaag

SEQ ID NO: 123604 - DNA, 595 bp, Arabidopsis thaliana
  unsure (1)..(595): unsure at all n locations
ccggccggaatcccgggcgaccacgcgtccgaacaccaaatcttaaacgttttactttgtgctgcactactcaacctcaatggccgcctcaacaatggctctctcctcccctgccttcgccggtaaggccgtcaagctttcccccgcggcatctgaagtccttggaagcggccgtgtgacaatgaggaagactgttgccaagccaaagggcccatcaggcagcccatggtacggatctgaccgtgtcaagtacttgggtccattctctggcgaatcaccgagctaccttaccggagagttccccggagactacggatgggacaccgccggactttcagctgtccccgtgacattcgctaggaacccgggcccttgaagttatccacagcaggtgggccacgttcggagccctaggcttcgnnttcccntaantttttggctagaaacgggtcaaagttcggnaaggcggtttggttaaaggccggtttaaanntttttancgttnnngggtcnttnttttgggaaccccaggtttgttcacgntanngattttggcanttggcccanaaantttttttattgggccnttaaggtt

SEQ ID NO: 123605 - DNA, 620 bp, Arabidopsis thaliana
  unsure (1)..(620): unsure at all n locations
tagggaacttttaaaaatatttaacgtcccttcgccccttccgtaacctcgaatttcggttcgagcctacctgggttcaccctaaaagcattttggccatttggcccacacaagttattttgatgggggcccgttgaaaggctacagaagttcgcaggaaatgggccattgggagaggccgaggacctgcttttaccccggtggcagctttcgacccattgggtttggcctaccgacccagaggcattcgctgagttcgaaggttgaaggagctctagaaacggaagaatgtggctatgttctctatgtttggaattcttcgttcaagccgtcgtccctggtaagggaccgatagagaacgccttgctgaccatttggccgatccagttcacatcatcgcattgggccttcgcctcctactttgttacccaggctagtgagccaagttttatctgtatttggcttcagtctttgcttcgtgagtgtgagaggagaaagagagcttgtttagatgtaaaatttgcaagactttgtatttttttcattaagcggccgcgaattcttgcagcgcgggggatcctctagtaagagagcggccgcctccncggtgcagctccagc

SEQ ID NO: 123606 - DNA, 564 bp, Arabidopsis thaliana
  unsure (1)..(564): unsure at all n locations
gtcacaaccaaaaaaaagaaaacacaaaaacaaagattataatgncttcctcaaccatggctttgtcctcccctgccttcgccggaaaggctgtnaagctgccgcatcaaatgtcctcggaagcggccgtgtgaccatgaggaagactgtcgccaagccaaagggtccatcaggcagcccatggtacggatctaaccgagtcaagtacttgggtccattctccggcgagcccccgagctaccttaccggtgagttccccggtgactacggatgggacaccgctggtctatccgccgacccagagaccttcgccaggaaccgtgagctagaagttatccacagcagatgggccatgtctcggagcccctagggttgcgttttcccctgagcctattgggtcaggaacggagtataagtttcggagaaggcgggttttggttcaaaggccggtttaaaacgtttttaagcgacggcggatttggcccttctttggcaaacccgcggtttggccacggcttagaaggatttttgccattttgggntnttaaantnttcccnatnggn

SEQ ID NO: 123607 - DNA, 664 bp, Arabidopsis thaliana
  unsure (1)..(664): unsure at all n locations
cgnnnnnnnnnnnnnnnnnnnnnnnnnnnnnnnnnnnnnnnnnnnnnnnnnnnnnnnnnnnnnnnnnnnnnnccacgcgtccgcggacgcgtgggcggacgcgtgggcggagaagcggtttggttcaaggctggttcacagatcttcagcgacggaggattggactacttgggcaacccgagcttggtccacgctcagagcatcttagccatttgggctactcaagtttttctcatgggagctgttgagggctacagagtcgccggagatggtccattgggagaagcagaggacttgctttacccaggtggcagcttcgacccattgggcctcgctactgaccccgaggctttcgcggagttgaaggtgaaggagctcaagaacggaaggttggctatgttctctatgtttggattcttcgttcaggccatcgtcaccggaaagggacccgtggagaacctcgccgaccacttggccgacccagtcaacaaccacgccttgggccttcgccacccaacttcgtcccccggaaagtgagcggctgcttaatnatgtgaattnagagcagagnaagagagttttttttgtgggtctatncaatgnaaattttgttgaactttccctttgtgggatctttnnanaggnaatcgaacntttttttttt

SEQ ID NO: 123608 - DNA, 773 bp, Arabidopsis thaliana
tcggagccctaggctgcgtcttccctgagcttttggctagaaacggagtcaagttcggagaggcggtttggttcaaggccggttcacagatcttcagcgatggagggctcgattacttgggaaaccctagcttggttcacgctcagagcattttggccatttgggccacacaagttattttgatgggagccgttgaaggctacagagtcgcaggaaatgggccattgggagaggccgaggacttgctttaccccggtggcagcttcgacccattgggttgggcttcccacccccagagacctttcgcggagttgaaggtgaaggcagctcaagaacggaagattggctatgcttcccctatgtttggattcttcggtcaagccatcgtcactggtaagggaccgatagcagaaccctgctgaccatttggccgatccagtcaacaacaacgcattgggccttcgccaccaactttgttcccggaaagtgagccaagttccatctggttggattttgcctttccttcagtcttttgaattcgagtgagagacatgaggagaaagagtaggtttgtgtttgtggtggttggtagagaccttcagatgttaatttctccaagccttggtatgatttgtccttaatccaaaaactccatggtctcttaaaaaaaaaaaaaaaaaaaaggcggcccccggctaatgaacctctccaccccggaatttaatccgggcccggtcccgccagcggtaccaccttccccatattaattcgaa

SEQ ID NO: 123609 - DNA, 567 bp, Arabidopsis thaliana
gccggaattcggtcgccacgcgtcgaatcttaaacgttgccctggaccgactagcgtccgaccgcatatggccgcctcagccaatggctcgtctcctcccctgccttcgaccggaaaggccgtcaagctttccccgcggcctccgaagtccttggaagcggccgtgtgaccatgaggaagactgtccaagccaaagggtccatcaggcagcccatggtacggatctgaccgagtcaagtacttgggtccattctccggcgagcccccgagctaccttaccggagagttccccggtgactacggatgggacaccgccggtctatccgccgaccccgagaccttcgccaggaaccgtgagctagaagttatccacagcagatgggccatgctcggagccctaggctgcgttttccctgagcttttggctaggaacggagtgaagttcggagaagcggtttggttcaaggccggttcacagatcttcagcgacggaggattggactacttgggcaacccgagcttggtccacgctcaaagcatcttaaccatttgggctactcaagttat

SEQ ID NO: 123610 - DNA, 823 bp, Arabidopsis thaliana
cgacccacgcgtcagcccaagcgtccgggaagactgtcgccaagccaaagggtccatcaggcagcccatggtacggatctgaccgagtcaagtacttgggtccattctccggcgagcccccgagctaccttaccggtgagttccccggtgactacggatgggacaccgctggtctatccgccgacccagagaccttcgccaggaaccgtgagctagaagttatccacagcagatgggccatgctcggagccctaggctgcgttttccctgagctattggctaggaacggagtgaagttcggagaagcggtttggttcaaggccggttcacagatcttcagcgacggaggattggactacttgggcaacccgagctacgttgagtcacaacgctctgaagtcatctcttagccatttcgggctcgcgcagggttatcctcattgggagctggttgtatcctaaccaccattgaagaaaagctcttgaggatatagctatggcatccattaccccggtggcatttgagaccgatcgggtttgaataccgacccataggcatacgctgaggtgaaggtgaaagagctcaagaacggaagattggctatgttctctatgatgggattcttcgttcaagccatcgtcactggttagggacccatagagaaccttgctgaccatttggccgatccagctaacaacaacgcatgatccttcgccaccaactttgtttccggaaagcgagccaagttttatctgcatttgcttcattctttgctttcggagtgttagaggagaaagagagctttgttagatgtaaaatttg

SEQ ID NO: 123611 - DNA, 432 bp, Arabidopsis thaliana
aacaaatcttaaacgttttactttgtgctgcactactcaacctcaatggccgcctcaacaatggctctctcctcccctgccctccgccggtaaggccgtcaacctttcccccgcggcatctgaagtcctcggaagcggccgtgtgacaatgaggaagactgttgccaagccaaagggcccatcaggcagcccatggtacggatccgaccgtgtcaagtacttgggtccattctctggcgagtcacccgagctaccttaccggagagttccccggagactacggatgggacaccccgccggactttttcagctgaccccgagacattcgcaaggaaccgtgagctagaagttattccacagcaggtgggccattgctcggagccctaggctgcgtctttcctgagcttttggcttgggaacgggtcaagtttg

SEQ ID NO: 123612 - DNA, 510 bp, Arabidopsis thaliana
ccccccgaccttaacctggaacccttaaaaccgtccgcccgcaacctaaacctttaattaactaaagaagccttttactaactggccccacactctcacccgcaattggccgcctcgaccaatggctctctcctctcctgctttgaccggaaaggccgttaagctatccccggcggcctccgaagtattgtggaacccgcccgaatcacctatgcgcaaagcctccaagcccaccggcccatccggcagcccatggtacggatccgaccgagtcaaagtacttgggtccattctccggtgagcctccgagctacctcactggagaaagttccccggtgattacggggtgggacactgccggtctctatccgccgatcccgagaccttccgttaggaaccgtgagcctagaagtttatccacagcaaatgggccatctgctcgggagccctaggctgcgttttccctgagctattggttaggaacggagtgaagttcgaagaagcggtttg

SEQ ID NO: 123613 - DNA, 439 bp, Arabidopsis thaliana
  unsure (1)..(439): unsure at all n locations
aacaacaaatcttaaacgttttactttgtgctgcactactcaacctcaatggccgcctcaacaatggctctctcctcccctgccttcgccggtaaggccgtcaagctttcccccgcggcatctgaagtccttggaagcggccgtgtgacaatgaggaagactgttgccaagccaaagggcccatcaggcagcccatggtacggntctgaccgtgtcaagtacttgggtccattctctggcgaatcaccgagctaccttaccggagagttccccggagactacggatgggacaccgccggactttcagctgaccccgagacatttcgcaaggaaaccgtgaacttagaagttatccacagcaggttgggccattcctcgggggccctagggttgngtttttccctgagctttttggttggaaacggggtaaagttttggg

SEQ ID NO: 123614 - DNA, 388 bp, Arabidopsis thaliana
aggtggcagcttcgacccattgggcctcgctactgaccccgaggctttcgcagagttgaaggtgaaggagctcaagaacggaaggttggctatgttctctatgtttggattcttcgttcaagccatcgtcaccggaaagggacctttggagaacctcgccgaccatttggccgacccagtcaacaacaacgcttgggccttcgccaccaacttcgtccccggaaagtgagcggctgcttattatgtgaatgagagcagagaaagagagtttgtttgtggtctattctatgtaaatttgtgaactttcctttgtggtatctttgtatagaaatcgaacctctttttctctaactgccttggcgttttatctgaagactcaattgaattg

SEQ ID NO: 123615 - DNA, 480 bp, Arabidopsis thaliana
gaccggaacggaagggccgacccacccgacccgactggctgtaccgcggaggcagcttctacccattgggtttggctaccgacccagaggcattcgctgagttgaaggtgaaggagctcaagaacggaagattggctatgttctctatgtttggattcttcgttcaagccatcgtcactggtaagggaccgatagagaaccttgctgaccatttggccgatccagttaacaacaacgcatgggccttcgccaccaactttgttcccggaaagtgagccaagttttatctgtattttgcttcagtctttgcttcgtgagtgtgagaggagaaagagagcttgtttagatgtaaaatttgcaagactttgtatttttttcattaatcaaataactcgtttttctctcaaattatctggcaattaccaaattggattatatatatattttgggcggccgttctagatgatccaagctttactt

SEQ ID NO: 123616 - DNA, 416 bp, Arabidopsis thaliana
caaatcttaaacgttttactttgtgctgcactactcaacctcaatggccgcctcaacaatggctctctcctcccctgccctccgccggtaaggccgtcaacctttcccccgcggcatctgaagtcctcggaagcggccgtgtgacaatgaggaagactgttgccaagccaaagggcccatcaggcagcccatggtacggatccgaccgtgtcaagtacttgggtccattctctggcgagtcaccggagctaccttaccggagagttccccggagactacggatgggacaccccgccggactttttcagctgaccccgagacattcgcaaggaaccgtgagctagaagttatccacagcaggtgggctatgctcggagccctaggctgcggcctccctgagcttttggctaggaacg

SEQ ID NO: 123617 - DNA, 558 bp, Arabidopsis thaliana
  unsure (1)..(558): unsure at all n locations
nnnnnnnnnnnnnnnnnnnnnnnnnnnnnnnnnnnnnnnnnnnnnnnnnnnnnnnnnnnnnnnnnnnnnntcgcgatctagaaactctttatnaaactaaaagagccttttactttgcgccacaactctcacncgcaaatgggcccgnctccgacaatgggctctctttcctctcctgcttttgaccggaaaaggcgttaaactatcccccggcggctccaagtatttggaccggcaatcaccatgcgcaagcctccaagnccaccgtccatcccgcagcccatggtacggatccgaccgagtcagtacttggtccattctccgtgagcctccgagctacctccactggagagttccccgggtgattaccggtgggacactgccggtctatccgccgatcccgaagaccttcccctaggaaccgtgaggctagaagttatccacagcagatgggcccattgctcggagccctaggctggcgttttccctagccaatagctcacccaaactcgagccgaattccgagcttacgtacgcgtgcatggtacgtcatagtaa

SEQ ID NO: 123618 - DNA, 436 bp, Arabidopsis thaliana
atcgcatcaataccaaaccacccattttttggtttacaacaacaaatcttaaacgggtgagtttgtgctgcactactcaacgctcaatggccgcctcaacaatggctctctcctcccctgccttcgccggtaaggccgtcaagctttcccccgcggcatctgaagtccttggaagcggccgtgtgacaatgaggaagactgttgccaagccaaagggcccatcatgcagcccatggtacggatctgaccgtgtcaagtacttgggtccattctctggcgaatcaccgagctaccttaccggagagttccccggtgactacgggatgggacaccgccggtctttatccgccgaccccgagaccttcgctaggaaccgtgagctagaagttatccacatagctcaggggggccacgggacagcgaagagcggggttgg

SEQ ID NO: 123619 - DNA, 585 bp, Arabidopsis thaliana
  unsure (1)..(585): unsure at all n locations
atcggccaaatggtcagcaaggttctctatcggtcccttaccagtgacgatggcttgaacgaagaatccaaacatagagaacttagccaatctaccgttcttgagcttggttcacgctcagagcattttggccacttgggccacacaagttatgttgatgggagccgatgaaggctacagagtagcaggaaatgggccattgtgagaggccgaggacttgctttacccaggtggcagcttcgacccattgggcctcgctactgaccccgaggctttcgcagagttgaaggtgaaggagctcaagaacggaaggttggctatgttctctatgtttggattcttcgttcaagccatcgtcaccggaaagggacctttggagaacctcgccgaccatttggccgacccagtcaacaacaacgcttgggccttcgccaccaacttcgtccccggaaagtnagcggctgcttatnatgtgaatgagagcagagaaagagagtttgtttgtggtctattctatgtaaattttgtgaactttncctttgnngggatcctttgtattagnaatcggaccctcttttttcnntt

SEQ ID NO: 123620 - DNA, 383 bp, Arabidopsis thaliana
cccacgcgtccggttagtcagaacacaaaaaaagcacacaaaaaagtttcaatggccgcctcaacaatggctctctcctcccctgctttcgccggaaaggctgtgaacctttcccctgcggcatcagaagtccttggaagcggccgtgtgacaatgaggaagactgttgccaagccaaagggtccatcaggcagcccatggtacggatccgaccgagtcaagtacttgggtccattctctggcgagtcacccagctaccttaccggagagttccctggagactacggatgggacacagctggtctatccgctgaccccgagacattcgcaaggaaccgtgagctagaagttatccacagcaggtgggccatgctcggaaccct

SEQ ID NO: 123621 - DNA, 339 bp, Arabidopsis thaliana
atcacgcgtccgcagatcttaaacgttttactttgtgctgcactactcaacctcaatggccgcctcaacaatggctctctcctcccctgccttcgccggtaaagccgtcaagccttcccccgcggcatctgatgtcctgtggaagcggccgtgtgaccatgaggaagactgttgcgccaagccaaagggcccatcaggcagcccatggtacggatctgaccgtgtcaagtacattgggtccattctccggcgagtcccccgaagctaccttaccggtgagttccccggtgactacaggatgggacaccgccggtctttccgctccgacccagagacctt

SEQ ID NO: 123622 - DNA, 295 bp, Arabidopsis thaliana
tcaagaacggaaggttggctatgttctctatgtttggattcttcgttcaagccatcgtcaccggaaagggacctttggagaacctcgccgaccatttggccgacccagtcaacaacaacgcttgggccttcgccaccaacttcgtccccggaaagtgagcggctgcttattatgtgaatgagagcagagaaagagagtttgtttgtggtctattctatgtaaatttgtgaactttcctttgtggtatctttgtatagaaatcgaacctctttttctctaactgtgttggcgtttt

SEQ ID NO: 123623 - DNA, 534 bp, Arabidopsis thaliana
  unsure (1)..(534): unsure at all n locations
tgcacgcctacangtaccggtccggaattccgggtctgaccacgcgtccgcaccacgcgttcggtgggaggcaaaagaaagccgataaagacagtggacaatctcacatccaagatagatttcatgaagttcaaccatgatgctcagattctagctatagtctctacaatgaacaaaaacagtgtaaagctagtccatgttccatccctaaccgtcttctcaaactggccgccaccaaacagcacaatgcattaccctcgctgcctagacttcagccccggaagtggcttcatggctatggggaacgctgccggaaaagttttgctgtataaactccatcattaccagaatgcttgaagtggtctttaacaagggcagttttgggattgttgtgtttcctctttttttgtcgcaagtactctttatgttatcaattttcctatccaattatcgatcaatgaaaaattttctttctgattaaaaaaataaaaaaaaaaggcgaaccgctctagaggatccaagcttacgtacgcg

SEQ ID NO: 123624 - DNA, 442 bp, Arabidopsis thaliana
cgaacttctccctcctcctctcactttcaccatggattccgtctccggttacgccgccggagcaggtcagcctcgagtcggtgggaaaattgttcgaccacgacgcaccgctgttgtcaggacgccgtgtgagcgccccgttcagagatcccgagatcctcctcagcaaaaccctagttggatctccaggctcgtttacaaacccgccagcgtaattgcttccggcgccggaaaattcatttcttccgtcgtcttctccgactcttcctcatcttcggaggaggacgaggattcatcttcagatattgatggtgatgaggatgttgagaagaacaatcccgattttactgaagaggaccttctgagtgcccagcaaccaagcattcaacgactcaattctaagcgaggaattgagcagcttctcttgcaagaaacatttgca

SEQ ID NO: 123625 - DNA, 446 bp, Arabidopsis thaliana
acccacgcgtccggatccggcgagattcgattcgatttctgctgacaagtcaaactctttgcccagaaatagctaagaaggtctagaggtgaaaaaatggcaacttcgcgtttacagttggaaggagatgactctgtacatctacacattactcacgccaaccttaaaagcttctctgcggacgctcgtttctctccgcaaatgagtgtagaagctgtgaaagaaaagctatggaagaaatgtggtacatctgttaattccatggctttagagctctatgatgactctggctcaaaggttgcagttctcagtgatgattctagacctcttggtttcttctctccttttgatgggtttcggttacacatcatagatcttgacccctcctcggtcacaactggaggctggcttgaagatacgtcactggttgagaagtataacatctc

SEQ ID NO: 123626 - DNA, 539 bp, Arabidopsis thaliana
  unsure (1)..(539): unsure at all n locations
ctcacgaaaatttaaatccctagctattaccttactcgtcgttctcttttgattttcatttcccgaagaagcgttttctcaggatatgcttctcgatctctgagaagaaagggatttgcaaatttgagaattcacattttggattaagatagaaacgatgtcgtctgagtcaccgaatttgcctgctgctgcgggaacagtaccagataatcatcctcctcctcctcctgttgttactgctgcagaagctggaagcgatgattcacctaaaggagtagcatcaaaactatctgctgctgggatttcaaattgggccaaaaacttgaaagttccacagccttttgcttccacacaaaacgactctggtgtcgaaaacaccgagaagtctgcgtttgcaaagtttacaagcgggttaggggttcgtttatctccgaaatcttctcaaacgggttgccactcccncaggagggacttcggggtntncaanattntagttttttttgggcttttcgnaanggnttggtggtcnancaaggant

SEQ ID NO: 123627 - DNA, 600 bp, Arabidopsis thaliana
  unsure (1)..(600): unsure at all n locations
gggaaagcntggtangccntgcaggtacctggtcctggaattccactctcaccttgatatttttcagagagggagagatgatttccgatcattgctatgtcgtccggatttcttcgtcaaggccgtccggtttgtcaaccggcttcagcccgacatccatatgcctcttgtgatgtggtttgtcggttactttcccggaatcttctggctcctttagcagaattgtccggtgtcgccgtcctccatcggttggttcctctaccaacggtggttggctcttgtctagcttctccgtcgtccctctccggcggtttaggctagcttttggccggatttcttttccggttttgttttatgttctcgttttctatagatccagtttgattttgctcctttgtgttctaactcttagagggctcaattccttgaacctcctttgtttaaagggctcaatttgtttttcaagcttatcgatttcaattatataagaacaaattagagttgtggattggggttttctctaatgcctttgagttgggttttatgcaattgagtcaattgtcatattggtttttggaaacgagtgtttttattttactt

SEQ ID NO: 123628 - DNA, 822 bp, Arabidopsis thaliana
  unsure (1)..(822): unsure at all n locations
gaatgttttaggtgcactatagaagagctatgacgtcgcatgcacgcgtacgtaagctcggaattcggctcgagagaaacctgtctgatttgctccgtcgcctaaaaagtctaaaaccctaagtgtctccgcctcgtagctttacccgattcaacgaagagtgaattcgcgtgagctcaagcagtatcgaaatctaccaatcatggcgagtcaaacaccgaatctcgagtgtcggatgtacgaggcgaaatacccagaggtggatatggcggtgatgatccaggtgaagaacattgccgatatgggagcttatgtttctctcctcgagtacaacaacatcgaaggcatgatccttttctccgagctctctcgtcgtcggatccgaagtgttagcagtttgattaaggtcggaagaattgagcctgtcatggttctccgtgttgacaaagagaaaggttacattgatctgagcaaacgtagagtcagcgaggaagatattcagacttgtgaagagaggtataacaagagcaaacttgttcattctatcatgcgccatgttgctgagactctttcaattgatttggaggacttgtatgtnaacattggttggcctttgtatcgacggcatggtcatgcttttaaggctttcaagatcttagtgacggatcctgattcagtgttgggtccntcacccgtgngatcaaagaagttgggcctnatgggncaanagntgcctaaggtgtnccncctntncggnangaagtaaaaantccctttttaggacattgggggggnattnncccccacccaatnaaaaccggg

SEQ ID NO: 123629 - DNA, 518 bp, Arabidopsis thaliana
  unsure (1)..(518): unsure at all n locations
nnnnnnnnnnnnnnnnnnnnnnnnnnnnnnnnnnnnnnnnnnnnnnnnnnaacgactcttctctttacccacgcgtccgctcgagtcctcgtcgctcgtagacggtgccaagcttcagtccttagaccctacggcggtttaaagccctttctttccttctgcagcttacctaactccactgcgccgttccgggattcgttgagagcaaaatccgatggattggctcgggcctatgttaccggagcgccgcctatcgtggaagaaccagacccaaagattgaagaatccaaatctgaggctgaatcgaaggatttaattagttgggggcttctgtggagcttgatgagcaagcacaagctcaggctcagtgtttgcttattgactctccttggatgcagtacttgcactctctctatgcctgttttttctggtagattctttgaagtactgattggggtgagaccggagcctttgtggcggctgctgagcaaaattgctggtttggactcggtggaacc

SEQ ID NO: 123630 - DNA, 751 bp, Arabidopsis thaliana
  unsure (1)..(751): unsure at all n locations
acgcgcaagannnnnnnnnnnnnnnnnnnnnnnnnnnnnnnnnnnnnnnnnnnnnnnnnnnnnnnnnnnnnnnnnnnnccacgcgtccgacatttctctccactcagatttccaattcctaaagatagagagaatgactaaaatctctgttggattgcaacttgtgacaagagattcgagggaaaaactaaacaatatagtgatcaaatcttcactgagactaaaccgatccaatccaaacatctcggagctttgtttccttaaaacatgtcatctctgcaataaacaactccatcaagacaaagatgtttacatgtacagaggagatttgggattttgtagtagagagtgcagagaaagtcagatgttgattgatgatagaaaagaactagaggcttcgacgaagatgatgttggcttcgtacagacgatgtaataacggcgccggaaaaagcgagtctcggaatttgtttgatgatctccggcgacgacgtcaattatttatagttccttgaggcttctttaagcaatatctaattatagtttttttggttacacatcttatgaaagttattagtaaaagaaagagaattaaattgtatctcccggttgtcatttttcaaaatcttaaatgttaattggacagtttatgtggtgaaaaaaaaaaaaaaaagnnnnnnnnnnnnnnnnnnnnnnnnnnnnnnnnnnnnnnnnnnnnnnnnnnnnnnnnnnnnnnnnnnnnnnnnnnnnnc

SEQ ID NO: 123631 - DNA, 772 bp, Arabidopsis thaliana
  unsure (1)..(772): unsure at all n locations
nnnnnnnnnnnnnnnnnnnnnnnnnnnnnnnnnnnnnnnaactggtacgccaccaggtaccggtcctggattcccgggtcgacccacgcgtccgcggacaagtagtgaagtatcacgactttgatttatttctgtatatctaagatgcaggcggtatcagttgatgaaaccaaaaacacggtggtgctacgggcggagcacaagaatgaagaaggccggaaatctgttgataagttcgaagtgaagacacgtaatccggagacgatcaagagcgttgagcggaagcttatggagaaaggtgttcaacggatggatcgtcatccttccgatgggattcctctcaggcgaccaccatcgaagtcaggtcacggcgggaagtacacgtgggaaggacctgatcggatggaggattacgagatgcagccggatccaccggcgatggatgaaggagatcctaattacgacgaggaacaggtgaagaagagtggtgatgacgtggcggttgagcttgtgaaaggagaggttgaggtggctaaggaggctccggctggtgttgctagggttgaggttgatcctcgcttggtcggtcgttgagagtttgatagaggaggaagaaaaatgttggggcgaatgtgagaaagagggagaaatgtggggttggatttttaatttcgagttaatgttttagtgtaaaatgacttttcactatttctttaaaaaataataaattgcccgtggtagnntttaaaancccccttcgggggtctttttc

SEQ ID NO: 123632 - DNA, 725 bp, Arabidopsis thaliana
agtttggtctcttgtgttttcttatgatcgttgaccgagcctacgctagagagtttacggtcggtggtgcaacaggttggaccgtcccttctggttctcaagtgtacagtcaatgggcagaacagagcagattccaaattggtgactctctgttgttcgtctaccaatcaaaccaagattcagtgctccaagtcacaagagacgcttacgacagctgcaacacggactcaccaaccgctaaattcgccgatggcaaaacttctgtcacgctgaaccactctgggccatactatttcattagtggaaacaaagacaactgcaagaaaaacgagaagcttgtggtcatcgtcatggctgatagaagcggcaacaaaaacaccgcatcatcaccgccgtccccagccccagctccctcaggagaatccgctccttctccacctgtctcgggaacctttgagatgaccccagcaccgacgcctactacttctgaagacactccaaacagcgcagcttcttccttatcatttgtcgctgctcttcttggggctgctctagcttccactctattcctacactaagaagtttctcttttgtcttcccttttcattctgtatcgagtcttttccctttccctcttcatccaagtttgtgtcaattggtgtttgttgtttgattttttaccccatttgttcttcatgtatatgaataaaagttctactcgtaag

SEQ ID NO: 123633 - DNA, 444 bp, Arabidopsis thaliana
cggacgcgtgggcacacacccagagagagacagagattcatcgatatggcggtttcttgcaaccactctgcgattctcttctctccatcatccaccgctggttcctcctccgttacttcttcctcgtcgctcatcggctttcctcgtttccaaacgctgcgtttcaaatcaagaagcgtttattcgaaatctagagtttcttctcctgtctcggcattgcctttacgttctctagaagctctgattttcgattgcgacggcgtgattctcgaatccgagaatctacaccgtcaagcttacaacgatgctttctcgcatttcgatgttcgatgtcctccttcttcctctgagtctctcgattggagcctcgagttctacgataagtttcagaatctagtcggaggtgggaacccgatcgtgcatttcaagaaatggatggccact

SEQ ID NO: 123634 - DNA, 1662 bp, Arabidopsis thaliana
  unsure (1)..(1662): unsure at all n locations
gcagtacccgtccggaatttccgggtcgacccacgcgtccgcaaagggttatcaacaatctctcatctttagcattgttttgttatcttctttttcatcacaatttttctacggtcagagattcaaaagagttctttctctctatcttattctccgatcatcatgatgcagcagccaccacccggaggtatccttccacatcacgctcctcctccttctgcgcaacaacagtacggttaccaacaaccttacgggattgctggagctgctccaccaccaccacagatgtggaatcctcaagcggcggcgccgccatcagttcagcctacgaccgctgacgagatccggactctttggatcggggacttacagtattggatggatgagaatttcctctacggttgctttgctcataccggagagatggtttctgctaaagtgattcgtaacaagcaaaccggtcaagttgaaggatacggtttcattgaattcgcatctcatgctgctgctgaaagagttctacaaacattcaacaacgctcctatcccgagctttcctgatcagctctttagactgaactgggcatcattgagttcaggagataaacgagacgattcaccggactacacgatatttgtcggtgatctggctgctgatgttacggattatatcttacttgagacgttcagagcctcttatccgtcagtgaagggtgcaaaggttgttattgacagagtcactggacgtacaaaaggatatgggtttgttaggttttctgatgaaagtgaacagatccgtgctatgacggagatgaatggcgttccttgttctactagacctatgagaattggtcccgctgctagcaagaaaggtgtaactggtcaaagaggggagtcaagaggctctctatcatcttgaggcctggaactgatattcagctganatggttatctccttattgagtgcccatgcttagattcataccagagctctgctgcaggggtaacaactgataatgatccaaataacacaactgtttttgttggtggattagatgcatctgtcacggatgatcatctgaacaatgtctttagccaatatggtgagattgtgcatgtgaaaatacccgctggaaagcgctgtggattcgttcagttttccgagaagagctgtgcagaggaagctcttagaatgctgaatggagtgcaattaggcggaacaaccgtcaggctctcatggggccgaagtccttcgaacaaacagtcgggggatccgagccagttttactacggtgggtatggacaaggacaggagcagtatgggtacacgatgcctcaagaccctaatgcatattacggaggctactctggtggaggatacagcggtggttaccagcagacaccacaggcaggacagcaaccaccacaacagccaccacagcagcaacaagtcgggtttagctactaaccccgagagtattgcttgagttaatgtcactctgcttgttgtttgcgtactttgttatgaacttgtttctgcgtgccttgttatgaatattttcccaaacacagtttatttgtccaaaaaaaaaaaaaaaggcgcgccgctctagaggatccaagcttacgtacgcgtgcatgcgacgtcatagttcttctatag

SEQ ID NO: 123635 - DNA, 1029 bp, Arabidopsis thaliana
  unsure (1)..(1029): unsure at all n locations
ctggctgctgatgttacggattatatcttacttgagacgttcagagcctcttatccgtcagtnaagggtgcaaaggttgtnattgacagagtcactggacgtacaaaaggatatgggtttgtaaggttttctnatgaaagtgaacagatccgtgctatgacggagatgaatggcgttccttgttctactagacctatgagaattggtcccgctgctagcaagaaaggtgtaactggtcaaagagattcataccagagctctgctgcaggggtaacaactgataatgatccaaataacacaactgtttttgttggtggattagatgcatctgtcacggatgatcatctgaagaatgtctttagccaatatggtgagattgtgcatgtgaaaatacccgctggaaagcgctgtggattcgttcagttttccgagaagagctgtgcagaggaagctcttagaatgctgaatggagtgcaattaggcggaacaaccgtcaggctctcatggggccgaagtccttcgaacaaacagtcgggggatccgagccagttttactacggtgggtatggacaaggacaggagcagtatgggtacacgatgcctcaagaccctaatgcatattacggaggctactctggtggaggatacagcggtggttaccagcagacaccacaggcaggacagcaaccaccacaacagccaccacagcagcaacaagtcgggtttagctactaaccccgagagtattgcttgagttaatgtcactctgcttgttgtttgcgtactttgttatgaacttgtttctgcgtgccttgttatgaatattttcccaaacacagtttatttgtctttgcttttctctaggtgtgtgttgagtttttaactcttaataatgtttctgcgatgcttctgtttttaaaaaaaaaaaaaaaaaaaaaaaccanaaagnnnnnnnnnnnnnnnnnnnnnnnnnnnnnnnnnnnnnnnnnnnnnnnnnnnnnnnnnnnnnnnnnnnnnnnngatcaatcg

SEQ ID NO: 123636 - DNA, 685 bp, Arabidopsis thaliana
  unsure (1)..(685): unsure at all n locations
cagctctctacgactcactattagggaagctggcacgcctgcaggtaccggtccggaattcccgggtcgacccacgcggccgaatttttctacggtcagagattcaaaagagttctttctctctatcttattctccgatcatcatgatgcagcagccaccacccggaggtatccttccacatcacgctcctcctccttctgcgcaacaacagtacggttaccaacaaccttacgggattgctggagctgctccaccaccaccacagatgtggaatcctcaagcggcggcgccgccatcagttcagcctacgaccgctgacgagatccggactctttggatcggggacttacagtattggatggatgagaatttcctctacggttgctttgctcataccggagagatggtttctgctaaagtgattcgtaacaagcaaaccggtcaaagttgaagggatacgggtttcattgcaattcggcatctcaatgctgcctgctgaaaagagtttctaccaaaacaattcaaccaaacgcgttcctatccccgaggctttccttatatcaagcatcttttanggccttgaacttggggaatcaatttgagtttcaagggggggtaaaaccgnggncngggttnacccgggncttnaacggntnttttngncggggtngncttggctcctta

SEQ ID NO: 123637 - DNA, 454 bp, Arabidopsis thaliana
cacgcggccgctcattcccacaaagagaggtacaacaagactcgtcgctcttcgctttttcttctctctttctttctcttgccagtagtgtgatcttacgaagcttttagtagagaaaaagcatatacgctttgtctttcttaatcgactgataagtccttaggatcagatggaacaaatgggtggctactcaaaacaacaaggtccatttttagtttgattaagggatttggatctgagcttacttcatcaactttgtcggaatatacatttgctttgtgtggatttggaagttgtccctgaatggcgtccgaggatttgaatattgttgcggaatcaaagaaaggggaagagaatgttattgttgataattccaaggacatgaatagacctgagaatcttgacttatctactgagaaaactgatactgccaatgagaatggtccaaaagatg

SEQ ID NO: 123638 - DNA, 436 bp, Arabidopsis thaliana
ctttcttctactctgtgatcaaactatcgaagaaaaaacaaaccctagatttatccgcccctcttcttcctctgatgataagaaagtcgaagactttgagaatctaaagctgaaaaattttgttttttttcattgagggaatcgaatcgagttatgtacaaggatcggagtggaggaggaataatgggtggtggtggatcatcgagatcggagatccttggtggagctattgatcggaaacgaatcaatgatgctttagacaaacatcttaagaaatcttcaccttctacatctagggttttcacttctaaggacaaagattctgtcccttctacttcaactgctaaatctcagcttcattctcgttcccccgatgttgaatctgacacggatagtgaaggatcagatgtgagtggttcagaaggtgatgatacct

SEQ ID NO: 123639 - DNA, 1010 bp, Arabidopsis thaliana
  unsure (1)..(1010): unsure at all n locations
gcnnnnnnnnnnnnnnnnnnnnnnnnnnnnnnnnnnnnnnnnnnnnnnnnnnnnnnnnnnnnnnnnnnnnnnnnnnnnnnnccacgcgtccgcccacgcgtccgcccacgcgtccgctctggttcattttccatggacggaccttgacctctctgcttcccttcgtgcattttctctctctcactatcctctctctttctagtgtttgtttgatcctctgcgtactctgttcttcttctctcttcagataaaacaagtcctgcatattgaagatctgatgtcttatcgattgctaagtgtggataaggatgaactggttacgtcaccttgtttgaaagaacgtaactacttgggtctctctgattgttcctctgttgatagctcaactattcccaatgttgttgggaagagcaatctcaatttcaaagctactgaactgaggctaggtcttcctgagtctcaatctcctgagagagagactgatttcggtttgctgagtccgagaacacccgatgagaagcttctcttcccgttgctaccttctaaagacaatggttctgctactacagggcataagaatgttgtttctggtaacaagagaggatttgctgacacttgggatgagttttcgggtgtgaaaggatctgttagacctggaggaggaatcaacatgatgttgtcgccgaaagttaaggatgtctcgaagagtattccaaggaggaaggcctcatgctaagggtggcttgaccaatgcaccagctgccaaggcacaggttgttggttggcctccaatcagatcataccggaagaatacaatggcttcttctacttcgaagnaccactgatgagggttgattggggaaacctgggtctttgggtgttctggtttgtgaagngtgagcatggatnggtnnctnccgtattcttgagaaaagntccgncctttnaggaccttttcanttccctatnnaanaagtttgttttcttnnnctttgngaaaattttncang

SEQ ID NO: 123640 - DNA, 580 bp, Arabidopsis thaliana
  unsure (1)..(580): unsure at all n locations
atgannnnnnnnnnnnnnnnnnnnnnnnnnnnnnnnnnnnnnnnnnnnnnnnnnnnnnnnnnnnnnnnnnnnnnnnnnnnnnnccacgcgtccgcggacgcgtgggcggacgcgtgggcgagtttgattcctttaattgaaaatccaataaacaagcgggacctcgatttgaaatctctttatccagatccatctctccgtcacaatcttccatctaccgtcaccggaaccggcgagttagtcgtcgggattccagatctgtttgtctacgtcttccttctgtctctgtgttcatcagagtaccaattcgctcgattgttgctgcatttcgcgaattgtattaggtttatagcgtctatgaactcctgttttcgctcgatttgagtaacctaggtatttctctacgttgattgtttggatttgaagaaaaggcgcaaagtatgagtagaaatttcggaagtttcatgaagatttgagggattgagttaggtattgtagttgtagagagaatgcagagtttatcgagctcggctccgacaccggaggcgatattagaatggttacagaaggaaatggggta

SEQ ID NO: 123641 - DNA, 511 bp, Arabidopsis thaliana
tctaatacgactcactatagggaaagctggtacgcctgcaggtaccggtccggaattccggtcacccacgcgtgcgggcgcctttcttcttcttcttcttcttcttcatctggaaatcgatatacgattctcactctctacccgcgagaaaacactaattgattcatatcctccgtcaaggataaatctgtgtgtgattcaccatatctctttcttctccctccgccctggagctacgacgcctacagatctggctggtaaaaatcacgcagatagagactctggcccgatgctctctttacccattgatccaggctttttctgatttctctttggtcctagaaaccattaagctcctacctctttctaggtgatgctcgtgttctcttcactggctatgactccaggtgtgatccctcaaaatctccgtgtctttggccctggtttgaatccctctttcccttactgcattgctaatcacttcccttgattgagttgctccattccaact

SEQ ID NO: 123642 - DNA, 956 bp, Arabidopsis thaliana
  unsure (1)..(956): unsure at all n locations
ggtggggggtagtatcgccggctactatacgactcatatagggaaagctggtacgcctgcaggtaccggtccggaattcccgtgtcgacccacgcgtccgcccacgcgtccgtacggctgcgagaagacgacagaagggagacaactcaagtttcttgcaattacctacttacaacaaagcaactcgactcgaacaaacacatccatggctccttctgcgcaacctcttcctgtgagtgtttcggatgaaaaatatgcgaatgtcaagtgggaagagttggcattcaagtttgttcgtacggattatatgtatgttgcgaagtgcaatcatggagagagttttcaagaggggaagattcttccttttgctgatttgcaacttaacccttgcgctgctgttcttcagtatggccagggtttatatgaaggactgaaagcttacaggacagaagatggtcggattctgctattccgaccagaccaaaacggtctccgccttcaagccggagctgacagactctatatgccttatccttcggtcgatcaattcgtctccgccatcaaacaagttgctcttgccaacaagaaatggattcctcctccggggaaaggaacattgtatattaggcctatcttgtttgggagtggtccgattcttggttcatttcccattcctgagaccaccttcacagcttttgcctgtcctgttggacgttatcataaggataactctggtttgaatctgaaaatcgaagatcagtttcgtcgagcttttcctagtggaactggtggtgtaaggggatcacaaaactattgncctggtttggntnccatttggnagnggggaaaaacaagggttcnctggaaanttggnttttnntcctgaacttgnaaaaacattgagggctttntgaantnatngttttttnnaagggaantttnatttgaccacaatt

SEQ ID NO: 123643 - DNA, 1518 bp, Arabidopsis thaliana
ctcaacatcgtcatctctaacaatggcgccttctccgatcatcatcttctccgttcttcttctcttcatcttctcactctcatcatctgctcaaacacctttccgtcccaaagctctccttctcccagtaacaaaagaccaatctaccctccagtacacaaccgtcatcaaccaacgcacacctctcgtccccgcttccgtcgtcttcgacctcggtggtcgagaactctgggtcgactgcgacaaaggctacgtctcctccacttaccagtctcctcgctgcaactccgccgtctgctcacgtgccggctccacaagctgcggcacatgcttctcccctccgagacctggctgtagtaacaacacttgcggcggcattccggataacaccgttaccggtaccgcaacttccggcgaatttgctttagacgttgtgtctatccagtccactaacggatccaatccggggcagggtcgttaaaatcccaaatttgatcttcggttgtggagcaacgtttcttcttaaaggactcgctaaaggaaccgttggtatggcgggaatgggacgtcacaacatcggtttaccgtcgcaattcgccgccgcgtttagcttccaccgtaaattcgccgtctgtctaacttccggtaaaggcgtcgccttcttcggcaacggaccttacgttttccttcccggaatccagatctcaagtctccaaacgacgccccttctcatcaatccggtcagcactgcttctgcgttttcacaaggtgagaaatcctcagagtactttatcggcgtgacggcgattcaaatcgtcgagaaaacagttccggttcaatccaacggtattgaaagattaacgcaagtaccggtatcgggggaaccaaaatcagctccgtcaatccttacacggtgttggagtcatcgatctacaatgcttttacgtcggagttcgttaaacaagcagcggcgaggagcatcaagagagtagcgtcggtgaaaccgttcggcgcgtgtttcagcacgaagaacgtcggcgtgacgcgcctaggatacgccgtgccggagattgagcttgtgcttcatagcaaagacgtcgtttggaggatatttggagccaactcgatggtgagtgtcagtgatgacgtcatctgtttgggtttcgttgacggaggagtcaacgcaagaacctctgttgtgattggagggtttcagttggaggataatttgatcgaatttgatttggcgagtaacaaatttgggtttagttccacgttattgggccgtcaaactaactgcgccaacttcaatttcacttccactgcttgattaaattagttgatccgttttctttttttaaaactgttttttagtggttattatattatgtttgatgtgattaataaagagccaatggaatcattatttggcatttgttataaaaaaaaaaaaaaaaaaaagggcggccgctctagaggatccaagcttacgtacgggtgcatgcgaagtaatagctg

SEQ ID NO: 123644 - DNA, 440 bp, Arabidopsis thaliana
cctccaaggattccctcggtgaaccgtccggcgcgtgtttcagcacgaagaacgttggcgtcacgcgcctaggatacgccgtaccggagattcacctcgtgcttcatagcaaagacgtccgtttggagaatctttggagctaactcgatggtgagtgtcagtgatgacgtcatctgtttgggtttcgttgacggaggagtcaacccaggagcctctgtggtgatcggagggttccagttggaggataatttgatcgaatttgatttggcgagtaacaaatttgggtttagttccacgttattgggccgtcaaactaactgcgccaactttaatttcacttcccactgcttgattaaatttagttgatgccctttctccaaaataaatgtgtttcagtaaccctaaataaacgtattgtattatgtttaatttggtcagag

SEQ ID NO: 123645 - DNA, 471 bp, Arabidopsis thaliana
gagagcttaagccaaagatctctcattgacctttgcttcttcatcttcttctccgatcacagtttctctctttctggattccaccattctcctctttgtcgtctatgtgacctattctcgattcgatccatggaataatctctgtccgaagaagatctctcattccccttcaaaagcagacagattcgaaactttcccccaaattcgtggaaattttgtgttagggtttgggttattctcaaatagaatcaatcagatcgtttttttttttgttagaagaagatgaagatagcggccaatggccggtttttcacaatcggactcgtagcgtcatggtattcatcgaacatcggagttttattgctgaacaagtacttgttaagcaactatggattcaagtatccgatcttcctcaccatgtgtcacatgacggcttgttctcttctcagctacgttgctattgcttggatg

SEQ ID NO: 123646 - DNA, 583 bp, Arabidopsis thaliana
  unsure (1)..(583): unsure at all n locations
cgggnaagactagataatctctgcatgtcattttgctctctgaaggcacttatagatgcaacgtcatctggaagtgacttagaggatgaaagcggaataagaatggtggcactatttgggcatgaagaagttggctccaattcagcgcaaggagctggatcccctgtcatgattgatgctatgtcacacatcacaagttgcttcagctctgacactaaggtgctcaaaaaagcgattcagaaaagtttgcttgtctctgctgacatggcacatgctttacatccaaactttatggacaaacacggagagaatcatcagccaaagatgcacggaggacttgtcatcaaacacaatgcaaatcaacggtacgccactaatgccgtaacttcctttgtattcagaggggttagcaggggagcataatctgcctgttcaaggattttgtggtgcgtaatgatattgggttgcggtcggcccttggtccaatcctgcaagcagtntgggntaagnccgttnttttnggnnnctagcntcaatcatggtncggagtnttctcanttcgngnggttntgnccttaagttt

SEQ ID NO: 123647 - DNA, 742 bp, Arabidopsis thaliana
  unsure (1)..(742): unsure at all n locations
ccccacgcgtccggaaaaactttggatcaatcaacaatggcggatctctctcttcctcccgattccctcttcctcggcttcgacagctctacccagtcaatgaaagcaactgtgttggattcgaacctgaacattatcaaaaccgaactcgttcatttcgattctgatcttcctcaatacaaaaccaaagacggggtttacagagacactactgtaaacggaagaatcgtatctccaactctcatgtgggtcgaagcatttgatctcattctccagaagctctctaacgccaatttcgatttcgccaaagttatcgctgtttcaggcagcgggcaacaacacggtagtgtgtattggtcaaaaggtagttctgaggtattgagatcattggattcaaagagatcattgaaagaacaactcgaaaacgctttttcggttaaggaatctcctatatggatggatagtagtactacattgcaatgtaaagagattgagaatgctgttggtggagctatggagttgtcgaagatcactggctctcgtgcttatgagcggtttactggtccgcagatacggaagctttttatgactcagggggaggtgtataagagcacggagaggatttcgcttgttagctcttttatggcgtctttgttggttggagattatgcttgtattgatgaaactgantgctgctggatgaatttgatggatattgagaaacgttgttggtctaaagctt

SEQ ID NO: 123648 - DNA, 498 bp, Arabidopsis thaliana
cccacgcgtccgcggacgcgtgggccagatcaattttctcgagaaaaagaaaatgtgattatccattcgattttttcgcagaagaagacgaaagagagaagaagagaaagagatttgaaatcatggcgaatgtagtgggacagctaaaacgaggaatctcgagacaattctcaactggatcgcttcgtcgtacgcttagtcgtcaattcacgcgtcaagcttcacatgatcctcgccggaacaatatgcgatttagttttggtcgacaatcgtctttagatccgattcgtcggagtcctgatggttctaacggtccgcagcttgctgtaccggataatctcgacgctactatgcagcttctatttgtggcttgtagaggtgatgttgaaggtgttcaggatctgcttgatgaaggtattgatgttaatagtatcgatcttgatggtcgtacggctcttcatatcgctgcttgtgaaggtcatgtcgatgttgtcaagc

SEQ ID NO: 123649 - DNA, 623 bp, Arabidopsis thaliana
cccacgcgtccgcccacgcgtccgcccacgcgtccgcccacgcgtccggaaggtttgggtttgagtagaaactcagatgaacgttacttggagctaggtcaattagagaatgaaaacaatagttttgctaagcatctagaatctgcaaatacgatgatctcatttatatggtgggttattggattttattgggtatcttctggtggtcaagagttagcacaaggatccccacagctttattggttgtgtatagtctttcttggtttcgatgtgttctttgttgttttctgcgttgcattggcttgtgttatcggcattgctgtttgctgctgcttgccttgcatcattgcagttctatacgccgtagcagaacaggaaggagcttcgaaagaagacattgaccaacttactaaattcaaattccgaaaggttggtgatactatgaaacacactgttgatgaagaacaaggacaaggagattctggaggagtgatgactgaatgtggtacagattcacccgttgaacatgctcttcctcatgaggatgcagaatgctgcatttgtctttccgcttatgaagacgagacagagctaagagaacttccttgtggccaccatttcca

SEQ ID NO: 123650 - DNA, 386 bp, Arabidopsis thaliana
gagaccgctctctcttccttatcctccatcttccaatggtttaatccagcaactgtcgacgatgtcgataacgtactccgctatttcctctagtacagtttctgggttttcaccaaaaagtgtaccttttgctattcagagcgtaaccaggaggcaatttcttaatcccaacacgttttatagatttgggttctctccttctcttcagggaagtagcattgagtttagccttcagttgaattcaagagttgtgcttagtatagagcgtcgatctctgccattagttgtgagaaatgatcgtcctcagaatgaagacttacctaagcagtacacaaggcgagagaagaaacctttcccagtccctattgtggacctgagacgagctg

SEQ ID NO: 123651 - DNA, 598 bp, Arabidopsis thaliana
  unsure (1)..(598): unsure at all n locations
nnnnnnnnnnnnnnnnnnnnnnnnnnnnnnnnnnnnnnnnnnnnnnnnnnnnnnnnnnnnnnggtttcactggtgcgaaactcgatggcgaggaggcgacgttcatcggcggcggagagtttgaaacggcggaacgacggatacgagtcactgtgtcaagtcgtacaacaagattcagatcggagactcatcaccattttcgtaatcttcttcattgtgattcccgccgtttcgattgctgtgtacaaagtcaaattcgctgatcgagtcatccaaacggaatcatcaatacgtcaaaagggaatcgttaaaactgatattaatttccaagaaatcctcactgaacattccaaggcttcagagaattcaactaggcactatgattatccagtgttagcttacattactccatggaactctaaaggctatgatatggcaaagatattcaactcaaagtttacacatttatcgccggtatggtacgacctgaagagccaagggtctggattggttttggaggggagacataatgctgttaagggttggattcaagggctttggtaagggggaatttcctttttttaccagggttttttta

SEQ ID NO: 123652 - DNA, 422 bp, Arabidopsis thaliana
agaaacgtgagaaactttgagaagaccaagaagaagaagcagaagaagaagaaaatgaaattggtttggtctccggaaacagcatcaaaggcttatatagacaccgttaaatcggtaagttttttttttattttccggtgagttgtgaaggaataataacacacgcttcttctctccagttctcgaaaactcagatcttaattttgttaaagattcatggtttgttcttgtaacgatttttttcttttcttttttgttcagtgtgagaatcttgaaacgccggacgcggcggagctaatagcggcgatggcggcgggatggaacgtgaagctgatcgtggaaacttggtcagaaggagacgcaatagcttcaagtattggtttaaacgtagcaagcagacacgcaaacgctaaacacatatg

SEQ ID NO: 123653 - DNA, 630 bp, Arabidopsis thaliana
  unsure (1)..(630): unsure at all n locations
tnttttgtcatncccgtcggnnttcccaccgcggggtttccggtcctgnagaaggnagttaccactttcccccggngntccggccctggatattaccccatccccgcggttatacccggccccaaagcttttgagaaggaagaagaatcccactattcgctatggttcctccagacagtcatcgcagctgctctcacactagtccatgggaccagcgttacctgcctgactggaaagattatgcccggctggtttggttgctgggatcagtgctctcatgacctgtttttacgtatacaagatcgctactggtggcaataaatttccagcaaaagctgaatgatggttctgctacatgcagatgatactatccgttgttgaatttgtcgattagaattctttttggtgtacacaatgcggttgtcataacgccttaatagcttgtattagtcaaagaactgcatatggtcttgtgttttcttgtcatcgtgtttttgtaaccacaaactgttttgagctatactactatatatattgagataaaaaaaaaaaaaaagtnnnnnnnnnnnnnnnnnnnnnnnnnnnnnnnnnnnnnnnnnnnnnnnnnnnnnnnnnnnnnnnntgtcctaa

SEQ ID NO: 123654 - DNA, 611 bp, Arabidopsis thaliana
caaaaatgatggaccgtaagtggaggattagttgtctgaagaccgttgacgaaaaaaggcggaccttttccacgcgctcaccacacaacactttcataaaatcaattcatcgatccatcgtctctatcagatcaattcatcgattgcgatcgctctttcaattttcttcatcaccggtgaaaataatcgaaacccagcacgagaaaaatgcatgatttttgcttcactatcccgtacgggatgcttctcatcggcggaggatttatcgggtacatgaagaaaggaagtataacatctttcgccggaggtgcaggcactggattattactcattctcgctggttatatcagtctcaaagcttttgagaagaagaagaattccactattgctatggttcttcagacagtcatcgcagctgctctcacactagtcatgggacagcgttacttgctgactggaaagattatgccggctggtttggttgctgggatcagtgctctcatgacctgtttttacgtatacaagatcgctactggtggcaataaatttccagcaaaagctgaatgatggttctgctacatgcagatgatactatccgttgttgaatttgt

SEQ ID NO: 123655 - DNA, 935 bp, Arabidopsis thaliana
  unsure (1)..(935): unsure at all n locations
ctaaggagatatgtggggagaaatagatacgaggttttngtacatagctatttcctgtctctnaatattnaaatgtnttgacaaaatcaatgtggagaaggccgttaagtacattgtnagcngcaaaaacctggatggtggttttgggtgcacacctggagcagagtcccatgcaggacaaatttcntcccgcgcggccgctcttgctatcactgggagtctccatcatgttgataaggactcacttggttggtggttatgtgaaagacaattaaaggctgggggcttaaatggacgtcctgagaaactcgctgatgtttgctattcttggtgggtcctatcgagcctaatcatgatagatagagttcactggatcgacaaagcaaagcttgtcaagttcattctggactgtcaggatttggacaacggaggcatctcagaccgacccgaggatgctgttgatatcttccacacctactttggagttgcggggctttccctccttgagtatcctggagtcaaagtaattgatccagcctatgctttgcctgttgatgtcgtcaaccggattatattcaccaaatgactgcaatgggtatatgatcttaatggtcaaacaatatggccgcaaggctctctatatgatttgttcattgaataatttacttggcggttttagaagttatgtatgctcaaggaggaggagattgcaatttgggtatgggaacagtctcaaatctcaatgttgtataacttgctacattattgaggtttctgatgtaatggaaacgaagttgtgttgctgctacattatataaatcacattaatgtgttttttctccccaacaagaagaaaactctcagtgataaaaagaacaaaaacaaagggcggccgctctagaggatccaagcttacgtacgcgtgcatgcgacgt

SEQ ID NO: 123656 - DNA, 484 bp, Arabidopsis thaliana
ttcttcttcttcttcctctctgctttgtctctcttcttcttcaaagtcaaaattcaacagtggttcatgagtggtattgtgatcgatctgttactttcggagtgcgagcaataagaagaggaaggatatgtcgtcactcagcagagaactcgtgtttttgatacttcagtttctcgatgaagagaaattcaaagatactgttcacaggttggagaaagagtctggttttttcttcagcatgaggtactttgaagatagtgtaacagctggtgaatgggatgatgtagagaagtatctttctggattcactagagttgatgataatagatactctatgaaaatatttttcgagattcggaagcagaagtatcttgaagcacttgacaagaaagatcatgccaaggcggttgatattcttgttaaggagttgaaaggtgtctcgacattcaacgaagagctttttaaggagattaccatgctttta

SEQ ID NO: 123657 - DNA, 611 bp, Arabidopsis thaliana
  unsure (1)..(611): unsure at all n locations
cnnnnnnnnnnnnnnnnnnnnnnnnnnnnnnnnnnnnnnnnnnnnnnnnnnnnnnnnnnnnnnnnnnnnnnnccacgcgtccgatttcttcttcttctcctttttcaaaaatttgtcacctccgagatcagatctgatcgtcggaattgagatggcgaggaataaacttgtaagtggtagtcatgggatatggaaatatttcaacccagcgttttatctccgaagaccaagacgtcttgctttgctcatcatcctcttcgtctctgtttcaatggttgtttgggatcgtcaatctctttcccgagactaccagtttgaagtttccaagttaaatgaagaagttttgcggttgcagcagatgttggaagagataaagagcgtcactgaggatgtgtctgtcaatagtttgaaggatgttcaggaagatccagttgatgctcagcgaatgcagagagttaaagaggcaatggttcatgcttggagttcatatgaaaagtatgcctggggacaagatgagcttcagccccagacaaaggatggtgctgacagctttggtggcctgggtgcaactatgatagatgcattagacacactatatataatgggtctag

SEQ ID NO: 123658 - DNA, 837 bp, Arabidopsis thaliana
  unsure (1)..(837): unsure at all n locations
caagctctcatacgactcacatgagggaaagctggtcacgcctgcaggtaccggtccggaattcccgggtcgacccacgcgtccgcccacgcgtgcgcggacgcgtgggcggacgcgtgggcaccgcacctattgatcccaatgccaaagaggtaacgaagcgcgtggactcaaacgagaaacattggtcgggatggaactggagaacggaaggtgacgttatggttaacggagcttttttcgtgccgtcaggtgacggagtgagcccagcgtatgccagagccaccagtgttcagcctaaagccgccgcgatcattgaccagctcacggtcaatgccggcgttttcggcgatccaagtgggagaaacggccaaggaggaagctttcccggaattacgaacggtggtgggaccatcacgcgcggttacagtaaaagtggacctgccggcggtggcagcggcagtgacagtgatgatgggcttttcacattgatattcggtaacaatagcggtgcggtggctctaaggccgggacaggtctggtcgattctattgattatcattttatattggtatattccacaccatacgagatcatagtttcattattggttcatagttacaaaaaaaaaatgaaaagacaaaaaaacgaatatacagatatataggtacacagcacttgcaagttgtaaaaatatgggaaatgtataagatattataaatcttgtttgatgcctaaaaaaaaaaaaaaaaagnnnnnnnnnnnnnnnnnnnnnnnnnnnnnnnnnnnnnnnnnnnnnnnnnnnnnnnnnnnnnnnnnnnnnnnnnnnnnaaaacg

SEQ ID NO: 123659 - DNA, 399 bp, Arabidopsis thaliana
cccacgcgtccggtcatggtttgcctttgtgaggaaggtcgttgcttgagaaaaacccattttctaaaacccttttctacctccatcgatggctctgtagccgagcttccccgtcttgatgatcaacaacgtctctctgattcttctctgcataatacctcttctgggttttgggctgcagatcatcatttcttcctatcatggcttggaaaaatgcaagctttgtatgaacccatttggaaaaaagctggaatttttgaagcaatcaaggcatccacttacaaaatcataaaagacacgtcctcgattctctccattgccgagaaatggtgttctgaaaccaaatctttcatctttccatggggtgaagcaacaattacgttagaggatgtgatggtg

SEQ ID NO: 123660 - DNA, 382 bp, Arabidopsis thaliana
tgatcaattgtcatccgaatgtctacgagacagattaatatctgatgaacgatatagtatggcggtgtatatgtgcaagaaatgcaagattgatgttttccccgtgtggaaagcatggggtcttgctttgttacggatggagcgctatgctcaagctcgagtcaaattcaagcaagcctttcaattaaagggggaagacattcctgatgtcattcaggagataataaatacaatacaaggaggtccgcctgtggatgtgtcaattgtacgttccatgtatgaccatttggcgaaaagcgcacctacaattttggacgattctttatcagcagactcatacctaaatgttctgcatatgccatccactttccctcgttcagag

SEQ ID NO: 123661 - DNA, 747 bp, Arabidopsis thaliana
ctgggttttagttagatggatctctgttgcgaccttctgttgatgattctacttttcgaatgtggagtagatgcaatagtatggggaaatcgtggattcttaatgttgtgaacaaggagatttatgacagtatactttattatgaagatgctgttgagatgtggactgatctatttactcggtttagggtgaataatttgcctaggaagtatcagctggaacaagctgtgatgacactgaagcagggatctcttaatctatccacttactttacaaagaagaaaactctatgggaacaggtgttgaatactaaaactcggagtgtgaagaagtgtgactgtgatcaagtgaaggagctgcttgaagatgctgaaacaagtagagtcattcagtttttgatgggtttaaatgatgactttaatactatcatgagtcagattcttaacatgaagcctagacctggactgaatgaaatttacaacatgcttgatcaagatgagagtcagcgattggttggacatgcttcgaaacctactccctctccggctgcttttcagactcaaggtttgcttactgaacagaatccaatattgatggctcagggaaacttcaagaaacccaaatgtactcactgcaatcgtattggtcacactgttgacaagtgttacaaagttcatggctatcctccgggacatccaagggcaaatcaacagagttcttgtgtaggcagtacaaatctaacaagca

SEQ ID NO: 123662 - DNA, 679 bp, Arabidopsis thaliana
tctgggggccccgccccgaaattccggggtcgacccaccgggtcgcccaaaccttcagatcataaatccaaaaccactcatttttctattactgaaatttttcttagagaagaagaagaagaagcaaaatggccacaagcgcatcagctttgctctcaccaaccacattctccactgcaatctcccacaaaaaccctaactccatctcattccatggccttcgtcccctccgtctaggtggctcctcctccgccctacccaaactatcaaccaccgggagaaaatcctcctccgctgtcgtgagagctgagctaagcccttccatcgtcataagtctcagcacaggtctctccctcttcctcggccgtttcgtcttcttcaacttccagagagagaacgtagcaaaacagggcttaccggagcagaacggaaaaacccatttcgaagctggagatgatcgtgctaaggagtacgtcagtctcttgaaatcgaacgatccaattggattcaacattgttgatgttcttgcttgggggtctattggacacatcgttgcttactacatcttgggtacttccagcaatgggtacggcccaagcttctttggatgattcgtttcaatgtcaatccccggtatggaaggaaaggttgccttgggtaaggattaaccggtcttttc

SEQ ID NO: 123663 - DNA, 610 bp, Arabidopsis thaliana
  unsure (1)..(610): unsure at all n locations
ccggaccgaagtcccggccggcgacgcgcacattgtgccaagcccatcaatttagattttactatccacattctccactgcaatctcccacagaaaccctaactccatctcattccatggccttcgtcccctccgtctagggggctcctcctccgccctacccaaactatcaaccaccgggagaaaatcctcctccgctgtcgtgagagctgagctaagcccttccatcgtcataagtctcagcacaggtctctccctcttcctcggccgtttcgtcttcttcaacttccagagagagaacgtagcaaaacagggcttaccggagcagaacggaaaaacccatttcgaagctggagatgatcgtgctaaggagtacgtcagtctcttgaaatcgaacgatccaattggattcaacattgttgatgttcttgcttggggtctattggacacatcggtgctacaaatcttgggaattccagcaatggtacgaccaagcttctttgntgatcggttcaatgcaatcnccggaaatggaaatggaatggttncttgtgtgnagcaatnaaacggtccaacccggtctctccgtgtgtgtgtgtngggggatnng

SEQ ID NO: 123664 - DNA, 870 bp, Arabidopsis thaliana
gttctagatcgcgggcggccgccctttttttttttttgttcttttttttttttttttttacactaaaactgattcttatattgttcataaagttatatcatacatgaacaatcccacaatataggatccgtggagtacattttactgtatattactcttagagaagaagaagaagaagcaaaatggccacaagcgcatcagctttgctctcaccaaccacattctccactgcaatctcccacaaaaaccctaactccatctcattccatggccttcgtcccctccgtctaggtggctcctcctccgccctacccaaactatcaaccaccgggagaaaatcctcctccactgtcgtgagagctgagctaagcccttccatcgtcataagtctcagcacaggtctctccctcttcctcggtcgtttcgtcttcttcaacttccagagagagaacgtagcaaaacagggcttaccggagcagaacggaaaaacccatttcgaagctggagatgatcgtgctaaggagtacgtcagtctcttgaaatcgaacgatccaattggattcaacattgttgatgttcttgcttggggttctattggacacatcgttgcttactacatcttggctacttccagcaatggatacgacccaagcttctttggatgattcgtttcaatgtcaatctctcgtatatgtatatgtatatgtttgacttgtgttgcaagctatctaatctgttctctatctctgtttcttcttctgttgttgttgttgttgtctaagacttgtccctctttttgcaaatgttttatttctccatttacaaagattggtttgcagagttttataaggaggacataatagtatataa

SEQ ID NO: 123665 - DNA, 367 bp, Arabidopsis thaliana
agaccacgcgtccgggctacttccgtcttccggcgactcgcgaggtcagcgcccattacattccctgtcgcatttggatctcaaagcaaatctggttctggcgctttccggttctccaccggtgcaatcgcggcactttccggtggattctcctattactacttgacatccggcaacaatctggtttatctggatcaagctaaggaagagacaggaccaaaaaccgctctaaaccctgataaatggctcgagttcaagcttcaagacactgctagagttagccacaacactcagttgttcaggttctcatttgacccctcagctgagttgggtctacatgttgcttcttgtctcctgacaatggctc

SEQ ID NO: 123666 - DNA, 937 bp, Arabidopsis thaliana
  unsure (1)..(937): unsure at all n locations
agaaagctctgaaagacatagtgggcnnggaaaatggcttttctctcttctctctttcgtccgcgcttttctctcttcagtgatttcacagatctgttccgacatcaatggcttttttagcgttgattggtcggctctactccgaaatcgtctgactttcacagcagcgatgttcggctcttacgtcccgttttaatcgggctctcgttcggcacctccagctttttcagtgaagatgaccgactcttttcccgacagcatacggctccatcagcggtgttggtcggattttagttttactttggccatagatgagttactctcaccttttggtctttgttttcccttcaataatttcagcaattatgtgttggtgataacgatttaggtgctatgttgcttaaactgttgattatccgactcatgttgtttgaagcttggttttacaggaattattattaagatttgcagtttataattgaagagaagaagaagatttcgaagcatattacacaattcctttagctgctatatttcagtttggagtttcgattgtcctatttctggtgaaaactcaaagattcatgtttcgatttttgtatcgacggtgactctttcaccagaatcgagctcgtacggcggaggctgaatcggaatcctttaggttactcatccccacatgtctgatttgtatttcactactgacacgttgcgtttggatggagacaagatgccaactcttcttcaatataatgtgatcttgggctttacttaatcttgtaaaatttaagtgtgggctgtggtttgttttagcccatttatgtatggtttgttctttcaataaaatatgagacaaaaaaaaaagatatcatgtgggtttaagcaaaaaaaatnnnnnnnnnnnnnnnnnnnnnnnnnnnnnnnnnnnnnnnnnnnn

SEQ ID NO: 123667 - DNA, 406 bp, Arabidopsis thaliana
acggacgcgtgggcggacgcgtgggttgcgatcgagttaccgggaagcgatggatactgccagagcatggctgaagaaattaaagtctaaagggaaagagaaatcttcgaataagaaggaaacttctagaggaaatgttaaggagggatcaaaaacagctggaggtgaagaagctgtgtctaatgtgacaaagcagaaggctgctgctgcgaaacagtatattgaaaatcattacaaaaaacaagttcaaagtcagcagcaaagaaaagagcggcgtgatatgctggaaaataagttagctgctgcagaagtctctgaggaagagcaaaagaatctgcttaaggatctagagaagaaggaaactgaatacatgcgccgtcagagacataaaatgggaactgatgac

SEQ ID NO: 123668 - DNA, 585 bp, Arabidopsis thaliana
  unsure (1)..(585): unsure at all n locations
gctggnacgcctgcaggtaccggtcccctattcccggggcgacacccgcgtccgctcacagaaaaccaaaaaaaaaatggactccaaaacaacttttctcacatttctcctctgtattttcattttctctcatttttcaccctcaacttccaaatctctgacagaaaagcccttatctttctcaccgtcggcgagtttgccgactctcacggcggagagacttatcaaaggattcaatttgatgcctacacgcgacgtcaatgtcatcgatgaagaaggttctgaggctccgagactggtcgagagagcattcgatttgccggcggcggttgaccgtcgtggctccggtggttctccgtcggttcaagattttggtcaccatgctggttactacaaactccctaactcaaaagcagcaaggatgttctactttttcttcgagtcaaggacgaacaaagccgatccagtggtgatttggctaaccggtggaccaggttgcagtagtgaactggctctgttctacgagaacggaccgttcaccgtctctaacaactcatctctttcttggaacgaatttggttggga

SEQ ID NO: 123669 - DNA, 618 bp, Arabidopsis thaliana
acggacgcgtgggcacaaaacagcgacattcgacgccaaatacataacatcgtcgtcaacagcaaaatggctaggtctggggttgatgagacatcagaatctggagcttttgtaagaacagcatcaacattccgcaactttgtttcacaagatcctgattctcagtttccagctgaatcaggaagataccatctttacatatcttatgcttgtccatgggcttgtagatgtctttcttacttaaagatcaaaggacttgatgaagcaatcaccttctcgtcggttcatgccatttggggaagaaccaaggaaactgatgatcatagaggatgggttttcccggattcggataccgagctccctggagctgagcctgactatcttaatggtgccaaaagtgtgagagaactctacgagattgctagcccaaactatgaagggaagtacactgttcctgttctttgggataagaagcttaagactgttgttaacaatgagagttcagagataatccggatgttcaacactgagttcattggtaatgcgaaaagcccgtcacttgacctttatccttcacatctcatagacgtactcagcgagactaactgatgggttttc

SEQ ID NO: 123670 - DNA, 567 bp, Arabidopsis thaliana
  unsure (1)..(567): unsure at all n locations
nnnnnnnnnnnnnnnnnnnnnnnnnnnnnnnnnnnnnnnnnnnnnnnnnnnnnnnnnnnnnnnnnnnnnncccacgcgtccgcccacgcgtgcgccagaaatagccaacggatccgccatgactgctcgtaagagaactccttcagtgtccaattcggagaaactagctctacctgaacctgcatcttccccgacggttcagaagacctctgtttccggagaggatttccagctcgcgccgccgaaattgggcgtgattttcgtgatctcttcgcttctgtgttcgctttatctttaccttctctgtttccactacaatgttgacaatgagctcaagcgtccgatcctcattaacgctgggcttagcttggttggattctttgtcacactcaagttgattcctgtagctgctagatacgttctgaggcgtaatatgtttggttttgatatcaacaaaagaggcactcctcaaggagaagttagagtgcctgagtcattgggaattgttgtcggtattgtcttcttgatagtggcgattgtatttcagttctttaatttcactgaaga

SEQ ID NO: 123671 - DNA, 447 bp, Arabidopsis thaliana
gatcgccatatcgttgatcaagaccagagcgtcgtcgatccggccgagtttgcagagacgagcgatgagagtttcgtaggagtgtttccgagtgtagccggcgtcggtctgaggcaaaatacggcggagatcttctaaggaggaggagtaagagtctgtgtttgttaggaatttgaaagtagctgtcgtgttgaaacacgcgtttacgacgcggctgttgaggagacgacgtacggcttcgaaatcgccggagcttccggctttgaagctgacgttatcgaattcgacgcaagtacgacgaccaggtgaagcagttggattgggattcacggtggagaatgtacgtcccgagattgattgaagcagaaatctggaattggtcgcatctttacacgaatcgtcggagaagagacatcgtgtgattcaggtcaacggagattaggggtt

SEQ ID NO: 123672 - DNA, 708 bp, Arabidopsis thaliana
  unsure (1)..(708): unsure at all n locations
acaagaaacgcggattaaagcccgcgaaacagccttggcttaacctttacaattacgacccaccaaaatacgcaaactccaagctcaaatacacagaccaattcagatttcttgataaagccgctatcttgactcctgaagacaagttgcagccagatggtaagcctgctgatccttggaagctctgtacaatgcaacaagttgaagaagtgaagtgcatcgtgagagtgcttcctatatggtttgcatcatcaatttactacttaaccataactcaacaaatgacttatcccgtcttccaagcccttcagagcgaccgtcgcttaggctcaggaggttttgtgattcccgcagccacctacgtggttttcttgatgacgggaatgacagttttcatcgtagtctacgaccgtgtacttgtgccaaccatgagaagaattactggtctagacaccgggataacgctctttgcagagaattggaactggcattttcttcgctaccgcgagtttagtagtcgcgggatttgtcgaggaacgaaggagaacattcgctctgactaaaccaacactcggtatggcgccaagaaagggngaaatctcgtccgatgtcaagctatgtggctgattccgcagctcttaactggcgggtttngncaaaaggccattttccagccatttnggncaaantgggngtttttacctncaa

SEQ ID NO: 123673 - DNA, 787 bp, Arabidopsis thaliana
  unsure (1)..(787): unsure at all n locations
nnnnnnnnnnnnnnnnnnnnnnnnnnnnnnnnnnnnnnnnnnnnnnnnnnnnnnnnnnnnnnnnnnnnnnnnnnnnnnnnnnnnccacgcgtccgcccacgcgtccgcccacgcgtccgtacggctgcgaaagacgacagaagggataacacaaatacaaaaaaaaaaaaaacagaaagtaacatgagatctctcttattagccgtgtgcctggttcttgctttacactgcggtgaagcagccgtgtcttgcaacacggtgattgcggatctttacccttgcttatcctacgtgactcagggcggaccggtcccaaccctctgctgcaacggtctcacaacactcaagagtcaggctcaaacttctgtggaccgtcagggggtctgtcgttgcatcaaatctgctattggaggactcactctctctcctagaaccatccaaaatgctttggaattgccttctaaatgtggtgtcgatctcccttacaagttcagcccttccactgactgcgacagtatccagtgagacaagcagaaaatcttaaaggaagctactacaagaactataataacctaataattaataaatgagggcattggtttgctagttgctaattgatcagtggatgtattgtcattttgaatgttctaatatcagcaggcacttatctctgaaacattctccatgcttccacccctaaaaaaaaaaaaaaaaaaaaaaaaaaaaagcgaccgctctagaggatccaagcttacgtacgcgtgcatgcgacgtcaagactcttcta

SEQ ID NO: 123674 - DNA, 629 bp, Arabidopsis thaliana
  unsure (1)..(629): unsure at all n locations
ggaanttgtcccntnaggtccggncggaatcccgggngnccncggtccgaaaaaaaccggaagtacatgngaccccttattacccgtgtgcctggtcttgcttttacactgcggtgaagcagccgttctngcaacccggtgattgcggatctttacccttgcttatcctacgtgactcagggcggaccggtcccaaccctctgctgcaacggtctcacaaacactcaagagtcaggctcaaacttctgtggaccgtcagggggtctgtcgttgcatcaaatctgctattggaggactcactctctctcctagaaccatccaaaatgctttggaattgccttctaaatggggtgtcgatctccctcacaagttcagcccttcctctccctgcgccagtatccagtgagccaagcagataatcttaaagggggctactacaagacctattttaacctaatgattaataaatgagggcattggtttgctagttgctaattgatcagtgaatgtattgtcattttgtttgttctaatatcagcaggcacttatctctgaaaaaaaaaaaaaaaaaaaaagggcggccgctctagaggatccaagcttacgtacgcgtgcatgcgacgtcatag

SEQ ID NO: 123675 - DNA, 445 bp, Arabidopsis thaliana
cccacgcgtccgcccacgcgtccgcccacgcgtccgcccacgcgtccgaaagaaaagaaaaacagaaagtaacatgagatctctcttattagccgtgtgcctggttcttgctttacactgcggtgaagcagccgtgtcttgcaacacggtgattgcggatctttacccttgcttatcctacgtgactcagggcggaccggtcccaaccctctgctgcaacggtctcacaacactcaagagtcaggctcaaacttctgtggaccgtcagggggtctgtcgttgcatcaaatctgctattggaggactcactctctctcctagaaccatccaaaatgctttggaattgccttctaaatgtggtgtcgatctcccttacaagttcagcccttccactgactgcgacaggtaaagagtacatctcactctctctctttgtgattactga

SEQ ID NO: 123676 - DNA, 610 bp, Arabidopsis thaliana
  unsure (1)..(610): unsure at all n locations
cttccgaacctttttggttccgccttctccgattcgctttacactacttcttccctcgtctctctctctcgcgcttcactgtgaattaatcgagagatctaaatatccgccatggacagagcacaattgatcttgttaggtctacctatattcttgttttgttcggatctcttcaacctcttcactcctccgcctcctaaacctcagcctcaccgtcctcatcagccaccgcatattcctcaccagcatcgtcctaatgcgatcatccccgaaaccctagactttccttcacagaagacaagtggcttaggaggagcaattggatatggaaatacagtagagatcaacttctgcgtctcctgttcttacaagggaactgcagtcaccatgaagaagatgttagagacggcttttcccggtttagatgtgattctcgcaaattacccaccaccagcaccaaaacgcctttctagctaaagggttgtacgccgggttggtccagatcggggagttatttgggaatgaatagnttgcanggtngatccgnattcccttccaatgnttgggattacggacccacctngtttnggttccactcctttnggggcaa

SEQ ID NO: 123677 - DNA, 676 bp, Arabidopsis thaliana
cggacgcgtgggaaatcactcgagaattcgctattttatcaccaatcttcttgaatcctctcatccaatcgtctgattctcatctttctccgttacttgtggatcttacgcaatgtatagagtttttgcgagccgagcactgagagctaagtctctctgtgacaaatcatccacctcgcttgcttctttgactctctccagattgaatcattccataccttttgctaccgtagatgccgaggagctctctggtgctcatcctgctgaagtacagagctttgtgcagggaaagtggataggatcgtcaaatcataacacgcttctagatcctctaaatggagaaccgtttatcaaagttgcggaagtggatgaatcaggaactcagccatttgtggacagcttatcccagtgcccgaaacatggtctccataaccctttcaaatctccagagagataccttttatatggagatatctcgacaaaggcagctcatatgctcgccttacctaaggttgctgatttcttcgcgaggttaattcaaagggttgctccaaagagttaccagcaagctgctggagaagtctttgtcacacggaagtttttagaaaacttttgtggtgatcaggtgcggttcctggcacggtcttttgcaatccctgggaatcatcttgggcag

SEQ ID NO: 123678 - DNA, 831 bp, Arabidopsis thaliana
  unsure (1)..(831): unsure at all n locations
ccnnnnnnnnnnnnnnnnnnnnnnnnnnnnnnnnnnnnnnnnnnnnnnnnnnnnnnnnnnnnnnnnnnnnnnccacgcgtgcggtggaattcactaaaccaatgaaaatgcaagcagttcttgttatcttggttttctccggtttactttcggttaagacagcgttagcagcacgacatgtgatcggcgggagccaaggctgggaacaatccgttgattttgattcttggtcttctgatcaatctttcaaagtcggcgaccaaatcgtttttaagtattcagaactacacagcgttgtggagctaggaagtgaaacagcatacaagagttgtgacctgggaacatcagttaattccttaagctctggaaacgacgtcgttaagctttctaaaaccggtactcgttacttcgcttgtggaaccgttgggcattgcgaacaaggcatgaagattaaagtcaacgttgtctcttctgactccaaatccgcttcctctccttcaggttcgggttcgggttcagattcagggtcgggttctacatctagttcgggtgatgggctacgcgcttcccttgggtacatgttcgttgttggatcgttggttattggtcttatttgggctcactaataattgtctagggcttttttgtaatgtatcgaatatatttggccggggagagaataaatatttttggaattattaattcgtacttgttgttgtattttatatagttcggatatttgcatttctgatctaattttctataaaaaaaaaaaaaaagggcggccgctctagaggatccaagctcacgtacgcgtgcatgcgccgtcat

SEQ ID NO: 123679 - DNA, 694 bp, Arabidopsis thaliana
  unsure (1)..(694): unsure at all n locations
acgactcctttagggaaagcacgtacgcctgcaggtaccggtccggaattcccgggtcgacccacgcggtncgaacatagggtcttatcaatattttgcaaataaaccaaaattaaatacagacttgtttaatttctgaatctctctcttcctctttctcgcgagctttttctctctgggtttagggttccggtaattttgcgacgacaccgagcgattcgtgcctccctccccttcctttgacttcggttctaacttgattaccagtgagaagtaggctaagatggaaatcatgtcaagagagaatgagactgctttgtcaggtcctaggccgatggaatggtctaccgtcccacacagtgcttctcaaggacctggtcccaatggcaagaaccggacctcgagcttggaagcacctatcatgttgctaagtggacatccgagtgctgtctataccatgaagttcaatcctgctggaactctgattgcatctggatcccatgacagagaaatcttcctctggagagttcacggggactgcaaaaacttcatggttttgaaaggtcacaagaacgccatccttgatcttcattggaccagtgatggctcccagattgtatcagctagtccggataaaactgtaagggctgggggatgtgagacttggaaacaaatcaagaagatggctgaacat

SEQ ID NO: 123680 - DNA, 507 bp, Arabidopsis thaliana
ggaaggctggtccgcctgcaggtcccggtccggatttcctgggtggacccaggcgtccgattcaatcgagtcgggattgcttccccttactccgttcggcttctgtcagtaaaacctatttcaaatgtcgatgatgcgaagtttcgatctcaggaagaagaagatcagtccagttacgatcagaaaacagtatgcgaagctctcacatgttacagcaacgattggcaaaaggcgttggagtttttcaactgggtcgagagagaatccggattcagacataccaccgagacattcaatcgggtgatcgatattctgggtaagtatttcgagtttgaaatttcttgggctttgattaaccgcatgatcggaaacacggaatctgtgccgaatcacgtcacgtttcgtatagtctttaagcgttatgtgacggctcatcttgttcaggaggctattgatgcgtatgataaattggatgatttcaatttgagagatgagacatcattttat

SEQ ID NO: 123681 - DNA, 482 bp, Arabidopsis thaliana
gggaaacaagagaatgctcttgttgcggcgactcaatcgtgttcggattgcttccccttactccggtcggcttctgtcagtaaaacctatttcatatgtcgatgatgcgaagtttcgatctcaggaagaagaagatccgtccaggtacgatcagaaaacaggatgcgaagctctcacatgttacagcatcgattggcatatggcgttggagtttttcaactgggtcgagagagaatccggattcagacataccaccgagacattcaatcgggtgatcgatattctgggaggctattgatgcgtatgataaattggatgatgtcaatttgaggggatgaaacatcattttataatctggtcgatgcgctttgcgggcataaacatgtggttgaggctgaagagctttgttttgggaagaatgtcatgggtcatggttttagtgggagtaatactaagattcataatctgattcttcgcgggtg

SEQ ID NO: 123682 - DNA, 644 bp, Arabidopsis thaliana
  unsure (1)..(644): unsure at all n locations
tgatactccnnnnnnnnnnnnnnnnnnnnnnnnnnnnnnnnnnnnnnnnnnnnnnnnnnnnnnnnnnnnnnnnnnnnacgccacgcgtctcgctgtctgaactgaaaaataagatcgcattaactcaaaactctcacaaagacaaagatcttctcctccttctcttctctttttcacttttctctcttcccctctctcgaagcttgaaaggtaacaacaatggagaaccctccggatcaaacagagtcaaaggagactcttcaacaacccattacaagaagaagaacaaagggtggtcttctcactatgcccttcatcattgcaaacgaggggttcgagaaagtggcgagctatggattattacagaacatgattctttatctgatgagtgattacagattgggacttgttaaaggacaaactgtcttgttcatgtgggttgctgctactaatttcatgcctctcgttggagcttttctctcagattcatatttgggtcgctttctcaccattgtcattgcttctctctccagtctcctggggatggtggttctttggctaacggnggtnttnccgaaagnaaaccataccgttgtngaacagccgnnccacttnanttccggggattttttaattggtttttc

SEQ ID NO: 123683 - DNA, 387 bp, Arabidopsis thaliana
ggttcttgtgactcagtactttgacacattgaaggaaattggtgcttcttcgaagtcaaactcggtgttcataccgcacggtccaggcgctgttagggacattgcttcacagatcagggatggtcttcttcagggtaactctgctgctgagtagagaaatgtctcaaagtacaaaaaggctttttcagagttttagagttgtgttactacttgctactcagtttatcttttagcggttggctctatatgggttcttaaatttcttatcgtttctctcttctaggcttgtggacttgatccattttcttgttttatgggtttgtggatagagtttgggcttgaaaaatatttgtgttattttgggttttaatgtcgttaactcgttat

SEQ ID NO: 123684 - DNA, 719 bp, Arabidopsis thaliana
  unsure (1)..(719): unsure at all n locations
atacgaatcaatttaagggaaaagcttgtgccccctccggtacccgtcccgaatttcccgggtcaaccaacgctgccgggaggctaaggtctgacgacgaggcctttggtatttatgatgagctcttctcttacgcatgccccaagtttatcaccccttccgcaccaccaactttcgaggaacctcttgtcaattacaatcaggatgcatacaggcttcagctgaagatgttcctttacgaggtaaagcagcagcagctcttgtcgggagtgcggactttcctgaaagtctactcctccatttctcttgctaagctcgcaaactacatggaagttgatgagcccactctaaggaccatattgttaacatacaagcacaagacccattcagttgattccgatggtaggatcatctccaatgcagacattgatttcttcatcaacaacgacatgatctacgttgtcgaatcaaaacccgcaaaacgttatggtgatttcttcttgcggcagattgccaagcttgaaggtgtgatcaccgacatggatcgtgtcaagctggaatgacgacttttctgtgttatacctaatcatcaatgcccaatctgatatgatgctttctcttataaaccatatgnttacttaaagccaaacacttttttgaggtagctgtcttcatgtgggcaaatggtaaccataaatcatctttcttagggatnggac

SEQ ID NO: 123685 - DNA, 415 bp, Arabidopsis thaliana
  unsure (1)..(415): unsure at all n locations
acgcggacgcgtgggcggacgcgtgggtttcgagaaattcgaacccatatttggagaagtcgtacccgaacgttcggatccgggttcgggtctactccggcgatgtctcttccacgtctacgcttccgattcgtataacttaacagttcatgtcactgacttcatctccggtgtctggacgacgatcctctccgtctcgcagctagacgatatgagggatactgttgggattggtggttcgtggtctgagttcgtcgattatactgttgcttccttgaaatccgacaatgtgaagcttctcttgggagaaacttcagtttcaaatggtgtcaaaactgcgcgattagtttctcagaaagccaaaggaatgcctcgcataaatgttcctttaacanagatggtggaatcatctgct

SEQ ID NO: 123686 - DNA, 849 bp, Arabidopsis thaliana
ctgcgagatgtttacagaagggggggagtgggaatcgatttcttgtgtgtctgtagctacggattcgattcgagtgaccaaaggaactcgatttattggttctaaagtctccaaatcagaaaattcagagacgagccctaaatggcagctccggaagattcaaagatgtctccggcgaattcgtttggagctgtcgttctcggcggtacgtttgatcgattacacgatgggcatcgaatgttcctcaaggcggcggcggagctggccagggatcggatcgtagtgggagtctgtgatggcccaatgttgacgaaaaagcaattctctgacatgattcaacccattgaagaaaggatgcgtaatgtggagacctatgtcaagtctatcaagcccgagctggttgtacaagccgaacccattacagatccatatggcccttctatcgtagatgaaaatttggaagctattgttgtcagcaaagagacattacctggtggcttgtcagttaacagaaaaagagcagaaagaggtctttcacagcttaagattgaagttgtggaaatagtttctgatggatcgagtggaaataagataagttcaagtactctgagaaaaatggaggctgagaaagcgtctaaacaaaaacaaccagcagaagaaaaagcatcatgaactcatcatatataaactctcaactttgcatgtaatttaatactcttttgtatactcaaaatgctgtaaattggatgcaatagatcaataaaggtccaagctttgcattctttaactcggaatatgaaccagtcctgtaaaatcaacttttggccaataaaggtcaagactttttgc

SEQ ID NO: 123687 - DNA, 526 bp, Arabidopsis thaliana
  unsure (1)..(526): unsure at all n locations
atgatttgccnnnnnnnnnnnnnnnnnnnnnnnnnnnnnnnnnnnnnnnnnnnnnnnnnnnnnnaccacgcgtccgctcatccacgcgtccgaataagagtttctctgtcttaaactcattcattctttctctctctataaccagagttctgtctgtgaaaacacacaaatctaagagaagttatgaataaacaagatgttatgaaacttcagacttgtgttctgaaagtgaacgtacactgtgaagggtgtaagcataaagtgaagaaacaattgcagaaaatcgaaggtgtttactctgtaaaagcagatgtagaacaggggagagttactgttacagggaacattgacccagctcttctggttaagaaacttagcaaatcaggcaaacatgccgagatcttaggcggtggtggaggaggaggcggcggaggtggaaaggggtttcctaatctgaatgggcaatttgcaaatctcaacatgggtggaaacaataagcctaaaggtggaaaagagagtaaccaag

SEQ ID NO: 123688 - DNA, 1401 bp, Arabidopsis thaliana
  unsure (1)..(1401): unsure at all n locations
gagtgtttctctctacagnttttagagggaaccgtcggttcacggacgcgtgggttcagtgggagttgttgggtgatcggtccgaggcgacatacaagatgaccggaaactcttttaactcgatgaaagatttcctgaagcagacaggcggctatgcggtaatagacggagggcttgcaacggagttcgagagacatggagcagatctcaacgatcctctctggagcgccaaatgccttgtcacctctcctcacctcattcacaccgtgcatctcgattaccttgaagctggtgctgatatcatctccagcgcttcttatcaggccacgattcaggggtttgaagcaaagggattttctagagaagagagcgaatctttgcttaaaaagagcgtagaaatagcgactgaagctcggaactcgtattatgacaaatgcggaactagctcttccatggatgataagattctcaaaaagcgccctatattagttgcagcatcagttggtagctacggtgcatacttggctgatgggtctgaatacagtggaatctatggtgattcgatcacgctggaaaagctgaaggattttcaccgcagacgactccaagttctggcggaatctggtgctgatttaatagcatttgagaccattccaaacaagatagaggctcaggcatttgctgatctattagaagagggagatgtgaagattcctgggtggttttcattcaactcaaaggatggcgtaaacgtggttagcggggattccatcaaggagtgtatctccatagctgaaaattgtgagaaagtagtggcggttggaatcaactgtacccctccaagattcatagaggggctagttttggagatagaaaaggtgacaagcaagcccatactagtgtacccaaacagcggagaaagctatgatgctgatcggaaggagtgggtggaaaacacaggagttggggatgaagactttgtatcatacgtagagaaatggatggatgcaggagtgtctctcctgggaggttgctgccgcacaacaccaaccaccatcagagccatccacaagagactcgtcaaccgcagatctctttagcattcaacttcactctcttctatgaatctctagaaccttggcaatagatttctaccaaaaacatgaatgtttgtcttccctttgccaattacaaatctaatttcaaggataggcgtgactgcatttaagcttggatgttaatttgaaagttttcatcttgcatgagaagaaatcttggatgttttacatcaacctcgcctggatacaaggctgttgatttatatgtgcttgagagatctctgctcttaatgcattctatatgcggaaatgtggtgagagcgattgtaaaatacccttcatt

SEQ ID NO: 123689 - DNA, 586 bp, Arabidopsis thaliana
  unsure (1)..(586): unsure at all n locations
nnnnnnnnnnnnnnnnnnnnnnnnnnnnnnnnnnnnnnnnnnnnnnnnnnnnaagcggacgcgtgggtttttaaattagggttcttcagatcgacaaatctttctctttctctttccccgatcggaatcatgctaaagatctgaactttttctcagatccgtgaataagtaagtacggagagacagaaacatactcagactgatctgaggaaaacaaagttgatggtcgcaaacctgtaagtgaaatctatagagagagacgttgaagaagaaaatgggtcaagatggttcgccggcgcataaaagaccatccggaagcggcggaggacttccgacgacgacgttaaccaacggtggaggaagaggtggtcgtggtggtttgttacctcgaggtagacagatgcagaagacgtttaacaacatcaagatcacaattctctgtggtttcgtcacaattctcgtcttacgtggcactatcggtgttgggaacctaggaagctcaagcgccgatgcagttaaccagaacatcattgaggagactaaccggattctagctgaaatccgatctgattcggatccaaccgac

SEQ ID NO: 123690 - DNA, 574 bp, Arabidopsis thaliana
agccaattttcatcttcccttttaggttggaattttgagttttatcttcccatttctggattttgtttctctctagtctattccttcaaaaccaagaacccaactttgttttatattcaaaagttgtttgctttcatcgcgtttggtgttcatcttcatctggtttgagattataataacatggaaggaatcattgtgagaagagttataccatctgataacagttgtctcttcaatgcaatcggttatgtcatggacaaggacaaaaacaaagctcctgagctcagacaggtgatagcagcagcagttgcaagcaacaaggagaaatataatgaagcatttctagggaagctcaatgaagaatattgtgcttggattctcaatccagacaagtggggaggtgcgattgagctttcgatattagcagattattatggtcgagaaattgcagcttacgacattcaaactagtcgatgtgacttgtatggacagacgagaaactacgacgaaagagttatgctgatctatgacggtcttcattacgatgctcttgctctgtctccatttgaagggg

SEQ ID NO: 123691 - DNA, 329 bp, Arabidopsis thaliana
cccacgcgtccgctatgaataacgatctcattgagacgacgatcacttcaccgtcccagtcatgggtcgaaggcatggtatcggtaaaggtatctcggcatctgctttgccatataagcgttcatctccgagctggctcaagacagtccctcaagatgtcgatgagtctatctgcaaagttgcgaacacaggtttgaccccagcgcatattggtgtcactcatcgtgactcacacgggattccatatgtgaaaagtgttactggcagcaatattctcacaaatttgcaagctcatggtcttgcacctgatatgtctgacgatctgtatc

SEQ ID NO: 123692 - DNA, 564 bp, Arabidopsis thaliana
  unsure (1)..(564): unsure at all n locations
tatnnnnnnnnnnnnnnnnnnnnnnnnnnnnnnnnnnnnnnnnnnnnnnnnnnnnnnnnnnnnnnnnnnnnnnctcgcaacgtagatcctggtgaagccaaaggcatcgtgagcaaaatccgcagttttctacattaatggattgtttctgttctagagcttctcttccgtctctgtgatttctgggtagattctaggatttctatttgcatctctaacctgagagctgctaatagtccacacaactttttagtttgtgagttttcctaatttagggttaggacaaatttctgtatttttcatccaaggggataaagatgtatgctgataaattggaggctgagtctggaagcaggaaggtcgttaaggatcgtatcaatggcggttctggagacatctctactcgcgtgcgacaagtgactgggaagaggcaaaggcaggacgacaaatgggagcatgatcttttcagtagtgacaaacctcaactttcaaatcgcaggggtgatcctagagaacttcgtttgaagctccaaaagagacatcatgggtctcaaagtgggcgag

SEQ ID NO: 123693 - DNA, 985 bp, Arabidopsis thaliana
caagagtgtctaagtcagcttcaacaataagttcaatgtctacttctcgctcttcagtaaagaaggaaagtgtctctgctttactgagaaagaaacaaaccgctccaaagtcattgcccatttctctcaatgtggatcagtcggtctccgatcctactgctgttccaacaacaagaaaatcgttgatcatggaacgaatgggagataaagacatcgttagacgtgcatttaagagttttcagaagagtttcgaccaaatgaaatctactgatgatgggcaagatacagctccaaagcaggttcttgcaaaggcaactgctgttcagaggttaggtacaactggtcagaaaaatgtcaggcttgcaaaatcagatggcacggagagaaaaggtcctaactctcaccgttcttcatctgttgtatcaaaaagcaacgggacagccgagaaacagaaggacccttctaggcttggcacaagagctgtagagaggatacatttacaggcgaaaccgaaggcagaagcaagcaatgtcaaaactcggaggcaaagtctaaatccaaaagaaaaccccattcaaggacctctcccaaaaggctattcagacaaagtactatgatgtagcagtcttcatttcacgaactttgatatgtaacaggtgactattgtttttatctgatcttctgaagcacaaggctaagggctccaccaacatttttcagcaaaaagatcaaatatctccaaactttcaaatgatgtttgttatatagagaagtcattacgtttgtggagaagtaagtattatacagtcttgtgtcaatgtatgtgtatagagtctgtagactataaacgtgaggatgatgttattaacatacttgaatatccatcctgttatttttaaaaaaaaaaaaaaaagggcggccgctttagaggatccaagcttacgtacgcgtgcatgcgacgtcatgcttcttcataggtcacgca

SEQ ID NO: 123694 - DNA, 605 bp, Arabidopsis thaliana
  unsure (1)..(605): unsure at all n locations
taggtaccactatagaagagtctatgacgtcgcctgcacgcgtacgtaagctcggaattcggcgagaagataaatccgatctaggtctcttcttccccaatctctctgtgtctctctcgatcgaagaaagaagacaatggacaaaggcaaagcagtgatgggtactggtcggagatgggccgtcgaattctccgatcaatctactgttccatcttcccgtgacatcctcgatccacctggcttctctcgtgcctctcaggaacaggatgattcagcaaacagccgccaaaagaaagacgctgaagctacttggaaacttcagaaagcgtgggaagtagcgcaatctccatttaagaatttgatgatgatgggtttcatgatgtggatggctggaaacacagttcatctttttagtattggtattactttctctgctctttggcagcctatcagtgctcttcagagtgttggaaagatttttgagcctttcaagggttacaaaaggtggaccttccttatgcccgaaatttagggttccttccctaaaccttttggggggaantttggggctttgagnttannctttggggtntccacaatatgta

SEQ ID NO: 123695 - DNA, 683 bp, Arabidopsis thaliana
atgactcactatagggaaagctggtacgcctgcaggtaccggtccggaattcccgggtcgacccacgcgtcctcccacgcgtccgcagaaaccctaacttcaacgggaactcaaaaatcagaatctccagatcgagagcttaaaaagtcgatttcaattcccctttaagattttttgcttttggaatgtagtgtgaagaagaaaccctagttttttctcacttgaattctctgccttctttagtaatgtcaagtgagcagcgagaaggttcgcaagagacgacgacgacgacggtggaaggtaacggaacaattgcaggtcagaattctcattcggcggctcccacgacattgagagctacctctacgatggtttcttgccagagactaaggctaaaccctaacaacgagcatagacccgatagttatgaagatctgcagcttgatttcccaaactcggtatattctagtctggagaagtacttgcctccgaatatgctcgtctcgaatcgtgatgagaaaatcaaattcatgactgatattatgcttatgcatcttcctcatggagagcgttccagagctcaaaggcacagtgactataggctgaagattacaacaaattatcagccacttcacatggagttgtatactctatttcccacagtatggttccgtcctgctttc

SEQ ID NO: 123696 - DNA, 1556 bp, Arabidopsis thaliana
cgcggtaccggtccggaattcccgggtcggacgcgtggggttaaagccactcatttgtttcatcgatcctacttcctcctgtgtcactgcaatcactcgctcgtccttttctctatttcttcaccgatcgaatcaatcagagatggagcatgaatctatcaccgctcgacgcaggctcgctgccttcgccgctcacttcccggcaaccagttacgattccgcctccaccgcatctctcgtccccttgaactgcagcagcagtttgaacactgtcatccaaaggtgtgacaacaaaatctcttttgcccggcaagcatcatctgaacagggcttttttatgaggccagcttcacccgatgatgtccttgagaacttaggtatgaatttgaagaacactgtcgttagaaggggtgacaacaggctgtattttgctcggcaagcatcttctgcacaaggtttttttatgagacaggcttcgactaatgagaggaccataccacatgatgctgctgcatctaccaagttttctgctaccaaaacaactggcttcgattcttcttcacctgcgtacgctgcaccacacttttctaagcctgcaaaagaggacatcttttttccttctttatcaccaaatctgcaaaaggaagggcctaagcttgatcttcctaagttagccaatttaggtactgtttggtctcccagatcgaatgttgctgaatcgacacacagctatgttgtggcaatagagctaccaggagccagtatcaatgatataagagtggaggttgacaacacaaacttgactgtgacaggtagacgcacatctatctgtcaaaaagttgatgcaggcaccaaagcttcgatccttggatatcataagcaagaaatactacaaggaccattcaaagtttcctggccactccccagcaatgtgaacaaggataatgtttccgctgaatttatggatgggattctgagaatagtaattccaaagctttgagggttcatcgttctgaaaccatatatagatacggtaaacattgtgtgtgatatagcagtttgtgtggaaaagaaaaatatcaaatcatgaagaaagtttggtcttttatgtaaaatagtttggtcttttatatatcacagattgtagacaggcattactcaaagtgaagccatgtaaacaatccataaatatataaaaataaaatcttcattactactaccaaaagccagaaaagaaaaagaaaaaaaaaaaaaagaaaaaagctcagaagcatctaatcatcctaaagctggggaaatctcaatctactcaactacgtagcaagcattattgttgtaataattaggaacggggtccaagattatccaccggtagccagatgggcgtcctgagacggggtatgccaaaagtgcttgcacggtacgatggggctaagctgcacatacgtaccggtagcattacagaacgcccatggggcacctgaaggatcgtaggagacaagctgaggctgctcatagttctggacatatccattgtggaacacaggatatgaagc

SEQ ID NO: 123697 - DNA, 525 bp, Arabidopsis thaliana
  unsure (1)..(525): unsure at all n locations
ccacgcgtccgagtatgttggaaatggcagcaaaactctgcattccctcttcttcgtttagccacagaactaatgattccataacctcatcatcttcttcatattcatcattgcttgctttgcctcaattcttctgtccaccatctccattaggattcccacagttcaagcttcacgccaagttaggtggaggagatggagaagtgaagcctaaagataagaagaagttcattaccaaagaggaagaacctgaacagtattggcaaagcgttggagaaagagaaggagagaatccgatgaagacgcctcttccttacattatcatcttcggtatgtcaacgccattcgtcatcttagccattgcttttgccaatggttggatcaaagttcccattcgttgagcccctctctttgttttttcttcacttgtttaaggctgaatcttaaacatggttcctatactcttcctcttcggctgtaaaaaaagaccaattatagatgcaatccnatatatatggggcttgc

SEQ ID NO: 123698 - DNA, 670 bp, Arabidopsis thaliana
cacagttcaagcttcacgccaagttaggtggaggagatggagaagtgaagcctaaagataagaagaagttcattaccaaagatgaagaaccagaacagttagttcatcttaattctcaattttttccatcatgagattgtagaaaataaacagaaactcattggatggtaatgtaattttagtctcctttgcagaatttagattttgtttggtatgtgacaatgacatgtagactagtggtttgtgttagtattgtatcaatacacgaaccataaatttgatcgaaaatatttggtttttgtaagttagtcaaaagaatcttaaactcttgcatgcacatttttcataaacatgcaatattgtgactgacgaaatggttatggatgagatttgcattacaactttataggtattggcaaagcgttggagaaagagaaggagagaatccgatgaagacgcctcttccttacattatcatcttcggtatgtcaacgccattcgtcatcttagccattgcttttgccaatggttggatcaaagttcccattcgttgatagcctttcttttttgcttctgctacacttgtgtaaggctgaatcttaaacatgcctattccactccccttcttcggctgtaaaaatagcaaaattaatagaatggatcatatgtt

SEQ ID NO: 123699 - DNA, 440 bp, Arabidopsis thaliana
gagatttgctttctctaccagagagactgttacagtagtagtagctacttttgcttgttgtcttcatttcaaatctgcaattttactttctttttgagttctaagtgaactcaacatttagcttctttttcttttctaggtttcataaaaacagtttggatcttaagctcacagctgaaaataacccgactttgattactgggtatataaaagccgccattgttgttcttttcactctttgggttattagggtttacgatttctgggtggtagataaatttgttcttcaaaaaagtttccttttttaaaaaatctcttagattcttaaagaattgtaatttagggttttaaatgcatggatgggagagaagctatggcatttccaggctcgcattctcagttctatcttcagagaggagtttttaccaatcttacacctt

SEQ ID NO: 123700 - DNA, 361 bp, Arabidopsis thaliana
aggtccaacaccaaaataaaaaatgtcatctcttcactggtttcccaatatcttcatcgttgtcgtcgtcttcttctccttgagaagttcacaagttgtactagaagaagaagaatccacagtcgttggatacggctacgtcgttagatcagtgggcgttgattctaaccggcaagttttgacggcgaagcttgatctgataaaaccatcgtccgtttacgcaccagatattaaatcgcttaatcttcatgtcagcttggagacaagtgagcgtttgagaatcagaatcacagactctagtcaacaaagatgggagataccggaaaccgttattcctccgtgccggaaacactctcctcgc

SEQ ID NO: 123701 - DNA, 530 bp, Arabidopsis thaliana
gcgcgagacagagaaagaaacctctctgagatacatctctctctctctctctatcccctcttaaatacactccataccgacaaaccaacttttttctcagtactaaaagaaacctctattcgatttctaaacaaaccctagatatagactactctacattcttccattaagttaatctctttcgtcttcttcttcttcatcctctcataattaaagatctctatcaagagagagatcttttattgtcttcttctgttaaaatcttttgatagatcttcactctctgaaagtcaagatcttagtctaggcaagtaaatatgtggtaaagcaaagcccttcttgaaattggtcatatatggctggtggtatcggaaaatggcaggatttttctcgttaggacacggcggaggaggaaacactccagacaaccacagaacaaacactaataatccttcttcatcgggaacagaatcttggctttggtgcagaaaccctaactctaacgctgacggtggagaagctggtccttc

SEQ ID NO: 123702 - DNA, 481 bp, Arabidopsis thaliana
  unsure (1)..(481): unsure at all n locations
aaaaggacccctcccaaccagaattagtggagataaacttgacgcgtcccttcttcattctccgtcttcttcacgtcaccggaaaaacgacgaatctcattgcctgagattcttcatcggaattaaacctccggaggaattaatcacgtctcacattttttcaccatgtcgagtttggaggagccgctaagctttgacaagttgccaagtatgagcactatggataggattcagagattttcttccggtgcttgtcgccccagggatgatgtcggtatgggacaccgttggattgaaggaagagattgcactacctctaacagttgcattgatgatgataaaagctttgctaaagagtcattcccgtggagaaggcatactcggaaattatctgaaggagagcatatgtttgaggatatttcggtttcnggaagnncttctactgtttngggggcttaagggntccaaaagntttnagggg

SEQ ID NO: 123703 - DNA, 446 bp, Arabidopsis thaliana
ctcacaaccagaattagtggagataaacttgacgcgtcccttcttcattctccggcttcttcacgtcaccggaaaaacgacgagtctcattgcctgagattcttcatcggagttaaacctccggaggagttaatcacgagagctcaaactatggcgtggaaaatgcaatggaatggggggagacgagcccattctatatggggcaggagattaacaaacaacactcatttgcgatcatccttctattccaggctcacattttttcaccatggcgagtttggaggagccgctaagctttgacaagttgccaagtgtgagcactatggataggattcagagattttcttccggtgcttggcgccccagggatgatgtcgggatgggacaccgttggattgagggaagagattgcactacctctaacagttgcattgatgatgataaaa

SEQ ID NO: 123704 - DNA, 911 bp, Arabidopsis thaliana
  unsure (1)..(911): unsure at all n locations
nnnnnnnnnnnnnnnnnnnnnnnnnnnnnnnnnnnnnnnntccgtgagagagttttgttcttcttctttctggttccttcgctttgctttggttgcgtgatctcctctctcatcaatcttcttcatcatcattctcatcatcattagcttcttgatttttttttccttctttttttcgtttcaagaaactaaacaaagtttctatttatggttttctgattcttcttctatagatctattatttgattctccttcgatcattgtcaacgttttcttcttttgtaatcatcacagttttttttgagaatttgttcatttttttttctcatatattgattcgagttctttcttcttgaatcttgttcttcatagatctagtttttgttttttactctctagatctatagatctgttgaattcacttctttaatccatctctgtgttcttgagttcctatggtctaagtcaaactcaagttcaagatctgttgaatttggaatcttgctggtgaagttagagatgaattatttcccagatgaagtaatagagcatgtattcgactttgtaacatctcacaaagacaggaatgctatatctcttgtatgcaaatcatggtacaagattgaaagatacagtaggcaaaaggttttcattggaaactgttatgccattaatccagagaggttgcttcggagattcccatgtctaaagtctttgactttgaaaggaaaacctcattttgcggatttcaatttggttcctcatgaatggggaggttttgtgctaccttggattgaggctttggctagaagccgtgtaggacttgaagagcttaggttgaagaggatggttgttactgatgagagtcttgagctgctttctcgttcttttgtcaattttaagtctttggt

SEQ ID NO: 123705 - DNA, 950 bp, Arabidopsis thaliana
  unsure (1)..(950): unsure at all n locations
ctgtaccgcaccggaatttccggtgcgccccacgcgtacggttagctggaatatactggccctacaacaccaggtcacacgcatttgagctaaccggtggatactacaacacaagaaaccatgacgggtatctgccaatagctaagatgttcaacaaacatggagttgtgctcaacttcacctgcatggagatgaaagacggggagcaacctgagcacgcgaattgctcaccagaaggtctggtcaagcaagtacagaacgcgacaaggcaggccggaaccgaactagcaggggagaacgcgctagaacgatatgactcaagcgcattcggacaagtggtagcaacaaataggtcagattctggaaatgggttaaccgcatttacttacctaagaatgaacaagcggttatttgagggtcaaaattggcagcagttagtggagtttgttaagaacatgaaggaaggtggtcatgggaggagactctcaaaagaagacacaactggaagtgacctttatgttggatttgtcaaaggcaagatcgctgagaaatgtggaggaggctgctttagtgtaatttcccacataggtacatacatatagtgtggtgtttattgtattcctgtctgataaataactagagagatcaaaccagtaagagtgttaaagctatagatttggcacaattctgggtcagagtcagagcaaagagaagcaaaatcaagatgatgtacacttagatgtttcctatgagttttccttgtacatcatcttcatactcttaatctcaaatactattgccttttttctcctacaaaaaaagagaaaaacaatcaatgtgagtttctcttatcatcaatcaaaaaaaaaaaaaaaagnnnnnnnnnnnnnnnnnnnnnnnnnnnnnnnnnnnnnnnnnnnnnnnnnnnnnnnnnnnnnnnnnnnnnnnnn

SEQ ID NO: 123706 - DNA, 1217 bp, Arabidopsis thaliana
  unsure (1)..(1217): unsure at all n locations
ctatacgacttacttagggaacgctggtacgcctgcaggtaccggtccggaattcccgggtcgacccacgcgtccggtaggaatgggaccttgtggagaattgagatacccatcataccctgagagcaacgggacctggagattccccggaattggagagttccagtgctacgacaagtatatgaaatcgtcacttcaagcatatgctgagtcaatcgggaaaactaactggggaacaagtggacctcatgatgccggcgagtacaagaacctcccagaagatactgaatttttcaggagagacggaacatggaatagcgagtatggaaagtttttcatggaatggtactccgggaagctgctagaacatggagaccaactcctatcttcagcgaaagggatctttcaaggaagcggagcaaagctatcaggaaagggagctggaattcactggcactacaacaccaggtcacacgcagctgagctaaccgctggatactacaacacaagaaaccatgacgggtatctgccaatagctaagatgttcaacaaacatggagttgtgctcaacttcacctgcatggggatgaaagacggggagcaacctgagcacgcgaattgctcaccagaaggtctgggtcaagcaagtacagaacgcgacaaggcaggccggaaccgaactagcaggggagaacgcgctagaacgatatgactcaagcgcattcggacaagtggtagcaacaaataggtcagattctggaaatgggttaaccgcatttacttacctaagaatgaacaagcggttatttgagggtcaaaattggcagcagttagtggagtttgttaagaacatgaaggaaggtggtcatgggaggagactctcaaaagaagacacaactggaagtgacctttatgttggatttgtcaaaggcaagatcgctgagaatgtggaggaggctgctttagtgtaatttcccacataggtacatacatatagtgtggtgtttattgtattcctgtctgataaataactagagagatcaacccagtaagagtgttanagctatagatttgcacaattctgggtcagagtcagagcaaagagaagcanaatcaagatgatgtcactaaaaaaaaaaaacaaaggannnnnnnnnnnnnnnnnnnnnnnnnnnnnnnnnnnnnnnnnnnnnnnnnnnnnnnnnnnnnnnnnnnnn

SEQ ID NO: 123707 - DNA, 1155 bp, Arabidopsis thaliana
  unsure (1)..(1155): unsure at all n locations
nnnnnnnnnnnnnnnnnnnnnnnnnnnnnnnnnnnnnnnnnnnnnnnnnnnnnnnnnnnnnnnnnnnnnnnnnnnnccacgcgtgcgggcgcgcgtacgcccacgcgtgccgcttctatcaaacaccaacagctctattctctacctcatttctcatcataacaaagagagagaaaaaaactatggaattgacactgaattcctcgagttctcttatcaaacgtaaagatgccaagagttctagaaaccaagaaagttcctccaacaacatgacctttgcgaagatgaagccgccaacatatcaattccaagcaaagaactcggttaaggaaatgaagttcactcacgagaagaccttcacgccagaaggtgaaacccttgagaaatgggagaagctccacgttctctcatacccacactccaagaacgacgctagcgttccggtgttcgtcatgttaccgctcgacacagtaacaatgtcagggcatttgaacaaaccacgagccatgaacgctagtttgatggccctgaaaggagctggtgtggaaggtgtgatggtggatgcttggtggggattggtggagaaagatggacctatgaattataactgggaaggctatgccgagcttatacagatggttcaaaagcacggtctcaaactccaggtcgttatgtcattccatcaatgtggaggaaacgtaggagactcttgcagtatccccttgcctccatgggtgcttgaagagatcagcaagaaccctgatcttgtctacacagacaaatctgggagaaggaaccctgaatatatctccttgggatgtgattctgtgcctgtcctaagaggaagaacacctatccaggtctactcagatttcatgaggagcttccgtgaacgatttgtaaggtcttctacatggggggagttattgcggaaattcaagtaggaatgggaccttgtggagaattgagatacccatcataccctgagagcaacgggacctggagattccccggaattggagagttccagtgctacgacaaggtattttaaactagcagaaaaagccttggaattcattagaacacttgtcaagagattagacatataccagagaagatcatgtatacttatgcttacttatactccatttgctt

SEQ ID NO: 123708 - DNA, 452 bp, Arabidopsis thaliana
acggacgcgtggggagaagctccacgttctctcatacccacactccaagaacgacgctagcgttccggtgttcgtcatgttaccgctcgacacagtaacaatgtcagggcatttgaacaaaccacgagccatgaacgctagtttgatggccctgaaaggagctggtgtggaaggtgtgatggtggatgcttggtggggattggtggagaaagatggacctatgaattataactgggaaggctatgccgagcttatacagatggttcaaaagcacggtctcaaactccaggtcgttatgtcattccatcaatgtggaggaaacgtaggagactcttgcagtatccccttgcctccatgggtgcttgaagagatcagcaagaaccctgatcttgtctacacagacaaatctgggagaaggaaccctgaatatatctccttgggatgtgattctg

SEQ ID NO: 123709 - DNA, 629 bp, Arabidopsis thaliana
ttggttttctgaccaaagaacctgaacctgatccaaatgatccttcaaaacttgtccagaaggaggaccctgttattttacatacaccaacaggtcgaataatcaactatgtagaggatgaaaaagcatggcattcgactattttggcagctctcctctggaggaaggagaagaagtggatccttcaaaagttgagtttctgccacttgggttcgacgagttctatgggaaagaagtggtagtgaaaaaggaacacccaataaaaagctttgtacttggaatcgagaaatcggtgaagccgatgcttgacggattagagaaatggacagaagagaaaaagaaagcatatgaggagagaaaggagatgatacagcaagaacttgagttagtagaggctgagatttgcttagaggaagctatagaagatatggatgaagaattgaagaagaaagaacaagaagaggaaaagaaaactgaaatgggtttaactgaacaggatgaagatgttttggtcccggttttataagaagagaaagttgtcactgccaaagagaagatacaagagaatatacaagaagagaaatacaaagatgatgatgatgacgatgatgacgatggtgatgatgatg

SEQ ID NO: 123710 - DNA, 546 bp, Arabidopsis thaliana
  unsure (1)..(546): unsure at all n locations
cgaagttacaaatccactcaatctcaaactcctataccactgcaacaacaacacacaactacagaactggtcactactgtcccttcctctcttttgtcggtaaatggagttacccgtcgtagatctgtctagttacctcgacttctccggtgatgaattaggatccgatctactcgaatcatgccgacaagtgagtcggatcctaaaagaaaccggagctctcattgttaaagatcctcgatgttgcgctcaagacaacgatcgattcattgatatgatggaaaattatttcgaaaaacctgatgatttcaaacgattgcaacaaagacctaatcttcactatcaggttggtgcgacgccggagggagttgaagtgccgaggagtttggttgatgaagagatgcaagaaaagttcaatacaatgcctaaatggtacaaaccccatattccggaagggccngatcataagnggggggnttttttggggggttggcctaggcatttacnccgggttaggggttaattnttgngcctttttccggnggc

SEQ ID NO: 123711 - DNA, 474 bp, Arabidopsis thaliana
aagagactcgttggattcgtgaagccgaaaaaaaaaaaaaaaatggtaattctcagcaacgtctcgttgttctcctgctgcaacatctctcagaaaccatctctcttttctccgtcttctcgtagttctcattgtcccattcgttgctcacagtcacaggaagggaaagaagtggttaccagtcctttgagaagtgtggtttggtcattaggagaagaggtttcaaagagaagtctatttgcacttgtctctgcttctctcttctttgttgatcctgctcttgcttttaagggtggaggtccctatggtcaaggagtcaccaggggacaggacttatctggcaaagatttcagtggccagactcttatcaggcaggacttcaaaacgtccatcctaaggcacgccaccttcaagggtgctaaggtggtaggtgctagcttctttgatgcagatctaacaggtgctgatttatcg

SEQ ID NO: 123712 - DNA, 721 bp, Arabidopsis thaliana
  unsure (1)..(721): unsure at all n locations
nnnnnnnnngccgagcctaatacgacttatatagggaaacctggtacgcctgcaggtaccggtccggaattcccgggtcgacccacgcgtccggatttcttcgtggtcgccgacggagaccccaaatcgattctgcttcgaaccaaatcgaaaccctcatcatgatagaggagcattatgtggctcaaggtttaagtattgttggatactttcatgcaaacgagaggtttgatgatgttgagctctgtggtgtggctaaaaacattggtgatcacatttctcgctatttccctcaggcaccaattctcttgggaatatagttgtgcaatactcagcaggctttaggattaggaagtgggactcaaagcacttacttctcatagtcaagaaccatctcgaagctaaagaaaatctaaaatatggaagacatagatacaagcttacaagtgttgaaaagccgagcactaaaagtataaaaatgaaacaaaggtggaaagaaactgctttctctatctcatgtctgttttaaggtttcttcggtcacttaagagacaaaaggcattgttttgatcactctttgaatcactcttatttttgaattagagcaatacctaaaaaaaaaaaaaaaaaaaagggcggccgctctagaggatccaagcttacgtacgcgtgcaggcgacgtcataactcttctatagtnnnnnnnnnnnnnnnnnnnnnn

SEQ ID NO: 123713 - DNA, 968 bp, Arabidopsis thaliana
cccacgcgtccgctcgatttgcttttgcgacattataattttcctttcaattgactcagtgagtcgccgatcgagttagaaatgggaatgggaagtaacggagaattgaagtatgagatctcccagaacgcgtacatcaaactcgttcttcactcgctgcgacacaagacggcggcggtcaacggagtcctcgtcggtagaatcagccctaaggacgacggagttgtagagatctcagattctgtgccgctctttcactctaacctcgctctccttcctcctctcgagatctccctcatcatgatagaggagcattatgtggctcaaggtttaagtattgttggatactttcatgcaaacgagaggtttgatgacgttgagctctgtggtgtggctaaaaacattggtggatcacatttctcgctatttccctcaggcaccaattctcttgttgaacaacaaaaagcttgaagccttatcaaagggtaaagagcgaagccctgtgatgcagctctgtgtgaaggatgcttctaagaactggagagtagttggagcagatggaggaagcaagctactcttaaaagagccatcggccaatgtagttttgtcagattacatttcatctgagaaatggaaggacgtcacagatgttgatgatcatcttgatgatgtaacaaaggactggctaaaccctggacttttcaactgaagatgggtatgcgacatagctaaactagacttttgctttcatcatcttctgtcgaaaaacaaaaaagttcctcggagaccattgtttaaaatttcccttgaatcttgttaaagtattatccagctatgcaacagagctcaaattacttttaattggtacacatcttaaaccttagttatatcatttgaatgatatcttttggagcttgttacattttgattatatagttccaatcaagaaagctctactttatttggct

SEQ ID NO: 123714 - DNA, 728 bp, Arabidopsis thaliana
  unsure (1)..(728): unsure at all n locations
nnnnnnnnnnnnnnnnnnnnnnnnnnnnnnnnnnnnnnnnnnnnnnnnnnnnnnnnnnnnnnnccacgcgtccgaaagaaaggtatcaagtaacagatatgaggaagctggccaacagaatggcgtttggtacacctgaagagagctccctcggtgatggactaggagaaggttatggaatgcttggccaggcaggaagcaacaggctgcgagtatccagtgttccgagcaagctcttcgccttcctaaggtcgccaaaaagcttaaagaaaggcagtatgcgggtggtgcgactacctctggtttgacatcgagcctggctttcactcctgtgcagggaatagagttgtgcaatcctcagcaggctttaggattaggaagtgggactcaaagcacttacttctcagagtcaggaaccttctcgaagctgaagaagatctaaaatatggaagacagagatacaagtcttgaaaagccgagcactaaaagtgtaaaaatgaaacaaaggtggaaagaaactgctttctctatctcatgtctgttttaaggtttcttcggtcacttaagagacaaaaggcattgttttgatcactctttggaaacgttttataaattttatttttgtattagagccataaaaaaaaaaaaaaaagcttattaccnnnnnnnnnnnnnnnnnnnnnnnnnnnnnnnnnnnnnnnnnnnnnnnnnnnnnnnnnnnnngcatt

SEQ ID NO: 123715 - DNA, 684 bp, Arabidopsis thaliana
tacggctgcgagaagacgacagaaggggctgcttcgaaccaaatcgaaaccctcatcatgatagaggagcattatgtggctcaaggtttaagtattgttggatactttcatgcaaacgagaggtttgatgatgttgagctctgtggtgtggctaaaaacattggtgatcacatttctcgctatttccctcaggcaccaattctcttggtaagtaaatgtcttatcctttgtttatggaatgctttggccaggcaggaagcaaaaggctgcgagtatccagtgttccgagcaagcttaagattaatgctaaggtcgccaaaaagcttaaagaaaggcagtggtgcgactatctctggtttgcatcaatgtctgactccaatttgttatctatttgatagggaatatagttgtgcaatactcagcaggctttaggattaggaagtgggactcaaagcacttacttctcatagtcaagaaccatctcgaagctaaagaaaatctaaaatatggaaggcatagatacaagcttacaagtgttgaaaagccgagccctaaaagtataaaaatgaaacaaaggtggaaagaaactgctttctctatctcatgtctgttttaaggtttcttcggtcccttaagagacaaaaggcattgttttgatcactctttgaatccctcttatttttg

SEQ ID NO: 123716 - DNA, 416 bp, Arabidopsis thaliana
  unsure (1)..(416): unsure at all n locations
tactttnatgcaaacgagaggtttaatgatgttntgctctttggtgtggctaaattcgctggaagcaaaaggctgcgagtatccagtgttccgagcaggctgaagattaatcctaaggtcgccaaaaaggcctatagttgtgcaatactcagcaggctttaggattaggaagtgggactcaaagcacttacttctcatagtcaagaaccatctcgaagctaaagaaaatctaaaatatggaagacatagatacaagcttacgtgttgaaaagccgagcactaaaagtataaaaatgaaacaaaggtggaaagaaactgctttctctatctcatgtctgttttaaggattcttcggtcacttaagagacaaaaggcattgttttgatcactctttgaatcactcttatttttgaatt

SEQ ID NO: 123717 - DNA, 1075 bp, Arabidopsis thaliana
  unsure (1)..(1075): unsure at all n locations
nnnnnnnnnnnnnnnnnnnnnnnnnnnnnngcaaaaccctccagcgccgcttggatctctctctcctctgttctctcttcccttatcttcttcttatacccttcgaccaacgaagaaccctagaaatcgattaacaagatgaatagggaaaagttgatgaagatggctaacactgtccgcactggcggaaaggggacagtaagaagaaagaagaaggctgttcacaagaccactacaaccgatgacaagaggctccagagcactcttaagagagttggagtcaattccattcccgccattgaagaagttaacatttttaaggatgatgtagtcattcagttcattaaccctaaagttcaagcttcaattgctgctaacacatgggttgtgagtggtacaccacagacgaaaaaattgcaagacattcttcctcagattatcagccaacttggaccagataacttggacaacctgaagaagctagcagagcaattccagaaacaagctccaggtgcaggtgatgtcccagcaacaatccaagaagaggacgatgatgatgatgtcccagatcttgtagtgggagagactttcgagacccctgctactgaagaggctcccaaagctgctgcttcttagaggaggaggaagaagaaggagaagagctcacctgcaaaacccatcataaaaatgtttgtcgctcgacctcttctgagcactgtcagattcttgttttctctaatgcttgcgaacagaaagacttggttttattatcacttgatgctttttggtccgaacagcaattttccttttattaaggttagatcgctttttgtttaccacctgttcaaatgagtactactatgtcctgtcgcttcatacacttcttgcaacacaagtcctttgttttgagtcaacgatgtcttgagatgaacaatcaacagtttcgtacatttaaatggaaattccaaagattttacatatttccaaaaaaaaaaaaaaaaagnnnnnnnnnnnnnnnnnnnnnnnnnnnnnnnnnnnnnnnnnnnnnnnnnnnnnnnnnnnnnnnnnnnnnnnn

SEQ ID NO: 123718 - DNA, 641 bp, Arabidopsis thaliana
  unsure (1)..(641): unsure at all n locations
ctacgattcttctttttttcaacgactgctcggatctttctcagtagagggaaccatgaatccctcactcgtcaccgccattaacgctccaatttcaccttctcctcggtctcctcttctttctcacttcctacctactttacctcaccgtttctccaagtctgagtgtctatctcgccgtcgttatcgagtttcgttccctcgtagctcagctgcttcctccgaccaactatcagtatctacgcaggcgaagaatcccggtatccatgggaataagaaggagctcactggattgcaaccgattgttgagaaaatgacaccgccggtgaggctagcgacttcagctgttgtattagcggcgtctttagctactgggtacggccttgggctccgtttagccggctccaggaatattgcctttggtggggctgctgttgctggagccgccggtggagctgtcgtatatgcggttgaactctgctgtaccggaggtggctgctatcagtttgcataattatgttgccgaattcgaagatcctgcctctgtgacggaagatgatgttcgaaagatcgcttgatagggacggtgtcaacaaaggagacgaggcattccaggtgagttttttgattttttncngaat

SEQ ID NO: 123719 - DNA, 612 bp, Arabidopsis thaliana
  unsure (1)..(612): unsure at all n locations
agtttttcgccggcgacgtacttcgacggagatggctctgtcttcgtcgactttccaaatcccgttcctcaaacaccgttacttcggaatgtctcaaaatctgaggacacctattttaacgatgtctacaatccccagagatcgtttgatttcgtcatttcatacggcgcgaagcaaactctgttctcctctccggaccatcagctgcgtcgccggagacgatgaaaccagagaagcatcttctcttccttcttcgatatcttcgcttttcgtgaaagggttttcggattcagtgagtgaaggacgtttagagaaagtcttctccgagtttggacaagttaccaatgtaaaaatcatcgcaaacgacaggactcggcagtcactaggatacggatatgtctggttcaacagcaaagaggacgcacagtcgggctgtcgaagncattgaacggaaagttctttttnatngcaggttcattcttgttaaaatttgggtcagcctggttttttcccntngcggggnccacatttccgatttccttntttgnaaaanaaatggtnttaacccnttttnctgtatgnnnntttatggggggnggtatttttanaana

SEQ ID NO: 123720 - DNA, 695 bp, Arabidopsis thaliana
aaaaaagaacgatagagatatttagtgataattttgttgggtcaacgtaatcaacggtcagaaatagatcacggtgcgttcgtctggcggcttcatttggcacaaggagtttactagtctggacaatatgtccttaattgctcttatcggagaaggcttactctgtttttcaggcgaactctgtttatcttctccgagctcgtacgagaatattcgtaaaggtttcttgtgagcttaaacgatgagtacccttgagaccacaagagctgagcttggtctggtagttgtgtatttgaataaagcggaggcgagagacaagatttgtcgagctattcaatatggttccaagttcttgagtgatggccaacctggcactgctcaaaatgtcgacaagaacaccagcttggctaggaaagttttccgtctcttcaagtttgtaaatgatcttcatgctctcattagccctgttcccaaagggactccactcccgcttgttctgctcggaaagtctaaaaacgcgttgctgtcaacgttcttgttcctagatcaaattgtgtggcttggcaggactgggatttacaaggacaaagaacgtgctgagattcttggacgtatatcacttttctgttggatgggttcttcggtttgcacatccttggttgaggttggggagcttggtaggctgtcagcatcaa

SEQ ID NO: 123721 - DNA, 516 bp, Arabidopsis thaliana
  unsure (1)..(516): unsure at all n locations
tcttcttcacttccgccatagctgaaaccttcagaagcctcgattctcatccacagttcccttgtaaacctcctcattttagctcttagcccttctgcagtgtctctttatccataacacaacgagcaatttctctcgtctccctcctcatgctcccagagaagataggtcagctctcatacacagctgcttcagtaccccgtctcggtattcctccgtacgagtggtggtcggagtctttacacggactcgccgataacggtcccggagtttccttcaacggttcgatctccgccggntactagttttcctcaggtaatcgtatcttgtgcatctttcaatagaacggtatggtacgngattgggatctgctgttgcgggtggaaggtcggggntnattgtacaaacggtgggtaaagcntngggttgacggntttgggnttccggantattaaaatggggttttggggnnccgannatnggggnangggggccaagnnagcttccttgggnngg

SEQ ID NO: 123722 - DNA, 444 bp, Arabidopsis thaliana
acttctctatcgagtacaaaccgcaagtgaaacagagtaacagagacgcgtcgtcttcaacgatgctctcaacggtgacggcgacggcggtttctcgaccgattctgaaggtggaatgtacaatcaaaaggacgtttaaagtgacggcggagaagtttccgacgtttctgccgaccgatgtcgagaaaattaaagacacgtttgctctaaagctcgccgccagaatagagaggcttcctgtatctgtgagcttcagggaagatagtattatgagcagttgcgtgacaccgctgatgcggaacgagacaactcctgttgtgcttcttcacggatttgatagttcttgtttagagtggagatacacttatccgttgcttgaagaagccggtttagaaacatgggcatttgatatccttggttggggtttttctgatttagacaaac

SEQ ID NO: 123723 - DNA, 460 bp, Arabidopsis thaliana
ccacgcgtccgggaagatgcaaagattgattggggttggagctgagttgaagctgaaaagagctcacgcgattttcgatcgtgtttgctctaagtgcatagcttctaagagagatgagatcagccaagggattgattcttcttcttctaaagatttgttgatgtcttctagaaatgtggacacgactaagtacaagttgttgaatccaagtgatgacagattccttagagacacaatcttgtccttcatgttagctggtagagacacaacaggctcagcgctcacttggttcttctggcttctatgcaataaccaagaagccatgaccaagattcgtcaagaaatcaacacaaatctatttccaagacacaagaccgacgacggttctgtttcgtatgattctgattcattcaatccccaagaggtaaagaagttggtgtatttacacggcgcggtttgt

SEQ ID NO: 123724 - DNA, 596 bp, Arabidopsis thaliana
agctctctacgactcactattgggaaagctggcacgcctgcaggtaccggtccggaattcccgggtcgacccacgcgtgcggttttgtaaccaatctcagctctccctctcaaacaatccaggattcttcagattcctctcctttgatcctctctttaacaatctctctctctctgttttcttcgatccgttgtaggagaaaatggtcgttatcaacagtctccgacgcttggcgcgtaccactcaggttcatttgcacagtaagtatgccacttgcatgtctgggaactccacttccaggaggattttcactactgaggcagcacctgagaagaaaaacactgttgggtctaaagggcatgatatgcttgcaccttttactgctggatggcagagtgctgatttagatcccttggtcattgcaaagtctgagggaagttatgtgtatgatgatactgggaaaaaatatcttgactctctcgctggtttatgggggactgccttaggaggaaatgagccaaggcttgtttctgccgctgttgaacagttgaacaccttgccgttttatcactccttttggaaccgtactactaaac

SEQ ID NO: 123725 - DNA, 534 bp, Arabidopsis thaliana
cgcctgcaggtaccggtccggaattcccgggtttgacccacgcgtgcgatgataatggctacagtgttgttcttcccgagaaactgaatactggcagttggaacgtctacagatctgcaaaatctccgttcaagctcgttagcagattcccagatcatcctgacatcgctactctccatgacaattttgagcatgctgttcatgattttcgagattacaagtatttaggaactcgtgttcgtgtcgacggaactgttggagactacaaatggatgacatatggagaagctggtacagcaagaactgctttaggttctggtttggttcatacacgggattccccatgggaaccttctgggggaaggtacttgatcaatccgcccaaagggggtcattgtgtgataatgcttgggtcttatttatacttaaggggccggacgctttaggattgaaactcttggcgctgatcgctggggatattactgggcaatgatgcgagtgggcaggcccttttgtgggatgggagaagtttta

SEQ ID NO: 123726 - DNA, 842 bp, Arabidopsis thaliana
acgcgtccgcattctctcctctgattccgaatcgggtaaattattatggattcttcttcttcgtcttcctccgccgccgcacgccgccgtatcaacgctatccactctcacctcgtcacctcttctcgctcttcccctctcctccgctccaatcccaccgccggcgagttctgtcttgataatggctatagtgttgttcttcccgagaaactgaatactggcagttggaacgtctacagatctgcaaaatctccgttcaagctcgttagcagattcccagatcatcctgacatcgctactctccatgacaattttgagcatgctgttcatgattttcgagattacaagtatttaggaactcgtgttcgtgtcgacggaactgttggagactacaaatggatgacatatggagaagctggtacagcaagaactgctttaggttctggtttggttcatcacggaatccccatgggatcttctgttggaatttacttcatcaatcgcccagagtggctcattgttgatcatgcttgttcttcttattcttatgtgtctgttcctttgtatgatactcttggtcctgatgctgtgaaatttattgtcaatcatgcaactgtgcaagccatattttgtgtggcagagactttaaactctttacttagctgtttgtctgagatgccaagtgtacgcctggtggtggttgttggagggttaattgaatctttaccctcgcttccctcatcatcaggagtgaaagttgtatcctattcggtgttactgaatcaaggtcgtagtaaccctcagcgattttttccaccaaaacccgatgatgttgcaaccat

SEQ ID NO: 123727 - DNA, 516 bp, Arabidopsis thaliana
  unsure (1)..(516): unsure at all n locations
tacnnnnnnataaccctcccatagggaacacagctggagctccaccgcggtggcggccgctctctactagtggatcccccgcgctgcaggaattcgcggccgctttttcttcaccattgttgattgatggatgagaaagcttattcacacttcatttctttgcttttggtgagagaatgaaacagagaagaagagatgaagaaaattaaagttctttccttttctcttttggatctaatttcatcttgagattttctcatagcttgatactaaagctacataaaaaacaattaggtgaaatgaaagtttgtgtgttttgataagttttcagagattttcggttgcatgttgttatcttgctcttgaagtctatcgaacccttttagattctgattttgttctcttcttatccctcctcctataagttagccatttagggtccccatcgaattttactaagttaaagtcagagtctttctggttaagctatggatcgaagagacgcaatggcgttat

SEQ ID NO: 123728 - DNA, 376 bp, Arabidopsis thaliana
gcaaacaccgcctttcatgtcactgggacagacaataaaaaaacctttttcgtttatgttccatgtctgaaattaaaacattttcaagtctcgggtagttcagattctccatcttagttcttgtaacctctccctcttcttctccaaattccacctgagagaagagaacttattccacccaaaaagcaataatatatagtaccgtactttgattttttcgataatctgttgattgaagttaagccaaaactcagctctgttcttattcttcttcaaacccaagtttcccacttcactgattctttcatcttagctcgttttaaccacaaagttcagttcttttttggtgtgtttctttttcgttattggcttttgc

SEQ ID NO: 123729 - DNA, 438 bp, Arabidopsis thaliana
gttaaaaccctaaacccttaatttgagctctctgctctcctggttttagttttcctctatttcgtgctcaattcgcttgttctccagttccactctatcagtgccggcggcgatattgtccgaggataaaacatgtttgctctttccaaggttttgcggagaagtcagagtctccgcctaggagcttgcaatgctgtctactctaagctagatataccattgggagaaagaaacattgctattgaatcaaacgctttgattcatgataaacacgaagctttgcctagattttatgagctctcttggtcttcctctaccggaagacgttcactttcctcggacgctggagctaaaactaccggagatgacgatgacctcgaagacaagaatgtagaccttgcaactccaaacgagactagtagtgatagtgaagatggt

SEQ ID NO: 123730 - DNA, 1070 bp, Arabidopsis thaliana
cttcaatttcgtaaacttctaggggagaaacaagggagatagagaagtgagagagggggaaaccctagattcgatctccattcgatttgattcgtttctcgaatcgaagcgatggttttctacttcaaggcccgtcctgatgctggcgactacaccatcttcatggggcttgataagttcgagaacgaggagctcatcaagtacggcttccctgaagatgtctggtttcacgtggataaaatgtcgtcagctcatgtttacttgaggcttcatagaggccaaagttttgatgacattagtgaaggtgtgctggaggactgtgctcagcttgtgaaagctaactccattcaaggcaacaaggtgaacaacgttgatgttgtgtacactccgtggtccaacttgaagaaaactgcctccatggatgttggtcaagttggtttccacaattcaaagatggtccggactatcagagtggagaagcgagtcaatgaaatagttaacagactgaacaaaacaaaagttgaaagaacccctgatctgagagccgagagagaagcagtgaatgccgcagaaagggcagagaggaaacaacatctgagggagaagaagaaacgtgaagagatagataggcttgagaaggagaggcaatcagagatgaggagttacaagggcctaatggtaactgataaaatgacatccaacaaagacattgcttcaagcaacaaatcgcttcaagaacttgaagacgatttcatgtaaaagctctgaagaaatgagaaacaaaacaaaccaagtcggtaacattctgccagagatgatctggtaccgtccttcaaagaaggcttatgatgttctactcgccttaactatgatgttgatggttgtccggttctatgttttctttaaaaaaatcttgaatacctaaaaccctaatctggttcttggactccctggtcccttgaaatggttcaaaaggattgaatctgacctgtgggcaaaagggaggcccgctctagagatcccagcttagtacgcggcagcgacgtcatagctcttctatagtgtcacct

SEQ ID NO: 123731 - DNA, 370 bp, Arabidopsis thaliana
cacattaattcacacctctctcccttctctctcctatctctcagtcaaaccctaattccgatgacggtacctaattccgacgatggtgaccggagtttaacggaggttatcacctctcttatcgactctatacccaaccttcttagcttcaagtgtaaatggtcatcaattcgcgccaaactcgccgatctcaaaactcagctctccgatttctccgatttcgccggctcttcttcaaacaaactcgccgtagatcttctagtttcagttcgcgagacgctaaacgacgccgttgccgttgcggcgaggtgtgaaggaccagatttagctgaaggtaagcttaaaacgcagagtgaggttgattcagtca

SEQ ID NO: 123732 - DNA, 431 bp, Arabidopsis thaliana
gtttctgaagaagagacagagagagaaggatagagtaaaagctaagagagagagcgagactgagagagaaagaaagagatatcattttggttattaagtaattaacttatgctaatcatgggttttatcgatggaaagtgggcaccaatgatagtcttaattgtttctaacatgattgcgggaatggttaatgctttagttaagaaagttcttgatggaggcatcaatcatatggttattgctacttatcgtttgggtatatctactcttttccttcttccagtcgcttatttttgggaacggaaaacacgaccaaagctaactctaagcatctcatgtcagcttttcgtcagtgccctttttggggcgagcttgatgcaatatttctacttgcttggactgtcctacacgtctgcaacgctgggatctgc

SEQ ID NO: 123733 - DNA, 837 bp, Arabidopsis thaliana
  unsure (1)..(837): unsure at all n locations
tctaatacgactcactatagggagagctggtacgcctgcaggtgccggtccgggattcccggggtcgagccacgcgtgcgcggggtctctatctatctctctctcgctctcatatttgcagttgacaattcgttctctttgggaaattagagatgcaggcatcaagagcgcgactgtttaaagaatacaaagaggtacagcgagagagagtagcagatcctgatattcaattgatctgtgacgataccaacatattcaaatggaccgctcttatcaaaggaccttcggagactccttacgaaggcggtgtttttcagcttgctttttctgttcctgaaccttatcctttgcaacctcctcaagttcgattcttgaccaagatattccatcctaatgttcatttcaagacaggagaaatatgtctcgacattttgaagaatgcttggagtcctgcttggacgcttcagtctgtgtgtagagctatcatagcattgatggctcatcctgagccggacagtcctcttaatgcgaactcagggaatcttctaagatctggtgatgtgagagggttcaattcaatggcacaaatgtaaacacgcctcgccgctatgcctaagaaaggaaaaagatgatgatgatcctctggctttttttttgtttttttttttgaaatttgtaatgaaattgatttgcgagagtgaatacattattaacgagaagaagatgattcttctttattaaaaaaaaaaaaaaaaaaaaaaagaaaaaaananaccnnacncnaagggcggccgctctagaggatccaagcttacgtacgcgtgcatgcgacgtcat

SEQ ID NO: 123734 - DNA, 725 bp, Arabidopsis thaliana
agtttaattggggattaactgttataacgattgcagagaatgttttaaagctacttgagaaaggggaattacttaacgaacataggaaccgagctcgtgagctgtcgcgagggattcatcgtttcggtagctttaaccacatctcttcatctcattctttgtcagagcatgaagtcttacatgaatctacagtctataggaaatgtaattccaattttaccacgaattacgatgaggatgaccaagcagaacactatggtttctcctaatgaccccaacctttttcctcagccgctggtagctgacccgagcgaggaatctaggacgggtatgaaagaaaatatggatcctgaacatgatcagaacacagagggaaacccacttttgggttttagtaaaaaggagggtcaagaactagccggagaagacgagaaccatccatttacggatggcgagagtaagcatacagtagtcttgcttgatgagaacacagattaaattttaattacgtgatatcgcaatctgtataagagaaaaaacccgagaagaagataatgtgtgtatacccatatgtatacatatctaccataataacacttctgttaatgactaaaaaaaaaacggccgcgaattcctgcaggccgggggatccactaggtctagaacggccgcccccccggtggagcttcagcctttggtccccttatgaaggttatttcgagcct

SEQ ID NO: 123735 - DNA, 1169 bp, Arabidopsis thaliana
  unsure (1)..(1169): unsure at all n locations
cnnnnnnnnnnnnnnnnnnnnnnnnnnnnnnnnnnnnnnnnnnnnnnnnnnnnnnnnnnnnnnnnnnnnnnnnnnnnnccacgcgtccgatttccgtctctctctctttttatctcaccgtctgatcgcttagaagcaaccatgcctcagggagattacatagatttgcacaggaagaggaatggatatcgcctcgaccacttcgagagaaagcgcaagaaggaggcgcgtgaagttcacaagcactccaccatggctcaaaagtctctaggtatcaagggtaagatgattgctaagaaaaactatgctgagaaagctctcatgaagaaaacattgaaaatgcatgaagagtcatcatcaaggcgtaaggctgatgagaatgttcaggaaggagctgttcctgcttatcttcttgatcgtgaagacaccactcgtgccaaggttcttagcaacaccattaaacaaaagaggaaagagaaagctggcaaatgggaggtccctcttccaaaggtccgtccagttgctgaagatgaaatgtttagagtgatccgatctggaaaaaggaaaactaaacaatggaagcggatggttacaaaagctacatttgttggacctgctttcacaaggaagccttcaaagtacgagcgtttcatccgtccacacgcgtccggtttcaccaaggcccacgtcactcaccctgaactaaaatgcactttctgtctcgagatcatcgggattaagaagaatcctaacggtcccatgtatacatcactcggtgtgatgaccaggggaacaatcatcgaggtcaatgtgagtgagcttggtcttgttacaccagctggaaaggttgtctggggaaaatacgctcaagtgacaaacaatccagagaacgacggatgtataaatgctgttttacttgtgtaaccaaatgtccggcactgtcgtagaagtatggatagagacgagaggaaggcgagaatcatgttggctagttttattttgttttctcctgaaacaattttgtgttatttcaagtttttttatgaatgtgtggttggtcttctcttcacattaactagctgctatgttagctttataagtatcccacattatgaaatttgttccctctaatgttcattttgagcctctttaatattaaaaaaaaagga

SEQ ID NO: 123736 - DNA, 464 bp, Arabidopsis thaliana
gttcttcttctcattggttgatcgatacgcgctaaatttctagaaatctcagatccataaaattttccgaggagagattctctaatcagagaacctcacaatggccgcatatagagccgacgacgagtacgattacctcttcagagttgtgttaattggagactccggcgttggaaaatccaacctcctttctcgattcacgcgcaacgagttcagtctcgaatctaaatccacgatcggtgtagaattcgccactcgtagcatccatgtcgatgataagatcgtcaaagctcagatttgggataccgctggccaagaaagatatcgagcaatcacaagtgcatattacagaggagctgtaggagcgttgcttgtgtacgatgtcacaagacatgtgacgtctgagaacgttgaaagatggttaaacgagcttcgagatcatacagatgccaatatcgtcatca

SEQ ID NO: 123737 - DNA, 423 bp, Arabidopsis thaliana
acgaccacgcgtccgcccacgcgtccgatcatatcttaactttgtctaaaaacaggacaacaaaacagaggatcatggttatgtatgaagaggattttgtgttgaactcacgaggcatgaagttgttcacttgtgtatcgaaaccagtgaagcatgaaccaaaggcattgcgcttcctctgccatggcgacgctatggagtccagcatcaccaggaacggcgcagccgcgacgttagccaatgccggttttgccgtagatggaatggactacgatggacatggaaaatctgagggtctaaatggttacatcagtaactttgatgatctcgttgatgatgtctctaatcattattctacaatttgtgagagggaagagaacaaggggaagatgaggttcctacttggagaatccatgggaggag

SEQ ID NO: 123738 - DNA, 625 bp, Arabidopsis thaliana
gtcagaggcctaccggttatcaaaagagaaacctcaaaatgggatatcaaattcaggaactcacctagctgtgagcctgtttcgcctcttatggctcctggaggcaaagcgcaggctgcagcgaaggaacttcttgactcaattttagatactattgtcaagatatttgaaaatcatgttgttattggagagcttttggagatgaaggcttcacaacatgacattaacacaccaaggtcattgcctactgatgtgaattggaacaccgagtctgaagcatcccaagctactggaggctacactatcagttttcccttgacagtcttacagagtgaatgccaacaactcatatgtgagattctacgagcaactccagaagctgcttcagcagatgctgctgcacaaactgctaagcttgcaaagaaggctccgaagaaagacaaaacggatgcacctgaggatggcctaacagtcacctttcggtttacagatgcaactgtagcaatatctaatcaaggagccgatctcattcgtcaaggctggggaaagagggctccaaatgcatcactggaaggttatggatctgcaactgttttgcctgaacaaggaatatatctagctgcat

SEQ ID NO: 123739 - DNA, 618 bp, Arabidopsis thaliana
  unsure (1)..(618): unsure at all n locations
ggaagccatataccaattacttacatatttttctccttctttcatccccaaaaaaaggtttctcattagatcggtatcgatggctgctgccgctaatacctccgccgttttcgcctctccgtcgcagcctttatcctcgaaacgtagttttttgtacagttcaaggattggtccaatactaaggagatttccgaggaagaaacttgatctccaagttaaagctgttgccacgactcttgcacctctcgaagagatcaaagaatacaagcttccttcatgggccatgttcgagatgggtactgctcctgtgtactggaaaaccatgaatggtcttccaccaacctcaggtgaaaagttgaaacttttctataatccagctgcaagcaaactcactcttaacgaagactatggggttgctttcaacggagggatttaaccaaccaattcatgtgtggtggggagccaagagcaatgcttaagaaaggttcggaggcaaagccgattctccgtttttcaaatattgaaggttgggatccctangnatnttggnaattnggnntttcccantncaactaaatggggnnggntngggnaggggcccatanaagtttcaagttc

SEQ ID NO: 123740 - DNA, 708 bp, Arabidopsis thaliana
  unsure (1)..(708): unsure at all n locations
aagatactccnnnnnnnnnnnnnnnnnnnnnnnnnnnnnnnnnnnnnnnnnnnnnnnnnnnnnnnnnnnnnnnnnnnnnnnccacgcgtccgcggacgcgtggggcaaaagcgaaattaaatacataaattcgatcggatgttgaaaatctccgatcggcgatgaaaggcgtctcttcgacgcccggagattacgtctactttaaatctcaggttcctcttcacaagattcccattgggacaaagcaatggcgttactatgactttggtccaaagactgttcctccgctcatatgtattcctggaattgcaggaactgcagatgtttactataaacagattatggcactctctatgaagggttatcgggtaatctcagttgatattccacgggtttggaattatcatgagtggattcaagcatttgagaagttcttggacaccattgatgttcatcacgtgcatctctacggtacttcccttggaggcttcttagcacaactctttgctcatcaccgtccaaggcgggttaaatcattagttctatcaaatacatatttggatactcgtacttttgctactgcaatgccatgggctccttttgtcagttggaccccttcttttttgcttaaacgatacgtcttaacaggaattcgtgacggacctcatgaaccctttatagctgactctgtcgactttgctgtttctc

SEQ ID NO: 123741 - DNA, 678 bp, Arabidopsis thaliana
  unsure (1)..(678): unsure at all n locations
cgcctgcaggtaccggtccggaattcccgggttgacccacgcgtccgtacggctgcgagaagacgacagaagggtacggcggcaagaagacgacagaagggtacggctgcgagaagacgacagaagggtacggctgcgagaagacgacagaagggtacggctgcaagaagacgacagaagggtacggctgcccgccgacgacagaagggggactcgtgtttgtttagtgaagcgatcaagcgagcgagatcagtcaaatagctttttcattgttcctcagatcgaagaagaagaagaagagcttagcaacaatggcggcgaaaccgattgcgagtccgattccggtggcgctgtatccgactttatcggtgttcactcttgcgattggtctcgtcattaccgctatcttcttcatctatgaagctacatcatccaggaaaaaccgaagcgtcggaaaggagctcgctacttcagcagttgcatctgtcttcttgggttttggatcgttgtttttgctacttgctagtggtgtttatgtctgatccttcttcctcaatactattcccaactagttcaaagacaaaaaaaacagatttatctttgttcaagtaaaatcagagttatgaatgttaagacttgagaagtagccttttaaacaaccaagtttcaattnaattt

SEQ ID NO: 123742 - DNA, 889 bp, Arabidopsis thaliana
gacttactcgacagggtcaggacacctgtggagaattccctgagggatgcaaaactcagcttcaaagatattgatgaggtgatccttgttggtggatccacacgtattcctgctgttcaggaactcgtgaggaaggtgactgggaaagaacctaatgttacagtaaatcctgacgaggttgtagcgttaggtgctgcagttcaggctggtgttcttgctggagatgtgagtgacattgtgcttcttgatgtgacgccgctttcgattggtttggaaacccttggtggtgttatgactaagattattccaaggaacaccacactgcctacttctaaatcagaagtcttttcaactgctgctgatggacagacaagtgttgagattaatgtgttgcagggtgagagggagtttgttagggataacaagtctcttggtagcttccgtctagatggtatcccccctgcaccacgtggagttccacaaatcgaagtcaaatttgacattgatgccaatggaattctatctgtcagtgctgttgacaagggcacaggaaagaagcaggacatcaccattactggtgctagtaccttaccaaaggatgaggtagacacaatggtgcaagaagcagagaggtttgcaaaagaagacaaagagaagagagacgcgatcgacacgaagaaccaggctgactccgtcgtgtaccagacagagaagcaactgaaagaacttggagagaaaattccaggtgaagtgaaaagagatgtggaggctaagctacaagagctgaaaacaagataggagtggatcaacccagaatcaaaacccatgctgctttacaaaaggatcaattgcagcttatcaccagctgactgagtcagtcagtctcacg

SEQ ID NO: 123743 - DNA, 710 bp, Arabidopsis thaliana
  unsure (1)..(710): unsure at all n locations
nnnnnnnnnnnnnnnnnnnnnnnnnnnnnnnnnnnnnntattatattattatattagaaactattagtaccacgaacatggaactattaagtaataagtgtactgaaaataagaaatcaataaatcttaaaacgagacgtctaccacaacaaccaaacgaaaaaaaatgattcgattaacctgaatttttgttttgactcaagagttctatatcccttgcccaatccactccgattggaattgactaagcgggtattttttccacattcataggagttcgtctatgtttctgctttacgaatatgatattttctgggcatttttactaatatcaagtgctattcctgttttggcatttctaatttccggagttttatctccaattaggaaggggccggagaaactttctagttatgaatcaggtatagaaccgatcggggatgcttggttacaatttagaatccgttattatatgtttgctctagtttttgttgtttttgatgttgaaactgtttttctgtatccgtgggcaatgagtttcgatgtactgggggtatctgcttttatagaagctttcattttcgtgcttatcctaattcttggtttaagtttatgcatggcgaaaaaggagcattggaatggtcttagtttcgtttacccgaatactttgatacaatttattaaaaaaaaaaaaaaaggaaaaaggggcc

SEQ ID NO: 123744 - DNA, 681 bp, Arabidopsis thaliana
  unsure (1)..(681): unsure at all n locations
agacaagcgttgagattaatgtgttacagggtgagagagagttcgtaagagataacaagtctattggtagcttccgtcttgatggtactccacgtggtgcaggtggaatatggaactattaagtaataagtgtactgaaaataagaaatcaataaatcttaaaacgagacgtctaccacaacaaccaaacgaaaaaaaatgattcgattaacctgaatttttgttttgactcaagagttctatatcccttgcccaatccactccgattggaattgactaagcgggtattttttccacattcataggagttcgtctatgtttctgctttacgaatatgatatttttctgggcatttttactaatatcaagtgctattcctgttttggcatttctaatttccggagttttatcnccaattaggaaggggccggagaaactttctagttatgaatcagggatagaaccgatcggggatgcttggttacaatttaggaatccggtaattaatatgnntgccccnagtttttggtggttttgatggtngaaactggtttnccggaacccggtgggnaatgnagttccgatggaccccggggggganccgccnttaaaagganncttccattttccgggggtaacccaaanccctgggggnanggtannccatgngggaaangggcc

SEQ ID NO: 123745 - DNA, 304 bp, Arabidopsis thaliana
attcctccgattcttcttcttcacctccccttcttcgaatttctctccttcccttttcatccttttgaaatttctcgtctttcttcttcgaaattggaaactcacagcagcacctgaaaaataacatcataagcttcaagatccaatttgggtcgttctgtgttttcttctgatgggtctcgtcgaaatgtagaacaagtttggagatgttgacaatggacaaggaatttgattcaaagcttactcttcaagggaattcatcttcaaatggggaaactatttccagaagcaaaagcttcgcctt

SEQ ID NO: 123746 - DNA, 1024 bp, Arabidopsis thaliana
  unsure (1)..(1024): unsure at all n locations
nnnnnnnnnnnnnnnnnnnnnnnnnnnnnnnnnnnnnnnnnnnnnnnnnnnnnnnnnnnngttttctacccacgcgtccgccgccgcgtaccattcaacaaaattctctcttcatttctttattttgttgttttttttattattattgaaatcaagagaattaaaacagaggctctgcaaaagaagatgatcaaaacaatcacatctctacgcaaaactctggttctacctcttcatttacatattcgtacgctacaaactttcgccaagtacaacgcacaagctgcatcggctttgcgagaagagcgtaagaaacctctttatcaaaatggagatgatgtatatgcggatttggattgggataatctcgggtttggtctaaatccagctgattacatgtatgtcatgaaatgctcaaaagacggcgaattcactcaaggagaacttagtccctatgggaatattcagctaagtccttctgctggagtcttaaactatggacaggcgatatacgaaggtacaaaagcatacaggaaagaaaatgggaagcttcttttgtttcgtccggatcacaacgctatccggatgaagcttggcgctgaacggatgctcatgccttctccttcggttgatcagtttgttaatgcagttaaacaaaccgctcttgcaaacaaacgttgggttcctcctgcagggaaagggactttgtacattaggcctttgttgatgggaagtggtccaatacttggtttaggtcctgcacctgaatatacattcattgtctatgcatctccagttggtaactacttcaaggaagggatggctgctcttaacctctatgttgaggaagaatatgtccgagcggctcctggtggagctggaggcgtcaagagcatcacaaaattatgccgccaagtttttgaaaggccctgtggcagagccaagaagtccggggggttttcaaaacggttcttaaaccctggncttttgncaagganggaggtcctttnggggggggtttntt

SEQ ID NO: 123747 - DNA, 469 bp, Arabidopsis thaliana
cagcgtctctacgactcactattgggaaagctggcacgcctgcaggtaccggtccggaatcgtgggcggacgcgtgggggatacttaatttgacactcttctttgtgttttctcttccaccttctttttcggtatatcattcaacaaaattctctcttcatttctttattttgttgttttttttattattattgaaatcaagagaattaaaacagaggctctgcaaaagaagatgatcaaaacaatcacatctctacgcaaaactctggttctacctcttcatttacatattcgtacgctacaaactttcgccaagtacaacgcacaagctgcatcggctttgcgagaagagcgtaagaaacctctttatcaaaatggagatgatgtatatgcggatttggattgggataatctcgggtttggtctaaatccagctgattacatgtatgtcatgaaatgctcaaaagac

SEQ ID NO: 123748 - DNA, 749 bp, Arabidopsis thaliana
gggaagaaaccagcccaattcaaaagatttttgaaaaaaagtgaagccttgaagggtttttaatacgttcaactcggtctgtttcaagtttgatattttttggacgcacgcaagggcgatttgttgtcattgtttccttacagagtaaaaaaagctctccgcaaaatccatgtaagggttgtttttgaacttgagaagaagttcagtggaaaggatgtgatcctcattgctacaaggaggattgtgaggccgcccaagaagggttcagcggcaaagagaccacgcatccgtactctgacctcagtccatgaagctattcttgatgatgtggtcttacctgcagagattgttgggaagcgcacaaggtacagactcgacggtaccaaaatcatgaaggtcttcttggacccaaaggaaaggaacaacacagagtacaaggttgaagctttctctgcggtttacaagaagctcactggcaaagatgtcgtctttgagtttcccatcactgaagcctaagagatgaaatgagacgtagagaatctgttatgatctcagatattttaatcttctttttcgtctactttctttaatgtggcaagacattggttttacttctgaaaatctgtacaatggtcgagttttctccaaagttttgagaaactttttaaaaaaaaaacaaaagaaaaggtcggccgctctagaggatccaagcttacgtacgcgtgcatgcgacgtcatagctggtctat

SEQ ID NO: 123749 - DNA, 960 bp, Arabidopsis thaliana
  unsure (1)..(960): unsure at all n locations
ctactatagaagagttatgacgtcgactgcacgcgtacgtaagctcggaattcggctcgggggacggattagcttcagtatccattggcggattagcctcagagtgctctgatcaaggttttggaggttgcatttgagtgaggagatgttttcggctcagcataagattcataaggagaagggtgtggaactttctgaattggatgagcaagttgctcaggctttctttgatttggagaacaccaatcaagaattgaaaagtgagctgaaggatttatacgtcaactcggctgttcaagttgatatctctggaggacgcaaggcaattgttgtcaatgttccttacagactgagaaaagcttaccggaaaatccatgttaggcttgttcgtgaacttgagaagaagttcagtggaaaggatgtgatcctcattgctacaaggaggattgtgaggccgccaaagaagggttcagcggcaaagagaccacgcaaccgtactctgacctcagtccatgcagctattcttgatgatgtggtcttaccttcatagattgttgggaagcgctcaaggtacagactcggcggtacctaaatcatgaaggtcttcttggaccctaagtaaaggaccttcacagagtacaaggttcaggctttctatacggtttccaagaagctcactggcaaagatgtcgtctttgagtttcccatcactgaagcctaatagatgccatctcacgtaaagaatctgttatgatctcagacattttaatcttctttttcgtctactttctttaatgtggcaagtcattggtttaacttctgacaatctgacacatggtcgagttttctcgaaaaaaaaaaaaaaaaaaggnnnnnnnnnnnnnnnnnnnnnnnnnnnnnnnnnnnnnnnnnnnnnnnnnnnnnnnnnnnnnnnnnnnnnnnnnnnnnnnnnnnnnnnng

SEQ ID NO: 123750 - DNA, 743 bp, Arabidopsis thaliana
cgcgtccgaccaagcgtccggttcgatctagctaggcatcatgcaccttcgacaatatttcttgatgagatcgacgcgatcataagccaacgtggtggtgaaggccgcagtgaacatgaagctagcaggcgtctcaaaaccgagctgctcattcagatggatgggttacagaaaacgaatgagctcgtatttgttttagcagcaacaaatctcccctgggaactatatgcagctatgctccggcgtctagagaaacgaattcctgtacctttaccggatccagaagcaagaagaggaatgttcgagatgcttataccgtcacaaccaggtgatgagccattgcctcatgatgtgttggttgagaaatctgagggctactctggttcagacattcgaatactttgtaaggaagctgcgatgcaaccactgagacgcacattggctattttggaagacaaagaaaatgttgtgcctgaaaacgagctgccaaaaattggtcccatcctgccagaagacattgatcgagctttgagcaacactcgaccatcggctcatctgcacgcccatcttttcgacaagttcaatgatgattatggtagccaaattctcaagtaaattcgatgtaatatatacatctatgccatctagaacttgctcattatttgtatggaagcatcccaattacggatgctcaatgaacttttctgtcttaaattatgaataaatgctcctagttccctggg

SEQ ID NO: 123751 - DNA, 916 bp, Arabidopsis thaliana
  unsure (1)..(916): unsure at all n locations
gagattccactctatacatacttaggaagctgtaccctcaggtaccgtccgatcccggtcaccacgcgtgcggggggcaacttacactccttactccgacgtgttggtcaaacccttctctctccatcacactatccctcaaccgccgtgctacaccgtgtgacttcaacaccggagtgatggtcatcgagttaaagaaatggcgagaaggagattacacgaggaggatcatagaggggatggagttacaaaaacggataagaatctacgagttaggctctttacccccgtttttacttggcttcgccggaaacatagctccggtagatcaccggtggaaccaacacggtttaggaagagataattttagaggactgtgtcgagatttgcatccaggtccagtgagtttgttgcattggagggggaaagggaacccatgggtaaggttagatgatggtcgaccttgcccgcttgatgcactttgggttccatatgatttgttagagtcacggttcgaccttatcgagagttaaattttagatgttagttttcttttttggggggtaaaagtatatttttgactgaatgtgtaatataggaagatgaataataatacttgaataaaatgataggaaggataggatagtcgaatgtgtaattagtttggtgatggtagttacttactctcgtaacgcattgcctaaatataaaataattaattcgatacctataaggtaataattgtgaatatgtatatctactctaccgaatgtactacggcgagtaattacaaagaaatatactacagcttttttttancaaaaaaaaaaaaaaaaaaaaaaaaaaaaaaaaacaaaaaacnaagggcggccgctctagaggatccaagcttacgtacgcgtgcatgcgacgtcat

SEQ ID NO: 123752 - DNA, 534 bp, Arabidopsis thaliana
cccggtaacagggagctcgcacgggcggctacgaaatcgctgtattttcaaatcgtctctcagtttccatgacttcagatgctctcactataccatctgagcttgaatctgccttgcggctcaggactgtacaatactttattacaaaaaggccttggcttgatctttatggagtccatgtgaggcctgtgccaccattcggaagtacaagccgtaaacctcattttgatccagctttgattcatcgttgcttgcctgatgagcttcttttcgaggtgtttgctcggatgatgccttatgacttaggtagagcagcttgtgtatgcagaaagtggaggtacactgttcgaaaccctgtgttctggcgtaatgcctgtttgaaagctttggcagactgctgggggtatcggaaaactataagatcttgcagtctaaatatgatgggtcatgggggaaaatgtggctcttaggtccagagttcggactgatgggctttatgtgagtgggtccttcatccgggtggattcaggtggc

SEQ ID NO: 123753 - DNA, 542 bp, Arabidopsis thaliana
acgattcgtcctcttcgtttccttcttccattaatacaaagcaaatcctactctgaaagcttctttattcaatctctctacttcagtttctctgtccccatttttcatctgagagttaaaactgtaacctcaaaatctgagataaagtcaaaaaaagaaccccagtttatgattctcattttctctttataatcgaaagcttcgatttttaacaaaacccagaatctgtgttcttgttttttttttttttttggtgagagttatctttttttttttttggaatattgggtgagaatctgagtaatgggatttacataaaaagattctatgtaaatactaaaataatctggaaattattaaatttccaaactttgtgttccattttgtggactcaaatttgtttataaagatctcaaatcagagagattgagacgaccaagaacaagcagaagaagaagaattgagagaatggtggtggggtcttcttcaactaaaggtcgttcgaatctggagaggttttttaggaatactctagcctcttc

SEQ ID NO: 123754 - DNA, 872 bp, Arabidopsis thaliana
aggacgcgtgggtcagtagatcggaaaatggagccatggattgacgaattaaccgacgacttacagagtgtaagctttacatcagccggaaccaccgtgaatcgaagcacaagctccggttctcgctcttcctcctccgccgcagctttaacaccagcaccatcagctcacggttcatgctcatcttcgaaactccctccttcactccgatcatctctctcactctccgatctcagattccgtctccgtctcggttccggcgacatcggctctgttttcttagccgaattcaaatccctaaccgccgtaacagaaaccaccgccgttaaattacctctgttagcagcgaaagttatggataaaaaggagctcgcgagcagaagcaaagaaggtagagctaagacggagagagagattctcgaatctcttgatcatccgtttcttccgacgctttacgccgccattgattctccgaaatggctctgtttattaacggagttttgtccccggcggtgaccttcacgttctcccgtcaaaaacagactcataaacgggtttccatgaatccgccgtcagattctattgtatcggaagtgatcgtagcgggttgaatattcttcacatgttgggggttgtgttcccccgggtgaagcctgagaacgtgctggttcgatcagatggtcacatcatgttaactgattttgatctctccttaaaatgtgatgaatcgacttccacaccacagatagtgctgaaccggaacaatcttcctaatggctcgtctgaccagaacgagaaccaaggcatggaccaccgtcaaaccacatcatcctcttgcatgatccctaactgtattgtccctgctgtctctt

SEQ ID NO: 123755 - DNA, 987 bp, Arabidopsis thaliana
  unsure (1)..(987): unsure at all n locations
ttaggacacactatagaagatctatgacgtcacctgcacgcgtacgtaagcttggatcctctagagcggccgcccttttttttttttttttattcataaccaataatcggattgttaattgaaaactttaatactccatacatattgagttaactctgttaacttgaatgcttaagaataccatccaaatctaatttagtcccaatctcaagttactaacaataataattactgtatatgaatgtcacatattaacctacaagaaaataaaataatattaattccatgtgcaataataagagtcgatcaccaacttcgctgtgtcactctctctatatataaagactttccctcctttagactttgtgcattatccaaaaaatggagaagaagaagaacaacaacaatggaggagatttcggagaagaagaaagttccattgacggagacatactcgagtcaatcctctcctatttaccactcctagacctcgattccgcttgccaagtctccaaatcatggaaccgcgccgtcttttactccctccgccgccttaaaaccatgccgtggttgttcgtctacaaccagagaaattctccgccgtacaccatggcgacgatggcgatggcttatgatcccaagtccgaggcctggatcgagctcaacaccgcatcatctcccgtcgaacacgtctccgttgctcgatcctctcactccacgttgctctacgctttatctccggcgagattctctttctcaaccgacgcgtttcatctgacttggcaacacgtggcaccgccgagagtttggaggatcgatccaatcgtggctgtagtcggacggagcctgattatagccggaggtgttttcgattttgaggagggtagattnccgtgggntnttcganatgaatccgagacgagcntggaaaattgaatcnttccggtttttttnngaatccngtgtcaagngggttccaagggtagt

SEQ ID NO: 123756 - DNA, 800 bp, Arabidopsis thaliana
aacttgaagccaccaaaaaaagtaggtgaaagtgagttggtggggggattcaaaagttccacatgacaaatagataatcagtataaataagattagttcttcttatattgtcttattcaatgcacacaaacatttacccaaaatggcatcggcggttcagaaatcagcgttgctcttatgtggagactacatggaagcctatgaaacgattgttcctctctatgttctccaatcgtttggggttagcgttcattgcgtttcacccaaccgcaacgccggcgatcgctgcgttatgtctgcccacgatttcttgggcctcgagctatacaccgagcttgtcgttgaccagttgactttaaacgcaaacttcgatgacgtcactccggagaattacgacgtcatcatcatcccaggaggccgattcacggagcttctcagcgccgacgagaaatgcgttgacctcgtggcgcgattcgccgaatccaagaagctgatcttcactagctgtcatagccaggttatgctgatggcggccggaatcctcgccggtggtgtgaaatgcacggcgtttgaaagcataaagcctttgatcgaactctccggcggtgagtggtggcaacagcctgggattcagagcatgttcgagatcaccgattgcgttaaagacgggaatttcatgagtacggttggttggccaacgcttggtcacggcattaagcttttgcttgaatctcttggtggcaaagtctgtagcttggagaagaagcaagcttctgtgcttttcctcattggggactatg

SEQ ID NO: 123757 - DNA, 533 bp, Arabidopsis thaliana
  unsure (1)..(533): unsure at all n locations
ggggggacgcctctcgttctctcttccgtcaatatggaaggcgtcaccgtcgtgtctttcttccttcttttcatcgccaccgccatggccgccaagtccaccgtctccttccgtgacggcatgttaccaaacggagacttcgagctaggaccaaaaccatcagacatgaaaggaacagaaatactaaacaaactagcaataccaaactgggaagtcacaggattcgtcgaatacattaaatcaggacataaacaaggagacatgcttctcgttgttcccgccggtaaattcgctgtaagacttgggaacgaagcatcgatcaaacaaagacttaaagtggttaaaggaatgtattactcactcacttttagtgctgctagaacttgtgcacaagacgagagacttaacatatctgtagcacctgactccggtgtgattccgattcagacggtttatagtagtagtgggtggggtttataattccttgggngnttaaggcttagagngnnttttctnaggtngtnttcanaacc

SEQ ID NO: 123758 - DNA, 458 bp, Arabidopsis thaliana
cgcgacgactgtgagagtttgtttcgcgaacattctctgagtttctctcgacgcgacggcgattgcgaatgtcttctccttctgattctcgtctctctgtgtctccgggataagtaatcgaagatgaatatgattcagcgattcatgcaatctatggcaaagacgcgtggcctctgtcatccagattgcgtaaaagcaagtagtgagcaagaagattacgatgcgtctcagctcagtatttggtggataatgctgggaaggaagacgaccagggagaaatggatgaaccaagctctcagttcactatcgaaaacttgcatcagtatatggtggaaaatgtctggaataagaggtaagatgtgcagggagagggagcaaccactcactgtcaaagactgccttgaatgtgctttcaagaaagggctaccgagaagagaacattgggcacatgtgggatg

SEQ ID NO: 123759 - DNA, 641 bp, Arabidopsis thaliana
  unsure (1)..(641): unsure at all n locations
ccaactctatacgactcactatagggaaagctggtacgcctccaggtaccggtccggaattcccgggtctacccacgcgtgcgagagaagacagaaagaaaaaaactttttttcttttcgttaaaggctccacctttctttcttcttaacacacaacacatgaaaatccctgcatcatctcctcaagacacgaccaacaacaacaacaacactaatagtactgatagtaatcacttatcaatggacgaacatgtcatgcgttcaatggattgggattccatcatgaaagaattggagcttgatgacgattctgctcctaactcacttaaaaccggtttcaccacaaccacaacagattctactattttgcctctttacgccgtcgattcaaatctccctggctttcccgatcagattcaaccgtcggatttcgaatcgtcttccgatgtttatcctggtcagaaccaaacaactgggtacggttttaattctcttgatagtgtcggcaatggaggatttgatttcattgaagntctcatccgagtcgtggnttgttttgaatcggcggngttncaactgggtcagggnggttttncacgggttaatnaacggttnaaatctccgngggntagcccntncag

SEQ ID NO: 123760 - DNA, 764 bp, Arabidopsis thaliana
  unsure (1)..(764): unsure at all n locations
acaaaacctaatttcctttctcctaaactctctcatcttcctctttctctctcttttcttcctaaatgataaggtaacttcaaaactacgacaattcaacactcgaaaggacacgccaagatttaggtttttagcttgattcaaaaatggagacgaatccgtgtgacatgaatcagctcgattccgattcgcatctccctcctcgaaaacgattacttgctggattcaagaaatttaactccaacggcattaatggatcttctccttcagatttcgcttcttcttcctctacttcaaactcaaacggatcttcctctgcttccaccaatgttcagacccatctcggcaacttgttatcttctcctttcaacaatgaccagtcacctgaagagctcgtggaggcaacgagatctgcagctgctttagcggttaaagctgcaaaggctgcgagagctattgctaacgagaaggctttgatttccgctaaggcgattgctgcggctaagagggcattggaattggttgattcttttcctaaagaagcaatggctgattgcaaggagaggtctcctaggaagaacaagcagaaggaaacatgtccccggtcgagctcttgtcttcaaagggggcagccttaagagacggtggaagatgatttaagcccgnaggtttcaatcgngctnttngccaatacggcggatccctagagtntttgagaactangcggaggngnattggccaggggnttcaaggnngcangnggt

SEQ ID NO: 123761 - DNA, 976 bp, Arabidopsis thaliana
  unsure (1)..(976): unsure at all n locations
ctctactccctctcagtatanctatgcgcctgcacgtaccggtccggaaaccgcaaacgcgacagaactaactaacgacgccggagatggccgccacttcaaccgccgctgctgcttcttcaatcatgggtacccgggtggtttccgacattagctccaattcaagccggttcacagcccggttcggattcggaaccaagaaagcatctcccaaaaaggctaagacggttatctcagaccggcctctatggttcccaggcgcaaaatcacccgaatatctcgacggttcacttgtcggggactacgggttcgatccttttggtttaggcaaaccggcggagtatctccaattcgatttggattccttggaccagaacttagccaagaacttatacggagaagtgatcgggactcgtaccgaggcggtggaccccaaatcgacgccgtttcagccatatagtgaagtcttcgggctacaaagattcagagaatgtgagctgattcacggtcggtgggcaatgctcgccacttttggggctattaccgtcgaatggctcaccggtgttacttggcaagacgccggcaaggtagagctagtggatggatcatcttacttaggacagccattgccgttctctatctcgacattgatatgggatcgaagtgttaagtgatcgggtacattgagttcccaaacgaaacgctgaactggactccgggagaagcgtttgtaatccaaggaggcaagttcttttgacccgttaagggctaacggnttgancccggtgaanaagggccagttnaagcaagctgngattaaaatgnccgtttancaagggtgnatnctngggtttcngggcaagngggttnancgggaaaggccgcnaaaaatngggggccncctnggggccctttnacnncatttggaacctcttccccccaaggggggtttncccacgggnnnaaaagggggggt

SEQ ID NO: 123762 - DNA, 737 bp, Arabidopsis thaliana
  unsure (1)..(737): unsure at all n locations
ttaggacacactatagaagagctatgacgtcgcatgcacgcgtacgtaagctcggaattcggctcgagcaaagattcagagaatgtgagctgattcacggtcggtgggcaatgctcgccactcttggcgctatcaccgtcgaatggctcaccggtgttacttggcaagacgccggcaaggtagagctagtggatggatcatcttacttaggacagccattgccgttctctatctcgacattgatatggatcgaagtgttagtgatcggctacattgagttccaacgaaacgctgaactggactcggagaagcgtttgtatccaggaggcaagttctttgacccgttaggactagcgtctgacccggtgaagaaggctcagcttcagctagctgagatcaaacatgctcgtttagccatggttggattcttgggttttgcggttcaggcggctgcaaccggtaaaggaccgctcaacaactgggcgactcaccttagtgacccacttcacaccaccattatcgataccttctcttcctcctgatgtggtggcttttagcttctactggtgtcatgtaatgatgtggtggcttttagcttctactggtgtcatgtaatgatgtaacgtcgttattttaaagaaaatttggcaccttttgtataaacggaatttcttnnnnnnnnnnnnnnnnnnnnnnnnnnnnnnnnnnnnnnnnnnnnnnnnnnnnnnnnnnnnnnn

SEQ ID NO: 123763 - DNA, 535 bp, Arabidopsis thaliana
  unsure (1)..(535): unsure at all n locations
aacggacagaactaactaacgacgccggagatggccgccacttcaaccgccgctgctgcttcttcaatcatgggtacccgggtggtttccgacattagctccaattcaagccggttcacagcccggttcggattcggaaccaagaaagcatctcccaaaaaggctaagacggttatctcagaccggcctctatggttcccaggcgcaaaatcacccgaatatctcgacgggttcacttgtcggggactacgggttcgatccttttgggttaggcaaaccggcggagtatctccaattcgatttggattccctgggcccagaacttagccaagggaccttttacgggggaagtgattcgggaccccgtaccgaaggccgggttggacccccaaattcgacggccgtttnaagcccatataagtgaaggttttcggggttaccagaggttaatgggggtttattacgtatttacggggggttgggaaatncttgccantttttggnggnttncccgnngaattgnnttacccggtgt

SEQ ID NO: 123764 - DNA, 571 bp, Arabidopsis thaliana
  unsure (1)..(571): unsure at all n locations
aacgggncagaactaactaacgacgccggagatggccgccacttcaaccgccgctgctgcttcttcaatcatgggtacccgggtggtttccgacattagctccaattcaagccggttcacagcccggttcggattcggaaccaagaaagcatctcccaaaaaggctaagacggttatctcagaccggcctctatggttcccaggcgcaaaatcacccgaatatctcgacggttcacttgtcggggactacgggttcgatccttttggtttaggcaaaccggcggagtatctccaattcgatttggattccttggaccagaacttagccaagaacttatacgggagaagtgatcggggctcgtaccgaggcggtggaccccaaatcgacggcgtttcagccatatagtgaaggcttcgggttccaaagtctagggatntaagctgttacggtggtgggaatttngcaactttgggggttccgcgtgggtggtgaccggttttttttgaaaacgncggaaagtaggnttntggtgntcantttnttggaacattccgtnttttttgantanta

SEQ ID NO: 123765 - DNA, 488 bp, Arabidopsis thaliana
  unsure (1)..(488): unsure at all n locations
ctacgggttcgatccttttggtttaggcaaaccggcggagtatctccaattcgatttggattccttggaccagaacttagccaagaacttatacggagaagtgatcgggactcgtaccgaggcggtggaccccaaatcgacgccgtttcagccatatagtgaagtcttcgggctacaaagattcagagaatgtgagctgattcacggtcggtgggcaatgctcgccactcttggcgctatcaccgtcgaatggctcaccggtgttacttggcaagactgccggcaaggtatcgcctcttttcttttcgtcacttttgcggtttgtgtttagcgctttcgacatctgtcttgattgttttatttttcaatttaccaggtagagctagtggatggatccatcttacttangncagccattgccggtntttatnctggncattgntaatgggnccgaaggnttaagtnnccgggnanatttgggtncancg

SEQ ID NO: 123766 - DNA, 613 bp, Arabidopsis thaliana
cacacacgtccgcggacgcgtgggcggacgcgtgggcggacgcgtgggggctaaagtaataaaattaatggcaacttcagggtttaagcatttggtggttgtgaagtttaaggaagatacaaaggttgatgagatcttgaagggcttggagaatcttgtttctcagattgatactgtcaaatcctttgaatggggagaagataaagagagtcacgatatgcttagacaaggtttcactcatgcattttcgatgacctttgagaacaaagatggttacgtcgccttcacaagccatcctcttcatgttgaattctcagccgctttcaccgccgtcatcgacaagatcgttctcctcgatttccccgtcgccgctgtcaaatcttccgttgttgcaacaccatgaatcttgtgatggttacatatcgtcatatgactcatatcgaacttgtttcttaatttaaacgaagtttgagttgtttggttatgtaacttggttgggtaattaaggatgttttggtttgatttgtttattttcggtttgcggtaataagaatctggtttgattggaccttgggggtttatgatttctttcaaaaaagagcattttttaagt

SEQ ID NO: 123767 - DNA, 635 bp, Arabidopsis thaliana
  unsure (1)..(635): unsure at all n locations
agccaacgcgtccgcccacgcgtccgcaatcgctggactctgctactgcgaagaacaacaaattccttgtttatcatggcgaattccggcgaagagaagttgaagctctactcttactggagaagctcgtgtgctcatcgtgtccgtatcgccctcgctttgaaagggcttgattatgagtatataccagtgaatttgctcaagggtgatcaattcgattcagatttcaagaagatcaatccaatgggaactgtaccagctctggtggatggagatgttgtgattaatgattcttttgcgataataatgtatctggatgagaagtaccctgagccacctttgttacctcgtgacctccataaacgagctgtgaattaccaggcaatgagtattgtcttgtctggcatacagcctcatcaaaatcctggctgttattagggtatatcgaggaaaaggtaaatntggaggnganggctncctgggtnataatgctttcncaaaagggtttcagtcttcggnaactttggggatttncctgggaanatcgctggngtgaattacccggtncttttttggcccagncccgggggntnacagtcccgttantggccgcccacnttnaaatttcggtttna

SEQ ID NO: 123768 - DNA, 411 bp, Arabidopsis thaliana
tgctactgcgaagaacaacaaattccttgtttatcatggcgaattccggcgaagagaagttgaagctctactcttactggagaagctcgtgtgctcatcgtgtccgtatcgccctcgctttgaaagggcttgattatgagtatataccagtgaatttgctcaagggtgatcaattcgattcagtttatcgttttgatcttcaagatttcaagaagatcaatccaatgggaactgtaccagctctggtggatggagatgttgtgattaatgattcttttgcgataataatgtatctggatgagaagtaccctgagccacctttattacctcgtgacctccataaacgggctgtgaattaccaggggaatgagtattgtcttgtctggcattcagcctcatcaaaatctggct

SEQ ID NO: 123769 - DNA, 570 bp, Arabidopsis thaliana
  unsure (1)..(570): unsure at all n locations
agctctcnnnnnnnnnnnnnnnnnnnnnnnnnnnnnnnnnnnnnnnnnnnnnnnnnnnnnnnnnnnnnnnccacgcgtccgctcccaccattttcagagctcagagaaaaagaaagaaagaaaaaaagcttcgtgctccttcaccttcccaaatcggaaaacaatgcacgccaaaaccgattccgaggtaacaagcctcgcagcatcatcaccagccagatctccacgtagaccagtctactacgtccaatcaccatcacgcgactctcacgacggagaaaaaacagcaacatcgtttcactcaactccagtactaagtccgatgggatctccaccgcattctcactcatctatgggtcgtcactcacgtgaatcatcttctagtcgattctctggctctttaaagcctggatctagaaaagtcaaccctaacgatggttctaaacggaaaggtcacggcggtgagaaacagtggaaagaatgtgcggttattgaagaagaaggttttggtttgtgtttttccgcgttttttatgttgtttgtccccgctgacgcctttcttcccccccc

SEQ ID NO: 123770 - DNA, 612 bp, Arabidopsis thaliana
  unsure (1)..(612): unsure at all n locations
cattttcagagctcagagaaaaagaaagaatgaaaataagcttcgtgctccttcaccttccgaaatcggaaaacaatgcacgccaaaaccgattccgaggtaacaagcctcgcagcatcatcaccagccagatctccacgtagaccagtctactacgtccaatcaccatcacgcgactctcacgacggagaaaaaacagcaacatcgtttcactcaactccagtactaagtccgatgggatctccaccgcattctcactcatctatgggtcgtcactcacgtgaatcatcttctagtcgattctctggctctttaaagcctggatctagaaaagtcaaccctaacgatggttctaaacggaaaggtcacggcggtgagaaacagtggaaagaatgtgcggttattgaagaagaaggtttgttagatgatggtgatagagacggtggtgttcctcgtcgttgctatgttttggctttnatcgttggattctttatnctctttggtttctnctctttnattctctatggtgctgctaaacctatgaaacctaagancactgtcaagagtataacatttganacgcttaaganccaagcctggtcaanatgctgg

SEQ ID NO: 123771 - DNA, 724 bp, Arabidopsis thaliana
  unsure (1)..(724): unsure at all n locations
nnnnnnnnnnnnnnnnnnnnnnnnnnnnnnnnnnnnnnnnnnnnnnnnnnnnnnnnnnnnnnnnnnnnnnnnnnnnnccacgcgtccgcccataccatcaattatcatttctctcttcgaagaagaagaagaagaagaagatatgggtgttgatttggatttggaatccatctccgaagccacctccggagccattggatctcttctcagcaccaccattttataccctcttgatacctgtaaatccaagttccaagccgagattcgtgttcgcggtcagcagaaatacagatatctgtcagatgtgttttgggaagcaatttcatcaggaaatgttctctccttgtatcaaggccttgggactaagaatttgcagtcttttatttcgtccttcatctatttctatagttatagctatttcaagaggttacattcccaaaggattggttctaagtctattggaacaaaggctaatctcctcattgctgctgctgctggtgcttgtacctctgttttgactcaacctctagatacagcttcatcgaggatgcaaacaagcgagtttggaaaatctaaagggttgtggaagacactaacagatggttcatggggaaatgcatttgatggccttgggatttcccttttattgacctcgaatccagcaattcagtatacagtgtttgatcagctgaaacagnacctccttggaaaaagggaaggcaaa

SEQ ID NO: 123772 - DNA, 592 bp, Arabidopsis thaliana
  unsure (1)..(592): unsure at all n locations
tacgactcactattgggaaagctggtccgcctgcaggtaccggtccggaattcccgggtcgacccacgcgtccgaaaaaaccttcggcttcgtctcgtcaatggcggccatttctgtaagttcttcaccatctattcgctgcttgagatcggcatgttccgattcttctcctgctcttgtatcctcgacgcgtgtatcgttcccggcgaagatttcatatctctccggtatatcttcgcaccgtggcgatgaaatgggtaagagaatggaaggattcgttagaagcgtcgatgggaagatctctgatgcgtctttctccgaagcttcatctgcgactccaaaatcgaaggtgaggaagcacacaatttcagtatttgttggagacgaaagcggaatgattaataggattgcaggagtgtttgcaaggagaggatacaatattgagagtcttgctgtttggtctgaacagagacaaggctctattcaccatagttgtctgtggacctgaaagggtctttagcaggtaatcggnaactccagaantcgtnaatgtctaaaggttnaagntttnnaagtncccnaagtggngtgc

SEQ ID NO: 123773 - DNA, 465 bp, Arabidopsis thaliana
tgaagttaataacaatgaagatattctctgttctgttactactatgtttcttcgttacttgttctgtctcttctgaacccagaaaccctgaagtggaggcgttgataaacataaagaacgagttacatgatccacatggtgttttcaaaaactgggatgagttttctgttgatccttgtagctggactatgatctcttgttcttcagacaacctcgtaattggcttaggagctccaagtcagtctctttcaggaactttatctgggtctattggaaatctcactaatcttcgacaagtgtcattacagaacaataacatctccggtaaaatcccaccggagatttgttctcttcccaaattacagactctggatttatccaataaccggttctccggtgaaatccccggttctgttaaccagctgagtaatctccaatatctgaggttgaacaacaactcattat

SEQ ID NO: 123774 - DNA, 698 bp, Arabidopsis thaliana
  unsure (1)..(698): unsure at all n locations
nnnnnnnnnnnnnntacaactcattttgggaaggctggtccgcctgcaggtcccggtccggaattcccgggtcgacccacgcgtccgcggacgcgtgggcggacgcgtgggttgaagtagactctaagctaaagccaccgtcagattttcagatctcagatctcagctcttcattcgacgccatggccgagaagggcaaagaaaaggtaactatgatgaagttgaaggtggatcttgattgtgccaaatgttacaagaaagtgaagaaggttctttgcaagttccctcaaataagagaccaattgttcgatgaaaagtccaacattgttatcatcaaggtggtttgctgtagtcctgagaggatcatggacaaactctgttccaaaggcggcggctcgataaagaccattgagatcgtcgagccacccaagcctcctcagccacaaccccaacaaccacctcagaaacctaaagatgctcagcctaaagctcctgagaaggcctaaggaacctgaaaagccaaaacagcctgaaaagcctaaagagccagagaagcccaaacagccagaaaagcccaaagaacccgaaaagacgaagcaacccgcacccgctccagctcccgcaccagcacccgcagccaaacccgcacccgctcccgctccagctcccgcacctgccccgaagcagccgggaccgcc

SEQ ID NO: 123775 - DNA, 458 bp, Arabidopsis thaliana
gtgaaaagggttctggtgattccattattgtacctggctgctaacatttttgtttttcttttaaaatcaagaaaaaagttttgattaatcaaaatcgacgccaactaaaaacacgtgtcaaaacgtggttggtgacagtgggatatgagactgtattataaaaagctacatttctcaccaccacccaatctctctctcccttgaagtagactctaagctaaagccaccgtcagattttcagatctcagatctcagctcttcattcgacgccatggccgagaagggcaaagaaaaggtaactatgatgaagttgaaggtggatcttgattgtgccaaatgttacaagaaagtgaagaaggttctttgcaagttccctcagataagagaccaattgttcgatgaaaagtccaacattgttatcatcaaggtggtttgctgtagtcctgagaggatcatgg

SEQ ID NO: 123776 - DNA, 561 bp, Arabidopsis thaliana
acaaaagtctgaagcagagagacatacttacatatgtgtgattcttccctaagaggaattctcaaaaatcaaagcatctctcctcttcttcctaaacgtcgacgagtggagtccttggcgcgatcaagattcaaaagaaattcggggactactactactcaagactaaataagataggaaatgggttgatacaaagaagttgtccttttaagaattccatcactaggagttggaaagtctgaaccagagactttggtgtgcttctccaaaaacgacgagagtccagcgtctagcagtatcaagcaactctcttcttactagattctttcacaccatcaagaggagccattatggcaggggaacttgtgtcgtttgcagtaaacaagctttgggacctactgagccatgaatacacgctatttcagggagtcgaagatcaagtagctgaactaaaaagtgatctaaacttgctaaagtcgtttttgaaagatgcagatgccaagaaacacacaagcgcattggtgagatactgtgtggaagagataaacgatattgtttatg

SEQ ID NO: 123777 - DNA, 531 bp, Arabidopsis thaliana
caggtctctacgactcatattgggaaagctggtacgcctgcaggtaccggtccggaattcccgggtcgacccacgcgtccgcccacgcgtccgcggacgcgtgggcagccacactggctcctttaaagatctgggcatgagtgttctcgtttctcaggtgaatcgtctccggaaaatgaacaaaccagtcatcggagttggttgcgcttctactggagatacctccgctgctctctctgcttactgtgcttccgctggaatcccctcgattgtcttcttacctgcggataaaatctccatggctcagcttgtgcagccgattgcaaacggagcgtttgtgcttagtattgacactgattttgacggatgtatgcatttgatcagagaagttacggcggagcttcctatttacttggcgaactctctcaacagcctccgtctcgaaggtcaaaagacggcggcgattgagattctgcagcagtttaattggcaagttcctgattgggtcattgttcctggaggcattcttgg

SEQ ID NO: 123778 - DNA, 828 bp, Arabidopsis thaliana
agaacattctgcaaagaggcaaagtttgttggaagagatcgaacgtgagtttgaagctgctacaaaagaacttgaacaactaaaggttaatgacttcaccggggacaaagatgacgaagaacactctgcaaagagaaaaagtatgcttgaagctattgaacgcgagtttgaagctgctatggaaggcattgaagcacttaaggtttctgattccacaggaagcggagatgatgaagaacaatctgcaaagagactaagtatgcttgaagagatcgaacgggaatttgaagctgcttcaaaaggtcttgaacaactaagggctagcgattcaaccgcggacaataacgaagaagaacacgctgcaaagggacaaagtttgttagaagagatcgaacgagagttcgaagctgctacagagagccttaagcaacttcaagttgatgattctactgaagacaaagaacactttacagctgcaaagaggcaaagtctgctggaagagattgaacgtgaatttgaagctgcaacaaaagatcttaaacaactaaatgatttcactgaaggcagtgctgatgatgaacaatctgcaaagagaaacaaaatgttggaagatatcgaacgcgaatttgaagctgctacaataggtcttgaacaactaaaggctaatgatttctctgaaggcaataataatgaagaacaatctgcaaagagaaagagtatgcttgaagagatcgaacgcgagttcgaagctgctattggaggtcttaaacagatcaaagttgatgattccagaaatcttgaagaagaatctgctaagagaaagataat

SEQ ID NO: 123779 - DNA, 748 bp, Arabidopsis thaliana
ggaagagctggcccgcctgcaggtaccggtccggaattcccgggtcgacccacgcgcccgaaatctctcaaagtaagaactaagagctttactacagtcctactctctacacatcttctctctctctcaagagctagtcatggccaaactcataacttcttttctcttactcacaattttattcactttcgtttgtctcactatgtcaaaagaagctgagtaccatccagaaagttatggaccaggaagtctgaaatcataccaatgtggaggacaatgcacaaggagatgtagcaacacaaagtatcataagccatgcatgttcttctgccaaaagtgttgtgctaaatgcctttgtgtccctccaggcacgtacggcaacaaacaagtgtgtccttgttacaacaactggaagactcaacaaggtggaccaaaatgtccataaacaaaaacattgagagagaaaccccaatctgtttcctattttatttaattatttccagtatgcttttgttgtcgtgatggttaaattatagtgtttttgcaggtatcatttatcatcgataaacaatatcatataaaatcttctatgtttctttcacgttttgtttcttttgttgtagtcaatacacgaaatgtgtatggaccttctaattaggaatatataaaattttatttattaaaaaaaaaaaaaaaaagggcgaccgctctagaggatccaagcttacgtacgcgtgcgtgcgacgtc

SEQ ID NO: 123780 - DNA, 694 bp, Arabidopsis thaliana
  unsure (1)..(694): unsure at all n locations
ctctaatacaactaactttagggaaagctggtacccctccaggtaccggtccggaattcccgggtcaacccacgcgtccgggggtgctgccggatgcataatttggatggttattgctgaagtgcttcctgatgcttttaaggaagcgtctccttcgcaagtggcatctgcagccaccatatcagtagcatccatggaagctcttagcactcttttcgagagtttcacacatgattacaactcagaggatgcttctggcttcttcgtttcactcctctttggtctgggtccattgcttgggggagtatttctggttgcatcggcagtcaccttccgtctccagcacgcccttctcatgggagttgcctcaggcattgcttttgtccttggtctctggcgcccacttcaactgctgctatccgcaaaaatgggattaatccctctggttagtctacttgcaattggagctggactgagccatttcactagctcaaccatcctgaatgtaacnggtcggaaaaagtcccgggctggcagtttaataaacccagtaaccaaattttccaaccagtgtggtaacactccaatcattatttagcgtntngagcggttggggtncatgcaattagccgagggggttnctctcgggggtggctgctccaaatgnttatggccttggcgncaaantggtttc

SEQ ID NO: 123781 - DNA, 1315 bp, Arabidopsis thaliana
  unsure (1)..(1315): unsure at all n locations
tnattattattcacnctctccncttctctccgccgaagtagtcacagttccggccaccaggcaaagaagagagaaaacgaccctgactccaataatggctcctagttctaggtctccttcaccacgtacgaagagactgagaagagctcgaggagagaaggaaattgggagaagtagagagagagaagatgatggtagagaaagggagaagagaaacagtagggaaagggatagagatataggaagagatagggatagggagagaaaaggtgaaggagaaagagatagggaagttggggataagagaagacgatcagggagagaggatactgaaaaaaggagaaggacaagaacagatgatgagagatactctagaggaagacatgagaggtctacttcaccgtcagataggagtcacaggagtagtaggcgttcacctgaaagagctattgcctcaaggcatgatgaggggtctaatgcaagagggggcagcgaggagccaaatgtcgaggaagattcagtcgcgagattgagagcagttgaagaggctctcgcagcgaagaaaaaggaagcccccttcttttgagctttcagggaaactttgctgaagaaactaacagatacagaggtatcacactcctcttcaatgagcccccaggggctagaaaaccccagcgaacgatggagactgtttgtttttaaggatggtgaacccctgaatgagccactctgccttcaccgccaaagctgctacctctttggacgtgaaagaaggattgccgacattcctacgggttcacccatcttgcagcaagcagcatgctgtctttcagtcccgggaaatggaaaaggagaaaccagatggtatgatggggaagcaagtgaagccttacataatggttcttggtagtaccaacaaaacttatatcaatgaaagtcccattgagccacaaagatattatgagctttttgagaaagacaccatatagtttggccacagcagcggagagtacgtattgttgcccgagaattctaccgagtcaatgaaatcagagtcaagcagaaacgagtaaatcacaatattagatagttgcgtttcacaggattaatagaaaagtgtctcctttttcatgtaggcattaaaccgaggtggtgagaatctcatacatcttttaggaatcatttgccagcttgttatataattcatccccatgagggattggaaggacaattggttttttttaaaaaaaaaaaaaaaaaggaaagggcggccgctataaaagatcccagcttgcgtgcgtgtgaagtcaaagtg

SEQ ID NO: 123782 - DNA, 921 bp, Arabidopsis thaliana
  unsure (1)..(921): unsure at all n locations
nnnnnnnnnnnnnnnnnnnnnnnnnnnnnnnnnnnnnnnnnnnnnnnnnnnnnnnnnnnnnncgtatcccaaagatctcatctcccctcgtgcggttcataaccaaaatcaaaacttgagtgaatcataatcgtcgtctcgtcgccggagaaaatgatcggcggtggtagggtttattgggggaagaagttagataaagagatggaagatgcggcggttgttgacggtggtggatctaacggtgttgttgtgatctttgtttggagctcgattaacgagaaccagcttatgaatttcgttgatctttattcttctcttggttggaattctcttgtttgccgcgctgattttctcaccgcggtttatcctgaaatggctctttctttagcattccatcttctttctgaacttgttgaggagttaaagagtagaccatgtcctgttatctttctagctttctctggtgctcctaaagcttgtatgtataaagttctacaggtgatcatggatgattgtgaagctcaaattcatccggatgatagccagttggttagaacctgtctttctggacatgtctatgactctggcccgttggattttacgagtgatttgaatgtgaaattcgcactacatcccaccatacgacgaatgtctggtccttctagactagtatcttgggtggctaaagggatttcttccgggcttgatggtttatatcttacaagatttgaatcccaacgtagtgagtactggcaggccctctactcatcggttgaaattggggctccatatctcattttgtgctccgagaatgatgaacttgctcctctacaagtaatttcaagctttacccatcaattgcaagaactgggaggagaagttaaggttgtcaagtggaaaaattctcctcatgcaagacac

SEQ ID NO: 123783 - DNA, 940 bp, Arabidopsis thaliana
  unsure (1)..(940): unsure at all n locations
gactttccngtgtaatatatgancctngtntgaatttnaaagttgcccgttttaccatacagcgtggaacagctcaaagaccttggctgcaagtgggtcattcttgggcattccgaacggagacatgtcatcggagaaaaagatgagtttatcgggaagaaagctgcatatgcattgagtgagggtcttggagtgatagcttgtattggggaaaagctagaagagagggaagcaggcaagacgtttgatgtttgcttcgcgcaactgaaggcgtttgctgatgctgtgcctagctgggacaatatagttgttgcatacgagcctgtatgggcaattggaactggtaaagttgcatctcctcagcaagcacaagaagtccatgtagctgtccgcggttggctaaagaagaatgtctctgaggaagttgcttccaaaacgagaatcatatatggaggttctgtcaatggaggcaacagtgcagagcttgccaaagaagaagacattgatggatttcttgttggtggtgcctccttgaagggtcctgagtttgcaaccattgtgaactcagtcacgtcgaagaaagttgctgcttgattgagaactatcagtaacggaaatcgctagtctccatggaacagatgagatgagaaataaaagggaggttagcgcccttgttgttgttgttgtgttcttacatcttcttcttgaactaataatggaaaacagaaagaaaaaaaatgattcgtgagctctggtttgacagagagagataaaagggtctttgattaaagatctttgtaactaagctgtgattctttttttcaatttgagtaagcttggctcccgagtttcttctatggaataatctaaatcaaatcttaagcccnnnnnnnnnnnnnnnnnnnnnnnnnnnnnnnnnnnnnnnnnnnnnnnnnnnnnn

SEQ ID NO: 123784 - DNA, 692 bp, Arabidopsis thaliana
  unsure (1)..(692): unsure at all n locations
cccggcccagcgcgtccgtcgagagtaagagagagagcacaaccaccaaccctcttatcgcctctatctcctctgctaccttaagctgagagagtcacagtctcgtctctatctctcctctttgcctttttccactcactacacgccaaacccgacgacatggcagctacctctctcactgcccctccttctttctccggtctccgccgcatttctcccaagctcgacgctgccgccgtctcctcccaccaatccttcttccaccgcgtcaattcctctacccgtctcgtttcttcctcttcttcttctcatcgctcccccagaggtgttgttgccatggctggatccggaaagtttttcgttggaggaaactggaagtgtaacgggactaaggactccatcgccaagcttatctccgatctcaacagtgcaaccttggaagcagatgtagatgttgttgtgtcacctccatttgtctacatcgaccaggtcaaatcctcgttgacagaccggattgacatatcaggtaagaactcttgggttgggaaaggtggggcccttnactggggaaaataaaggggggganaaggttaaaaaggcccttggttcaaagtggggcatttttgggattccgaacgggncatntattggggaaaaagttggttttngggagaagttaattaattngtttc

SEQ ID NO: 123785 - DNA, 499 bp, Arabidopsis thaliana
  unsure (1)..(499): unsure at all n locations
ctctcctctttgcctttttccactcactacacgccaaacccgacgacatggcagctacctctctcactgcccctccttctttctccggtctccgccgcatttntcccaagctcgacgctgccgccgtctcctcccaccaatccttcttccaccgcgtcaattcctctacccgtctcgtttcttcctcttcttcttctcatcgctcccccagaggtgttgttgccatggctggatccggaaagtttttcgttggaggaaactggaagtgtaacggggactaaggnctccatcgccaaggcttatctcccgatctctaaacagtgcaacctttggaagcagatgtaggatgttgttgtgtcaccccccatttttgttttaaatgggcccagggccgaaattccccggtttgacaagacccgtaattggcaannattaagggtaagaacttttttgggggttggggaaaggtgggggccttnacctggnngaaaatnangng

SEQ ID NO: 123786 - DNA, 420 bp, Arabidopsis thaliana
  unsure (1)..(420): unsure at all n locations
acaaattcggataatctctcatcggaggatcgttgttgttgttgctagggttcttatcgatttgtaatgtacaaaactaaattaatcccggtgatgaacgaggatgctgtgattgttcaacaaacggattcgattcaggatcctaaggtaactccagatgatactgtagttgattcgagcggggatgttcacgaagccattgatgatgatgttgaagcttcttcacctatggagctagattcggcggttacaaatgacgctagggttctcgaaagtgagagatcggagaaagatggtgtcgtagggagtgaggaggaagatgagattaaaagcgaggatgttttaattgataaggatgatgagagttcttaaggttaaagaagaaggangnagnagaagatggctctnatgaancaatct

SEQ ID NO: 123787 - DNA, 708 bp, Arabidopsis thaliana
  unsure (1)..(708): unsure at all n locations
ggannattgtttnccctngcgaatcatttnngagncnaataanttnggattaggtttttancctaggggttgnaccattccantgngcttgttccccnactggaaccatgaagacgagtcctttttgnccttganaaggtgttgctgaaagcnccatcggcttacnccncntcgatgttctttaagatttcaggaatcaattgccgttggggagatctttcctttccagatttgctaatgaagtttggtggattctctaattaaaaatcaatggacttctcttgaagctccggcggtttccggtggttttagagttccctgagttgctaaccagaacggtggtgaatggcgacaactaaggcttcttcagtcaacgtgtttcaactttgtttgttaacatcacacgtggctttgtggtggaagggaatctttaatttacttcctcataaaggttttgtttcctggtttgggctttctttatgggcctctgcttataagttggacttgttggttttttatgcaatatggatgactatattttagttgatccaatgttgtaaggtttaatatgtgtcaagatttgtaagtggaaggttccacagttgtatctttacaacataaggtaataaataaagtgcaacacggcggccgctctagaggatccaagcttacgtacgcgtgcgatgcgacgtcatagtcttctatagt

SEQ ID NO: 123788 - DNA, 400 bp, Arabidopsis thaliana
cccacgcgtccgggaaaagaatgttttgtaggcttctctctctcttctctcatttgcatcttttagagagagaaagcatctgatcttctttttccggcaacaatagcttctttagtgtttgttggccagttctctgtccagaatcttatggcttttccagcatggatgtctggcttttgtccggcgatgtttagggcaacgtttgattgtcgtggttcttctgacactgttcggttctttacgacgatggtcggtttgcgtttggcttccattggcttctttagcggcggtaagctagctaagatttcaggaatcaattgcctttgggagatctttcctttccaaatttgctaatgaagtttggtggattctctaattaaaaatcaatggacttctcttg

SEQ ID NO: 123789 - DNA, 687 bp, Arabidopsis thaliana
  unsure (1)..(687): unsure at all n locations
nnnnnnnnnnnnnnnnnnnnnnnnnnnnnnnnnnnnnnnnnnnnnnnnnnnnnnnnnnnnnnnnnntacccacgcgtgcgtggtggaaaagaaggttttgtaggcttctctctctcttctctcatttgcatcttttagagagagaaagcatctgatcttctttttccggcaacaatagcttctttagtgtttgttggccagttctctgtccagaatcttatggcttttccagcatggatgtctggcttttgtccggcgatgtttagggcaacgtttgattgtcgtggttcttctgacactgttcggttctttacgacgatggtcggtttgcgtttggcttccattggcttctttagcggcggtaggctagctaaggtctagagtttcaccgcctatcttcggtgtttcgtctaccttttggccggattgattccggtttagatttatgttttcttctctcgatttctttatattcaagtttgattgagccccttttgcggttcaatgtnagancctggaaataaatcccttgaaccncctttggttaaaaggggtnaaatttgttttcaacggtanncgnttcaatttttgnggncaaaataaggtccgggttaagggttttaaacctaaaggggtnaacaattnaaattgggggngttcccaacgaccatgggcggggctttttnt

SEQ ID NO: 123790 - DNA, 527 bp, Arabidopsis thaliana
acaagcggtggaggttcgattattaacattagcgcgactttgcactacacggcttcttggtaccaaatacatgtctctgcagccaaggctgcagttgatgctaccacaagaaacttggcattggagtggggaactgactatgatattagagtgaacgggattgctccaggtcctattggaggtacacctggaatgagtaaacttgtacctgaggagattgaaaacaaaaccagagagtacatgcctctttataaagttggagagaagtgggatatcgctatggctgcactctacctcagctgtgattctgggaaatatgtgagcggactaacaatggtggtagatggaggactgtggcttagcaaacctcgccacttgcctaaagaagcatgtactctctggttttgttttcaatctcctcaggtacaagtttactcattccaggtgtacctccaataggacctggagcaatcccgttcactctaatatcatagtcagttccccactccaatgccaagtttcttgtg

SEQ ID NO: 123791 - DNA, 440 bp, Arabidopsis thaliana
  unsure (1)..(440): unsure at all n locations
ccggaanggaaggcccgggccagaccgacccacggacattgcaatttttctaaatccggcgattaaatatgggtttcatagtcggcgttgtaatcggactcctcgtcggaatcgcaatcatcatcggctttgtcaagttggagaattctcgatccaagcttcgctctgaacttgcgaatacggtggctgctgctgcgaggatgacggtggaggattccaggaagcttttgcctcctgagctttatccttcctgggttgtcttctccgagcgtcagaagttgacttggctcaaccatcacttgacaaagatctggccttatgttgatgaggcagcctctgagcttataaaggcatccgtggagcctgttcttgagcaatatagacctgccattgtggcctgcttaacatcttctaagcttactctgggtacagtggcacct

SEQ ID NO: 123792 - DNA, 1029 bp, Arabidopsis thaliana
  unsure (1)..(1029): unsure at all n locations
gccaactctatacgactcgtatagggaaagctggtacgcctgcaggtaccggtccggagttcccgggtcgacccacgcgtccgcttttttattatgagtcaacacaacatcttagaagctctaaatgtccgggtcgtgggtacgggtgatcggatcctgtttttggcccatggattcggtactgaccaatcagcttggcacttgatccttccttacttcactcaaaactacagagtcgtcctctatgacctagtttgcgccggcagtgtcaaccccgattacttcgatttcaatcgttacacaactctcgatccttacgtcgatgatcttctcaacatcggtgattcactcggaatccaaaacttggcttacgttggtcactcttgttccgctatgatcggaatcatcgcttccatttcgccggcggaactttttctcccaagcttatttttggatccggatttttcggcccaatgttttcctcacacgaacgaaaggaattttttccattggggagggaatttccgataagaaaaagggtgtaagaaaatttggaagngaataaagggttcttttcccctcacaatactttcctttggagaaaaagctcttaaaatttttaccccataaagacgctctttggggggcttctcaaatgggggattttttgtggctctccccgctcttcttggcttagttttgcggaaaccctttaatggtttcccccggcgcgggccgggtttttaaatgaaaattttatagcccgggagccttttggctttaaatatgggccgcccccgggaaaatttacccctcggaccggctcttcgaagggaccgggttttctaaccaccgcaatctctaaaaagggggggccttggggtttaattcaaaagttcccccacgggtgtggaaatcaacaagtgggaaagggttttttttttgtcccgggcttttgtggggggggggatttttagggctctacttcgggggggaataccttctggggggaacctctaaaaccttgag

SEQ ID NO: 123793 - DNA, 643 bp, Arabidopsis thaliana
acgccgattctttggcagctgcaagaagagacagtacgggacacgcacacacataaaaaaatgagtcaacacaacatcttagaagctctaaatgtccgggtcgtgggtacgggtgatcggatcctgtttttggcccatggattcggtactgaccaatcagcttggcacttgatccttccttacttcactcaaaactacagagtcgtcctctatgacctagtttgcgccggcagtgtcaaccccgattacttcgatttcaatcgttacacaactctcgatccttacgtcgatgatcttctcaacatcgttgattcactcggaatccaaaactgtgcttacgttggtcactctgtttccgctatgatcggaatcatcgcttcgattcgtcggccggagcttttctccaagcttatcttgatcggattttcgcctaggtttctcaacgacgaggattatcatggaggattcgaagaaggtgagattgagaaagctttcttagctttggaagctaattacgaagcttgggttcatagatttgctccgcttgctagtggagctgatgttcccgcctgtcgttatagattttaaccggaccttgtctaatatgcctccggatattatttttggattgctttcgcaaccc

SEQ ID NO: 123794 - DNA, 701 bp, Arabidopsis thaliana
  unsure (1)..(701): unsure at all n locations
nnnnnnnnnnnnnnnnnnnnnnnnnnnnnnnnnnnnnnnnnnnnnnnnnnnnnnnnnnnnnnnnnnnnnnnnccacgcgtccgactttttcctttatataaagttagaaaaacaaaaaaaacaaaatagttagaaaaaatctgagagaaacagaagaaacataaaaaaaatgaggccattgagcattaaaccaacatcgttagatgtagctagacatgccacatcagtagaatcatttgggaatcaccgaccgccgatatcgccgtggcactcaccggtgccgtacctattcggtggtcttgcggcgatgttaggcctcatagccttcgctttacttatcctagcctgctcttactggcgcttgtcaacctccggtgatgactccggcgaaagagtcgacgaggaaaaagagagtcggtctggagtgaaggcggctagcgcggcgtgcgaggagaaggttcttgtcataatggccggagatgacttgccgaggtttctggccacgccggcggcgaacaaatgcatgtgcggtcacgagggtagaatggtaattttcaaggaggatggtattggtgctggagaggagaaaatgggagacagagagaaagccaatgaaaatgaagaaacaacgagtcagggagcttnttggtttccttttctctcttcagccttgccttttttttttggggggggaattttcc

SEQ ID NO: 123795 - DNA, 537 bp, Arabidopsis thaliana
gcctgcaggtaccgggcccggatttcccgggtctaccacgccgtccgcggacatcgtgggggggtggagccggagtcaccgcgtgaatcatcctcaccggagagatctgtgccactccgccgttccaaccgccaagcaaaccgtaagggagactcgtcgagaaaagccaccgagaaaggtaatcgggaatcttctcgtgttgtcatgtgactgtgttatttgattattaaaccatgatctaaataaaaccagttaaaaccaatgaatgtttgtttagttagaggttacgtgaaattgtgtcgtgaggaacaagaagatgacttcattcattggtttagttgttacagtaccggttaattgccaaaccggaagctatctttcacgtgaatgcatggatccaattgtggacgtagtgttacgtgtagtaattgaatcaatatttaattattagatttggttggattaatttattaaattaagtctagttaatttattgaaggatatatagtttgggttgattatgaaattaattataga

SEQ ID NO: 123796 - DNA, 528 bp, Arabidopsis thaliana
  unsure (1)..(528): unsure at all n locations
tacgactcactatangggaaagctggcccgcctgcaggtaccggtccggaattcccgggtcgacccacgcgtccgcccacgcgtccgcccacgcgtccgcccacgcgtccggcgaagcaatggaatcaatgacgccaatctcgtgccctacgactcctcgttggaaccaagacagaccatttctcactggtcgcgtccatcaggaaacgagggcaagctccttgtttgctgattctaagaggtttactttagactcgtctagttctggagtagagcaggcaattggctgctatgacacaccggttcaggagcttatcgtcattgatgatctcttatctgcgttggttggaattgaagggagatatatttcaattaaaagattccatgggaaggaggatagtatagctttccaagttgatccatcaatggatttggcactacaggaattggcgaaaagaatatttcctttatgtgaatattatctgctgattgaccaatttgtggagtcaagctcgcagttcaggaacg

SEQ ID NO: 123797 - DNA, 528 bp, Arabidopsis thaliana
tacgactcactatagggaaagctggcacgcctgcaggtaccggtccggaattcccgggtcgacccacgcgtccgcccacgcgtccgggtgaagctagggcaacctggatggagagaacgttattatgaagagaagttctcagtagtaacccctgaagaaatggaaagagtccggaaggatgttgttttgaagtacacagaaggcctttgttgggtcatgcattactacatggaaggtgtttgctcctggcagtggttctatccttaccactatgcaccattcgcttctgatctgaaggatttgggagagatggatattaagttcgaattaggaactccttttaagcctttcaatcaacttcttggggtgttcccagctgcaagttcgcatgcacttccagagcgctacaggaccttgatgacagatcccaactctcctatcattgatttttacccaactgattttgaagtcgacatgaatgggaagcgtttttcctggcagggtattgctaagctgcctttcattgat

SEQ ID NO: 123798 - DNA, 465 bp, Arabidopsis thaliana
ggacccggcccggaattccggggcggccccagccgtccggttaatcctggggatcaaatccggctagctataagaactccggtgaagccgattgttcgatgacgaagtttcgaatttccagagaagcgggtgaggtcttcaattacggcggacgaggcgaaagaggattgattactcaacatcacagaagaaaaaaggcagtcctgcatgcgaagaagaggtgtgatcgcgattttttgttttatcaaattggttacaaaggagagaagatgcgtcaacagagattcggatatcgaaaaacagagattctatcatcagattcgtcaatggagatacctgtttgtcgaggtctggaagctgattttagaggtaaggaagatggcgaatgaaacggggttggacttcactgagcagattattactttggagaacaagtatagacaggcaccggaaaaaatctttaca

SEQ ID NO: 123799 - DNA, 588 bp, Arabidopsis thaliana
  unsure (1)..(588): unsure at all n locations
nnnnnnnnnnnnnnnnnnnnnnnnnnnnnnnnnnnnnnnnnnnnnnnnnnnnnnnncccggggcgttccacgcgtccgcaaaaacttttccttcttcttcctcaacctttgcttcaatcttcaacaactttctttttataaagattttgcaagttaagtgtaaacctacaaaaaccaaacatggtggttttgccacagccagtcactttagataaccacatctccctaatccccacatacaaaccggttccggttctcacttcccattcaatccccgtcgtcaacctagccgatccggaagcgaaaacccgaatcgtaaaagcctgcgaggagttcgggttcttcaaggtcgtaaaccacggagtccgacccgaactcatgactcggttagagcaggaggctattggcttcttcggcttgcctcagtctcttaaaaaccgggccggtccacctgaaccgtacgggtatgggaataaacggattggaccaaacggtgacgttggttggattgagtatctactcctcaatgctaatcctcagctctcctctcctaaaacctcagccgttttacgtcaaaccctcaaattt

SEQ ID NO: 123800 - DNA, 926 bp, Arabidopsis thaliana
  unsure (1)..(926): unsure at all n locations
cggacgcgtgggttgaggttctctttctcgcttgtgtgatctgtctgacaagctagaagaatcgtagaatcgtgagcggattgatttgataattatggtgaaggagacggagttttacgatgtcctcggcgttagccccaccgctacggaggctgagattaagaaagcttattacatcaaggcacgccaagtgcatccagataaaaaccctaatgatcctcaggctgctcataatttccaggtattgggagaggcctaccaagtgctaagtgatccagggcaacgtcaggcctatgacacatctgggaagtcagggatttcaactgagatcattgatcctgcggctatatttgctatgctttttgggagtgaactctttgaagaatacatagggcagcttgctatggcatcaatggcttcacttgatatcttcactgaaggggatcagattgatactaaaaagattatagaaaaaatgagggctgttcagaaagaaagagaagacaaacttgctcagattcttaaggaccgcctcaacctatatatgacgaacaaagatgaatttactagcaatgctgaagctgaagtaacaagactctcaaatgcagcatacggggtggaaatgttgaacacaatcggatatatatatgtcagacaagcggcaaaagagcttgggaagaaagctatttatctcggtgtgccattcgtagctgaatggtttaggacgnaaggtcacttcatcaaatcccaagtaacagctgcaacaggtgcatacggtttattccagctgcaagagggaatgnaaaggcaactaaggtnctgaaggcaattttnccgggaggacttttagggtccatgaggccccttaggaagtaattgttggttccctgtggaggccaatgttctgtttcggagcncttttcnta

SEQ ID NO: 123801 - DNA, 508 bp, Arabidopsis thaliana
  unsure (1)..(508): unsure at all n locations
accacgcgtacgtatcgccggccgattcaataatttcgctttactctgccaaaaaagtttgttcttttgttttctgggattatccaaagagaagaaacagaggaaatcaatctcttttttagtttcagaccctaaatcctaggttttgaagttttgtttctttagtaattttgtcaggttttgtgtctggtgttgggattttccggagcttggtttcttgaaccagctccattttctaaaaattccttctttaaatccccattgttgtaagtcttaaagaaaaaagaagatgacttgttgtttctcttgtttgaatcctcggaccaaggacataagagtcgacattggtaacgctcgattgcaactctcgttaaccaaaccgattcatcaggtcatgggagtggttacaaccaggaaccagggtcggattcggggcatcttaggaaatggtaaagtggatagnccgtacctggnggtggccncgggcttaggttaaagggtanctnng

SEQ ID NO: 123802 - DNA, 637 bp, Arabidopsis thaliana
aattaaaatggcttcctcttcctcttctccgacgcctagtgctgcggcggcggtctctcctcttacggaggaagaattaactctaacagttaagtggaatggaaaagagtacaccgtccgtatctgtgccgatgactcagtcgccgagctaaaacgtcgcatctgccttctcaccaccgttttacctaaacgccaaaagcttctttatcccaagatcggaaacaaactctctgacgattctcttttactctcttcgatctcctttaagccctccctcaagatgacaatgatcggtactgttgaagatgatataatagtagatcaagctgaatctcctgaaattgttgatgattttgagcttggtaaggaagaagctgttgatgttaaagataaagaagttaataaacagaagttgagaagaagaattgatcaatacaagataaatcttcgaacgccatgtcgtcaaggcaagaaacttcttgttttagatatcgactatacattgttcgatcatcggtccaccgcggagaatccgttgcagcttatgcgtccttatctccatgagtttcttactgctgcttatgcggaatatgacatcatgatttggtctgctaccagtatgaagtgggtggcgttg

SEQ ID NO: 123803 - DNA, 559 bp, Arabidopsis thaliana
aatcagattgtaaatttagggaagagactttcgcaagcaatctagaagcaaatcgatcgccaaatctccggattatttgcaagaatcgttcccagataatcttccccagattctccacttctccagcttgaagaagacgacgaagatatggctacttcgaagaaaatgatcacacgtgaagaatgggagaagaaactaaatgctgtgaagcttaggaaagaagatatgaatactttggtgatgaattttcttgtgactgaaggatatgttgaagctgctgagaaattccaaagggagtctggaaccaaaccagagatagatgcttgcgaccattactgatgcgaatggctgttaaaaaggctgttcacaacggaaatgtcgaggatgcgattgaaaaagttaatgatttgaatcctgagatactagacacgaatccggagctcttttttcatcttcagcaccacaggttgatagaattaattcgacaagggaagacagaagaggccttagagtttgctcaggaggaacttgcaccacgtggcgaagaaaaccaagcgtt

SEQ ID NO: 123804 - DNA, 687 bp, Arabidopsis thaliana
gagctctagacctcggtgtcaatgtcaagatgattactgttgatcaacttgctattgcgaaagagacaggacgtagacttggaatgggatcaaacatgtacccatcctcttctttactcggtaaacacaaagacgaagccatggctcacattcctgttgaggatttgattgagaaagctgatggctttgctggagtcttcccagagcacaaatacgaaattgtgaagaagttgcaagaaaggaagcatatctgtggtatgactggagatggagtgaatgacgctccagcattgaagaaagcggatataggtatcgctgtggcggatgcaactgacgctgcacgaggtgcttctgatattgtcctcaccgagccaggtctcagtgtgatcatcagcgcggttctaaccagtagagccatcttccagagaatgaagaactacacaatatatgcagtctcaattaccattcgtatagtgtttgggtttatgctcattgctctaatatggaagttcgacttttcaccattcatggttttgatcattgctatattaaacgatggaaccatcatgactatctcaaaggacagagtcaagccttctccaacaccagatagctggaaactcaaagaaatcttcgcaaccggcgttgttcttggaggctacatggctataatgactgttgttttct

SEQ ID NO: 123805 - DNA, 466 bp, Arabidopsis thaliana
  unsure (1)..(466): unsure at all n locations
cgtggtgttagaatcaaagaaaccgcttcaaggatggtgagtgaaggagcaacaagaaaagaacttaacctctgtttcgagaatatgaagatggaaggagttttgatctctgagtggaaagatatccctgtggagcttctcatgaagattttaaaccttgttgatgatcggactgtgatcattgcttcttgtatttgtagtggctggagagatgctgtttcccttggcctcactcgcctctccctctcttggtgcaagaagaatatgaacagtttggttctatctcttgctcccaaattcgtaaagcttcagactttagtactgcgacaggacaaaccgcagcttgaggacaacgcggtggaagccatagcaaatcactgtcatgagctacaagatttggacttaagcaaaagctcggaatcactgcccattcctnttattactttcccggggttnacttacntgc

SEQ ID NO: 123806 - DNA, 1133 bp, Arabidopsis thaliana
ctaaaataaaagtgaagcgccttcctcaggattttcccgagttagtttcgctttcctccgagaaaatttcagacttaaattttccggaatctaataaggagaagccattgttgaagaaactagtctctctgtttcgaatcttcaaattcagattcaatatctatcaggaaaatttcgcatgggggtgaaagtagcttcttcgtctactttccttcaatggactactcagcctattattcatcagtcgtcttcaccatctcaaaccctagcttcgggaaccataacatctccttcaaaacgacgtagcacagtacacgacggccggtttctatcatgtcgtttcgtgacacagagactaaaccgttcggctcttttcggatctcccgccccgaagcttcatcgacccaagtcatgtgagctatggaaatcatcatcatcatcatctagaccgatcaaaactcagtcgtttcgaagagtttatagcgcaaacttagatccattctccgacgaagagttctcgaaaaaaatccaagagctaactctcagattcaatatcccacaccatgacgacgacgagaattcaatcgagccgccatggaacgagattgggtccatttgtccggggtattgaaatgaaagcaaacagtgttgatcttcctctttcacttcgtattataaagaagaaacgtcaatgggaagaaggagttaaacaagctgggtggaatctgcgtgtttgctccgatgaataaaagctttttccttcaatggtggtttatgataccggggggcttcaagagcttttacctttacaatatggagagaggttcctgttcttacggagacctttgcaagagattttgcctaacggaggttgagaagagatgcaaccatcctttcggtttggttgttgcaccaagatttctctgctcctcctacggttgatgggttatggtatggttccctttaccaatttcccttggttttctttccggaacaacagctccgctttagccgctggtgctcctcttgctccgacgaatacggagttaaccactgttagggaaacagaggaaaacaaccgtgaagttttgaatccctcggtgggtggaaaaacgtcttttgggttcatcttc

SEQ ID NO: 123807 - DNA, 329 bp, Arabidopsis thaliana
gcaagaacaagtgaatacgattgctgctgtgagattatatccatcttccaaaaccttaaaagacccgtcgacaagattttggaagatggatataatctcacagttgcaagaacaagtgaatacgattgctgctatcactttcaatgcttttgggacactgcaaagggatgcaccaccagtccagctttcacctaattatcctgaaccacccgctacaactacggttactgatgatgctacgccttttcctgagcaacctaagcagctcagtgctggcttagttaacgctgctaaacagtttgatgctttggctgctgcacttcctttgt

SEQ ID NO: 123808 - DNA, 876 bp, Arabidopsis thaliana
gggctctctttcatcttcgtggtttgccatagctcttcttgaatcaaggtcgtcttcttgaaatcagatctcttcgtgacttctcctgtaaccaacaaagaaccatggagctcctctctagagctcttttcttctttcttctactctcagttctttcttctttctcttcttcaagtttcatttcagatggggtcttcgaatctcagagtttggttcttggcagaaacttgcttcagaccaagaaaacatgtcctgtgaactttgagtttatgaactacacgatcataaccagcaaatgcaaaggtcccaaatacccaccaaaagaatgttgtggcgccttcaaggactttgcgtgtccttacactgaccagctcaacgacctgagctcggattgtgcaaccactatgttcagttacatcaatctctatggaaaatacccgcctggacttttcgctaaccagtgcaaagaaggtaaagaaggtctcgaatgccctgccggatcccagttgcctccagagacatcagcagaggtaaacgcagcaactacctcgtcgtcccgtctttggctgaccgtttccgcggctcttttggtttttgttaagttgttctgaggctgataaatccgaatttctgcaatgaacttattacaacaacctgaggaagaggatgtatgtatatccacgatttgttttactgttgtactgtctcattcttttgttactagggagttcaaaaaattctaaatgataatttgtaatggcctttgtgtgtctaaaaaaaaaatcttataaaaaaaaaaaaaaaaaaaagggcggccgctctagaggatccaagcttacgtacgcgtgcatgcgacgtacatagctgttcgatagt

SEQ ID NO: 123809 - DNA, 552 bp, Arabidopsis thaliana
  unsure (1)..(552): unsure at all n locations
atgatacttcnnnnnnnnnnnnnnnnnnnnnnnnnnnnnnnnnnngtcaagtctttcttctgcacatcttctctctctctatttccgcagacatcaattcccctttttgactaaaattccgcgacttgggctttgatccattcccagtgaatctcactgcttttctcacagaaaaaaatcactcctttttcctggattttgttttctcgactgatttggggaaaagctatggtggtctgattaatctctgtctgtctttggtgagatgggtttggatgctgttaaagctaaagggaattggaaatcggagaaacctaaagagactgagaataagaatcacaagaagaagaatggtgatgataataaaagtagaaatgaagaagaagaagaaggagaagcaagtggttgctgggtcaaatttaggtttatgattggttgcataccttcaaaatcagaccttgatgcttcttcttcttctatctatggctctaactgcactgttacaacaatggaaagtaaatcggcaaatgagaaatcaaatgatcaaccagt

SEQ ID NO: 123810 - DNA, 598 bp, Arabidopsis thaliana
  unsure (1)..(598): unsure at all n locations
acgcgcgaannnnnnnnnnnnnnnnnnnnnnnnnnnnnnnnnnnnnnnnnnnnnnnnnnnnnnncttttttcttccttccacgtttcacaattcatatcctgtctgatgaacagtagctgttagactctctctctttctctcttctctgttcttcttcatcttctctagccgaatccatccttcagatactactctgtaatttcactacaatcatctcagccaaatgggttcggaagaagagaaggtcgttgttcccagaaactttagattattggaagagctagaaagaggtgagaaaggaattggagatgggacagtgagttatggaatggatgatgctgatgatattttgatgcaatcttggactggtaccattcttggtcctcataatgttagttttcttcttctcaatctatctcttcatcttttgtttaacttaaatgataatatctatggtagatttgaataaagatgcattttttaatgctaaagcaagaacctttccaaatgtttaacttaaaagatgcaattttttgctacttgtttgtcactataattcgagggtttaatttaacttcaaatgatccttagctgagt

SEQ ID NO: 123811 - DNA, 880 bp, Arabidopsis thaliana
  unsure (1)..(880): unsure at all n locations
ctctctctctcttttatctctgagattgcttcttcgctattgctcaattctctctctcacctaaccctaattattcattattcctgagattcatcggcgatgagttcggaggaagccaaggtcgttgttccgaggaactttagattgttggaagagcttgaaagaggtgagaaaggtattggagatggtactgttagctatggaatggatgatgctgatgatatttatatgcaatcttggactggcaccattcttggtcctcctaatactgcatatgaagggaaaatctttcagctgaagcttttctgtggtaaggagtaccctgaaagtccaccgactgtgaggtttcagacccggataaacatggcttgtgttaatcctgagaatggagtggttgatccgagtcacttccctatgctttccaactggagaagagaattcacaatggaggatctactgattcagcttaaaaaagaaatgatgtcatcgcagaaccgcaagttagctcaacccttggaaggtaatgaggaaggcaggacagacccaaagggactagtggtgaaatgttgcgtgatgtgaaaagaggtaatgaggaatttataagaatttaagagacaaaacaatgtatataaacagcatttgaagggctttgagattggcctaagaaccctttcttctataggccttcttaatcctaccatttgattatgtattatgtaatatttgagaatatattcaccaaaaacaggtgcccttaataaacctccactcttcttcactaaaaaaaaaaaaaaaaaaaaagtnnnnnnnnnnnnnnnnnnnnnnnnnnnnnnnnnnnnnnnnnnnnnnnnnnnnnnnnnnnnnnnnnnnnnnnnnnnca

SEQ ID NO: 123812 - DNA, 816 bp, Arabidopsis thaliana
  unsure (1)..(816): unsure at all n locations
gtctgatgaacagtagctgttagactctctctctttctctcttctctgttcttcttcatcttctctagccgaatccatccttcagatactactctgtaatttcactacaatcatctcagccaaatgggttcggaagaagagaaggtcgttgttcccagaaactttagattattggaagagctagaaagaggtgagaaaggaattggagatgggacagtgagttatggaatggatgatgctgatgatattttgatgcaatcttggactggtaccattcttggtcctcataatactgcgtatgaagggaaaatctttcagctgaagctattctgtggaaaggattatccggaaagtccacctactgtgaggtttcagagtcgtataaacatggcttgtgtcaatcctgagaatggagtggttgatccgagtctcttccctatgctctccaactggcggcgagaatatacaatggaggacatactggttaagctgaaaaaagaaatgatgacttcgcataaccggaagttagctcaacccccggaaggtaacgaggaagctagggcagatccaaaaggaccagctaaatgttgtgtgatgaagagaggttggtgggaatcagctatttgtattaatagaaggaacagtgtatataaaacatcatttgaagctttgaaattccctacaacttcctaatgttatagtcttgtttgagaatatatatatgtccgccaaaaacagttgatgattattttaataaacctcatctctacaatctcttnnnnnnnnnnnnnnnnnnnnnnnnnnnnnnnnnnnnnn

SEQ ID NO: 123813 - DNA, 417 bp, Arabidopsis thaliana
cggacgcgtgggttcgtctctatcaagctcatttctcagatccgtaggatcttcatttccatggaggcttaaaaaccctagaagatattcttttacacatcactcatccgctagtgaagataaaaatcatttctagagcttcctctttctctctctgtatgatctgaagcgaatcgtctttagattcttcaccaatcactatcaaaaggacctctttttaaagcttttcgagacgagctgggtttcggatcctgtgagcttcagagacgcttactggtttatcaacaaggctttccctttgaatcaagctttgattgagaaaggagtgaaaagattttgattttgatcagatacacaaagtgttcttgcgttagttaagcgactaggtgtgtgttgttgtagtgaaagcttcttact

SEQ ID NO: 123814 - DNA, 872 bp, Arabidopsis thaliana
  unsure (1)..(872): unsure at all n locations
nnnnnnnnnnnnnnnnnnnnnnnnnnnnnaccgtcatnnnnnnnnnnnnnnnnnnnnnnnnnnnnnnnnnnnnnccacgcgtccgcggacgcgtgggcagtctctcactttctctcttctctctctctctttcttttttgagtccgtgaaggctaagtctgaaagaatgacgaaggatgagttgacggaggaagagtcgctctccggcaaggactacttagacccaccgcctgtgaagacgttcgaggtgagagagctcaagaagtggtccttctacagagctgtcatcgctgagttcatagctactttgctctttctatacgtgactgttttgacagtcatcggctttaagagccagactgatatcaacgccggcggcggagcttgtgccagtgtcggcctcctaggcatctcttgggcctttggtggcatgatattcatcctcgtctactgcactgccggcatctctggtggacacatcaatcccgcggtgacgtttgggctattcctagctagcaaggtatcattgggtagagctgtgtcgtacatgggggctcagtgtctcggagccacttgtggagttgggttggtgaaagtcttccagtcgacttattacaacccgcttcggtggtggagcccaacatgccttttcgaccgattccaatgttggccgttgggggttggtgcctgaaaataatcgggcactttttggtcccttagtttttccaccggtctttttttccggttacccggaacccttatagccgaaaatggccccgttgaacttcttaacaatttccttggtttttagcccaccctttggcccaacttgggaatttcttcccggggtgtccactggggtccaatttaaa

SEQ ID NO: 123815 - DNA, 831 bp, Arabidopsis thaliana
  unsure (1)..(831): unsure at all n locations
gcatgatattcatcctcgtctactgcactgccggcatctctggtggacacancaatcccgcggtgacgtttgggctattcctagctagcaaggtatcattggttagagctgtgtcgtacatggtggctcagtgtctcggagccacttgtggagttggtttggtgaaagtcttccagtcgacttattacaaccgctacggtggtggagccaacatgctctccgacggatacaatgttggcgttggggttggtgctgagattatcggcacttttgtcctcgtctacaccgtcttctccgctaccgaccctaagcgaaatgcccgtgactctcacattcctgtattagcaccattgccaattggattttccgtgttcatggttcatttagccacaattccaattactggcaccggaataaacccggctaggagttttggagctgccgtcatctacaacaatcaaaaggcttgggatgatcagtggatcttctgggtcggtccatttgtgggtgcagccattgcagcattttaccatcagtttgtgttgagagctggtgcaatgaaggcctatgggtcagtcaggagccagcttcatgagctccatgcttaaatttgttatttcgaactagcgaagaggtgaagaattctttgggccaggaagggaggaaggaaaaaaaaaagggacccaaatcatataaaagaaaaaacgaatattatttaagatggtcggtgagtgacatttactgtgtcttatttatggctttgtgggggaggtttggcggccgcgaattcgatatcgagcttatcgatacaatcgacatcgagggggggtc

SEQ ID NO: 123816 - DNA, 556 bp, Arabidopsis thaliana
aattccaattactggcaccggaataaacccggctaggagttttggagctgccgtcatctacaacaatcaaaaggcttgggatgatcagtggatcttctgggtcggtccatttgtgggtgcagccattgcagcattttaccatcagtttgtgttgagagctggtgcaatgaaggcctatgggtcagtcaggagccagcttcatgagctccatgcttaaatttgttatttcgaactagcgaagaggtgaagaattctttgggccaggaagggaggaaggaaaaaaaaaagggacccaaatcatataaaagaaaaaacgaatattatttaagatggtcggtgagtgacatttactgtgtcttatttgtggctttgtgggggaggtttgtgtgtaacaatttgtaacgtacaagcaatgtatgtgttatttgatgcatatgatatttatatatctacttattgaaaaaaaaaacccaaagggcgaccgctctagaggatccaagcttacgtacgcgtgcaggcgacgtcatagtcttctatagtgcacctaatagaatcg

SEQ ID NO: 123817 - DNA, 837 bp, Arabidopsis thaliana
  unsure (1)..(837): unsure at all n locations
nnnnnnnnnnnnnnnnnnnnnnnnnnnnnnnnnnnnnnnnnnnnnnnnnnnnnnnnnnnnnnnnnnnnnnnnnnnnnnnnnnnccacgcgtccgcagacaaaaaaaagctgcggagctagcgacttcgcttctctctttctctcaaatctcttatccgtttgattttttctgtgtcgcaatctcttcttcttattaattcattcaaaacagaaaagtacgggaaaaaggaattgagacggtgggtttcgatggggtcaggtgcatcgaagaatactgaggaagatgacgatggttccaatggcggaggtggtcagctctacgtttcactcaaaatggaaaactctaaggttgaaggagagctcactcctcatgtctatggctctcttcctctcatcggttcctgggatccttccaaagctcttccgatgcaacgtgaatctgcgttaatgtcggagctaagcttcgttgttcctcctgatcacgagactttggacttcaagtttttgttgaagccaaagaacagaaatacgccctgcatagtggaggagggtgaaaataggcttcttactggtggttcgttgcaaggagatgctagattagctctgtttaggctggaaggtgatgtgattgttgaattccgagtcttcatcaacgctgacagagtttctccaattgatcttgctactagttggagagcttatagggagaacctccagccttctactgtacgtggaattcctgatgtcagcattaatcctgatccaaaatctgctgagtgtcctttagaaagtttggagctcgatcttgcacattatgaagttcctgctcctgcgcct

SEQ ID NO: 123818 - DNA, 749 bp, Arabidopsis thaliana
cttactttcaggacacaaccgcttccaaatatgattgtgggatggatgctaagtttgagttcactgaaactgagagagctgagttttcaggttatgttttcacccgaggaggatatgttgagttgtcgaagaaactttcacttccattgggtaccactcttgacaggtacgaaggcttagttctttctgttggtgggaatggaagatcctatgttgtaatccttgaagctggtccatcatcagatatgtctcagagcaaacagtatttcgctaggatcagtaccaaagcagggtttcctcgcgtgcgggtgccattttcagcttttcgaccggtcaacccagaagatccaccgctagatccatttcttgttcacacattgacaatacgctttgagcctaaaagacagaggcctgttgatggacttgctggtgcgcaacaagatttgagaagttttagccttggatgggagtacataaaagctttgcctgcgggtcaagaaacagactttattctggtatcgtgtactggttcgggagtagaagccaacagaagggagcaagtgttgaaagctaagagggctggtgaagattctttaaggagatcaggccttggatacacaatcattcgtcctggtcccttgaaggaggaaccaggcgggcaacgagctctgatatttgatcaaggaaacagaatttctcagggcattagttgcgcggatgtggctgatatatgtgtcaaggcactgcac

SEQ ID NO: 123819 - DNA, 407 bp, Arabidopsis thaliana
aggtgaaactgaaaaaaagcttgaacactccattgttctctactctaccactatctcacagagattcatggatacgatgcgaatctccggtgtatcaaccggagctgaggttttaatacaatgcaattccttatcaagcctcgtttctcgtcgttgcgacgacggaaaatggcgaacgagaatgtttccggcgagaaacagagacttgcgtccatcgccgacgagaagatcctttttgtcggtgaaatctatctctagcgaaccgaaagccaaagtaaccgacgcagttctcgattccgaacaagaagtgtttattagctcgatgaatccgtttgcgccagatgctgcttcggtagcttcgagtatcaagtaccacgcggagtttacgccattgttttcaccggaga

SEQ ID NO: 123820 - DNA, 412 bp, Arabidopsis thaliana
cttagcctttaaagatagaaacctctctctctcaaagaccaaaaacaaaaaaaaaaactttttttttttcccccttctcttctttcttcttcaaggtagcctccaagccaaacacggaggaacctaatctgttgtctgctcgtaacttcacaagaagctataatttgtcgttaatgttggcttcttcttgtccatttcttcttttcttcttcctctgaaacacaagaaaaacatctttaacccctgagcagagtaaaaagacgaagaaactggtaactccaaaaaacagagtatatatatgaagagaaacttgagtttgtgaaagtttttttagttatcttgtttttgagataagagttaagtagaggaagaagatatgtctgcaaaacttctatataacttgtcagatgag

SEQ ID NO: 123821 - DNA, 684 bp, Arabidopsis thaliana
  unsure (1)..(684): unsure at all n locations
acgactcactctanggagagctgacacgcctgcaggtaccggtccggaattcccgggtctgacccacgcgtccgctcaaatacaagtgcaaatcgtgagttaagcagaagtattctggtagaggttctactgggagaggggattatcttggtagttctgacgacaaggttagtgatagtatgtggacttcagctagagaaagagaagtgcaaccatctttaggctctgagaagccaagatctgtttcaattcctgaaactcctgccagaagttctcgtgctattgcaccaccagaattatctcctaggattgcctctgaaatttcaatggcacctcctgctgttgtttcgcagcctgttcccaagtcaaatgattcagagaaaatatggcattacaaggacccatctggtaaagttcaaggacctttttcgatggcgcagctccgtaaatggaacaacactgggtacttccctgctaagttggaaatctggaaagcaaatgagtcaccgttggactctgttctactgactgatgcattggctggactatttcagaagcaaacccaggcggtggntaaataagctatatgaaagctcaggtaagcagctttttnntgggnnaatcaagccnattttgaacccaattnaagggtttnccngccnagggttgttccnaacaaccatt

SEQ ID NO: 123822 - DNA, 1440 bp, Arabidopsis thaliana
  unsure (1)..(1440): unsure at all n locations
nnnnnnnnnnnnnnnnnnnnnnnnnnnnnnnnnnnnnnnnnnnnnnnnnnnnnnnnnnnnnnnnnccacgcgtccgctacactttccattaattaccaatatatttttactacttaaaaaagatattggtcttgaaatggagagttacttaacgaaatggtgtgtagtgcttgtgttgttgtgtttcgggtttagtgtagtaaaagcacaagcacaagctcaagttccatgtttctttgtttttggtgactctttggttgacaatggaaacaacaacggtcttatttctattgcaagatccaattacttcccttacggtatcgatttcggcggccctaccggccgtttctccaacggcaagactactgttgatgtgatcgctgagctacttggatttaatggctacattcctgcgtacaatactgtgagtggtcggcaaatactctccggagttaactacgcttccgcagctgctggaatccgagaagaaaccggtcgacaattgggacaaaggataagctttagtggacaagttaggaactaccagaccacagtatcgcaagttgtgcagcttctaggagacgagactcgtgcagctgattacctcaagagatgtatttactctgttggtttaggaagcaacgactatctcaacaactacttcatgcctacgttttactcttctagcagacaattcacacccgaacaatacgctaacgatctcatcagtcgctacagcacccagctcaatgcattatacaactatggggctcgaaagtttgcattgagtggaattggagcagttggttgtagtcctaacgcgctcgcaggcagtcccgacggtaggacttgcgtagaccgcatcaactcagcaaaccagatcttcaacaacaagctaagatctcttgttgatcagctcaacaacaatcaccctgatgcaaagttcatctacatcaatgcttatggcattttccaggacatgatcacaaatcctgccagatttgggtttagagtgacgaacgcgggatgttgcggtattgggaggaatgctggacagatcacatgtttaccgggacagagaccgtgtagagaccgcaatgcgtacgtgttctgggacgcatttcaccctactgaagccgcaaatgtgatcatcgcaaggagatcgtacaatgcacaatcggcttcagacgcttaccctatggatatttcaaggctggcacagctttgaagaaacatagtaaaataagaactaaagaagttccacaaaccaatgtgtgatcttgttgtgtaccgtaccgctatttaagattttcttgacgtaattgaaatcgagtaaaacattattctatatacattaaaaaagcntttnnnnnnnnnnnnnnnnnnnnnnnnnnnnnnnnnnnnnnnnnnnnnnnnnnnnnnnnnnnnnnnnnnnnnnnn

SEQ ID NO: 123823 - DNA, 523 bp, Arabidopsis thaliana
tacaactcattttagggaaggctggtccgcctgcaggtaccggtccggatttcccgggtcgacccacgcgtccgcccacgcgtccgcacaaatcctgccagatttgggtttagagtgacgaacgcgggatgttgcggtattgggaggaatgctggacagatcacatgtttaccgggacagagaccgtgtagagaccgcaatgcgtacgtgttctgggtcgcatttcaccctactgaagccgcaaatgtgatcatcgcaaggagatcgtacaatgcacaatcggcttcagacgcttaccctatggatatttcaaggctggcacagctttgaagaaacatagtaaaataagaactaaagaagttccacaaaccaatgtgtgatcttgttgtgtaccgtaccgctatttaagattttcttgacgtaattgaaatcgagtaaaacattattctataaaaaaaaaaaaaaaagggcggccgctctagaggatccaagcttacgtacgcgtgcatgcgacgtcatagct

SEQ ID NO: 123824 - DNA, 568 bp, Arabidopsis thaliana
  unsure (1)..(568): unsure at all n locations
actacactttccattaattaccaatatatttttactacttaaaaaagatattggtcttgaaatggagagttacttaacgaaatggtgtgtagtgcttgttttgttgtgtttcgggtttagtgtagtaaaagcacaagcacaagctcaagttccatgtttctttgtttttggtgactctttggttgacaatggaaacaacaacggtcttatttctattgcaagatccaattacttcccttacggtatcgatttcggcggccctaccggccgtttctccaacggcaagactactgttgatgtgatccgctgagctacttggatttaatggctacattcctgcgtacaattcctgtgagtgggtcggcaaaatactctccggaggtaactacgggttccgcagctgcttggattcccgggagggaacccgtcggcaatttggggcaaagggctaagcttttggtggccaagtttgggcctnccagcccccaggttccaaagctgttcacgtttttcgggggccgggcttttcaactgtttcccaaggngtgtttaccncnttggttngggg

SEQ ID NO: 123825 - DNA, 522 bp, Arabidopsis thaliana
gctcgtatacgactcactatagggaaagctggtacgcctgcaggtgccggtccgggattcccgggcttcttcttctgtacctcggtctcttccgtgtccactccgagctcttactagtaccactcgatctctaccatttcaatgtgctcctctctttttctctattccttcttcaatcggttgcttctcccactcaaaatccccgacccgcgaagagggtgccggtggcgtccgggaagagcggagatggattcgcgaggagcaacgatggattcgtgaagaacagagatggatacgcgaacgtgaatcgcttctacaagagatttcggatctacagctcagaattcaatccctagagtcacgaaattcgcaatgggggaattctattcccgatacgatttcgaatatcgctgctttgcttcagggtttgaaggagaagaatcggatttctgagagtggattgagcgcaacgccgatggtattggagagtacgagagaacaaattgttgaggaggtggaaga

SEQ ID NO: 123826 - DNA, 1097 bp, Arabidopsis thaliana
ttaggtacacactatagaagagtctatgacgtcgcctgcacgcgtacgtaagcttggatcctctagagcggccgctcgcgatctagaacttcttctgggtgttcaaagaattagtcgttctcgcgtattcactttccatggcgggctttctctccgttgtccggcgcgtgtacctcactctctacaattggatcgtctttgctggatgggctcaggttttgtacttagcgataacgacgttgaaggaaacgggttatgagaatgtctatgacgccattgagaagcctctccagcttgctcagactgccgccgttctcgagattcttcatggattagtaggtttggtcagatctcctgtttctgcaactctgccacagataggttcaaggctatttctcacttggggcatcctatacagttttccagaggtccgatctcattttcttgttacgtcgctggtcataagctggtctatcacagagattattcgctactcattcttcggctttaaggaagctctaggctttgcaccttcatggcacttgtggctcagatacagcagctttttattgctataccctaccggtatcaccagcgaagttggtcttatctaccttgccttaccacacatcaagacatcggagatgtacagcgttaggatgcctaacatattgaacttctcatttgacttcttctatgcaacgatactcgtccttgcaatctatgtcccaggtagcccacacatgtacaggtacatgcttggtcagcgaaagagagctctctccaaatccaagagggaataaaagaaaagatttagaaagagacgaaaaagctcatcaactgttttctcctcttgtcttgttcgttcatgtactactagtctactactacaacttgtcttttgtttagcttgtttgagcttttacttcctcggcgattacttgaacttacatgcagcaggatactattaagtgtaatgtggtttctaaattaataagaaaatcattggttccttctcaaaaaaaaaaaaaaagggcgaccgctctagaggatccaagcttacgtacgcgtgcgtgcgacgtcatactcttctatag

SEQ ID NO: 123827 - DNA, 680 bp, Arabidopsis thaliana
  unsure (1)..(680): unsure at all n locations
agtcccaccgctcttatgctttagattttgaatcagcttgatgggtttgacgcacgtggtaacatcaaggttcttatggcaacaacagggcctgacacactagccccagctcttttacgttctggacgtcttgaccgtaaggttcagtttggtctacctgacctggagagcagaacacagatcttcaagattcacacaagaaccatgaactgcgaaagagacatccgtttcgaactccttgctcgcctctgcccaaactcaacgggagctgatattcgaagtgtatgcactgaagcaggaatgtacgcaatcagagctaggagaaagactgtgactgagaaagactttctagacgcagtgaacaaagtcattaaaggttaccaaaagttcagtgccactcccaagtatatggtctacaattagagagattgagacagatagaagaactccgaaataaaactccgaaacactctttgttctttgtttgtgtctcttcccttcaagctcttttgtagtacttgtttcacaacttattccagtaactcgggtttatcttcttcaatgtctactacttttggattcataaattctttgttaagtttcnnnntntnggngaattcacgtcttttggnnnnnnnnnnnnnnnnnnnnnnnnnnnnnnnnnnnnnnnnnnnnnnnnn

SEQ ID NO: 123828 - DNA, 633 bp, Arabidopsis thaliana
cccacgcgtccggtcctttgagtaatttagaaaatcaaaatgggtcgcaacgtcaaaaccaaggcaaagaggaagaacaagaagaaagcagaggcgtcttcttccgagataccatcgataccaactagggtttggcaaccaggtgttgatacccttgaagatggagaagaacttcagtgtgacccttctgcttataattctctccatggcttccatgttggttggccctgtctgagctttgacattttaggtgataagttgggtttgaaccgaactgagtttcctcacacactttatatggtggctgggactcaggctgagaaagcagctcataactccatagggttatttaaaatcaccaacgtatctggtaagagacgtgatgttgtgcctaagacatttggcaatggtgaggatgaggatgaggatgacgaagatgacagtgacagcgatgatgatgacggaggatgaagcttctaaaactccaaatattcaggttcgaagggttgctcaccatggatgtgtttaaccgtataccgtgcaaatgccacaaaactctcatattctgggctcttttgggcagattctggtcatgtacaggtctgggacatgagctctaattttaatgcttta

SEQ ID NO: 123829 - DNA, 523 bp, Arabidopsis thaliana
gactcactttagggaatgctggtacgcctgcaggtaccggtccggaattcccgggtcgacccacgcgtccgcccacgcgtccggcagcttattctgttgcttttgctcagattgggatgaaatgggcgaagtacttggttggtatatgcgctttaaagggaatgaccacaagcctgcttgttggctctctaggccaagctcggtacaccactcagattgctcggtctcatatgattcctccatggtttgctttggttcatccaaaaacaggaacccctatttatgctactctccttgtaaccatactcagttcaataatatccttcttcaccagcttagaggttttatcaagcgttttctcctttgctaccctcttcattttcatgctcgtggcagtagcattgcttgtgagacgttactacgtgaaggatgttactcctgaggcccgtttgttgaagtttcttgggtttttgttttgataattgcttcctccattggagatcaccgctttgaactcaagcgt

SEQ ID NO: 123830 - DNA, 643 bp, Arabidopsis thaliana
cgcctgcaggtaccggtccggaattcccggtgttgacccacgcgtccgaggacgcgtgggcggacgcgtgggctgcgagaagacgacagaaggggagaccgaacacgaagaaacaaaaattcaacaaaaacaaagacaaagtttcgttttagcttaaaggttccagatttcgaaaaagctctcttttttttttctccttcgtgttacacaaccatttctagatatcattttggtgattaagttatttaagaaatggctgatcatttgagtttatgtaccgatcgtctcataacatctgagagcttggactcagagaaagattcagattcttcaggagaaagttcttaccggcctcaaggcacagacttggcttcttcatctgtgaatgaaactgaggttcctagagagtactacgcggttgcggatgaggaagaacctcttctccaatctgttgagtgtcgtatttgccaagaggaagatagtactaagaaccttgaagctccttgtgcttgtaatggtagtttaaagtatgctcaccgcaagtgtgttcagcgttggtgtaatgggaagggcgccataacctgtgaaatatgtcacccgccttatcaacatggatacactgcacctccgcctcctcctcctg

SEQ ID NO: 123831 - DNA, 689 bp, Arabidopsis thaliana
aaacctagagaagcaaaacatccgtataagaaaaatggcacaagctacgcgtcagtcttctctacaaggggaacttgaggtagatattgagatcaaagcatcggcaaagaagttccatcacatgctctctggaagaccacaagatgttgcgaaagccactcctgacatccagggatgtgctttgcatgagggagagtttggcaaagttggcagtgtcatattctggaactatgctattgatgggcagcccaaggtggcgagggagaggatcgaggcagtggatcaggagaagaatctgttagtgctcagggtaatagatggagatctgacggaaagagttcaagagcttcttggtcactatccaggcaaccccaaagctaagaggaccgggaagtgtggttaagtgtcacttaaaatatgagaggattgacgagaaggtggctcctccggagaagctgctcgagttgtttgccaagctaaccgaatcaatggacgaaatgcttttgtccgaagtctagaggattccttggatatccatctatctatctatctatctatgtttgtgggtgttttgtaagatatctcaaattttcaataatgtgctctctctatgaagagatctgaactgcaagtattgcagagtttgtgttacgtatgtttgaagtttttaattagttgcaaattataac

SEQ ID NO: 123832 - DNA, 568 bp, Arabidopsis thaliana
  unsure (1)..(568): unsure at all n locations
aaacctagagaagcacaatatccatataagaaaaatggcacaagctacgcgtcagtcttctctacaaggggaacttgaggtagatattgagatcaacgcatcggcaaagaagttccatcacatgctctctggaagaccacaagatgttgcgaaancactcctgacatccagggatgtgctttgcatgagggagagtttggcaaagttggcagtntcatattctggaactatgctattgatgggcagcccaaggtggcgagggagaggatcgaggcagtaggatcaggagaaggaatctgttagtgctcagggtaataagatggagatcctgacggaagagttcaaagagctttctttgggcacctttcccgggcaanccccaaaagcttagggggccccgggaagttttggggtaggggtccccctttaattttgggggggttttccggggaaggtggctccccccgggaaacttccccgggtttttttnccaagtntcccgntnattngccggaattttttttcccgngtttangggtccnttgganccccctttttttntnncncc

SEQ ID NO: 123833 - DNA, 336 bp, Arabidopsis thaliana
gtccacgggccttgtaccgtggttggcttccatcagtgattggagttgttccatatgtgggcttgaacttttcggcgtatgagtctctaaaggactggctagctaaagagaacccatacggtctagtagaaaacaatgagctgacggttgcaacgaggctcacttgtggtgcaatagctggaacagccggtcaaacaattgcttatccactggatgtgactcgtaggagaatgcaaacggtcgggtggaaagatgcttccgctattgtaacatgccaagggagaagcacagcttcacttgaatacactggtatggtcgatgcatttagaaaaacag

SEQ ID NO: 123834 - DNA, 1096 bp, Arabidopsis thaliana
  unsure (1)..(1096): unsure at all n locations
acgcgcacannnnnnnnnnnnnnnnnnnnnnnnnnnnnnnnnnnnnnnnnnnnnnnnnnnnnnnnnnnnnnnnnnnnccacgcgtccgctcagatcctccatttgagggtgagtcttgcggattctcgtgtcatcttgaatgtgctttcaacactgaaaaatccggtcttggaaaagacaagcaaagtgagggatgctgcttctattgtgtctcttgcggtaaagcaaacagtttgcttgaatgctggaagaagcaattgacgattgctaaagaaaccagaagggtagaagtgctttgttaccgtcttttcttagtccagaaactattgaagagctcaactaaataccgaaatctgtgtgaggttgtggatgaagctgtcaagactcttgaagctgatgtgggtcctctcactggtcttcctatgaaaatgggtagaggaattgtaaacagacttcattcgggacccgatgtgcagaaactttgctcttctgctcttgaatctcttgaaactatagcaactacacctcctgatgttgctgcattaccttcacctcgcagctccaagatgcagcaaggtcagaacttttgtacccttcaatgattgagtaatatattaagtttgttgaataatgtggattctctgattttgtttcgtagattgttcttatgtattgagcaatgagatatctgcagatacagcaaccacaggatcaaccaagatcaggttcgaggatgtaaacgcgacttcacttacagtggttctcgcctctaatgaaattccctcacctccaaacatcgttcactacagtatttggcatcgtaaggtaccagaaaaagattacccggagaaatcgacttgcacattgtttattccaaacacaagatttgttgtctctggattagctccagcttttgagtactgcttcaaagttgtgtcctatagtggaaccagagaaatgggcgttgatgaaatcaatgttttgacacgtagcgctgaagaaggagcgaattgctcttcggcagtcgcacaaaagcgtaagccccccccccaattgcagcacattgtcttctaatccttcttctgttgaagctgag

SEQ ID NO: 123835 - DNA, 481 bp, Arabidopsis thaliana
gagatcgcaattttgcaaaacagcgaaaatagttctttgtgattttcgagtgagagagacgacagcttccattatcccctgtctctctccctctcgaactacaaatcaaattcgagtgttttcatattgttaatctttttcttcaaggaaagaagagattttgttttccgtttctgggggtttttcttgattctgatctctgatctgatctcatcatcattgtccgtggattctccgatgggtttctgattgtgggttctttcaaatttcttcacttttggagcttttcttctctctgtcttttgttttccctcagctatggcttggaatgagaccaaactcaagaggctctatcaagtttggagaggaagcaataaatttctatgtggcgggaggctaatatttggtcctgatgcatcatctctatatctatcaaccatcttgatccttggtcctgctgtaatgttctttgtcaaaatgt

SEQ ID NO: 123836 - DNA, 521 bp, Arabidopsis thaliana
gcctgcaggtaccggtccggaattcccgggcttcaccccaactgtattagcactgttcgtctttcagaaaaaacaataatagatagaggaaaaaagaaagaaacagagaagtgagaaaaagcccttaaaactcaaacactaaaaaattttcagtgtcgattcaaaaagttttgttatttgatctgtttctgtgtaaaaaaaatggtgaaagatctggttgggtatagattttatccaacgggagaggaattgataaaccattatctaaagaacaaaattttgggtaagacttggctcgtcgacgaagccattagcgagatcaacatctgtagttacgacccaatttacttgccttctttatcgaagataaaatcggatgatcctgtgtggtacttcttctgtccaaaggagtatacttctgcgaagaagaaggtaacgaagaggactacaagttcagggtattggaaaagctactggggttgataggaaaatcaaagataagagaggtaatcgcggcgaga

SEQ ID NO: 123837 - DNA, 425 bp, Arabidopsis thaliana
caggaattgttgcacttctcaaagctctgcatcctgattggtctcctgctgccattagatcagctattgtcactacagcttggagaacagatccatttggagagcagatatttgcagaagggtcacctaggaagccagctgatccattcgactatgggggaggccttgtgaatccagagaaagctacaaaaccaggtcttggatatgacttgggactcgaagactatgttctctacatggggtctgtggggtacaacgagacttcaatctctcagcttggcggtaaaggaactgtctgttcgtatcccaaaccatctggtcttgatttcaacttgccttctatcacaattccaaatctcaaagaagaagtcactcttcccagaaccctcactaacggtggaccacttgagtcggtctatagagga

SEQ ID NO: 123838 - DNA, 1447 bp, Arabidopsis thaliana
tgactgtccgtctgcggtaccggtccggaattcccgggtcgacccacctctctactcaaagctcttcttcttcgatcaaaaaacctcgagcttctaacaatggagaccagcatcgcgtgctactcacgtgggatccttcccccaagtgtctcttctcaacgatcctctacattggtctctcctccttcctactccacatcctccagcttcaagcgtctaaaatcgagctcaatcttcggagattcactacgattagcaccaaaatcgcaacttaaagccacaaaagctaagagcaatggtgcttcaactgtgaccaaatgtgaaattggccaaagcttggaagagtttttggcacaagcaactcctgacaagggattgagaactttgctgatgtgtatgggagaagcattgagaacaatagcttttaaagttagaacagcttcttgcggtggaacagcttgtgttaattcctttggtgatgaacaactcgctgttgatatgcttgctgataagcttctctttgaggctttgcaatactcgcatgtgtgcaagtatgcttgctctgaagaagtacctgagcttcaagacatgggaggtccagtggaaggtgggtttagtgttgcgtttgatccattggatggatcaagcattgtggatacaaatttcactgtgggaaccatattcggtgtttggcctggagacaagttaaccggaatcactggaggagatcaagtggctgcagccatgggaatctacggtccacgaaccacttatgttttggctgttaagggctttccaggaactcatgagttcttgcttcttgatgaagggaaatggcagcatgtaaaggagacaacagagatcgcagaagggaaaatgttctcaccaggaaacttaagagccacattcgacaactccgaatacagcaagctgattgattactacgtgaaagagaaatacacactgcgatacaccggaggaatggttcctgatgttaaccagattattgtgaaggagaaaggaatcttcacaaatgtgacttctcctacggctaaggcaaagttgaggctgttgtttgaagtggctcctcttggcctgctcatagagaatgctggtggattcagcagtgatggacacaagtccgtgcttgacaagaccatcatcaacctcgacgatagaactcaagttgcttatggctcaaagaacgagatcatccgcttcgaagaaaccctctatggaacatcaagactcaagaatgttcccattggagttaccgcttagaaactcattcaaaataagtgaatgcatgtttatttttccataaaccggataatttacttttcccttgggttataacggcccccgaattccttcaggccgggggatccactagtcttaaacggccgcccccccggtgaagctcccagcgtttgttccccttaatgag

SEQ ID NO: 123839 - DNA, 613 bp, Arabidopsis thaliana
  unsure (1)..(613): unsure at all n locations
tcgcacatccctttgcctcggtctctctctcgcccaattgcccatcaccagagcttaatcatatcttcttcagttactgccacgtgtcactctgaccgtgaacagcctttatctcttccaagtccacttgtgttcttgattattttgtcttcaccattctctctactcagagctcctcttctccgatcaaaaaccctcgagcttttaacaatggagaccagcatcgcgtgctactcacgtgggatccttcccccaaacgtctcttctcaacgatcctctacattggtctctcctccttccttctccacatcctccagcttcaagcgtctaaaatcgagctcaatcttcggagattcacttcggcttagcaccaaaatcgcaacttaaaaggccgcaaaaggctaagnggtaaatggtgcttcaaacttgtgnccaaatgtggaaattngccaaaggttttgaaggggtttttgggaaaagaaactcctgncaaagggttttagnncttttctgaatgtgtattgggggagnattttggcaatagntttaaaggtngnnaanttttnnggnggcacnttttgttatncttgggggncacncgtgtgaagntnta

SEQ ID NO: 123840 - DNA, 514 bp, Arabidopsis thaliana
gaaagagaaatacacactgcgatacaccggaggaatggttcctgatgttaaccagattattgtgaaggagaaaggaatcttcacaaatgtgacttctcctacggctaaggcaaagttgaggctgttgtttgaagtggctcctcttggcctgctcatagagaatgctggtggattcagcagtgatggacacaagtccgtgcttgacaagaccatcatcaacctcgacgatagaactcaagttgcttatggctcaaagaacgagatcatccgcttcgaagaaaccctttatggaacatcaagactcaagaatgttcccattggagttaccgcttagaaactcattcaaaataagtgaatgcatgtttatttttccataaaccggataatctacttttcccttggtttataagagaagcaacaaaacttgtgatacaagtttttaaaaaaaattattagtttggtttggtgttaatcaaaattttaacagcatgaaacgaataatgaaatctgtctg

SEQ ID NO: 123841 - DNA, 543 bp, Arabidopsis thaliana
  unsure (1)..(543): unsure at all n locations
cagagctcctcttctccgatcaaaaaccctcgagcttctaacaatggagaccagcatcgcgtgctactcacgtgggatccttcccccaagtgcgtctcttctcaacgatcctctacattggtctctcctccttccttctccacatcctccagcttcaagcgtctaaaatcgagctcaatcttcggagattcactacgactagcaccaaaatcgcaacttaaagccgcaaaaggctaagagcaatggtgcttcaactgtgaccaaatgtgaaattggccaaagcttggaagagtttttggcacaagcaactccctgtcaaggggatttgaggacctttgcctgatgtgtatggggagaaggcatttgaggaccaataaggcttttttaaagttagggcccancttttttcgggtgggaccaccttttgttgttatacctcctttgggggatggncaactcggtnttnnaaatgcttccnggaaaaggtttctntttngggntttaaanncnnggatttttcaaaanttnttncctttaaagggg

SEQ ID NO: 123842 - DNA, 803 bp, Arabidopsis thaliana
  unsure (1)..(803): unsure at all n locations
tacggctgcgagacgggaactagccactgcgatcggagaagaaaaagctcgagagacgccatggaaatttcccaagctcgttcaagcttcgtttgtcttcttcttctgttactctccatgtgtttcgttccctgcgtcttttccaaatctcctcgtcctatctccgatgtggagatcaggcagaagaagagcgaatgctacggtgatatagagagtgggttatggggttggcaatgcaaatcttctgcaatagcgaaagagaattgtgcgctgcgatgcctttctccggtttgctatcaactcatttatgagagtgatccgcttgaagaaggtgaaaaagatttgattaggagccaagagtacaagtattgtatgtacaagtcatcactcggggaaagcttagagggtgttcgaggcatcttttgatggtatcaaataagactttctcagtgaagacatttgccaaaatctgagctaagctcttgaatttctgatcagtagtattctgctctgtcgcgtttgaagccatgtaaggcttcttttattataaacctcaatttttgggttaatggttgtttatatgaaacgtttacgtttatgattggcaaatccactgaatcttggaaccattgtacaaatcagtcttaatacgcacagattggtcccagttctcttgtcatgaataggagtccatattattgttggagtctnnnnnnnnnnnnnnnnnnnnnnnnnnnnnnnnnnnnnnnnnnnnnnnnnnnnnnnnnnnnnnnnnnnnnnnnnnnnnnnnnnnnnnnnnnnnn

SEQ ID NO: 123843 - DNA, 892 bp, Arabidopsis thaliana
  unsure (1)..(892): unsure at all n locations
gagagaaaaaatttgacttgcacttcctttgactcactatcgggaaagctggtacgcctgcaggtaccggtccggaattcccgggtcgacccacgcgtccgtccaatttctccggctaagatgcagcagaggaagccgacggcgggtagacccagtggtaccgatggatccgatttctcataccgcatggtcgttgactctcgttacacgaaggtcactaaagaaaaagctcgtctccgtcctttgatctttgttcaggctgcgatttatgtaatcggattatcgtgtgcgtttctaacaacaactaaaaaggatgagaagaacacccttgctattgcagctgctgttgctggcttagtgtgttcattgataggagaattaggttgcagacgtagcagagtaaaccttttgaggctctacacggctgcatcaaccattgttatggttctttctgtgttttgtgctgttaggagcagattaaccatggaggaacgcaatagctctggaacaaccgcgaagcttgagctcgcaggtttcatttgtgctcaattaggagcggtggtgcagatattagcgatcatcgttacagggtcccttgtcaataatatgtctccacctacgaaagcagcatagaggaacataaaatttgggcactgtcgtgtgtgcttctcttaaatgaagaacttaggaaatttgtaatttttgaaccatttttgttctctccaccaagtgattagtgttatacacacgttgtttacttcaagcttttaatcagtccttccaacacaaaaaaaaaataaaaaaaaaggggcggcggtcttaaagatccaagctacgtaccctgnnnnnnnnnnnnnnnnnnnnnnnnnnnnnnnnnnnnnnnngtaaatcg

SEQ ID NO: 123844 - DNA, 586 bp, Arabidopsis thaliana
  unsure (1)..(586): unsure at all n locations
gaaaaacccgcccncctaacttgtcagcccgattattaacggatacgggcgttctaccaccactaaaaggntggaagaccccttgctatgcactgctgtgctggcttagtgtgttcattgataggagaattaggttgcagacgtagcagagtaaaccttttgaggctctacacggctgcatcaaccattgttatggttctttctgtgttttgtgctgttaggagcagattaaccatggaggaacgcaatagctctggaacaaccgcgaagcttgagctcgcaggtttcatttgtgctcaattaggagcggtggtgcagatattagcgatcatcgttacagggtcccttgtcaataatatgtctccacctacgaaagcagcatagaggaacataaaatttgggcactgtcgtgtgtgcttctcttaaatgaagaacttaggaatttgtaatttttgaaccatttttgttctctccaccaagtgattagtgttatacaacgttgtttacttcagctttttaaaaaaaaaaaaaaaaaagggcggccgctctagaggatccaagcttacgtacgcgtgcatgcgacgtc

SEQ ID NO: 123845 - DNA, 385 bp, Arabidopsis thaliana
actttctctctctctctctctctgattgattcttgaaaagagtatcatagtctcaatagcttgggtttgattctagttccattccacaattgcatctaattctcctaccgtagccttgtcttctttatttgtcatcaacaactcctaaaattcatatgaaattagagaaatcgaaacgaagagataatatttttcaagaaagagctacatatacaccttttgaccttgtaaagttggaaccctagaggcctttcaagcaaatcatcagggtaacaatttcttgatctttctttttagcgaatttccagtttttggtcaatcatggcaaacccttggtggacgaaccagagtggtttagcgggcatggtggaccattcggtctcct

SEQ ID NO: 123846 - DNA, 711 bp, Arabidopsis thaliana
atgatttgccggcactatacgactcacttagggaaagctggtacgcctgcaggtaccggtccggaattcccgggtcgacccacgcgtccgggtataatatgagagatagacaaatgtaaagaaaaacacagagagaaaattagtttaattaatctctcaaatatatacaaatattaaaacttcttcttcttcaattacaattctcattctttttttcttgttcttatattgtagttgcaagaaagttaaaagattttgacttttcttgtttcagatttcagcaaatgggatcgattttaagcttcgtctgggttaaaagcttggagcctatctgaagacagaacaaaggttcttgcttttgattcattgcccattttgagaagatgttcgaaggtcgtcctcgtgattcttgtctagtttcaacacttttcaccatgccaagccataaagaaacgaaatggagctttttggtttctgggaaacgatcttttctcaacaacgatgagtctgatcttcacttcaagaagatgtacaagcttactactgattcaagtgaaggagaagacaatggatcttcttcagattcaggaacacttatcccagggatgaacagagatgattcgttaagctgtttgattcgttgctctagagctgattactgctccattgcttctgtgaatcgtagcttacgttctttgattcgaagtggag

SEQ ID NO: 123847 - DNA, 707 bp, Arabidopsis thaliana
  unsure (1)..(707): unsure at all n locations
tgatcttnnnnnnnnnnnnnnnnnnnnnnnnnnnnnnnnnnnnnnnnnnnnnnnnnnnnnnnnnnnngtcagcataaaaattccacgtcgcatttttctcttcttcctcttctgaaaaattagggtttgagttcttcttctaatcgatcagaaagatgggtggaggaaacgcacagaaatcagccatggctcgtgccaaaaacttggagaaggctaaggctgcaggaaaaggtagccaattggaagctaacaagaaagctatgtcgattcagtgcaaggtttgtatgcaaacattcatctgcacgacatcggaagtgaaatgcagggagcacgcggaggcgaagcatccgaaagccgatgttgtcgcttgtttccctcacctcaagaagtgatgaaagctattatctcaactataaaggattccaatgtataacgtatggatcctcatctttcctatgtttgtatcaaagtctcgacaaattttatggtttctatttctctctacttgtttcaacaataagtctcttgctatgattatataatgaagctctgtgtggaacctttttttttaatataaattggcttcttttcgctaaaannnnnnnnnnnnnnnnnnnnnnnnnnnnnnnnnnnnnnnnnnnnnnnnnnnnnnnnnnnnnnnnnnnnnnnnnnnnnnnnnnnnnnnnnnnnnnnnnnnnnnnnnnnnn

SEQ ID NO: 123848 - DNA, 468 bp, Arabidopsis thaliana
gagacttacttgaagatagacgggagtaaagccgagaagtttgtgtcaaaagggatgtacaaggatccgagtggtctctctgttcttactggaaacaacaagaagaaactgatggaccatgcaagctttaaaggcttgaaggatccaaaacgtaactctcaagagaaaaccctgagaaccagcctgagccggttgatgccaacagtcagttttaatgacaagactctaaactcacccacatctcagaaacgaaaatccgctgtttatcggctttctttcaaaaggaggtcgtgtgatggtgagcgaagttactgagcaacgtaagttgttgtaccgtccaaaagcgggattcacaattccttcctcgggcagagaaaagcagtctagcggaagttggtctgagataccgccttcaacttttaaactccgtggagaaacctatttcaaagacataaagaaatccccagc

SEQ ID NO: 123849 - DNA, 996 bp, Arabidopsis thaliana
  unsure (1)..(996): unsure at all n locations
nnnnncacgcgtacgcaaaggctggcgcgtgccttatctgcttctctctctccagtggtctcaaatctctctgtgtgatcccacttgtcatcctcctccacaacataaagcttgagaccataaccctttagcgttttcggctaaagctttcgctgactactacaacaatggcgtcctcatccctttcccctgctactcagcttggttctagcagaagtgctttgatggcgatgtcaagtgggttgtttgtgaagccaacgaagatgaatcatcaaatggttagaaaagagaagattggattgagaatttcttgtcaagcgtcgagtattccagcagacagagttccagatatggaaaagaggaagactttgaatcttcttcttcttggggctctttctctacctactggctacatgcttgtcccttacgctaccttctttgttcctcctggaaccggaggtggaggtggtggtactccagccaaggatgcccttggaaacgatgtagttgcagcggaatggcttaagactcatggtcccggtgaccgaaccttgacccaaggattaaagggagatccgacttacctagttgtagagaacgacaagactctagcgacatacggtatcaacgcagtgtgcactcatcttggatgtgttgtgccatggaacaaagctgagaacaagtttctatgtccttgccatggatcccaattcaaccgcccaaggaagagtcgttagaggtccagccccattgtcgctagcgttggctcacgcggatatagatgaagctgggaaggttctttttgttccatgggtggaaactgacttcaggactggtgatgctccatggtggtcttaagactcttcaacaagaaaaagagaaagatttggtctttttgtgtaagacttgtttgaatgttcttataatgtataagctacatttcatcgcaattactctgtgaattcttgcctcttatatgaaatattatgttcattc

SEQ ID NO: 123850 - DNA, 494 bp, Arabidopsis thaliana
ctgcaggtcccggcccggatttccggggttgaccaagccgtccgaaagactgagaaaaagctccaaaaaatgagagagctcctgtgaagggccgaagagccgaagaagaaggagaacattaatggcggctactccgtggtccttggtcgcagtacttctcaccattcttaccagctctcaggggattctatcaactctttctcaaagtgatggaggttataagtatgattatgctactgttccctttcttgctgaagtttttaagctgatcatttctggtttatttctctggagagagatgcggacatcttcctcaacaacttcaaggattactacggattggaagagtgtgcgattatttgttattccgtctcttatttatctgatacataacaatgtgcagtttgctacattgacttatgtggatacgtccacttatcagataatgggtaatttgaagattgtgaccactggcatactgtttaggttatttt

SEQ ID NO: 123851 - DNA, 791 bp, Arabidopsis thaliana
  unsure (1)..(791): unsure at all n locations
aaccgggagattcccttttttggtgatgaataaaataggaatcgaacacgtggacggcgcagatgctaaagtgaccaaatccactggtgatccgggtaaagtttcgggtccggctcagttcacaacaagtggtgacgtggcggaggtgatagaggagcttcgaacggagaacaagcagttaaagagagccgttgaagatctccgggaagtaatatcaaacgtccgtccatactcgccggcgacaattgattacggatcacactcgaagtatcgcgaatccgagaggaacaacaacaacaacaacaacaacaacaacaacaacaacgggagatcgagagctgatcggtggagcagcgagagaacgacaacgtctgattacggtgggaagaaaagcaaggaagagggcaatgtagctgaggagctgaagaaagctttgaaaggagctgcttgaagcttctatggcggctattggtaatcgcaggctttactcgaattacaattacatttgtcgaccttaatcagctattgcttttgtatatatatgcgttgaattatctggattagatttgcacaacttgttttgaatcttttgatggaatcttcagagttttgtatgagattatgcttttcaattctctttattgaacttatatgcaggttgattgttgaattgatttgaatcagtattctattatagtacgaataaaaagaacaaagggaggccgctctagaggatccaagcttacgtacgcgtgcatgcgacgtcaaagtcttctaannnnnnnnnaatc

SEQ ID NO: 123852 - DNA, 673 bp, Arabidopsis thaliana
  unsure (1)..(673): unsure at all n locations
gcgagagagaaggaagaagatccagacgaagtggtttgccttcagggaacgagagagagaaagagattttaacaaacgatgtcgctgaggccgagcacacgcgcggagctaaggaagaagatatacaagacaggcgtcgatgccgatgaggccaggcggaggagagaggacaatctcgtcgagattaggaaaaacaagcgtgaggatagtcttctcaagaagcgtcgtgaaggaatgatgcttcagcagcagctgcctctcggagctggccttgatggtccccagaccgctgccgccgttgagaaacgattagaaggtatcccaatgatggtacaaggtgtttattctgatgatcctcaagctcagctagaagcgactacccaatttagaaagttgttatctatagagcgtagtcctccaattgatgaagtgatcaaagctggggttatccctcgntttgtggagtttcttngaaggcatgaccatcctcaattgcagtttaaggctgcatnggctttgaccaatnntgcgtcagggacatcagatcatactcagggttgtaatcggaacaagggnacggttcctattcttcgttaaggtttnttacatnttcaaagtggntnncggtcnagagcaggnggaantngggctttgggaatgnnnattggggcct

SEQ ID NO: 123853 - DNA, 417 bp, Arabidopsis thaliana
  unsure (1)..(417): unsure at all n locations
ttttttnanancccggggcccnttgacccnnattttttncggcccgttcaaaggaatttcccngnccggaaanctttccnccagngngtacnctgtccagaaagttactgcacatcatcaaccaatactaaggaaacaagaccagcggcaagttctttgcttgggatggccaggagataccttggtgatttcttatatggttttctcgatccgaatggtcagttctttcaaagtctattgaattcttgtcggggttttttcacgttcttggtttgagagcaattcctcgagtaatatcgaatagcttggagtgagtatccagaagctgagagctttctgagtatataataaccaatgtgatggtataatcttctatctacattttgtattactgcataattttacacgctattttcg

SEQ ID NO: 123854 - DNA, 845 bp, Arabidopsis thaliana
atcaaaagccttaactttttctttagctctttccattacaagagacctctagcttcatactttttataaaaattctctctttttctcagtttaatctcaagaaatggtttcaagatcgtattcaaatctgttggagttagcttcaggagactcaccaacgtttggacgcatgaaccgacaaatcccacgaatcatggccgttgctggaatcatgtcaaacatcgataatgactctaaagacactgatctgtctcctaaagatcgtatcatcattgtagccaatgaattacctatacgagctcagagaagggttgatggtaatggtagtggtagtagtagtagtagtacttgttgtagcaaaggttggaacttttcttgggatgagaattcacttcttctccaattgaaagatgggttaggagatgaagctattgaagttatctatgttggttgtttgaaagaagagattcctcttaatgagcaagaagaagtgtatcagattcttcttgagagtttcaagtgtgtgcctacgtttttgcctttggatttgtacactagatactaccatggattctgtaagcaacagctttggcctttgtttcattacatgttgccactttctcctgatcttggaggtaggtttgataggactttgtggcaagcttatgtctctgtgaacaagatttttgctgatagaattatggaggtgattaatcctgaggatgattttgtgtggatacatgattatcatttgatgggtttgcctactttcttgaggaagaggtttaacagagtcaagcttggtttcttccttcatagtccatttccatcgtctgagatttaca

SEQ ID NO: 123855 - DNA, 889 bp, Arabidopsis thaliana
  unsure (1)..(889): unsure at all n locations
cttcaaacaccatttttggaaacaccatttcatattccttaaacttttccattttagtatcatttcatattcattgatatggatgtctccaacacgatgctccttgtagctgttgttgcagcttactggctatggttccagcggatctcaaggtggctaaagggtccacgtgtttggccagttttgggcagtcttccgggtctgatcgagcagcgtgaccgtatgcacgactggatcactgagaacctccgtgcgtgtggcggcacttatcagacatgtatctgcgccgtacctttcttggcaaaaaagcaaggtctcgtgaccgtcacgtgcgatcccaagaacatcgaacacatgctcaagaccaggttcgacaactaccctaaaggtcctacgtggcaagccgtgttccatgacttcctcggccaaggtatcttcaactccgacggtgacacttggctcttccagcgtaaaaccgccgctcttgaattcaccaccaggacgttgaggcaagcgatgggtcggtgggtgaaccggggaatcaagctccggttttgtccaattctcgaaacggctcagaacaattacgagccggttgatctccaagacttaatactacggctcacattcgacaacatttgcggtttagcattcggtaaagacactcgaacctgcgcaccgggacttcccgagaacggtttcgnctcggctttcgaccgagncaccgaagcttttctccagcggtttattctaccagaggtttctatggaggctttaaggaaatggcttttgnctncggcttagaaggnaanttttagnccggagcctaggggaaattccattgggatttagatcntgcattnatncacgtngaaaganttntngnnna

SEQ ID NO: 123856 - DNA, 791 bp, Arabidopsis thaliana
cccaagcgtccgcccacgcgtccgcggacgcgtgggcgagaagcaaaggatagtataaaaccaataagagagccaagcagggtggtacaagcaaaaccagccagaggtcaaaccgggaagaaaacagctccatcagttaaggtggttgagccaacaatgctggtcatgaaattcccacctggcacatctctcccttcagccgcattgctaaaggcgaggtttggtcgcttcgggctgttagatcaatccgccattagggttttctggaaatcatcgacctgccgtgttgtctttctgtacaaagccgatgcccagactgcttttcgatatgcaacaggaaacaacactctatttggaaacgtgaatgtaaagtactttctccgtgatgtggatgctcctaaagccgagcctcgtgagccagaaaacaccaaggaagatgatgaaccacagagccagtggttggaccaagcaccaccgcttcaccaaccaacattaccgccaccaaacgtcaacctcaaatcctgtttgaagaaaccagttgatgacccgagcagtagtagcaacaatggaaacggtaaccgcgcagccgtaagagtcaaattcatgttaggtggtgaagaaaactcgagtaaagcaaacaccgagccaccacaggtcacaatgaccttgaatagaaacagtggaccttcttcatcatcatcatctgttccaatggaatttgttagtaagaagtttcaaaacgttgttcatcatcaacaagtttcttcttctacattgccttcaattttttc

SEQ ID NO: 123857 - DNA, 392 bp, Arabidopsis thaliana
acaaagtctcatttctcgttaatttccattttcgttatctctctctctcgccgatcaaaccctaggtgtatcaattcgttcagattcccggcggttggtctcactgtcatgtaggtttgattcatcttctcttctggatcttgagtgacgaagagagaagagatctgagtttttctgagagagagatttttctccctcgttgacccgatcagttttttttcgtcgctggggattttcaaattttttttgagggatcggttttgatttgttacgtagatggcggattcttcacccgattcgtgtttcaaaggaggcaaatttagtgctccagggtttcgatttcatccaactgatgaagagcttgtgatgtattatttgaagaggaagatttg

SEQ ID NO: 123858 - DNA, 614 bp, Arabidopsis thaliana
  unsure (1)..(614): unsure at all n locations
nnnnnnnnnnnnnnnnnnnnnnnnnnnnnnnnnnnnnnnnnnnnnnnnnnnnnnnnnnnnnnnnnnnnnnnnnnnnccacgcgtccgccttttctacgtttcccgaattctgattagttgattcttcttcctcaatccgttcttcccaaacttgttgccgatttttggatccggtcatcaactttgttgtttatttgtcatcaatgcaaaaattgagagcgtctgtgttttcacttgcatgttatcaattcctaatgttgtttgccgtttcattaaccggattcgagactcttcccgctggatttctttttttcacgtcttcttttctattttttatggatttggtattttgacatgttaagcaaccttcgttaatcagtttaaaatcggtgctttccgaaatttttagaagaaacatggaagcttaaaattttgaaattgctatttggaaaagctatcatttcataggcttagtctttgtaattcttctttacttgttgttcattggcatgaatatatgaaggattttatatttgattgggtgtttgtttatgttgttagaaattgatcaaaatgggagaagctggtcaatccagagacggagaatctgtcac

SEQ ID NO: 123859 - DNA, 587 bp, Arabidopsis thaliana
  unsure (1)..(587): unsure at all n locations
nnnnnnnnnnnnnnnnnnnnnnnnnnnnnnnnnnnnnnnnnnnnnnnnnnnnnnnnnnnnnnnnnnnnccccgcttcttcacccaaaaacccctaaaagccttatcccttcttcttcccatggctgcttcagcttcgtctctcgctctctcttccttcaaccctaaatctcttcctttcggcgtctccagacctgcctccgtttccctcttatctccttccctctcctttaaactcaattccgactccgtttccttctccatcgccgccaaatggaactctcccgcttctcgcttcgcccgtaacgttgcgattacctcagagttcgaggtggaagaagatggtttcgctgacgtcgctccgccaaaagagcaatctttctctgctgaccttaaactcttcgttggtaaccttcctttcaacgttgacagtgctcagctcgctcagctctttgagagtgccggaaatgttgagatggttgaggtaatctatgacaaaattacaggaagaagcagaggttttggattcggggcaatgctcaagttcnaagtnngggagtgncagngtcaatgggaanngtggngggnc

SEQ ID NO: 123860 - DNA, 490 bp, Arabidopsis thaliana
  unsure (1)..(490): unsure at all n locations
gctctctcttccttcaaccctaaatctcttcctttcggcgtctccagacctgcctccgtttccctcttatctccttccctctcctttaaactcaattccgactccgtttccttctccatcgccgccaaatggaactctcccgcttctcgcttcgcccgtaacgttgcgattacctcagagttcgaggtggaagaagatggtttcgctgacgtcgctccgccaaaagagcaatctttctctgctgaccttaaactcttcgttggtaaccttcctttcaacgttgacagtgctcagctcgctcagctctttgagagtgccggaaatgttgagatggttgaggtaatctaatgacaaaattaacagggagaagcagaggttttggattccgtgcactatggcttcaagtttccgaagttgaggcagattgctcagcagtttaatggcgaaaagatggggggggaaaccctttgagaaaaanggggggccccca

SEQ ID NO: 123861 - DNA, 801 bp, Arabidopsis thaliana
  unsure (1)..(801): unsure at all n locations
agatttcttggtgatgctttgcgcgttctttggtgtcattttcctatccgttcaaaacggtctagccattgcggtggggctatcgttgttcaagatattgatgcaagtaacaaggccgaaaatggttataatgggtaatattcctggaacggatatataccgagatcttcatcattacaaagaagcacaaaggatcccgggatttcttgttttaagcatcgaatctcctgtcaatttcgccaattctaactccctcactgaaagaacatctcgttggattgaagaatgcgaagaagaggaagctcaagagaagcattctagcctacagttcttgattcttgaaatgtcagcccgtgagcggtgtagacacaaaccggagtgtccttttttaaggaacttaagaaaacaaccgccaagaaggacatcgagcttgtgtttgtgaaccctcataagcgaagtggtggagaagcttcaaagagctgacgaacaaaaagagttcatgaggcccgagtttctcttcttaaccgtcgctgaggccgttgcgtcgctctctcttaaagggccatctctcagtaacgtttaactataattttttgtatcggtccaatattgatatttaaccgatggttaaatttttctttttgtctctttttcatcttttaatttcagtacagatgtaatattacgttcttctctctctttcttcagtgatgattttggtcaagatatgtttgtatgaaaaaaaaccccaaaacacccagggcgaccgctctagaggatccnagcttacgtacgcgtgca

SEQ ID NO: 123862 - DNA, 638 bp, Arabidopsis thaliana
  unsure (1)..(638): unsure at all n locations
atacgactcccttagggaaagctgctacgcctgcaggtaccggtccggaattcccgggtcgacccacgcgtgcgccttctcccataagaaaaaaaaaataatcaaatcctcctcctctgcttcaccaccaaaaagcatattcttctctcgtcttctccggttaatcaaaatctctccgtgtgaatcgtttgtgaatggtggaaactaatccgatcggtggtaagtttacgctctccctttccatcaaaagggcgagcttttctcttcctctctcgacatcctctgttttcgctttcggatcttgcaaagaaggctggtactttcgctgccttggcctcgacccgtgaacgattcgcccctaaaattcacaacccggaaccctaatttcctaaaaagtggttctttttttattgattctgttacttgtgagatttgctctgttttttgttctctcgatttcgaagatgttgctctacaacaagcagaagaagaaccaaaacgctaaagggaataggattctcattagggttacggttttgggaagtccggccctcccggtttttgcttataagggtccccttgtgccctgtaaggactgccttaaagggacggngaaaggggctccctntgnctntnnc

SEQ ID NO: 123863 - DNA, 689 bp, Arabidopsis thaliana
gttcttgcaaagaaggctggtactttcgctgccttggcctcgacccgtgaacgattcgcccctaaaattcacaacccggaaccctaatttcctaaaaagtggttcttttttttaattgattctgttacttgtgagatttgctctgttttttgttctctcgatttcgaagatgttgctctacaacaagcagaagaagaaccaaaacgctaaagggaataggattctcattagcgttacggttttgggtagtgccggtccgatccggtttgttgcttatgacgatgatcttgttgcctctgttatcgatactgctcttaaaggttacgctcgtgaaggtcgtcttcctcttcttggatctgatttcaatgaattttcttctctattgtcctatgggttggacctgaagctttaagcacatgggatgcaattggatctcttggagcgaggacctttatgctctgtaaggaaaccagaggggaagaaggttgagggaagtaatggaaggcctgactctaccattaatggtgcaagaaaaggtggaagcttgaaggcttggatcaacaaatccttcaatctcaaagtctcaagccattaagattaattttcttctcttttttatgaaataataagaccaatctttgttttatcatcattatgttctttgtttttggttttgattccaaagtttg

SEQ ID NO: 123864 - DNA, 447 bp, Arabidopsis thaliana
atcacatcgagactctttgatcggagtttcccaaaatccccgatggcgaaggaaactccggcgtcgtcgtcgatgccttctggtctcaaagcctacacggttcctatcttcctcttcgtcctcgctatgttcttccagcttttccttcttcctcgttcctttcctccttctcattacgacgttttgggtgtaaagatgtacagctcagtggatgacgtgaaagatgcgtatcagactgttgcttctaagtgggattcgggttcaggagtttctcttccagctgattttgttaagatacaatacgcctatgagctgttaacaaatctagtatggaaaagggactatgacttatacgccattgatgaatcagtacatattatagaggaacttgaaaaacaatatgctgtggaagattttgcaaaaataaaacttcccctactggaagtt

SEQ ID NO: 123865 - DNA, 681 bp, Arabidopsis thaliana
  unsure (1)..(681): unsure at all n locations
aaaanaanggccccancccnggggaaatcccccccccccngnccnnnnttnaccaaccccagcccnaaccntncccccgggccccctccagnnccagtaagcccacccgtggtgttgtncaatttccccagccatggttcaacccattgccccgggaatggcttttggtactggaagtccagttccacacagggctgttgattctgtgatgggtccacgaaccattcagcatgaggctgttgaggctgcttctgcatctgcagcccctgctggaagcgccatgctttctagcacctgtgacattcatgctaaggctttccaagattgcatcggcagctatggaagcgagattagcaaatgtcagttctacatggacatgttgtccgagtgcaggaagaactctggttccgtgattggtgcctagagtttccatttctcctatttgttttatcttaaagaattatccagctgtgatgatgctgagaatttggatatgatgatatgatcaaataacagtattatgtttccagaacctgaaactgcatggttgaagtcttattatgggtaatcgtttttaagacttgggttctatcccttttttaaacaaataatgcaagtttttttgtaaaaaacaaaaacaaaagggcgaccgctctagaggatccaagcttacgtacgcgt

SEQ ID NO: 123866 - DNA, 558 bp, Arabidopsis thaliana
atgatactccagcgtctctacgactcactattgggaaagctggcacgcctgcaggtaccggtccggaattcccgggtcgacccatgcgctccatttgcttaatctcattttcgtttcaccgccgtctctctctatatcaaaatgggtcgccgtagctcaggaggaagatctgcccctcgccctcgtcctgctgctgcacgcagcccagctcctcaacctgtacaccgtgcacctcctccagctccagctcaggccagcggtggtggtggtggcatgttctcaggcattggttcaaccattgctcagggtatggcttttggtactggaagtgcagttgcacacagggctgttgattctgtgatgggtccacgaaccattcagcatgaggctgttgaggctgcttctgcatctgcagcccctgctggaagcgccatgctttctagcacctgtgacattcatgctaaggctttccaagattgcatcggcagctatggaagcgagattagcaaatgtcagttctacatgggcatgtggagcggggtgcggggagaactgtgg

SEQ ID NO: 123867 - DNA, 459 bp, Arabidopsis thaliana
  unsure (1)..(459): unsure at all n locations
ttagcatgaatgtccaaggtgctaaaaagcatggcgcttccagcaggggctgcagatgcagaagccgccgcctctccctcttgctgaatgggtcgccgtagctcaggaggaagatctgcccctcgccctcgtcctgctgctgcacgcagcccagctcctcaacctgtacaccgtgcacctcctccagctccagctcaggccagcggtggtggtggtggcatgttctcaggcattggttcaaccattgctcagcgtatggcttttggtactggaagtgcagttgcacacagggctgttgattctgtgatgggtccacgaaccattcancatgaagcttgttgaagctgctttcttgcatctgcaacccctggctggaaaacgcccatgctttttaaccacctgtnaanatccatgcctaangntttcccaaaaattggcatcccggcagcttattgggaa

SEQ ID NO: 123868 - DNA, 757 bp, Arabidopsis thaliana
  unsure (1)..(757): unsure at all n locations
cataccactcactttanggaaagctgctacccctgcaggtaccggtccggaattcccgggtcaacccacgcgtccgcggacgcgtgggcttcaatgtgaaagagtattgcaactgatttcccgtttcatgcaggcaagaaaacagaaaggcagtgatcatggcatcaaagcgcatggagatggttggttgctaactgttgctctaattgagggggtcgatctagcagctgtggatccaagcgggcattgtgatccctatattgtatttacttccaatgggaagacaagaaccagctccatcaagttccagaaatctaatcctcagtggaacgaaatatttgaattcgatgcaatggctgatcctccttctgtactgaatgttgaagtttttgatttcgatggaccttttgacgaggctgtttcattggggcatgctgaagtcaactttgtgagatctaatatatctgatttagcggatgtttgggttccacttcaagggaaactagctcaggcttgtcaatccaaacttcacttgaggattttcttggatcatacaggaggtggagatgttgtcagagactatttaaataagatggagaaagaggtgggcaagaagattaatgtgcggtctcctcaaacaaattcagcttttcagaagctctttgngtctcccacaacgaagaatttctaatcaatgacttttacatgtcacttaaagcggnnaatgccttttcagggtcgtcttttcctgtctgca

SEQ ID NO: 123869 - DNA, 473 bp, Arabidopsis thaliana
aaacagattcattaaccctttcttttgcttaggcatctcattaggtagagtcttagagtcaaaggatctctctttgagtttctggtcttttatcaggttttctaataagcaaactttgtttttcgttgcagtgatcttgataaccaaggtctgaaaggtttcctaccaaacgatatatcaaagctaaaacatcttcagagcataaacttgagtgaaaacaacattcgtggaggaatacctgcatcgcttggaagcgttacgagcttggaagtattggacctctcctacaattccttcaatggatctatccctgaaaccttaggagagttaacatccctgcggattctgaatctcaacggaaactctttgtctggaaaagtaccagcggctgtaggtggaaggctgttgcacagagcaagcttcaacttcacagataatgcaggtctttgcggaatcccggggctaccagcttg

SEQ ID NO: 123870 - DNA, 531 bp, Arabidopsis thaliana
gcctgcaggtaccggtccggaattcccgggtttacccacgcgtccgaccacgcgtccgatcagttattgggacatgaagttgaggcccagatggttcgtaacacactacctcgacgttttggggtacctggtcttccagaactgaatgcatctcaggttaatgcggtgaaaagtgtccttcagaagcccatcagcttgatccaaggtccacctggcacaggcaaaactgtgacttctgcagcaattgtgtatcacatggcaaaacagggccagggacaggttctcgtttgtgccccaagtaatgttgctgtggaccaactagctgaaaaaattagtgctactgggttaaaggttgttcgcctttgcgcaaaatcaagggaagctgtaagttctcctgtagagtatttgacccttcactaccaggtaagacatcttgacacatctgaaaagagcgaactgcataagttgcagcagttgaaagatgaacaaggtgagctgtcaagcagtgatgaaaagaaatacaaaaatttg

SEQ ID NO: 123871 - DNA, 490 bp, Arabidopsis thaliana
  unsure (1)..(490): unsure at all n locations
agttaacttgcagatttcttagtatttctaatctttttcttatattaaccttttgtctccttctctctctctctctctctgaactatacaaaaacctacttttaggttctcgtccaagaagtcaagaacccagaagaagacatgacaagtgaagttcttcaaacaatctcaagtggatcaggttttgctcagccacagagctcatcaaccctggttcatgatgaatctctcatcaatcctcctcttgttaagaaaaagagaaatctccctggaaatcctgatccggaagctgaagtgatagctttatcccccacgaccttgatggctacgaaccggttcctatgtnaggtatgtggcaaaggtttccaaagagnccnaaacttacagcttcatcnggcgggggacataaatcttcccatgggaaggtttgaagncaggaggnccaaagcaaaaggaaggtgagnnaaanggtgtnttacgttttgncccc

SEQ ID NO: 123872 - DNA, 533 bp, Arabidopsis thaliana
agcgctacacgactcactattgggaaagctggtcacgcctgcaggtaccggtccggaattcccgggtcgacccacgcgtgcgctctcttcttttttttttttttttggtttttcatttaagtctattcaatcatggaaaccggtttaaacatcttaaagctatcgctatgcgtcagcctagtcgtggttggatcatatgctcaggctcccgcaccatggaatccatctaatgggtttcgtccggggacatgtgaccactacgagtgtcccacctataaattggtagaggccggatacggctttgagatccgcatgtacgacgctgccctatggatatctactagtcctatcccctccctatccatgactcaagccaccaaaaccgggttccgacggttaatgaggtactggaatatataagacttggcgttctgcggccgctcctcgtcccgaccaggggtggtgtagcgtgcaggccggcgcgggccgagcgctccccttttgctgtgatcctcgtgttttcatccccgtgc

SEQ ID NO: 123873 - DNA, 490 bp, Arabidopsis thaliana
  unsure (1)..(490): unsure at all n locations
aaatggaacaaaggtaatatatttgggtggtgaggaaaaggcaccggggttgctaacctggtttggcccaacgtgaaggggtaaggtaaattcccaacgaattttctcgctgtttataacccgccatctcatacctcgggctagggtgattaatgagatcatggttccgtttaacatgtagatcatgttaatggcgccctcacgttttgattgttccgtagcaattggattagaagaggtggtttagacccgatcgatgctgtatcagcagcttgcagcttctggtttaaccggtataaattgtatctctggttaagtggtgattaatattgttattttgtaaaggtggggaaaactgtaaccaaaaagtttgataaaagatttattttttcctttgaaaaaaaaaaaaaaaaaaaaaaaaaaaaaaaaaaaaaaaaaaaagggcgancgctctagaggatccaagctacgtacgcgtngcgtgcgacgt

SEQ ID NO: 123874 - DNA, 681 bp, Arabidopsis thaliana
tcgctcgttttcgattctaggatggtcatttaagtctattcaatcatggaaaccggtttaaacatcttaaagctatcgctatgcgtcagcctagtcgtggttggatcatatgctcaggctcccgcaccatggaatccatctaatgggtttcgtccggggacatgtgaccactacgagtgtcccacctataaattggtagaggccggatacggctttgagatccgcatgtacgacgctgccctatggatatctactagtcctatcccctccctatccatgactcaagccaccaaaaccggtttccgacgattaaataggtacatagaaggagataacaagagcaacgtgaagatgaacatgacagctccggtgatcgcacaagcaacgcctggaagatcagtctacacggtctcactctacctcccgaagaagaaccaacagaacccacctcaggccgatgatctccacgttcggtctacgaaaccaacttacgtagccgtgagacagatcggtggctacgtgtcgaacaatgtagccaaggacgaagctgcggctctgatggaaagcctccgggattctaactggattttgcccatcgagaagagcaaaggaaagttgccggcgtattttctcgctgtttataacccgccatctcataccacggctagggtgattaatgag

SEQ ID NO: 123875 - DNA, 498 bp, Arabidopsis thaliana
tccacttatacatattaggagctgtccctcagtaccgtccgatcccggtcaccacgcgtgcgggacgcgtgggctttttaccgcgcttgctacacatgggggcagacatcaactcctacctaaatctggtagcagcccattttcagatcgaattgaccccaaggagatcacatcagtttttgggggttttgaggaatgaatttcttgcttcgatctgcttcttccgctactcatcggcctccggtgatcgaaccaccagctacgccgcctcaacctccccctgaaacagcgaggcccggagttactttggaagggctgattgctgaagagcatttcccacaatatccatcagtagatgaagatctcgatcgtgtgggtgatggatctggagaccttgatggtaatggagagtcaaatgctaagtctggtggctctggtatggagagattctctgatgtgtctgaggaacaaggatggatcgccattccatacaaggag

SEQ ID NO: 123876 - DNA, 710 bp, Arabidopsis thaliana
tccttcacattcatcccaaaacattacaaaacgttacaatggcttctaaggctcttgcagttacagctcttcttattacacttaatcttctttgtcttcacctttgtaacctccacaaaatgtccaccaactactcctaaacccccaaaaaccccgaaatcgcctaagaaggctcctgccgtgaaacccacttgtcctaccgacacacttaagcttggtgtttgcgcagacttattgggcctagttaacgttgttgttggttctccaccaaagactccttgttgtacacttcttcaaggtcttgctaatcttgaagctgcggtttgtctctgcaccgctcttaaagccaatgtcttggggattaatctcaatgttcctattgatctaaccttgctgttgaactattgtggcaagaaagttcctcatggtttccaatgttcttgaagatttgagactttaaaagagaaaaatctctttggtttgctatgtttttatatgtttgtttctactgttatctattgtttttgtgagaaaaagctttgttctgtcactgttgagtttgatgtaatgcttgagcttgttcatgatagaacctttgttctctcaatattgagtttgatgtaatgcttgagcttgttaatggattttatgttcttagtatttctcctctcgtccataaatgacattcaatcataacgctcttctaaaaa

SEQ ID NO: 123877 - DNA, 502 bp, Arabidopsis thaliana
aggtgacactatagaagagctatgacgtcgcatgcacgcgtacgtaagctcggaattcggctcgaggcttgttaatggattttatgttcttagtaagctcaagcattacatcaaactcaatattgagagaacaaaggttctatcatgaacaagctcaagcattacatcaaactcaacagtgacagaacctttgttctctcaatattgagtttgatgtaatgcttgagcttgttaatggatgtgatgaacttagttacaatcacaaaaacacacggcgtccgacccctaagcatctagtgtaccccctgatgagcctaatgacggaacctgctcgcattccttgttttcctataactggccgctttacagctgggaaacctgacgggccaacttggttactggatgagacaacgctccggtacaggcggcacccatataggaccccgaggcgtattttcttttcccagggagcctagaacagtgattgccctttacattctgc

SEQ ID NO: 123878 - DNA, 559 bp, Arabidopsis thaliana
  unsure (1)..(559): unsure at all n locations
atgcaagagattcttaaaccgagtcataaaaaacaaagtataactcattactccacagccgtaggccaaatcttttgtataaaaaccaaaacaatctaactggaatcaagtttaacatatattgagaaacactttcaggttcaaagatcactgtagtacaagaacaaaaggtaaacaggataaacgtcaaaaacgtgtgtagtcgaaacagccaaaagggcattcattgcagagcgcttcaacggaagtaaccgtagagctccaagtagcaaatgcaaaagttccacggagttgatgtatctgcagttggaccggtcagaaccagcctgaaaaacctaaaggggagtaatgcatttgctgcggtgattggccatgatgcaaactgaccggccttgcacattgtttgggcancccatggactctcaagtctgnccatgtttnccatccatcggtccctgaacttccagatctggggaagccctgggccgcctnnctganggggaaaatgcaanaanngntgtctcgcnagccccccnccggngtntggcgcccccnggcg

SEQ ID NO: 123879 - DNA, 816 bp, Arabidopsis thaliana
  unsure (1)..(816): unsure at all n locations
nnnnnnnnnnnnnnnnnnnnnnnnnnnnnnnnnnnnnnnnnnnnnnnnnnnnnnnnnnnnnnnnnnnnnnnnnntttgtattaattcgcggccgcctaagaacataaaatccattttcttgtctcaagcattacatcaaactcaatattgagagaacaaagggtctatcgtgaacaagctcaagctttacatcaaactcaacagtgacagaacaaagctttttctcacaataacaatagataacagtagaaacaaacatataaaaacgaaacactttcaggttcaaagatcactgtagtacaagaacaaaaggtaaacaggataaacgtcaaaaacgtgtgtagtagaaacagtcaaaaggtcattcattgcagagcgcttcaacggaagtaaccgtagagccccaagtagcaaattgcaaatagttccaccggagttgatgtacctgcagttggaccggtcagaaacatccagccttgaaaaacctaaaaggggagttaatgcatttgctgcggtgattgcccatgatgcaaactgaccggccttgcacattgtttggtcatcctcatggactctcaaggctgcccatgttttcccctccatcgatccctgaaacttccagaaatcttgggaaatgctcttgataccgccttggtctgaaggtggtaatagttgcaccataagctgatgttcttcgcctaagtccaccacccaccaggatgatatatggccgtcttccatcctaggccctgcaaaggaagtacccgcataggcttttgaagccaaagcctttggatcagtgaatctggatgtggg

SEQ ID NO: 123880 - DNA, 301 bp, Arabidopsis thaliana
ctcatggtttcaaatcttcatgaacattggaaaccatgaggaactttcttgccacattagttcaacatggtttccaatgttcttgaagatttgagactttaaaagagaaaaatctctttggtttgctatgtttttatatgtttgtttctactgttatctattgtttttgtgagaaaaagctttgttctgtcactgttgagtttgatgtaatgcttgagcttgttcatgatagaacctttgttctctcaatattgagtttgatgtaatgcttgagcttgttaatggattttatgttcttagt

SEQ ID NO: 123881 - DNA, 729 bp, Arabidopsis thaliana
agaatgaagccggagtattatggattcttctaatggttctctctttcttgcttcaaggagcaggtacagtattgaaggaagtcatctttatagatagccaaagacgattaaagggtgcttcactcgatctatttatagtaaattcatatggttcagctttccaagccatctgcattgcgttgcttcttccatttctttcaaaactttggggcataccgtttaaccaactcggtacctacctaaaagatggtgcggtttgttttctcaacaatgggacaataacaaaaggatgtgatggggctccgtttttgcctctgttgtttgtgataatgaacattggctataacattgctcttttaagactcctcaagatttcatccgcggtggtttcatgtcttgcatcaacagtctcagtgccaattgcagtgtttctgttcacaatgccattaccgtaccttggagttgcatcatcactaccaaaagggttcatgggaggaacaatcatacttgtattgggaatgattctttatagttggacaccacacggagctaactcttctcatactgattcagtcattccttcacctcctccaacatagagagggcttaactaaggggttttgcttttatataaagatttgagagatttatgcaaattcggtttgtgtttaaataaacttatatttgatcatatgatgttaatggaaaagttgacattttgtgaaaaaa

SEQ ID NO: 123882 - DNA, 761 bp, Arabidopsis thaliana
  unsure (1)..(761): unsure at all n locations
tccacgcgtccgaaatgtgcagctccggaaataaataatcactaaaataaccagatccgatctactgccccggtttctcgccggaatctccattctgtaaccggcgatcctctttctgctcagttatggaagacgtgaaagggaaggagattattgatgatgctcctattgacaacaaggtttcagatgaaatggagagtgaggaaaatgcgatcaagaaaaagtatggaggattgttgcctaagaagattcctttgatatctaaggaccatgaacgtgcgttttttgactcagctgattgggctttaggcaagcaaaaaggacagaagccgaaagggcctttggaagctctccgcccaaaactgcagccaaccccgcaacagcaaccaagagcaagacgaatggcttattcttcaggcgaaactgaagacactgagattgataacaacgaagctccggatgaccaagcctgcgcatcagctgtggatagtaccaatttaaaggacgatggaggcgcaaaagacaacatcaaatcatgaacaacatatagagatcttttgaggagcgcaaacaaacaacatccccaagtcaatttttcaggaggattagccgccccagggttttctttttgcaaccgggttgtaaatatcaagggcccttanccttatcatactttggggccttcaaatntggtatcactttcaaacctcggtggctttaaacggctnttttggcggttgaaaatnattttgctttaatgg

SEQ ID NO: 123883 - DNA, 388 bp, Arabidopsis thaliana
  unsure (1)..(388): unsure at all n locations
cccacgcgtccgccgaaagttctcatggcgtcgaagcaaaaattctgactcgttgatccataaagcgaactctttctcgctcttagtttctgcatttcgtctatcaaaagtaggattatacactttttgtttttgtttttgtgaaaccctatacagttcgatctaaaaccctaaaaagatggtgaaaccttccgatttcaaagcagttcacaaacttattcaattgcattacagtcgagtcaacctgttcacaacgacgggatggtcaaaactctcagctttgtcttctccggctcttccttcaaatggggtttctcagcttcagcctaagtctggtttccacaccttctcgtcgagacncacttcgaaaaactttggcttatcccag

SEQ ID NO: 123884 - DNA, 807 bp, Arabidopsis thaliana
  unsure (1)..(807): unsure at all n locations
acgtaaaaacataagaaaaacagagtaaataaagtaatgcgccgatcgtcgacggagagtatgagatgagaagagaaattgatattgatattgtttgatatctactgtagatgattcgtcttgacaaagagtatagtgtacttcgatgttgctttcggagatcagaaacttagttttgactttttttttgtgttctccttgtatagggaaggaggctgcttgacatcgaccaccctgaaagtccttttggtacaaaggaatctcctgctgtcgtacagtcctactttgacaagagaaatatcggatgccgtggtggtgaaggcgaggatggacacgacgtcgtttggttctggctagataaaggaaagtcatttgaatgtccagtgtgctcccaatactttgagcacggaccaccagacggtcatggtgacgatgaagaccaccaccattgattccggtcttttcttaacggcgaaatgttttcttctattgtagtgagtggaataaatatttctcgttggtgaaaacacttaaatatgttttttttgatcccccgagaagacaccacccctttatttgcctcaggctctaaccctttttgctttcttgagacttttgtttttatgaatgattctcgagtcagaatcattcctcctttttttgacccatataaaaaaaaggttttgggggtcnccggggggganggttgggggaaaaaggaaaacccnanaannatgcntnggggcgggaancntgnaccccgggggggcccaagnctanangggggccncccngggggggnccanc

SEQ ID NO: 123885 - DNA, 707 bp, Arabidopsis thaliana
  unsure (1)..(707): unsure at all n locations
tactctcnnnnnnnnnnnnnnnnnnnnnnnnnnnnnnnnnnnnngcctgcaggtaccggnccggaatncccgggttgacccccgcgtgcgggcacgcgtacgcccacgcgtccgcaacgacctgggcttgtatcctcaagctctacttcaaaaccatgtcttccaaggatgtccattgttactttcatatcctgcaaaaggactgtacacttggagtacttatcaaattgcttgagcaatccgaggagccaattgtttgttagatatggttttctggaaaggagcaacaagaagaaatcacagaggctggtcttggcatctgctgaagatggagtagctattaatggaagtcctcagccaagatctagtagtaatttggaggacatgaggactagtttcaccggatcattacaagacgaaaacaattctaatggacttaaccagtctttgcatgatgctgctagatctattgaattggctgttaaagagaagattactccgtccagattttcgtggtttccttcgacttggcttggtgctgataaatatgcatgggtgaagactcttttcgtatcaggcttctctgtactccctactgcaagcagtaaatgagatttcatctagaggcaattacagagacgaggntattaatgcctttgtcaaagaggctntcacgccagctgnnccccttgagaanatnatngaga

SEQ ID NO: 123886 - DNA, 514 bp, Arabidopsis thaliana
  unsure (1)..(514): unsure at all n locations
nnnnnnnnnnnnnnnnnnnnnnnnnnnnnnnnnnnnnnnnnnnnnnnnnnnnnnnnnnnnnnnnnnnnnnnnnnnccacgcgtgcgcggacgcgtgggcggacgcgtggggcatttacacacaatcacacacacacacacacacacacaccaaaatgatagcttacatagaaccatacttcttggaaaacgacgccgaggctgcctctgccgccaccgccgccggaaaatctacggatggtgtttctgagtcacttaacatccaaggagaaatcttatgtggtggagctgcggcggatatcgccgggagagattttggcggcatgaactgtgtgaagcctcttgctgtggtgagaccagtgggaccggaagatatcgccggagcggtgaaagcggctctgaggtcagataaactaacggtggcggcgcgtggaaacggccattctatcaacggtcaagccatggcggaaggaggactcgttgtcgatatgagtaccacggcggagaatcatttc

SEQ ID NO: 123887 - DNA, 640 bp, Arabidopsis thaliana
  unsure (1)..(640): unsure at all n locations
gcgtccgaaaggagctctttagattgagactagtggaagagagacgagcaaggaattagcaatggcggcggatttgccggaggcgacagtacagaacattctggaccaagagtctcttaaatgggttttcgtcggaggtaaaggaggtgttgggaagacgacatgcagttcaattctcgcaatttgtctcgccagtgttcgatcctccgttctcatcatctccaccgatcctgctcacaatcttagtgatgcctttcagcaacgcttcactaaatctcccactttggttcaaggtttctctaatctctttgccatggaggtagatcctaccgttgaaactgatgacatggctggtacagacgggatggatggtttattctctgatttggcaaatgcgattcctggaatcgatgaggctatgagttttgctgagatgttgaagttggtgcaaacaatggnttatgctactattgtgtttgacactgctcctactngncatactntccggcctgtnacagttccggccacactaggaaggggcctttcgagttnatgccattnagggnngggtttggggcttatgcccantggncgntgtttgatggggntngtcgagggtcttctggaggttgggttaagc

SEQ ID NO: 123888 - DNA, 1172 bp, Arabidopsis thaliana
actcagctgaagaaagaactattcgagactgattctgtgtatgactcagagaagctcgctgagagaattgcgaacctagctggaggtgttgctgtcatgagaaggcagagcatcaactgaaactgagcttgaggaccgtaagcttcgtagcgaggatgcaaagaacgcaacatttgctgctatcgaggaaggcatagttccaggtggtggtgctgctttggtgcatctctccactgttattcccgccattaaggagacttttgaggatgctgatgaacgtttgggagctgacatagtacaaaaggcattgctgtcaccagctgctcttattgctcagaacgctggagttgaaggagaagttgttgtggaaaagattatgttcagcgattgggagaatgggtacaacgcaatgactgatacatatgagaatctgttcgaagctggagtgattgatccggctaaagtgacaagatgtgcgctacagaacgctgcttccgtagcaggaatggtactgaccactcaggccattgttgttgacaaaccgaaacccaaggctcctgctgctgctgctcctgagggtctcatggtgtaatcaaaacacaacatcttatcatcacaatggcatctttgtctttttgcacatttgtcatccccatttatctgcaatgtttttcttttttgggggaatatgagtagtttgttaacagtatcgagaaataattatcatcttttttgtccaatggaaattgcagaaaatggttatgtatgcgaccaaacattttatatgtagcgagagtagtttagcagaacaataagcaaatatgcgtacaaactgaataatgttccaacttactatactattccactaggagggaacaatgttttttcatgcctttactagttttctcataaaacttgatctggatattgcacttcgatgatctacgaaccattagcagatctccggtgattcgatacttctccttgtcgtttattgcacaggcacgaactttgacaagcacaagacatgacagtttctctatgaaatgtctcatttcctctagctcttcaattgttccttcatattcagttatcttcaatactttcacaggacatgacaatccatatattcttgtaaagttaagtatatatacagggagatcagactcgtt

SEQ ID NO: 123889 - DNA, 563 bp, Arabidopsis thaliana
  unsure (1)..(563): unsure at all n locations
gctctaatacgactcactatagggagagctggtacccctccaggtgccgggccggagttcccgggtcgacccacgcgtccgcccgcgcgtccgggtgtggaaaagattatcttcagcgagtgggagaatgcgtacaacgcattgactgagacatatgagaatctgtgccaagctggagtgattgatccggctaaagtgacaagatgtgcgctacagaacgctgcttccgtagcaggagtggtactgaccactcaggccattggtgtggacaaaccgagacccaaggctcctggtgctgctgctcctgagggtctcatggtggaatcaaaacacagcatcttatcatcacgatggcatctttggctttttgcacatttgtcatccccatttatctgcgatggttttcttttttgggggaatatgagtaggttggtaacagtatccagagataattatcatcttttttgtccaaaaaaaaaaaaaaaaaaagnnnnnnnnnnnnnnnnnnnnnnnnnnnnnnnnnnnnnnnnnnnnnnnnnnnnnnnnnnnnnnnnnnnnnnnnn

SEQ ID NO: 123890 - DNA, 887 bp, Arabidopsis thaliana
ccagctctatacgactcactattagggaaagctggtacgcctccaggtaccggtcccgaattccccggtctacccacgcgtgcgggacgcgtggggttctttgagtttcttcttctcttggaggaaaatcgagaaagacgaaacatggcttcttcttctacttctctgaaaagaagagagcaaccaatttcgcgagatggagatcaacttatcgttactccgttaggagccggaagtgaagtgggtcgttcctgtgtttacatgtccttccgaggcaaaaatattctgtttgattgtgggattcatcctgcgtactcgggcatggctgcgttgccttacttcgatgagattgatccttcttccattgatgtcctcttgattactcactttcatatagatcatgcagcatctctaccttattttctggagaagacgacattcaatgggcgggttttcatgacacatgcaacaaaggccatctacaagctgttgcttacagattatgtaaaagtgagcaaagtgtctgtggaagatatgttgttcgatgaacaagacatcaacaagtctatggacaaaattgaggtaattgacttccatcaaacagttgaagtgaatggcataaagttctggtgttacacggcaggccatgttttgggtgcagccatgtttatggtggatatagctggtgtccgaatcctctatacaggcgactattcccgtgaggaagaccgacatctgagagcagctgagcttcctcaattctcccctgacatatgcatcattgaatccacttctggtgtccagcttcatcaatctcgacatattcgtgagaaacgcttcactgatgtaatccattcaacggttgctcagggtggacgtgtgctgat

SEQ ID NO: 123891 - DNA, 816 bp, Arabidopsis thaliana
attttagatgggaggaggagaagttagtaaagagatgggagcttgttcattagcgtatcgtcgtggagatcagaaattacgcaagttcgtgacggcgaggagtactaagtttcttctattttgctgcatcgctttcgtcttggtcacaatcgtttgccgatcttctcgtccttgggttaacagttcaatcgccgtcgcagatcggatctccggatcaaggaaaggttatacacttctgatgaacacatggaagagatatgatctcttaaagaagtctgtttcccactatgcatcatgttctaggcttgactctatccacattgtatggagtgaacctaaccctccatcagagtctctgaaagagtatcttcataatgttctgaagaaaaagactcgagatgggcatgaggttgagctgagatttgatataaacaaagaagacagtttgaacaacagatttaaagagattaaagacttgaaaacagatgctgtcttctcaatagatgatgatatcatatttccttgtcacacggtagattttgcattcaacgtttgggaaagtgctccggatacaatggtggggtttgtgccccgtgtgcattggcctgaaaaatcgaatgataaagccaattactacacctacagtggatggtggtctgtttggtggagtggtacatatagcatggtactctcaaagggaagcttcttccacaaaaaatacctcagccttttcacaaatagcatgccagcatcaatcagggaattcacaacagagaacatgaactgtgaagatattgcaatgtcattcctcatcgc

SEQ ID NO: 123892 - DNA, 526 bp, Arabidopsis thaliana
aggaagcttgtaagagcggagatgcggtggaacgatggcgacttcagcggcgtagtcttgagagtctgcctcctcaccttgctgatgctctcctccgtcgcctcctcaaaaagcggcttcttttcccttcgttactcgaaggattcaaatattctgtagagaatatagatctccgaggcaaaagctcagttaacgcagaatggatggcttacattggaggcttcgttaatctaattactctaaatctttcagattgccagagaatcaacagttccaccctctggcctatcacaggattaacaagtttgacagagttggacctttcaagatgtttcaaggttacggatgctggtatgaagcacctccaatctgttgtaaatctgaaaaagttgtggatttcacagacaggtgtcactgaagttggaatttctcttcttgcttcacttaaaaaattgtctcttttggatttgggcggcttacctgtaactgatcagaacttgatttctctccaggcactgacaaagct

SEQ ID NO: 123893 - DNA, 460 bp, Arabidopsis thaliana
acaaaaacaaatagaaaaaaatacaaataaaaaatgtcaacccaacagatgaaacacactccacaaaacttgcaacagcaaggacaaggacttggtgagcaaggaagagacactcaaggacttggaagcacacaagagtttggacaacgtgatagacaacaggatcttggtagccaatttgataaaactcaacaacaaggacaacaaggacaacaaggacaacagggacaacaaggtcaacaaggacttcaaggtcagcaacagtggggaggtgctcagcaatttgatcaacaaggaggaaagcaacaagatttgggacaacaacaatttggatcaactcagcaaaagaaccaagactttggacagagatcataaagagatgaagcaacgaggcgatgatgatctcccaaaaagaagaaagtctgtttaattgatgtgtagcagagtgctctcatagcaa

SEQ ID NO: 123894 - DNA, 589 bp, Arabidopsis thaliana
  unsure (1)..(589): unsure at all n locations
ccnnnnnnnnnnnnnnnnnnnnnnnnnnnnnnnnnnnnnnnnnnnnnnnnnnnnnnnnnnnnnnnnnnnnnnccacgcggtncgggcttctctgtttctctctcttcttcttgcagttttggtttggaagaaagagaacgaagaagacgacatctccagagtttttggcaataatcttttaagaaatgggaaagcttttgtgtgattcaacggcgacatttcaatctccttcaccaacggttccttggagagaaccttctacagtcgccgtgtctctcgaagatgtagatcttgttgaccaatccgcggctgctgcggcggtggacgcggttgagaagacaatggccgccgcaactaccaccgcttgggatgaggtttttggattggaggaggcgcaaagacggcatctgagccggctacacgcgagaggtgtgttgtggaaacatcctggtaaagatgaatcctctgcttccgtcgttttccgtctctctcacggcggagaggtttcttccgacgggaactgtttgttcaccgcttctcagaaggctatggaggcgcgtgggatcgacgcgcgagatttacggcggcg

SEQ ID NO: 123895 - DNA, 1064 bp, Arabidopsis thaliana
  unsure (1)..(1064): unsure at all n locations
cccacgcgtccgcacctaccatttttgccaacaaacgcgagcaagagttttgagctccaatggcgaccttgtcgatgactctgtcaaatccgaagtcgctctcagctcctccacgaagactttctccgatcaatacctccgctttcacatctacctctttccgattgcgcaccaaatcttccttcgattcaatctcgttctcgtcttcaactcccttctccgcctcatcgctcctccttcacacgtcttataccaaaagaaaccaccgctgtttctctgttcaatccaatgctgaggtggttactgaaccgcaatcgaaaataacacacaaggtgtatttcgatataagtgttggcaatccagtggggaagttagctgggaggattgttattggattgtatggtagatgatgttccccaaactgtggagaactttcgtgctctatgcacaggtgaaaagggatttggctacaagggttctacattccatcgtgtcatcagagatttcatgattcagggaggagactttgagaagggcaatggaactggaggtaaaagtgtatatggccgtacattcaaggatgagaatttcaagttatcccatgtcggaccaggagttctaagtatggcaaatgctggccctaatacaaatggaagtcagttctttatctgcactattaagacgtcatggttggacggaagacatgtggtgttcgggcaagtaatagaaggaatggaagtggtgaagctgatagaggaacaagagacagacagaggagaccgtcccagaaagaaagtggtgatagcagactgtggtcaacttccaatgtctgaagcttaaaagtaagatcatttaaccaaaatcttgtagacatgagatggagcttgtttttgcattttacaaccctttcttttgtgtaatggatttgtatccccttcttccaaaaatttaagaaagaaatagtattccgctgcaaaaaaaaaaaaaaaaaagggcggccgctctagaggatccaagcttacgtacgcgtgcatgcgacgtcannnnnnnnnnnnnnnnnaacg

SEQ ID NO: 123896 - DNA, 531 bp, Arabidopsis thaliana
  unsure (1)..(531): unsure at all n locations
tttcgggggncttnggaggccatgacnggggtaaagttttttgcccgtccttccagggtgggattccagttcccccatgccgncccggggttcctagtatggcaaatgctgcccttattccaattggaagtcagttctttatctgcactattaagacgtcatggttggaccggaagacatgtggtgttcgggcaagtaataggaaggaatggaagtggtgaagctgatagaggaacaagagacagacagaggagaccgtcccagaaagaaagtggtgatagcagactgtggtcaacttccaatgtctgaagcttaaaagtaagatcatttaaccaaaatcttgtagacatgagatggagcttgtttttgcattttacaaccctttcttttgtgtaatggatttgtatccccttcttccaaaaatttaagaaagaaatagtattccgctgccgggtgttgaactcatatttcatttcattggtttgtttcgaaattaaccattgtgttatagcggttcagttgcattagaaa

SEQ ID NO: 123897 - DNA, 675 bp, Arabidopsis thaliana
  unsure (1)..(675): unsure at all n locations
tncccccnattttttgaatttgncnnacaattccccggaacngctttnccatattcccaagcncaaattaccccncactaaggggaccaaaacttgnncctccaccncggttgccccccgccgacggcgtggtgttcctccttcctgctctgaaaaatggcgaagagaacgaagaaggttggaatcgtcggcaaatacggaacacgttatggtgcgagtatcaggaagcagattaagaagatggaggtcagccagcacagcaagtacttctgtgagttctgtggcaagtacggagtgaagcgaaaggctgttggtatctggggttgcaaggattgtggcaaggtcaaggcaggtggtgcttacacaatgaacaccgccagtgcggtcactgttagaagcacgatcagaaggttgagggagcagatcgagggttaaaagtctgctggctttttatatttggtttccttgttttgacaatttaagttttgcaaactctatgcttgtgattttgaatcaagacttatacattgagcagtttaagcaggtttttatttttttgtttgaggtaatttttcaaaagtttcatttnccaataggtcctagnctatataanccntaaagttagggctttgaggggttttgnaatgnttgnncccattaacnncntatttataa

SEQ ID NO: 123898 - DNA, 946 bp, Arabidopsis thaliana
  unsure (1)..(946): unsure at all n locations
nnnnnnncagacccggactcgactggatcttctcttctctccctatctctctctatcgacgatcgaactgacttgagtacttcttcttcttttgaccagagctctcacacatacgagtcactataatggaaggcgatcaagagacgaatgtttatactttggtggcaaggaagccttccttcgatctcccaacagcttgccctaattgtcttcctgcttatatatacctgaaattagcccagctaccttttgaacttgcgttcaattcaaccttccctgattcagatgaactgccgtactttgaaagtgatacatatgttgcatataacaatgaagatggaggagtaattgaaaaactgaagaaagatgggattgttaatctggactctcagctacagtctctttcggattatttatctttgaaggctcttattgtgtcttggctagaagaagcgcttacctatgagatatgggttggtaccgaggggatatctacatcgaacaatctactattcatatcttccttgggtgatcagcaaggtcctgttttataagcagacatacttggcaaagaaccgtttaggaatcaccaaagagaacgcagagcaaagagaaaaacagatatacaagagagcaagtnaggcatatgaggctttgtcgactaggttaggtgagcagaagtttctntttgaagacaggccatcgagtttggatgctttcttactctcgcacatacttttnataatccaagcgttaccagttacatcagtgcttcggtgcaaacttctggaccatagtaatnctngtccgntatgctgagnacttaaggcagagttccttgaagcctctccttcactcctcacctcactttantcatccctccccattccagaaaggtngagccaagggaaccaaggngnaagcccnggggggaaanttaggangg

SEQ ID NO: 123899 - DNA, 1344 bp, Arabidopsis thaliana
  unsure (1)..(1344): unsure at all n locations
nnnnnnttgtccgcctgcaggtcccggtccggaattcccgggtcgacccacgacgtccgctacaacatggactcctccaaactctcatctctctctctttgcctcttcctcatttgcattatctatctcccccaacattctctcgcatgcggctcttgcaacccacggaagggcggaaagcactcccctaaagcccctaagctaccagttcctccggtgaccgtccctaagctaccagttcctccggtgaccgtccctaagctaccagtccctccggtgaccgtccctaagctacccgttcctcctgtgaccatccctaagctacccgttccaccagtgactgtacctaagctacccgttcctcctgtgaccgtccccaagctacccgttcctccagtgaccgtccccaagctacccgttcctccagtgacagtccctaagctacccgttcccccggtaactgtacctaagctacccgttcctccagtgaccgtccctaagctaccccttcctccgatttcagggctacccatacctccagtggtaggtcccaatctgccattgccgcctttgccaattgtaggtcctattcttccaccgggaacaaccccaccagccacaggagggaaggactgtcctccaccgccagggagcgtaaagccaccatcagggggcgggaaggcgacatgtccaatagacacgctgaagttaggtgcttgcgtcgacttgttgggaggtttagtaaagatagggcttggggatccagcagttaacaaatgttgtccgttacttaaaggcctcgttgaagtcgaagccgcggcttgtctctgcactaccctcaagctcaaagctcttgacctcaatctttatgtccctgttgctcttcagcttctccttacctgtggcaaaaatccacctccgggctacacttgttccatatgataaactcactccacttataaaggatgctttggagaaaaaagtgagaagagaatggcagagctccaatctttcctgtcttggtttaccaaatatatcatatcaaatcctatccctttgattctttcctctatcgttcccttatgcttgtatcattaattaatgtgtgctttttagattaatgattcttctcttgtattaaagtatgatttgaaatcctttttttttctctatctctttttattgaatggaattgactgcgttcatgatactgtcaaaaagagagaaaaagagtacaattttatatatttttcgtattagttgaacgacaaaataaattacattttaaaatgtaaaatataaaatacaatgccattgaaaatatttacaggggtgtnttggaag

SEQ ID NO: 123900 - DNA, 528 bp, Arabidopsis thaliana
  unsure (1)..(528): unsure at all n locations
atcagagatcagccatggcttcttcgactctcttcaaactcaattcacagacattcaaagctctaccccttcctccgatttcagggctacccatacctccagtggtaggtcccaatctgccattgccgcctttgccaattgtaggtcctattcttccaccgggaacaaccccaccagccacaggagggaaggactgtcctccaccgccagggagcgtaaagccaccatcagggggcgggaaggcgacatgtccaatagacacgctgaagttaggtgcttgcgtcgacttgttgggaggtttagtaaagatagggcttggggatccagcagttaacaaatgttgtcccgttactttaaaggcctcgtttgaaggtcgaagcccggggtttgttttttaaatacccctaaggtaaaggtttttgaccccaaactttttttccccggtggctttcaagttttccttaacccgngggaaaatccngcccccnggttnaaattggccctttttttnaatncaccccncttttt

SEQ ID NO: 123901 - DNA, 565 bp, Arabidopsis thaliana
  unsure (1)..(565): unsure at all n locations
ttcttctcattttccctctatatattcatatactctttcgtatagttgcaccatccactctactcaacatggactcctccaaactctcatctctctctctttgcctcttcctcatttgcattatctatctcccccaacattctctcgcatgcggctcttgcaacccacggaagggcggaaagcactcccctaaagcccctaagctaccagttcctccggtgaccgtccctaagctaccagttcctccggtgaccgtccctaagctaccagtccctccggtgaccgtccctaagctacccgttcctcctgtgaccatccctaagctacccgttcctccagtgactgtccctaagctacccgttccccccggtgacccgtacccaaaggtacccggttccctccagtgcacccggtccctaaggtaacccggttcctcccagtgcaggggcttacccataaactccagtgggtagggtcccaattttgncaattngcaacttttnncaaattntagggncctaattttttcaaccggggnanaaacccatcnagncaanaggagggg

SEQ ID NO: 123902 - DNA, 432 bp, Arabidopsis thaliana
  unsure (1)..(432): unsure at all n locations
atcagagatcagccatggcttcttcgactctnttcaaactcaattcacagacattcaaagctctaaacccatctcctccggcgttatctcctcccaattccagaattttccatcttcatttctccaaatcactctcacaacagcattcaaagctcaaccacaaatcaaccactactcgcttattcgctcctctctgttcctctcttccttcaccttcttcttcttctcctcccctttccaaagaagaagccattaatcaagccaaaaacttgtctcctttcatgtctcaccaaacccttaaaacaacccaaaacttcgttctccccaaaaactcaggacagctcaaacaaaccaaggttccgtccttggaaatcccaatccttgacgggtggnttctccttnggnaaatttgttcagnttgggttttntcgg

SEQ ID NO: 123903 - DNA, 645 bp, Arabidopsis thaliana
acccacgcgtccgcattctctaaattaactcaaaggagtaaataaaaatacaaatacaaaatttatacagaacaacccacaattctgtctagtttagttaaacgtgttaaaatagtcacgcaatgctttttctatttttaaaaattaataagctctgacctgtacgcaaccaaataaaacactaaaacttatctgtgatcaacttagctctgtataaaaatcttcctcctctttctttctgtccaattctctacagagaagtcttagcttttgcaaaatcattaactaatctctgttttgatgactagataacttggatgtaggattattatacctaaattctttctttccatgcatttatgtcggttttgacatctttgttctcttagtttaaaagatatcaatattagttatcttctattctttgaacatttgtgtccatctcatgaagttcaggaagcgtaggcaatactttcctgcttgttcgtctcatcgccaagtaatgatctcttcgtcatcttcttcttctccaaactcatatcaaatttgaatcttatcatcaaattgagagtaatcaacgacaccactgcaatcttgcatatacattgttcttgtgtattccacccgtttctttaatcttcaatg

SEQ ID NO: 123904 - DNA, 450 bp, Arabidopsis thaliana
caaaaatcttagtttcagacggaaagagagagtatagccatggaagtctcaaatcagaccagaaaacggaaagcaatcgacgccggacatggctcgcagccgacggcgtatcgaggctcagatggtgtagatctttctctccttgaagcacttgagaagtcttcgcataatggagtagaagcgcttgatcttaaaaccctaaaaaagcttgtcctctccttcgagcggcgtcttagagacaacatagctgctcgtctcaagtatgtggagaatccagaaaagttcgctgactcagaggttgacctacacgacgatcttcagaagctcaaggtgctcgctggagctccggaactttacccggaccttgttgcttccaatacggttccttcgattgtcaatctcctctctcatgaaaactccgatatcgccaacgatgttggtcagcttctt

SEQ ID NO: 123905 - DNA, 623 bp, Arabidopsis thaliana
  unsure (1)..(623): unsure at all n locations
aatacgactcaccttagggaaagctcctacgcctgcaggtaccggtccggatttcccggggcgacccacgcgtgccggcagtcttcaaaactcaatggccaccactcctctcctcctccttctcctcaccgccgtcttcctctccacggagataaccgctcaacgcgctgctccggctcctggcccggctggtcccatcaacatcacggcaatcctcgaaaaaggcggacaatttgttactcttatccgtcttttaaacacaactcaaataggaaaccagataaacatccaaatcaacagttcatcagaaggcatgaccgtgttagcaccaacagacaacgctttccaaaaccttaaacccggaaccctaaacaaactaagcccggacgaccaagtcaaactcattctttaccatgtcagtcccaaattctacacattgggaagatcttctctctgtaagtaacccggtcagaactcaggcctcaggtcgagacggttggtggggtttacgggctttacttancggtaaagggatcaaggcaatgtatctctngtgtggtggncaggtttagtcttnattgggcagangncttttcggttnggtggtgcatggattttccggc

SEQ ID NO: 123906 - DNA, 1080 bp, Arabidopsis thaliana
  unsure (1)..(1080): unsure at all n locations
cagctctccatacgactcactatagggaaagctggtacgcctgcaggtaccggtccggaattcccggaccaaatgcaaacacaccacatgcagcaacaacaactccatcacttcgtctttgtccacggctcatgtcatggagcatggtgctggttcaaactagctgcaaagctcaagctcgatggtcaccgtgtgacagctatcgaccttggtggctccggtgtcgacacgaggcagctccatgaggttcgtttggtgtcggcgtatctagagcctttgatgagtttcatggagtctctccctgaaaacgagaaagtggttcttgttggtcatagctatggtggcattggaacttctcttgctatggaaaggtttccgaccaaagtctctgtcggaatcttcctctctgcttacatgccgcaccatgactctcctccggcggttttgattcaagagtattttacgagactaccagagggtttcgctatggactgtgagtttacattcgaggaaggattagacccccccccaagttcagttttgttcgggactagtttcttgaaggagaaggcatatagtaattgcccgttagaggttctacaattacccctggcgttgatgaaaccaagctggttatcccctaaggaaatggggggtgaagtttttataccaaaggaaaggtatggttttgggaaaaaagtgttttttgtttgtgaaggcgccaatgtggttccaaaggagattcaaaagtggatgtttagtaactccgaccccccccaagttaagcggattgaaaaagctggtcccatgggtatgccccctaagccccatgaactttttcaactggtccaagaaatagcagcgaaatataactaaatgtaaaatgatgccccccgggtattatttggggccagttccctctttgatatgaataaaagggtttccttnnnnnnnnnnnnnnnnnnnnnnnnnnnnnnnnnnnnnnnnnnnnnnnnnnnnnnnnnnnnnnnnnnnnnnnnnnnnnnnnnnnnnnnnnnnnnnnnnnnnnnnnnnnnnnnnnnnnnnnnnnnnnnnnnnnnn

SEQ ID NO: 123907 - DNA, 410 bp, Arabidopsis thaliana
acggacgcgtgggactagaaagagaaagaaagagagagagagagagagagagaaccagagattatcgaacacgaagcagaagacgattcgtggaagagacttggagagaatatttctcaatgtctcctctcccaatcttccatcgtcttcctcacgccacgttctcttcctttctcctctcactgtctcaagctggaagttctaaaacatcagtggcattcctcaatgccttcaaatcagaagatatcattgctcgaattgggctatggtggcagcttataagggctgttgtagttgtacctgtcttcaagttcctggtgcttctatgtttggtcatgtctgtcatgttcttcgttgaggttatgtacatgggaatcgttgttttgtatgtcaagctgttcaagagaaag

SEQ ID NO: 123908 - DNA, 1278 bp, Arabidopsis thaliana
  unsure (1)..(1278): unsure at all n locations
cgccgcagaccggccgaanccgggttgacccagcggcgcctccacattaaagtaaagtatctctctcttttttctcctacgtactccatagtgatggcttcatcgcttctgacatcttccgttatgatccctaccaccggttccaccgtggttggccggtcagtgttaccctttcaatcttccctgcactctctccgcctgacccattcgtacaagaaccccgcattgttcatctcatgttgctcttctgtgtccaaaaatgcggcaactagttctactgatctcaaacccgttgtggaacggtggccggagtacataccgaacaagcttcccgacggaaactatgtgcgtgtattcgacacgacgctccgtgacggtgaacaatctcctggtggatccctcactccgccgcagaagctagagattgcccgacagctcgctaaactccgagtagacatcatggaagtcggttttccgggatcatctgaagaagagttagaaaccattaagaccatcgccaagactgtggggaatgaggtggatgaggaaacaggttacgtccctgtgatatgcgccatagctcgatgcaaacatagagacattgaggcgacttgggaggcgctgaagtacgcgaagaggccaaggatactcgtattcacatctactagtgacattcacatgaaatataagttgaaaaagactcaagaagaagtgattgagatggccgtgagtagtattaggtttgctaaaagcttgggcttcaatgacatccagtttgggtgcgaagatggcggcaggtcggacaaggatttcctatgcaagattctaggagaagccataaaagccggtgttacggtggtgaccatcggtgatacggtagggatcaacatgccacatgaatacggggaactcgtgacttatctcaaagcaaacacccctggaattgacgatgttgtcgtcgctgttcattgtcacaacgaccttggtcttgcaaccgccaactcaatcgccggtatacgtgcgggacgagacaggtcgaagtaactatcaacggaattggtgaaagaagtggcaatgcgtcgcttgaggaggtcgtgatggctttgaaatgtcgaggggcatatgtgatcaatggggtttacacaaaaatagacacacgccaaatcatggctaccagcaagatggttcaagagtacacggcttgtatgttcaagtcacataagcccatagttggagcgaactgttttgttcatgagagcgcattcatcaggatggaat

SEQ ID NO: 123909 - DNA, 951 bp, Arabidopsis thaliana
  unsure (1)..(951): unsure at all n locations
nnnnnnnnnnnnnnnnnnnnnnnnnnnnnnnnnnnnnnnnnnnnnnnnnnnnnnnnnnnnnnnnnnnnnnnnnnnccgcgcgtccggtgaaggaagtacaactcaaggatgggaggacattggaagccgacattgtgatagttggggttggtgcaaaaccattgacatccttattcaagggacaggtcgaggaagataaaggtggaattaagaccgatgcattcttcaaaacaagtgttccagatgtttacgctgttggtgacgttgctactttccctttgaaaatgtacggagacgtgagaagggtcgagcatgttgaccattcccgcaaatcagcagagcaagctgttaaggcgatcaaagcggctgagggaggcgcagcggtggaggaatacgactatcttccattcttctactctcgctcctttgatctctcatggcagttctacggagacaacgtaggagactctgtgttatttggagacagcaatccatcaaacccaaaaccaagatttggagcatattgggttcaaggtggtaaagtggttggagcattcatggagggaggtagtggtgatgagaacaaagccttggctaaagtcgccaaagctcgaccttttccagagagtctcgacgggcttcgtgaaacaaggaatttccttcgcagctaagacttgggtgaaccacaacccccaaaacaaactcacgttttctcttctatgttaaaataaaaacttgtttagctataataaggtgtgtgtttgtattgtctctctaaactccatgagaagagtctgcggcagaggaaaccctgacccacattcccattttagatcatgtgtttggttttctgtgtttcagtatctgtcttggtaaaaaaaaaaaaaaaaaaaaaaagggcggccgctctagaggatccaagcttacgtacgcgtgcatgcggcgtcatag

SEQ ID NO: 123910 - DNA, 527 bp, Arabidopsis thaliana
  unsure (1)..(527): unsure at all n locations
aggagactctgtgttatttggagacagcaatccatcaaacccaaaaccaagatttggagcatattgggttcaaggtggtaaagtggttggagcattcatggagggaggtagtggtgatgagaacaaagccttggctaaagtcgccaaagctcgaccttctgcagagagtctcgacgagctcgtgaaacaaggaatttccttcgcagctaagatctgagtgaaacacaaccaccaaaacaaactcacgttttctcttctatgttaaaataaaaacttgtttagctataataagttgtgtgtttgtattgtctctctaaactccatgagaagagtctacggcagaggaaaccctgaaccacattcacattttagatcatgtgtttggttttctgtgtttcagtatctgtcttggtttcttaatgtgaacaactccaaaaccacatttactgtaatctcaaatgaagggagttattttcaatnnnnnnnnnnnnnnnnnnnnnnnnnnnnnnnnnnnnnnnnnnnnnnnn

SEQ ID NO: 123911 - DNA, 792 bp, Arabidopsis thaliana
  unsure (1)..(792): unsure at all n locations
tacagacatggctttgtacggtgaaaaggagtggtatttttcctcaccaagagatcgaaagtatccaaacggttcaagacccaaccgtgcagctggtactggatattggaaagctaccggagctgataaaccaataggtcgtcctaaaccggttggtattaagaaggctctagtgttttactcgggaaaacctccaaatggagagaaaaccaattggattatgcacgaataccggctcgctgacgttgaccggtcggttcgtaagaaaaacagtctaagattggacgattgggtattgtgtcgtatatataacaagaaaggtgtcatcgagaagcgacgaagcgatatcgaggacgggttaaagcctgtgactgacacgtgtccaccggaatctgtggcgagattgatctccggctcggagcaagcggtgtcaccggaattcacgtgtagcaacggtcggttgagtaatgcccttgattttccgtttaattacgtagatgccatcgccgataacgagattgtntcacggctattgggcgggaatcagatgtggtcgacgacgcttgatccacttgtggttaggcagggaactttctgagttgtcacggtgcgattagagttaagtggaaagtgggaacttatcactggnctgttttcgcaacgtntcgggtaagccgtntttnnaaaccccntaagcttggnccanaaagtnaccccaatttggntttttaaacaacaatttgggccttagnctttttttnccccttagtaagnaaannnnctnanttgggt

SEQ ID NO: 123912 - DNA, 590 bp, Arabidopsis thaliana
acttgcaaggatggtaagttgggatgtttggataatgggaagtatgtgaggtatacacctgaacaagttgaagcacttgagaggctttatcatgactgtcctaaaccgagttctattcgccgtcagcagttgatcagagagtgtcctattctctctaacattgagcctaaacagatcaaagtgtggtttcagaaccgaagatgtagagagaaacaaaggaaagaggcttcacggcttcaagctgtgaatcggaagttgacggcaatgaacaagctcttgatggaggagaatgacaggttgcagaagcaagtgtcacagctggtccatgaaaacagctacttccgtcaacatactccaaatccttcactcccagctaaagacacaagctgtgaatcggtggtgacgagtggtcagcaccaattggcatctcaaaatcctcagagagatgctagtcctgcaggacttttgtccattgcagaagaaactttagcagagtttctttcaaaggcaactggaaccgctgttgagtgggttcagatgcctggaatgaagcctggtccggattccattggaatcatcgctatttctca

SEQ ID NO: 123913 - DNA, 487 bp, Arabidopsis thaliana
  unsure (1)..(487): unsure at all n locations
ccacgcgtccagtctctaactactactatcnccaacacacactgttactcttcttcttcttctctgtcactgtctattctctcttttggacctttcatggctatgtttctctgcaatggaagtccaagctcgtgatcaccaacaccgacacgctaatggctattggagatagagctatgtttactgttttgcttctattcattgcttcgatctctggattctctgttgttcgttgtgttactgatccatctgatgttcaagcccttcaagttttgtttacttcactaaatagtccttcacagctaaccaattggaaaaatggtggtggtgatccatgtggagagtcatggtaagggatttcttttgagggctttatagtttgttatttatttttttatctttatctaaatatatactaatttctctgtgtatttttttttttttttcattataatttattaatatttactcgttttttctatatttt

SEQ ID NO: 123914 - DNA, 959 bp, Arabidopsis thaliana
accaagcgtccgcccacgcgtccgcggacgcgtggggcaaattcttgatatgggtggaggtagttgggaccgtgacactgttgttcgtgctctgagagctgcgttcaacaatcctgaaagagctgttgaatacctgtactcgggtatccctgctcaagctgaaatcccaccagttgctcaagccccagctactggggaacaggcagccaatcctctagcacagccccaacaagcagcagctccagcagctgcaactggtggtccaaacgcaaatccattaaacctgttcccccagggcatgcccgctgcagatgctggtgctggagctggtaatcttgatttcctgcgtaacagtcaacagttccaagccttgcgagctatggtacaagcaaacccacaaattctacagcctatgcttcaggagctcggtaaacaaaacccccagcttgtgcgactaattcaagagcaccaggctgacttcctacgcttgataaacgaacctgtcgagggagaagagaatgttatggaacagttggaagcagcaatgccacaagctgttaccgttacacctgaagagcgtgaagccattgaacggcttgaagggatggggtttgatcgtgcgatggtcttggaagtgttctttgcgtgtaacaagaatgaagaacttgcagctaattaccttctagatcacatgcatgagtttgaagatcaataaacagagcaaatccattcctccctctaaactcagaccatctttctgtttctttttcttcttcttttttaatatgataatctcttctccaatgccatttgacagtttcatgtttatgttcatgggagttgatgtgtttatgttactattaaaactatcatagtttatctggtttgaagaaaaaaaaaatttatcgctggccgctctagaggatccaagcttactgtacgcgtgcatgcgacgtcaa

SEQ ID NO: 123915 - DNA, 685 bp, Arabidopsis thaliana
  unsure (1)..(685): unsure at all n locations
taatttcgtccactttaatcattttcgttgatacagcttctcccggtaataatgtcggcggatttctccgtcgcactctaaattctttaggattttgtttctcttgctcatctgtaactcaggcaagctctcgttggattgttttaggcatgaatgagtcagtccctgattctgtggaagacaacggtaattcagtccctgcaaatggattattagtattgcctgataatgatcatgaggaaggaggtgttggatcacctcaacgatcgaacagcgttgaatctcctggtggatcagtacattctacgaggaaaggttttggtttgaagaaatggagacggatcaaaagagatggtcctgtgagagatgaggctgctcctgttgatgatggtagtaagttactgaaacgtggattggctggtttggtgaatcctccttctaaacatgtagaattttcttcagttgaagcaaggcagagtagtgaagggctctgttgggtcagcgaatatggtgcatcatccaggggtagccaacgggtttagtcccgatataggttgtatgtttgctgttgggcaagcgtttgagaaaagtgaagagcatagcggtaataccataggtggaaggtttgtgggggaaggttttcaggtgcagggaacntgggtgnccccagnggctccngnggggc

SEQ ID NO: 123916 - DNA, 686 bp, Arabidopsis thaliana
  unsure (1)..(686): unsure at all n locations
anntctcccncctttccncgnncgttaanctagaagngnccccagaccaggaggaaggccatttttgtccccccggaccttaaagaccccgtcccaactgcaagctgatactacgttagctaaagaaaacgaagcgttgagaagtgagctgatgaagatgaaaatgtatgtttcggatatgcagaagaataagaacggtgcaggagcttcttcttcgaattcgtcgtcgttggtgagtagtaagaagagcaaacatactttcttctcttctgtttccaagaaacttgggaagttaaatccgtttaaaaatgggtctaaggatacttcgcacatagatgaagatcttggaggtgttgacattactaagccaaggagacgaagattctcaatctcttaaaagaaaacgtttgatctaagtgcttttgtgtgttgtgtataactcttttagactagtgtgcttattgttcccttcttgatgcgtgatttttttttttgggtgtgtgtgtttattgtttaatgagcttggttaataaaatgaaaatcgaaaccaaaaaaaaaaaaaaagggcgaccgctctagaggatccaagcttacgtacgcgtgcatgcgacgtcatagtcttctatagnnnnnnnnnnnnnnnnnnnnnnnnnnnnnnnnnnnnnnnnnnnnnnnnnnnnnnnnnn

SEQ ID NO: 123917 - DNA, 1203 bp, Arabidopsis thaliana
ctctcttttaccttcagacaaagggctgttcccagtcaatttcctctgttctctcctccgttgcgcgatcttcttagacacttccttgacctgcaagaacgagctcgagaagcgaatctcagtcgttctagaacacgtctccgtcgacgatcttttgatcccgtctttcacctacgacggcgaacggttactagatctcgatagtgtcagaagaatcatctctgctttcgtggaaaaagagaaaaacgttggtgttttcaacggtgggagacttcaacagaggagtctgctctgtttcactacaaagagtagctaaaacagttgattcttacttagcggagatcgctacttacggagacctaacaatctccaaattcaacgcgattgcaaatcttgtcccgaaatccgctagaaaatcagacgacgatctctacagagctatagacatcttcttgaaagctcatccgaatctagacgagatcgaaagggaaaaagtgtgtagctcaatggatcccttaaagctttcttacgacgcacgtcttcacgcttcacagaacaagagattaccagtaaacattgttcttcacgctcttttactacggtcagttaaagctaagaagtggagtcgcagaaccaagaagaaagagcagtagttgttctccctgaagctttaaagacacgtagccaactgcaagctgatactacgttagctaaagaaaacgaagcgttgagaagtgagctgatgaagatgaaaatgtatgtttcggatatgcagaagaataagaacggtgcaggagcttcttcttcgaattcgtcgtcgttggtgagtagtaagaagagcaaacatactttcttctcttctgtttccaagaaacttgggaagttaaatcccgtttaaaaatgggtctaagggtactttcgcaccataggttgaaggtccttcgggggtgttgacattactaagcccaaggggacgaagattctcaaatctcttaaaaggaaccgtttgatctaaggccctttttgtgggttgtggataacccttttaggctagtgtgcttaatgttcccttcttgaagcgtgattttttttttttttgggtgtgtgtggttaatggttgcggccgcgaaatcctgcaggccgggggatcccctaggtttaaaacggccgcccccccggttgaggttcagcctttggtcccct

SEQ ID NO: 123918 - DNA, 439 bp, Arabidopsis thaliana
acccacgcgtccgccaaaagctctctcatctctctcgtccgtctcctctttctccatagtttaaagcttcgtcgttccgtcaccagaatttcaactactttgagttgattctcgttggatttctcacgatgggagacagcgggaagcttgaggcaacgatagatcggcttctgaatgaagagaagcagatgagactcgccgaaaacgtagccggtacaaggaaagccgccactgagattcttcagctttgtttcgatgctaaggattggaaacttctgaatgagcagattctcaatctctctaagaaacgtggtcagctcaaacaggctgtgcaatccatggtgcagcaagcaatgcagtatatcgatcagacaccagacattggaactcggatagagcttatcaagacgctgaacaatgtacctgctggaaagatata

SEQ ID NO: 123919 - DNA, 1193 bp, Arabidopsis thaliana
  unsure (1)..(1193): unsure at all n locations
acgcgcacnnnnnnnnnnnnnnattaaaacatctcactctttatctccctcacacctcagccttctgtgttcgtcttccacgcgtccgcaaatctcaattttggactcgtctgcttttgtttatataaacacttctcttcttcttcaatctccacacacaccacacaaaaccacctaccttcttcgatttctccagaaatcctccttcaagttcatactcatggaagaagctaaagtggaagcaaaagatggtaccatctccgtagcttctgcattttccggtcaccaacaagctgttcacgatagcgaccataaattcctaacgcaagctgttgaagaagcttacaagggagtggactgtggtgatggtggcccatttggtgcggtgattgtgcataataacgaggttgtcgctagctgccacaatatggttttgaaatatactgacccaactgcacatgctgaagtcaccgccattagagaggcatgtaagaaacttaacaaaatcgagttatcagaatgcgagatttacgcatcttgtgagccatgtccgatgtgcttcggagccatccatctctcgagactcaagaggttggtttatggagccaaagccgaagcagctatagccatcgggtttgatgacttcatagctgatgctttgagaggcacgggggtttaccagaaatctagtctggagatcaagaaagcagacgggaatggcgctgcgattgcggagcaagttttccagaacacaaaggagaagttccgtttatactaaagcacttctccattaccacattcttcttcttcttctccttcatgatggtaattagaagtagtagaagaagaactgcacttgctttaacttaaataaatctctgtttcaaattgttcattttaaaaacagaaggaaacgaaaaaaaaaaatcaatttcggttcttgttgacacgatttgtaatttcttttcttcatttgaattgaactggtaaatactttcttctctgtcaaaatctttattttctattttctgtacaaggccaagttcttcactaataaatcgaattgtttttctaaaaaaaaaaaaaaagnnnnnnnnnnnnnnnnnnnnnnnnnnnnnnnnnnnnnnnnnnnnnnnnnnnnnnnnnnnnnnnnnnnaaaggagtgtacagcctttcaaaccgtgggggcgcgg

SEQ ID NO: 123920 - DNA, 531 bp, Arabidopsis thaliana
  unsure (1)..(531): unsure at all n locations
tctacgactcacttactggagagctgacacgcctgcaggtaccggtccggaattcccggngctacccaggcgtcctgaaacggtgacggtacacatgatccagtcctcagaatctctaggaatggtcatgaagcgagagtatataaaagacgacgagcaccacatatctctcggcaccgccctgggtgagatattgaaacacaatgagccctccccatctctatgcacagtgctgggcgagatgtctaaaaacaacgaggagaaggaacatattttttcggatctagaacgaggaacaatgctaacaagaccaatgggcgaaggatatattcaatatctacggctttctaaagagacgactcaaccggcggattctaagattcccggtctttggtcttcttccgttagaccagagttttgttgcatctatagagtaccagaccggttacgcaaagtgaaccccgaggcttacactcctcaaatgctgctaatcggacctcttcaccattccaagaaagctgaagccctcaa

SEQ ID NO: 123921 - DNA, 281 bp, Arabidopsis thaliana
tgcgacgatcacatctggaactgagtctctctgctttccttctaatgtgtaagtaacagacttgtttattagatgagaggaagaatcaacgggaatgcataatctgacgatttcataagaatgaatgaaacaaaacaagagagagctaagaagaagaaaaaggattgtatatgtatgtacaaaaggtctatatatgtacaccattattcttttctatctgtaaccttgcgacttaaatgacattacagtttttttgaaaaaaaataaaaaaaaaaagaaaa

SEQ ID NO: 123922 - DNA, 588 bp, Arabidopsis thaliana
tttagcctctccacactcacaaagggctcacaagtctcaaatacaaaacaatgaagaacatactagcttgcatagttaccatcataaccctctcaaacctcataaccatttctcaaggaagaagggtatcacagtcatttgaaacatttgagtacacagcaattatttgcagatcccacagtgcctccataacagagtacggtggtgtaggagacggcaagacgctaaacacaaaggccttccagagcgccgttgatcatctcagccaatactcatctgaaggcggagcacagctctttgtacccgccgggaaatggctcaccggaagtttcaacctcacaagccatttcactctgtttcttcacaaagacgcaattcttctcgctgctcaagacttagacgaatacccaattctaaaggctttgccttcgtacggacgaggacgtgacgccgccggtggaagattcgctagtctcatcttcggcactaatctctccgacgtaattataaccgggaacaatggtacaatcgatggtcgaggatcgttttggtggcagaagtttcacggtggtaaactcaaatacactc

SEQ ID NO: 123923 - DNA, 461 bp, Arabidopsis thaliana
cccgctttggctgatgaaagaggcaatgagataaagacatcgaaggttgatctagaaactgaggttgcagtagttagtgaaggaacatccccaaatccatttctggctctcctgaatggtcttggaatttttagtgctggcgttcttggtgcactttatgcactggctcggcaagatacaaaagctgctgaggaaaccatcgaatctctaaagaaccagttgaaagacagagaaagagcattggttttgaaggagaaagatttcgaggcaaaactgcagcatgagcaggaagagcggaaaaaggaagtagaaaaggcaaaagaggaacagttgtcattgatcaaccagttgaattctgcaaaggacttggtgacagaattaggccgggagctaagtagcgagaagaaattatgtgagaagcttaaagatcaaatcgaaagtctggaaaatagtctgtcaaa

SEQ ID NO: 123924 - DNA, 611 bp, Arabidopsis thaliana
  unsure (1)..(611): unsure at all n locations
cccaaattgctctcgactttttattctcggattagcgtttgtgctttcgcatcagagaatctctcagttcttctcaatttaggtcatcagatctcacaatcaatcgactcgaactcaaatctcacttcatcaatcaaatcatgactcttggctcaggatcgagtgttgtcgttccgaggaatttccggttgctggaggagcttgaacgtggagagaaaggtattggagatggaactgtgagctatggaatggatgatggagatgacatttatatgcgctcttggactggcactatcatcggtcctcacaacactgtacatgagggtcggatttatcagttgaagctcttctgtgacaaagattaccctgagaaacctccgactgttcggttccattcgcgtatcaacatgacttgtgtcaaccatgataccggcgtggtgggttcaaagaagttttggggtctttcaaactggaaaggcagtccacaatgggggcatactcgcccaattttagnagggggtggttcatcgataccggaggtttttaacccccggggcctttttttaaccntaaggctcctttgggggtccctttggttaagttttttncnt

SEQ ID NO: 123925 - DNA, 621 bp, Arabidopsis thaliana
  unsure (1)..(621): unsure at all n locations
ctctattcgattctccctttacttcttctcgtctctcttctctgctcgtcagatctcaaaatcaatcggatatcgaaaccacaacttcatcaattatgactcttggctcaggaggatctagcgttgttgttccgaggaattttcggttgttggaggagcttgaacgtggggagaaaggtattggggatggaactgtgagctatggaatggatgatggagatgacatctatatgcgttcttggactggcaccatcatcggtcctcacaacgtaactgttcatgaaggtagaatctatcagttgaagctcttttgtgacaaagattacccggagaaacctccaactgtccgattccattcacgtgtcaacatggcttgtgtcaaccacgaaacaggagtggtggatcctaagaaatttggggctacttgcaaactggcaaagagagtacacaatggggggtatactggtcagtttgaagaacggaatgtcttcggcgcataaccgtaagcttgtcaacccccgaaggacttcctccaagtacttctggatctcttccggttgcaaaaaaatgcccccnaaaccaagangactggggcccatgnggncaancttttttttntng

SEQ ID NO: 123926 - DNA, 787 bp, Arabidopsis thaliana
  unsure (1)..(787): unsure at all n locations
caagttttaatacgcctccctatagggaaactgggtcgccctcaaggtaccggtccgaaattcccgggtcgacccacgcgtccgtgcgtctttggcctggccccatcatcggtcctcacaacactgttcatgaaggtagaatctatcagttgaagctcttttgtgacaaagattacccggagaaacctccaactgtccgattccattcacgtgtcaacatggcttgtgtcaaccaccaaacaggagtggtggatcctaagaaatttgggctacttgcaaactggcaaagagagtacacaatggaggatatactggtacagttgaagaaggaaatgtctacgtcgcataaccgtaagcttgttcaacctccggaaggtacttgcttctagttacttctggaatcttcttctggtttgctagaaaatcattgccccttctaataccaaagtatgtatctgggggtccttcattgtcgttctcaacgcttttttttttttaattcatcaaaaaatggtctgtgtggatggtatggtgatgatgatgatgttgtccgattgatcatctgaagttttatcattgtgtgcaaatatcaaaaacagcttctcttcctcactccatgtgttcaatcttttgaatttaacatgttgtgtcagccctttttttatatataaatgaaatctgctatatttgattggttaaaaaaaaaaaaaagaaaaaacaaaaagggcgaccgctctagaggatccaagcttacgtacgcgtgcgtnnnnnnnnnnnnnnnnnnnnn

SEQ ID NO: 123927 - DNA, 423 bp, Arabidopsis thaliana
ccgactgttcggttccattcgcgtatcaaccatgacttgtgtcagccatgttaccggcgtggtggattcaaagaagtttggggttcttgcaaaactggcaaagacagtaccacaatggaggaccatactgactcaattgaagaaggagatggctgcatcgcataaccggaagcttgttcaacctcccgaaggaactttcttctaatactctcaaagcctacctttgaggggcttctccattgttggtcttcaagcttttctttcgtaccttaaagtaaaaacaatggtgtctgtcgatgaatgatgatgttcgattgatcatctggagtttaaatccttgtgtgcaaatatatctagacaacgctgtctcacgacttcatcttctcagtttagatataatatgggaaacaaccttctagaatc

SEQ ID NO: 123928 - DNA, 602 bp, Arabidopsis thaliana
ggtacgcctgcaggtaccggtccggaattcccgggtcgacccacgcgtccgatggcgcaggagcaggaaggagcggtcgttgagaaaggtgagccgaatgattcctccgccgctgccgtggccgcaaccgcaaccgcaaccgccgatagcgtgaagaagaagcaaaatggattcttttcgcgtttgtggaatgggatatttagggttagaggtgacgatttcgagaagagacttcaatacatctcaagggaagaagctactgttttatcaaggatgaagcgtagatcgatttcatggaggaaactcaccagaaatctcatccgttcctctgtattattcgagataattgctgtgggttatgcgatcctgacaaccagaacggaagatttggattggagaatgtggagttccccgatcttgccaatggttcatctcacctgctgcttctgctcttgcttattcctcaatcgtcagcttctcaaagcatgttctgacccgcagcacatccaaatagaaccctttggcaacaaagcttcttcgaggcctctgaaacagggtttggtgcgtaacaaacattcaaaatgggaaaacccttttataaa

SEQ ID NO: 123929 - DNA, 689 bp, Arabidopsis thaliana
  unsure (1)..(689): unsure at all n locations
aggagtttccggatcttgccaatgtttatctttcctgctgtttctgctcttgcttattcctcaatcgtcagcttctcaaagatgtttgaccgcagagatcaaaagaccttggaaaagcttcgagctgaaaggttggcgaaaatcaatgaacttaaagaaaggaccaattattataccacacaacaacttattcagagatatgacccggacccagctgcaaaggcagctgccgcaactgtcctggcatccaaattgggtgccgattcaggcttgaaagtatatttaggagatgaatcccaactcgatccatcctcgggcaagagcaatgacatggaggttaaccaatcacgtgggttgaggaatcgaaggcaaccaaatacaagaccccacggttctgggagcacttcaacacatcattctgatgatgagtctcaccattctggaacaagcgagagatttccaggcaccacagagcaaaaccagcagatgttggttgagcattacagccctcagggatatgctgctcatgatngcagttggatcttacggattgnggctctacttntgggggaagatcccacacaatcatttggggtcatttntggaaactntcggtntncanaatnggctttntntggnaaagggggttttccttnaattanaactttttccccnncttgnattnttta

SEQ ID NO: 123930 - DNA, 472 bp, Arabidopsis thaliana
taccactcactttaggggaagctggtacgcctgcaggtaccggtccggaattcccgggtcgacccacgcgtccggaaggagaagaaaagtgtcggagagaaagaagaagccaatcatcatcgccagttgttcttctcttcgagatattcaaatcctccgtctctagagaatttcatatcaagagaatcagtggtttctgtagtttgtggtggtggtggttggaaggtaagataggatatggcgcaggagcaggaaggagcggtcgttgagaaaggtgagccgaatgattcctccgccgctgccgtggccgcaaccgcaaccgcaaccgccgatagcgtgaagaagaagcaaaatggattcttttcgcgtttgtggaatgggatatttagggttagaggtgacgatttcgagagagacttcatacatctcagggaagaagtactgtttatcaagatgaagcgagatcgattca

SEQ ID NO: 123931 - DNA, 1074 bp, Arabidopsis thaliana
  unsure (1)..(1074): unsure at all n locations
nnnnnnnnnnnnnnnnnnnnnnnnnnnnnnnnnnnnnnnnnnnnnnnnnnntgccgtaccggtccggaattcccgggtcgacccacgcgtccgcccacaagaagaagctgctgaagaagaaacctcatccttcgaacgttaagaggaagaagaataagagaaatcgattcgtggttttgggaaaattcaatggcggtttctactgtatcgtcgtttctattgccatctttcggcattccaagctcttcgccttcttctaccagactcaaagtctctctgctgccttcatcttctacccatggcggccttagttcctgcgtccttacgaaaccatccgtctcgcttacgaaggtcttcgctgttcccgataccctagatccaactccagaaattctcgatgaacccgcctctgaggttccgagctcttcatccatcagtgtagacgcggataagatggcgccaaagcaaaagattaggatcaagcttagatcatactgggtgcctcttattgaggactcatgcaagcagatacttgatgctgcgagaaacaccaatgcaaagacgatggggtcctgttccattgccaaccaagaagcgtatctactgtgttctcaagtctcctcacgttcacaaggatgctaggttccattttgaaatccggacacaccagcgcatgattgatattctctacccgactgctcaaactatcgattctttgatgcaacttgatcttcctgctggtgtcgatgtggaagtgaagctctgaagaagaagcgtaactacaatgatgtgatgggcacttttgcattgaatgaacagactgtttcagatcaactacattgcttagaactggtaagccttgtatcatcttttttgagaacctttgtaacgaaaatgtaagttgtattatctggtccttggaatctatctttagcgatgcttggttcttagttgatgaacatatccttaattaagcaagttcaaaggaatttgtttttgttttactaataaaaaaaaaaaagggcggccgctttagaggatcccagcttacgtgacgcgtgcatgcgacgtcaa

SEQ ID NO: 123932 - DNA, 661 bp, Arabidopsis thaliana
  unsure (1)..(661): unsure at all n locations
anccggcntnacccnccgttgcccgntaaatgncccaaccaaaaattgggnnaacctngacatncggggcccctattggggcccntccaaccagttctgatctccgggaaccccaatncaagncgatggncctgtnccatgccaacccaagaagncgtatctactgtgttctcaagtctcctcacgttcacaaggatgctaggtcccattttgaaatccggacacaccagcgcatgattgatattctctacccgactgctcaaactatcgattctttgatgcaacttgatcttcctgctggtgtcgatgtggaagtgaagctctgaagaagaagcgtaactacaatgatgtgatgggcacttttgcattgaatgaacagactgtttcagatcaacttacattgcttagaactggtaagccttcgtatcatcttttttgagaacctttgtaacgaaaatgtaagttgtattatctggtccttagcaaagttggaatctatctttagcgatgcttggttcttagttgatgaacatatccttaattaagcaagttcaaaggaatttgtttttgttttactaattgttatgcagtttgcctgtgtccattatgataagtttttttatttttgttgtattcaaagtggaatcttttttttgaatat

SEQ ID NO: 123933 - DNA, 734 bp, Arabidopsis thaliana
  unsure (1)..(734): unsure at all n locations
cggtcctttatttccgggtccgccccacccgtccgaaaatggttaaccctcaagaagaacctgctgaagatgaaacctcatccttcgaccgttaagaggaggaggattaagagaattcgtttcgtggttttgggaaaattcaatggcggtttctactgtatcgtcgtttctattgccatctttcggcattccaagctcttcgccttcttctaccagactcaaagtctctctgctgccttcatcttctacccatggcgggcctagttcctgcgtccttacgaaaccatccgtctcgcttacgaaggtcttcgctgttcccgataccctagatccaactccagaaattctcgatgaacccgcctctgaggttccgagctcttcatccatcagtgtagacgcggttaagatggcgccaaagcaaaagattatggatcaaagcttagatcatactgggtgcctcttattgaggactcatgcaagcagatactttgatgctggcgagaaacacnaatggcaaagacgatggggtcctggttccattggccaacccaagaagcngtatctaactggnggttcctcnaagtcttccctcaaggtttcanaanggattctaagggttccaatttttgaaatccngggnaaaccaagggcattganttgaaatttcntttacccgggttggnnaaaaaantaggnttnttttgnngcactttgatttcccccgggggggnncc

SEQ ID NO: 123934 - DNA, 617 bp, Arabidopsis thaliana
  unsure (1)..(617): unsure at all n locations
ccccccnnttttggngaatnggcgganncattcccccgnaccgctngccatgattcnccaagcnttantcggctcccctttnggaaacctggtccccctgcnagtcccgcccggccgcccacgcgtccgctcacgcttatcgccgcatctccgtcaaccttcatctacagaatggattctcagatcaagcacgctgtggtggttaaggtcatgggtaggactggttcaaggggtcaggttactcaggttcgagtgaagtttaccgactctgatcgttacatcatgaggaatgttaaaggaccagtgagggaaggtgatatcctcaccttgctcgagtctgagagagaagctaggagacttcgttgatcttcttcttcatactccaaaatgcggaaacaagaaaacatttggttatttctcttttgctttctttgattggattagtggattatgcatttggagtcttaattttgttgttgctttaagacaattgctgctggatttataagttgtttggtattcaaaaaaaaaaaaaaaaaagnnnnnnnnnnnnnnnnnnnnnnnnnnnnnnnnnnnnnnnnnnnnnnnnnnnnnnnnnnnnnnnnntcagctcaatc

SEQ ID NO: 123935 - DNA, 651 bp, Arabidopsis thaliana
acccacgcgtccggcgatcggagagctctgacggcatcagccacctctgcggcttcgcaaatccaaataagctgtggatgaaacgaagaatcctagatttctgaatggcgacaccatttatagcgggggttgcagtagctgcaacagcacttgctggtagatatggaatccaagcatggcaagcattcaaggcaaggccaccaaggcccaaaattaagaaattttatgagggcggtttccagcctacgatgacgaaaagggaagctgctctcattcttggcgtcagggagagtgtagcggcggaaaaggtgaaggaagcacacaggaaggtaatagtagcaaaccatccagatgcaggtggtagccatttcctagcctctaagatcaatgaagctaaagacgtgatgctaggcaaaactaaaaacagcggatccgctttttgatgcaaatttcaatcaaaagacttccttatgaatcatcttatgttataggactgtaatgtcaaaatgcagattttatgctaatttataagcttgtggtctgtttgtgacacataaagactcgaatcttttctttcacttgttgtcgctgaaaagaacacaaaaataaaaacgcaaagcagaaggaaagaaactagtcttttcggttttt

SEQ ID NO: 123936 - DNA, 1314 bp, Arabidopsis thaliana
  unsure (1)..(1314): unsure at all n locations
nnnnnnnnnnnnnnnnnnnnnnnnnnnnnnnnccggcacgcctgcaggtaccggtccggacttcccggggcgacccacccgtccgcccacgcgtccgcggacgcgtgggcttttctctctgttacttacttccattattttcgagcttattcttatcttcatcgcttaaggttcgaattttcgaattcgatctctttttgtagctataccaatcacaagtagctgaaatcaatagtattaagccaggctagctagaccagcaagtaaatttgctggctagcaggatcctcatgagccctcagagcgtatcgaagactagcaaatcccttgagggtgtccatggggttcatgttgtatctcattctcatttcggatttgaaagtattggccaagtctctggctttgagtctgcggatgcaggaacaaagcagagacttttcattgaacgtgtttggcaacaaagacctccatgcctaagacccatccattgcagcatccatggtgatcagagtatcttagaaacagctgctaatgtgatcacatcgatccctttcattttcctcggtatgcaggcaccgaggaaaaacctgaacatgaaggtatatgcaaactccttaatcggagttggaattgcatcgagtttgtatcattcttcaagagggaagtttaggaagtaccttagatgggctgattacacaatgatagctacagcgacaatatgtctaacgagggcgcttagagaagagaacccaaagttcttgatggctgcatcagctttggctctaccgtttcagcctctcgtggtatcagctgttcacactggaatgatggaggtagcatttgcgaaacgagccttagaggatccggatttgaaaatggctcatgatgtacacaagatgtcttcgttattaggcggagcattgttcatagctgatgatcttttccctgaaacaccattcattcacgccggttggcatctcgccgcagccattggcgttggaacttgcaataagcttcttcagtaatccacagtaccaactatattgagtgattgtggaactgccacattcttggcttaatgaaaccactagtacgtgtggtttcactaagctcataaatcagccgacataactagtagtagtcatctctatctttaaatcaatgtaaggaaccgaaacaagtcacctgttgtaatataaggacaaaggccactcgtctctatatattgaaaaaaaaaaagtataatttnnnnnnnnnnnnnnnnnnnnnnnnnnnnnnnnnnnnnnnnnnnnnnnnnnnnnnnnnnnnnnnnnn

SEQ ID NO: 123937 - DNA, 695 bp, Arabidopsis thaliana
  unsure (1)..(695): unsure at all n locations
nnnnnnnnnnnnnnnnttaggtccactatagaagagctatgacgtcgcatgcacgcgtacgtaagctcggaattcggctcgaggagcagaatctaaaaacacttatcgtttcgtctcttctctgatccattgttgaagatgtcgaagagaaaaactaaggagccaaaggttgagactgtgactcttggaccttctgttcgtgaaggagagcaagtttttggtgttgttcacatctttgcatctttcaatgacactttcattcatgtgactgatctctccggtagagaaactctcgtccgcatcaccggtggcatgaaggtgaaggctgaccgtgatgagtcctctccttatgctgctatgcttgcagctcaagatgttgctcaaagatgcaaggagcttggcatcactgccatgcacgtgaagctccgtgctactggaggaaacaaaaccaagactccaggtcctggtgctcagtctgctcttagagcccttgctcgttctggcatgaagattggtcgtattgaggatgtgactccgattcccacagacagtacacgccgaaagggttgnccgaganggagaaggctttnntttcacggtgngnccatatnggtgaatgtncntttagcttgggattttttggcatncagaagtttcttnccaatttttccantntttggaatnnagggttttgc

SEQ ID NO: 123938 - DNA, 556 bp, Arabidopsis thaliana
  unsure (1)..(556): unsure at all n locations
tgcttgcagctcaaaatgctgctcaaagaatgcaagggagttggcatccctcccatgcccgtgaagctccgtgctcctggaggaaccaaaaccaagactccaggtcctggtgctcagtctgctcttagagcccttgctcgttttggcatgaagattggtcgtattgaggatgtgactccgattcccccagacagtacaccccgaaagggtggacgaagaggaagaagactctgattgcccgatgaggctcatcatcgttgcaatgtgctcttgagactgtgggtattttcttgggtacccttcccagttagttttgtctctctccaatttatctttccagttgctttgagaacattataagctgtgtttttttgtatttggagtttttggtattgagaaaaaaaaatgttaagtttctgatcaaaaaaaaaaaaaaaaaaaaaaaggnnnnnnnnnnnnnnnnnnnnnnnnnnnnnnnnnnnnnnnnnnnnnnnnnnnnnnnnnnnnnnnnnnnnnnnnnnnnnnnnnnnnnnnnnnnnntagctnnnnnnntcat

SEQ ID NO: 123939 - DNA, 533 bp, Arabidopsis thaliana
  unsure (1)..(533): unsure at all n locations
ggatcccttccatgcacgtgaagttctgtgcttctgagggaacaaaaccaaaactccagggtcctggtgctcagtctgctcttagagccccttgctcgttcgggcataaagattggtcgtattgaggatgtgactccgattcccacagacagtacacgccgaaagggtggacgaagaggaagaagactctgattgcacgatgaggctcatcatcgttgcaatgtgctcttgagactgtgggtattttcttgggtacacttcgaagttagttttgtctctctccaatttatctttccagttgctttgagaacattataagctgtgtttttttgtatttggagtttttggtattgagaaaaaaaatgttaagttactgatcgcgtcgtgttactgttagttggcttattgatattttacattttctctctttttaaaaaaaaaaaaaaaaaaaagnnnnnnnnnnnnnnnnnnnnnnnnnnnnnnnnnnnnnnnnnnnnnnnnnnnnnnnnnnnnnnnnnnnnnnnnnnnnnnnn

SEQ ID NO: 123940 - DNA, 1616 bp, Arabidopsis thaliana
  unsure (1)..(1616): unsure at all n locations
cgcggaannnnnnnnnnnnnnnnnnnnnnnnnnnnnnnnnnnnnnnnnnnnnnnnnnnnnnnnnnnnnnnnnaaaaccacgcgtccgcagaagaataacagataaaactctctgtgtgagtgagtgagactcaaccatggcgtctttggctcagcaattctcgggattgagatgttccccactctcttcttcttctaggttatcgaggagagcttcgaagaactttccccagaacaaatctgcctctgtttctccgactattgtcgccgcggttgcaatgtctagcggtcaaacaaaggagcgtcttgagctgaagaagatgttcgaagatgcttatgaacgatgtagaacttctcctatggaaggtgttgctttcaccgtcgacgatttcgctgctgctattgaacaatacgacttcaattccgaaatcggcactagggtaaaaggaacagtgttcaagactgatgcaaatggtgcattagttgacatttctgcaaagtcatcggcttacttgtcggtagaacaagcgtgtattcatagaattaagcatgtggaagaagctggtattgtaccctggatggtggaagagtttgtcatcattggtgaaaatgaaagtgatgacagtttgctattgagcttaaggaatattcaatacgaacttgcttgggaacgttgcaggcagcttcaggctgaggatgttattgtcaaggctaaggttattggtgctaacaaaggtggattggttgcccttgtggaaggtcttcgtggatttgtgcccttttcgcagatatcatcgaaagcagcagctgaagagcttcttgaaaaagaaatacctcttaagtttgtggaggttgatgaggaacaaacaaagcttgtcctcagcaaccgtaaagctgtagcagatagccaagctcagcttggaattggttctgtggtcctcggagttgttcagagcttgaaaccttatggtgccttcattgacattggtggaatcaatgggcttctccatgtcagtcagataagtcatgaccgtgtctcagatatcgcaactgttcttcagcctggtgacactttgaaggttatgatattgagtcacgaccgtgacagaggaagagtaagtctctccacaaagaagctggagccaacacctggtgatatgattcgtaacccaaaacttgtgttcgagaaggctgaggagatggctcagacattcagacagagaattgcgcaagcagaagccatggctcgtgcagacatgcttcgcttccaacctgagagtggactgacgctgagttctgacgggatactaggaccactcggatctgagttaccagatgatggcgtagatctaacggtcgacgacattccttctgcagttgatatttagattctaaagctttagtgtattttttcatacacaaaaacacctccttgagcttaattgaatatgtagtttacttcctacaagacattttatcatgtgtactttgtcttttgtaatcgatatgttctgttacaatgtcaagaaaccaaagaaaggctttgcccaagaccaaacagagcacacggtcttaaaaaaaaagatattgttaaaattttaaaaagaatttattcat

SEQ ID NO: 123941 - DNA, 510 bp, Arabidopsis thaliana
acccacgcgtccgtgatttcaaagggatcgtctttaatggaggtgatacacgcatggtctgctccaagatcactcagcaccactctcatgtactcctttgcccagagagatgacattgaagtgcttgatgagccattatacgctgcgttcctcaagtctacgggtgttgataggccttacaaagatgagcttctctctaagatggagtgtgatggagaaaaggtggtgaaggatatcatttatggtccaggaaagaagaaatataggttttgtaagcatatatcgaaacagcgacttcttggtttgccaagtgaactaatgagtgaagggaagcactttatattgatacgcaatcccctcaacatattgccttcttttgagaagatacacccttcatcgtttcacgaattgggactgggagagttagtatcgatatacagtgatctctgtcagatgggaacaccaccagcaatcatcgatgcagatgagcttcagcgagatcccgaggct

SEQ ID NO: 123942 - DNA, 656 bp, Arabidopsis thaliana
  unsure (1)..(656): unsure at all n locations
cccacttcttccgctttcgtcttcttcccggctttactctctttctctctccaccgtcggctcagatctagacggaaatgtgccggtgaaatcgaatcatgaaaagatctcacatttcgtctcctcgttcttattcacgaccagcgatttcaatcttcggtgtcttcctcttgtttcttctggttttaacactaagctctcgaaaaccatcagattcatcctccggtttagctccaaatcgaaacttagccacaaaatcgacgattccgaggtttgcgtatttggtaacgggaacgaaaggagatgggaaacgagtgaagcggctgcttaaagcaatacatcatccgagaaattactatctgcttcatttggttctcgaagcttcagatgaagagagaatggagctggcgaagtatgtgagatcggagaagaagaagtttgagaatgttatggtaatgggtttagctgatttggttacggagaaaggtccaacgatgttagctagtacgcttcatggtgttgccatttttttgaagtaagctaaggattggaattggtttatnaancttaggtgcttctaattancctttaangcctcangatgntatttgccatatatccccatacttnccacggttcctganctttatcggggc

SEQ ID NO: 123943 - DNA, 494 bp, Arabidopsis thaliana
  unsure (1)..(494): unsure at all n locations
cctgcttgcttctctctttgcttgcgttttctcaaaggttcgaagaaaacgaagaaccacgcttttgcttttttcccaagacttaatctaaaaagcgagatttccttctttcgattcttttttctcaatctggttttcagtcttcggattcaatggcgtctggatcttcgggtcgggtcaactcaggatccaaaggtttcgattttggctccgatgatatcctttgctcttatgatgactacaccaaccaagactcctctaatggtcctcactccgatcctgcgatcgctgcttccaactccaaacaaggaattccataaaacaaggatggcaaggtcttcgggttttccctacaagctcttacagtccaccagaggnttcttttgagncaagncaattactgacactgtcggaaagggccntnaagntgtatgctggtaacatganggggtttnttnaaaggcctaagtcannggttgtctaantttaacttt

SEQ ID NO: 123944 - DNA, 623 bp, Arabidopsis thaliana
ccaacgcgtccgcccacgcgtccgcccacgcgtccgcccacgcgtccgcccacgcgtccgatttcaacaccgataagttcgcgtcgtaactctaacccattcgaattgatttaggcgttagggtttcttcatatttctctctcggaagaagaagatggtttgcgataagtgtgagaagaagttatcgaaagtgatagttcctgataagtggaaggatggtgctcgtaatgtaactgaaggtggtggtcgtaaaatcaatgagaataagcttctctccaagaagaatagatggtcaccttacagtacctgtaccacaaaatgtatgatctgcaagcagcaagtgcatcaagatggtaaatactgtcacacatgtgcctatagcaaaggagtgtgcgcaatgtgcgggaagcaagtgttggacaccaagatgtacaagcaaagcaatgtataaacaaatccgcaagcgtttcacattttagtttttgtccctttgatgtcaacgttgtatcctctcactcatgtatttttttgtatcggtttcctccggttttaatataaccaaacagaatcttgttgcttcactgtgtttcttgactgatcataaagttaatgtttcgttttag

SEQ ID NO: 123945 - DNA, 837 bp, Arabidopsis thaliana
gtccggaatttcccgggtcgacccacgcctccgatttttttttcttaagcaaaaaagattttatctcactctcaatagtggtagtattggcacagagaaagcttcacatctagaaaaagaagcagagtttataaagagaaacccattttaaaccctataaatctaagtggaagggggggaacccttctgattccgcaacaatggaatttacagatactgaaagtcctcatcttggggaaatttacttggggccccttacttggaaaagtgccaagaaatctgggataaagtgggggagagggttataaaccaaaccaccttgttcttaaaataaagcaggagtgtttgactttacaaaaaaaaaggggggcggggtggaaaatcccgagctggctttttaaaccttggaaatggtaagggtgacctttcacccaaaagtgtttttgaaaaaaagtttttgggcttccgaaaatcttaaaaaaaaataaaaacattttgttaataccccgttttttaccttggggaaaaaaaaagaaaaacccgaaatttttttttcccccccaattaaaaatttggaattttcggggggtaacaatgagcccttagcagggttggtttgcctaaaaaaaaaaattcccaaccccctcaagccccaaaaaaaaaaccccggcccccgggtaaagtagagcccctcaaacttggggtttggggggtttttaccccccccattttctccgttaaaaaacccggccccaaaaattaaagaaacccgagggggggacccctctcttataataaaaaatatctaactcaggcgctcccctttcccgggggggg

SEQ ID NO: 123946 - DNA, 661 bp, Arabidopsis thaliana
gtataattcattcttagtttagttttagtctctcattggtttttgttttcgagtgtctctcccggaaaccttctgattccgcaacattggcagttacagatactgaaagtcctcatcttggggaaattacttgtggtaccttacttgagaagttgcaggaaatctgggatgaagttggtgagagtgatgatgaacgagacaaactgcttcttcagatagagcaagagtgtcttgacgtttacaagagaaaagtcgagcaggctgcgaaatcccgagctgagcttcttcaaaccttgtcagatgctaatgctgaactctccagcctcacaatgtctcttggagacaaaagcttagttggcattccggataagtcttcaggaacgattaaagaacaacttgctgcaatagcaccggctcttgaaccaactgtggcaacagaaagaggagagagtccgagagttctctgatgtacaatcacagattcagaagatatgtggagagattgctggaggtttgagcaatgaggttcctatagtcgatgagtctgatttgtcactgaagaaattagacgatttccagagccaactccaagagctccagaaagaaaagagtgacaggctgcgcaaggtgttagagtttgtgagtactgttcatgatctat

SEQ ID NO: 123947 - DNA, 490 bp, Arabidopsis thaliana
aaacgattgggtcccacactcacctctccgtctcttccacctccatagatagattttttttccttaagcaaaaaagattttatctcactctcaatagtgttagtattgtcacagagaaagcttcagatctagaagaagaagcagagttcataaagagaaacccattttaaaccctagaaatcaagtgtcaatctcggaaaccttctgattccgcaacaatggcagttacagatactgaaagtcctcatcttggggaaattacttgtggtaccttacttgagaagttgcaggaaatctgggatgaagttggtgagagtgatgatgaacgagacaaactgcttcttcagatagagcaagagtgtcttgacgtttacaagagaaaagtcgagcaggctgcgaaatcccgagctgagcttcttcaaaccttgtcagatgctaatgctgaactttccagcctcacaatgtctcttggagacaaaagcttagttgg

SEQ ID NO: 123948 - DNA, 427 bp, Arabidopsis thaliana
  unsure (1)..(427): unsure at all n locations
acagagcacacaaaagaaggagagaaagatgacgtcaccgagccatgcctctgatcgcggcggcggcgacggtgactcagtcgagaatcagtcccctgagctcaggaaagatccggtaactaaccgctgggtcatattctctcccgccagagccaagagaccgactgatttcaaatccaaatctccccagaaccctaatcccaaaccttcctcatgcccattttgcatcggtcgtgagcaagagtgtgccccggagttatttcgtgtgccagatcatgacccgaattggaaactccgggtcatcgagaatctntacccggctcttagtaggaatntngngncccaattgncccaacctgagncggggancaagtcgggcaatagtngggtttgggnttccacggcggtgtgattcggatcccctgtt

SEQ ID NO: 123949 - DNA, 553 bp, Arabidopsis thaliana
ctgtagaggctactttcattaacttggaacagttcttggaacctcttgagctctgttaccgatctctgtgttcatgtggtgatcgtccaatagcagatggaagccttcttgatttcttgaggcaagtctcaacctttgggctctctcttgtgagacttgacataaggcaagaatctgaccgccacactgatgtattggatgctatcaccacgcatttagatatcggatcctacagagagtggtctgaagaacgccgccaagaatggcttttatctgagctaagtggcaaacgtccgcttttcggttctgatcttcctaaaaccgaagaaatagctgatgttctggacacgtttcatgtcatagccgagctaccagcagatagctttggtgcttacattatctctatggcaactgcaccttctgatgtattagctgttgagcttttacagcgtgaatgccgagtgaaacagcctttgagagttgttccgctctttgagaagctagcagatctggaagcagctcctgctgcagttgctaggctcttttctgttga

SEQ ID NO: 123950 - DNA, 945 bp, Arabidopsis thaliana
  unsure (1)..(945): unsure at all n locations
ctatacgacttctatagggaaagctggtacgcctgcaggtaccggtccggaattcccgggtcgacccacgcgtccgaaaaattgagaagaaaacctagaaacaaatacggtcttttttttttctttttatgggtcgcgaatctctggctgttgtgtcctcgccgccatcggcgactgcgcccagtactgctgtgtcggctacctcgcttgctcctggctttcgatttcatccgactgatgaggaactcgtgagctattacttgaagaggaaggttctgggtaaacctgtacgcttcgatgcgattggagaggtagatatctacaagcatgagccctgggatttagcagtgttttcgaagttgaaaactcgggaccaagaatggtacttcttcagtgcgttagataagaagtacggtaatggtgctaggatgaatcgagcaactaacaaagggtactggaaagcaactggaaaagacagagaaatccgccgggatattcagttgctcggtatgaaaaagacgcttgttttccacagcgggcgtgctccagacggccttcggactaattgggtcatgcacgagtatcgccttgtggaatatgaaactgaaactaacggaagcctgctgcaggatgcatatgtgttgtgcagagtgtttcacaaggaataacattgggccacccaagtcgggaacagatatgcggccattcatggaaggaaggaatgggctgattggtggaggagctcctgattccagggattagaccgttagggtcaagggttagaggctcttaccacaaagcccattggaaacaacccgatttgcccccggaaattccattntagcaaagcaaagnttctcattnaacaatnaacggggtttcccgggaggttctttcttccaattggccattgaccctacccaccagatnatntttngggtcngc

SEQ ID NO: 123951 - DNA, 454 bp, Arabidopsis thaliana
  unsure (1)..(454): unsure at all n locations
ccacaagaataacattgggccaccaagtgggaacagatatgctccgttcatggaagaggaatgggctgatgatgaaggagctctgattccaggaatagacgttaagctcaggctagagccgccgccagtagccaatggaaacgaccagatggaccaggaaatccagtcagccagcaagagtctcatcaacatcaatgagccaccgagagagacagctccactggatatcgaaacggaccaacagaatcatcatgagaatgacctcaagccggaggggcataacaacaataataattatnattgaaaacgggggaacactnaaaacgggngcagattgggagaagaggagcgtcctccttggcctgtatgnnttntttaacaaagaggtccatttcctttttntgaatttcaaacgtggnnnccaaaggggtnccacaacaaatttannnggggc

SEQ ID NO: 123952 - DNA, 394 bp, Arabidopsis thaliana
agcctgcctttctgggaacgcgaaaagaaagacaaaattttcttgcaattgaaggtgaggtttggtgaaagggaaattgagaaaaccctagaacaagtacggtctctattttgctttaatgggtcgcgaatctgtggctgttgtgactgcgccgccctcggcgactgctccgggtactgcttcggtggcgacctcgcttgctcctggcttccgatttcatccgactgatgaggaactcgtgagctattacttgaagaggaaggttctgggccaacctgtacgcttcgatgcgattggagaggtcgatatatacaagcatgagccctgggatttagcagtgttttcgagattgaagacaagggaccaagaatggtacttctacagtgcattagat

SEQ ID NO: 123953 - DNA, 453 bp, Arabidopsis thaliana
tgattaagatgatgaagcaagcccgctctttgctctccaggagcctttgtgaccaaagtaagtcacttttcgaagcttcgacgttgcgtggttttgcaagctggtcaaattcttcaacccctggacgtggattccctggtaaagatgccgcaaagcctagtggtcgattgttcgcaccttattctatcttcaaaggaaaagctgctctctctgttgaacctgttcttcccagtttcactgaaatcgattcgggaaatcttcggatagatcgtcgtggatccttaatgatgacttttatgcctgctattggtgagcgtaagtacgactgggaaaagaaacagaaatttgctttgtcacctactgaagttggatccttaattagcatgggttccaaagacagctccgagtttttccatgacccttccatgaaatcaagtaatgctggtcaagtca

SEQ ID NO: 123954 - DNA, 1015 bp, Arabidopsis thaliana
  unsure (1)..(1015): unsure at all n locations
aacaaaaatgcaagccatcggtagcagccatggcaggaggctctgcttcaaccactatctctccgattccttctccaaattcctctctccttcttcttctccttcccttctccctcagagatgccattcgttctgtatccccaagcttggaagtagtagtaccaatgagaatggcagaggaagaagtgtaacagtgagagcttcaggagatgaagattctaatgagaactttgctcctcttgctcctgttgagcttgaatctcctgtaggacagcttttggagcagattcttagaactcatcctcatcttttacccgttactgtcgatgagcagctcgagaaattcgccgcggaaagcgagtctcgtaaagctgattcggcttccacacaagacattctccaaaagagggtatcttgaagttagagataagggaaggccgtaaaactttagcagagatcatttactgttttaggtggtacacagaattttttggaaaaaggaatctctatgattcctcggattaaaccaacttcagacccagcaggacggatagacttatggccgaatcaagaagagaagctcgaagtcattcactctgcggatgcgttcgagatgatacagagtcacttgtcttcagttcttggagacggaccagcagttggtccgttaagctctatagttcagataggcaaaatcaagctaggaaaactctatgctgcttctgctatgtatggatattttctcagaagagtagaccaaagataccaacttgagagaaccatgaacacacttccgaaacgccctgagaaaaccagagaacggttcgaagaaccttcgcctccttacccgttatgggacccggattccttgatcaggattcaccccagaggtatatgatcccgatgaatacgcggtccaagaatgaagatgnggcatcgccttatggattnggntcatatgntncggatttggntcgnancgcttcagaganttgncncgatnggtntaagnngc

SEQ ID NO: 123955 - DNA, 531 bp, Arabidopsis thaliana
caaatctctgaatctcttgggtttgatgtgtaatcttaattccagttttcttgttgctttcgtttgttaaattacagagatgccattcgttctgtatccccaagcttggaagtagtagtaccaatgagaatggcagaggaagaagtgtaacagtgagagcttcaggagatgaagattctaatgagaactttgctcctcttgctcctgttgagcttgaatctcctgtaggacagctttttggagcagattcttagaactcatcctcatcttttacccgttacttgtcgatgagcagctcggagaaattcgcccgcggcaaagcgaagtctcggttaaagctggaattcgtctttccacacaaggcaatttctccaaaagtaagtctttttgcttcaagtttttgagtgagactgtgggagaatcttgcaatgcttaagtacatagccttagccttagatactgtattggtcgaggtctacttgaagatgttgttgtgtggttgatttgcaggaggatatctgaagttagaga

SEQ ID NO: 123956 - DNA, 919 bp, Arabidopsis thaliana
  unsure (1)..(919): unsure at all n locations
tacggctgcgaaagacgacagaagggtacggctgcaagagagagagagaaaacaaaacaaaaaatggctacccgaaaagctctgatcaacgttcaccggatcattcgctccaccgccgtggttggccggagctctatcattcctgccgccgctaaccggtcatatcctattatattccggaatggagttgatttgggggcgagattcttctgtgagaacactgcgtctgcccagaatttcgatattgatctctctaacgaagagaataagagaagaacgatcaacagattgttgtataggagcaagcaaagagggtttttggaacttgatcttgttttggggaattgggttgaggagaatgttaattccatggacgaaaatggtgttaaatccctaattcatgtcctcaatttggaaaaccctgatctctggaaatggctaactgaacaggaacagcctccggaagcagtgagttcaaatccggtgttctcggcgttacacgagaaagtcatgaagaatctgaacaagcatgcagcgccagagactcgtgcagcggctggacagccctgggtcagaggatgggacgatttcaagagaggccgtgatgctcccatttcagggaatcagttaacattaactcctctttttcaaaaagtatcaaagtgaaaataagttctgatatgaaaatagatccccagtagtagccacccattactttactattgtatttattaagaaccaggccgtgaagaaggtccatggcgttgagataattacagtgttgtgtcttgtttgttgaagtttccaaagctaatatttggggtttctagaaccaaaaaacaaaagggcgcgnnnnnnnnnnnnnnnnnnnnnnnnnnnnnnnnnnnnnnnnnnnnnnnnnnnnnnnnnnnnnnnnnnn

SEQ ID NO: 123957 - DNA, 877 bp, Arabidopsis thaliana
  unsure (1)..(877): unsure at all n locations
ccacgcctccgcaatctcaaaaacgctcctggagtgtcaagaacagagatttgggtcggaatcaagaaagtaatcgagactttgcaggacaactatccggaattcgtgtccagaaacatattcatcaacgttggagtctggttctacgccatgagagctgtcctctcgccattcttaactcaacgaaccaagagcaagtttgttgtggctcgtctcgctaaggtcagagagactcttctcaagtacattccagctgatgagctcccagttcagtacggggggttcaaaacaggtaggcggtttcccctaattctccaaacggaaacttgccnccttaaggttggttgtnaaccctgggatcatcttaaaccatcgaaatcccagctcctgagactgaaggtacattggtatgggacatagcggttttgggatgggaagtgaattacaaggaagagtttgtgccaacagaagaaggagcttacacggtaatagtccaaaaggtgaagaagatgggagcaaatgaaggaccaatcaggaacagtttcaagaacagtcaggctggtaagattgttcttaccgttgacaatgtctctggcaagaagaagaaagttctgtacaggtacagaaccaagactgaatcctcttcctgaagtggaggatttcatgtagtctctggatatataatattcttttctaaatttaaacgtttggtgttattatttatttttgagtgatatgtaagagaaagagatactcccattatttcattgatattcaatcaaaaaaaaaaaaaaaagnnnnnnnnnnnnnnnnnnnnnnnnnnnnnnnnnnnnnnnnnnnnnnnnnnnnnnnnnnnnnnnnnnnnnnnnnnncattc

SEQ ID NO: 123958 - DNA, 676 bp, Arabidopsis thaliana
  unsure (1)..(676): unsure at all n locations
acgcgcgnnnnnnnnntacgactcaaatagggagagctggtacgcctgcaggtaccggtccggaattcccgggtctacccacgcgtccgcgatctcaaaaacgctcctggagtgtcaagaacagagatttgggtcggaatcaagaaagtaatcgagactttgcaggacaactatccggaattcgtgtccagaaacatattcatcaacgttccattctggttctacgccatgagagctgtcctctcgccattcttaactcaacgaaccaagagcaagtttgttgtggctcgtcccgctaaggtcagagagactcttctcaagtacattccagctgatgagctcccagttcagtacggtgggttcaaaacagtagacgataccgaattctccaacgaaactgtctctgaagttgttgttaagcctggatcatctgaaaccatcgaaatcccagctcctgagactgaaggtacattggtatgggacatagcggttttgggatgggaagtgaattacaaggaagagtttgtgccaacagaagaaggagcttacacggtaatagtccaaaaggtgaagaagatgggagcaaatgaaggaccaatcaggaacagtttcaagaacagtcaggctggtaagattgttcttaccgttgacaatgtctctggcaagaagaagaaag

SEQ ID NO: 123959 - DNA, 564 bp, Arabidopsis thaliana
  unsure (1)..(564): unsure at all n locations
gaagaaaaccctcaaatggagaaagcaaaacaagattgattcgatccttggagaggagtttggggaggatcttgccactgcagcttacatgaacggtgtggaccgcgagtcccacccagtttgttacaatgtccacagcgaggagctttaccagacgattgggtcggagaagaacagagagaagttcttgagatggaggtttcagctgatggagaagggaatccagaagcttaatcttaaaccaggaggtgttacttctcttctccagatccacgatctcaaaaacgctcctggagtgtcaagaacagagatttgggtcggaatcaagaaagtaatcgagactttgcaggacaactatccggaattcgtgtccagaaacatattcatcaacgttccattctggttctacggcatgagagcttgtcctctcgncattcttaactcaacggaccaagnacaagtttttttgtggntncntccccttaaggttaaggggnnctttttttaaggcaaattccccanctttattggnncccccaattnnnaaaanggggggtttnaaaa

SEQ ID NO: 123960 - DNA, 605 bp, Arabidopsis thaliana
ggcgtgaatgcagtaagagacggcatgaacttagttccatataaatatatcatttgcaggcaagggaccccaggaatggataaggccatggggattagccatgactcagcccggacgagcatgcttgttgtctctgagtttatcggctgctcgccttctttgagtggtgcgatcagggtgaacccatgggatgtagatgctgttgcagaagcggtaaacttagccctcactatgggtgagactgaaaagcgattaaggcacgagaaacactatcactatgtgagtactcatgatgtgggttactgggcaaagagctttatgcaggatcttgagagggcatgccgggagcattataataaacgttgttggggtattggttttggcttgagtttcagagttctgtcactgtctccgagtggtaagaagctatctatcgatcacattgtctccacgtatagaaatacacagagaatggcaatatttttggactatgatggcactctcgttcctgaaagctccatcatcaaaacccctaatgccgaagtcctgtctgttctgaaatctctgtgtggagatcctaaaaacactgtgtttgttgtcagtgg

SEQ ID NO: 123961 - DNA, 410 bp, Arabidopsis thaliana
caagctccaatctctctctctctccctctcccaaaatctcacgatgcaacctcagccgcatatttctccgaacaccgcaactgccgcgatctcagccgcgcttgaatctcagcgcagtagaaaaaaccgaggaagttacaattgcggtagatgtggtcaacctaagaaaggccatgtctgtcttttaactgctccacctgatattcccactactccgatcgcttctgagccagtgagctgcatctccgccgccgcatcttcttcccgttctactgtcttatctttaacagcggcgccgtcatcgcgacagaccttcactcacttacgccgagctttatcgttcgatgacgtcgatgcgcgtaattcactcgatgaatccgatctggatgctgcatcgatggatctggatc

SEQ ID NO: 123962 - DNA, 728 bp, Arabidopsis thaliana
gccgtctgcggtaccggtccggaattcccgggtcgacccacgcgtccgacactctttcactgacttacccctacctcaaaatcaccttcttcttcatcgtctcagctcaggaattgctaactacctgtttttgaatttgagatctgtttttgtttctagaagaaaacagcttgttttcaccgtctctgatcctctgatttgatcggaatctaatgggtaaaaccaccgggaacagagattggactcagatctacgctatttacggaatcgaacaatggcagacactcgtcttccttctcttccatgctttcttcttctctcttctctctcttctcttcctcatctacttcgatcagatttgcttcttcctcgattccttcttcctctccggcgccgccagattagccgcgggtttcaccggtgctgtaaccgctctctccgcggtttgtctactcttcgccgcagctaatttcgtttactcagatgttccgcttcagtacgagatggctcaacgcatggttagctccgtcggtgactggtcttgtgtcaaaactgctctcgatctcggttgtggccgtggtatcctcctcaatgccggcgctacacagcttaagaaaaccggtagcttcggtcgggtcggcgggttagaccgctctaaacgcaccacttttttccactcttcccaaccggtttaacttcgaaggtgtgccaagaattttttgaccatg

SEQ ID NO: 123963 - DNA, 605 bp, Arabidopsis thaliana
  unsure (1)..(605): unsure at all n locations
ctctaatacaactcactatagggaaagctggtcacgcctgcaggcaccggtccggaattcccgggtcgacccacgcgtccgcccacgcgtccgcttcatccataataacttcactctctcccccccccccccccccaacatgttcctgtgacgacgatacactctttcactgacttacccctacctcaaaatcaccttcttcttcatcgtctcagctcaggaattgctaactacctgtttttgaatttgagatctgtttttgtttctagaagaaaacagcttgttttcaccgtctctgatcctctgatttgatcggaatctaatgggtaaaaccaccgggaacagagattggactcagatctacgctatttacggaatcgaacaatggcagacactcgtcttccttctcttccatgctttcttcttctctcttctctctcttctcttcctcatctacttcgatcagatttgctttttcctcgattccttcttcctctccggcgccgccagattagcccgcggggtttacccggngcttnaaacccggtntttcccgggggttttnaannttttgggccggngnaaaatttggntttacnaaagat

SEQ ID NO: 123964 - DNA, 556 bp, Arabidopsis thaliana
ccacgcctccgcacctttttgcagagcttcttcttcttcttctccaaaaatcccaactttcttctctttcccggtttcttcgtctccagcattttcgcgtgttgtaacctaatccaaatcttacccattgatggaataacatcatcacgacgcgtcaaaattctgtatcggaggaccgagagatctccatctcctgtccagattcgattcccaccaatcccaatttcgtgaaattcgttagggttttagtttgaatctcatctcatcagatcgagtcgacccaggattaggaagaagaaaagcgatgaagatggcgacgaatggccggtttttcacaatcgggctagtcgcgtcttggtactcatcgaacattggtgtattgttgctgaacaagtacttgcttagcaattacggattcaagtacccgatctttctcaccatgtgtcacatgacggcttgttcgttactcagctacgtcgccattgcttggttgaagatggttccgatgcagacgattcgatccagatttcagttctttaagatcgcagttctaagt

SEQ ID NO: 123965 - DNA, 723 bp, Arabidopsis thaliana
ctaatacgacttacttagggaaagctggtacgcctgcaggtaccggtccggaattcccgggtcgacccacgcgtccggataaaccacaacatcacctgatcaagatttggcattgctttaattaggaagtgtttgacgtgctcgatctgctcctttatgtcttcattgtcatcacaaatttcttcaaacttaaatatcttaaggaccttcaccggacttgataatagagattaacgaactttgtgatgacaacgaagacacagctgatcaaatcaagtaggtcaaccactttctgaagacaatgccgaatcttgaccatttgatgttgtgctacgatacaccaaatcatttgatgataccattagaaattacatttattcacccacgattctgtatttggaaaagatgagacaattaaatatgcaaaattaggttttgaatcttaaagtcattcttaaactcatgaaaggcctcctttagtctagatgacaaaattgtttttggaagaaacaaacggttttgcaaaacttgaaccatgggaaatttaacacctcatttagtaaagtttattattttaggggtcagaagaaaatctaaaattttaaaattatatgtttagtgtctttatatgtttagtgacactaaacatataattttaaaaaattggatttccttctgaaaactaaaattaaaacctttactaaaatatgttctattttacat

SEQ ID NO: 123966 - DNA, 551 bp, Arabidopsis thaliana
  unsure (1)..(551): unsure at all n locations
nnnnnnnnnnnnnnnnnnnnnnnnnnnnnnnnnnnnnnnnnnnnnnnnnnnnngacgactcacgcgtatcgaaacaaaacgttgttgttagagagaaaattccagttcttggattccggcgacctcattggtgaaagatcttcagagattattatatttctcttgaccggtttcgatggcggatggaaacgccagttcgcgttacgtgaaattgaggaaagagcaggctcctgtcgaagaagatatcacacccggtgaactcaatcagcccattgatgttcctcagttgaatgtccgcaagtgccatgaatgtatgcaagttctacctgaaacctatgaacctccttctgatgaaaactggaccaccggcatttttggttgtgctgaagatccagagagctgcaggactggtctcttttgtccgtgtgttctgtttgggcgtaacattgaagctgtgagggaagagattccttggacccaaccatgtgtatgccatgctgtatgtgtcgaaggaggtatggcacttgcagcagtaaccgcactcttcagtg

SEQ ID NO: 123967 - DNA, 952 bp, Arabidopsis thaliana
actatagggtaagctggtacgcctgcaggtaccggtccggaattcccgggtgcgacccacgcgtccgctactttgctttactcaaaaggatgccgatgagaagtgttggatgtgaccaagacttctgtcgcagcaagaagtggtggctttgcactggcaaagatgttgtcggagaaagcagcttgggcattatccatggaccgcaggctcaacatggtctctatcaaccctggtcttgtcgtcggaccatctgtcgcacaacacaacgctaggcccaccatgtcataccttaaaggagctgcacaaatgtatgagaatggtgtgttagcttatgtagacgttaagtttctagcggacgttcatattagagcattcgaggatgtttcagcttgcggtcgatacttctgcttcaaccaaatcgtcaacacagaagaagaagctctcaagctagtggagagtttgtctcctttgattcctatgccaccgaggtatgagaatgagatgcacggaagtgaagtttacgaagaaagattaaggaacaacaaattaagcaagctggtagaagctggctctgcttgttaaagaaagatttcacaatttaaattgaaagagacgagattatacaaaaaaaagttgtaatttgtatattgatcttctcatagatgcatgtgttgcttgtgaactattaaaaagaaagaaaaaaaacacatttcatctcattttataactaatagtatatgagtagttttttttttttggctgggggcacaatatgaatgttttctaatttttgttaaacatattaaatcttggtgggagagttgtcgtatacgaaccttttaaagcgatgtttcctataattgtgcaataataatatggcggccgctatagaggatccaagcttacgtacgcgtgcatgcgacgtcatagctaatctatagtgcagctcaat

SEQ ID NO: 123968 - DNA, 832 bp, Arabidopsis thaliana
  unsure (1)..(832): unsure at all n locations
gaagntntataaatgtgannccaacctctgcnagaaaagttggcatcnctgcaaaatgttgcgganaaancacttgggcattancaatggcccgtggctaacatggncccntcaaccctggncttgccgcggaccatttgncgcacaacacaaccgctaggcccaccatgtcataccttaaaggagctgcacaaatgtatgagaatggtgtgttagcttatgtagacgttaagtttctagcgcacgttcatattagagcattcgaggatgtttcagcttgcggtcgatccttctgcttcacccacaatcgtctacccagaacaagatagctctcaagctagtggagagtttgtctcctttgattcctatgccccctgaggtatgagaatgagatgcccggaagtgaagtttccgaagaaaggttaagcaactacttattaagcaagctggtagaagctggctctgcttgttaaagaaagatttcacaatttatattgaaagaggcgagattatacaaaaaaaagttgtaatttgtatattgatcttctcatagatgcatgttttgattgtcaactattaaacaacaagaaaataaacacgtttcatctcattttataactaatagaatatgagtagttttttttttaaggatgggggcacaatagcaatgtgttctaatttttgttaagcatattaaatcttggtgggagagttgtagtatccgaaccttttaaacacatgtttcctatcgcgtgggcggacgcgtgggtcgacccgggataccggaccggtacctgcaggcgtaccagcgtcccctatagaagtcgtatag

SEQ ID NO: 123969 - DNA, 1117 bp, Arabidopsis thaliana
  unsure (1)..(1117): unsure at all n locations
accacgcgtccgcggacgcgtgggcggacgcgtgggctctcttcctacttctaaccttctttttctccttcatcacacacatatacacacgctttcgtttaaactctctctgtttcaatcattaatcagaaagaagcaacacaaatatggatcacgacaagtctacttcttgttgctgcgttcttgatgcttccacttatgttggtttctggattctcaagaaattgcttagcagaggatactctgttcacgcagcgattcgtagaaacggggagagtgaaattgaggagatgatcagagagatggaaacaacagaagagagattagtggtgtacgatgtagatgtgttggattatcaaagcatacttgtctctctcaagacatgtaacgttgtcttctgttgcttagacagccctgaagggtacgatgagaaggaggtggatttggaagtgagaggagcgatcaatgtggtggaagcgtgtggaagaacagagagtatagagaagattgtgttttcttcttcattaacagcttcaatttggagagacaacattggaactcaaaaggatgttgatgagaagtgttggagtgaccaagacttctgtcgcagcaagaagttgtggcatgcactggcaaagatgttgtcggagaaagcagcttgggcattagccatggaccgtaggctcaacatggtctctatcaaccctggtcttgtcgtcggaccatctgtcgcacaacacaacgctaggcccaccatgtcataccttaaaggagctgcacaaatgtatgagaatggtgtgttagcttatgtagacgttaagtttctagcggacgttcatattagagcattcgaggatgtttcagcttgcggtcgatacttctgcttcaaccaaatccgtcaacacagaagaagaagctctcaagctagtggagagtttgtcccctttgattcctatgccaccgagggatgagaatgagatgcacgggaagtgaagttacgaggaagattaagggcaccaattngcaantggnanantggcctnttgtaaagaaagttcccatttaattgaaggcgggtttcaaaagtggattgaatgccncccnggnnggtntggnt

SEQ ID NO: 123970 - DNA, 534 bp, Arabidopsis thaliana
  unsure (1)..(534): unsure at all n locations
nnnnnnnnnnnnnnnnnnnnnnnnnnnnnnnnnnnnnnnnnnnnnnnnnnnnnnnnnnnnnnnnnnnnnccacgcgtccggcactggcaaagatgttgtcggagaaagcagcttgggcattagccatggaccgtaggctcaacatggtctctatcaaccctggtcttgtcgtcggaccatctgtcgcacaacacaacgctaggcccaccatgtcataccttaaaggtacacacacatagagaaatttcataaacctcacaaaagagtttatgagcatttaatcaaagttccggaattagttgcgaaggttttgtgaatgttttaagaaggcttttttaatagcataactggaatttgtttttaaacaatcatagtgttgaagaacgagacatactaattcatattcatcaattgtgatttgaatttgatgaaatagtgtttttggtaacaggagctgcacaaatgtatgagaatggtgtgttagcttatgtagacgttaagtttctagcggacgttcatattagagcattcgag

SEQ ID NO: 123971 - DNA, 397 bp, Arabidopsis thaliana
cggacgcgtgggttttgagtactcccgtgatcatgatcctgtagcatccaggtttaaacaactttactgcgagtcagataagaaacatattgatgccccaaacaagaataaacaacaagcaagtaaaaatgatggtccagattacattgcagataatgattcaagcggaagttttcatgtgaagattcaaactgatggtggtttttcgtttggttcgtcccaaaaagatgggcagtcaatgcatgccgaatctagtacatcattatggtcaggcaatcacgaaacggtaaccagagatacgaacaccgaacgtttgagtgcttcaacagccatggatgagatggttgcaacttggagacgaataagtagtgagtcatcaagttctcatacttctgtg

SEQ ID NO: 123972 - DNA, 835 bp, Arabidopsis thaliana
  unsure (1)..(835): unsure at all n locations
nnnnnnnnnnnnnnnnnnnnnnnnnnnnnnnnnnnnnnnnnnnnnnnnnnnnnnnnnnnnnnnnnnnnnnnccacgcgtccgcccacgcgtccgcccacgcgtccgaagagaacagccatggcttcttcttcaatctcattctcctgtgcaccttctttggccacctcactcttctccaccacttcttcttccccaaggctgctctcctctagatttctcggaacccgaaacttaaagcttcggatccgacctgccagactaggaccctccaatggttcaagaaccacttgctggttcaagttcggcaagaatggtgtcgatgctgaaaatgccggaatctatggcagccagtctcgagatgatttcgacagagacgacgtcgaacagtatttcaactacatgggtatgcttgcagtagaaggaacctattcaaagatggaagctcttcttaacctaaacattcacccagttgatatcttgttgatgttagccgctacagaaggtgacagacctaagatcgaggagcttctcaaagccggtgctgattattcggtcaaggacgctgatggaagaaccgctatcgacagagccaacagtgaagagatccgtgatttgatccttggctactcgactcaaaaggcttgactccgcttggttttaatacacaggaacaacacaagttatgttcttgagttttgaaatgtttgtgtttgctaggacaaactgtctttcctgtgttccgcggattgagtagattcataaaaatccatcttcttccctttttggccttttcttggccagttttcttggtttcctcaantggggggttgttct

SEQ ID NO: 123973 - DNA, 416 bp, Arabidopsis thaliana
  unsure (1)..(416): unsure at all n locations
cccaagcgtccgactgaatctgttttgctttagttggaagcattaagagaacagccatggcttcttcttcaatctcattctcctgtgcaccttctttggccacctcactcttctccaccacttcttcttccccaaggctgctctcctctagatttctcggaacccgaaacttaaagcttcggatccgacctgccagactaggaccctccaatggttcaagaaccacttgctggttcaagttcggcaagaatggtgtcgatgctgaaaatgccggaatctatggcagccagtctcgagatgatttcgacagagacgacgtcgaacagtatttcaactacatgggtatgcttgcagtagaaggaacctattcanagatggaagctcttcttaacctaaacattcacccagttgatatc

SEQ ID NO: 123974 - DNA, 447 bp, Arabidopsis thaliana
  unsure (1)..(447): unsure at all n locations
gggacacttaaagagagaaacaaatccttcttctaaaatattcttcaatcttcttctcgaagcttctccaaaaatggcgattacttcttctagaaccgccagatcaaacggatctgcttcgctccgatccaaatcaccgtccggtcgattctgtggcgtttactcaaaccgtgtgccgtcatcatctccgtcgtcgtcaggtttcgcttcttccacaagctcaagtttctcgtcaccgtcgacagcgtttttcagcagccacaatcagaacaaccaccaccaacacagatctgcttctccgacgcgtgtgaatctattcacatcagcaccgatgacgcaatcgtttcgttaactcaatcggtaacagatctatatcaccggaatcgtttctatcgctgtttcctccaacaaacctagcaatcatcacaagattccgggnttnggngg

SEQ ID NO: 123975 - DNA, 504 bp, Arabidopsis thaliana
cgccgatgttaaattcaacagatcgagagagaaaaaactctctctccctcctccgttcaccgtcgcgactcggctctacagtacattttgttgagcaatctcgtatttagaggattccaatgtctggcgcagaggataataaatcttcccatgctcagctttcgtcccaaatttttcttgatcttgtggattcggtgatagctgatgtagcatctgagtgtcatcgggtagcacgactaggacttgatcgtgatttggatatagtagaagaagagttgagattgtcagtggaagcgcgtgcgaagatcgctgatcctagcaacaacctcgaaaccaacaccaaatatgttgttgatatatttgggcagactcaccctcctgtagctagtgaagtgttcaattgcatgaactgtgggcgacaaattgttgcacgaacgtttgctcctcatctcgaaaaatgcatgggaaagggaagaaaggctcgtgccaagactaccagaagca

SEQ ID NO: 123976 - DNA, 697 bp, Arabidopsis thaliana
ttaggtgacactatagaaagatcttgacgtcgcatgcacgcgtacgtaagctcggaattcggctcgagcgagaaccagtttttttgttgatcctatcaacaatgacgaaaatagagcttcgagctttggggaacacagggcttaaggttagcgccgttggttttggtgcctctccgctcggaagtgtcttcggtccagtcgccgaagatgatgccgtcgccaccgtgcgcgaggctttccgtctcggtatcaacttcttcgacacctccccgtattatggaggaacactgtctgagaaaatgcttggtaagggactaaaggctttgcaagtccctagaagtgactacattgtggctactaagtgtggtagatataaagaaggttttgatttcagtgctgagagagtaagaaagagtattgacgagagcttggagaggcttcagcttgattatgttgacatacttcattgccatgacattgagttcgggtctcttgatcagattgtgagtgaaacaattcctgctcttcagaaactgaaacaagaggggaagacccggttcattggtatcactggtcttccgttagatattttcacttatgttcttgatcgagtgcctccagggactgtcgatgtgatattgtcatactgtcattacggcgttaatgattcgacgttgctggatttactaccttactt

SEQ ID NO: 123977 - DNA, 640 bp, Arabidopsis thaliana
  unsure (1)..(640): unsure at all n locations
aggtgccgggccggaattcccttgtttacccacgcgtgcccgaaagcaaagactgagagaaccaaggctccgatctaacaatgaggaagaggacgctcgtgtccgttttgttccttttctcgcttctgtttcttcttccagatcaaggaagaaagttacacgcgaatgcagaagagagttccgatgatgttacagatccaccaaaagttgaggagaaaattggtggtcacggtggtttatcgacggattccgatgtagttcatagagagtctgagtcgatgtcaaagaagacgcttcgcagtaacgcggagaagtttgagttccaagctgaggtttctcggcttatggacattattatcaactctctatacagtaacaaggacattttcttaagagagttgatctccaatgcttctgatgccttggacaaaattaggttccttgcactcactgacaaagacgttttgggtgaaggtgacactgctaagcttgagatccaggttaagcttggcaaagccaggagntccttcctttccggacccgggaatttggttactaaggaggcttatnaagaccttgnnccttggaaatttgacgcaacttttttggaatcacagngggttaccnttgcatttggttt

SEQ ID NO: 123978 - DNA, 590 bp, Arabidopsis thaliana
gattggcgacatttttgggaaatctagagactaataatcaatttcgtcaaaagatcaaatcttgctaaattttcttctgctcgtttgattttccgaatcgttggtttcgataagtgaagaaaagatggggaatttgttcgtgaagaaaccacagatcacggaggttgatcgagcgattcgctctctcaaaacccacagacgcaagcttggtcaatatcagcagaagcttgagaaagtaattgaagcggaaaagcaagctgcaagagacttaatccgtgaaaagcgataggacagagctttgttagcattgaggaagaaacgaactcaagaagagttattgaagcaagtggatcaatgggtcatcaatgttgaacaacaatgaacagatattgaacttacgagcaaacaggaggcagtgtttgagagcttaaagcagggtaatagtgctagtaaggccattcaaagcgaattggaccttgatgatgttcaaaaacgaatggatgatactgctgatgctaaagcttagcaagatgagctgaacgctatattgggagagaaactatcagcagaggatgaggaagatatattag

SEQ ID NO: 123979 - DNA, 676 bp, Arabidopsis thaliana
atacgacttacttagggaaagctggtacgcctgcaggtaccggtccggaattcccgggtcgacccacgcgtccgccacctcgttcgtaaaagctccgtcggttactccgccttgaggtccgtttcgtacctccgtcaatctgccgttacctctccacctccgattttctccgccgccgcttcaaccgttcgccagttcacttccgccggctatccttccaacagttttcaattgacgccgccgacgaattggggaatccggatagttccggagaggaaggcgtttgtgattgagcgattcggtaaatacgctacgacgttgccgtcggggattcatttcctcattccgttcgtgggatcgtattgcttatgttcattctctcaaggaagaagctatcccgattccgaatcagactgcgattactaaagacaacgttagtatccacatcgatggtgttctctacgttaagagtgcggatcctaagttagcttcttatggcggttgagagtcctatctatggctggggtacagctggctcagaccacaatgcgtagggagcttggcaagatcactcttgataagacctttgaggaacgagacactctgaacgagaagatggtggacgccatcagtgttgctgcaaaacactgcggtcttcagtgccttcgttatgagt

SEQ ID NO: 123980 - DNA, 341 bp, Arabidopsis thaliana
gaggaactagttccctatatttcttctttcttcacacacatattctccaattcttacataaatatcaaataaaccaaacttgaaacttgttgtgcttaagatgacgaagaaatcactgacaatgtttctttttatacttctgcaatttctgctcgtaaactctctatcttcaaagcattcatcacccaaaccaaaaccagatgcagaaatcactataatgggttttgtttactgcggatgtttgctccaaaaacagtttctctaaaacacagttacttcatgtccggtgtgggaagtgaggatagtctgccgattcaaagcagcttcgtcaacaacggcag

SEQ ID NO: 123981 - DNA, 747 bp, Arabidopsis thaliana
ccgggctcttatctgcgccatctgtttctccaattaataatctccttaaatccggatttgttattaattctaatcttttccaattgatccactttcctcctctgagtttttaagactaatagagagatatatagagagagattgcttctggttttgccttccccctttgtttgacctctcttttctttcttcccccctttgtgtttcccgcattttctcgggaaaatctaaaggaacaaaaacattaaaagtttgtgattttctgattatttctttatttaatcgagacccattgtttctcgcctgatttggcgcaaacccttttggattctggtgaaaaaggttgggatcagaggaagaatgatgacgagtatggaagggatgatggagatgggtgtattggatgatattataaggagattgttggaaggtaaaggaggtaaacaggttcagctttcggaggtcgagatccgtcaactttgcgttaacgccagacaaatcttcctttctcagcctaatcttctcgagcttcatgcccccattcgcatctgcggtgatatcccatggacagtacccaagatcttctgaggctattcgaatacggaggctatcctccttcaagcgaacctatctctttcctcggcgattacgttgataggggcaagcaaagtcttggaacattatgtttacttttggcttacaaaattccggtcccttccaagtaatttttcttgagtggtatccatt

SEQ ID NO: 123982 - DNA, 458 bp, Arabidopsis thaliana
attttctataaagagataacaaacttcagaaacttctagggccatttttattccggtgcatcctaatcatgatatctgttgtaatcatcactgagttacttttggagtacacgacggctcttgctaaactcaccgccggggttcttccgagacggcaaggcgacagaaatgttatacgtattggcggtttctctctgccttgtcctcctagatcctcacctgttccagatttttcttctcatcttggcgatttctgaactctgcgctacgccttaatctcaattttggtttttcaccggagattatgactgccaagacttttttcccggcgtctgatctctccgtctgtagaataccttttttgtattttcttaaattttttgttttgttcctgaattttgaatggctcagagttgtaaaagatgtatcgaattataatagagactatgatttaactc

SEQ ID NO: 123983 - DNA, 652 bp, Arabidopsis thaliana
  unsure (1)..(652): unsure at all n locations
tattctactcactatagggaaagctggtacgcctgcaggtaccggtccggaattcccgggtcgacccacgcgttcgcggacgcgtgggcggacgcgtgggcaatcgctctcatccttcgcttcttcgaattccaaaggtagaacagtagaagaaatcatggatccagctgaaatgagatatttggaagaagaggatggtccgttgatgaagacaatcaaaggtagtatcactggttttggtgctgggactatttacggaaccattttagccacatggaaagatgttccaagagtggagagaaatgtggctcttccaggacttattagaacactgaagatgatgggaacccatgggctgacttttgctgctataggaggtgtttacatcggtgttgaacagctggttcagaattttagatccaagagagatttttacaatggtgctattggtggttttgtcgctggagcttctgtgcttggctatagagcaaggagcatcccgacagcgatagctgcaggtgcaacactagctgttacctctgctttgattgtgtctggaggcagccncaagggtggcaatgcaggnatctttccttcaccntcgggaangntaagtgtccnnatcntttggnctngtaaaagggnatcngga

SEQ ID NO: 123984 - DNA, 563 bp, Arabidopsis thaliana
  unsure (1)..(563): unsure at all n locations
gatgaacagctggttcagaattttagatccaagagagatttttacaatggtgctattggtggttttgtcgctggagcttctgtgcttggctatagagcaaggagcatcccgacagcgatagctgcaggtgcaacactagctgttacctctgctttgattgattctggaggtcagaccacaagagtagacaatggcagagaatactatccttacaccgtcgagaaaagagctgaagctgattcctgatttctcttttggtcactgagattaataagatgtgcattcgctgatccggggatcttgagataatctcttttgtttattttatctggatatgtgatatcatgatactctttgctcttgtttcttcttgttttcttgagagcgactttctcacatcttttgtctgaatgtttcctgcaataaaaattcaactttgtctgcagatgtaaacaaatgttttagctttcagtaaaaaaaaaaaaaaagnnnnnnnnnnnnnnnnnnnnnnnnnnnnnnnnnnnnnnnnnnnnnnnnnnnnnnnnnnnnnnnnnnnnnnnnnn

SEQ ID NO: 123985 - DNA, 814 bp, Arabidopsis thaliana
  unsure (1)..(814): unsure at all n locations
cttcgaattccaaaggtagaacagtagaagaaatcatggatccagctgaaatnagatatttggaagaagaggatggtccgttgatgaagacaatcaaaggtagtatcactggttttggtgctgggactatttacggaaccattttagccacatggaaagatgttccaagagtggagagaaatgtggctcttccaggacttattagaacactgaagatgatgggaacccatgggctgactttttgctgctataggaggggtttacatccgggtttgaacagcttggttcagaatttttaggtcccaggggagggtttttccaatgggggctatttgggggggttttctccccttggagctttcttgtgcctttggcttataaggggcaagggngcatnccgnccancgattactccaaggtgcaacaactagctgttacttctgctttgattgattctggaggtcagacgacaagagtagacaatggcgagagaagactatccttacaccgtcgagaaaagagctgaagctgattcctgatttctcttttggtcactgagattaataagatgtgcattcgctgatccggggatcttgagataatctcttttgtttattttatctggatatgtgatatcatgatactctttgctcttgtttcttcttgttttcttgagagcgactttctcacatcttttgtctgaatgtttcctgcaataaaaattcaactttgtctgccnnnaaaaaaaaaatatataaaaataaaaaataaataaatattatattttatatataataatatattttatatatct

SEQ ID NO: 123986 - DNA, 855 bp, Arabidopsis thaliana
  unsure (1)..(855): unsure at all n locations
atgatactccagctctctacgactcactatatggaaagctggtcacgcctgcaggtaccggtccggaattcccgggtcgacccacgcgtgcgcccacgcgtccgatagtttctctctctttctctaaactttcacctaagatcgatcaatggccaagggaagaggcagtgcatcatggtcggctcgagccatagtgactctcatggctgtgtcagtgttgttgcttcaagctgactacgttcaagctgcaacgtacacggtcggtgactctggtatctggacctttaacgctgtgggttggcctaaaggcaaacactttagagccggcgacgttcttgtgtttaactataatccgaggatgcacaacgtagtgaaggtagatagcggaagttacaacaactgcaaaacaccgacaggggcaaaaccttacacttcaggcaaagatcgtataactttgtctaaaggacaaaactttttcatctgcaattttccaaaccattgcgaaagcgatatgaaaatcgcagtcaccgcggtttgatcgaacatctagcaatgaaaatagtttgataacttgttatgttcttaagaaactattgaagtatgcaataaaactcgtatcaaaactttttttgtttttcttatgttttctgaaaagtatccggtgcggtctctctagagaaccagagtcggttttgtagtttggaagattcaaacggacctcttattatatttattataatatagttataaaaatatatttcaaaaaaccaaaaaaagnnnnnnnnnnnnnnnnnnnnnnnnnnnnnnnnnnnnnnnnnnnnnnnnnnnnnnnnnnnnnnnnnnnnnnnnnnncaa

SEQ ID NO: 123987 - DNA, 529 bp, Arabidopsis thaliana
gttctatatacaaccacattatagggaagagctggtccgccggcaggtcccggcccggatttccgggttcaacccacgcgtccgcccacgcgtccgcggttagagctcgctgttggaacagttgtttcgttcattggatacacattcactctaacattggcgtgtccaagggcttgtaaacacgtttggagatctacgtggagacttttgctgctattgacaggatcaattccattttaaacgcggtggacatagatgaggctcttgcctacgggttagaaagagatatacatacaaagaaagtccaagatgaaaaccttaaattgttcttgtctgctggcccaaatgtgaatatccgtcacctcgataagtactacatgtcaaatctgaaatcaactaacaatctacgtaccctaacatgggctggagatgtctgtcttgatgatgtgcattgtgcttatcctctacgacccgacgtgaaagttcttgatgggctgagtttgacgttgaattctggtactgtaactgc

SEQ ID NO: 123988 - DNA, 684 bp, Arabidopsis thaliana
cccacgcgtccgtcaatgaaaacctaaagcattgcttttgccttcatggtatcagagctcatggaacatagatccatggaactctactctgttccttctctcaatatttcaaattgtgtcaccgtcactcttactgccaagaactatattctctggaaatctcagttcgaatcttttcttgatggtcaagggcttctgggttttgtcacaggctcgattcctgcaccaagccaaaccagcgttgtttcagacattgatgggtcaacatcggcttcacccaatcctgagtactacacctggttcaagacagatcgagttgtcaaatcctggctccttggttctttcttagaagatattctcagtgttgtggtcaactgcaacacttctcatgaggtatggatctctgtagcaaaccactttaatagggtttcctcctctaggttatttgagctgcaaagacgcctccaaaatgttagcaaacgtgataaatctatggatgaatatcttaaggaccttaagactatttgtgaccaactagcctctgtaggaagtcctgtaacagaaaagatgaagatttttgctgctttgaatgggttagggcgagagtatgagcctatcaaaaccactattgaaaactccatggatgctctgcctggtcctagtctagaggatgttattcctaag

SEQ ID NO: 123989 - DNA, 419 bp, Arabidopsis thaliana
cccacgcgtccgcacaagtgaagaaaacagagagagaaagacagagagatctctctctccttcacacacacagatacacatggccatcgcgagcgggtcatgggtagccactgtgaaccaccatgctaatccccacagcttcacttctccgaccaaacccattttctttctttctcaaaagcctcacaatttccatgtctgctcgtctcgatgctctatggttcttgaggaagatgaaaagaagtcaccgagtcctaaagaagacaagtggccattttttgaacctggtccgaatgaccttaaccgggtcttatccaggtttctccgagacccggaaactcggaaactttcttctgaattctacgagaaagctaaggagaactctgagttgagaacgaccaagcatctgataagttact

SEQ ID NO: 123990 - DNA, 462 bp, Arabidopsis thaliana
gaggattaaacagattcgctcagttctcaaaacgatgaaagtagcggagaagattgttttcctctggaatgattccgatggatttgctgcaaccatttctgatactttaaaccctagccctagttcccctcttcgcaaactagaagaacagatccagcttccgttggataagtatggcgttgaaggtgtggaaaccggcgggagtatcgttcatttcgtagatgaaaatgaagtttatcaggtctcgatttttcttcttcgaagttatgagcctccagtactagtgtgtgctatgaatgaactgctggacctaattacaaggggatcgtcaactctacccacaatcatagctcctttctttgtggcggcatctaagctcaagttcaataacagaatccctggaagcaaataacagaaaagctagtcttcattacgttcaagttgctacagaaacagagacca

SEQ ID NO: 123991 - DNA, 621 bp, Arabidopsis thaliana
ccggtgcttcaatggcggttcttcacattatcttcactgcgtaattgaaaaagttgttctctcttcctcttaatttcgagttgtgttcttaaaaaactccagagctgattcgattctcgagaagaaactaagccgacaataaagttcagatctggaaaaaagcgagctccagattacaaaaagaaacagctcgttttttttcactttcaaaaaaatggaagctttgaggatttatctatggagtctctgtctctctctgtgtttgattatctatggagcaaactcagatccattagaagacaaacgcgcattgcttgagtttcttaccattatgcaaccaactcgttcactcaactggaacgagacttctcaagtctgcaacatctggaccggagttacttgtaatcaagacggatctcgaatcatagccgttagattaccaggcgttggactcaatggtcagattcctccaaacactataagcagactctcagctctcagagttcttagtctcagatccaatctaatctccggcgagtttcctaaagattttgttgagttgaaagatttggcctttctttatcttcaggataacaacttgtctggtcctttgccattgga

SEQ ID NO: 123992 - DNA, 978 bp, Arabidopsis thaliana
  unsure (1)..(978): unsure at all n locations
gggaaggttgtccccctgccagtacccggcccgaatttccgggttgacccaacccttccgggccacttccagcttctgcaacgttgtttttcgcttcaatggttggcatccaagtttttgtgacgggcgggataggtggtgtccatagacatgccaaccattcgatggacatatcatctgatcttactgcacttgggaggactccaatagcagtgatatcagcaggcgttaaatcaatacttgatattccaaagactcttgaatatttggaaactcaagaagtgtatgttgctgcatacaagagcgatgagtttccagcatttttcacagaaaaaagtggctgtaaggcaccttcccgtgtaaatagccctgaagactgtgctagagtaatagatgcaaacatgaagctaaaccgtcaggcggggattctatttgccattccaattccgaaacaccattcagccgctggaaatcttatcgaatcagcaacacagcgtgctcttacagaagcaagggaacaaaacgttactggaaatgcagaaactccattcttacttgcacgggtaaatgagttaaccggaggcacatcacttgcagcaaacattgcgcttgtgaaaaacaatgcccttatcggttctcagattgcagtagccctttctcagctgatgtgagcttccttatcaatcccagactcaagctcaagcgcaagttattcaggttcatgattcaggacagatcaaagatgttttggattggtagttatcaatttatattggttatcaaagatttttctttagctaaagaaactcgttaacttattatcacatgttatatattagtcattagatttatatcatgtggtacccttaaagattaaactattgaaattttaatttatatcacaaaaaaaaaaaanaaaggacggccgctctagaggatccaagcttacgtacgcgtgcatgcgacgtcatagctctc

SEQ ID NO: 123993 - DNA, 654 bp, Arabidopsis thaliana
ctctcgcctctcggtgtccttgtatacagtacttcagttgtccgatctctttcagattctgttgccaaacttcatataaacttagtgagcggaactggatttggggagaatggcttcttctttagctcaatctagaatcgtcgagtctccagaatcatctttcacctcttgaagcaaacaacaagctcaggagtctggtcaagatttctccccaagtatctgaagccttgtctaatggacgtgctgttgtcgctcttgagtcaaccattatctcccatgggatgccttaccctcaaaatctgcaaacagcaaaagaggtggagtcaattgtgagagaaaatggagcaatccctgcaacaattgctatccttaatggagtaccttgcataggtctgagcgaggaagaactagaacgtcttgcatctctcggaaaaagtgtccaaaagacagcgggaagggacatagcaaatgttgtggctacaagaggaaacggtgcaactacagtctctgcaacgttgtttttcgcttcaatggttggcatccaagtttttgtgacgggcggataggtggtgtccatagacatgccaaccattcgatggacatatcatctgatcttactgcacttgggaggactccaatagcagtgatatcagc

SEQ ID NO: 123994 - DNA, 607 bp, Arabidopsis thaliana
ctatacgacctactatgagggagcgctggtacgcctgcaggtaccggtccggaatttccgggtcgacccacgcgtccgcgccgcaacaatatcttttgctttctctctcattcttcaccagtaacaagcccatctctcgattcttcactctcaaggaaggagacgttttgaaaatcagaaatggtgaagatatgctgcataggagctggttatgtgggtggtccaaccatggcggtgatggctcttaagtgtcctgagattgaagtagtcgtcggtggatatctctgaaccaaggatcaatgcttggaacagtgataggcttcctatttacgagccgggattggaagatgtggtgaaacaatgcagagggaaaaacctcttctttagcacagacgtggagaaacatgtatttgagagtgatattgtatttgtctcacgtaacaccccaaccaaaacacaaggtctgggtgccggcaaggctgctgatcctactactgggagaaggcatctcggagatccctggtggctcaatctagccaagcgtgaggaaaaaacacggttcccggaagaacggaataggctatgaaagatcccggccccaccgcag

SEQ ID NO: 123995 - DNA, 1106 bp, Arabidopsis thaliana
  unsure (1)..(1106): unsure at all n locations
nnnnnnnnnnnnnnnnnnnnnnnnnnnnnnnnnnnnnnnnacgcgcacnnnnnnnnnnnnnnnnnnnnggctcgagctcgagccgaatcggctcgagcggctcgagcggctcgagcgccacgcgtccgcctttttacctgttcaacgaaactcctgagctcagcttcactttgctcgacgttatcttcttcgttcagcgacaatggcgtcgattacgaacctcgcctcttctctctcttcactctcgttctcctcccaagtttctcaaagacctaacaccatttccttcccccgcgcgaattcagtattcgcattaccggcgaaatccgcacgccgcgcttctctatctatcaccgccacggtatctgctccaccggaggaggaggagatagttgaactgaagaaatacgtcaaatcgaggcttcccggaggatttgctgctcagaagattattggcactggacgacgtaagtgcgcaatcgctagagttgttcttcaggaaggtactgggaaggttatcatcaactatcgtgatgccaaggagtaccttcagggaaatccattgtggcttcagtatgttaaagtaccattggtgactttaggatatgagaatagctacgacatatttgtgaaagcccatggaggcggtctctcaggtcaagctcaagcaattaccttgggagtcgcacgtgcactcctgaaggtaagtgcagaccacagatcgcctttgaagaaggaaggtttgctcactagagatgcgagagtggttgaaagaaagaaggccgggctcaagaaggcgcgtaaagccccacaattctccaagcgttaagagttttacatatcattggatcaactcttcaagtagactcctctgcctccattttttttaaaaacttttcttgtctattatcggtcttttgtttcatgttaatgtttatgtgtagacgaactaatacaatctctgttttgtttgaatggaacgcaaagttgatatgcttttgtaacaaatgaaagtatgaattgtggtccaaaaaaaaaaaaaaaaaaaaaaaaaagggcggccgctctagaggatcctagcttacgtacgcgtgcatgcgacgtca

SEQ ID NO: 123996 - DNA, 807 bp, Arabidopsis thaliana
  unsure (1)..(807): unsure at all n locations
gacctctaattcttctcactaaaaatatcaaaagctttcacattacaatatctccctctctctacacaaagctctctatgccacaagtcgatatagaagcctttgtttcttcagtatgcatcggtggctccgaccaccgcaagatcgtatgcgaaaccctcgccgacgactcaacgatcccaccttattacaacaactccgccgttagtccgagtgatttcccaccggaatcttatttcttgtcaaacgatgctcagctagagtggctcagcgacaacgccttctttgatcgtaaagactcacaaaaaggaaactctgggattctcaattctaatcccaactcgaatccaagctcgcaacggttcttactaaaatccaaagcgtcgatcatcggtttgcctaaaccgcagaaaacgtgtttcaacgaggcaaagcaacggagacacgcgggcaagaaccgggtcatcttgaaacgggtcgggtcaaggataaagacggatatttcgcttctggaaccttcttctcctaaagtctcttgcatcggtagagtgagatccagaagagaacgcagccgccgtatgcaccgtcaaaaatcaagtcgggtcgaaccggtaaaccgggttaagaaacccgggtttatggcgagtttcagagctattttcaggatcaaaggcggctgcaaagacgtgtcagcgcgtgagactcacacgtcgacgagaaacacacacgacatcaggagccgacttcctgcggaagcctgtggagaagtcaggtttcgacggcgganaaccggtgggaccccggttt

SEQ ID NO: 123997 - DNA, 467 bp, Arabidopsis thaliana
  unsure (1)..(467): unsure at all n locations
aaggattcgaagctggttgtttcccaatctgcataagaaatatcgaaacacttccacacaaaatccacgcgctctctcacgctcactcactcgcataacacttgttccttcttcgtctcaatttcaaaaaacgacgatctcttcgatgctttctcttccttcctccttcatttccttctgactctgctcttcttcttcgtcttggatcttcgaatttgtctttgtgatttgagtgttatagaataaagatctgtttggagtggatccattcaagtaattgaagaactcaacgcagaagatggcttcaatatcgcattcatcactagctttaggngggagcttcttctgctttctgcttcaanattacttncggagttcggggcaaatnggggttaaatggggtncccttgaaaaccttngggaggggcnngtgtttnntacccncaagggggnngnctttngggggt

SEQ ID NO: 123998 - DNA, 822 bp, Arabidopsis thaliana
  unsure (1)..(822): unsure at all n locations
atgatacttccgcctctnnnnnnnnnnnnnnnnnnnnnnnngaatgttgagacgaattgaaaaggaaccagaacaactactaccacgcgtccgcgatttcgccgggaacggagaagaaaaccctagatatggcggagaagcttgcgccagagaagagacacgatttcattcacaatggtcaaaaggtatttgagtgggatcaaaccctggaagaagtgaacatgtacataactttgccgccaaatgttcatccaaagtcattccactgcaaaatccagtcgaaacatatcgaagttggcatcaaaggcaaccctccctatctcaatcacgatcttagtgctcctgtgaagactgattgctcgttctggactctagaggatgatataatgcacattaccctgcagaagagggagaaagggcaaacatgggcatcaccgattctgggacagggtcagttagatccttacgccactgatcttgagcagaagcggctcatgctccagaggtttcaagaagagaacccgggattcgacttctcgcaagctcagttctcgggtaattgtccagatccaaggagcttcatgggcggtattcgttctgactaaataaataatagtcccactcttgttgctataatagtatgtccattataacaaactcaaaagtcaccatgacttaaacaaaatgtctcatgtctcataaataaaccccctgctttttggttttaataaaaaaaaaaaaaaaaggcggccggttttaaagattccaggctaacgtaggcgtgcatgcgacgtcatagtctttctatagttcacctaaatc

SEQ ID NO: 123999 - DNA, 802 bp, Arabidopsis thaliana
  unsure (1)..(802): unsure at all n locations
ccnnnnnnnnnnnnnnnnnnnnnnnnnnnnnttagcaccgaccttccgggtcgtaccactcttaaccattaacaatgtcgtctccggcgactactatcaccttctttttcttcttcactctctcatccttcttctacatcacttcttcactccagaacaacaacaacaacaacaaacacacagcaaccgttaactccttaaatatcccctccgccgcggcggagattacgctagtaaacccaaagcttccgccgcggagtctctccctcacatcctccaaaaaattcgaaggatcttcaaatctagtccacctccgttaccacatgggaccagtcctctcatcttctccgatcaacatctacgttatctggtacggacaatggtcacgcccacacaaatccctaatcagagatttcctcaattctatctccgacgctaaagcaccttctccctccgtctccgaatggtggcgcaccgcttctctctacacagatcaaaccggatccaacgtctctagatcccggttaatcgccggagaatactccgattctaaatactcccacgggcaacaccttacttcgtcttacgattcagggaagtcattcgccttccgccggccagatccggttcccctttccgggtgggatcattaaaaaacgggaatgtattctagtttcttgaccgttcacaaccgacgttccacgaatggccaaggaatttttttggcccgcggcccaggttttggtagggaattttccaacctaatttttcaacctttttccccgggtccggaatggggttt

SEQ ID NO: 124000 - DNA, 658 bp, Arabidopsis thaliana
  unsure (1)..(658): unsure at all n locations
attggnaccaaggttcttcacccaaccntctgtctcccctaatgttaaggatgaccttgcttatccgctcaagccgggattttccggtcccagtccaaatcgatcttgaagttcagtgatgtggatcgaggtgataaagaggccgaaccgagaccgaagtacgggctagcggcaggggttttcacgaagaatctggacacggcaaacagggtttcaagggctttgaaagctggtaccgtatgggttaactgcttcgacgtatttgatgcagccataccatttggtggttacaagatgagtgggaatgggagagagaaaggcatatacagtctcaataattacttgcagatcaaggcagtcgtcactgctctaaataagcctgcctggatctgatctctggagtgtggtttcagcatcataaatgctcaaacaaaagaaatagactctataaagttacaatagtaataattaaggtcatggtttgtaatttgagtaacggattgtgatacttctaataaatttttcattgttgtttattcctcacagagctgttgtccccctgccatttctcacaaaaaaaaaaaaaaaaaaaaagggcagccgctctagaggatccaagcttacgtacgcgtgcatgcgacgtcntagctcttctata

SEQ ID NO: 124001 - DNA, 1799 bp, Arabidopsis thaliana
  unsure (1)..(1799): unsure at all n locations
ttcgtccgcccacgcgtccggtacggcaacacaaaccaagagagtgtaagttaagcgacatgtgttagagatatccggagatctcaaccgttggattctttctccttcaaatcaaattataaatcccatcaaacagagagagagagagaagaggaggagaattcgaagaataaaagataagaactttgacgttttgaagcttaaagcttgaaacttgtttcatccatggcggctcgtagagtgtcttctcttttatctcgatctttttcagcttcctctcccttactgtttcgttctcaagggagaaattgttacaatggagggatcttaaggagatttggaacctcttctgctgctgctgaggaaatcataaacccatctgttcaagtttctcacacacagctcctcatcaatgggaactttgttgactctgcttctggtaagacgtttccgactcttgatccgaggacaggcgaagtcattgctcatgtagctgaaggcgatgctgaagatatcaatcgagctgtgaaagctgcaaggacggcctttgatgaaggaccttggcctaaaatgagtgcttatgaaaggtcaagagttttgttgaggtttgcagatttggttgagaaacacagcgaagagctcgcgtctctagagacatgggacaatggcaagccttaccaacaatccttgaccgcagagattcccatgtttgcaagattgttccgttactatgctggatgggcggataagattcatggactaacaattccagctgatggaaactatcaagttcacacattacatgaaccgataggtgtagctggacagatcataccgtggaattttccacttttgatgtttgcttggaaagttggtcctgctcttgcttgtggtaacaccattgtcctcaaaaccgctgagcaaacacctctcacggctttctatgctggaaagcttttccttgaagcgggtcttcctcctggcgttctgaatattggttcgggattcggtgcaacagcaggtgctgccctcgcgagtcatatggatgtagacaagcttgcttttacaggatcgactgatacggggaaagttatacttggattggctgctaacagcaatcttaagcccgtaactctggaacttggagggaaatcaccgttcatcgtattcgaagatgctgatattgataaagctgtagagcttgcacactttgccctcttcttcaaccaggggcaatgttgctgcgcggggtctcggacatttgttcatgagaaagtgtatgatgagtttgttgagaaatcaaaggcacgcgcattgaaacgtgttgttggtgatcctttcaggaaaggcattgaacagggtcctcagatcgatttgaagcaatttgagaaagtgatgaagtacataaagtcagggtatccgaagcaatgctactcttgaatgtggtggtgatcagattggagacaaaggttacttcatccaacctactgtcttctctaatgttaaggatgacatgcttatcgctcaagacgagattttcggtccagtccaatcgatcttgaagttcagtgatgtggatgaggtgataaagagggcgaacgagacgaagtacgggctagcggcaggggntttcacgaagaatctggacacggcaaacaggggttcaanggcntttaaagctggtaccgtatggggtaactgcttcgacgnatttatgcancaaccatttggtggttcaaaatgantgggattgggnaanaagccttcagcccaaatncctgcgtcagnngngcnccgtc

SEQ ID NO: 124002 - DNA, 447 bp, Arabidopsis thaliana
ggcagccgaaccctagctttcataaaattttcattcatcatcgttcttgcttcttgctaaaggccttgccttgtgcttcctcgtcctatctctcttacctccgtaatttgttcgtaagagaagtatcgtgatgggtactgagagaaagaggaaaattagtctgttcgatgttatggacgatccgtctgctccggcgaagaacgccaaaaccagtggtcttcccgacggcggaatcaacagtctgatcaataaatggaacgggaagccttattcacagagatattatgacattctggagaaacggaggactctacctgtctggctgcagaaagaggagtttctcaaaacgttgaacaacaatcaaaccctaattctggttggtgaaaccggtagtggtaaaactactcagattccacagtttgtgatagatgctgtggatgctgaaac

SEQ ID NO: 124003 - DNA, 766 bp, Arabidopsis thaliana
  unsure (1)..(766): unsure at all n locations
nnnnnnnnnnnnnnnnnnnnnnnnnnnnnnnnnnnnnnnnnnnnnnnnnnnnnnnnnnnnnnnnnnnnnnnnnnnccacgcgtccgcgtcgttgtctgggaatcggtgacttttgaatctttgcgactctcttgtagtgataaattgatcgttatctactttgatactctccggtcgtttttctccggtgctggagatccgattccttatcttttctgtcttggctcgagatccgagccaagcagtaaagaagacgactttgtttcacgatttggaatttgattcctgcgatcacagatggcatcgggtgagggaattttgacggatggacagtggaaaaagcttgaaatagcaactcataattctggaagtttgtcatcatcgcctaaatctcatactctctttgctgatctgaacattaagtctcccactggtggcaaaggaccagttgctgggattcctaataggcatgtgcgacgtactcactcagggaagcatattcgtgttaagaaggagggtgctggtggcaaagggacttgggggaaagcttcttgacactggatgatggtgacccctggaattgataagaatgatcccaattacgaaatnggagaggacncatatganggcttgttgatccccgggntcaaacccgtggaaggttccaaaaagcngnagttcccncattgggaaantttncccggggggtnnaaanggggggnttccccnggganttggtcaagggaanccccttntcccaaggggc

SEQ ID NO: 124004 - DNA, 1079 bp, Arabidopsis thaliana
  unsure (1)..(1079): unsure at all n locations
cgccnnnnnnnnnnnnnnnnnnnnnnnnnnnnnnnnnnnnnnnnnnnnnnnnnnnnnnnnnnnnnnnnnnnnnccacgcgtccgattgatctcgctaaacagatgcttcaggtgcaaccaaactcatacgcactagtggtgagcacagagaacataaccctaaactggtacttaggcaacgaccgatcaatgcttctatctaactgtatcttccgtatgggcggagccgcggtacttctctcgaaccgctcctctgatcgcagccgttcaaaatatcagctcatccataccgtccgtacccacaaaggagctgatgacaacgcatttggctgtgtttaccaacgagaagacaacaacgcagaagaaaccggcaaaatcggagtgtccctctctaaaaacctaatggcgatagctggagaagctctcaagacaaacatcacaactctcggaccactagttctaccaatgtccgaacaacttctctttttcgcgactcttgtggcccgaaaagtcttcaaagtcaagaaaataaagccttacattcctgatttcaagctagctttcgagcatttctgtatccacgcgggaggtagagccgtgctcgacgagattgagaagaacttggatttatccgaatggcacatggagccatcgaggatgacgttgaaccggtttggtaacacttcgagtagctcactttggtatgagcttgcgtatagtgaagctaaaggaaggattaagagaggagataggacttggcagattgcctttggatcgggttttaagtgtaatagtgcagtttggaaagctttgagaacgattgatccaatggacgagaagactaatccatggattgatgagattgatgactttcctgttcaagttcctaggatcactcccattacatcgtcgtagtgttttaaattcttttggagaactaatttgttatgttttattaaatgtaataacttacgtgatttgatatttttttattatcttaatatatatggttgcctttttnnnnnccaccttaccnccaggnngcagccgctctagaggatccnagcttacgtacgcgt

SEQ ID NO: 124005 - DNA, 462 bp, Arabidopsis thaliana
atacgactcactttagggaaagctcgtacgcctgcaggttcccgtacactataaccggagagagcgccgattccgtcgtcagaagaatcctcgtaaacaatcatgggtaaggtacacggttccttggctcgtgccggtaaggtgagaggtcagacaccgaaagtggcaaagcaggataagaagaagaagccacgtggccgtgctcacaaaaggttgcaacacaatcgccgtttcgtaaccgccgttgttggatttggcaagaagagaggacccaactcttctgagaagtagatgatgatgatgatcacacttcatgaagcttgaagttttactttctcgttagtatgaattctgcaatatccgctttgttatcgatatttgcttatttggtttttctatagacgatgtaattctcttgttcatttctccatcgaattgacttttgaccatacttttttcgac

SEQ ID NO: 124006 - DNA, 908 bp, Arabidopsis thaliana
  unsure (1)..(908): unsure at all n locations
nnnnnnnnnnnnnnnnnnnnnnnnnnnnnnnnnnnnnnnnnnnnnnnnnnnnnnnnnnnnnnnnnnnnnnnnnnnccacgcgtccgtacggctgcgagaaacgacaggggactgtggagaaacactttagcacggtgcgacaagatggcgagctcagtgacgctgcttctatggagtcttcttcttctcggtacactaagcgctattcaggccaaaaagtctaaggaaaacttaaaggagatcacacacaaggtttattttgatgttgaaattgatgggaaagcagctggtcgtattgtcatgggtctatttggcaagacagtccccaaaactgtagagaatttccgagctttatgcactggggagaaaggaataggtaagaatgggaaggcgctccattacaaggggagttcatttcataggatcataccaagctttatgctccaaggaggcgattttacacatggaaatggaatgggaggagaatctatctatggtgagaagtttgctgatgagaacttcaaactcaagcatactggtccagggttcttatcaatggcaaatgccggtcaagataccaacggatcacagtttttcatcacaactctacaaacctagctggctccatctgatcatccattgatgtgagctctagtgtgcttgatgccccttgtgttaaaacgagtgtcttggttactttatgaaagattctaccggctttatttctttcgtctgctttctagctcgagctatgtctgactttatacacaaatgtctttcagtagcaaaaattctgtacttatgccnnnnnnnnnnnnnnnnnnnnnnnnnnnnnnnnnnnnnnnnnnnnnnnnnnnnnnnnnnnnnnnnnnnnnnnnnnnnnnnnnnnnnnnnnnnnnnnnnnnnnn

SEQ ID NO: 124007 - DNA, 383 bp, Arabidopsis thaliana
  unsure (1)..(383): unsure at all n locations
ccatttggtnatccgggaaggtagtgncagtattgnatntgntgtaccaaagtcgaagctgaaggaatccagagtggaactcctaagagtaaagtggtgattgtagacagtggtgagcttcccctgtaactcaacaactctagttttctccatctgatcatccattgatgtgagctctagtgtgcttgatgacttttgtgttaaaacgagtgtcttggtttctttatgaaagattctaccggctttatttctttcgtctgctttctagctcgagctatgtctgactttatacacaaatgtctttcagtagcaaaaattctgcacttatgccgttttgcattgtcgacatttgttgtatttatagaagttacacgataatatat

SEQ ID NO: 124008 - DNA, 389 bp, Arabidopsis thaliana
gcgtccgcagacgagtgggcaaattagggttttctgggaattaggttgattaaattatgcgaggcggtggtaggagaaggtcaaacggtggtggtagttctggcaaaaacaaggctaaatcctccaggacagagcacgagaaccaatcataattccgcggcggggtcttcctccggtggtcgtcaccgacgtcagaataatactactttgtttgttgaaggaggtattctctccgactaccgaaaagatcctaacttttcgacgccatctcgtggaggaagctcttcgggaaagggattgagatctagaagcatagagcgtgtaaaagcttctgcttccacgagtggtccaaggaaatgcagtggtaatacttatgtgtatcaatatcc

SEQ ID NO: 124009 - DNA, 953 bp, Arabidopsis thaliana
  unsure (1)..(953): unsure at all n locations
nnnnnnnnnnnnnnnnnnnnnnnnnnnnnnnnnnnnnnnnnnnnnnnnnnngggctttccttcattggtcagatcagacgacgttttacatcttcttcttcttcctcttcgatattcgtcagtgtgtgtattttggggaaaactttgtgagcaaagagcgagaaaatgagcggagccggtaagaaaatcgcggatgtggctttcaaagcttcaaggactatcgattgggatggtatggctaaggtccttgtcacagatgaggctcgtagagagttctctaaccttcgtcgtgctttcgatgaggttaacacacagctccagaccaaatttagtcaggaacctgaacctatagattgggattactataggaagggtattggagctggcattgttgacaagtacaaggaagcttatgacagcattgagattccaaagtacgttgacaaagttactcctgaatacaagccaaagtttgatgctttgttggtggaactgaaagaagcagaacagaaatcgctcaaggagtctgaacggttggagaaagaaattgctgatgtccaagagatcagcaaaaagctcagcaccatgactgcagatgagtactttgagaagcacccggaactcaaaaagaagtttgatgacgaaatccgtaatgacaactggggatactgatcatgtttctccatctccggcttggaaagaaaactctctttctctttctctgttctcttactgtgattttgtgagccaatcataacaataataagtacaccattcacttaagcagtgttgagatcttcattccaaggaagataaacgcatttggttttagttatcaatttcacaaattgtttcgtttcgttcttcagtgaataataagagtcaaaaaaattatcattgtcaaggaaagaagaagactcttgactcgtcaaaaaaaaaaaaaaagggcggcc

SEQ ID NO: 124010 - DNA, 389 bp, Arabidopsis thaliana
  unsure (1)..(389): unsure at all n locations
gcctctccagattattcagcctgaaggtccaagttttcgtgtaaggggttactttgtcgagtggcagaagtggaactttcgtattggattcactccaagggaaggtttagtcatacattcggtagcatatgttgatggcagtcgaggtcgaaggcctgttgcacacaggctaagttttgtggaaatggttgtgccttatggcgatcctaatgagccacattacaggaaaaatgcttttgatgcaggggaggatggtctcgggaaaaacgcacattcgcttaagaaggggtgtgactggctgggatctatcaagtacttcgatgcccatttcacagatttcactggaggagttgaaacaattgagaactgtgtntgcttgcatgaagaag

SEQ ID NO: 124011 - DNA, 723 bp, Arabidopsis thaliana
gaattgttcttaggtgcacactatagaagatctatgacgtcgcctgcacgcgtacgtaagctcggaattcggctcgagccctaattgtgtgtctgtagctttctctctctctctctctctctctctcgcgaagaagaagaagaagaaggagatcaaggaactcgaagtgtgtgtgtgtgtgtttgccttctcttgtcttttagttttttctctctttggctgtgatttcgtcggcgaagagagacatagatcggatatggcggctgataatacgggttcgaaatcgagctccgctgcggattcttacgttgggagcttgattagtttgacatctaagagtgagatcagatacgaagggatcctttacaatattaatacagatgaatccagtatcggacttcaaaacgttcgatcatttggaactgaaggaaggaaaaaagatggtccacaagttcctccaagtgacaaagtttacgagtacatattgttccgtggaactgatatcaaggatttgcaagtcaaagcttctccaccagttcagcctcctgcatctactataaataatgaccctgctataattcagtctcactaccctagcccgatgccaacatctggtagcttgccttctactgcgagcgggtcactacctgacattagttctcataatggacaacctggacaacatggaatgggattccaaaacgcaatgcctttgtatcaacc

SEQ ID NO: 124012 - DNA, 482 bp, Arabidopsis thaliana
acgcggacgcgtggggtttcaagggttttcgtttttatcttttcctccgaagaagaagataagaggttgaagaagaagaagatgccaggtccagttattgaggaagtgaatgaggaggctcttatggatgccattaaagagcagatgaagctccagaaggagaacgatgttgttgttgaggatgtgaaagatggagacgaagacgatgatgatgttgatgacgacgacgatgagattgctgatggagctggtgagaatgaggcttccaagcaaagtagaagcgagaagaaaagccgaaaggcgatgctgaaactcggaatgaaacctgttactgatgttagcagagtgactatcaagagatcaaagaatgtgttgtttgtcatctcgaagccggatgtgttcaagagtccgaactctgagacctatgtgatattcggtgaggctaagattgatgacatgagctctcagctacaagcacaagc

SEQ ID NO: 124013 - DNA, 761 bp, Arabidopsis thaliana
  unsure (1)..(761): unsure at all n locations
aggaacatgagttctacagattctgaacattacgagcaccagatgactactaacgggatcttccctggtggattgaggaatggcaaagtctctcccggtgtgaacaacagaatgtttgatctatctactgattttgctaatcaaatgagtcgcacagcaacaagttcacagcaaccaatgagacaacagagtcaaagccacgaggaacaagcacagataatgagaaacttcaatgagagggctagaacacagcacaactccacttataatcatcctaaagctgatgctccaccgaagatttcgtcaccacaatccgcaagaagtgaagattcaggcaatgcttctctagcagcagcacgagcatggatgtcgataggagctggagggaataataaacaaacatttgaaaatgctagtaatccgaagagcagccagatttctgcggagtccttgtataatccatcaagagaacattttcaccaacaagctttcaaaccgagagatgctgaagagacacagttccatcctcaaaggaatggtttccctttccagacatttgtgcaccaacctgttcacgggatgatgaacggaggataccaaccatttcaaaacaaccgaccaattgttttccctcagatggctgccccaacttctgatttctcaagattccatgtccagtctcaatggcgaggaggcattactccacaagtccagttgaagcagagacaagagaatttcaatctcncaccagatttgaacat

SEQ ID NO: 124014 - DNA, 473 bp, Arabidopsis thaliana
cggacgcatgggcttgaaatcgatggaaagcaatcgaacccgaaattctctcatttctcaatcaaaactatcttctttcacttctgggcaagaagctctgttgtggaacatcggaaatcagaactgaaacagaaacagaaaccatggagaagagagaagacgaacaacaaaagcgcgacgattctagattcaatcaaacactcaagaacgtccaagggtttcttaaaggtagaagtattcctggtaaggtattgttgactaggagatcagatcctcctccatacccaatctctccaacatatcaacggagcttatctgagaatgacgccggaagaaatgagctattcgaaagtcctgttgaggtggaggatcacaattcaagcaagaaacatgataatacatatgctggtaagctacgatcaaactctagtgctgaaaggagtgtgaaagaagttaaaacttgaagataggtg

SEQ ID NO: 124015 - DNA, 579 bp, Arabidopsis thaliana
  unsure (1)..(579): unsure at all n locations
atgannnnnnnnnnnnnnnnnnnnnnnnnnnnnnnnnnnnnnnnnnnnnnctgcaggtaccggtccggaatcccgggtcgacccacgcgtccgcggacgcgtgggcggacgcgtgggcaaaatcctagatttctcttcatgggtttccgacaatgtctacagaatcgtaatcatcttcctctacaacaccaccgacactgcttctctcctctgtttccaatcccaatcaactcaatctcttcaatctctcactcgccctcaaatcaactggaactcgatccaaatcgtctccgacaaaacctcaccttacgctagtttccgtacagagaaatggatcgttgtgtcggtgacaaagcacccaacagaggagctcaaaggtttggtcaagattaaaggatggcaagttctagcgatcggaaactctttaacacctaaagattggaatctcaaaggtgcgatttttctatctctagatgctcaagctgagcttaattaccggatttttggaccatccgccttatgatcccctcgtacgcaaacatgtcggttacttggttgcgatccagcatggtgcaaaga

SEQ ID NO: 124016 - DNA, 957 bp, Arabidopsis thaliana
gcagtaccgcaccggaattcccggggcgacccacgcgtccgacaaacaacatgcattcttaaacataaatggctaaatattagtttctctctcttctctatcatgtatctttgagagagagaaactttctactttgtttatagtttctaatctaaatcagatctacaaataaattttcgttttaacggataaagcttccggcgttgtccggtttatctttccgattagatcggattttttgtttgtgttttagtttttctttttccacatgtttacaagatcaattcggtttgctttcttcttcagaagaattctgctttcaccaaactcatcttttcctttataagggagtaatatcttcaccgtccattgaagggacctacaagataggtattaggtgaagctttcctttgaagactagattgagagatctctgaatttatttcaaggtggtggcatggaatcttcagctgatgggatctccggcaattatgtgggaagaagcctcttggtggttgatgttgaataaagcccgaaccggccagaaaccaaaaaggtcggattccgtgggaatcaagccccggccaccggtttaggttttcccaaccaattcctcttttcggttcctccaaccggttgggggacccaccgttgtttcgggcccaatccggtgggccccctcttttttttttaagtgccctttaagagccccttctaatttctcttgttaaaacaaaatttcgggggagtgaggggcgtttaaaggaccttcggggccctttttataaacaatatttttaaatttccacaaggggtggtttcaaaattggggcgaaagggcgatttggggcccctttttcacattagcccttattggtacccccccccttttttttgggggtgtctttttttttctcccatattggaaaatttgggcccccccaaaaaaaaataaaa

SEQ ID NO: 124017 - DNA, 613 bp, Arabidopsis thaliana
  unsure (1)..(613): unsure at all n locations
cttggtaagntccgccaaccggcnccaanaatccggtttaccggtaagctccgcgtnccgggttacttcccgataaaccggattttggtggggtttaggttctttcccncatgttccaagaccaatccggttgccttcttcttcangaggattctgctttcaccaaactcacttttcctttataagggagtaatatcttcaccgtccattgaagggacctacaagataggtattaggtgaagctttcctttgaagactagattgagagatctctgaatttatttcaaggtggtggcatggaatcttcagctgatggaatccggcgaattatgtggaagaagctcttggtgttgatttgattaagcccgaccgacggagcagaggtggatcgtggatcagccggcaacgtcagtttcaacatctcttcatctcacgttggacacgtgttggcaacgtggcactttttttgtcttagccttatctttagaattgggtgggttaagctgggctttaaattttaatcaaagttgtaaatggtcagggattggtctattcatacgcatctgtaacaccctttattgggttttaatatccaatatgaaatatggccgac

SEQ ID NO: 124018 - DNA, 705 bp, Arabidopsis thaliana
  unsure (1)..(705): unsure at all n locations
attgatctcaatataactgctcccaaaaaagcttctctagctgatgtgggtgttgtgggggatctgagcaatgaagatgggaacaaagcatctgctgcatcgtactactcaggctggtccatgggtgcaggatccgggcttggtaaaactggcctatacagtacacagcagcagcagcaacaacaacaacaacaacaagcacctgatatctcagacgatttcttctccagcctcagtaaccaaaggtaccaatctggtggctttaagcagtgaaattgtctgtgatttggtgttgagatgaaaaggcatatcaagtttgattctacattccatactggaaatgtaagtttttttaatgggtttgttgttcttgcacttcattcatgggacaatttggtcggtgacttatgggccaatggtggtggggcggttaccttggggtttaaataaaaaaaaaaaaaatggccttaaggttttttttaaaaaaaaggacctttaataatgggttaaaagttccaattggttaaaaaaccaaaagaaaatgattttcttcccccccaccaaaaaatttttttaatggggggtaattcttaatccaaaaaagcctccaactttaaaaaaaaaaaaaaaaaggcggcccgctctagaggatccaagcttacgtacgcgtgcatgcgacgtcatagtcttnctatagtgtcacct

SEQ ID NO: 124019 - DNA, 783 bp, Arabidopsis thaliana
cccaagcgaccgcccacgcgtccgggctaagcgagacacacacacacgcgcagtcttcttcatcttgcttgcttctggttgcttaaccaaaacaccatggaatctccctaaatttcctcacctactcacttccaatttcaacctgctcgattcttcccctcttcttcgcaaaagccctagttttgatcatcgcacttcactctcctccgcatgagaaatcgagaaatccgctcgacgtagtagatagataaaaccacaaagttaggtttttttcaattgggtatggaacctcgtgttgggaacaagtttcgccttggccgcaaaattgggagcggctctttcggagagatttacctcggaactgatgttcagactaacgaagaagttgctattaagcttgaaagtgtgaagactgcgcatccgcaattgtcatatgagtcgaggatatatagagttcttcagggtggaactgggattccaaatatgaaatggtatggtgttgagggggactacaatgtcttagtcatggatttgcttggtccaagtcttgaagatttgtttagttattgcaagaggcagtttagcttgaagactgttcttatgcttgctgatcaaatgataaatcgtctcgagttcattcattctaagtcgtatcttcatcgtgatataaagccggataattttctcatgggcttatggaggcgggcaaatcaagtctacatcatagactatggtttggctaagaaatatagagacagctcaactcatagacatattccatac

SEQ ID NO: 124020 - DNA, 395 bp, Arabidopsis thaliana
ctctctctctcttggaaaagtcaaaatcaagggtttcgtcgtcgctttgactggcttggactcgcttgctgattgagaagcgaaaaatgcttgaatcaggaatttgcaagtatgcgtgaacaaaggagcaagaaacaatgatctaaagaagatgaagttccacttactgttagagagacgtttcctaagatggtgatggaagaaagatcttgtcatactgctaacagagttggggatgtccaaatgggtaatggtcataagcgtggaagaagcgaagattcatccagcaacaatgttagtataggtgtggagactgataaacaggatatgttgtcaaacaaagcccaaaagaagtgggtctttggaaaatgtgtcaatctttcagctgtggatgc

SEQ ID NO: 124021 - DNA, 584 bp, Arabidopsis thaliana
  unsure (1)..(584): unsure at all n locations
aaattaggtgcatagcaaaaaaaaataacacaatcgtgccaccgaaccaatcgggccgcccttttctaccgccggctaaatttgacggtcacatatagagccccaaaaactctccaccatgtccactcttcctttcgcgccttctgtcacccatgcgcactttagccactccctctcccccatgtttatcctgcgccatctccctcttacacgccatctccgtttatcccgaaataaccgcgtcgcttccgttgtatccgccgccgccgttcgccaggacgcttccctctggactccagctcctctctctctaatcgaatcagctgcagaatcgcttttccacatctcaatcgacatttcaaacgctccggatctcgtagcttcgtacacgagaccccgggtcagtatctccaagatccggtgttcctgatggttgagaaggccttcttttatgggcaatggttttcctccttccttgggggtttttggnggngntttggattnttggntaaagggatcgttggttnccgggggggtttttggggtttagnaagggnacccttaggtagntttatnggatnttc

SEQ ID NO: 124022 - DNA, 988 bp, Arabidopsis thaliana
  unsure (1)..(988): unsure at all n locations
gctccttacaatcaagctgcttatcaacagcatcctcagtttcaatacgctgcttatgaggagcagcagcagcaacatcaccagagtcagcagcagccacgcggtggatctggtggtgatgatgtcaagactctttgggttggtgatcttcttcattggatggatgagacttatctccatacctgtttctctcacaccaatgaggtttcttctgtgaaagttatacgcaacaagcaaacttgtcaatctgaaggatatgggtttgttgagtttctttcacgttcagcagctgaggaagctcttcagagctttagcggtgtaacaatgccgaacgcggaacagcctttccgtttaaactgggcatctttcagtactggtgagaaaagagcatcagagaatggtcctgacctatccatatttgttggagatttggctccagatgtgagtgatgctgtcttgcttgagacttttgctggtagatatccatctgtcaaaggtgctaaagttgtgattgattccaacactgggcgttccaaaggttacgggtttgttaggtttggtgatgagaatgagcgatcaagagctatgacagaaatgaatggtgctttctgttcaagcaggcaaatgcgtgttggtatcgcaaccccgaaaagggctgctgcttacggccaacaaaatggttcacaagctcttacacttgctggtggacatggagggaatggttcaatgtctgatggagaatcaaataactcaacaatatttgttggcggtcttgatgctgatgttactgaagaagacctcatgcaacctttttccgattttggggaggttgtttcagtgaaagatcccagtagggtaaaggatgtggcctttgtccaattttgcnaacaggcaaaagtnctnaggaagccntcgggnacttnnaccgggncagtaattgggagnacacttttccgcctttcatngggaagagnccnacaaacagttg

SEQ ID NO: 124023 - DNA, 508 bp, Arabidopsis thaliana
aggaaagctcaaaatatcctcttgtattctgatcaaatttctgtaatatcatcgatggtgctatccaaagagaatatgttgaaatactcggcacaccttcgtgcttacaattccgcatgtggagaccatccagaactcaaatcctttgattctgagcttcagcagaaaacctcaaatctgataaactcgttcacctctgatgccaaaactgggttggtgccactgccccaacacgcagcatacaaggagttcaccaagcacctagctgaagtaaaccaacaggtgtcagactacatcattggatatggagaagtagtgtgggagaactcaactctgagatctttggtcgaaacctattttgaaagtgccaagaagactttggacattgccgagaatgtaacagaatacgtcgatgaagcaaaaaggggcgaacgttacattgtagcggccgtggcacagtttgaaaaagacaaagaaaatgatgttggcaaaaaaacgaagaggtatg

SEQ ID NO: 124024 - DNA, 338 bp, Arabidopsis thaliana
gctcaagtcacgcagctaacaaagtacagatttttcccttgtttcgattgcaaaagcgcataagcttcgtacttgccaaatctgaagtcaaaccaaatacactggtcaaacaaaaagtcgacgagccccagattccgatagcaaaaccagtcggacccaggatttcgatgagccacactggttagcttccgacccaattcacgtcctaggtcaccgagaacgtgacttcgttgcatgttttggttttgttgagtcggatgagttttatttttggcttcgctctcgaccagtagcagaaagctatggaaggtgctgctgtggcggaagggctgtgggga

SEQ ID NO: 124025 - DNA, 876 bp, Arabidopsis thaliana
  unsure (1)..(876): unsure at all n locations
nnnnnnnnnnnnnnnnnnnnnnnnnnnnnnnnnnnnnnnnnnnnnnnnnnnnnnnnnnnnnnnnnnnnnnnnnnnnnnnnnnccacgcgtccgcccacgcgtccgcccacgcgtccggacaagaggacgcgtagagagctcagcaactgtccgtcacgcttctgcagatgccagaccctgggcagagctcgttgaccggtcagcgttttcccggccaccatcgctctcggaggcaacgtctcgagtaaggaagaacttttcctatttccgagccaattacataaccttagtggcaatcttactcgccgcgtctctgctcacgcaccctttcgctctcttcctcctcgcatcgctggccgcttcttggcttttcctctactttttccgtccggcggatcagccgttggtcattggaggacgcacgttctccgatcttgagacgctagggatactctgcctgtccactgtggtggtgatgttcatgaccagcgttggatcgctcttgatgtccactctagcagttgggatcatgggcgtggccatccacggagcgtttcgtgctcccgaagacctgtttcttgaagaacaagaagccattggatctggacttttcgcattcttcaacaacaatgcctcctaatgcagctgccgctgccatagccacctcagcaatgtcacgcgttcgagtctgagattgttgaagagactacattcctacaccgcatttccaaagtgtgatatttattcatattgaattgttgtaacttgtaaccattcttttgtcatttctgttttgtttactttgttgctggaattttgaaacacaattcatcttactatacaccattaaaacgagagtcagtaaagaagaatttt

SEQ ID NO: 124026 - DNA, 551 bp, Arabidopsis thaliana
  unsure (1)..(551): unsure at all n locations
nnnnnnnnnnnnnnnnnnnnnnnnnnnnnnnnnnnnnnnnnnnnnnnnnnnnnnnnnnnnnnnnnnnnnnnnnnnccacgcgtccgcggacgcgtggggatcaacaaaaggaaagaatggcaaaagctatggagctttgggtgggagagatgaagaagatgagtgagaagataaacactagaaatccattgatgcaaaggaagaattcaacatctgttgtgtccaaacaacaacaaggatcagaagaagaaagaggacttattaaccaaaagattagagagaaaaatgaagctgtaactatgtctgagctcactgtttgtcttctcatggaccgttttgttccttggtgatctttccatacccaactacttctagatctcttctttggtgatgtgtatatatatatctagaaactacatgtagtatgtctatatatcagattttgtttgtgcagaccatgtttttaagtttccttgtaaacctgtgaaagtaatgtgtttgagaaacatatttttattactttaatcaatagaagtcaatttatttttttt

SEQ ID NO: 124027 - DNA, 447 bp, Arabidopsis thaliana
aaaaaacaaatcaagcaaatttatttatcttggtcaagagacattgattctcttaaatttctgcaaaattaagctcagagattcacaccgcatctgaaattgtgctcagaggggttccaaatattaccagtcgttaggaagcaatcacgagttgttttaggaattagtgaacgtgataatggctagcaatgagatggaaaaatcgagtaaagagaaggaacctaaaacacctcctccttcttctactgcccctccctcttcacaggaaccttcatcggctgtgagtgctggcatggctactccagattggtctggttttcaggcatattctcctatgccgccgcctcatggttatgtggcatctagtccccaacctcacccttatatgtggggagttcagcatatgatgcctccttatggaactccgcctcatccttatgttgcaat

SEQ ID NO: 124028 - DNA, 840 bp, Arabidopsis thaliana
  unsure (1)..(840): unsure at all n locations
nnnnnnnnnntaggtaccactatagaagagttatgacgtcgaacccacagatggggcatccaaaaaaaacaaaacaaaaaattatattcaagagaaaaaggaaaaaatgaatttcatctccgatcaggtaaagaaactctcaagctcaacaccagaggagccagaccacaacaagccagtcgaaggaaccgaaacagctacaagaccagctaccaacgccgagctcatggcaagtgccaaggttgtagctgaagctgctcaagccgcagctcgtaacgaatcagacaaactcgacaagggtaaagtcgccggagcctctgctgatatcttagacgctgccgagaaatacggtaagttcgatgaaaagagtagcactggtcagtacctcgacaaggctgagaagtatctcaacgactacgagtcgtcacactccaccggtgctggtggtcctcctcctccgacgagtcaggctgagccagcaagtcagcctgagccggcggctaagaaagacgatgaagagtctggtggtgggcttggaggttatgccaagatggctcaaggtttcttgaagtgatttgatctttaattgttgttcatcattttcgtaataataaattaaataactagtatcgtttgtgactagtttatgttgcttcgtttatgtttatggggagtgacgagtgagtgtaataacttctggtgatcatgaatctaatccatctttgttgtgattaaaaaaaaaaaaaaaaagaaaaaaantaagggcggccgctctagaggatccaagcttacgtacgcgtgcatgcgacgtcgtagtgttcnnnnnnnnnnnnnnnnnnn

SEQ ID NO: 124029 - DNA, 645 bp, Arabidopsis thaliana
  unsure (1)..(645): unsure at all n locations
aatacgactcactttagggaaagctcgtacgcctgcaggtaccggtccggaattcccgggtcgacccacgcgtccgtacggctgcaagacgacagaaggggcatccaaaaaaaacaaaacaaaaaattatattcaagagaagaaggaaaaaatgaattgcatctccgatcaggtaaagaaactctcaagctcaacaccagaggagccagaccacaacaagccagtcgaaggaggccgaaacagctacaagaccagctaccaacgccgagctcatggcaagtgccaaggttgtagctgaagctgctcaagccgcagctcgtaacgaatcagacaaactcgacaagggtaaagtcgccggagcctctgctgatatcttagacgctgccgagaaatacggtaagttcgatgaaaagagtagcactggtcagtacctcgacaaggctgagaagtatctcaacggctaacgagtcgtcacactctcacccgggtgcttggtgggtcctccttccttccgnnggggttaaggcttnggccagcaaagtttagcctttnggcccgggggttnagaaaagncggtttaaggngttttgttggttggnnttgggggnttttccannntggctaaagntttttttaanggnattt

SEQ ID NO: 124030 - DNA, 382 bp, Arabidopsis thaliana
gactctcaccagtcacaaccaaaaaaaaaaaaacaaaacaaaaaattatattcaagagaaaaaggaaaaaatgaatttcatctccgatcaggtaaagaaactctcaagctcaacaccagaggagccagaccacaacaagccagtcgaaggaaccgaaacagctacaagaccagctaccaacgccgagctcatggcaagtgccaaggttgtagctgaagctgctcaagccggagcctctgctgatatcttagacgctgccgagaaatacggtaagttcgatgaaaagagtagcactggtcagtacctcgacaaggctgagaagtatctcaacgactacgagtcgtcacactccaccggtgctggtggtcctcctcctccgacg

SEQ ID NO: 124031 - DNA, 775 bp, Arabidopsis thaliana
tcactatagcgattgctggtacgcctgcaggtaccggtccggaattcccgggtcgacccacgcgtccgatcgatcacgtatccagagcactaatttgtttgcagcattggacactcgtaagaagaagaagaagtctgacaaggcagggaagagcaaagggtcttctaagtcacgagagccagagaaggagcctgagcctcaggtctattgggctcctacgcctttgaaagttaagtcttgggctgatattgatgatgaagacgacgatgatgactattatgcaaccactgctcctcctcagtctggttggagtacttctctgccttcccatactgattccaaagacgttcatgttgaggaaagtgaaagtgaggaagatattcttgatgaaggtgatgatgatgtggaggaagagcaggaacaggaaacagaggtacaggttcatccagagcctgaggtgaagaaagctcctgaagttcctgcacctcctaaagaggcagagaggcaactttccaagacagagaggaaaaagaaggaacttgctgagcttgaaactttgttggctgattttggagttgccccccaagagaacaatggcctagaagaatctcaagaggcttggaccagataagaaagaagatgtcaatgggaaagggagagaaaaagggagaatgccacaggttgggggagtcaaaggcttccaaaaaagaagataaaggaaggattagccccaaggaggtaaaaagaatcttaaggagccacaaagcaaccacca

SEQ ID NO: 124032 - DNA, 644 bp, Arabidopsis thaliana
cagatttcctcatcctctattagggaagaagaaccaaaaccctaatcctatcttctcctcttataaatcgcttcaacaacagtttctttctcttctgatttgatccatgatttctcatctggaaccctagtttatacatccatcgggtgttactgttctttatctgggcaatcagtggtgtttttgttccttttgtatatctgtcgagacttctaggtgtgaaatcaaagcttgtttggtttatatcgatcttggttttagctgaatcgttgttaagatggctggaggtggaaacaggagagatgaaggatcgatcacgatccagagcactaatttgtttgcagcattggacactcgtaagaagaagaagaagtctgacaaggcagggaagagcaaagggtcttctaagtcacgagagccagagaaggagcctgagcctcaggtctattgggctcctacgcctttgaaagttaagtcttgggctgatattgatgatgaagacgacgatgatgactattatgcaaccactgctcctcctcagtctggttggagtacttctctgccttcccatactgattccaaagacgttcatgttgaggaaagtgaaagtgaggaagatattcctgatgaaagtgatgatgatg

SEQ ID NO: 124033 - DNA, 732 bp, Arabidopsis thaliana
  unsure (1)..(732): unsure at all n locations
nnnnnnnnnnnnnnnnnnnnnnnnnnnnnnnnnnnnnnnnnnnnnnnattctctttcagcttaacgtcactattggtatcctcttcgccaatcttgtcaactatgggaccgccaagattaaaggaggttggggatggaggttatcgttaggtttggcgggaattcccgcgcttcttctaacggtcggagctttattggtgacagagacaccaaacagtttagtcgaaagaggtcgtctcgatgaaggtaaagctgttcttcgtcgtattcgagggaccgataatgttgaaccagagttcgctgatctccttgaagctagtcgacttgctaaagaagttaaacacccttttagaaaccttcttcaacgtagaaaccgtcctcagctcgtcatcgccgtcgctttacagattttccagcaatgtactggaatcaacgcgattatgttctacgcgcctgttctgttcaccacattagggtttggtagtgacgcttcactttactcagcagtggtgaccggagcagtcaacgtcctctcaactttagtctcaatctactccgttgacaaagtcggtcgccgagttcttctcctagaagctggtgtccaaatgtccttttntcaagtnggaatcggcatttatccttgggggcaaaggaacagcanttttncaaatttttccaagggttnngaattttggngggggaatnncntganaanngnggttgtttngctgg

SEQ ID NO: 124034 - DNA, 662 bp, Arabidopsis thaliana
  unsure (1)..(662): unsure at all n locations
actaagaaacgggttacatcgtcttggatctaagcttacggagtctgaaatcaaacaactcatggaagctgctgatgtggacaaaagtgggacgattgattacattgagtttgtaactgcaacaatgcatcgtcatagattggagaaagaagagaatttgatagaagcatttaaatacttcgacaaagacagaagcggttttatcacaagggacgagcttaaacactccatgactgagtatggcatgggtgatgatgcgaccatagatgaagttatcaatgatgttgataccgacaatgatgggaggataaactacgaggaatttgtggcgatgatgaggaaaggaactacagattcagatccaaagctgatcagatgatatatattcaactacagtgacgaatgcttttgcttcatatataataattaaaataaactaataataaacacgaatgcaatgagaattaatgcattcctatgttttttcccttgagatgtataaataataaatatgatgaattgcgtaagtatgatgaatcaaaaaataaaatgaaacttatggcccatttaaaaaaaaaaaaaaaaagggcggccgaaaacannnnnnnnnnnnnnnnnnnnnnnnnnnnnnnnnnnnnnnnnnnnnnnnnnnnnnnnnnnnt

SEQ ID NO: 124035 - DNA, 887 bp, Arabidopsis thaliana
  unsure (1)..(887): unsure at all n locations
gagacttaaagcctgagaatttcttgcttgttagtaacgaagaagattctccaatcaaagcaacagattttggactctctgttttcatcgaagaaggtaaagtgtataccgcgcgtccggggagcgcatactacgttgcacctgaagttctacatcgaaactacgggaaagaaatcgatgtatggagcgcgggtgttatgctttacattcttctcagtggtgttcctccattttggggagagaccgagaagactatatttgaggcgatcttagaaggaaagctggatcttgaaacttctccttggcctactatatcggaaagcgcaaaagatttgataagaaagatgttgataagagatcctaaaaaaaggataaccgcagctgaagcacttgagcatccatggatgacagacaccaaaatttctgataaaccaatcaatagtgctgttcttgttaggatgaagcaattccgcgcgatgaacaagctcaagaaacttgccttgaaggtgatagcggaaaacttatcggaagaagagataaaaggattaaagcaaacgtttaagaacatggatacagatgaaagtggcaccatcacttttgatgaactaagaagcgggttacatcgtcttggatctaagcttacagaatctgaaatcaaacaactcatggaagctgctgatgtggacaaaagtgggacgnttgnttacattgagtttgtaactgcaacaatgcatcgccatagattggngaaagaagagaatttgaatgagnatttaatcctccgcaaagcagaccggnttttncccangggncggcttnacacccatgcctgggntgcatgggtgtntccgnccggggggnccgggnngggnttaaccnngggtnat

SEQ ID NO: 124036 - DNA, 407 bp, Arabidopsis thaliana
agatttatctccgattgaaatcggatttcatcttagtttgcttttctttgttttcttttgattccggtattttgccggtttaaatttccgacttgttcggaatttcttccggttttattgccggttttttgataagatcttttgcaagttgcaaatcaccacttccaatcttggcagatgtctaattccgggagagttttagatggatctttgttcattggatgcttgagttttcttccatgtgaaggtaaattcctcgctttgctaataagagcgtaagggcgtcggttcttcatgggtgatagatcaagatgtttgcggttgattggagaggagtatgaagagttggggttcacgtcgtgttttgatggtcctccaaggattattccaatcctcatcagctgaag

SEQ ID NO: 124037 - DNA, 446 bp, Arabidopsis thaliana
caaaaaacagaagagaagcgttttgaaacgaagaaccaaacaggttcttcgtcccttttgcctttagggcacaaaggggaagcctttttcactgggtatgtgttgagaatttggggtttttaggtttttggctcagaagagagaatctgggatcttaaaaatcgaaactttctagatgtggttttagttcaacttagttgtagaagatgggatcaaatcaaggttcttccaggttagataccgtagagattaaagctctcatttaccgggaaattgggaatcaaagagctgagagttacttcaatcagctcggaagattctttgccttgaagatcaccaaatctgaattcgacaagttgtgcatcaagaccattggtagacaaaacatccatcttcataaccgtcttatacgttccatcatcaagaatgcttgtattgccaaatct

SEQ ID NO: 124038 - DNA, 690 bp, Arabidopsis thaliana
  unsure (1)..(690): unsure at all n locations
cgccnnnnnnnnnnnnnnnnnnnnnnnnnnnnnnnnnnnnnnnnnnnnnnnnnnnnnnnnnnnnnnnnnnnnnccacgcgtccgatttcctttaagcaaacgagcttgagaagctttccgatttcaattccttttaattgacgatgccttcttcgttctccaagccggatttagatccttcttcttcgcctccaccgatttctcctttatctcaagacagctcggaggctgagcgccggcttcgagaagcggaggagaggctacgcgatgccatggcggagcttcagcgtagacaacgctctgcggcgcgtggatctcacgcggaattgtgtgatcacgctgacgtttcttgcgtcgccaatgccattgggaatttatgtcagagctttcttctctcttatggtgttagagttgggatcgggattcttcttcgcgcttttaagctcgctaggggacagtcttattcgtctcttctcgatcttaagcaacttgtttcagagaaagatttgatagttagggaggaagcatgtcgtattggtctactntntggtggcntactggctcgatcatgcccttagatgctgtttgaggaagtggagaaagaaagagacgccattgaattcgtaagtttatttatttatttgtgtgcctaagattcgattggtgatctctntcttataatgctctact

SEQ ID NO: 124039 - DNA, 400 bp, Arabidopsis thaliana
cgggaggaaaaagaataaaaccaaagcaaaaaaatggctttgaaactcacttctccgccttcagttttctcacaatcaaggagatcatctccttcttcgttaattccgataaggtcaaaatccacattcaccggatttcgatcgagaaccggtgtttatttaagcaaaacgacggcgcttcagtcgtctacaaaactgagtgtggcggcggagagtcctgcggcgacaattgcggcggatgattgggggaaagtatcggcggttctgtttgatatggacggcgtgctttgtaacagtgaagatctttctagacgcgccgccgtggatgtttgtacggagatgggagttgaagtcactgtggacgaattcgttcctttaagggaacaggtgaagccaaatt

SEQ ID NO: 124040 - DNA, 414 bp, Arabidopsis thaliana
gcttgaaatcactctctttcatccttccccgcgcactgtgtctcgctctctctctcccacatttccattatctcctttactttctttctttgagaatgtcttctacaacaatcggcgagcacatcagactccgacgagctagaaaccaaacaatccgtcatctccacgccgccgacgatgatccgccgctaagccacgtcgttcttccgatttcacaacctaatcgcttctgtaactccgcaatgtcttccttctttcccctcccgacttcctcctccaacgaaagcacgaggaagaaaccgtaccaaacgtcgtcgtttcgagggatgggttgctatgccgcagcagcagcagcagctcaagaggtttctgttccctccgtcattcgctactccgcggatttggatgccagaa

SEQ ID NO: 124041 - DNA, 407 bp, Arabidopsis thaliana
cggacgcgtgggcggacgcgtgggctcttggttcttttccataagcttataacatatattttttttaaaatctactctgcgttaaaaaaatgaaaacacgtagcagcagtgtgggtaagatcaaagggtgtttctcgatcagtttcatattcagatgtatcagagttctcattaacagatctgtttctttttccttatctgattaaacaatttccttcagaattttacttttttgaacatatatagtttttctctgttcctatatcttgagttttgtgagaggttaattatatgaaattttacgcattattgttcatctatatcgaaaaacaatgtcaagaaagccatgttgcgtcggagaaggcttgaagaaaggagcatggaccaccgaggaggacaagaaactc

SEQ ID NO: 124042 - DNA, 398 bp, Arabidopsis thaliana
aacaaagtcatcctcttcgtcttctttctctgaccaaaacagagcgaaaagcaaaaatgaaaagtggagggaacacaaacactaaactcatacttgttcatccatacattcaaaagcaaacaagcacaaatcgtctatggcttctcgctttcgtttctttcttcacaatcgcttttctcctaactcttctctacaccaccgactccatcatctcttctaaaaacaactccgccaccgtctcctccgccgtcaattctgccgtcaccaccgctaccatctctcagttaccaacaacagccatcaatgccatgctccactacgcttcaagatcaaacgacagctaccacatgtcatacggagagatgaaatcaatctccgacgtcctccgccgctgctct

SEQ ID NO: 124043 - DNA, 856 bp, Arabidopsis thaliana
  unsure (1)..(856): unsure at all n locations
atgctacttccagctcctatacngactcactatagggaaagctggtacgcctgcaggtaccggtccggaatcccgggtcgacccacgcgtccgcccacgcgtccgcccacgcgtccgaaaatctcaagataaacctatagttgtcttgtcaaacaatcaaaccctttttagatatagaaaatgggaatcaaattcagccaaggtccttcgaatacaaccattcacaacagaagtcatcaagatggtgaggatcaaaggaacgagacggcgacgaagatcaatcatgacaagcctcaaaatcaatcaagtagctttcagattccacttcattatccaaagtatacaaagagtgattatgagaaaatgccagagtggcaattggatcggcttctgagagagtacggcttgccggttatcggagattcttacgagaagaggaaatttgccatcggagcatttctctggtcgtcggagaacgagcactagatcatatgttatccgaatagacgtcatcgtttcatatgggactgtttgaataagattaagttggtgaaagcgtggaaaagaaacatgtttgcatgtagatattatcctggacatgtatgttttatataatatatatatatgtattaaagtatttggatatatggtgtgtttctctactctcccatgtatgttaccctcatggncacgacattttgtaataaactatactaagcnttaataatttttctagcgttttcnnnnnnnnnnnnnnnnnnnnnnnnnnnnnnnnnnnnnnnnnnnnnnnnnnnnnnnnnnnnnnnnnnnnnnnnnnnnnnnnnnnnnnnnnnnnnnnnnnnnnnnnnnnnnnnnn

SEQ ID NO: 124044 - DNA, 438 bp, Arabidopsis thaliana
cttcactctaattgcgattgattctcctgtcttctccaatttatcagagaaattgcagagatgacacctgaatcaaacgctccctcagtagatccacaatttgtaggcaatgggtttgttcaagaatactataaccacctttatgattcaacctcggaagtacacaaattctatctcgaggatagtatgatttcacggcctggtctcgatggtgagatagttactatcaaatccttgaaagggattaatgatcagataatgtccattgactacaaaagctcaaggatcgagattctaactgctgattctcaattaactctaaagaaatggtgttgtacctctagtaacggttttagtgatcggaaacattgatgaaggatgaaattctcttaaaatttctttcttggtgtcgctgtatggtaacttcctttttgcctt

SEQ ID NO: 124045 - DNA, 963 bp, Arabidopsis thaliana
  unsure (1)..(963): unsure at all n locations
cccacgcgtccgaaaaaaaaaagaaagctttttgggaacataaacaccatcgaaggagggtgggaggtgttttatgttcatgggtggagcttcttggccaacctgaccccattcatcatatcattacccactttcttctcctaaattattctctcttatctctctctctctctttttattttctttctttcttaattcatctaaactctctctgcttttgcttttcgtaattccttacatttcactcaatattaatcgccagaatctccgatccacccacaaatttagcaattttctgagatttgatcatttgggtcaccaaaaaatcttgtctttttgatctgggtttaacgccaataacatatgggaaacattagcagcagcggtggtgaaggtagacgccgtcgacggcgaaaccatacggcggctccaccaccacctcctcctcctccttcttcttctcttcctccaccttcaacatcatccaccgcatccttaccacaaccactcttgggctcccgtggcgatggccagatacccttatgctggtcacatgatggctcaaccgactccttacgttgaacaccagaaagccgtcacgattcgtaacgacgttaatctcaagaaggagtctcttaggcttgaacccgacccggataatccgggtcgctttctcgtctcctttacgtttgatgcaaccgtctccggaaggattagtgtcattttctttgctaaagaatccgaagattgcaaactcacagcgacaaaggaagatatactgccacctatcactctagatttcgagaaaggacttggtcagaagtttaaacaatcatctggttctggtatagacttttcggtctttgaggacgttgagctgttcaaagcnnnnnnnnnnnnnnnnnnnnnnnnnnnnnnnnnnnnnnnnnnnnnnnnnnnnnnnnnnnnnnnnaacggaatcat

SEQ ID NO: 124046 - DNA, 577 bp, Arabidopsis thaliana
  unsure (1)..(577): unsure at all n locations
ggttgccgcgcaccgcacccacgcgtccgcggacgcgtggggcgggaggtctacaactaaaagcctttgtgtgtgccagattagctccctactaatccgccgccgcacctcctcgatctccgcccagctcccttcttttctatctatctattcagttgtttctccggtaacaaccagctgaggaagaagaagaagtagtagccgtgatgatgatgatgacgtcacttggtggtggtgctggaggcggcggaggaggtggtggtagtggtggtgggagatttgtgacgtatccgccgcctctatctgtgcctccgtcggctcctcagtcacctaacttctctggtggtctccgatcacagccttctttctctcgttgaggcaagagatgtatcgtttctgaagttacttgcagagcgtcacaaaggcttactgcatttttgcctgtggttccacatgtttgcgggntaatgaacccaagagatcgggtttaatnatcccnagancaaattggggttaanctttcctggnagttnnccgggtttattggnaaggggcaataagggggggttttcngtgg

SEQ ID NO: 124047 - DNA, 935 bp, Arabidopsis thaliana
aggcacgcctgcaggtaccgggccggacctcccggggcgacccacaacctccgcaaggaggaacctgccaaagaggaacctgccaaggagaagagcagcgaagccaccgaggccaaggaggctgtagcaaccaaggaggctgccgcagtcaaagaggcggcctaatcagcacaggcttctttatataaaagagacccggaaagttaaggggacctcaagaatgcggacaaaccacggagagggaggggttctcactgctctaactatcatgtaggacctacctaccaccggcagcggctggcttacccgcgataagaaaccaagacaagccggggcactaaaaaaaaaaaaacacaggggcgcccccccaaaaggaccaaagctgaccgacgcgggaccgcaacggacaaactccagtaaagggccacctaaagccaatccaccggcccggcggtctaccacgcgcgggactgggaaaaagcccgggcgccacccacaccaaaagcgccttggagaccaaaacccgcctccgccaagcggggggaaaacgcggagaaggaaccggaccggagccgccctgcccaccattgtgccacacccgaaagggcggaaggggcccgcgcccccgggacgcggccaataaaggcgcgcacgcgaggggggcaaacccacaccgcaacgatcgacctgggcagcgaccaaaggcacgcccatgaagcaacacgccaactaagtcacacacggagcccggtgacccgcgcaagacccaacacagtggcctccctacaggcggagaagaagggcccgccgcgcccaccaccagaaacggaaagggaaggggcgccgaacgggccacacgccacgaaagagatgcgccccgagaatggagggcacaggctacacgggacccgcgtcaacggaccaccaacaccaac

SEQ ID NO: 124048 - DNA, 827 bp, Arabidopsis thaliana
  unsure (1)..(827): unsure at all n locations
nnnnnnnnnnnnnnatacgactcactttagggaaagctgcgtacgcctgcaggtaccggtccggaattcccgggtcgacccacgctttaagacagctaaaactaaatacaaagaaacagagatgggtttggttacagaggaggtgagagctaaggcagagatgtacaccggagatgagatatgtagagagaagacaaagtgtttcctcaaggaaatatctatgcccaatggtttattaccattgaaggatatagaagaggttgggtatgacagagagtcaggtgttgtatggctgaagcagaagaagagcatcactcacaagttcacagagatagataagcttgtctcctatggaaccgaagtcacagccattgttgagaccgggaaaatcaagaagctcactggagtcaaagccaaggaacttcttatttgggtcactatcaatgagatctataccgaggaaccccctaccaagatcacgttcaagacaccgaccacactgtccaggactttcccggtcacagcttttatagtcccagaagaacctgccaaggaggaacctgcccaaagagggaccttgccaaggaggaagagcagcgacgcaccgagggccaaggaggctgttgcaatcaaggaggctgtcccagccaaaagaggcggcctaatcagcccagctttagcggtttaaagagccccgattttttaggggacccaagaactttggccaaccatgggagttgtgttccactgccnacaccatgatntcnccnccnctnttcngggcggaattcttagccgggggnncngntttnngnnccccgngngtc

SEQ ID NO: 124049 - DNA, 620 bp, Arabidopsis thaliana
  unsure (1)..(620): unsure at all n locations
ggaaagctggtacgcctgcaggtaccggtccggaattcccgggtcgacccacgcgtccgaccgggaaaatcaagaagctcactggagtcaaagccaaggaacttcttcatttgggtcactatcaatgagatctataccgaggaaccccctaccaagatcacgttcaagacaccgaccacactgtccaggactttcccggtcacagcttttatagtcccagaagaacctgccaaggaggaacctgccaaagaggaacctgccaaggagaagagcagcgaagccaccgaggccaaggaggctgttgcaatcaaggaggctgtcgcagtcaaagaggcggcctaatcagctcagcttcagcagataaaagagacccgaatttttaagtgtacttcaagaatttgaacaaatcatggagagttagtgtttctcactgctctaactatcatgtattatctacctaccacttgttgctgcttgttttacctgtaataagatatcaatatcatcctgttccactaaaaaaaaaaaaaaaaaagggcggccgctctagaggatccaagcttacgtacgcgtgcatgcgacgtcatagctaatnctatagtgtnnnnnnnnnnnnnnnn

SEQ ID NO: 124050 - DNA, 644 bp, Arabidopsis thaliana
  unsure (1)..(644): unsure at all n locations
ccttnggtttnnagggttggttncaagggccggtttttttgcttaccaaaggagggctcccttacatgttcccggggttggtaacttgtcccctttgggacccgagttccacccattgttgggccccgggaaaattcaagaagctcactgggggttcaaagccaagggacttcttattttgggtcacttatcaatgggatctataccgggggaacccccctaccaagatcacgttcaagacaccgaccacactgtccaggactttcccggtcacagcttttatagtcccagaagaacctgccaaggaggaacctgccaaagaggaacctgccaaggagaagagcagcgaagccaccgaggccaaggaggctgttgcaatcaaggaggtgtcgcagtcaaagaggcggcctaatcagctcagcttcagcagataaaagagacccgaatttttaagtgtacttcaagaatttgaacaaatcatggagagttagtgtttctcactgctctaactatcatgtattatctacctaccacttgttgctgcttgttttacctgtaataagatatcaatatcatcctgttccactaaaacttatccttaattatctataaactacaatacagctggttctgtatgtcacttc

SEQ ID NO: 124051 - DNA, 347 bp, Arabidopsis thaliana
gctaaactaaatacaaagaaacgcgacttattgggtacaggggttgtgagagctaacgcagagatgtacacgcggggatgagatatgtagagagaagacaaagtgtttcctcaaggaaatatctatgcccaatggtttattaccattgaaggatatataagaggttgggtatgacagatattcatgttttgtatggctgaagcataatatgatcttcacttataagtttacagaaatttatattcttgtcttctatttaacctaaatctcatctttttttttttacctttttaattaaaaaaattttctctagtcatattcattgttatcttatttattttttttta

SEQ ID NO: 124052 - DNA, 323 bp, Arabidopsis thaliana
atcaaatcaaaatctcaactctagagatttattgttgacccgtttaccgcgattctctcctcaattcgccggtaaacccctaactctgtcggaaaaccctaattcgccgcgacggaaattaccaatactcgtttcctcgtagcattggatttttaaagctgttgattccagctttgttgaggttaaagcaactatgaagcctgttcttcactcgggttcttcatccaatggattttcacacaggagatttgaaaaggaggcatggatgaataacgcacagccttctgttgacaatacagaaaacggttgggacgctgaaagtg

SEQ ID NO: 124053 - DNA, 711 bp, Arabidopsis thaliana
  unsure (1)..(711): unsure at all n locations
cgnnnnnnnnnnnnnnnnnnnnnnnnnnnnnnnnnnnnnnnnnnnnnnnnnnnnnnnnacaaaccaaaaaagagagtccaccaactctacacgcaattcatccaattatcttgctgtcgccattcgccaatatccatccccatcttcttcgatttctgagattcggtcgaaaatcatcagatgggttttcagaacgaagctagctcctcctcttatacccttaaaatacctccaccggccagagaggactcgcctcttctcggcaagggacctcccctctccagccagtttaagaccttcgccaacgtcttcatcgctgtcgtcggcgctggtgttcttggtcttccttacgccttcaagcgaaccggatggctcatgggtgtcctcctcctcgtctccgtctctgttttgacccatcactgtatgatgcttcttgtctatacccgccgcaagctcgactctttcaatgctggcatctccaagatcggctctttttggtgaccttggattcgccgtctgcggctcctttggggaggatcgtcgttgactttattttatcaattctgtctcaaagctgggtttttgtgtnggataatcttnatctttcancgggnactanttttagntaaatntatccgancccttnaanngcccaccaattnttggggaatnnagtttnaaaangttgggnnttaaatccttgggggggtc

SEQ ID NO: 124054 - DNA, 590 bp, Arabidopsis thaliana
  unsure (1)..(590): unsure at all n locations
tgatactccnnnnnnnnnnnnnnnnnnnnnnnnnnnnnnnnnnnnnnnnnnnnnnnnnnnnnnnnnnnnnnnnngcaccacgcgtccgcccacgcgtccgagaaggacgaaaatcggaggaggaagaagaagatcgattcgatttgtgatcaacgatgagctccttcaatggaaacagcaacatcgacaacctcctaatccaaaccctacttggacgtctccaaattcgtccccctaactctcatttcctctctcaatccctagacgacctcctcttcaaatccgacgacagcgacggcgatgatgacggacaaggtcagaccagtctcgacagagaagaagctaggcttgagaaagagctaatccgagtcatcgtctctggtcgaagcgattctctcaagccgaattcaggtcaagccgtgacagtcaacgaacaccacatctgcgttgggtttcatgacgatgaggaatcggattatcgtgtttgggagtggcatggtcatatcatggtgtttgatgaagaaatggggacacgcctgatatttctacgggaaaacttcgagaggtggctgtgaacttcctattacccc

SEQ ID NO: 124055 - DNA, 1077 bp, Arabidopsis thaliana
  unsure (1)..(1077): unsure at all n locations
nnnnnnnnnnnnnnnnnnnnnnnnnnnnnnnnnnnnnnnnnnnnnnnnnnnnnnnnnnnnnnnnnnnnnnnnnnnnnnnnnnccacgcgtccgatctcctcttactgcttcgaattcgatcgttactagaaactgcgaccacgacattggtcgtggcctcgttggggaagaagtagtcaaagtcacccgcatcgattgggacacgttcttcttcatcaacctaatcgaatcttttatcctctcttcgatcccaacatcgataaattattattaccatttgcggcgttgttgagtgatctccgcgactatggagagatcagcgtcggtgggtgttaacgacggccgttttggtggcaaccaattctattcgccatctttctcttcttcttcttcttcttcttccatgagacatgttaattacagttgtggatcttgtgggtatgaactaaacctgagctccacgaatcgaatcacatcgacaatcggatcaaagtacggtaaatccatgaagagtgggatcatatctttcttcaacatcgacgagggaagattcagtcaggtcgatgagttccaatgcatgcctcacttctctagatactcttggggttttgtttcgacacagaacgaagcttctatgtcgcaaatgtaataattatatcggcaatgcttctcaggagaaggctcctgagtatgcacttgttacacaaaacctcggatccgcacatccgcctaggactggtagtgttacggaagtacgatatcagaataccgctcgcttcaacccttcttcctgcggtcgctttgctgtgagtgcttccttctactaactgtatatacccgccgatattctaaaatcttcttcggagtttcggatttagatcttcgatgaagtgtttgttatcggcttggtactgttttgataaggttggtttggcttttcagttgtatagtagtaacaacaatttgccttatgtttcttgctcaaattcataattggtgtttaccaattttattgtcgaaaagctgtgtacaacaattcaaatactgtatttcaagtgtaatgtaaaacattttatc

SEQ ID NO: 124056 - DNA, 449 bp, Arabidopsis thaliana
  unsure (1)..(449): unsure at all n locations
cagatcaaccccttggttcctgttgatcttgtcgttgatcactcgatccaagttgactttgcaaggtcagaagatgccgcacagaaaaatttggagcttgaattcaaaaggaacaaagaaagatttacgttccttaagtggggttcaacagccttccaaaacatgctggtcgttcctcctgggtctgggattgtccatcaggtcaacttggaataccttggacgtgttgttttcaactcgaaaggatttctctaccctgatagcgttgttggaaccgactcccacacaaccatgattgatggattaggagtcgctgggtggggtgttggaggaattgaggcagaggcagcaatgcttggtcagcccatgagcatggtgttacctggcgtggtcgggtttaaattttgattggaaaagttgaaggaagngggttacnacctacctnattt

SEQ ID NO: 124057 - DNA, 823 bp, Arabidopsis thaliana
tgcagtaccggtccggaattcccgggtcgacccacgcgtccggacagatcataaaaaaaaaccaaacataaaacataaaactctgtcctttttttgtcttcttgtaacttttcttgttaaaaatcaatggcgtcatctagcagcacataccggagctcaagctcttccgacggtggtaataataacccgtcggactccgtcgtcaccgtcgacgaacgaaaacgtaaaagaatgttatcgaacagagaatttgcacgtaggtcaaggatgcgtaaacagaaacacgttgatgatctaacggctcagatcaatcagctatcaaacgacaaccgtcagatcttgaacagcctcaccgtaacatctcagctttacatgaagatccaagccgagaactctgttctcaccgctcagatggaggagcttagcaccagactccaatctctcaacgagatcgttgatcttgttcaatccaacggtgcaggatttggtgttgaccagatcgacggctgtggttttgatgatccgaccggttgggatcgacggatattacgatgatatgaatatgatgagtaatgttaatcattggggtggttcggtttacactaaccaacccattatggcttaatgatatcaattatgtatttgaattaataaaaattaacttaaaaataatttagaacggccccttttttttcggcttttttaatttctcaaaaattttagccccaatttttggggttggtttttttggggcttgggccggtggaaatgattgttcaaatttatttggttaccacttgccctctctttggaattggggttg

SEQ ID NO: 124058 - DNA, 826 bp, Arabidopsis thaliana
  unsure (1)..(826): unsure at all n locations
ctcatcttctcttccttatctccttaaaaatcttctgctgttttcttttttatatttagagctcctctgtttcttctccaataaccaaaataaaaaaaaaaaactcttcctctgtttgttttcaagttctgacatcataaattcagaccgagaaaacataaaaatttgagtcttttgatgatcggaaactgatgactcccgttctctgcgaaatcctgctctctgggctcacggtcaaatctgctctctgccgtagaacccatctcgttcaatctttctccgtcgtcttcctctactggttttacaacgtttcatgaattgctacaaactctaattaattttttcagacagatcataaaaaaaaacccaaacataaaacataaaactctgtcctttttttgtcttcttgtaacttttcttgttaaaaatcaatggcgtcatctagcagcacataccggagctcaagctcttccgacggtggtaataataacccgtcggactccgtcgtcaccgtcgacgaacgaaaacgtaaaagaatgttatcgaacagagaatctgcacgtaggtcaaggatgcgtaaacagaaacacgttgatgatctaacggntcagatcaatcagctatcaaacggcaaccggcagatcttgaacagcctcaccgnaacatctcagctttacatggagntccaagccgngaactntggtctcaccggnncagatggggggggttnggancagnnccaatctcncaangggtcgtnggtttggtcaaccacggggnagggttngggttgcanntngcnggtggggtttntntcnacggtggg

SEQ ID NO: 124059 - DNA, 411 bp, Arabidopsis thaliana
  unsure (1)..(411): unsure at all n locations
gtggtttagatgatcgtacggttgggatcggcggatattacgatgatatgaatatgatgagtaatgttaatcattggggtggttcggtttacactaaccaacccattatggctaatgatatcaatatgtattgattaataaaattaattaaaataattagatgccccttttttgtctttttattttaaaatttagcccattttggtgtttttgggttggtgtgatgatgtaattatagtacatgcatctttgattggttggaaggataaatataacctttatatatatattggggcatatatatatgagttgtactttgtcatgtattggtgtgtgttttgttataattatatgattatatatgtttatgttatcatgattttgnctttcacccttaatatnccaattgtt

SEQ ID NO: 124060 - DNA, 512 bp, Arabidopsis thaliana
  unsure (1)..(512): unsure at all n locations
tccnnnnnnnnnnnnnnnnnnnnnnnnnnnnnnnnnnnnnnnnnnnnnnnnnnnnnnnnnnnnnctctcgggttccacgcgtgctccttgctcctctcgcttttgaatggagatgtgagctttcttcattcaaagagcaaaactatctaattccatggcgttctccctcctctctccaattcctacctctgcctctctttttttcactctctccgccattaccgcttctaataatgcttcctcctcctctctctcccgtctttactctttatatcaccccaaaggaaccttacgaaccagaaccgcgacctcgtttttcggagcttctgggaacttgaggattgtttccatggcggagaataggcaattggtttgtaggattggtggcggagccggtgctgaattggatgatatggatgaaggtgaaatccagaggattggaaatgaagacgaagacgacgatgaattcatacaagtccatgctaataattcctctgctgcttcgcctgaga

SEQ ID NO: 124061 - DNA, 646 bp, Arabidopsis thaliana
atctagacaaagagtgttgtctgaattggctctgtctcaaaaaatgaaattctcaaattaaccacaacgatctttagagccttcttcgctcaccgatctctgaaaccctggtagtttctatgagtatgtcgcagtctcgagctgtccaaagatcgtcttcacctaatgaggatagaggtgagaatcagttagtggtttatgacttgaaaggaaatgatgatactgaagaagaagttctaccggttcaatctcagcctttgtcatctagaacacagtgtccctctatcggggcatttacggttcagtgtgcaagttgtttcaaatggagactcatgccttcaatgcagaagtatgaagagattagggaacagcttcttgaaaacccgtttttctgcgatacagcgcgtgagtggaagccggatatttcttgtgatgttcctgctgatatctatcaagatggaactcgtctttgggctattgataaaccgaatatctctcgtccacccgctggctggcaacgtttactgcggattagaggtgaaggaggtaccagatttgctgatgtttattatgttgctccgtctggaaagaagcttcgattaactgtggaggtccaaaagtacttgaatgacaactccgaatacat

SEQ ID NO: 124062 - DNA, 219 bp, Arabidopsis thaliana
cgtccgattagctctgtctcaaaaaatgaaattctctaattaaccacaacgatctttagagccttcttcgctcaccgatctctgaaaccctggtttgctctcgtcctcttcgttttctatgagtatgtcgcagtctcgagctgtccaaagatcgtcttcacctaatggggatagaggtgagaatcagttagtggtttatgacttggaagggaatgatga

SEQ ID NO: 124063 - DNA, 538 bp, Arabidopsis thaliana
aatgtattaggtcacactatagaagagctatgacgtcgcatgcacgcgtacgtaagctcggaattcggctcgagatccccctctgttcgatcccgccgcggtgagaagcgatgaagtcggagactttaacattagttctggtgtatctcgccggaatcatggagagagccgatgagtctctgcttccaggagtttacaaagaagttggagatgctctacacgtggatcccacagctcttggaacattaactctgttccgctctattgttcagtcttcttgttaccctttagccgcttacttgtcttctagacataaccgagctcacgtcatcgctctcggtgctttcctctgggccactgccactttcctcgtcgccgtctccactactttcttccaggtggcagtatcaagaggcttgaacgggatagggctagccattgtgacacccgcgattcagtccctagtcgctgactcaactgatgactataaccgtgggatggcatttgggtggttaggattcacatcaaacattggttc

SEQ ID NO: 124064 - DNA, 578 bp, Arabidopsis thaliana
cgcgcaagctctaatacgactactatagggaacagctggtacgcctgcaggtaccggtccggtttcccgggtcgacccacgcgtccgaatcaatcttgagattgtgtcaagaaacctcaagagtgaaaatgagttttttcagatcaaagacttcaaaaactgaaacacaacaaccatcatcgtatggacaacaacaagacgctatgtactcatcttacggaaccgtgagtgacgaagtgttattacagattcatggatgcagagctcatctcatcaacggatccgaagctgtggagctagccgccggagacttcgagcttgtacaagtcttagacagcaacgtagccttagctatggtcgtgaggatcggaaatgacttacaatggccggtgattaaagacgagccagtggtgaaacttgactctcgtgactacctcttcacgttgccggttaaagatggagagccacttagttacggcatcacgtttttccctattgatgaaaatgacatcgtttttgtgaatagtatcgagttgctagacgatttcttgagagagaattcttgtttctcttcgtct

SEQ ID NO: 124065 - DNA, 1169 bp, Arabidopsis thaliana
  unsure (1)..(1169): unsure at all n locations
nnnnnnnnnnnnnnnnnnnnnnnnnnnnnnnnnnnnnnnnnnnnnnnnnnnnnnnnnnnnnnnnnnnnnnnnnnnnnnccacgcgtccgcccacgcgtccgtacggcgcgagaagacgacagaagggtacggctgcgagaagacgacagaaggggaacgcagaatctgagaataagctaaccgattccgatttcgagttcgtcgccgggaggaatgaaccggttgaaggagcaaaaggggccgaagttcgacggcgaagaatcacctccacctgattttgatgaagatcgaagtgtgggtgaggtagacggaggagatcacacgccattcgctggaggtaaagtcagaaggaaagcgtctcgctatagagagcatcgtggtgactatcttcacgtttcttctcgtcctggattgatgcgaattctggagaaacaaggtgatacatcgattctttttgctgataaagttttgaagttcaccggctcggggaagatgaaacggcgtatttttatcctcactgattttgcgatctatctaattgatcccgagactgaagctatgaccaggagaattgctttgtcatcagtagagaagatgtgtttaagcaaattgagtgataacttcttcgctatcattattcccacggaatatgatctcttcatggccagcactaggaagactgagcttgttcaggtcatggtagatgtcactaaaagtgcttctgactatgaacttgaagtgcttctctctaacagatttgagtacaatgcatctgcctcattagtaaaggaagtttcttttgaggaatctgaagggggtatcaagaccaaatttgtgtggaagtgactacatctcaactttcctcgctgttcataaactttggagggaccactagtaagatctgtttcgactttcgaatgtcttttctgttggttactaatagctgaaatcatggtggtatgtgttgtttattatattctgtttcgactttcgaaaatgtgaatggattctttcatgtaacacaagaccagtagtgtcaatataagatacaaatggttacaagtatatttcaaatattgttagnnnnnnnnnnnnnnnnnnnnnnnnnnnnnnnnnnnnnnnnnnnnnnnnnnnnnnnnnnnnnnnnnnnnnnnnnnnnnnnnnnnnnn

SEQ ID NO: 124066 - DNA, 420 bp, Arabidopsis thaliana
cggacttcttgggcggacgcgtgggcggacgcgtgggtggagatttttctaacgcagaatctgagaataagctaaccgattccgatttcgagttcgtcgccgggaggaatgaaccggttgaaggagcaaaaggggccgaagttcgacggcgaagaatcacctccacctgattttgatgaagatcgaagtgtgggtgaggtagacggaggagatcacacgccattcgctggaggtaaagtcagaaggaaagcgtctcgctatagagagcatcgtggtgactatcttcacgtttcttctcgtcctggattgatgcgaattctggagaaacaaggtgatacatcgattctttttgctgataaagttttgaagttcaccggctcggggaagatgaaacggcgtatttttatcctcactgatttt

SEQ ID NO: 124067 - DNA, 694 bp, Arabidopsis thaliana
  unsure (1)..(694): unsure at all n locations
nnnnnnnnnnnnnnnnnnnnnnnnnnnnnnnnnnnnnnnnnnnnnnnnnnnnnnnnnnnnnnnnnnnnnnnccacgcgtgcgcgcacgcgtccgtccaattgttcttctctcttcttcttcttcttcttcttcttcttcttcgccgcttcttctctctcgaattcaccccatctcaagtgtacgttagcctcctccctctaatggcgactcgtcttcagtttgagaacaactgcgaagttggtgtcttttccaaactcactaatgcctattgcttagtcgctataggaggctctgagaacttttacagtgcttttgagtcggagttagcagatgttatccctattgttaagacctctattggaggaacacgaattattgggcgtctttgtgctggaaacaagaatgggcttcttgtacctcatacaacaactgaccaagagcttcaacacttaaggaacagtctacctgatcaagttgtggtccagcgaattgatgaacgtctgtctgctcttggaaattgcattgcctgcaatgactatgtagctctttgcccacaacgaccttggttaagggaaccgnggnaataatagcgggtgtacttggcgttgaagntttccgcagacaatttcaggaacattnttgtgggaagtnnnnngcccttccaacaaggnggatggccnccccaaactcnnc

SEQ ID NO: 124068 - DNA, 568 bp, Arabidopsis thaliana
  unsure (1)..(568): unsure at all n locations
ccnnnnnnnnnnnnnnnnnnnnnnnnnnnnnnnnnnnnnnnnnnnnnnnnnnnnnnnnnnnnnncctccgtcccacgcgtccgcctccgtcgtctcctccttcttcctccgtcgctcaatggcttcctcaacaatctcctcggatataatcactccatcaaacaccaaaatcggatggatcggaaccggagtcatgggccgatcaatgtgtggacacttaatcaaagccggttacacagtcaccgtcttcaatcgaaccatctccaaagctcaaactctcatcgacatgggtgctaacgtcgccgactcaccaaactcagtcgctgaacaatccgacgtcgttttcaccatcgttggttatccttccgatgtccgtcacgtccttctcgatccaaagtccggagctttatctggtctccgtcaaggaggtgttctcgttgatatgactacttctgagccttctttagcagaggagatagctaaagctgcttcctttaagaattgtttctcaatagacgctcctgtctcaggtggagatttaggagctaagaatgggaagctatctata

SEQ ID NO: 124069 - DNA, 686 bp, Arabidopsis thaliana
tacggctgcgagaagacgacagaagggtacggctgcgagaagacgacagaagggtacggctgctgagaagacgacagaagggggcagcctttggatattcggcggaatcgaaaatggtcaagggacgccaaggagaacgagtcagactctacgtgaggggaaccatcctcggatacaaaaggtcgaagtccaaccagtatccaaacacgtccctcgtccagatcgaaggagttaacactcaggaggaggtaaactggtacaagggaaagaggatggcttacatctacaaggctaagacaaagaagaacggtagccactaccgctgtatctggggaaaggttaccaggcctcacggtaacagcggtgttgtccgtgccaaattcacatccaaccttcctcccaagtccatgggaagcagagtgagagtcttcatgtatccgagtaacatatgaagcaatgcaaaaatggcttaaacttataatttagccgccttggttttgttcactagtttgttattttgtattttgatattgaaagcatttcctttctttgtttgaagtgtttggagattctctaaattgactttgatcatggatccggtttttcatcccaaaaaaaaaaaaaaaaaaaaagggcggccgctctagaggatccaagcttacgtacgcgtgcatgcgacgtgatag

SEQ ID NO: 124070 - DNA, 512 bp, Arabidopsis thaliana
tacgttaggggacccactctcggataccaaaggttgaagttcaaccagtatccaaacacgtccctcgtccagattaaaggagtttaccctccggaggaggtaaactggttctagggaaagaggatggcttacatcttcaaggctaagacaaagaagaacgggagccactacccctgtatctggggaaaggttaccaggcctcacggtaacagcggtgttgtccgtgccaaatttacatccaaccttcctcccaagtccatgggaagcagagtgagagtcttcttgtgtcccacccccataaaaaacaatgcaaaaatggcttaaacttaaaatttaaccgccttggttttgttccccagtttgttattttggattttgaaattgaaagcatttcctttctttgtttggaaaaaaaaacaaaaaaaaaaaaaaaaaaaaaaaaaaaaaaaaaaaaacaaaaaaagcggccgctctagaggatccaagcttacgtacgcgtgcatgcgacgtca

SEQ ID NO: 124071 - DNA, 527 bp, Arabidopsis thaliana
cccacgcgtccgcccacgcgtccgcaaactcagtgagtgagtcaccgaaaacctcttgtagtagattcgtgacgggtttgatcatctcttcgaggtcggttctagggtttcactacgagaatggacggagatgagctcaccgagcaggaaactgctctttatgaccgtcaaattagggtatggggagctggtgctcaaagaagattgagtaaatctcatgttttggtatctggaattaagggcactgttgctgagttttgtaagaacattgtgttggcaggagtaggtagtgtgactctgttggatgatcgattggttacaacggaagtcttcaacgcaaacttcttgattcttcctgatgaaaatgcttatgtaggcaaaaccgtagctgagatttgttgtgattcacttaaggattttaaccctatggttcatgtttcaatagagaaaggtgatttgtcaacacttggtgttgattttttcgagaagtttgatgttgtggttatcggctacagttctcgtgctac

SEQ ID NO: 124072 - DNA, 694 bp, Arabidopsis thaliana
tgatactccagctctatacaactcacttatagggaaggctggtccgcctgcaggtaccggtccggatttcccgggtcgacccacgcgtccggaaaaattcattcctctttgaatgttgttttttattcccgtcgtacagatcaaaaaccaaacagtccctctcgacctactggattcccgttttgcttttgatcacatcttcgtcattgagcttcttcttcttctcgatccctgttggttttggttgttgtttttgatgaactgatagtggagatcagagatctggaaaacagagccgtgtgttactgtttcggattgatggaactgaagaaacgttgtgagaaagttagggaaactgtgaagaaatgaagttttacatatcagcgacggggattaagaaggttacgatatcaaatcccggcgtcggaatcggtaaaggaagcggaggatgtgcggctgcagcggcggcgttagcagcgcggagattctctagtcgcacgttgttactgttgctgctgctgctcgctatcgtcctcccttttatcttcgtcaggttcgcgtttctcgtcctcgaatctgcctccgtttgcgattcaccactcgattgcatgggactcagacttttccgtgggggcgacacatctctgaaaattggggaagagttgacacgggctctagtggaagagacgacaga

SEQ ID NO: 124073 - DNA, 1131 bp, Arabidopsis thaliana
cacacgcgtccgcaaaaacactatggataagacaatgacactgttcttgctcttgtccactctcctcctcacgacttctttagctaaagatctctgtcataaagatgacaaaactaccctcctcaagatcaagaaatccctaaacaacccttaccacctcgcctcatgggatcccaaaaccgactgttgctcttggtactgcctcgagtgcggcgacgctactgtcaaccaccgtgtcacttccctaatcatacaagacggcgagatctccggtcagatcccccctgaagtcggtgacttaccgtatcttacatcccttatcttccgcaaactcactaacctcactggtcacatccaacccactatcgccaagctcaagaacctcacttttctcagactaagctggaccaatctcaccggtccggttcctgagtttctgagtcagctcaagaatcttgagtacattgacctttccttcaatgacctctctggttccatacctagttccctctcttcattacgtaaactcgagtatcttgaacttagtaggaacaagcttacaggtccgataccagagtcatttgggacgttttcaggaaaggtccctagtcttttcctatcacacaaccagctctctggtactataccaaagtcactaggcaatcccgacttttaccgcatcgatttatctcggaacaagcttcaaggcgatgcttcaatcttgtttggagctaaaaaaacaacatggatcgttgatatatcaagaaacatgttccagttcgatctctccaaggttaagctcgctaagacacttaataacttggacatgaatcacaatggcatcacagggagtattccggctgagtggagcaaagcttattttcagttactgaatgttagctataacagactgtgtggacgcatccccaaaggagagtatattcaaagatttgattcttattcctttttccacaacaagtgtttatgtggtgcacctcttcctagttgcaagtgaagattccagcaaaaccaagcattatctctgatataccaaataattaatcaagtctagtgccaattgtgtttttattttgaatgattaataaaagcatgaaccaatgttttagcttg

SEQ ID NO: 124074 - DNA, 374 bp, Arabidopsis thaliana
tttggaccgaaaaaaaaaaaaaagaattcatccccaaatctgcacctcctctcatcttcttcatctccttcaatcttcattatttataacctagaacgactgaatctttctctctctttatctccattttctaggtgtgcttatcacagctagaaagttcttacatttaaatcgccctagttggagaaagccgtcggtttctcattttgaaatttccaaggagatctgaaagttttaattttttggatcgatttcatcgttatcatactccgatcatcagttccgttcaagggttaatcgtaaatcgttcatcgggttacttaaagaggtttactgaaagcaaaatactttcttactcattgtagggagtaaga

SEQ ID NO: 124075 - DNA, 842 bp, Arabidopsis thaliana
  unsure (1)..(842): unsure at all n locations
gtcggtttccatgttataagataggggttgaagactaatcgcagtatcatccgcggttcacttccttcgtttcgaaattattagggttactgcgtatttgcactctccttcttcggctctccagcttgacaatgcctcgctatgatgatcgctatggaaacactcgcctctatgttggtcgcttatcatctagaactcgtaccagagaccttgagcgtctctttagcagatacggaagagtacgagatgtggatatgaagcgtgattatgcctttgttgaatttagtgatcctcgtgatgctgatgacgcaagatattacttggatggacgggatttcgatggaagtcgcatcactgtggaggcatcaagaggggctcctcgtggttcgcgggacaatggtagcagaggcccacctcctggttctggtcgctgttttaattgtggtgtcgatggccactgggcccgagactgcacagcaggagactggaagaataaatgttaccgctgtggtgaaagaggacacattgagagaaactgcaaaaacagtcctagtccaaagaaggccaggcagggtggaagctattccaggtcaccagtcaaatcccgctcccctcgtcgccgaaggagcccaagccgtagccgtagttacagtcgaggtcgcagctacagtcgatcgcgatccccagtgagaagagagaaaagcgtggaggacagatcacgcagtcctaaggcaatggagcgatctgtatctcccaaaggtaggggccaaagcctttagttccagaccngaaaagtgnttgatncaagccccaaggcntggnttcaaacttttgattggtag

SEQ ID NO: 124076 - DNA, 376 bp, Arabidopsis thaliana
aacctcaattcggcgatttctctatcaaaaagtctcattcttcgtctggatttgagaggaatttgatcaaatcgatgaatggatctgtttccgaagatgattcttcgattgaggtggtggatactccagcggtcaatggatgcggcggaggatttagaaaagtcacggttctgccgtcaacttctgctggagatatcgctggattgttatctggcgttgaggttgcggcgaggacgtctctgcctgtgagaggacgcgccgttttgaatttccggtggggcgttagggttcctacggagaatcagacgcgatttcgatccaacggcctgctatttcgttgaggagattcccttttttgggtgatgaaataaaatag

SEQ ID NO: 124077 - DNA, 440 bp, Arabidopsis thaliana
gcgggggtatgtacgtctgctgccagagatgcttcttccgtttcagctgcagcttcagcttcagctggctctgagatggatgccagagttgaatttgatctagatgaaggttttgatggagacgatgcacaacatggggacgcaaataacttctctggatctgtagttttgacgcctactcctctacaaccacttaataccttaccttttccggtggctcctgtatctagtggaattcctgcatccattactgttgctgctgccgtcaaaggtccgtttgttccacctgaagatctgttgagatataaaggggctgctggttggagaggatctgctgccactagtgccttccgcccagctgagccaagaaaagctcaggatgtgttactgagcattaacaatacctctacatctgatgcatctacttctgctggcaaaca

SEQ ID NO: 124078 - DNA, 778 bp, Arabidopsis thaliana
aaggatacctccaggttttattacaattcattttagggaaggctggaccgcctgcaggacccggcccgaatttccggggtcgaccccacgcgtccgcccacgcgtccgcccacgcgtccgattgcattgcctgcaatgactatgtagctcttgcccacaccgatcttgataaggaaaccgaggaaataatagcggatgtacttggcgttgaagttttccgtcagacaattgcaggcaacattctcgtgggcagttactgtgccctatccaacaaaggtggaatggtccatcctcacacctcagtggaagacttggaagaactctcaacacttcttcaagtccctctcgttgcaggaaccgtgaaccgtggtagtgaagttatcgctgcgggtatgaccgttaatgattggacctctttctgcggttcagacacaactgcgactgagctctctgtcatagacagcatcttcaagctaagggaagcccaacccagctctatcgtcgatgagatgaggaagtcattgatcgatacctatgtttaaattttgtttgtttggatgacacacacatcccaacatcgccaatgtgtcaatgtcagaaaattttcatactctactgtttgcaagaattagctgttttattttatttttgtgtggtttttaacagtttaaaggaaatcctggttaagttttaaaaaaaaaaaaaaaaaggccggccccttcaaaagatcccagcttacgtacgcgtgcatgcgacgtcatagctctttatagtgtca

SEQ ID NO: 124079 - DNA, 509 bp, Arabidopsis thaliana
  unsure (1)..(509): unsure at all n locations
tcccccccagtggaagacttggaagaactcttacccctttttttaagtccctctcgttgcaggaaccgttaaccttggtagtagagttatccctcccggtatgcccgttaatgattggacctctttatccggtttagacacacctcggagttaccctcctgtcatagacagcatcttcaagctaaggggaagcccaacccacctctatcgtcgatgagatgaggaagtcattgatcgatccctatgtttcaattttgtttgttccccccccccacacatcccaacattcgccaatgtgtcaatgtcagaaaattttcatactctactgtttgcaagaattagctgttttattttatttttgtgtggtttttcacagtttaaaggaaatctgttgatgtctctttgaatctttctggagtaaccccaagctcaagggcgcccgctctagaggatccaagcttaggtacgcgtgcaggcgacgtcatagattttnntagagtggcacctaa

SEQ ID NO: 124080 - DNA, 570 bp, Arabidopsis thaliana
aggtgaattatagaagagcttgacgtcgcatgcacgcgtacgtaagctcggaatcggtgtgtaagtgaagaagaaaaataaggaagaagaagaagcagcagcaatggtggagaagtcaggaggagaagtcaatttcccaaaattggagaaaccaacaggcaagaaacagacagcgacggttgttgtgggagtgttggcggtgggatggctggcgatagagctcgtgtttaagccattgttcaagaagctgagctcctccaaggacaaatccgattccgacgatgccaccgtccctcccccgtcgggcgcctgaatatggtgagtgagaatttaacaaagcctctgcgggagacacgtgtgttgaagctcattttattagcaaatcttgtgtttctttttgtaatatcgttcggacttttacgtactgctttgatgatgtccttttttaatttatcccccctttcaaataaaatcccgacaagggtaataaaatcaatgagagatacgatgtaattggtttttattttcttgtttgtcctgggttttgttggtactaaataaatcttgatt

SEQ ID NO: 124081 - DNA, 626 bp, Arabidopsis thaliana
atcaaaccctaaacctaaaaccccttattttcccgccaatgtatcaatccatgaatctatcagtttcttccaatttcactcaccgatcactcctcgaatcacgatttcctatattctccaccggattccgcaaatccgtcaatctcaaacctccccgtgtctcatctggtcctgaatccaacgattcaggtcacgaaaccttaaccgataagcttatccatctcctcagagctgttccagattgggcagacgagattaaagagcgtgggatgcagcagaaacgctctctctacacacacgagaaatgggttgaacatagaagctctcttcgccatgtgcgtcatctactctcgagcttttcttcacgagttatactctccctgattccacctgttttcttcttcacaagcgtcgcggttgtgatcgctagctacaactccgccgtggctttggattggcttcctggtatttttccaattcttcgatcctcgtcgttgccgtatcagctcacagctccggctttggctcttcttctggtctttcgtacggaggcttcggattttaggtatgaagaaggaaggaaagcctggggtgggattattgctggaactaatgatttagctagg

SEQ ID NO: 124082 - DNA, 386 bp, Arabidopsis thaliana
agaagatgctaccttttctgtgttgaaaatggatgagattgtcaacggggaatctaaaaccaacttggaacttgataaacgtcgctgacgcaagtaaaacaattgtgagaggaataagcggtggagctgaaacgattgctaaagagagagttgacaccgtagtgatcggtgccggagtcgtaggtttagcggtggcgcgtgagctcagtctccgcggcagagaagttctgatcctcgacgccgcatcatcgttcggcaccgtgacgagttcccgcaacagtgaagtcgtccacgccggaatctattatccaccaaactctctaaaggccaagttttgtgtaagaaggagggaattgctgtataaatactgctctgaatatgaaatc

SEQ ID NO: 124083 - DNA, 541 bp, Arabidopsis thaliana
  unsure (1)..(541): unsure at all n locations
cgcgtccgatctctctctctcttattaactcaatgacggcgactgcgtttagggtcggcttgtggttggccgttacggcttcctttctcttaaccgcaacaaacgccaaaatccccggcgtttacagtggcggaccgtggcagaatgcacacgccactttctacggtggcagtgacgcctccggcacaatgggcggcgcgtgtgggtacgggaacttgtacagccaaggatacggtgtgaacacggcggcgttgagcactgctttgttcaacaacggattcagctgtggtgcttgttttgagattaagtgtactgatgatccgagatggtgtgttccgggaaatccatctattcttgtgacggcgacgaacttttgtccgccgaattttgctcagccgagtgacgacggagggtggtgcaatccgccgcgcgagcattttgatctcgcatgcctatgttcctaagatcggttttacgtgaaggatttnccngttctnttgaaggaccttttgganangggggnaagttcaagaanggtnnc

SEQ ID NO: 124084 - DNA, 369 bp, Arabidopsis thaliana
  unsure (1)..(369): unsure at all n locations
gggaaatccatctattcttgtnacggcgacgaacttttgtccgccgaattttgctcagccgagtgacgacggagggtggtgcaatccgccgcgcgagcttgttgatctcgccatgcctatgttcctcaagatcggtctataccgtgcaggcattgtccccgtctcctatcgcagggtaccttgtcggaagataggagggataagattcacagtaaacggattcagatacttcaatcttgttctggtaactaacgttgccggcgccggagatattaacggagttagcgtaaagggatcaaagacagattggggtgaggatgagtcggaactgggggacagaactggcaatccaacgccgttctcatcggc

SEQ ID NO: 124085 - DNA, 505 bp, Arabidopsis thaliana
gggttttggcgttttgagttgataaaccattcttagttgtgaatcagggatacaagagagagaggaaagtggttttacggtgaccggagagatgaacggagaagggatctctgatggtttgtcggctgagaggaaagtggaaattagagtgaggaagaatgggagaaaggataaggttatagttgagaaatctgctgctcaaggtttacctgaaggatggatcaagaaacttgaaataacaaatagatcaggccgtaaaaccagaagagatccattcttcattgaccctaaaagtgagtatatctttcaatccttcaaagacgcatcacggtatgttgagactggcaatattggacattatgcacgtaaattgaaagaaagtgatatcgaagatgatgattccggaaatggaaagactgttcttcgtctggagtatgtggacaagagatctgcagatgatgtattggaaaaagagaaaacgatagatgatgtcagaagaagtaaa

SEQ ID NO: 124086 - DNA, 440 bp, Arabidopsis thaliana
cccacgcgtccgttaagagtcaatatggtggtcatgattttggttcgacatcttcatacggtccttggatagaatctgaggttgggattactgagtatgcaaaactaggaagcagcaacaaatctcaaggtcagcggacattgaatccattggcccgtcagttctctcttgcagatgctaaacaaaagccatatggctatggtaaaaaccaagctgcagatgatttatcgctagtggtgaatactagcggtttatacattccagctcgttatagggacgaccataatgtagtagatgcagacttagcacaatcctcagtaaatgtggagcgttttcttcccaacatgtcacatggcggttcttcacttataactccaaaggcagacagtaactttgggtctactaagtggattgcggtggagccaaaccctacattttca

SEQ ID NO: 124087 - DNA, 470 bp, Arabidopsis thaliana
gtcacgtttgttcatctctctcttatatatttgtttaaaggcttcgtctttgttcatttgcttttgttgatctcattacttgttcatcaatggcaagtctttgtttccaatctccttccaaacccatttcctatttccaacccaaatccaatccatcgccaccgttattcgccaaagtctccgtctttcgatgcagagcttccgtacaaaccctcgtcgccgttgagccggagccagttttcgtctccgtcaagacttttgcgccagccaccgtcgctaatttgggaccagggtttgatttcttaggatgtgccgtcgatggtctcggagaccatgtgactctccgtgtagatccctctgtacgagccggtgaggtctcaatctcggagatcaccggaaccacaacaaaactcagcacgaaccctctccggaactgcgccggaatcgctgctattgctacgatgaagatg

SEQ ID NO: 124088 - DNA, 780 bp, Arabidopsis thaliana
  unsure (1)..(780): unsure at all n locations
nnnnnnnnnnnnnnnnnnnnnnnnnnnnnnnnnnnnnnnnnnnnnnnnnnnnnnnnnnnnnnnnnnnnnnnnnnnnnnnnnnnccacgcgtccgccggcttctctcattctcatggtagctgttacgcctgcagttgtcgttgtttgcctcatgttcttcatcagacctgttggtggtcacaagcagatccgtcccactgatggagccagctttactttcatctacggtgtctgtcttctacttgctgcctatctcatgtccgttatgcttattcaagatctggtcgttgttagccacaacgtaatcactgtgttcaccattgtgttgtttgtcattcttgttgtcccaatcttggttccaatcatgacaagtttcttcacggagacaaacgagcctgatgacacaatagaagaacctcttgtcccaaaacgagaagaccaagaaccaggactgcaaacacctgatctaatcttgagtgaagtggaagatgagaagccaaaagatgtagatttgcttcctgcctcagagagacataagagaattgcgcatttgcaagcacagctaatgcaggcagctgcagaaggggcggttcgggtgaatagacggagagggccgcatagaggggaagatttcactctaacgcaggcactggtgaaagccgacttctggctcattttcttctccttgctgcttggttctggttcgggtttgacagtaattgacaatcttggtcagatgagtcagtctcttggttatgataacactcacgtgcttgtgtc

SEQ ID NO: 124089 - DNA, 543 bp, Arabidopsis thaliana
  unsure (1)..(543): unsure at all n locations
cagnnnnnnnnnnnnnnnnnnnnnnnnnnnnnnnnnnnnnnnnnnnnnnnnnnncgacgtgttaatcttcttcctcctgaagatctctctctgaaagacattctcaaattttctcgggaaaacacctttttctgattcgtttttctccagatcattccttctttcttatatccgatttcttcgggaggaggcgaagagacggtcaacaattttatccaatgtcgcgccgtcttttcgcctgtttcggcctcaagaaatcttcaactaaacctatctctggtggtaacaattccgccgccgtagccgcagaaattcccgccggagatggtcccgttctcgtccagctattctcgtctcagggatgtaaaacatcgcccgcggcggagatgttgatgtcccggctaggtcgaggtgatttcgacgctcagatccgtggcgaagatggtggatctggatctccgacgatggttttggtgtttcatgtggattattgggattacaaggggtggaaagatccgtatggatcgagccaatggacggtga

SEQ ID NO: 124090 - DNA, 993 bp, Arabidopsis thaliana
  unsure (1)..(993): unsure at all n locations
nnnnnnnnnnnnnnnnnnnnnnnnnnnnnnnnnnnnnnnnnnnnnnnnnnnnngcttctcacactaacccacgcgtgcagaaaaagagctcgaaacaaaaatggagggaaccttctcgccgctttgcttacgttcttcttcgaacctctgttacttctccagtaatgtttcaccagattctcaccgttctataggatttacattggttgattcgctccggccaacgaacttggtttccctgcgaacgggaaataaacgttcgtcatcgtcttcactacggctatttctctctccgactagaagcgctctccgtacgccgactatttccgcggaggaggtgaaagatgtcccgatgccgaagattgataagagcggccgattaagcagtcctcgagccgcacgcgagctcgctcttgtaatactttatgccgcatgcttagaaggctctgacccaattcgtctctttgagaagagaataaacgcaagaagagagcctggatacgagtttgacaagagttctttgttggaatacaaccacatgagctttggaggacccccagttaaaacagaaacaaaagaagaagaagatgagcttgtgcgccatgatgaaaaagaatcgaaaatcgaagccgaagtgctttcagctcccccaaagctggtgtacagcaaacttgttttacggtttgcaaagaaactcttggctgcggtagttgataaatgggatagtcatgtcgttatcatcgagaaaatttccccgccagattggaagagtgcaccagctggaagaatattggagttttcgattcttcacttggcaatgtctgaagtggcagtccttgaaacccgacacccgattgtcattaacgaggctgttgatcttgcaaaacggttctgcgatggatcagcaccacgcataatcaacggatgcctaaggacatttgtcaaggatagagcaacaacatcaacacctcaagctttagaattgaagcaaga

SEQ ID NO: 124091 - DNA, 390 bp, Arabidopsis thaliana
cggacgcgtgggcggaagccattgattcagttacagttacaagtttagggttttaaagccatatcttgcgaatggctataatcgcaggtaatcatctctaaaattctctctgcagtttgtctttcccgaattgataagtcagtcgcttctgcaactgtgttccttctgatacccaaaactttccatttgggatagtggcagaattagtggaagaagtaagcatgagcagggtcgagcatgtattgaactatctgaaacgtaggcagctcgagaatcctggtttcttatatgcaattgaggacgattgtgggaatgttttctgggcggatccaacttgcaggttgaattacacctactttggtgataccctagtctttgacaccacctata

SEQ ID NO: 124092 - DNA, 468 bp, Arabidopsis thaliana
ccgtttgcagaaatggagactggtgctggtataggtttgtaccctttgcatcgctgcaaaaccatttacctagtgagacatgctcaggggattcacaatgtggatggggagaagaattataaggcttacatgtctcatgactactttgatgctgagttgacccagcttggctggaaacaggtagatagtttgcgtaagcatgttcattccagtggacttcacaagaagatcgaactggtcatttcgtctccactgatgagaaccttgcaaactgctgttggtgtttttggtggagagggctacacggatatgagtgatgtactacctctaatggtagcaaatgcaggaaatagcagccgtgcagctatatcgagtttaaactgcccaccagttattacagaggagtcctgcagagagcatttgggagtgcatccatgtgatcagaggagaagtatcagcgactatcag

SEQ ID NO: 124093 - DNA, 607 bp, Arabidopsis thaliana
  unsure (1)..(607): unsure at all n locations
nnnnnnnnnnnnnnnnnnnnnnnnnnnnnnnnnnnnnnnnnnnnnnntttaaannnttaaaancgatctgaccgcgcgtccgaagaaaagaagaaattcgggagtcggagaaattgtcgggtggatcgatgaatacttgtcagtttatggataagcagataatggatctatcttcttcttcatctctaccttccactgatttcatcgatctgatgaacaatcatgacggcgatgatcaccagaagaagcaggtgatcggcgataatggattggactctaagaaagaagtgatcgttcctagctatgatttccatcccatacgtcccaccaccgccgcacgattgtctcactcggctttagatctcgccggatccacgactagggttaattggtccgcctctgattataaacccgtttccactacttcgcctaacactaattttggatctctcgattctattgaaccttccaagttggttcctgacaagggtcaaaatgtgtttaacacgactattatgtccgagattatagataggacaatgaagaaacataccgataccttgcttcatgtaatggaaggtgttagtgcacgtctttcacagctgga

SEQ ID NO: 124094 - DNA, 368 bp, Arabidopsis thaliana
cggacgcgtgggttcgaccaaaaccttctcctctcctctgggagatctccatcttcttcgcttcttcgcttccccgcctgaaacaattactcgatctcgccggcggaacaagctctccgtttctctttccggcagatcgattcttccaattccttattcctttctaggtcttccttaagaaacccttactttcttcaaaatctgcatttatggcgattagggttaccttcacctactccagctatgttgctaggagcattgcttcatccgccgggactcgtgtcggtaccggcgacgttagatcatgcttcgaaacatgggttcgtctcaggttctgcggccacaatcagataccagatattgttgat

SEQ ID NO: 124095 - DNA, 568 bp, Arabidopsis thaliana
  unsure (1)..(568): unsure at all n locations
cgtgatgtggcttgggcaccgaacttgggtctcccaaagtcaaccatagccagtggttcagaagatgggaaagtgatcatatggaccatagggaaagaaggtgagcaatgggaaggtactgttttgaaagatttcaaaacaccagtgtggcgggtctcgtggtcgttgaccggtaatttgttggctgtttccgatgggaacaataacgttacagtgtggaaagagtctgttgatggagagtgggaacaagtgactgttgttgagccatagattgttgtttgtttgtttggttatcttttgttttgtggtaatatcaaaatgtggtgtgttctgtatacaatttctagggacctgtttctctctatacgtttctcaggaaagtatattcttatgtattttaatcagacaacagagattgcaaaagaaatgtatttttcataaaactttttaattccgataatgaggttttttttactggtaaaaaaaaaaaaaaaagnnnnnnnnnnnnnnnnnnnnnnnnnnnnnnnnnnnnnnnnnnnnnnnnnnnnnnnnnnnnnnnnnnnnnnnn

SEQ ID NO: 124096 - DNA, 950 bp, Arabidopsis thaliana
  unsure (1)..(950): unsure at all n locations
atgatactccagctctatacactcactataggaagctggacgcctgcagtaccggtccggatttccggtcgaccacgcgtccgcgaccgcgcaattctccctttagcttcaaagatccgaggcagaccagttagagtcaatgtcaagattcgaatgggattagggctattcatatcattcttagcaatggcggtttccgcaactgttgaacattacagaaggaaaaccgcgataagccaaggactcgcaaacgatgccaactcaacagtgagcatctcagcaatgtggcttgtaccacagtatgtactacacggtttagcagaggccttgaccgggataggacagaccgagtttttctataccgagtttcctaaaagcatgtcgagtatcgcagcttcgttgttcggtctaggaatggcagtggctaatatcttggctagtgtgatcctaaatgcggtaaagaatagctcaaagcagggcaatgtgagctggattgaagataacatcaacaagggtcactatgactattactattgggttttagcgatcttgagcttcgttaatgtcatctactacgttgtgtgtagctggtcctatggtcctacggtggatcaggtgaggaatgataaggttaatggtatgagaaaagaagaagaggaagttattaaattaaactaagcccaattggttgatcataattaaatggtgtacgtgtgttataaaattctatatatttgtatgtaattagattattatatcatggatttggattttcttaggatgtaaaggttgatgttaattaatgggtcgtgtgtttatttaattattccccnnnnnnnnnnnnnnnnnnnnnnnnnnnnnnnnnnnnnnnnnnnnnnnnnnnnnnnnnnnnnnnnnnnnnnnnnnnnnnnnnnnnnnnnnnnnnnnnnnnnnnnnnnnnnnnnnnnnnn

SEQ ID NO: 124097 - DNA, 1009 bp, Arabidopsis thaliana
  unsure (1)..(1009): unsure at all n locations
atgtactccagctctaatcgactcactatagggaaagctggtacgcctgcaggtaccggtccggaatcccgggccccccacgcgcccggtgcggcctcttcctcttcctcttctaaacaatgacggaggaagaggtagctatggaagtggaagctctagaagcagtttacagcgaagactgcgttatactggattcgtatcctcctcatcttcacctccatatcaagccccgtaccgccgaaatctcttctcagcagtttgtggaagccgttgttagattccaagcaggttctaagtatccagatgaaccacctcggattagtctgattgaatccaagggtcttgacgagcaaaggcaaaagcttttgattggcatagtgcaagagaaagcttctcaactatcatcttctttaatgcttgtagaactttgtgaggaagcagtggagaggctcacaattatgaatcacccggagggagattgtccactgtgtttgtatccgttattccctgaggatggcgggagtaaacaaatgccatttatgaagctgatgtcttgttttcattggttccactgtgagtgcatcattaggtggtggaattggcttcatgcacaggaagaggctgattcgaaatctggtgacactttacatatgcgtagaggatcaactgctcgagaaggtaattctggatcagcagataaaagcttgggaaactgtccagtgtgccgcaaaatttttcactcgagtgacattgaacatgttcttgacttagttggtgctcaatcatctctacaggactntagtttaataccaggcaaggaccaagncccgntgctccagtcagattcagagancataagaagagagcggtttnaggtctattctaaaagacggcaggntgaaaaagggtggttttgggtcaacccgntngaaaaacatattcggtggtgcccggntatntatcttncctccacctggctcatntatnaacgtnacggaaccgtgganga

SEQ ID NO: 124098 - DNA, 896 bp, Arabidopsis thaliana
  unsure (1)..(896): unsure at all n locations
atgatttgccnnnnnnnnnnnnnnnnnnnnnnnnnnnnnnnnnnnnnnnnnnnnnnnnnnnnnnnnnnnnnnnnnnnnnnccacgcgtccgcccacgcgtccgaaataattgagttttttttttaattagaaacaaatggggttgagtggtgttcttcatgtggaggttgaggttaagtctccggctgaaaagttctgggtagcccttggcgacggcatcaatctcttccccaaagctttccctaacgactacaaaaccatccaagttctagccggcgatggcaacgctcctggctccattcgcctcattacttatggagaaggatctccactggtgaagatatcggcggagaggatcgaagcagtggatttggagaacaaaagcatgtcgtacagcatcattggcggagaaatgttggagtactacaaaaccttcaaaggaaccatcaccgttatccctaaggatggtggtagccttctgaaatggtctggtgagtttgagaagaccgcccatgagattgatgacccacacgtcatcaaggactttgctgtcaagaacttcaaagagatagatgagtatctccttaagcaaactagtgcctaacactagaacctttaaattatataagagggttcgaccgtctctataagatttttctaattaagaagttgaataaagtggaacccctttatgaatatccacgttttatgatttcggagtttatgcagcctagtaggccataagctttttacaaaagccaatttagtcgaacattttgaaaaaatcgaaccttgtggtagagtaattatttggctcaaaaaaacaaaaaaagnnnnnnnnnnnnnnnnnnnnnnnnnnnnnnnnnnnnnnnnnnnnnnnnnnnnnnnnnnnnnnn

SEQ ID NO: 124099 - DNA, 593 bp, Arabidopsis thaliana
  unsure (1)..(593): unsure at all n locations
nnnnnnnnnnnnnnnnnnnnnnnnnnnnnnnnnnnnnnnnnnnnnnnnnnnnnnnnnnnnnnnnnnnnnnnnnnnnnnnccacgcgtccgttctcttattataagaagacaggagtgccaaaacgtgtaatgttccatgagaatggtgaatggattgatttgcctgatcatattctatgcgacatcaggaatgatcttgaagcaaagagagctacaattgagttcaattggtgcggtcgccattttctcctggatttcttgcacatgtatcgactagacttggaaacaggtgtaaaaacccagcttgcttggattgatattgctggcaaatgctttttccctgaaacttttgacaccctcgaaagggacggctgccatcatatccgtggggaagatccggaacaacatgatcaacgtgagatcaagctgcacattgaaattgatgtaaatagtggggagttaccgaggctgaatttgaatgtggtcactgacgagtctggtgacaatatggatgattttcaagctgttcagagatcctcaaatgggccaaatgacgaggcatcagaggatatctgcagccgtgagcttgatga

SEQ ID NO: 124100 - DNA, 549 bp, Arabidopsis thaliana
  unsure (1)..(549): unsure at all n locations
cnnnnnnnnnnnnnnnnnnnnnnnnnnnnnnnnnnnnnnnnnnnnnnnnnnnnnnnnnnnnnnnnnnnnnccacgcgtccgggtttttgaaatttctatcttccatttccatctgatgaatctctgacgatgtctttgagaactcgagcatcgtcatggcctcgtcttctacttcgccggaaccctagatcttcattttctcgtcagatatctactctcgattcctcaacatcaacatttcccagaagaatctccggttactactcctcctccttctttcccgtaaatcaaacgccatggatctcatctcagaggtaccgtttcttctcctcaagcacaatgtcaccatcggaagctgatagagtagtgagagaacttatagcagaggttgagaaagagaagcagcgtgagagagaggagagacaaagacaaggacttgattacaaagacattgatgccgaagacgaagaagattacttagggattgagccgtttatcgagaagcttaagaagcagaatttgaaagatgatggttgaataaataggcgt

SEQ ID NO: 124101 - DNA, 496 bp, Arabidopsis thaliana
gggaaagctggtacgcctgcaggtaccggtccggaattcccgggtcgacccacgcgtccgcccacgcgtccagaagaagactaactgtgttttttttttctttcctcgatgcctagatcaagcagatgggtcaatcagcgagctacctctaagattaaaaaatttatactctttttgggtgtagcctttgtcttctacctctacagatacccttcttcgccatcgacggtggaacaatcatccacttccatctacaacatttccgttaaggatattgaagggaaagatgtgagtttgagcaagtttaccgggaaagtgcttcttatagtcaatgtagcctctaagtgtggtctaacacatggaaactacaaagaaatgaacattctgtatgccaagtacaaaactcaggggtttgagatcttagcatttccttgcaaccaattttgtagtcaagagccaggcagcaacatggagatcaaagaaacccgttgcaata

SEQ ID NO: 124102 - DNA, 838 bp, Arabidopsis thaliana
cagcactatacgactcacttagggaaagctggtacgcctgcaggtaccggtccggaattcccgggtcgacccacgcgtccgcattttctcaaactctctctaatccataaaaatggaagcagtaacggcgattaagccacttatcagagtcgctgctctctctggttctctccggaaaacctccttccatactggtctcctccgcgctgcgattgatttgacgaaagaatcggttccgggattgcaaattgagtatatagatatatcaccgttaccgttaattaacacggatcttgaagtcaacggtacttatcctccagttgttgaagctttccgacagaagattcttgaagctgatagtatcttgtttgcttctcctgagtataacttctctgtttcagctccacttaagaatgctcttgactgggcttcaagaccacctaatgtttgggcggacaaaccagctgctattataagcaccggtggaggttttggtggaggaagatcgcagtaccatcttcgacaaatcggagtcttccttgatcttcatttcatcaacaaacccgagtttactctcaatgcatttcagccacctcagaaatttgatgcagaaggaaaccttgtcgatgaagtgactaaggagaggttgaaacaagtccttctctcgttacaagcattcacacttcgacttcaaggtaagtaaatgaagtggattaattcttgatcatttgagattggtcgtgtgataaaaataatgccaattgttgtgataataaacagtgtataacactctatttctcattcatttatgttttaataaacgattggtgaactggtg

SEQ ID NO: 124103 - DNA, 862 bp, Arabidopsis thaliana
aaaataaatttgtattaaccactctttaaattcatcctctggatctgttgtactcgtatagagaaaaaatggcgtatcctgagagatctctcattgttgatcctagaagtggtttctgcaaatcaaactctacattctatagcaagcgccaaccattaagtctcccgccaaatctttcgcgtgacgtcaccacattcatctcctctcagccacaccgtggcaaaaccgcctttatcgacgctgccacaggccagtgcttaaccttctccgatctctggagagccgtcgatcgcgtcgccgactgtctatatcatgaagtcggaatacgaagaggcgacgtcgtcctcatcctttctccaaactccatcttcattcccgttgtttgcctctccgtcatgtctctcggcgccgttttcaccaccgccaacactctcaattcttccggtgaaatctccaaacagattggcgccagtaatccaactctcggcggcactacgcgccagctggcaccaaaactccccgtcgctatctccgtcgttctcaccgacgacgaagtttaccaggagctcactagcgcaatcagagtcgttgggattttaagcgagatggtgaagaaagaaccgagtgggcaacgagtcagggaccgagtcaaccaggacgacacggcgatgatgctttactcgtcgggaaccacgggaccgagcaaaggagtgatctcgtctcaccggaatttaacagctcacgtggctagattcatatcggatgatttgaaacgagacgatattttcatctgtaccgatccgatgttccacacctacggtttattgacctttgctatgggcaccgtagcattgggttcaac

SEQ ID NO: 124104 - DNA, 489 bp, Arabidopsis thaliana
ctcaatctttttcgtcgtcaaaagccaaagctttttgcttttttgtcttaatgggtttcatctcttgcatctcatttccgacgatcaattcaagaattctatcgactcaccacttttccaagcactcgacttcagcgtcttcttcatattcacttaagtttgctttgagacgtcaggaggataaacccaaagtctcgttttttcttccattaacgtcttcgttaatggcgacccctattcaagcctcttcttcctccaccattggtgagaccagtgatggcttgaaggtccagtctcatgtttcaattggagcaaacgatctgctgattgttggaccgggtgttcttggacgcttagttgcagaacagtggagacaggaacatccagagtctcaaatctttgggcagacagtaacaacaaatcatcatggtgagttgtgagaatttgggtttcaaaccatctcttaaaggaaccgcatatgggggaaag

SEQ ID NO: 124105 - DNA, 527 bp, Arabidopsis thaliana
  unsure (1)..(527): unsure at all n locations
nnnnnnnnnnnnnnnnnnnnnnnnnnnnnnnnnnnnnnnnnnnnnnnnnnnnnnnnnnnnnnnnnnnnnnnnnccacgcgtccgcccacgcgtccggaaacaaacacgagaagaaatacttctacaaaaggaaagaagaagataaaagaaatccttcaaaaagcagatgctgcagggacaacttctgatctctatatggcttacaaagggcctgaggaaaagaaagagagctcaaatgttgttcatgatgtttcgaaccagaacctgttacctgccatacctcaggctgttgaagccattgtggatactgaaccagtgaaaaatgaaccagaagactgggaagatgcagccgatgtttctacaccaaagctggaaactgcagataattctgtgaatgcaaagagaggttcctcagatgaggtcagcgacaactgcatcaatacagaaaagaagtactcccgggatttcctcctaaagtttgcaaaccctgggtactgctcttcctgagggattgaacgtttcgcctg

SEQ ID NO: 124106 - DNA, 582 bp, Arabidopsis thaliana
aatacgacttctatagggaaacctggtacgcctgcaggtaccggtccggaatttccgggtcgacccacgcctccgttcttcttctcttgatcaccattgctattgcatatgctgcaactcctgcccaaccagtatttccatctgcatttaacgcagaagtctccacatatagaggaggacaaacaccagtttaaggggaatggttctatagcggggctctcaatgctgaaagatttgattgtgatatgattgatcacaatgaccaacctgttcatgaagcattttatgcacttcataatgaatcaactgagatatttgatgaccactgctggggggagcttctcatgcagaaaacttaacattggatccaaaccttttgttccatctctcaactggattcacttatactggattagatgttggccaaactcaatatgccaaccccggcatacaaatggataaacccctaccaactgataaaccaaaggttcctacatcaaaggactgtcaaaaacctccggtaaagaaaaaaatctttggcggaaaaatggatcatttaccctctggcgttgtaaggaagtt

SEQ ID NO: 124107 - DNA, 1289 bp, Arabidopsis thaliana
  unsure (1)..(1289): unsure at all n locations
ctatcgggaaagctgtgtacgcctgcaggtaccggtccggaattcccgggtcgacccacgcgtccgaaaaagctcaatggatggggaatattcggatctaagtacgaggatgctgctgatctgctcgaaaaagcagctaattcctataagctcgccaaatcatgggatcaagctggaaaagcttatctaaaacttgccgactgtcacttaaagtcagatagcaaacatgatgctgctaacgcctatgctgaggctgctaaatgctacaagaaagttgacactaatgaggctgcgtcttgcctagagcgagcggtgaatatattttgtgagataggaaggctcaacatggctgcaagatattacaaggaaattgctgagtattatgaatctgatcagaagttcgagcaggctattgcttactttgaaaaggcagctgaattctttcagaatgaagaagtgaccacttctgcaaaccagtgcaatctaaaggttgcgcaatatgccgcccagctggagcagtatgagaaggcaatcaagatttatgaagacatagcacgccattcactcaacaataacttgctcaagtatggagttaagggccatcttctcactgctggcatgtgccacttatgcaaagccgatgttgtttccatcactaacgctctggagaagtatcaggatctggatccaacttttactggaacacgggaatgcaagttcttagcggaccttgcttctgctatcgatgaagaagacatcgcaaagttcacagatgttgtcaaggagtttgatagcatgactccactggattcatggaagacaaacaatgttgttgagggtgaaggagaagctcaaggccaaggagctagaggaggatgaccttacatagacatatttatccagagcgttgctttttattcattcccgggttgtattgtcactatgtccgttacttcatgtccgactcttctttgattttattgtgtctggttttgagttttaaagtttcttaagaggtttggtcaaattgggtttgtttggtatcgacgtctacaattgttctctgcgtctcgtcacttcatttatgggaactactcaagtctggagttttttttatattggttaaanatctgtggagagttttnttcgttcagcgattatttgatgcatcgagaggatcatgtctcgattatttgtttgcttttacgtctacatctatctaataaacgtgtgctttttcttcctgttaacgacaatttgtagtgttttgattaaaaaaaaaaaaaaaa

SEQ ID NO: 124108 - DNA, 716 bp, Arabidopsis thaliana
gcggtcgcgcgggatcgattctcgtctctctctctttcatcgcagcgaataatccaaatcgaaagcaatttctctcgacgaagaaaagagaagcaatcggagtctgtggaggtaaagaagtacacgatcaaatttcaagtcagagtttcggggaaaaaaaaggaatgggggatcatctggtgagagctgaggaattcgagaagaaagctgagaaaaagctcaatggatggggaatattcggatctaagtacgaggatgctgctgatctgctcgaaaaagcagctaattcctataagctcgccaaatcatgggatcaagctggaaaagcttatctaaaacttgccgactgtcacttaaagtcagatagcaaacatgatgctgctaacgcctatgctgaggctgctaaatgctacaagaaagttgacactaatgaggctgcgtcttgcctagagcgagcggtgaatatattttgtgagataggaaggctcaacatggctgcaagatattacaaggaaattgctgagtattatgaatctgatcagaagttcgagcaggctattgcttactttgaaaaggcagctgaattctttcagaatgaagaagtgaccacttctgcaaaccagtgcaatctaaaggttgcgcaatatgccgcccagcttgagcagtatgagaaggcaatcaagatttatgaagacatagcacgccattcactcaac

SEQ ID NO: 124109 - DNA, 575 bp, Arabidopsis thaliana
cttacccttggctggcatagaggcgatactttcgtgcgatgatccccaaattgcttctgaggaggctgtttatgattctgtctggaaatgggcacggggacagtatagttcattggaagatcgtacagagattctgggttcacgccttgcactctacatccgcttcccatacatgacgtgtcgaaagctgaaaaaggtactaacgtgcagtgattttgagcatgaagtagcatcaaagcaagtattagaagcgctcttcttcaaagcagaagccccacacaggcaacgcatcctcgcagctgaaggatcggactccatgaaccgccgtttcatagagagggcttacaaatacagacccgtaaaagtggtggagtttgagcttcctcgcccgcaatgtgtagtgtacctggacttgaagcgagaggaatgcgcaggactattcccttcaggaagagtctattctcaggctttccacttaggaggtcaaggtttcttcctctcagcacactgcaacatggaccagcaaagctcgttccactgctttgggctattcctcggaatgcacgagaaagggg

SEQ ID NO: 124110 - DNA, 533 bp, Arabidopsis thaliana
  unsure (1)..(533): unsure at all n locations
atgattctccagctacatacgactcacttagggaaagctgctacgcctgcaggtaccggtccggaattcccgggtcgacccacgcgtccgcccacgcgtccggatcattcgactctcattagtactgctacttgcatctgagtttatgaattgggacaatggatctgcagattgtgtgtgatctgatgaaaccattgttgtgtttttttgtttcatctcaagaaactagctaaagagatctgttactggggncccaacccacgcagaccgctccttaaagtttacctggggttggggcttaaccacgtatcacttctttggggggctttaatgtttcatttagtctttttgggcccacccccaccctggcggattggcctcaaaatttttttttcacggaaacccccgggatggtttttagatttcctcgctgcccactgtttatatgtgctgtttattttatttggtggtctgtccatttcctttaatatttgccgcgggccgtttgttatttatctacattgttcgttttc

SEQ ID NO: 124111 - DNA, 898 bp, Arabidopsis thaliana
  unsure (1)..(898): unsure at all n locations
nnnnnnnnnnnnnnnnnnnnnnnnnnnnnnnnnnnnnnnnnnnnnnnnnnnnnnnnnnnnnnnnnnnnnnnnccacgcgtgcgcgcacgcgttcgcccacgcgtgcgcccacgcgtgcgtacggctgcgagaagacgacagaagggggaagaaaaacagatcaaaatagagaaatattgaaattcgtgcgttgagagaaaaacgttgaacgatgggagccggtaatggagaaacgccaaaacctacacagatttcaatttctaaagatcaattcctcgcttggaaacgccaaaaggatgctgagttattagccaaacaagctgaagcagcaaggaaacgacaagaggacatagcttcaggtcgtgttccaatgaatggtcgtgagcttttcttgcatgagccttgggttttcgacgatactcatcattgattctgggctattcactacttcttcataggtaacagagatcattcgactctcattagtactgctacttgcatctgagtttatgaattgggccaatggatctgcagaattgtgtgtgatctgatgaaaccattgttgtgtttttttgtttcatctcaagaaactagctaaagagatctgttactgcattatctattgatgttgtctatttatgtgtgtttcaggtgatttaagacatttcctcgatgatttgtgatccaactctgtttctcttttgttgttgtactctcatgttcccacttttgtctcaagtgttaaatcagaaatttagtcctcagtaattgtgacttaatcgttggctctgtttnnnnnnnnnnnnnnnnnnnnnnnnnnnnnnnnnnnnnnnnnnnnnnnnnnnnnnnnnnnnnnnnnnnnnctnnnnnnnnnnnnnnnnnnnnnnnnnnnnnnnnn

SEQ ID NO: 124112 - DNA, 441 bp, Arabidopsis thaliana
gatgaatcctccaccgtagatttttgttcatccaacggtccccagctgatgattgacattttgctctgtttcccactactagacttttgtgactcatgaaaggtaagtaaaaaggcattggagatggaatctaagtaggatttgtgcagtaaagaagtaaaacgggatctgtcaaaagaaggaaaaagctctcgcttgcttggctagtatttatcattttgatgaaagtaactcttttttgttcaaagactttagtgtgattttcaggaccaagggctttgagggtagtgctagctgtagtaatagtaatgaaggtgtgggatcgtgtttctgaattatgtaaaaaaggaagaaaaaacaaatgttggtattataaaaaatattaatttaaaagggttagcccggccgctctaaaggatcctagcttacgtacgcgtgcat

SEQ ID NO: 124113 - DNA, 517 bp, Arabidopsis thaliana
cagacacatcttcttcaatcgtcaaaccagaaatgaatcctccaccgtagatttttgttcatccaacggtccccagctgatgattgacattttgctctgtttcccactactagacttttgtgactcatgaaaggtaagtaaaaaggcattggagatggaatctaagtaggatttgtgcagtaaaaaagtaaaacgggatctgtcaaaagaaggaaaaagctctcgcttgcttggatagtattaatcattttagttctcttaacctattgatgttgtctatttatgtgtgtttcaggtgatttaagacatttcctcgatgatttgtgatccaactctgtttctcttttggtggtggactctcaatggtcccacctttgtctcaagtggtaaatcagaaatttagtcctcaataaaaaaaaaaaaaaaaggcggccgcttctaaaagattccagcctacggacggcgggccatcggcgttccatagcttcttctaatagtgtcaccataaatcaatccg

SEQ ID NO: 124114 - DNA, 357 bp, Arabidopsis thaliana
taagtaggatttgtgcagtaaagaagtaaaacgggatctgtcaaaagaaggaaaaagctctcgcttgcttggctagtatttatcattttgatgaaagtaactcttttttgttcaaagacttttagtgtgattttcaggaccaagggctttgagggtagtgctagctgtagtaatagtaatgaaggtgtgggatcgtgtttctggtttatgtaataaaggcacaaaaaacaaatgttggtcttatattatggttttgcctctcttaaaaaaaaaaaaaaaagggcggccgctctagaggatccaagcttacgtacgcgtgcatgcgacgtcatagtctatctatagttcgcctcaatt

SEQ ID NO: 124115 - DNA, 558 bp, Arabidopsis thaliana
  unsure (1)..(558): unsure at all n locations
ctagaaaggtcaaacccaaattctacaagtatccacattttccccaggtcccctgtcctataagttatcttcctctaacaaccggatcaattagcatccctctctcttctccccagtgataaaaacaggaccaatatcatgccctcgcaaactttatttatctcctcgggaagtaagctcctcaaggactgtctcttggatatcccaagctttctcaatctcctgaccataatgtccctgaaacgccgcttcccttctttattcggagggcacagcctattaaaaagagccttgtcgnattncagttccagatctctttagctattgatgttgtctatttatgtgtgtttcaggtgatttaacacatttcctcgatgatttgtgatccaactctgtttctcttttgttgttgcactctcatgttcccacttttgtctcaagtgttaaatcataaatttagtcctcagtaaaaaaaaaaaaaaagggcgaccgctctagaggatccaagcttacgtacgcgtgcgatgccacgtcatagctcttgctatagtgtcacct

SEQ ID NO: 124116 - DNA, 665 bp, Arabidopsis thaliana
  unsure (1)..(665): unsure at all n locations
ccagctccaatacgactcacatatatggaaagctggcacgcctgcaggtaccggtccggaattcccgggtcgacccacgcgtccggaaatctgctgtaagtcacagtataatatggagtagaccactcactgcaaaacgagtagagatcgatggagctactgcttattctgttgatggaactcctgcggattgcactggtttgggcttatcggaagcactctttccttctcgtcctgacctggttctgagtggtataaacgtgggtagcaactgcggttataacatcgtctattctggaactgttgctggcgctcgtgaagccttcctttatgatgtgccttctgcctccatatcatatgattttgattggaaacgtggagagatgaatgctaatgattttgccctttctgcccaagcctgcttgcccattatcaacggcatactcggtgcaatcaagaacaaaactcaccctatgcaatgctttctgaatatcgatttgccgactgatattgctaaccacaggggatacaaactaactagacaaggtaaaagcatgggtaaaatgggatggagacaagtggaagaggaagcacangggccgaagatgttatcaacaatgacaatggatacagagtcaggagtagtctcatcagagaacgacaca

SEQ ID NO: 124117 - DNA, 414 bp, Arabidopsis thaliana
  unsure (1)..(414): unsure at all n locations
ggccgacccacgcgnccgaacnacaagctccaaaagcnnncnccnncnatttttctcttatcncnannncgtacggaggggtgtaaccgttgcgatggagattgaccctcgagatcgtacttccggtgaacgaccgatcattatggtcaccaacgacgacggaatagacgcgcctggccttcgttctcttggtcgtgtcctcgtctccactaacctcgacgatgttcgcgtttgcgctcctgattcggagaaatctgctgttactcacagtataatatggagtagaccactcactgcatcacgagttgagatccatggagctactgcttattctgttgatggaactcctgcggagtgcactgggttgggctcatcggaagcactctttgcttcttgatctggcctggttctgag

SEQ ID NO: 124118 - DNA, 1124 bp, Arabidopsis thaliana
ggttactcttcggttcttttgagcctagagttgcgtattgtgatgctgctgctgcaatagatgatgattaccttggtgctatacggaaaatgtctgcggatgttttgcagcgtcaaccccttgcgtatatttctaggccccgcgtgcgcaatatccagccaaaaccagttctctcggcctttgagttcagggcacttgcaatgactacagtgagatcccttttgatgttttatttgcctcttttggagcctaaaacggcttcagaggatgatgatgatttcctaaacaatgctgcagaagaaaaccgccacacagacttgattgttcctcttaaaaagtcagcaaagcaaattgcccgtgagaccacagttgtgaccactcggagagtccttgaaaggctggctctgagttatgtctcacagcgtatggcatggaaacttctaaaggatgtgcctcagtcggctttacgcaaggctcaaagagggttgccgacacatgtatatatctttaaagtcagccaaacaactcttagaggtcacttcctgggaatcgcagcatcatgggtagttcaagtaggcattgaaatctacagatgtgtgttcccgaatgttaaacccgaggaagaagaagaagaggagaaagtcgagatatcacagcaagctaaggatctcggaaacaaagttgtgggtatcacagtacgatgtggcgcgtccttagtatttgctgccattggagccgggatatgttcttgccttatccgtccctccacgggccaatggatcggttgcgcgctgggagacttggctggtccgatggttgtttcggtttgcctgcagaagactcttcaagctgattattaagttcttgtgtggaaattgaattcttctacttgaatcttgatgatccaaatgaaatcatagagcttgttttttgtttctgaaatttcttattgtcttcactgaaccttaaaaacaatgatcaatagatttctcaaaatgtacctacttttgacaacagcacaataagtcaggtatttattttcctcaaaaaaaaaaaaaaaaaaaaaaaagggcggccgctctagaggatcccagcttacggacgcgtgcacacgaagtcacagc

SEQ ID NO: 124119 - DNA, 436 bp, Arabidopsis thaliana
agaaaactaaagaaaagggggctctttgattcaaagatccaaactttgacaattcaaaatccaacatagaacacggatcaagctttcaaattcagacagagatatgtcgtgtgcatcctcatctggatcagaggaagacgatgagggtcccgatgctttccgttttttggtggatatcacgccgtgagaatcggagaccagtttgccggtggccgcttacattgctcagagaaagcttggttggggccaattctccaccgtttgggctttggcctatgatactcgccacttctaattatgttgctttggaagattcagaaagagcgcccttacaattttgggtcaaagcctgccaacttcccatggaaattcggaacctttccttccaacccttgcttgcttgactggggggattcccctcgcaaaatttcccaac

SEQ ID NO: 124120 - DNA, 849 bp, Arabidopsis thaliana
  unsure (1)..(849): unsure at all n locations
gactgaacgtctgtgaagttcacgaccaaaccagtcttactctctcttaactaataatattgagatggcagacaatttgaatttggtgagtgttctgggagtcttattggtattaaccatcttccataatccgatcatcgtctacgccggcgagggtgttcccaacgtagctttgttcactttcggagactcttactacgacgccggaaacaaagtgtttctcagccaaaggaaagatcttccacaaacctattggccctacggaaaatcccgcgactaccccaacggcaagttttccgacggccacatcgtccccgacttcatcgctgatttcatctctattccgaatggagtactcccaccggtgcttaaaccgggcgttgatatttcacgtggagtcagctttgccgtcgccgatgcttctattctcggagcgccggttgaatctatgacactaaatcaacaggtggttaaattcaaaaatatgaaatcgaattggaacgacagctacatcgagaaatcactgtttatgatatacattggtacggaagattatttgaattttcacccagggccaaccccaattgcagacgcttctgctcagcaagctttttgtcactaacggttattaacccggttaaaggacggcaatcaaaattgttgtactcttttgggngcgngtaaaattcgngggttcaaatttgctagcacccattgggngtncttaccgntncgtaggncaaggntnnaaaaccggaaacgngtttttcgggnttgccnaatngttttggccaanaacattacgggaaantcgggccnattntaaaccggntttctaaaattaggntt

SEQ ID NO: 124121 - DNA, 588 bp, Arabidopsis thaliana
  unsure (1)..(588): unsure at all n locations
nnnnnnnnnnnnnnnnnnnnnnnnnnnnnnnnnnnnnnnnnnnnnnnnnnnnnnnnnnnnnnnnnccacgcgtccgcccacgcgtccgtacggctgcgagaagcgacagaaggggagagaagacagaacaaaaaaaacacaagaacagggcaaggaaaatgtcggttttcctctgtttcctcgtcctcttacccctgatcttaatcttcttgaacgttttgaaaccttcgaaatataagcttcctccgggtccaaagaagcttcccatcatcggaaacttacaccaacgcaggacactacatccgaggaatcgccgtaatctcgccgaaatgtatggaccagtggcgcttctccaatacggattcgtccccgtggtcgcgatctcttcgaaagaagcagcagaggaagtgctaaagatcaacgatcttgagtgttgtagtcgaccagaggcggccggaatgagagcaactttttacaacttcaaagacatcgggatggcacccttcggtgacgagtggagtctgatgcggaagctctcggtggtcgagctcttcagcgtgaaaaagcttcaatctttcaagtatatca

SEQ ID NO: 124122 - DNA, 538 bp, Arabidopsis thaliana
tgatctccagctacatacgactcactatatggaaagctgctacgcctgcaggtaccggtccggaattcccgggtcgacccagtttctctcttcgagcttccggaatctttggtgatcaccgaccggatctggacgaagaatctcgttaacaaactcaacaagcattctccaaagcttcctcctttttcttcaacgatcgtcattgcattgtaatttggagagtttagctacaaagtctgtcttcatcgaattaagatctatctgatttttctgggtggttctcatgtgtgagatttttgatgggtttagagttgtcggatatggaaggttcttcttatctttgatttgttttatatattaagcggcaaaatttgaggttgacttgagcgagaatctggattctttcgaggagtatttaatgttcctgagaattccctgtatttggcgcaagttttcatttttctgagtgttataaatttagaatcattactccccagatagagagagagggtgtaatctgaagaaagctctttgggga

SEQ ID NO: 124123 - DNA, 629 bp, Arabidopsis thaliana
gcgagctctatacgacttacttagggaaagctggtacgcctgcaggtaccggtccggaattcccgggtcgacccacgcgtccgggagactttgacttcttctgatgaactttcttctgcacttcttctcattaagcctccttgttaaaataatttgagatggcgataggaaacccagaagtagcaactatggggaaggagaacactgaagccgagtcctctaatggaaacgagtctcagttaagttctgacttaacgaagagtcttgatctggctgaagtgaaggaagacgaaaaggataataaccaagaagaagaagatggactgaaagctgaggcttcaacgaagaagaagaagaagaaaagtaaaagcaagaagaagaagagttctcttcaacagactgatcctccttcaattcctgttcttgagctcttcccttctggagattttcctcaaggtgaaatccaacagtacaatgatgataatttgtggagaacaacatctgaagagaagagagagatggagaggctgcaaaagccgatatataactctcttcgccaagcagcggaagttcatcgtcaagttaggaagtatatgagaagtatattgaagcctggaatgttgatgatt

SEQ ID NO: 124124 - DNA, 739 bp, Arabidopsis thaliana
  unsure (1)..(739): unsure at all n locations
cnnnnnnnnnnnnnnnnnnnnnnnnnnnnnnnnnnnnnnnnnnnnnnnnnnnnnnnnnnnnnnnnnnnnnnnccacgcgtccgcccacgcgtgcgcccacgcgtccgcccacgcgtccgcggacgcgtgggtgaacaatgggcaatcactctggcactctcagtcaccgaaaactccaacgacgatgctagatcgggctctttcctctcgccgtcctcactccgacgccgatctctctgcttccggcgaatccggaaccgacgaatctaaaaccaaacgcccacacatctacctccttgcttccaatttcctttctcggatcggtcatcagtggtggccttgtctcattctcgctctcctcttcctcgtccttctcttcctcatctccgttgctttccattctcacagctttgtttgcatctcccgcttcgatcccgctgctcggatcgggtttttcggtcttgatggcctcgaatcggattttggtgccctaggtgttccttggtgcagatcgaaacatggaaaagaagttgagtggacatccaaagattttacttcaaggggctaggaggaggtttgtgcccggtaatatgaaacacggcccgttaaaggaccaatattgtatggaattgggtttttgatcaaaaggctttggggtatgggtcaattgnccctttgggtaaaagccaggtattnttgattntgggtggggcttttaagggaagtctcctttgggtnt

SEQ ID NO: 124125 - DNA, 425 bp, Arabidopsis thaliana
cccacgcgtccgcttttttaaaaaggattactactgtttacttctctgaatgcgttcactgcttcacccgtactatcttactcacatctccgtctcattctcttatccggcgcacggctctcgccgccatggccaccaccgcctcctcttccttgctcctcccttccatatctctcaacaatctctcctcctctaaaaatgcctcctttggcttcgccgccaagaatctcagccgatctaggatttctatgagcgtctctgctggatctcagagtactactgttcacgattctctgttcgctgattacaaacccacctctgcttttctctttcccggtcagggagctcatgcagtaggaatgggaaaagagtctcagagtgttggagcagctggagagttgtataagaaagctaatgatatctta

SEQ ID NO: 124126 - DNA, 686 bp, Arabidopsis thaliana
  unsure (1)..(686): unsure at all n locations
agcccaagcgtccgggaaacatcacacattggtgacaaaaattcttaggaaaaccaattaatggaggtgcacaaggtggttgctccgccgcataagagcacggtggcaaagctaaagacaaaactgaaggcgcctttcttcccggacgatcccttaagacagttcagaggacaaccaaaccgtaccaagctcatacgcgccgctcaatacatttttccaatcctccaatggtgtcctgagtacagcttcagcctactcaaatccgacgtcgtttcaggtcttaccatcgctagtttagctattcctcaggggattagttacgcgaagctagcaaatttgccaccaatcgttggtctatactcgagcttcgtgccaccgctggtttatgcgggtcttggcgaagctcaaggagatctaggcagtggggaccagtctccatagcgtcgttaatcttaggatccatgctaaggcagcaggtcttctcccgtaagacgaccctggtctctttctacaggctaagccctctctgctacctccttgtgctgggcccctgtcgagcctctcttggattgcccagggtggggttaataataggctgtctacaaaagggcggtaataggggttatgggggggngagcataantggncntccaaaggtangggtggttggganccattccaagggg

SEQ ID NO: 124127 - DNA, 1056 bp, Arabidopsis thaliana
ggaatcccgctcgaccacgcgtcccgtcttcttcttcctcgcttaaacccattaattcaatttcttcatagccagcaataagatctggcaaattaaaccattccactatgcttcgtatagttcaaatcacgcttctttgtttcgttctcgccgccgggatctcgatctccgccgtgatcgccgagaatgaatctatagacgagatccttctagcgaatggattacctttggggctatttcctaaaggcgtgaaaggatttaccgttaatggcgaaacgggacggttctcggtttatttgaatcagtcatgccaggctaagtatgagacagagctgcattacgatgagattgtttcgggaacgataggttatgctcaaatcagggatttatcgggaatctcagcgcaagagctgttcttgtggttacaggtgaaaggaatccgagtcgacgtgcctagctctggtcttatattcttcgacgttggtgttcttcgcaagcaatactctttgtctttgttcgagacaccaagagattgtgtcgcggttcgtggcgatgccgagtttattggtgaaaacaaggttcagtcttcgatgttgccattgtatcaagtagatcaaactcttggaagaaacactgtttagcaggagttgaagaaatgttgttatactatacgagaaagatggaaaagatagatagatgctctcatctattcttgaagatactttctactgttttgatctcaaatcttaggcatgattcatggtcagatgcttcattctttcccttcccccatcccagtgttgtttctgcattgctttctccagattgcgagggtgacagaaccgagagaatctgtgagcggaagttagacggtaacaacgatgtcaggattggtttggaaaagatgttgaatgaatggctcagatttggttgaagtgatgaatgtttattattgtattctttttgtcttttgttctgttttgtacttttctcatgtaagcccagacataaataaacataatcttgtatttagccgaataagtgtgattataactc

SEQ ID NO: 124128 - DNA, 566 bp, Arabidopsis thaliana
  unsure (1)..(566): unsure at all n locations
atgatattgccnnnnnnnnnnnnnnnnnnnnnnnnnnnnnnnnnnnnnnnnnnnnnnnnnnnnnnnnnnnnnnnnnnnnnnnccacgcgtccgctcgatttcacaggcggaataaacaagttggatggactcggcaaaaagtatttcttctcatcccaaccaatttaggctctatgttattgttatatggttacagttattgttacttttcatggcgtgtatctgacacatccatcatgaaaattgcaggtacttcatcttatgattgcttcttcaaacactggttctgttatttatttcgtggctgcggttatagcgacttgcacaaggtggcatcattggtccaacgcattaggttttctactcatggcctttcccaaaattctgtttctggcaacttttctcctgcttctctctttctgggtagatgtttgccatcagggaaatggagaggaggatgatgatgatgatgaagaaaatagcatccaacaagtgttgcttgaaaaaagcaagagcaagccaggttcttcaatgcaagtgatcgtagaaagtgttgctctttccat

SEQ ID NO: 124129 - DNA, 491 bp, Arabidopsis thaliana
cctgcaggtaccggtccggaattcccgggtttacccacgcgggcgaacacccgtccggaaaattgcaggtacttcatcttatgattgcttcttcaaacactggttctgttatttatttcgtggctgcggttatagcgacttgcacaaggtggcatcattggtccaacgcattaggttttctactcatggcctttcccaaaattctggggctggcaacttttctcctgcttctctctttctggtatgtatattctcaatactctgatcatattgcgctgtccctgattattttatcttaataatgatctgagataagacaatgatgcttcttcatgttatagggtagatgtttgccatcagggaaatggagaggaggatgatgatgatgatgaagaaaatagcatccaacaagtgttgcttgaaaaaagcaagagcaagccagggtcttcgaatgcaagtgatccgagaaagtgttgctctttccatggtat

SEQ ID NO: 124130 - DNA, 498 bp, Arabidopsis thaliana
gctgccacgcctgcaggtaccggtccggaattcccggttcgacccacgcgtccgcccccgcgtccgcaaaaaaccgacaaaagcctctgtctcggacagggacagagaaacagaacagagcaagaacaatggctgttacacaaatacttgtcgtctttgcttctgcattactcctatcaatgttcttcactggcgtcgattccacaaggtctaatgaaacatggcatgaacatgcagttgagaatccagaggaagtagctgccatggtggacatgagcattcgaaacagcacagcgagaagaagattaggatacttctcatgctcaaccggaaatccaatcgatgattgttggcgttgtgaccggagatggcaatcccggcgaaaacatctagccaattgcgcaatcgggttcggtcgcaatgcaatcggcggtagagacggtcgttactacgtagtgagtgatccaaacgacgataacccggttaaccttaaaccgg

SEQ ID NO: 124131 - DNA, 480 bp, Arabidopsis thaliana
  unsure (1)..(480): unsure at all n locations
gacccacgcctccgcggacgcgtgagtgcctcttcctttttctttccttatatcgagaaaagcctctgcctcatatagagataactaaacagaacagagcaagaactatacagccataacaatggctgtcacaaaacttattctctttgcttctgcattacttctaacagctctatttatcggcgttaatgcatccaggtccaatgaaacatggcatgaacatgcagttgagaacccagatgaagtcgctgccatggtggacatgagcattcgaaacagcacagagcggagaagattaggttacttctcctgcgccaccggcaacccaatcgacgattgctggcgttgcgaccgcaaatggcagctccgtcgcaaacgtttagccgattgctctctcatcggggttttgggccgcaaacgnaaatngggaaggccctcgancgggtccggtttnttanggtcggtaaacccnacccttgg

SEQ ID NO: 124132 - DNA, 838 bp, Arabidopsis thaliana
  unsure (1)..(838): unsure at all n locations
nnnnnnnnnnnnnnnnnnnctcactatatggaaagctggtacgcctgcaggtaccggtccggaatcccgggtcgcccacgcgtccgtcttcctttaccaaatcttttcttctttactctttttcatcgtcgagaaaaaatggagttggatcttacacctaagttgcccaagaaggtttacggaggagatggtggatcttactctgcctggtgcccagaggagttgccgatgctcaaacagggtaacattggagccgctaagcttgctcttgagaagaatggcttcgctgtccctcgttactctgattcctctaaggtcgcttatgttcttcaaggatctggaactgctggaattgttctcccagagaaggaggagaaggtgatcgcaatcaagcaaggtgattcgattgctcttccctttggtgtggtcacatggtggttcaacaacgaggatcctgagcttgttatcctcttccttggtgaaacccacaagggtcacaaagcagggcagttcactgagttctatcttactggcacaaacggtatcttcactggtttctccactgagtttgttggcagagcctgggaccttgatgagaacaccgtgaagaaacttgttggttctcaaaccggtaatggcattgtaaagcttgatgcgggctttaagatgccacagcccaaggaggngaaccgtgctgggtttgntttgaactgtttggaggctcctnttgnatgtagacatcaagggntggnngcagggncgtttttttttaacacaaagacccttccctttngttgggnaggttggnttggggntnntnttntccggntcggtcaaa

SEQ ID NO: 124133 - DNA, 947 bp, Arabidopsis thaliana
aaattacttctcccgcggatttaatttaatatcccctacaaccttaatccttatttatccattattccaccttttgccctcttctctgttttcccattgagcctaaacagagcaccaatttgattaacaattctcaagtccaatgttctgaagcagagtaccaatgaagtgacggcggctgttcatcggagaagaaaccacaagcttcttcaccgcttagaaaatcctcgtgatcctctgtttgctctgttttcacaaactgtaagaaactcccgccagtaaccgtcacaggcggcgtcaatcttccgttatcagaacttgtttcgtcgttaagaacggcgcttgaatcgcaactatcggaagatccagcctcgacaacggtggaattcggtagaaggtcacggaggtcagtgaagcttcgccggtagttacacccagaggaatgttctagaaactgcagaggagacgaaggaatcgaatccgtcttgtgaacttcctcttccttaacaccctccgtaatagctttgttgttgttgttatcttcttcaccgtttaccttagctttgattttactaatctcttggagaagggaatcattgtcacggcggagagaatcgaaattgtggcggagagaatcgtattgacccttaagaacaccgtaatctttttcaagctgttttgttttccaccgtgcacgacggttctgaaaccaaacagctacttgacgaggttgaagtccaagctcttgtgctaatttagttttcctctcaggttcgagtttattctcaagttcgaaattcttctcaagagctttgacttggtcaacttttaatcttctcttcttctccgatagacccatgtgcggacgcgtgggtcgacccgggaattccggaccggtacctgcaggcgtaccagctttccctatagtcaacgtatatacaaggcgt

SEQ ID NO: 124134 - DNA, 683 bp, Arabidopsis thaliana
cccacgcgtcaggcaagaagcaggaggttcaagcaccaaccagattatggctttctgaagcaatatcttcagaaaacaaaataaagtttttatttgattttcttattaccatattatatactattaaataagaaattcaaagttttttttttccattctttctttcttccggaggagggagagtatgatatgggtctttcacgtgtgacattgatgagatgatgaattcaaattatatctcataccaaaaaaaaaacacaaccaagagaaagaggcgtaaccttctgatttctttcttttaagatatcaataaaatctttcacattttctaatttttaattcttttcaagattttgttgtctccttcaacaatccatcagaagtacgcagtttggtttccaggttaagtgcttacgacctgatcagaaaacaagggactatggaactcacgtgagccaaaaagaacactccatttcgatggagaattatccagaaacacagtttattcccggagattcaatgatccagaatgctatagtttcttactctggggcatcagccggctgagaaagaagaactgcagcttacaatgtctcagcctcacaggagaggcaagcattggtcatatttgggggagattcacaaatgcagaacattggtccagatttccgttcttggggaga

SEQ ID NO: 124135 - DNA, 1273 bp, Arabidopsis thaliana
  unsure (1)..(1273): unsure at all n locations
gcctgcaggtcccggtccggatttcccgggtcgaccacgcgtccgagcttcattctttcggggatgggctgcagcgcgggcctgatctcagttgatctagcccgcgacttgctccaagttcatcccaattcaaatgcaatcatcgtcagcacggagatcataacgcctaattactatcaaggcaacgagagagccatgttgttacccaattgtctcttccgcatgggtgcggcagccatacacatgtcaaaccgccggtctgaccggtggcgagccaaatacaagctttcccacctcgtccggacacaccgtggcgctgacgacaagtctttctactgtgtctacgaacaggaagacaaagaaggacacgttggcatcaacttgtccaaagatctcatggccatcgccggtgaagccctcaaggcaaacatcaccacaataggtcctttggtcctaccggcgtcagaacaacttctcttcctcacgtccctaatcggacgtaaaatcttcaacccgaaatggaaaccatacataccggatttcaagctggccttcgaacacttttgcattcacgcaggaggcagagcggtgatcgacgagctccaaaagaatctacaactatcaggagaacacgttgaggcctcaagaatgacactacatcgttttggtaacacgtcatcttcatcgttatggtacgagcttagctacatcgagtctaaagggagaatgaggagaggcgatcgcgtttggcaaatcgcgtttgggagtggtttcaagtgtaactctgccgtgtggaaatgtaaccgtacgattaagacacctaaggacggaccatggtccgattgtatcgaccgttaccctgtctttattcccgaagttgtcaaactctaaactgaaaacgtctttgaacggtttagtaacggtttgattttgtgttacggtttaggtttatttggtctcgggatttggtttaaaggggattgagaaatgggaagttagagagaagaaaaagcaaagcataaatgtttgtatttaattgctctgcatatacttaaatctctgcttttcatttggggtattttttagtttctcgtgctgtaattaataacttgtggtgtactcaaataagaatatttctctctgttttattatttttaaattggagaataaacttctttgttttaaaaaaaaaaaaaaaaaaagnnnnnnnnnnnnnnnnnnnnnnnnnnnnnnnnnnnnnnnnnnnnnnnnnnnnnnnnnnnnnnnnnnnnnn

SEQ ID NO: 124136 - DNA, 1156 bp, Arabidopsis thaliana
  unsure (1)..(1156): unsure at all n locations
cccacgcgtccgcaaaaataccctaatcacattttgtaacaataatacaattatacattaaaactctccgacgatgcctcaggcaccgatgccagagttctctagctcggtgaagctcaagtacgtgaaacttggttaccaatatttggttaaccatttcttgagttttcttttgatcccgatcatggctattgtcgccgttgagcttcttcggatgggtcctgaagagatccttaatgtttggaattcactccagtttgacctagttcaggttctatgttcttccttctttgtcatcttcatctccactgtttacttcatgtccaagccacgcaccatctacctcgttgactattcttgttacaagccacctgtcacgtgtcgtgtccccttcgcaactttcatggaacactctcgtttgatcctcaaggacaagcctaagagcgtcgagttccaaatgagaatccttgaacgttctggcctcggtgaggagacttgtctccctccggctattcattatattcctcccacaccaaccatggacgcggctagaagcgaggctcagatggttatcttcgaggccatggacgatcttttcaagaaaaccggtcttaaacctaaagacgtcgacatccttatcgtcaactgctctcttttctctcccacaccatcgctctcagctatggtcatcaacaaatataagcttaggagtaatatcaagagcttcaatctttcggggatgggctgcagcgcgggcctgatctcagttgatctagcccgcgacttgctccaagttcatcccaattcaaatgcaatcatcgtcagcacggagatcataacgcctaattactatcaaggcaacgagagagccatgttgttacccaattgtctcttccgcatgggtgcggcagccatacacatgtcaaaccgccggtctgaccggtggcgagccaaatacaagctttcccacctcgtccggacacaccgtggcgctgacgacaagtctttctactgtgtctacgaacaggaagacaaagaaggacacgttggcatcaacttgtccaaagatctcatgggccatcggccggttgaaggcccttcaaaggcaaacattacccaacaattaagggtccttttggtcctnaccggggntnaa

SEQ ID NO: 124137 - DNA, 589 bp, Arabidopsis thaliana
  unsure (1)..(589): unsure at all n locations
ccggggnggcgttcncggcccaaaactccnttcgggaccntgncccnaaatgcctcacgtttgtacncncacttcaccgtttggtcgngcttgctncacgggtctaagggagaatgaggaganccatcncgttggcaaaccncgtttgggagtggtttccaagtgtaactctgccgtgtggaaatgtaacccgtacgattaagacncctaaggacggaccatggtccgattgtatcgaccgttaccctgtctttattcccgaagttgtcaagctctaaactgaaaacgtctttgaacggtttagtaacggtttgattttgtgttacggtttaggtttatttggtctcggggtttggtttaaaggggattgagaaatgggaagttagagagaagaaaaagcaaagcataaatgtttgtatttaattgctctgcatatacttaaatctctgcttttcatttggggtattttttagtttctcgtgctgtaattaataacttgtggtgtactcaaataagaagaggtctctctgtttaataataacccccttggggggtttgcttctttgttttaaagaggtaaaaaatttaa

SEQ ID NO: 124138 - DNA, 552 bp, Arabidopsis thaliana
  unsure (1)..(552): unsure at all n locations
nnnnnnnnnnnnnnnnnnnnnnnnnnnnnnnnnnnnnnnnnnnnnnnnnnnnnnnnnnnnnnnnnnnnnnnnnnnnnnnnnnnccacgcgtccgtttgtctatctccctcttccatctcacatacttatatatttcatgcatgtcatgtgtatatatttcatgagttttgtctagttcatagaactgatgaactgatttagagagagagagatatatagggaaatttagagagtggtttgtgtgctttgagattctttgtgtgtgtgtgtgtgattaattactattgagattgagatcagaatgaaaatctccaaatctctctggagtgttatgatttctattctcttctatcttacttctgctccaccatttgtgatttgctcatctcttgaagtcaccattgataaccattcaccaagcaatctcaagactaaaggatccctagaacaagataagttgagtcatcaaatgataaatagcataaagcttcatggcattctcttatgggtttccatgggctttcttatgccaggggggattctcttcattag

SEQ ID NO: 124139 - DNA, 504 bp, Arabidopsis thaliana
tacggctgcgagagacgacagaagggtacggctgcgagaagacgacagaagggggagcattagaaatggaacagttttttgctctgtttaccatttttctatcttttgctttccccgggagatgcagcgacgttttcagcagatctgatttccccgagggattcctcttcggagctggcacttctgcttatcagtgggaaggagctgctgcggaagatggaaggaaacctagcgtgtgggacactctttgttactctcgtaacattggtaacggagatgtaacatgtgatgggtatcacaagtataaggaagatgtgaagctgatggtagacactaacttagatgccttcagattctctatatcttggtctaggctaatacctaatggaagaggctctgttaaccaaaagggtctacagttctacaagaacctcatcagcgaattaataacccatgggattgaaccacatgttacactgtatcactacgatcatcctcagtatc

SEQ ID NO: 124140 - DNA, 550 bp, Arabidopsis thaliana
  unsure (1)..(550): unsure at all n locations
nnnnnnnnnnnnnnnnnnnnnnnnnnnnnnnnnnnnnnnnnnnnnnnnnnnnnnnnnnnnnnnnnnnnnnnnnnnggcaaaatcagaacaaaacgagtggagctccggcgtgtgggctcacttaaccgccgtacggcaacaatcgccgcttgttcagtgcatcaccaacttcgtctcgatggatctcgttgccaacacgcttttatccgccggtgcatctccagcgatggtccattccgtcgttgagattcctgatttcactcctcatattcacgcgctctgcgtcaacgtcggaacacttacacctgactggcttccgtcaatgaaagctgccgctgaactcgcttctcagctccgaaagccttgggttcttgatcccgccgccgtgagttgctccggattccgattaaaagcgtgtttggagctcatcgagctaaaacctactggaatcaaaggaaacggttctgagattattgctctctcctctgcttcacgtggacaaactaagggtgctgatagctcacatgaatcaacagacgctatagaagct

SEQ ID NO: 124141 - DNA, 649 bp, Arabidopsis thaliana
accaagcgtccgggatgaaggttttagtgaagcacgtgttcttgcggaaatcactcttttgcctgacaagatccgtgttgcgtcagggagacgtgctgtggccatggccacaggtgttattgataggtactataaaaatggaactccccagaagcaggttgtggtcgttgttacctcaggttggtctgtgctctgctttgatcacaacctgaaaaagctgtgggaaacgaatctgcaggaggatttcccacataatgcacaccatagagagatagcaatttcgataagcaattacacattgaagcatggtgatacgggtttggttattgttggtggacggatggagatgcagccatataatcacatggacccatttgaggaacttggcatgacagcacaaaatgctgatcaacacagaagaagtgctactgagaatcaggcctctgaagattctggagccataaacttgcgtcacttttctgtctatgcatttgctggcaagactggccttcttcgatggagtaaaaagactgatgatgttgaagctcacacctcagatgcatcacaattaattccacaacacaattacaagcttgatgtgcatgctctaaatagccgtcacccaggagagtttgagtgcagggaattt

SEQ ID NO: 124142 - DNA, 592 bp, Arabidopsis thaliana
  unsure (1)..(592): unsure at all n locations
tctatacgcgctatttcaagaccaaaccttttctctcttctagagtgaaactgtggaagcaactctcacagagcagcaatggcggagaagtcgagcttcttcgttcatttcagctgtcttctgcttcttctaactatcataataacatgtggagagggagtgaggaatccggtgaggccaagatcatcggagagaagagcattgatggacggccaagatctctcgaggccattgaagctgacatttggtgggccttctcgtaattggactgacgctattcccatcggtaatggccgtctcggagccacgatctggggcggcgtctcctctgagattctcaacatcaatgaggacacaatttggactggagtaccagcagactacacgaaccagaaggcccctgaagcattagcagaagtgaggaggcttgttgatgaaagaaactatgctgaagctacttcagaagctgtcaaattatcaggccagccttctgatgttaccagattgtgggagattgaatttagagttgncagttcgatcggagacaccaagnccctatcgcgggaaccncttgaactgcgacnaagaagac

SEQ ID NO: 124143 - DNA, 835 bp, Arabidopsis thaliana
  unsure (1)..(835): unsure at all n locations
acgaactctagtggttggatttggtttaatgttgatacaacaattatctggagctagcggtatcacatattattcaaatgccatatttagaaaagctggcttttcagagagacttggatcaatgatatttggtgtgttcgtgatcccaaaagctttggttggtctgattcttgtggatagatggggaagacgaccactcctattggcttctgctgttggaatgtccatcggatccttgcttattgggggttagcttcacgttacagcaaatgaatctgcttcctgaattgatcccagttttcgtcttcgtaaacattctggtctacttcggatgttttgcattcggtataggagggctaccttgggtcattatgtctgagatctttccgataaatataaaagtttcagcaggaacaattgtagcattaacatcatggactagtgggtggttcgtgagttacgctttcaactttatgtttgaatggagcgcacaaggaacattttacatatttgcggctgtcggaggaatgtcattcatttttatttggatgctcgtaccggaaaccaaaggacaatcattggaagaattacaagcttcgcttacggggacatcctaaatgcacatttatattgtaatatactattaattttgtttggtaaaaagataaaatttattttctgttgtcagtcgcattgcaaataataaatgtattttgtaacattatttgcatattgatattaataatattttaaaaaaaaaaaaaaaagnnnnnnnnnnnnnnnnnnnnnnnnnnnnnnnnnnnnnnnnnnnnnnnnnnnnnnnnnnnnnnnnnnn

SEQ ID NO: 124144 - DNA, 573 bp, Arabidopsis thaliana
  unsure (1)..(573): unsure at all n locations
annccncgccctnctatgggtnctccgtccggaatgactntccngattnanccgtttcggctcanaanatcnggctncttggattttatcaccggtttggggcctccttggatcattatgtctgagatatttccgataaatataaaagtttcagcagggtcaatcgttgcattaacatcgtggaccactgggtggttcgttagttatggtttcaactttatgtttgaatggagcgcacaaggaaccttttacatatttgcgatggtggggggattgtcattgctttttatatggatgctcgtgccggaaaccaaaggacagtcgcttgaagaattgcaagcatcccttacggggacaacctaaatacacatttacatctattggcagtgtctttgcaaacattatttacataataaagtacacaacctgctcttcatagtgattgatgtgtaaaccttttccttgcgaacattgtcgtatatatcctagctatattttttccataaaagaaaacataaaaaaataatccaattcgcaattaataaaacaaaacccgacattagatttgtcctt

SEQ ID NO: 124145 - DNA, 1228 bp, Arabidopsis thaliana
aggcaaaggagcaaaaacgaaaccacagagagaaagcctccgtctcccttatcaaagaagaagaagacgtgtataacaaaacactagacacattgtgaagatagaaaaaaatggagagagcagcaattctcccgagtgttaatcaaaattacctactttgtccttcacgcgccttctccacgcgcctccactcctctactcgtaacttatcgccgccgtcatttgcctccatcaagcttcagcattcttcttcctctgtttcttctaatggtggaatctctcttactcgatgcaacgctgtttcgtccaattcttccagtacgttggtaactgaattagccgacatagattgggataccgttggatttgggcttaagccagctgattaccgggtcgacttacgcctacgcattcatggagagttctcaaaaggcgagttgcaacgttttgttaatattgaaattagcccatctgctggtgtactcaactatggacagggattgtttgaagggctaaaagcttacagaaagaaagatggtaataacatcctcctctttcgtcctgaggagaatgcaaagcgtatgagaaatggtgctgagaggatgtgtatgcctgctccaaccgttgagcagtttgtagaagctgtgacagaaactgtactaacaaacaaacgttgggttccaccaccaggtaaaggttccttatatgttagaccattgctaatgggaacaggagctgttcttggtcttgcgcctgcaccagaatatactttcattatctatgtttcgcctgttgggaactacttcaaggaaggtgtggcacctatcaatttgattgtggagaatgaatttcaccgtgcaactcctgggggtacccggaggggttaaaaccataggcaattatgctgcagaactgaaggcacagtccatttgcgaaagctaaagggatatttccgatgtttttgtacccttggattggcattttacaaaaaagatatttctttgagggaagggtcttcggtcctttggcaaaataatatttttcaattctcgcggaaaaggggaaccaaatgggtggaattacattcttaaactctcccccttgggaaaaaatttaaaagaagggggggacaactcccatatttttttaacccccccgggggtgatttttacccttctcgacacacaaaaaggctattttgaaataaaggaccgcttgtgggctttcg

SEQ ID NO: 124146 - DNA, 688 bp, Arabidopsis thaliana
  unsure (1)..(688): unsure at all n locations
tgatgaagaagacatcaatgactggcttccataaacttttaaagctctctctttcagattcctctctatccatttcattaacaccaaaacctttttcttctctctaaccaaacaagaagaggactccattttcgcaagaatggggaggcttaagcaatgttggtcaagtctgctagtattggcagtgttggtgatcggaactggagccgttcccatcacttatctccaaagcgccgtcgctaaaggagccgtgtgtttggatgggagtgcaccagcttaccattttgacaaagggtttggttcgggtgttaacaattggatcgtccacatggagggaggaggatggtgtaccgacgttgcttcatgtaatgaacgtaagggtacaatgaagggttcttccaaattcatgaacaaagactttggattttccggtatcttgggtggcaagcaaagcactaacccagatttctacaattggaacagaatcaaagtacggtattgtgacgggtcatcctttaccggcaatgtagaagccgttaatccggcaaacaagctgttctttcccggtgcccgagtttttgggtccgggtggttcatgaaccttttggctaaagggtttaaaaccgtcaaaacggttttttctcccggttgttcaattgggattngnttcgatnttattnngnanttt

SEQ ID NO: 124147 - DNA, 481 bp, Arabidopsis thaliana
  unsure (1)..(481): unsure at all n locations
gaatctaaagagaactaaaaagctcatgagactattacttagaagagaatcgatcagatatgattttagcgcatcttccaagattccatctctcaatcctcgcgaaaccttctttctctctctcttcttcgcatttcagtttcttaaaccctaagccttcggtaacagtatctcgaacccttttctcattcgcgtctaaatcgaatctcgccactgttgaacccataccattatcggtctcagattcaaccgatttggatgatgcacctgccgagattgcgctcgacaagctttttattccgccggagaccgatatatccggtgaagactcggcgagtttaacgacgaggatacttaagggttcgaatattgtgctgagcaagtacgcggcgagggacgcaccagggtgggttcaggctgatttaatggtgaaggggtaggttcaaaacggggggnttttcccgcccnttggnttcccgga

SEQ ID NO: 124148 - DNA, 998 bp, Arabidopsis thaliana
  unsure (1)..(998): unsure at all n locations
ctctatacgactcatttagggaaagctggtacgcctgcaggtaccggtccggaattcccgggtcgacccacgcgtccgcccacgcgtccgcccacgcgtccggtaggatacaagaagacagttgtaaattgaatacaaattcatcagagactaaggtaaagagcaagttttgttatggtgaaaaggaaaaggaaaggttcagtagaatactaagttgttatgttggatcatataatttccataacttcactacaagaacaaaagcagatgatccgactgcgaatcgtcaaatcatctccttcactgctaatactgtgattaatcttgatgggattgactttatcaagtgtgaagtcttaggcaaaagctttatgcttcatcagattcggaagatgatgggtcttgctgttgcaatcatgcggaattgtgcttctgaatcacttatccaaagtgctttcagcaaggatgtgaatataactgtaccaatggcgccagaagttggactttatctggacgaatgcttcttcacgttcttataacagacactttgaagacagtcatgaagaagtgtccatggaagcatacaaagaagaagctgaagcatcaaattgaagcatatctattctcatatcggcgctacagagcgaaaatacggaaatatggctctttggttacattccttgaactatagaaactatccagacctaaactttggcagctgtggacaaaacacagaccaagttcttgttcataagaaaattgatgaaagagcaagtcatagtctctaagcaaaatgatggaagcttagtttgaagattttgacattgtttttgttattgttggttaatcccaccatttttgtaactttttaatcaaattagtatatttttgtgttgtaaggtgacagtaatgaaaaaaaaaaaaaaaggtnnnnnnnnnnnnnnnnnnnnnnnnnnnnnnnnnnnnnnnnnnnnnnnnnnnnnnnnnnnnnnnnnnnn

SEQ ID NO: 124149 - DNA, 589 bp, Arabidopsis thaliana
  unsure (1)..(589): unsure at all n locations
ccccccctcgattacgacggtatcgcataagcttgatatcgaattcgcggccgcgcggctcaaagagagatcgagatcgagatccacacgacggagacgagagagagagagagagagctcaacggtgatgggatcttggcttccccagtattgcttcctcttcatcttctactgtcactcccacaataccaatcacttttcctgatatcgttagctgcattttctccgaaactcactctcttctcctactcaggatttgaacttcttacgttttgaacccggctgctcagagtaacttgctctggtttttctttaaatcaccaaaatgggttcgagatacccatctcatcagctcagcaatgggctatttgtgtctggtcggcctgagcaacccaaagaaagggctccaactatgagtgcagtagccatgccttacactggtggtgatatcaagagatcaggagaattggggaagatgtttgatattccagcagatggggctaggccaggaagtctggncccatacaggngcccttcaaaggctgggcanttgagnatngcaatnagggcaggggccatgnatgggggc

SEQ ID NO: 124150 - DNA, 538 bp, Arabidopsis thaliana
  unsure (1)..(538): unsure at all n locations
agctacnnnnnnnnnngtttcttcttcttcctctttgcatcagnttgttagtcatttttttaaaaaacttaccccttttagagagagaaagagagagaggaaaaggaagaggagagagaaagagagagagactgagacaactcatcagttgttgcggctcaaagagagatcgagatcgagatccacacgacggagacgagagagagagagagagagctcaacggtgatgggatcttggcttccccagtattgcttcctcttcatcttctactgtcactcccacaataccaatcacttttcctgatatcgttagctgcattttctccgaaactcactctcttctcctactcaggatttgaacttcttacgttttgaacccggctgctcagagtaacttgctctggtttttctttaaatcaccaaaatgggttcgagatacccatctcatcagctcagcaatgggctatttgtgtctggtcggcctgagcaacccaaagaagggctccaactatgagtgcagtagccctgccttacactg

SEQ ID NO: 124151 - DNA, 547 bp, Arabidopsis thaliana
  unsure (1)..(547): unsure at all n locations
gaacacatcgagagagcttcttccaaaaacctcaaacgctcctcacacaacgggtttaggagtgatggggtctctcgttcgtgaatgggttgggtttcagcaatttccagcagctacccaggaaaagctgattgaattcttcggaaaattgaagcaaaaggatatgaactcaatgacagttcttgttctgggtaaaggcggtgtcggaaaatcatccactgtcaattctcttatcggcgaacaagtcgtccgtgtcagtcctttccaagctgaaggattgagaccagtgatggtttcaagaacaatgggagggttcactatcaacattattgacacccctggacttgtggaagctggatatgtcaatcaccaagctctcgagttaatcaaagggtttcttgtgaacagaacaatagatgtctttgctctatgttgatcgtttggttgtntatagngccgttggctggtaanaaanttgttttgnattccccaacctttggaaagggttttgggaaaacctgttntctncnangccaattccccccgt

SEQ ID NO: 124152 - DNA, 708 bp, Arabidopsis thaliana
  unsure (1)..(708): unsure at all n locations
nnnnnnnnnnnnnnnnnnnnnnnnnnnnnnnnnnnnnnnagctannnnnnnnnnnnnnnnnnnnnnnnnnnnnnnnagccacgcgtccgcccacgcgtccgtttctcctttctctggccaaagttccgactttttgcttctcccagaggctaatcatggacgctgtggcggcgaatttgtttcaatctccttccttactgcgtcaaacttccgaaaggttgatattttcgacgcccaactgtcctggcttcatgcgaattagctccggacctcaatttcgtctcagacaaaactcttctcttaaattctcgagaccatttcaaagcggaacaacttgtgttaaatctcggagaagctttgtggttaaagcttcagcttctggtgatgcttcaacagaatcaatcgcgccgcttcagttgaagtctcctgtgggacagtttctgtcacagatattagtgagccatcctcatcttgttccagcagctgttgaacagcagcttgaacagctccaaattgatcgagacgctgaagaacagagtaaagatgcatcctctgtccttggaacagacattgttctctacaggagaattgctgaagttaaggagaaagagagaagaagggctttggaaganattttttatgcnttagtggttcanaagttcatggatgctaatgttacacttgtaccatccataacctnttcatctg

SEQ ID NO: 124153 - DNA, 958 bp, Arabidopsis thaliana
caacaacaacaacaacccaaaacccaattttgttacctcttcttttctcaatcctaaagtcaaaacaattccattttttttctttgattatcttcaatcggaatttcaggtgtgagagatgggttctgaaggaccaaaagcaataacgattcatgtgactggtttcaagaaatttcttggggtttcagagaatcctactgagaagatagctaatggtttgaaatcgtatgtggagaaacgaggtttgccttctggattgtgtcttggtagctgtagtgttcttgacactgctggggaaggtgcaaaatctaagctttatgaggttttggagtctagtgttgtctctggagataagaacaacaatggaactgttgtctggcttcatctcggggtgaatagcggagcgacaaaattcgccattgaaagacaggcagtgaacgaagctcatttccgttgtcctgatgaattgggctggcaaccgcagcggcttcccatagttgttgaagatggaggcatttcaaaggcaaaagagacttcatgctcgacggagtccattttccagttattaaagaagaaaggctttgaggttgttcaatcagacgatgctggacgttttgtatgcaactacgtgtactatcactctctaaggttcgcagagcaaaagggacacaagtctctgttcgttcacgttcctctcttctccaaaatcgatgaagatactcaaatgcagttcgtggcttcactcttggaggcaattgcagctacttgctagtgtttataagaatccactaaagccaaatattgtaagtatacaatgtatatgacccatttgtctttctatgaagctctttgtgttcttttgttggaagggttggggatataaaaagacgattgcttttggttctcaaaaaaaaaaaaaaaggcggccgttctagaggatccaacttacctacgcgtg

SEQ ID NO: 124154 - DNA, 534 bp, Arabidopsis thaliana
cccaattatgtcttattactcctctttcttcttccttttcctcttctcctttctcacgagtttcagagtttctgctcaagatcccacttacgtataccacacctgtcaaaatacggcaaattacacaagtaacagcacttacaacaacaatctcaagacccttttggcttctctttcttcccgcaacgcttcctactccaccggattccaaaacgccaccgtcggccaagctccagacagagtcaccggacttttcaactgccgtggagatgtctcaacggaagtttgccgtagatgcgtctcctttgccgtcaacgacaccttaactcggtgtcctaaccagaaagaagccacactttattacgatgagtgtgtacttaggtactctaaccaggatattctctcgacactaataaccaccggtggggttatcttgggttaacaacccggaatgtggcatctaaccaactagacctgttaagtgacttggttttgcctactctgaaccaagccgccaccgtagccttgaacagt

SEQ ID NO: 124155 - DNA, 631 bp, Arabidopsis thaliana
cggacgcgtgggcggacgcgtgggccgccttcaaaaattcccaatttgttttttcaaacaaacttgctcagatcctcttcttcttagggatcaatcttcaaatcaattgttgttaaaataaatgggattaaagcgaccttatgatgctgaagagatgcaaaagtgcaatgctaagcatgcaagacagcttagttacaaaaaccataaccaatttgacgaagctattccatatcatcatgcttctatggagaagaagacaaatgttttagtagaggatctgattggtctctgtgagaatcctacgtggactaatgatgcaaatcacgttgacaagggttttgaaacaaccggtttgtgtcaggaagattctcagtctggagtgacgactcagtcagatctttctcatcaatcttctggttcagatttcacctggaagccagtggaagatgtttatacttgtttgatgaatcaacctcctaggaaacaagttcttgttgggtctaatcatcaagcggatattcccgagtttgtcaaggaagagattcttgatcagtcagaggctcgaactaaggaggacttagaagggaagctgatgagaaagtgtgtgataccaatgtctgactctgaactt

SEQ ID NO: 124156 - DNA, 412 bp, Arabidopsis thaliana
tgtttctcaacaattttctggtctcttagagtgagaggagagagatagagagttgtgttgggcgtggaacttggactagttccacatatcaggttatatagatcttctctttcaacttctgattcgtccagaagctttcctaatctgagatctgacatggaacaccaaggttggagttttgaggagaattatagtttgtccactaatagaagatctatcaggccacaagatgaactagtggagttattatggcgagatggacaagtggttctgcagagccaaactcatagagaacaaacccaaacccagaaacaagatcatcatgaagaagccctaagatccagcacctttcttgaagatcaagaaactgtctcttggttccaataccctccagatgaagacccattcgaac

SEQ ID NO: 124157 - DNA, 333 bp, Arabidopsis thaliana
acccacgcgtccgcccacgcgtccgcgatcttcagtgatcatcaaatcgtaaccagtaaaaaatcgatcatgtcgatgctcgattccttcttcaataagggtttcaaagctgcaaaatgcaaaaccttgctcaagttaacgatccctaggattaagctaatcaggaatagaagagaagcacagattaaacaaatgcgtcgtgaaattgcaaagcttctcgagactggtcaagaagctactgctcgaattcgggttgagcatattataacggaagagaagatgatggctgctcaagagatccttgagctcttctgtgaactcattgctgttcgt

SEQ ID NO: 124158 - DNA, 378 bp, Arabidopsis thaliana
agcaagcttcggcgaaaatgggattcattacgactctttaactcatcgatcccaatttgaaaactcgcatttccattgattcctttgatcagttctcaagtcgaaggtaattttgaatcaggcgcgatactccaagttaggatcttcggttcgagcttttgtgtgatcgatctaaaaggctatagaatatggtgaaaccatcggatttcaaagcaattcaagggtttattcggctgcattacactcgggtcaaccctgtcacaattggccgatcaaacccatcagctttgtcttctccagctattccctccaatggtgtttctcagcttcagcctaagtttagcttccacagcttatcctcgaaacccacttccaaaa

SEQ ID NO: 124159 - DNA, 494 bp, Arabidopsis thaliana
  unsure (1)..(494): unsure at all n locations
cccacgcgttcagaaaattctcatcggcgtttagatcagaaacttgggaatcggagaagctcactgagaacaatggatatgagacgtgcttcgatgtgtatgatgttaatttgcgtctccttggttctcctttcgggttttggccagtttgtgatctgcagtgaagaaaaaggaacgtacaacgacaacgtcgtaaagatgaagcttggtggatttagcgattccaagaacgattggaacggtggaaaagagatcgatgatattgcactcttcgctgttcaagagcacaacagacgagagaatgctgttcttgagcttgctagagtattgaaggcaacagagcaggtggttgctggcaagctataccgtcttactctttgaagttatttgaagctggtttggaaaaggttttttgaagctaaaagttttgggtgaagccntgggttaacctttangcagcttcaggngttcaannatttntcccctcccttnaa

SEQ ID NO: 124160 - DNA, 579 bp, Arabidopsis thaliana
  unsure (1)..(579): unsure at all n locations
ccattgcttagtgttggttcccaagtcccaacctgcttcaatttaggtcgcaaacgatctcaattattcacaatccaatcttttcttcaatcgatcttcgtttctgatcaagctaataataagctaggaagagagtttagtgaagtagtgaagatgcagaatcagattgatatggtgaaggatgaagcggaagtagctgcatcgatttcagcaattaagggtgaagaatggggaaattgttcatcagtggaagatcaaccatcttttcaagaagaagaagctgctaaagttccttatgttggtgataaggaacctctgtctagtttagctgcagagtatcaatcagggagtcccattttgctggagaagattaagatactggacagtcaatatatcgggatccggcgaacaagaggagatgggaattgcttcttcccgaagtttttatgtctcttaccttgagcatatatttgggtcccaagntcgtnctnaaggccggncgatcaaggcaatttttngaatttggnagcccttcaaaccttnggtntccagntttccatttnggctttttcngtggnc

SEQ ID NO: 124161 - DNA, 583 bp, Arabidopsis thaliana
  unsure (1)..(583): unsure at all n locations
gtcgtctctcgaccaaaccacaaaaaccagaacaaaaataactaaaaaacaatcagatctgagatcgaacaaaacaacatgaacacgttaatcccatcggagaaaagatggatcatcaccggcgttttactagccggtttagttggcggtgctttgcttttcacaagcttcatacgagccgctgacgaaacgctcttcctctgttccacagcaagcgccaaaagcagagcggtggctgcggcagctgattacgaagcgactccgattcagcttcaagcgatcgtccactacgcgacatctaacgttgtcccacaacagaatcttgctgagatctcgatctctttcaacatcttgaaaaagctagctccggctaactttctcgtgttcggtctcggtcgtgactcgctcatgtgggcttctttaaatccacgtggcaaaaccttgttcttggaagaagatcttgaatgggttcagaaagtggccaaagctttccctttttaacgtgggataagggcgttaaaggcggggttttacagccctgggtggtcgtacgntggaaaaaagggcctaactttttcgggga

SEQ ID NO: 124162 - DNA, 384 bp, Arabidopsis thaliana
cggtcgcgtgggcggacgcgtgggttgtgtttgggaaatcaaaattcagacgatggcttcgattccgcagattatcctttgtaacttctccatacacgacggtttcaacaaggaacccagtaacagattacacgctaaaagacggagcttggctccttctatgctccaaaccaagttggggttgagagcttgcttgattgagcatagacagagacagcgagtgatgggtctgggagatattgggatgctagctagtgagaaatctcttaaccgtaaaagacgggtggttagggttaggggtttgaagtttaatggtggagataacaacggaaatgggaggattctcggaaaccttgctttggccattggcttgacttatctctc

SEQ ID NO: 124163 - DNA, 645 bp, Arabidopsis thaliana
gttattgacttgcttactgctgaggcatggttttctgaagataaacagctaaaagagaagattgctaaactaagcatccaaaccggcgtactatccgagtatactcgaatgatccaattagagaacacagaagaattgaaacccagcgaaactggcggaaagaagaagacaacaagcaacggcgagaaacagaagatgatatcaagaacgatcccgctacaaagccttgggataggatttggggataaaacagccaccagagagaatgttccgccaggatttggcgagcagaaagctcctgatgctgctgagaagttcgtcaaggctgcttcgagctgttgtgtctccttgtgcaacaaatgttgctgcatgtgttgtgtccaatgctgctctaagctcaatgatcaatgtgtccttgtcttcacacagctcttcacagcgattgcttgcatcgcctgctttgaatgttgctcaactgtttgctgttctggagacgatgggtagttagttaaattataaaaaaaaatcggttttgaattcgagtgtaaagctttaaaagtttcaaagtaagtttgtacattttacatacacactgcatgtaatttctgtacggcctgatcaaatataaaagctgtgggttttctg

SEQ ID NO: 124164 - DNA, 528 bp, Arabidopsis thaliana
cccacgcgtccgcccacgcgtccgcccacgcgtccgcccacgcgtccgcccacgcgtccgcccacgcgtccggtctgaaacagtgaggggattcctaggtttcagagcttagtaatgtctccactcaagtacttgtgtgtgagaatggtactcttgttgttgctctattccagtctcttcctattctcttcttcttctttctttgcctcatcagttgatgatcatgagctacaacgaatagatcctcatttccgagtgagaagattgttggtgaaagatctggattcaactggtgatgatgatgaaaccaatcttcctcctcctcctaagaagaagaagcttcttactgattctgtttcatcatcatcatcatcatctgttactaataataatcaaaccaatctccttaaacccatctcttcttcttcttccaccaataaccatactaaactctccaataccaccaccatttttacgtctcacatacttaactccacaaaatcttcttctaacacatccaataccatc

SEQ ID NO: 124165 - DNA, 1012 bp, Arabidopsis thaliana
  unsure (1)..(1012): unsure at all n locations
nnnnnnnnnnnnnnnnnnnnnnnnnnnnnnnnnnnnnnnnnnnnnnnnnnnnnnnnnnnnnnnnnattgttttgcctttcctaagatcatcgagagagaagaaaagggaaaacaaaggatcttccatgggcgatcgctgagaagatccgcaagaacaaaaacatcaaattccttgaaatcaggaatcttattcgatagtctatttgagcccttgatctggttttttatttggtgaaagttttgaaatggtgctggtattggcattgggggatctccatgtaccccatagagcggctgatctacctcctaagttcaaatcaatgcttgttcctgggaagattcaacacatcatctgcactggaaatctctgcatcaaagaaatccatgactacttgaagactatctgccctgatttgcatatagttcgaggggagtttgacgaagatgcgcgataccctgagaataaaaccttgactattgggcaattcaagctgggattgtgtcatggccaccaggtgatcccatggggtgatctagactcactcgccatgcttcagagacaactgggcgtcgacattctcgtaacaggccatacccaccagttcacagcgtacaaacacgagggaggagtggtgataaacccgggctctgcaaccggagcttacagcagcataaaccaagacgttaacccaagctttgtccttatggacatcgatggtttccgagctgtagtctatgtctatgagctaatcgatggagaagttaaagtcgacaagatcgagttcaagaagccccctactaccagctctggtccgtagttccttaaaaaaaaacttaaaccgttttatgttttcgtctgaaatcactcctaaacatttagaactttcttgtgaaaaataatatttttaacaatttgcaaaacgaaccattgagaataaacaaaaaaaaaaacaaaagggcgcgccgctctagaggatccaagcttacgtacgcgtgcatgcggcgtcatagt

SEQ ID NO: 124166 - DNA, 541 bp, Arabidopsis thaliana
  unsure (1)..(541): unsure at all n locations
agcttttctccttcacaaaaaaaaaatgaagatttctctcttcctcctctctatcctcattctcttacccatctccctacaagatcctactcctgaagtcaagaaaccaactcgtgcacacgcagagctcacgaatcatggattcccaattggactcctacctttatctgtcaaagattacttcctcaaccaaacctccggcgacttctctcttttcctcaacggagcatgcaaaatcacgcttccacctgataactacatcgctacttattctaacaaagtaacgggtcggatctctcagggtaagatcgcggagctccaagggattcgggttcgggcgtttttcaagtcgtggtctattactgggattcgatcttctggagataaatcttcgtctttaaggttgcttgggataaccggctaaaaancccttcggangattttcgattgagggntttnattntaaaggggaacggtcttnttctngnttcaaattnnattaaagnaagcttttaagnaaggntcgcaagtnaggattgta

SEQ ID NO: 124167 - DNA, 650 bp, Arabidopsis thaliana
  unsure (1)..(650): unsure at all n locations
nnnnnnnnnnnnnnnnnnnnnnnnnnnnnnnnnnnnnnnnnnnnnnnnnnnnnnnnnnnnnnnnnnnnnnnnnnnnnnnnnnnnnnnnncggccgcggaatatccctgtttcacccttcttcttcttcttcttcttcttcttcctcgtgttttttttccataacattccctctgaatcttcgttttttattggaaagaaacaatctaatccaagttcaagggttttctcatcttcagtggctgaagttatgagctttacaagatgggaagtgttctttggtctctctgttttagccttgacaatgcctttctcagctggagttactaatctacgagatgtttcggcgattaataacttgtatatcactttgggagcaccatctctacatcattggcttgcttttggaggagacccttgtggagaaaagtggcaaggtgtggtgtgtgactcctcaaacatcacagaaataaggatacctggcatgaaggtaggtggaggcttaagtgatactctggctgatttttcatctatccaagtcatggacttcagtagcaatcatatttcagggacaattccgcaggctttgccttctttcattcggaaactatctttctcaagcaatcgctttactgggaacattccctttaca

SEQ ID NO: 124168 - DNA, 1030 bp, Arabidopsis thaliana
acgactcacttttgggaaagctggcacgcctgcaggtaccggtccggaattcccgggtcgacccacgcgtgcgtacggctgcgagaaacgacagaagggatcttgaagctcttacacaagagattaagaagaagcttacacgggctgttgtctctccagcacaaacacgcaacttgttacaagacttatttgctgatatagctctcgaagtagacgatcgagccaaagatgtgatccttagcaaagaagaggatttgattacttctgatgaagcagatgctgatggtccgttatgctttttcgatgtccttgctgattactatgtgaaagtgtctgagagggggaaggatatacttgatttgatggtgcagctgtggagccagtcctttgcatcacatatattctctctactggtccataaatggctgtttggggttgagctcgacaatcaagaaatactcctgcgatattcttcggctctggtgcagggagcaacaaatgtgttctggatagacatccagacaaatacgaggcgcttccaaagtctctttcggtatctcctggaggaagttgctttggagcagatacgattgaaaaaaattcccattcaggctcagagggaactgtatctcttactctctaggttcattttcttttacaattcagtggatgaactcgatagcttcttgaggaacttcccagagtttccaaatgctttcttgattggaggacctggagatttccttgttatcgaactaactgatcagctgcaaaaactggaaggtggaaccactgcttgctacattatcttttctcagatgaagcattcttccaagggattggacctgcggatcgacttcctttgcacccaaggttaaaaggcgtggcttttttcagtttttcccccccctggaagtccaatgtacccgacaagagccgtccgtcatgcagcctgcgatgctttggattccctctttcctgttgggcgttacccgaggcatctcattagtctatttttcaggctgctata

SEQ ID NO: 124169 - DNA, 606 bp, Arabidopsis thaliana
  unsure (1)..(606): unsure at all n locations
cacacgcgtccggagaaaagaagttcacgcctaattacgactaatttttaaatccagaggagaccccattcattgattgattgaataaaataattcgtaacgaagaagcaatcattatcattctctcgatttctcatactagcgataatagatcgacgctgttgatcgcatgtggtagttcctttttggatcagtggtttttgaaatggagaaagtttcgtcgccgtcttcctctttttcacggaggtctgcttatcttgaagctcttacacaagagattaagaagaagcttacacgggctgttgtctctccagcacaaacacgcaacttgttacaagacttatttgctgatatagctctcgaagtagacgatcgagccaaagatgtgatccttagcaaagaagaggatttgattacttctgatgaagcagatgctgatggtccgttatgcttttccgatgtccttgctgattactatgtgaaagtgtctgataaggggggaaggctattcttgaatttgatggtgcagctttggagnccagtcccatgcatcacatatatnctctctactntnccataaacggctgtttgngnttgancntttgc

SEQ ID NO: 124170 - DNA, 464 bp, Arabidopsis thaliana
attttgtttttgtaagatcaatcagtttttatgaagagaaaatggagataacaatatcccaattgtgctctcgagttaagttttcatcatcatcatcatcatcatcacttttctgtttctatggaaacagtaatagaaacaacctaaatggagctgtttcagtaaactgcttgagagagaatgagcagatcagtaatattagcttcattgcgaagaaaccaagaagtcatgcaccggtggtgagaacaacacgcgcctccttggatgagaatcaatccccaacttccggaggagaacggtggcttctcaaaccagttggcgatggagacacaagacacattggttacaaagtggcaatgcctgctccttttgagatctcctctggccaagttaccatcggacggctaccggaaaaggctgacgtcgtgattcctgttgccaccgtgtcaggagtccatgcgaca

SEQ ID NO: 124171 - DNA, 665 bp, Arabidopsis thaliana
gatagaagcatcaagagccgggaagtggagtcttctagagcatgccttcgatgcagggcttgaagatggagaaatcccgcacccattgttcttcactgaactgttgtgtcatgccacagctaaaggcgatttccaaagagctatcacactgattaacactgtggctctcgcatctttccagattagtgaagaagaatggactgatctttttgaggagcatcaagactggcttactcaagataatcttcataagctctcggatcatctcattgagtgtgattatgtaagtgaaccaacggtctcaaacctctcaaagtcattgaaatctcgatgtgggtcttcttcttcttcagcacaaccattgttagccgtagatgtaacaactcaaagtcagggcgaaaaaccggaggaagatttgcttctgcaagatacaacaatggaagatgataatagtgctaatggtgaagcttgggaatttacagagactgaactcgaaacgttgggtctagaagaactcgagattgatgatgatgaagaatctagcgactctgattcactttcagtttatgacattctgaaagaatgggaagagagtagtaagaaagaatgaaaatgcttgtaaatttcctcaaaatctttagtagaacaaaatctcaatttttttg

SEQ ID NO: 124172 - DNA, 1120 bp, Arabidopsis thaliana
  unsure (1)..(1120): unsure at all n locations
atacgactcactttanggaaagctcgtgcgcctgcaggtaccggtccggaattcccgggtcgacccacgggtgcggcacgcgtacgtacgggtagatttgcgagaaggcgacagaagggggaagaagaagaagaagatcaaaaccatgacgagtcaccacgcgatcgaagtgacgaagacggtgctggaagtagccgacgtagcatggaccgcggtggaaacttaccatcaccaccaccaccaccaagacgaaaatcacgagtcaacgaatccaatttctgatccacgagatcgtgaattagaagctcttcgtcaagagaatcgtcgtctcaggactttgcttgaatcgaatcttaaactctttgagactctcgctgaatctgctgcgttctctcatgattgccctagcgacctctatgctaggcttgtaacgatggttacttcaagagatttcttggctagattagagaatctaagacaagctttatctaatggaactcagaatcaatttccattcaaggaaccaacagaagatgatgtgaagactgttgaagttcttatagagatggatcatcaagagccaagttggtgggttttagttactgatgatatagttcctagtaatgtcgaggaacaaagcgcgatcgataacgaacattacattgttgtgaatgaagaacatgtgattgatgctgttgctcactttttggctaaatgtattatgtcaaatcccaaagctaagaatctcaaacctgaagagcttcagaaacttttggtgcaagaagttactgctctgagcaaggtagggaaggtagtggatatatggcatgctgggaaaatgttctacacactgtccacttggggacttgcatttggaggggttataccaagctcgtggtgtgctgaagatagctgctaagggtgtccatgcgaccagcaaggttgtccttagggctctttgaaagttataagaggcctacctaatccgatgaaagtggggatgatgacttccaccacctttggggttgccttnctgngcgaaccccggttttaaaaaaaccatccgggggaaaaggaaaanggggtnccangtgnttccaatggccaaccccatgncttt

SEQ ID NO: 124173 - DNA, 589 bp, Arabidopsis thaliana
taaatgtattatgtcaaatcccaaagctaagaatctcaaacctgaagagcttcagaaacttttggtgcaagaagttactgctctgacccaggtagggaaggtagtggatatatggcatgctgggaaaatgttctacacactgtccacttggggacttgcatttggagggttataccaagctcgtggtgtgctgaagatagctgctaaagggtgttcatgcgaccagcaaggttgttcttagggctctttgaaagttataagaggtctatctaatgcgatgaaagtgggaatgatgatcttcaactatctttgggtttgtctttctgtgcgagactctgtttttaaattaatagcattgcgggtgtaaatagtgtaaatagggtttgatcaatgttgtatttcatattgatttcaaattcgacatttgttctttgattctcgtttataaacgcagacaatttgtgaatatcgaacaatgtttgcagttaaaaaaaaaaaaaaaaaaaaaaaacccaagcggccgctctagaggatccaagcttacgtacgcgtgcatgcgacgtcaagtaaattctatagtgtgcctaaa

SEQ ID NO: 124174 - DNA, 425 bp, Arabidopsis thaliana
aatccctaaatttcgaaatctcactctctctcattttcgactttagaaatggcgaccaacgcagatccagctccgacgaagaaaccaaggaacagtagaaaggcgttgaagcagaagaatgagctcgtggagacgccaccatcgcctgtctccgtcaaggggaagtcagcgaagtctttcgagcaagatctgatggagatgcagacaatgttggagaagatgaagatcgagaaggataagacggaggagttacttaaggagaaggatgagattctgagaaagaaggaggaggagctagagaccagagacgctgagcaggagaagctcaaggtggagctgaagaagcttcagaagatgaaggaattcaaacctaacatgacttttgcttgcggtcagtcatctctcacacaggctgggccaggaaa

SEQ ID NO: 124175 - DNA, 350 bp, Arabidopsis thaliana
agagtttgctccacttttacctttgaaattttgtttcctttttaatttttgcgaaatttcaggagtgtttctggttaatgtgagaaagtagattcgcaagaaaccaaaattaaaaaagtgagcgattcgtgttcgattgattttgtggatgatccattatctttctccaatatttttgatttgagcgagagttttgcttcattcggaatcttaagatgtcaggtcccgttgatcgattcgcaataccatgttttgagggaatattgagcagtgatgagaaaaaggaaagaaagtctgattttgagaactcagaagatgagaggagaacaagaatcggttctttgaagaag

SEQ ID NO: 124176 - DNA, 823 bp, Arabidopsis thaliana
  unsure (1)..(823): unsure at all n locations
gggtaaccccacgcgtccgcaaaaacttttgagagagagagtttgtttttttggtaaagtccgatcgtgatctcatatgcatgttctatcctcgccgtccggtttatccggctcctgtccagcatcgactagcttctaaagtagtgttggctggcttatgtctggcgatttgccgtcttgtttacggtgtcttcggccagttttgggtttgttaagtttttttgtttcaataatctcattagatctgagttggtgatgatgttttaggtgttgtgtcacttaaagaatggatttctccgacttgtttcttttgagcttttggtttgcagaaatctttccagagacataaggaaagaagaatctttcgaagcatattatgattgccttaaagctgttagtttctttttggagtttcgattagcttagcaacggtgacaaacaaaggattcaacgaccgattatatttcggcgataatcttctcaccgaaatcgatgctcaacggcgaaggttgatgtcggaaatctttcgattactcatccagcatgtgtcgtggttgtatccagttgctgacacgtgggcttaggtggagtacaaacaaattttcttatgcagtatgcggttatccgataggctcttgttgggcctcaaatatttctgtaaacttttcgtggggcttttagtgtagcccgtgtatgatcgggttacgtttaatacaatactacacttgagaaaaaaaaaaaaaaaaaagnnnnnnnnnnnnnnnnnnnnnnnnnnnnnnnnnnnnnnnnnnnnnnnnnnnnnnnnnnnnnnnnnnnnnnggaa

SEQ ID NO: 124177 - DNA, 367 bp, Arabidopsis thaliana
cccacgcgtccggtgacttttgtggtgggattatttcaatttatcagtttagcctacctatgttctgttgagtggaattattggttctcagatctcaattaatttgagaactcttatcagaaactattccaagataacaaggtgttttttttctctatctcacagcctcattggtatagacctttttgtgttttggcagtattgttttgggagaaaccaactggattttaacgaaatattgttaaaccaaaggtttgttttcttggagattgagcttagctttgtttggatcattcggccacttgtgtgagagtttgattgatggttagtcatttttatatcatcatcatgctttgatagttgagag

SEQ ID NO: 124178 - DNA, 493 bp, Arabidopsis thaliana
  unsure (1)..(493): unsure at all n locations
aacgttcattaaacacaaagaagaagaagaagaagaagaagatggatgatttggcattatgtgaagcaaacaatgttgctctaacccccatgacgttcttgaagagagcttcagagtgttatccaaatcgaacttcaataatctacggaaaaactcgtttcacttggcctcagacctatgaccgttgttgtcgtctagccgcttctctaatctctcttaacatctccaagaacgatgtggtatcagttatggctccaaacacacccgccttgtatgaaatgcactttgccgttcccatggctggagctgtacttaaccctatcaacactcgtctagacgcaacatccattgccgcaatcctccgccacgccaagcccaagatcttattcctagaccgcagttttgaggccttggctagagaaagcctccatttattatcatctgaagactcaaacctaaacttgccggtcatatntatccacgagaaccattt

SEQ ID NO: 124179 - DNA, 626 bp, Arabidopsis thaliana
ctcacgcgtccgcttctctcaagaacaaaaaagaaagaaagccctcacattgctttgtccaaagagagtcttagaatctcaaacctatctcttagggagaaaccctgattctatattcttacttgctttcctttaagtttctgtctcgtccagagggacaaagccccccaattccagtcaatttcctttgtttttgatggattgagtttctttctgttggagaaagaaaaagaaaagagctacacatacacttgcagagaagaagcaacaatgagagaagagaaatccaagactaataagctggcatggtccaagaagatggtaaggaaatggttcaatatcaaaagcaaaacagaggagtttcaagcagatgatccttcttctgctggaattgaagtagagcatagaagtagcttttcagctgagaaagcaccttccacaatcaagaataccaaaactgagaaactcagtaagaactgggagcagcaagctcggcaaaggagaatgaattatgagaatcctaggatcattgatgtccaaaactacagcatctttgtggctacatggaacgtagctggacgctctcctccttcaaacttaaaccttgatgagtggcttcattcatc

SEQ ID NO: 124180 - DNA, 473 bp, Arabidopsis thaliana
  unsure (1)..(473): unsure at all n locations
cgttaatccacatcctgatgcttttgtcatcaacataggtgaccagttacaggcattaagtaatggagtatacaaaagtgtttggcatcgcgctgtaacaaacacagaaaatccgagactatcggtcgcatcgtttctgtgcccagctgactgtgctgtcatgagcccggccaagcccttgtgggaagctgaggacgatgaaacgaaaccagtctacaaagatttcacttatgcagagtattacaagaagttttggagtaggaatctggaccaagaacattgcctcgagaattttctaaacaactaagatacatatatctttggcctttgtgtttgtctagtaggcatatatatacaagtcaatgtaacagcattgatgttcgattctacattcctaccaacattttgttctagacgtatgataatngtaggaatcatgatcatatgtcttgataataacnatcatggncata

SEQ ID NO: 124181 - DNA, 479 bp, Arabidopsis thaliana
acgcgtccaaaaaaactctaaagaatcagagagcgattttttttcttcttcctgggtctctctctggtggtgacgatcgaagagagttcacggattcgtacaaggattaaattaattattctggtaaattaatcgaagcgtaaggaattggggagagtgatttttctgggttcgaatttggtggttgattcaaaaaaagaaaagggttttgagatttgggttattttgatttcgaattttggttatgggtttaggcaataagggtaacaaattcaatttcggcgataatgatctcgccgacgaagctagtggtgccgatggcgacgaaggtgatggttttggttcggttgcgtgttcgatttgtctcgagacggttgttaaaaacggcgatcgagcatgggctaatcttcaatgtgaccatcagttccatctagattgtattggttcggctttcaatgcaatgggagtgatgcaatttc

SEQ ID NO: 124182 - DNA, 1205 bp, Arabidopsis thaliana
  unsure (1)..(1205): unsure at all n locations
tacgactcactctagggaaagccggtacgcctgcaggtaccggtccggaattcccgggtcgacccacgcgtccgctcgagactgtagagtgaagtttgatttatttagagagataagttaaaaaaaaaatggtcggtatggatttgttcaaatgtgtaatgatgataatggtgttggttgtctcttgtggtgaagctgtttctggagctaagttcgatgagctttatcggtcaagctgggctatggatcattgtgtcaacgaaggcgaagtcacaaaactcaagcttgacaattactctggagctgggtttgaatcaagaagcaaatacttgtttggtaaagtctctatccagattaagcttgttgagggtgattcagcaggaacagtcactgctttctacatgtcttcagatggtccgaaccacaacgaattcgattttgagttcttagggaacactaccggcgagccttacatagtccagaccaatatctacgtgaacggagttggaaacagagaacaaagactcaacctttggttcgatcccaccactgagtttcacacttactcaatcctctggagtaaacgcagtgttgtattcatggtagacgaaacaccgattcgagttcagaagaatcttgaagagaaaggtatcccatttgctaaagatcaagcaatgggtgtttacagctccatttggaatgcagatgattgggctacacaaggaggtcttgttaaaactgattggagtcacgctcctttcgttgcttcttacaaagaattccaaatcgatgcatgtgagattccaacaactactgatctaagcaagtgtaatggagaccagaagttttggtgggatgaaccaactgtctctgagcttagccttcatcagaatcatcagcttatttgggttcgagctaatcatatgatttatgattattgttttgatgctactaggtttcctgttactcctcttgagtgccaacatcatcgtcatttgtagtttagagattagtcaagaataaaaatggatcaagagaacacatgtggttactctttgatgattctgttttaatgtataaataatcaatcttctattgattttggtggagtttttaaaaaaaaacacaaagggcgaccgctctagaggatccaagcttacgtacgcgtgcgatgccacgtcataactcttnnnnnnnnnnnnnnn

SEQ ID NO: 124183 - DNA, 939 bp, Arabidopsis thaliana
cgactcacatttgggagggctgacacgcctgcaggtaccggtccggaattcccgggtttgacccacgcgtccgctgggcttgaatcatgaagcaaatacttgataggtaaagtctctatccagattaagcttgttgagggtgattcagcaggaacagtcactgctctctacatgtcttcagatggtccgaaccacaacgaattcgattgtgagttcttagtgttctttaccggcgagccttacatagtccagaccaatatctacgtgaacggagttggaaacagagaacaaagactcatcctttggttctatcccaccactgagtttcacacttactcaatcctatggagtaaacgcagagttgtattcatggtatacgaaacaccgattcgagttcagaagaatcttgaagagaaaggtatcccatttgctaaagatcaagcagtgggtgtttacagctccatttggaatgcacgatgattgggccacccacggaggtcttgttacacctgattggagtcgagctccgttcgttgcttctttccaagaattccaaatcgatgcatgtgagattccaacacgtactgatctaagcgagtgtaatggcgaccagcagttttggtgggatgacccaactgtctcttagattagccttcatcagaatcatcagcttatttgggttccagctcatcatataatttatcattattgttttgaggcgaataggtgtcccgttactcaaattgagggcccacatcatcgtcatttgtagtttaaagattagtcaagaatataaatggatccacagaacacatgtggttactctttcatgattctgttttaatgtataaatcatccatcttctattgatttcggtggcagaaaaaggaaaaacacaaacaaaggacggccgctctagaggatccaagcttacgtacg

SEQ ID NO: 124184 - DNA, 1031 bp, Arabidopsis thaliana
  unsure (1)..(1031): unsure at all n locations
cccacgcgtccgggaaaatttttccttgattcattacgacagagagaaccatgccggcgaaacagaggaccccgaaggtcaacagaaaccctgatctgatcaggggtgttggtaaatactcgagatcccagatgtaccataagagaggtttgtgggctatcaaggccaaaaatggaggcgttttcccacgtcacgacgctaaatctaaggttgatgctccggtggagaagccaccgaagttctatccagctgaagatgttaagaaacctctccccaacaggcgcacggcaaaaccaaccaagctcagagctagcattaccccagggccagtgttgattatccttgccaccccttcctggtaattttagggccaaggggttttccttccttaaggagcttgcctccggtttgcttcttgtgactggaccattcaagatcaatggtgttcctctgagacgtgttaaccaggcctatgtcattggtacttccacaaaggttgacatttctggagttaccctcgacaaattcgatgataagtacttcggcaaggttgctgagaagaaaaagaagaagactgaaggagagttcttcgaggctgagaaagaggagaagaaagagattccacagggaaagaaagatgaccagaaagccgtggacgcagctttgatcaaagctattgaagcagttccagagttgaagacttacctcggagcaaggttttcattgaaacaaggaatgaagccccatgagcttgttttctagatttcattactttttttctgaggtttctagtgtatctgtctcctgaagttttacactccaactggttggttctgttctcgtccactgaccagagacataaaatcttggctgctgctatctggatttctgtcttatatggataatttatcaatcctgtttttgaaggagaacttttccccggctttnnnnnaaaattaaataaaaccccccaccccannaagggcgcccgctctagaggatccaagcttacgtacgcgtggatgcgacgt

SEQ ID NO: 124185 - DNA, 1042 bp, Arabidopsis thaliana
aggtctctacgactcactatagggaaagctggcacgcctgcaggtaccggtccggaattcccgggtcgacccacgcgtccggagccggaaaatttttccttgattcattacgacagagagaaccatgccggcgaaacagaggaccccgaaggtcaacagaaaccctgatctgatcaggggtgttggtaaatactcgagatcccagatgtaccataagagaggtttgtgggctatcaaggccaaaaatggaggcgttttcccacgtcacgacgctaaatctaaggttgatgctccggtggagaagccaccgaagttctatccagctgaagatgttaagaaacctctccccaacaggcgcacggcaaaaccaaccaagctcagagctagcattactccaggtacagtgttgattatccttgctggtaggttcaagggaaagagagttgtcttccttaagcagcttgcctctggtttgcttcttgtgactggaccattcaagatcaatggtgttcctttgagacgtgttaaccaggcctatgtgattggcacttccacaaaggttgacatttctggagtcaccctcgataaattcgatgataagtactttggcaaggttgctgagaagaaaaagaagaagccagaaggagagttctttgaggctgagaaagaggagaagaaggagatcccacaggtgaagaaagatgaccagaaagctgtggatgcagctttgatcaaagccattgaagcagttccagagttgaagacttaccttggcgcaaggttttcattgaaacaaggaatgaagccccatgagcttgttttctagatttcattactttttttctgaggtctctagagtatctgtctcctgaagtgttttaccttctaaatggttgttttgttcttgttcactgaacacatacaatttttggcttatacattctctgttcttacgtaaaaaaaaaaaaaagggcggccgctctagaggatccaagcttacgtacgcgtgcaggcgacgtcataactcttctatagttgttcc

SEQ ID NO: 124186 - DNA, 490 bp, Arabidopsis thaliana
gaccacgcgtccgaaagtctcttcttgattatcgtccagggattgcaacagagagaaagtaacgatgccggcgaaacagaggacagctaaggtcaacaggaatcctgatctgatcaggggagttggtaaatactcaaggtctcagatgtaccataagagaggtttgtgggcaatcaaggccaaaaatggaggcgttttcccccgccacgacgctaaatctaaggttgatgctccggtggagaagccaccgaagttctatccagctgaagacgtgaagaaacctcttcccaacaggcgcacggcaaaaccagccaagctcagagctagcatcactccagggacagtgcttatcatccttgctggtagatttaagggcaagagaagtgtctttcttaagcagctttgcctccggtttgcttcttgtgactggaccattcaagatcaatggtgttcctctgagacgtgttaaccaggcctatgtcattggtac

SEQ ID NO: 124187 - DNA, 508 bp, Arabidopsis thaliana
  unsure (1)..(508): unsure at all n locations
ctctctcctctatccactctnagccggaaaatttttccttgattcacttcgcgccagaaagaaccatgccggcgaaacaaaggaccccgaaggtcaacagaaaccctgatctgatcaggggtgttggtaaatactcgagatcccagatgtaccataaganaggtttgtgggctatcaaggccaaaaatggaggcgttttcccacgtcacgacgctaaatctaaggttgatgctccggtggagaagccaccgaagttctatccagctgaagatgttaagaaacctctccccaacaggcgcacggccaaaaccaaccaagctcagagctagcattacttccagggttacagtctgtttgattattcctttgcttggtagggttcaagggggaaagcagggtttgttttcccttaaggaaggntttccntctggggttcctttcttcgtnacctgggcccattcaaggtcaatggggggtccnttttangnggggttnaccaggccctttt

SEQ ID NO: 124188 - DNA, 1583 bp, Arabidopsis thaliana
  unsure (1)..(1583): unsure at all n locations
nnnnnnnnnnnnnnnnnnnnnnnnnnnnnnnnnnnnnnnnnnnnnnnnnnnnnnnnnnnnnnnnnnnnnnnnnnnnnnnnnnnnnnnnnnnnnnnnnncggccgcagtgagagaacctatcctgaagagatgattcagacgggtatattcaccattgatggcatgaactttatcggcagaagacagaagattccccttttttctggcggaaggctttcccaccatgaaattggtggttaaaattggcggcaaggtgggttgggtaaaccgttaaaggaggcaaaatattcttttgaggcttaaggaggaggataccttggccttggggtccgaagaatggggggggaccatgaaaacggcccattttttaaaacgggaattcgagggagaatggatcgatggagagagtgactcttttccttaacttggcaaacgaccccactattgagcgtatcatcactcctcgtatcgcacttacaactgctgagtacttggcatatgaatgtggcaagcatgtccttgtcattctcacagacatgagttcctacgccgatgctcttcgtgaggtctctgctgcccgtgaagaagtgcctggaagggttggttacccaggttacatgtacaccgacttggctaccatatacgagagagcagggcgaattgaagggaggaaaggttccatcactcaaattcccattttaaccatgccaaacgatgatatcacgcatcccacaccagatctgacaggatacattacagaggggcaaatctatattgaccgacaacttcacaatagacagatctaccctccgatcaatgtcttgccatctctgtctcgtctcatgaagagtgccattggtgagggtatgactcgcagggaccactctgatgtttctaatcaattgtatgccaattacgctattggaaaggacgtgcaggccatgaaagccgtggttggagaagaagctctttcttccgaggatctgctatatcttgagttcttggataagttcgagaggaagtttgtggctcagggagcttatgatacccgaaacatcttccagtcactcgacctggcatggactctcctcagaatcttcccccgtgagttacttcaccgtatacccgcgaaaacccttgatcagttttacagtcgcgataccaccaactgaagaacatagtttctactgccttggtgtgatgatatgtccaaatgcatctttattttttacttctgcggttggatcacacctctgagtcgtccgtcccaataaatggtgtttgttcccaatcgctagaccctttattattgtcttcgaaactgagcaagccaggttgattattctttttgtaagagaaattgaaattcttgtataatttatgagattttgcatcttttttttggggtaccaaattactggttcagaacaacatacatttgtttgtcttattactgtcacgaatgtcaatgcagcttcttcttctttttttataacaaaaaacccaaaaaaggacggccgctctagaggatccaagcttacgtacgcgtgcatgcgacgtcaaagctcttctataagtcacct

SEQ ID NO: 124189 - DNA, 383 bp, Arabidopsis thaliana
cgggtatatccaccattgatgtcatgaactctatcgccagaggacagaagattcccctcttttctgccgcaggtcttccccacaatgaaattgctgctcagatttgccgtcaggctggtttggttaagcgtttagagaagtcagataatcttctcgagcatcaggaggatgataacttcgccattgtgttcgcagcaatgggtgtgaacatggagactgcacaattttttaaacgtgatttcgaggagaatggatccatggagagagtgactcttttccttaacttggcaaacgaccccactattgagcgtatcatcactcctcgtatcgcacttacaactgctgagtacttggcatatgaatgtggcaagcatgtccttgtc

SEQ ID NO: 124190 - DNA, 543 bp, Arabidopsis thaliana
  unsure (1)..(543): unsure at all n locations
nnnnnnnnnnnnnnnnnnnnnnnnnnnnnnnnnnnnnnnnnnnnnnnnnnncccacgcgtccgcccacgcgtccgcccacgcgtccgctctctcctccgtcaccgagggagagcaaccatgccaatctcaattccccttaacgccactctacaatactcgtctccttcttcttcttcttcttcttcttctctcgtaccttcttcccctcttttctctccgattccttcaaccactgtttcccttaccggaattcgccagcgatgcctcaggatggtcacttcttgcgtctccaacgctcagaaatccgtcctgaatggtgccaccgattccgtctctgtcgtcgggcgggagcagattcgtcttggtcttcctagcaaaggacgcatggccgccgattcgctggatcttctcaaggattgccaattgtttgtcaaacaagtcaatccacgacaatatgttgctcaaattcctcagttaccaaatactgaagtttggtttcaacgaccaaaagacattgtcagaaagttgctatcacgagatct

SEQ ID NO: 124191 - DNA, 785 bp, Arabidopsis thaliana
  unsure (1)..(785): unsure at all n locations
nnnnnnnnnnnnnnnnnnnnnnnnnnnncgttggggaagactatttgttcacagtgagctaccactatgcctttaagccttttccgcccgtccgcttgtttccgacttttagaaggaaggacaacattcgaagaacaaccacagtttctacgtttagcaactcattatttttaggcgccatcaagaatgggaaagactcctggtaaatggatcaagactttgcttctcgggaagaagtcgcctaagtcgaattcggataaccgaagccagaaactgaaatctgctaagaaagaagagctggtggaatcggtgacagaagatttgtcaaacttaacagttgatcctccggtggtttcatcacaaccagttccagcttctactgctcaaaatgtggtttctccaatcaatggtgatgagtccaaggataatctcgagtcaaggaatgacttgggagaagtcgagcttgaacaagctgcaattaaggttcaagctaccttcagagctcatcaggcacgtagagcatttccaactcttaaaggtatcatcaggctgcaggcagttatccgtggtcacttggtgagaagacaagccattgctacatattcatgtatatggggaattgtgaagtttcaggctcttgttcgtggccagagagctagatcttcagatattgcgattcagcttcagaaaaaacatatggaagcaagtgattcagaaagttttgcatcagacacgtgttgttggatgggtaatcccacaaagttcgtctttgttgataagcttct

SEQ ID NO: 124192 - DNA, 560 bp, Arabidopsis thaliana
  unsure (1)..(560): unsure at all n locations
cacacacacatgttcttcgttgctgcttcgttgggttaaaaacttttcttttgtttcttgctttttgcaaagtcaaagataacaaataaataagaaaaatggagaatctaccacctggttatcgtcccaatgttggtgtttgtctaatcaactcggataatctggtatttgtagcttctagattgaatgttccaggagcatggcagatgccacagggaggcattgaagatggggaggatccaaagtcagcagccatgagagagttacaagaagaaactggtgttgtttcagctgaaatcgtctctgaggtcccaaattggttgacatatgattttccaccagcagtaaaagcaaaagttaaccgtctttggggcggtgaatggcatggtcaagctcagaaatggtatttagtgagactgaggaacgatgaggacgagaaagagatcaatcnaagcgaacaacgaagcggattcagagtttgcggagtggnaatagggcgaacagnaagaagtgggtngaaccaagcagtgggnttaacaaaaaggccaacctatgaagaa

SEQ ID NO: 124193 - DNA, 679 bp, Arabidopsis thaliana
gaatattaatgcttcagacaatgtttctgaggttggttctgttgtctctcatactgagaatcatgaagaggatgtgcaggaaggtgggaagaagcataggcgatacccgcccaagaaaacagagattaagcttgagggtaagatggtagtggagggagttgatgcatcccatgggcaatatgatgatgatgatgatgctagtgattggagacccgcagtcagtagaagtactcactcaaagtatcttacaagaaaggcaaggtgggaacattacaatgccttggctgaacaagaaattcagaaagatcaagaagctgacaaagctcgacacactaaagaggccaatgaaacccacgcagaagatagtggaaagaatggtgaggatatatcttccatccttaaagatatgaggttggaggaagagtcattaagggctctccaagaagagactgaagagacgaatgctgaagcaactttgatcaatggtgaggatgatattgatcatgatattgaagtcgaagctgaggggatcgatgttgcaaatcaagcgctagagaacttggagattgctagtgaggctgaggataccttcgaggcatcatcgattggagatgatggtagcagcgagcagagttggtcattgagagctttatctgagtccagtgtagcttgtataact

SEQ ID NO: 124194 - DNA, 521 bp, Arabidopsis thaliana
  unsure (1)..(521): unsure at all n locations
cnnnnnntaatacgactttcttagggaaagctggtacgcctgcaggtaccggtccggaattcccgggtcgacccacgcgtccgttataattcacctgagaaaaacaatatcaatcggctcgttttctctcctcagtgtttcttcagtagtcctgcgagatcgtataagagattcgaaaccctaatctatcaatttgatcctgtccattctctgtgtaatattgtttgagaattgtgcaatccgatggggacgatgcaccggagtggtgctcccagaaggacaaatgaaaatgcgaagcttatcataacgacaatcgtgggagtggtgtttggtttttttgttggtatcacattaccattaggttcctttagaaagattagcttaccttcaggccttatgtcatctcttgatgtagccatgtcagatgggaaattgttttctggtggcagatcacctgaagatattggttcaagaaagtctcctaagatatatgttccaaccaatccgcatggtgcagaact

SEQ ID NO: 124195 - DNA, 645 bp, Arabidopsis thaliana
ccgcgccggaaccggtcccgcgtaaaaaagtgggagaaaatgacttaagctaaaaccacaccaaccccttcctcctccattttttagtagttgaagcttccttcttcttcttcacctaatacttcttctctatctctctcgccaaagaatcgtacttcttctctcaggttttaaggagatgggatctggtcaatggcacgttgagaaaaggtctacgtttaggaatgattcgtttgtgagagaatatggtatagttccagaaactggttgtctttcaatcatagttcttggtgcttctggtgatcttgctaagaagaagacttttcctgctctttttaacttataccgtcagggatttctcaatccagatgaagttcatattttcgggtatgcgaggactaagatttctgatgaagagctgagagataggattcgtggatatcttgttgatgagaagaatgctgagcaagctgaagctttgtcaaagtttctgcagctgattaagtatgtgagtggcccttatgatgctgaggaggggttccagagattagacaaggcaatttcagagcacgaaatctccaaaaatagtactgaagggtcttctagaagactgttttatcttgcacttccaccgtctgtttatcc

SEQ ID NO: 124196 - DNA, 400 bp, Arabidopsis thaliana
caaaattcgaaaaaaaagcttcccagagagaagagaaaaaacttctctgaggcggccatgacgttgcagagaggtttacctcttctcttgcaacagtacacggcgttgttcaagaaaaaccttttgctttcatggcggagcaaacgagccacgtttcttcagctcttcgcttctttcttcttcatccttctcatcttctgtatccaagcagccatggagaagagtttcgcttcctccacggctctcaaaactgttacggatccgacggcgctgatatcgccgccgattccgccttgtgaagataaattcttcgtgaatcttccttgctatgactttgtttggagcggtaatcgtagctccaaggtcacgcagattgttaatgcgattatgaagaataatc

SEQ ID NO: 124197 - DNA, 702 bp, Arabidopsis thaliana
gattattctttatctggatagagaagataatgagctccttggggttttcagttggaactggttctcctccaagtgagaaaagaaaatgcagatttcttgtgaataatagcttaaacaaagcagaggctattaacttgagaaacaagcaaaaagtttcttctgatcctgagttaagttttgcccaattatcctcatgtggtagaagagaagcaattattggttttggtttctctattggcttgcttgataatgtttctgcattagccgaaacaacttcttgtgaattctctgtgtctccttctggtcttgctttttgtgataaagttgttggttatggtcctgaagctgttaaagggcaactaatcaaggcacattatgtagggaagttggagaatgggaaagtctttgatagtagctataatcgagggaaacctcttactttccgaattggtgttggtgaggtgataaaaggttgggatcaaggaatccttggctctgatggaattcctcctatgcttactggtgggaaacgaacattgaggattcctccagaactcgcgtatggtgatcgaggcgcaggttgcaaaggaggctcatgccttattcctccagcttcggttcttctctttgacattgagtacataggtaaagcttgagagagcttttttgcttttgctttgccttttctgagccatatcatac

SEQ ID NO: 124198 - DNA, 425 bp, Arabidopsis thaliana
cccacgcgtccgcgttaacatgggctttctcttctctatctcctctacctatgaagtcacttgacatttcgagatcctcatcttctgtctcaagatctccttaccattttcagagatacctattgagacgtctacagctaagttcccgttcaaacttagaaatcaaagattcatcaaacactagggaaggttgttgttccagcgctgagtcaaatacatggaagaggattttgtctgcagcaatggcggcggctgttatagcctcgagctccggcgttccggccatggcagagcttaacaggttcgaggccgatacacgtggcgagtttgggattggctcggctgctcagtacggttctgctgatctcagcagaacagttcactccaatgaaaatttcagaagagccaactttacttctgccgac

SEQ ID NO: 124199 - DNA, 906 bp, Arabidopsis thaliana
cgtgggtcgacgcaagtctctatagtgagtcgtaataacgacagaagtttccaccactgtgactaaatctaaacaatttcatggcgagtctctgtctctcatcgtcccggatcgtttctcttcaccaccagaaaccattcctctctcttaaactccggtctcgtccttcagatctctccggtctaggtcgccacacgagtcctgtttgcttcaatccgcttaggttatcgggtgatcgtcagcgaaccgctacggtatcaacgagggtggagaagcggcgaaagagaggatcgagtgtggtctgttatgctgctccgatttctgccaatagtctacaatggatctccaccatttcttgccttgcattgatgcttgcaaggggtactggtatacataagtcagttgttgttccactattcgctctccacgcaccatcgagcatcgtcgcctggattaagggagagtatggtgtatgggcagcattcttggcgcttattgctcgacttttcttcacttttccaggtgaacttgagcttccattcatcgcattactcttggtgattgtggcgccatatcaagtcatgaacataagagggaagcaagaaggggcaatcatagcaatagcaatatctggttttctggctttccaacatttctcacgagcagggagcttggagaaagcatatgagaagggttcagttcttgcccctgtagccattattggtgtcacagttgtatcgctccttttgttgctataactatatgctcctgaccaaaaatgttaatcagtgtaagaatgtgtgtgaaggaaaaaaaagaaagatgtgcttgcatttatccgctctttaagaaatgctggtacatttttggcaactattcgctggcaataaaaatgatctttcatgt

SEQ ID NO: 124200 - DNA, 393 bp, Arabidopsis thaliana
cccacgcgtccgtggctaacttatgtgttgtatcctcgcatacggtgaatggcgttgctcagttacacagtgatatcttgaaggctgagttattcgcagactatgtctctatatggccaaaccaggttcaaaacaaggcttatggcatcacacctcggaggggggtaccgttctgcagccctgagctcagtgatattatcacaaaggggtttaaggccgacaaatggattaccgatcttgacctacttaccggtcttcgccagtttgcggacaatgaagaactccaatctgaatgggcttctgcaaagacagccaataagaaacgtttggctcaatatatagagcgcgtgactggtgtgagtatcgatccaacaagcttatttgacatacaag

SEQ ID NO: 124201 - DNA, 1063 bp, Arabidopsis thaliana
  unsure (1)..(1063): unsure at all n locations
cttctttcattgaagaaatgaaagtgttctataaagagagattgagtggttactacggcgtttcggtttatatcatatcgaattacgtctcttctttcccgttcttggtagccattgcgctcatcacagggagtattacttacaacatggtgaaattccgtcctggtgtctcgcattgggctttcttctgtctcaacatattcttctctgtctccgtcattgagagtctcatgatggttgtggcttctcttgttccgaatttcttgatgggtcttatcacaggagctggcatcatgggagtcatcatgatgacttctggattcttccgtttgcttcccgatctgccaaaggttttctggcgctacccgatttccttcatgagttatggttcttgggctattcagggagcatacaagaatgattttcttggtctagagtttgacccgatgtttgcgggggaaccaaagatgacaggagagcaagtgataaacaagatttttgggagtgcaagtcacacattctaagtggtgggacttatcagcgatcgtgttgatccttgtgtgttaccgcattctatttttcatagtcttgaagcttaaggagagagcagagcccgctttgaaggcgatacaagcaaagcgaacgatgaagagtctcaaaaagagcccttctttcaagaaagttccatctctatcatccctatcttcaaggagaccccaccctttacattcccttttttttcaaaaaggtcttccctctcccattaattaaagattatatctatttggggaaaccctttgtttcttaatttgttttgcccatccgatagtttcaccatttataaatatgtatccttatcagcatctaatgattttatgattcagccttgttatttttggagaataaacatgaaactctgtatctttcgtctnnnnnnnnnnnnnnnnnnnnnnnnnnnnnnnnnnnnnnnnnnnnnnnnnnnnnnnnnnnnnnnnnnnnnnnnnnnnnnnnnnnnnnnnnnnnnnnnnnnnnnnnnnnnnnnnnnnnnnnnnnnnnnnnnnnn

SEQ ID NO: 124202 - DNA, 398 bp, Arabidopsis thaliana
cctgtgtgtaaaggatttgctcatgttgatttcaaaactgagattgatgcaaacaggtttgtgaaacagttcacgggacagagcttagcatttgggaaggttataaagcaaatcaaatgtcaggttgtggagtttacttctgatgattctgtatcgaaggaagtgtacttagataacggtttcaaggtgcagaagcttccgtattctggtcttgaaggagattctagtgctgatgttgttgaagaagaggttttgttgggttcaggggaagaatcggatgattcagaagaagaggtagatgaaagagaagtggaagacgatgagcggaatcatatctctggtagcatagaatcttctccccttgaaatgacacgtgattcgatacccagttaaagttt

SEQ ID NO: 124203 - DNA, 1127 bp, Arabidopsis thaliana
  unsure (1)..(1127): unsure at all n locations
atgatcctccagcactaatcgactacnatagggaaagctcggtacgcctgcaggtaccggtccggaattcccgggtcgacccacgcgtccgagcggaacaaggattgagaaaaggaacctttcccttttaataagccgatatagatccttggaggagaatttgtagcagaccgatctctgtctgttgtctctgtttctacgagtctctgtgtttgtcggaaatcgtaaattatgggtttgtgggatgctcttctcaattggcttcgcagcctcttcttcaagcaagaaatggagctttctttgataggacttcaaaatgcaggaaagacatcacttgttaacgttgttgcaaccggtggatacagtgaagacatgatccctacggttggtttcaacatgaggaaagtgacaaaaggaagtgtcacgatcaagctttgggatctcggtggtcaacctaggttccgcagcatgtgggaacgttactgccgttctgtttccgcgattgtgtatgtagttgatgctgctgatcctgataacctcagtgtctcgaagagtgaactccatgatttgttgagcaagacgtcgcttaatggtatccctctcctagtccttgggaacaaaatcgacaagcctggagctttgtccaaagaagccctaaccgatgaaatgggtctcaagtcactgacagatagagaagtctgttgcttcatgatatcttgcaagaactctaccaacatcgatcaagtcattgattggcttgtaaagcactccaaatcatcgaattaaactttaccccaaaaggagagaagtcaactctctgcagttgttgatctttcttgtgtttttggtcatttgatgatgatgatggtgattgtggaagaagacacagcttttttcttttatcctgtgaaaaacaagatttgtctatgttctctgtctgattctttatctgtctttcttctgcgtatgtggctgtgttctctgtatattagatttgattggtgctccctcttcttaaagccatgatgagatcccttaaaaaaaaaaaaaaaaaaaaacaaagggcggccgctctacaggatccaagcttacgtacgcgtgcatgcgacgtcatagtgttctatagt

SEQ ID NO: 124204 - DNA, 980 bp, Arabidopsis thaliana
gcggtcccggttccggattcccgcggacagagatcaacgaggacaagaagcttctcagagagatccgtggaggagaattctctcaggcggatctgtttgtcggagcttttgtgaatcatcatcatcaatgggtttgttggaagcttttctcaattggcttcgtagcctcttcttcaagcaagaaatggagctttctttgataggacttcaaaatgcaggaaagacatcacttgtaaatgttgttgcaactggtggatacagtgaagacatgattcctacggtcgggtttaacatgaggaaagtaacaaaaggaaatgttacaatcaaactatgggatcttggtggtcaaccaagattccgcagcatgtgggaacgttactgtcgcgctgtttctgccattgtgtatgtagttgatgctgcagatcctgacaacctaagtgtgtcgaaaagtgaactccatgatttgttgagcaagacttcgcttaatggtatccctcttctcgttcttgggaacaagattgacaaacctggagctctgtccaaagaagccttaacagacgaaatgggacttacatcacttacagatagagaagtctgctgtttcatgatatcatgcaagaactctaccaacattgatcaagtcattgattggctcgtaaagcattcaaagtcgaagaactaatcttcaccaagaacatatattctctcttcttgattcttcttagtcttcctgtattgtctagttgatgatgatggtgacaatttttcgtgtgaaacaagagtgtctttatttttcgccttccgtctctccttcttctgctggtctggtcttgtttggtcctccagtcttgtctttgtatattagatgtggattgtttttctattcccaaggctttgcaatttttgaaacacaaaaaaaaaaaaaaagggcggccgctctagaggatccaagcttacgtacgcgtgcatgcgacgtcagg

SEQ ID NO: 124205 - DNA, 610 bp, Arabidopsis thaliana
aaaaatataatcgagctctggcaaagttaaaccctaattcccaaattggagtcacgaaagcaatctccaaatctatctcattcggttcgaagaagcttcaaaggcgattcctttgctttagctaactagtagtttcgtcatgtcttggtgcacgattgagtcggatcctggtgtatttacagagcttattcaacaaatgcaagtcaaaggagtgcaggttgaagaattgtattccctggattctgattctctcaataacctcagacccgtatacggtctgatctttcttttcaaatggcaagctggggaaaaagatgagcgtccaacgatccaagatcaagtttcgaacttatttttcgcaaatcaggtcattaacaatgcttgtgcaacccaagcgatccttgctatcctcttgaactctccagaggttgacatcgggcctgaactatcagcgctgaaagaattcaccaagaactttccatccgacctcaagggtttggctatcaataacagatattcaatccgggctgcgcacaacagtttcgcaaggcctgagccatttgtcccagaggaacagaaagctgctacaaaagacgatgacgtataccat

SEQ ID NO: 124206 - DNA, 390 bp, Arabidopsis thaliana
cttgctcgtctgaaagctcttgcaaaatttgcttttggcatgggactaactcaggggttgttatgcacggctgcattcactgcttttgaactcccaccaaatggagccatcggaacaaaaattctggaattcctctttcattcaaggcctgacttggtcaacattagaagcattgatgaggccgttgtcattggcgctgctctatcattgtcatcttcagcttttgttctacagcttcttgcagagaaaggtgagctccctacaagatttggctcagcaaccttgggaattcttcttctacaggatatagctgttgtgccgttactagtcattcttccagtgttggaaagccaggatattggtggggaaagcataaggccaatgcttgca

SEQ ID NO: 124207 - DNA, 477 bp, Arabidopsis thaliana
  unsure (1)..(477): unsure at all n locations
gaaacatgcgtgtggatacgaaaganctctagattcctccactcctcaatttctcatcttttgcttcgtcgtgacgcttcttgatttcagcaataatgggttctgttatgagtttgagctgttccaagaggaaagcaacgagtcaggacgttgagtgttcaagcgaatctcgtaaaagacgaaagatatcttcagagaacgatgaagaagagtgttgtagattgattccaagtcttcctgatgagttatctatacagattcttgctaggcttcctagaatttgttactcgaagtgttcggttggtttcctcggaggtggagatccggctgtttcgaccttcttgaggtgtatagtttgaggaaaagaactttgggaggacctgaggcagtggctctattgtgttgcccaaaggtcatgagggtaagctttttgtgggattccttaanaccccngggtctactnaattgncagngntt

SEQ ID NO: 124208 - DNA, 404 bp, Arabidopsis thaliana
cggacgcgtgggcggacgcgtgggcggacgcgtgggcgctgatccttcacacgcaagctaatgaagcctctcactaatggcgatctggtcaaatccccaactctgatcaagatctccgccttagttttcgtcaccgtcgctttcttctacttaggcaagcattggtccgacgatggctaccaacagctcgtcttcttctcctcttccacctccggtagctcgatcccggaggtctccgtttcaccgaatagtaacagagtctttaatttatcagcgataattcctactaaccatacccagattgaaatccccgccacaatacgacaacaacctccgtcggtggtggcggacacggagaaggttaaggtggaagctaatccttctccttctccaccttcttttct

SEQ ID NO: 124209 - DNA, 647 bp, Arabidopsis thaliana
  unsure (1)..(647): unsure at all n locations
cgactcactattgggaaagctggcacgcctgcaggtacctggtcacggaattccacgggtcgacccacgcgtncgacttagtattgaagaatataatgaccgtgttagagcaagtggtgccgatgtgaagcacattatgctttggctgcagaagcttgttgatgatgacttcttaacgaaagatgaaagagatatactttcggtggggaaaaaacgcacgctgcggttatatacacggtcaaactaagacgtggccgagtgttgcctgcttataaccagagcctcatcattcgaaaacactgattgggtatttggatctatcaaacgggaaaagactggaaagaaatgatggcagaggctaggatcctcaggtggttcttcacagaaagaaaggtaaaggagcttgctcaaacaaacatcttaaaaaactttctatttgaagtacaggcggttataaaacgttgaattaagatttttttacaaaaaaaaaaaaaaaggcggcccttaaggacaaggtactacgggctgcaaccctagtttgttggggcctaaataaaaacggcgccgttccaacgggaatggaaccctggttcccaatatagctgaacatcccctttccaagggcttatgaaagcccgcccatgcct

SEQ ID NO: 124210 - DNA, 831 bp, Arabidopsis thaliana
caaaaatggcgattctatcagcgagctctactatagtgagagctgctttagatacgcagccgaagctccgatacaatcccaatgcgccacgcaatgttaagaaaaattctaatttgagttcttttgttccaccgtcgtctccttcttcatcttctccggcgacaaacttaagcgtctccgtttctgatttactcaaacgtcctgcaagcaaagatattggtgatggatttgatgatacttgtgttggatatgagaaatggtttccaagtccaccaaaagtggagaaacctagatctgtcttcaatgctgcctcattagcttatattggcgattcaatctatgagatatatgctcgtaggcattttctttttcctccacttagtattgaagaatataatgaccgtgttagagcagtggtgcgatgtgaagcacaatatgctttgctgcagaagcttgttgatgatgacttcttaacgaaagatgaaagagatatacttcggtggggaaaaaacgtaggctcggttaaaacacggtcaactagacgtgccggtgttgctgtttataacaaggcctcatcattggaaacactaattgggtatttgtatctatcaaacgggaaaagactggaagaaatgatgcagaagctaggattctcaagtggttcttcaacagagagaatggttaaggaagctggctcaaacaaaccatctttcaaataaactttactatattgtagttacagtctgtatcattaaaaatggtgggaatatatatatttttttttaacaaaaaaaaaaaaaaaaaaaaagggcgggcgctctataggatcca

SEQ ID NO: 124211 - DNA, 697 bp, Arabidopsis thaliana
caatcatataagcataaccaataatcatcggcttccatttgcgtcttgagaaagaaaaacaaaatggcttcgatgggtggattacacggtgcatctccggcggttcttgaaggaagcttaaagatcaatggctccagccgtctgaatggctctggaagagtggcggtggctcaaaggtctagacttgtcgtcagagctcagcagagtgaggagacttctcgccggtccgtgattgggcttgttgctgctggtttagctggtggctcgtttgttcaggctgtcctcgccgatgctatttcgatcaaagttggccctcctccagctccttccggtggccttcctgggacagataactcagaccaagcaagagactttgcattggcattgaaagacaggttttacttacagccattgccaccaacagaagctgcagctagagccaaagaatctgcaaaggatatcataaatgtgaagccattgatcgacaggaaagctttggccatatgttcaaaacggttttcgttccaagggttttttatctccggtatggccttaacacaatcatttcctccaaacccaagggttggaaggaggcccttaagggtctttccccaaaggttttgggccctttggcaaatttggttttcggggagaagagggccttcaagcttgagcctttcttgaaatttttttttcc

SEQ ID NO: 124212 - DNA, 731 bp, Arabidopsis thaliana
  unsure (1)..(731): unsure at all n locations
cnangcnnccagntgggngctttncccggcncgggntgggntttgtcctctggtttcctgggggccgtttgtncagggttccnncccngtnnntttcnngcnaaaggttgcccntcctccangtccttccggtgccttccctgggccagttactnaggcccaagccaaggggcttttccattggcattgaaagccaggttttacctaccagccattgccaccaacagaagctgcagctagagccaaagaatctgcaaaggatatcataaatgtgaagccattgatcgacaggaaagcttggccatatgttcaaaacgatcttcgttccaaggcttcttatcttcgttatgatcttaacacaatcatttcctccaaacccaaggatgagaagaagtcactcaaggatctcaccaccaagctcttcgataccatcgacaatctggattatgcggcgaagaagaagagtccttcgcaggctgagaagtactatgctgagacagtctctgctttgaacgaagttcttgccaagcttggttaagcattttaatttctgcatttttcttgtaaattattattcttggtttttgttcttgagtactttagactcaaattcgtgaatctgaatttatgtttcacgaaaaaaaaaagtaatgaaaaaacaaaaaaagcggccgctctagaggatccaagcttacgtacgcgtgcatgcgacgtcataactcttctagagt

SEQ ID NO: 124213 - DNA, 665 bp, Arabidopsis thaliana
  unsure (1)..(665): unsure at all n locations
aaaacaaaatggcttcgatgggtggattacacggtgcatctccggcggttcttgaaggaagcttaaagatcaatggctccagccgtctgaatggctctggaagagtggcggtggctcaaaggtctagacttgtcgtcagagctcagcagagtgaggagacttctcgccggtccgtgattgggcttgttgctgctggtttagctggtggctcgtttgttcaggctgtcctcgccgatgctatttcgatcaaagttggccctcctccagctccttccggtggccttcctgggacagataactcagaccaagcaagagactttgcattggcattgaaagacaggttttacttacagccattgccaccaacagaagctgcagctagagccaaagaaatcctgcaaaagggatatccataaattgtgaaggccatttattcgacaggaaaacctttggccataatggtccaaaaccgatccttccgttccaaggggctcctcaacctcccgaaactgaccttaaccccaancactttccccccaaaacccaagggtgngaanaaagcancccaaggggtttnccaccaaangcnttnngaccaaccggnaaannttgggttttcggggggnaaaaaaaaaangnccttccaaggggtgnaaagnaccatt

SEQ ID NO: 124214 - DNA, 570 bp, Arabidopsis thaliana
  unsure (1)..(570): unsure at all n locations
nngngaaatangnttcgatgggtggattacacaggtgcatcnccggcggttcttgaaggaagcttaaagatcaatngctccagccgtctgaatngctctggaagagtngcggtggctcaaaggtctagacttgtcgtctgagctcagcagagtgaggagacttctcgccggtccgtgattgggcttgttgctgctggtttagctggtggctcgtttgttcaggctgtcctcgccgatgctatttcgatcaaagttggccctcctccagctccttccggtggcccttcctggggacagataactcagaccaaagcaagagaacttttgcatttggcattgaaaagacaggttttacttacagccattggccaccaacagaagcctgcacgctagagccaaagaatctggcaaaggggtatcataaaatgtgaaagccattggatcgacaggaaagcctttggccatatggtcaaaaacgatctttcgtcccaaggcttcttattttcggtatgatcttaacacaatcatttcctccaaacccaaggatgagaagaagtcactcaaggatct

SEQ ID NO: 124215 - DNA, 407 bp, Arabidopsis thaliana
gggcaacggagaaatttgttttagggctttttgcttatcatcgtcgtctcagatcctgctaaaaggaaaaatcttttgttctagatttcttcactctcgtcttttgatctcttgggtttttccctgttggtgtcaccatcgttctcgtttcttcgatcgatcgttgagtcaccggcgttaagcccgacttgagttccttagataattttaagattaggttgtaaaaatttgaatttggtgggtttggtttgatgatgttgacccaaactgttggggtttgaagtaatatggaagtggaagattaacaaagaagaagataatgacgctttatattcgccgcgaagcttccaagctatggaggagattttgttcggaaataacaacggagattggtctcctcgctgaga

SEQ ID NO: 124216 - DNA, 914 bp, Arabidopsis thaliana
  unsure (1)..(914): unsure at all n locations
ctctctcattctcactaacagagagaaaaagcaaaagcaaaaatggctcgatctttcgctattgctgtgatctgtatcgtcctcatcgccggngttactggtcaagctcccgccccctcctcctgcttctcctccaccagctactcctcctccagtcgcttctcctcctcctcccgttgcttctcctccaccagcaactcctcctcccgtcgctactcctcccccagctcctctagcttcccctcctgctcaagttccagctccagcaccgaccacgaagccagattctccatctccatctccgtcatctagcccacctcttccatcaagcgacgctcctggacctagcaccgattctatctctcctgctcctagccccactgatgtgaacgaccagaatggagctagcaagatggtttcgagcttagtatttggatctgttctcgtctggtttatgatctaagtggaatcttttgtgactgtgttacttgcatttatttttatgtcgtctttgtttgttccactgtattgcttgggactgaattcttttgggatttattatctttcggagaggatactattgagagcttgagatggagatagcaggatattttgattgcagatacttttgtggcttcatttctcattccatttgattattagtgtactacattccttttctccatgccttatttctttcttttgtctaaaaaaaaaaanaaaaaaaaaaanggngggcccctcctagnggnncccaagttttaggtacggggtgnatcnngcggncaaaggccttntatagggnnaccnaaatccaattnactggccgcggttttnaacgcnngnctggggaanccctgggggtncccanctaaaacgctttaagnaaanccccctttgccancttggnaaan

SEQ ID NO: 124217 - DNA, 571 bp, Arabidopsis thaliana
  unsure (1)..(571): unsure at all n locations
tccaggtccgaccacgcgtccgattctcactaacagagagaaaaagcaaaagcaaaaatggctcgatctttcgctattgctgtgatctgtatcgtcctcatcgccggcgttactggtcaagctccgacttcaccaccaaccgctacaccagctccaccaactccaacaactcctccaccagcagcaactcctcctcctgtctcagcaccaccaccagtcacaacatctcctcctccagtcaccactgctcctcctccagcaaatccaccaccaccagtctcttctcctcctcctgcttctcctccaccagctactcctcctccagtcgcttctcctcctcctcccgttgcttctcctccaccagcaactcctcctcccgtcgctactcctcccccagctcctctagcttcccctcctgctcaagttccagctccagcaccgaccacgaagccagattctccatctccatcttcgtcatctagcccacctttttcattaagcttggcaaccttttcataagggaggtnttgggcttggacggtttttttttctgttctggcaatgntgnanc

SEQ ID NO: 124218 - DNA, 723 bp, Arabidopsis thaliana
  unsure (1)..(723): unsure at all n locations
actgctcctcctccagcaaatccaccaccaccagtctcttctcctcctcctgcttctcctccaccagctactcctcctccagtcgcttctcctcctcctcccgttgcttctcctccaccagcaactcctcctcccgtcgctactcctcccccagctcctctagcttcccctcctgctcaagttccagctccagcaccgaccacgaagccagattctccatctccatctccgtcatctagcccacctcttccatcaagcgacgntcctggncctagcaccgattctatctctcctgctcctagccccactgatgtgaacgaccagaaatggagctagcaagatgggtttcgagcttaggtatttggcgttctggttctcggtctgggtttatgaatctaaggtgggaatcttttggtgacttggggttactcgcatttaatttttatggtgggctttggtttgttccactgtattgccttcggccccaattcttttgggggtttattatcttttcgggagggggtactatttgagggcttgagatggggatagcaggatattttgattgcagatacttttgtggcttcatttctcattccatttgattattagtgtantacattccttttctccaaaaaaaacggacgcatggnnnnnnnnnnnnnnnnnnnnnnnnnnnnnnnnnnnnnnnnnnnnnnnnnnnnnnnnnnnnnnnnnnnnngg

SEQ ID NO: 124219 - DNA, 424 bp, Arabidopsis thaliana
acgcgtccaagaaaacacaaagtagcttctccaagacgcggttcccaatatctgcgtttcccgtttgcgttttccggcaatggctctccaagccactactactacgttctgcttctccggtccaactttccgatcaactcctcactcactcacttcaaaacgtcctatctccatcaaagctactacttcttctccttcaagactctccaattcacgatctaatctcaaaggaagagcattgtctagtgatggttcaacacaagaatctccttatgtagtctgttttggagaaatgctaatcgattttgtaccgacgacaagcggactttcattagccgatgcaccggcttttaaaaaagctccaggtggtgcacctgctaatgtagctgttggtattgctcgtcttggtggttcttcagctttc

SEQ ID NO: 124220 - DNA, 383 bp, Arabidopsis thaliana
tctctttctttcaattccactgcaatggcgaaaacagagaagagagtccgagaaggactcggatcttcttcgtatttcctcggctgtttcggattctcccggaaaatatactccgacaagccgatggttacgaagggagacggtggtgagaagaagaagatgaagaagaagcgaatccctcggtggtttttgtgtcccatgttccgcctgaagaacagcgagatctaaccgtcgccgatcgaggaaacagagaaacctacttcgagagtagaagatgaaactgatgataagcagaaacccctctccgtgatacgtcgtataactgatcgtaaaaatattccggttgatgataaagccatgaatcaggaaacaaaagagacaaa

SEQ ID NO: 124221 - DNA, 962 bp, Arabidopsis thaliana
  unsure (1)..(962): unsure at all n locations
nnnnnnnnnnnnnnnnnnnnnnnnnnnnnnnnnnnnnnnnnnnnnnnnnnnnnnnnnnnnnnnnnnnnnccacgcgtccgcggacgcgtgggctgcgagaagacgacagaagggggaggatttttcagtaaatggatagcctgacacgagaaagctgacctcactcgctacttgggttgattgtgtaaatatatgaaagtatcgtcgttgagaaattgggactctgatctgttgcagaaagccgaaagctttggtctttggagctctaacctctgcctctgaacacacacagaatctcccatggctgcatttgcaacggcagaagcgtgtgacagcaacgcagaactaatatcaaatggagacttacgcgctcttcacccaatcttcaagatctatggccaaagaagatgcttctcaggaccaatcgtgactcccaaggtctttgaagacaatgtcctcgtcagaaaccaactagaaacgaaaggagaaggcggagtcttagttatagacggtggtggaagcatgagatgcgcgcttgttggaggaaacctcggacagttagctcagaacaacgggtggtcggggattgttgtgaatggatgcgttagagatgtggatgagatcaatgactgcgatgttggggtcagggcattgggatctaacccgttgaaatctactaagaaaggtcatggtgagaagaatgtgccggttcatattggaggaactttgattagagatggagagtggctatatgctgatagtgatggtatcttgatctccaggaccgaactctctgtttgagtcagaacgtttccgtgatagtgctaagagactacagcttcttggagcaaggtggtttattcgaattcttaagaatctgtttaatactccaaataatcatttttattacaatatacttacgttttatgaaattacaaaataaaagtctatttagttcaccc

SEQ ID NO: 124222 - DNA, 763 bp, Arabidopsis thaliana
gctggtacgcctcaggtaccggtccggaattcccgggtcgacccacgcgtccgcggacgcgtgggcgaaatctcgaatcgactcatctctcagctcaccggtgctgcattatcaaaactgcaggaaggatttggttgtgaagatggcatcgaagttgatacaagttcaatcaaaggcatgtgaggcttcaaagtttgtggctaagcatggaacttcctactacagacagctgttggagaagaacaagcagtatatccaggaacctgccactgttgagaagtgccaagagttgtctaagcagttgctctacacccgtcttgctagcattcccggacgctatgaaaccttctggaaggaagtagactacgcaaagaacctatggaagaacagatccggtctgaaggtagaagatgcaggaatcgctgcattgtttggtctcgaatgctttgcatggtattgcgcaggtgaaatcgccggcagaggattcaccttcacaggctattacccatgaaggagagtaccaataacttgaagattgtgtaatcccccccgtttttagttttcatgatcccctcttgaatcaattttttttccagtttatccctgaaacggaggctttgaagctgagaaaaacccattttgctataactctttgataaaggttgctctaaaaagaccccatttcccaggaaaaaaaaaaaaaaaaaagagggggccctttaaggaatcaattttctcccgggcgtggaaggattattttttt

SEQ ID NO: 124223 - DNA, 639 bp, Arabidopsis thaliana
  unsure (1)..(639): unsure at all n locations
anagaggtttgttnaaatggcccaagttgtccagatcaccggcgtctggggcttcaaagtttgtggctaagcatggaacttcctacttcagacagctgttggagaagaaccaagcagtatatccaggaacctgcccactgtttgagaagtgccaagagtttgtcttaaggcagttgcttctaccacccgctcttgcttagcattccccggacgcttatgaaaccttctggaaggaagtagactacgcaaaggaacctatggaagaaccagatccggtctgaaggtagaagatgcaggaatcgctgcattgtttggtctcgaatgctttgcatggtattgcgcaggtgaaatcgccgggcagagggttcaccttcacaggctattaccccatgaaggagagtaaccataacttggagattgtggaatcccctccggtttttagttttcctggttcccccctggcatcaatttttttcccagtttatcccctgaaacggaggctttgaagctgggaaaaatccattttgcgataaccctttgataaagggggcccccaataagacaaataggccgggatccncgggggggngccttttggggaaacccnnntttgggggantcgaaaacntttgnngcttg

SEQ ID NO: 124224 - DNA, 677 bp, Arabidopsis thaliana
cacgccccccctcggcttcgacggtatcgataagcttgatatcgaattcgcggccgccgaagttgatacaagttcggtcaatggcatgtgaggcttcaaagtttgtggctaagcatggaacttcctactacagacagctgttggagaagaacaagcagtatatccaggaacctgccactgttgagaagtgccaagagttgtctaagcagttgctctacacccgtctccgctagcattgccggacgctatgaaaccttctggaaggaagtagactacgcaaagaacctatggaagaacagatccggtctgaaggtagaagatgcaggaatcgctgcattgtttggtctcgaatgctttgcatggtattgcgcaggtgaaatcgccggcagaggattcaccttcacaggctattacccatgaaggagagtaacaataacttgaagattgtgtaatcccctccgtttttagttttcatgattctctcttgaatcaattttttttccagtttatccctgaaacggaggctttgaagctgagaaaaatccattttgctataactctttgataaaggttgctctcaataagaacaaaatttcccaggaaaaaaaaaaaaaaaaaaaaaagggcggccgctatagaggatccaagcttacgtacgcgtgcatgggtcgtcatag

SEQ ID NO: 124225 - DNA, 778 bp, Arabidopsis thaliana
catgagtgcaggttggtatcgaagatgtgagagcagaagtaatgccagctggtaaagctgacgttatacgttcgctgcaaaaggacggaagcacagtagccatggtaggagacggaatcaatgactctcccgctctagccgctgcagatgtgggaatggcaattggtgcaggaacagatgtagcaatagaagcagcagattacgttctgatgagaaacaacttagaagccgttataacagccatcgatctccccccgaaaaaccttaacacgaatccgattaaattacgtcttcgcaatggcgtacaatgtagtgtcaatcccgatagcagcaggagtgtttttcccggttctgcgggtgcaattaccgccttgggcagccggagcatgtatggcactctcttcggttagtgttgtttgctcttctttgcctcctagaagatacaagaagccaagacttaccactgttttgaaaatcaccacggagtaaaaagtcctttgttttcttacattggagtgactcgactacttttgttctgaaaataatttgtatttacttttcttttgtgctgttgttgttgtaatcatgtaacaacgatattggtcttggagaggtttctttttttctgtaagaaatgtgtcctctcggcctttgttgtaaaaaaatggtttcgatgctttgtgctcgattattaatgtaaaatggtgccgcgaatttcttcaagcccggggatcccactaagattaagaccgcccccccccccgtgagctccgcgttg

SEQ ID NO: 124226 - DNA, 1033 bp, Arabidopsis thaliana
  unsure (1)..(1033): unsure at all n locations
atgannnnnnnnnnnnnnnnnnnnnnnnnnnnnnnnnnnnnnnnnnnnnnnnnnnnnnnnnnnnnnnntctctctctctctctaaacccattaaagtaatttagctcctcatagattctcgagaagaacacttccatggcgactaaagtatatatcgtgtactactctatgtatggtcatgttgagaaattggctgaagaaataaggaaaggagctgcttctgttgaaggtgttgaagctaaactatggcaggtaccagagacgcttcacgaagaggcactctctaagatgagcgcaccaccaaagagtgaatccccaatcataaccccgaatgagctagctgaagctgatgggtttgtctttggtttcccaacaagatttggtatgatggctgctcagttcaaagcctttttggatgcaaccggtggactctggagggctcaggcactcgccggtaaaccagctggtatcttctacagcactggctctcaaggtggtggccaagaaaccacagcattgacggcaataactcagctggttcaccacgggatgttatttgtcccaatcggttacacatttggcgcgggaatgttcgaaatggagaatgtgaaaggtggaagcccatatggagctggaacatttgcaggagacggttcaaggcagccaacagagctggagctacagcaagcatttcaccaaggccagtacattgccagcatcaccaagaagctcaagggatctactgcttagagcttaaaaagattatggtatcaataagaaaaaaagaaaaaaacagtttggttctgcttttttttatattctttctctttgaatttgggggcttttgtgatttttcgggtttaattatcttaaaatacatgatattatttcacagcaataattcttatcttggttttacgtaaaaaaaaaaaaaaaggnnnnnnnnnnnnnnnnnnnnnnnnnnnnnnnnnnnnnnnnnnnnnnnnnnnnnnnnnnnnnnnnnnnnnnnnnnnnnnnnnnnnnnnnnnnnnnn

SEQ ID NO: 124227 - DNA, 482 bp, Arabidopsis thaliana
ctttgtttatcttagggtttgtagataaaggaagaagatcgttgtggcaaagaaggaaatcgatggctccgacggcgacgctggacaacaatgaggagctccggcgactcagggaggttaatattgacgaagctccggggcgtcgtcgtgttcgtgattccttgaaagatattcagcttaatctcgatcatatcctcttcaagacaccagaaaatgggattaagacaaaggagtcttttgaggtgaattcgagaggagttgagattttctctaaaagctggcttcctgaagcttctaagcctagagctttggtttgtttctgccatggttatggagatacttgcacatttttcttcgaaggaattgcaaggagattggcattgtctggatatggagttttcgctatggattatccgggattcggcttatcagagggcttgcatggttatatccctagctttgatctccttgttcaagatgtt

SEQ ID NO: 124228 - DNA, 933 bp, Arabidopsis thaliana
ctctctttgtgtttattttactgatcctattagaagataaaacggtcttcttcttcttcttcttcttcttcttcttgtaagaaccagtcatgggaagatctccagcttcttcttgtctccgtctcatctcttgctccggcggtgatgatacctccgccgatcctaactccaccgccctcgagaacaagagctctggggataagcgtggatggagtttcaggaagaaatctgggaaacagcgagggttgattactagtgtagtttctgaaactactcctgcttctaggactagagagactcttgaatctgctctccttaaatctccgtctcctgataataacaatgtttctgaaaaacagcagcagtctttctctgttgatgaaaagaagagtcagttacctgttgttacctatgtggctgagcctgtggatgagaaaaaaacacagtctgttattgaggagaagacggagttgttgtcagtggaggaacagattgaccatagaactgaggtgtcgcctgttattgtggaatcaaaagggactgaaactgaggaagatgatttgattggaactgaattgcaaggaccaagtgctgctgatgccgccaagatagaggaagatgttacttccgaggttgaaatggctagtaaggttgagccggaagaatctgaatccgatgatgtgattatagttagaaaagaaagtgatgaaaaagttgatgagaagctggatgagtctgttatcgttgtcatccaagctgctgttcgtggttttttggcgcgaagagaacttttaaggagcaagaaagttattaaactccaagctgcagttcgtggccacctggttaggagtcaggccatgggatcactgcgttgtgtccaagctattgtcaagatgcaggcgatggttcgtgctcgtcattccacaaaagatg

SEQ ID NO: 124229 - DNA, 474 bp, Arabidopsis thaliana
cggacgcgtgggttcatctctctcccctctctccctctatagctctctctcccttttcgacttgagagtttgggtcctttgggagaaagaagaagaagaagaaaaagattggattttgttcactttaacatcttcaatctctaaacccacctgagttttctccatttctctgtttggtttcttgtcagttttcaagaaagcgtccaaatcctagatcctctgttttctcttctctgtttgctttcattttctctggattcggatctgaccactaaagagaggtttatcgtttcagacaacaaaactcaaagatcgaatctatcttttgtccttagagtctggaaaaagcagctctcttttgatctcctctttagattcttcaaagctttagatgcttatctctctttctctctcagattccatttgaataaatgccattttgacagatcaaatatctcccacttttctctctct

SEQ ID NO: 124230 - DNA, 437 bp, Arabidopsis thaliana
ctaatgtctttacatgtcaagggacctgtttgtcaaacttgtggcgacataggttgggaagaagcacttgtcttttgtgactcttgtatgtttgagtctattcaccggtgagttcaattctcgatttcccctgtgcgtcgatcaaattgtgcctattaggtttctcctgtggtttgattgaattatgcatatacctatttctcttgttcttcagctattgcttagggataacaccgattccttttacggaatacataacttggatttgtgaggattgtgataacagtgagagtgattctgattgcaatgaagttgatcagactgttaagaagaagatgaagagtagaaatcaaccccttgtggttttagctgaggacaatgtgctccaggaacctttggaggggtctaagagagaagaaagctcatgtagcagaaaa

SEQ ID NO: 124231 - DNA, 501 bp, Arabidopsis thaliana
acccacgcgtccgaacataaccacttttcaaacattggaactatctaagtattgaacacatagatggccaaagtgttgacactacttgttcttcgactactcatgaacctcttacttatcggttggatttctctctggatcatcaaacccacgaccatatggatacaatcttggcgtcaagctgaagataccgccagacacactttcttcggctattacggtctcaactttgccgtattttcattccctcctattgctctctctatcgttggactcatttacttgagtttactgccacaacatcatcatccaacaagaggagggaggggtgcagctattactgtctcaagaccagccattatcaatagcttcattggaattgcgtcctgtttcgagatacttgctcttcttttgttcctactctttcttgcttggaacttctatgcccgtgtctctaacgacttcaagaagctgatgcctgtcaaaaccatgaatcttaac

SEQ ID NO: 124232 - DNA, 846 bp, Arabidopsis thaliana
accggaattcccggggcgccccacgcgtccgcagagagcctttacccaggacagcaaaaaaaaaaaaacttttgttcactcgatggcggcgaagagaatcggagccggtaaatctggcggcggagatccaaacatattagcgaggatttcaaactccgagatcgtgtcccaaggaagacgcgcagcaggagatgccgtcgaagtatcgaagaaactgctccggagccaccggaaaagcagcgtggatcgctgggacaacttttctcatacttgttgttccattgatcatcgagatggatcgagaggcacaaatcaacgaaattgagcttcaacaggccagtctcctcggagctccaccatctccaatgcacaggggattggaagaatcccttattatggattagggccctctgggttacgagtgcttttggtatatgttgttgctcgaatttgaatttcgtataacagcggataattcacatgttggattcatatagaccggccccgttgtttatatcgtcatccgggaccgaaaacaaaaaaaacaggggggccgttttgttaagaacccaaccttacctcccccgtgcatgccagggtaatagcttctctgatcgtggccacctaaaattcaatttcactggcgcgggcggtttttcaaaccgacctggggctgggaaaaacccccctgtcagtttaccccccactttagatggcaactttgtgcatacctccatttcccccccctttctccccgcccaccctttcggtctcgtctacactcccgctgcaaagagagagcgcctctgctggactcgataatcctcccctcccttttctcccccc

SEQ ID NO: 124233 - DNA, 739 bp, Arabidopsis thaliana
  unsure (1)..(739): unsure at all n locations
atgattcgccggcactaatacgactcattaagggaaagctggtacgcctgcaggtaccggtccggaattcccgtgtcgacccacgcgtccgcggacgcgtggggaaagttttaacccaaaaaagcaaaaaaaaaaaaacttttgttcactcgatggcggcgaagagaatcggagccggtaaatctggcggcggagatccaaacatattagcgaggatttcaaactccgagatcgtgtcccaaggaagacgcgcagcaggagatgccgtcgaagtatcgaagaaactgctccggagcaccggaaaagcagcgtggatcgctgggacaacttttctcatacttgttgttccattgatcatcgagatggatcgagaggcacaaatcaacgaaattgagcttcaacaggccagtctcctcggagctccaccatctccaatgcaaaggggattgtaagaatcccttattatggattagggtcctctgttttacgagtttttttggttatatgttgttgtttgaatttgaacttcgtataagagtggtttaactcccatcgttggattcataaagttcaggctttgttgttttatatattatcttgagattgatttggcaatcaataattctggtttctcggatttnnnnnnnnnnnnnnnnnnnnnnnnnnnnnnnnnnnnnnnnnnnnnnnnnnnnnnnnnnnnnnnnnnnnnnnnnnnnnnnnnnnnnnnnnnnnnnnnnnn

SEQ ID NO: 124234 - DNA, 423 bp, Arabidopsis thaliana
cccaagcgtccgcacactctctttacttcgtcgctttttttttctttagactttccggtgatcggagccaaatcaaggaaacattcaccggccaaatggacgaatcttggcgtatgaagatgggtttaagcgttgatccattcttctccattgctcgtaaatcaatggatgctcgtatcgacgcggaagacttcgctgatgttttcggcggtccgccgcgaagcgttctcacccgaaaattttccggcgacttctctcgttccgactgtttctacgacgagatttttcagcctccgggaactttctcctccggcggctctcttgcgtcttcgaaatctcacggaagaaacttaccggcattcagaattccgtccggcggggaaggattttacgacggcgtgtttggtggtcgcggcggttctg

SEQ ID NO: 124235 - DNA, 545 bp, Arabidopsis thaliana
  unsure (1)..(545): unsure at all n locations
nnnnnnnnnnnnnnnnnnnnnnnactgacacaaaagggaatgcgcttcatgcgggtcatcctcttaatctcaaactctctaggactacactaaatctaactttttgcagagagcaaaagattcaataattgagattgatctcaaaaccaaagctctcgtgctcttgtcgttgatgttggttgtgtagactttgtatacaatgatgaaaagtttggcgaatgctgttggagcgaagacggcgagggcttgcgacagctgcgtgaagagacgtgcacggtggtactgcgcggccgacgatgcttttctttgccagtcttgcgacagtttggtccattcagcaaaccctcttgctcgccgccacgagagagtccgtttgaagacggctagcccggcggtcgtaaagcatagcaaccactcatcagcttctcctccacatgaggtcgccacgtggcatcacgggtttactcgtaaagctcgaacgccacgtggctctggtaagaaaaacaattcgtcgatatttcatgacttggttcctgatattagta

SEQ ID NO: 124236 - DNA, 724 bp, Arabidopsis thaliana
  unsure (1)..(724): unsure at all n locations
acccacgcgtccgaaaggattagatgaactcttcaaagtagcacagttacttgcagatggtgtaatcccaaatgagtatggcatcaatccgcaacaaaagcttaaaatcggttcaaagattgctcggcgcttaatggggaaaatcttgatagacttgaggaatactcgagaagaagcactgagcgttgccgagttgaaagaaagccaagaacaagtcttgtcattatccgcctcgcaaagggaagatagaaataccccgccgccgctatttatcaatagcgatgaattgagacgacctggcacaggtgataaagatgaagatgatgataaagaaaccaaataccgattagatccaaagtatgcaaatgtgaagacacctgaacgtcatgtgaggactcgactttactttcactatctgaatcgcatattcattcgctcatgaacgtccttcgatactgtaaccttgatgaatctctcctaggagaagaaagcctcatttgccaaaacgccttataacgtatctgtaaaaccaaggaactcgattacatgagttacattgtcctaaggctctttgagaacaccgaggtatcacttgaagacccgaaaagattccgcattgaacttacatttagccgnggagctgatttggctcccttaaggaataatgaccaccaggcagagacattgcttagggaacacacactttcgataatgggaccagaga

SEQ ID NO: 124237 - DNA, 774 bp, Arabidopsis thaliana
  unsure (1)..(774): unsure at all n locations
acggacgcgtgggtggcgcattcatgagatgatccagcacgccaacttgagtagactagccgatcctaactcgacggctgtatcagttgatccattcatgcaaatcggagttcttaacttctcggaagttagatttagagtatccatggcgatgtcccccagtcaaaggccgaggggagtgcttggattttggtcatccctgatgactgctcttgggaatacagaaaacatgccagtacgcataagtgagagatttcatgagaacatatccatgcgccaaagtactatgatcaataatgctattaggaacgtaaagaaagacctccttggccagcctcttcagttgctctcaggtgttgatattcttggcaatgcaagcagcgcgcttggacatatgagtcaaggcatagctgcattatcaatggataaaaaattcatccaaagtcgacagagacaggaaaacaaaggtgttgaggactttggcgatattatcagagaaggaggtggagctctagcgaaaggcctgtttagaggagtcacaggcatattgacaaagcctctcgaaggtgcaaagtcttctggtgtcgaaggctttgtctctggggtttgggaaagggaatcattggtgctcntgcccagcctntnagcggagtcttgatcttcttncaaaagnccctnaaggtcaaattcccntgngggttnaanngnnnttccctcaccccagntgncaacttttttccggngnttcnaaggngggtnggcttnaggtttttg

SEQ ID NO: 124238 - DNA, 788 bp, Arabidopsis thaliana
ctggtacgcctgcaggtaccggtccggaattcccgggtcgacccacgcgtccgatctaatcgaaatggtgttcgctaaaggagatcctgggattgctgctttgtacgataagcttcttgtttcagaggaactctggccttttggtgagaaactcagagctaacttcgaagaaaccaagaaactcatcctccagaccgctggacacaaagatcttcttgaaggtgatccttacttgaaacagagactgagacttcgtgattcttacattacaactctcaatgtctgtcaagcttacacattgaagagaatccgtgatccgagttaccatgtgactctgcgaccacacatttctaaggagatagcggaatcgagcaaaccagcaaaagaactcatcgagcttaacccgactagcgaatacgcgccaggacttgaagatacactcatcttgacgatgaagggtattgctgctggtctacaaaacaccggttaagctacaaagagatggttaaacaaactttgaatctctctttctctctcaagtctctcctttttttaactacagatttggaaaataaggttggattctggtttattttatgtatccaccgtcaaaatgttgattttcgtgtacgagtacttcgagatcattgaacacatgctctgtttttttctcaagtttaataaaacagaacaagagaatcttttcttgtttattttcctaaaaaaaaaaaaagcggccccgaattcgatatccagcttatcgattccctcgaccacaagggggggcc

SEQ ID NO: 124239 - DNA, 858 bp, Arabidopsis thaliana
  unsure (1)..(858): unsure at all n locations
agcagatctggaagcagctccngcngtagttgcnattctctttnctgnngannggtacaaaagaccgaattaacggtaagcaagaggttatgatcggttattcggattcagggaaagatgctggacggttatccgctgcttggcagttatacaaagctcaagaagagcttgtgaaggtggcgaaagagtacggtgtgaagctaacaatgtttcacggtcgtggtggcacggtcggaagaggaggtggaccaacccatcttgctatattgtctcagcctccggatactattaacggttccctccgtgtcacagttcaaggtgaagtcatcgagcaatcgtttggtgaagagcacttatgctttagaacacttcagcgtttcacagctgctacactcgagcacggtatgcgtcctccaatttcgcctaaaccagaatggcgcgctttgctggatgaaatggcggttgttgcaaccgaggagtatcgctcagttgtgttccaagaacctcggtttgtcgagtacttccgcctcgctacaccggaactggagtatggacgtatgaatatcggaagcagaccttcgaagcgtaaaccaagcggtggcattgaatctctccgtgcaattccatggatcttcgcttggactcaaacaagattccatcttcctgtatggcttggattcggatcagcaattagacatgtgatcgaaaaagacgtcaggaacctccatatgctccaagatatgtaccaacactggcctttctttagagtcaccattgatctaatcgaaatggtgttcgctaaaggagatcctggtattgctgctttgnacgataagcttcttgttttcaanaggaact

SEQ ID NO: 124240 - DNA, 457 bp, Arabidopsis thaliana
agaagatgtttcgaaagcttcatggaaagttcctcttagagactgtgtggacattagtgaaaatagacaacagaaaccctcttctttaactgaccgtctatcttcatatccaacaagtctaagagaaaaaggcatcagcgaagacgaatttacattggacacaaacttctggagagaacaagtgaatcagtactgggagttgatgaatgttaataagactgaagtgcgaaatgtgatggacacaaatgcattcattggtggatttgccgcagccatgaactcatatcccctttgggtcatgaacgttgtacctgctacaatgaacgataccttatccggaatttaccagaggggcttaaccggtgcttatcatgattggtgtgagccattctcaacatatccccgtacttacgatctgctacacgcggaccatctcttcactcactataaaatctac

SEQ ID NO: 124241 - DNA, 509 bp, Arabidopsis thaliana
cacgcgtccgcccacgcgtccgcccacgcgtccgcggacgcgtgggtttccgtgaatgttgtgattagcttattattatcttcgttgcccaaaaacttaaaagatccaaacttcgaacaattttggtgtctgctatacagaatccaaatccaccttctccgattaaaaatcccttctctttcgatcatggatgtgtctaaagttgtcagcttttcccggaatttcgccgtcttggtcaaagtcgaaggccctgatccaaagggattgaagatgaggaagcatgcttttcatcaataccattctggcaatgcaacactttcagcttctgggatcttgcttccaagagatatttttttgagtggtgaggtcgctgctaaggttctgtttgaagctggtcaggacatggccctggttttgaccgttgcatctgttgttgagccattcttaacattaggtcacagaactagtagtagtatctctcaggatccggtgaagcttattccgggtgc

SEQ ID NO: 124242 - DNA, 561 bp, Arabidopsis thaliana
atctctctacttctcggtcgtcttcttcgtctccactctagggttttactctatcttcttcttcatcatcatcttctacaccaatctctagcgttaatctgtttctgctggagaagatttacgcttgttcctcggttctcttacttctgctccggttcgatcgcttgctaagtgtttcgagttggttcgcacttcggtgggcgatatcatgactgtgaggaacggtggtttcccaggagattataatcgtaacagttttgactctcccggcggctgtgatgatagccccaatgcttccaaggatgatgaaacttttggtgtcccgagaatagttttacccttgtctgacttgtcatcatcagaaaggagaaagtggattcatacgcttcgtcaggagctggaacaactacggtcctttcagaagagtgttggggaccttcttcctatatctaagattgttactagtacacctgcaagtaatgtgtctcgccccaagagttttggaatgtcacgatgctctactggccctggaaaaagggtgctccccttcacagcaaccaa

SEQ ID NO: 124243 - DNA, 1121 bp, Arabidopsis thaliana
  unsure (1)..(1121): unsure at all n locations
nnnnnnnnnnnnnnnnnnnnnnnnnnnnnnnnnnnnnnnnnnnnnnnnnnnnnnnnnnnnnnnntcgcgatctagaactagtcctgatccttctctcatcctcagaaagaatggctcaaaccatgctgcttacttcaggcgtcaccgccggccattttttgaggaacaagagccctttggctcagcccaaagttcaccatctcttcctctctggaaactctccggttgcactaccatctaggagacaatcattcgttcctctcgctctcttcaaacccaaaaccaaagctgctcctaaaaaggttgagaagccgaagagcaaggttgaggatggcatctttggaacgtctggtgggattggtttcacaaaggcgaatgagctattcgttggtcgtgttgctatgatcggtttcgctgcatcgttgcttggtgaggcgttgacgggaaaagggatattagctcagctgaatctggagacagggataccgatttacgaagcagagccattgcttctcttcttcatcttgttcactctgttgggagccattggagctctcggagacagaggaaaattcgtcgacgatcctcccaccgggctcgagaaagccgtcattcctcccggcaaaaacgtccgatctgccctcggtctcaaagaacaaggtccattgtttgggttcacgaaggcgaacgagttattcgtaggaagattggcacagttgggaatagcattttcactgataggagagattattaccgggaaaggagcattagctcaactcaacattgagaccggtataccaattcaagatatcgaaccacttgtcctcttaaacgttgctttcttcttcttcgctgccattaatcctggtaatggaaaattcatcaccgatgatggtgaagaaagctaaattatcatgtacttaaatttagtagagagtgtgtgaccttctcttcatgttgagacaaaaggaaatggacagcttaaattgttgtaatacttatatccttttgtttttaacttggaattttctgattatatatagttttattacacctaagtgactaggtgattgataaaaannnnnnnnnnnnnnnnnnnnnnnnnnnnnnnnnnnnnnnnn

SEQ ID NO: 124244 - DNA, 570 bp, Arabidopsis thaliana
  unsure (1)..(570): unsure at all n locations
cactgatccttctctcatcctcagaaagaatggctcaaaccatgctgcttacttcaggcgtcaccgccggccattttttgaggaacaagagccctttggctcagcccaaagttcaccatctcttcctctctggaaactctccggttgcactaccatctaggagacaatcattcgttcctctcgctctcttcaaacccaaaaccaaagctgctcctaaaaaggttgagaagccgaagagcaaggttgaggatggcatctttggaacgtctggtgggattggtttcacaaaggcggatgagctatttcgttggtcgtggttgctatgatccggtttcgctgcatcgtttgctttggtgaggcggttganggggaaaaggggtatttagctcagcttgaatntggnggacaggggtacccgtttncggagccagagccattgcttctctttcttaaacttggtccactcttttgggggccattggcgctttgtggcgcanaggaaaattnntggcggcctccaccggggttngnaaaccgnattctncggaaaaagccactttcctgggttaa

SEQ ID NO: 124245 - DNA, 778 bp, Arabidopsis thaliana
atttcccacctcaacagaggcccggagaccatttttttgctacaaaaagaaaaaagatttatgcgggaggaaacaaggtaaaatacttgccaaaagcagccgccacccccttttcccatgtgccccgggaaaaggctacttcggtcgtggtccgatcccaactatcatggaacttcaactacggagcgtgtggtcaaagtctcggtcttgaccttctacgccagcccgaacttgtgggtagcaacccaactgtagctttcaggacgggtttgtggttttggatgaatagcgtaaggccggttctgaaccaagggtttggagccaccattagagctattaatggaatggaatgtaacggtggtaattccggtgcagtcaacgcaaggattggatactatagagactattgtggacagcttggtgtggaccctggtcctaaccttagttgctaaaaaacctttgaacccaaacacggacatatgtgacgtggcatgtaataagtgagatatactaaaatttcacacgtatgtactttatgtcgggtctcggtgttccctgcgtcacaagcaaaaaattgttgtaataaacttgtgaaagtgattttcttttcttatgtgacttcttatgaaagagaattttaagattgatagatgtttgagtttgacacttgcagtatctgattttgggatactcgcataaataaaaattaaaataaaaaaaaaaaaaaaagggcggccgctctagaggatccaagcttacgtacgcgtgcatgccacgt

SEQ ID NO: 124246 - DNA, 704 bp, Arabidopsis thaliana
  unsure (1)..(704): unsure at all n locations
caaaacatggctttcacaaaaatctccttagtccttcttctctgcctcttaggtttcttttctgaaactgtcaagtctcaaaactgcggttgcgctccaaacctctgttgcagtcagttcggttactgtggtaccgacgatgcatactgcggtgttggatgccgatcaggtccttgtagaggtagtggaaccccgaccggagggtcggtcggtagcattgtgacacaaggtttctttaacaatattatcaaccaagctggtaatggttgcgcggggaaaagattctacacccgtgactctttcgttaacgccgctaatactttccccaactttgccaattctgttaccagacgtgaaattgctaccatgtttgctcatttcactcacgagaccggacatttctgctacatagaagagattaacggagcaacacgtaactactgccagagcagcaacacacaatacccatgtgcaccgggaaaaggctacttcggtcgtggtccgatccaactatcatggaactacaactacggagcgtgtggtcaaagtntcggtcttgaccttctacgncagcccgaacttntgggtagcaacccaactgtagctttnaggacgggtttttggttttggatgaatagcgtaaggccggttntnnaccaaagggttttgagncaccnattagnagctattaaatngaatngaat

SEQ ID NO: 124247 - DNA, 556 bp, Arabidopsis thaliana
gcaaaacctaaactttcgtcttctcaacaaaatctgcagttccttgctcctttctcagtccaaattctctgatttttgattttttcgattcaatgggtttcaccaaagatcagttgcttgatcgacttcaggaacttgagattgattattccaagtatgaacatccgcctgtactaaccgtcgaagaacaggccaagtatgttagcagtagtaagggtgcactgagtaagaatctcttcttgaaggacaagaaacatcggtattatattgtttcagcgatggtggatacgaaagttgacatgaaagttttatctcagagacttggtcttggaaaaggagggattagaatggctccagaagaagcacttggtgagcttttgcaggtatccctcggatgtgttaccccgtttgcagttgtaaatgaatcagcaagagacgtgtctctcttgttagaccaaaaattcaagaaccaaacgcgttgcatcttccacccattggtctaacgatgtctcagtctctcttgaacacattgggtctggacaagtttcttgaaggt

SEQ ID NO: 124248 - DNA, 538 bp, Arabidopsis thaliana
  unsure (1)..(538): unsure at all n locations
ctctcaaagtcaccccccaaatttttttatttttttttttaactttgaatgtgactcaggatagagagagggcgagacagataaagagagcttgaggaaggatttaagcagatctgcaagaaacactctctcagtgtttactttttttccgtagaatcaaaccggcggcgacagtgacggcggcgaaaagcggcggtgttggccgcaaaaacgatgcaaaaccagctatggtcattaccgctaacgntttatcaaaatgggaaaattttcctaaaggacttaaggttcttcttctcctcaacggctgtgacagcgacggagatggctccctcagcccgccgagactcgatcagagctcgggatcaaatgggctatatcggttactacattcacccgntgaaacttaagcacttctnttgcggttttaaagaaccccgnggnggttccanaattttccatcgtcgnggtgaanattnccccttnggggtngggttttnangttntttggnttccaaagcggtttccccctanaaggttt

SEQ ID NO: 124249 - DNA, 570 bp, Arabidopsis thaliana
tatacgacttactatagggaacgctggtacgcctgcaggtaccggtccggaattcccgggtcgacccacgcgtccggttttatcgaaagtgcaacttatgatttgatcacaattctttttctctctggggtttactttttttccgtagaatcaaaccggcggcgacagtgacggcggcgaaaagcggcggtgttggccgcaaaaacgatgcaaaaccagctatggtcattaccgctaacgatttatcaaaatgggaaaattctcctaaaggacttaagggtcttcttctcctcaacggctgtgacagcgacggagatggctcctcagccgccgagactcgatcagagctcgaatcaatggactatatcgttactacattcaccgatgaaactgaagcactctctgcggctgtcaagaaccccggagagcttccacattgccatcggcgaggtgaatatgagcgctgagagggaggagttcaagtttcttgaggctgccaaagacgctcttcccactataaaggtttcaccggacattggatcactactacaatgaaatgcatagcgcttg

SEQ ID NO: 124250 - DNA, 425 bp, Arabidopsis thaliana
gacccaagcgtccactctctcaaagtcaccccccaaatttttttatttttttttttaactttgaatgtgactcaggatagagagagggcgagacagattaagagagcttgaggaaggatttaagcagatctgcaagaaacactctctcaggttagaatcaaaccggcggcgacagtgacggcggcgaaaagcggcggtgttggccgcaaaaacgatgcaaaaccagctatgggcattaccgcgaacgagttatcaaaatgggaaaattttcctaaaggacttaaggttcttcttctcctcaacggctgtgacagcgacggagatggctcctcagccgccgagactcgatcagagctcgaatcaatggactatatcgttactacattcaccgatgaaactgaagcactctctgcggttgtcaagaa

SEQ ID NO: 124251 - DNA, 471 bp, Arabidopsis thaliana
gtctgttctttaccaatatacatacaaataccctttgaaagctcagctttcacaactggaacacagaaattgaaattaagtggaaatgacgaagaggaagattcatcatagcgacgacgaagaggacgacactttctactatcgctattcctccgtcgcggcaccaccaccttcgaaccctaaacaccaaccttcttcctccgccaaatcatcagctcccggcggcggatctggcggcttagctccttcaaaatcaacactctacgtctccaatctcgatttctccctcaccaattccgacatccacactctattctccactttcggcaaggtcgcgagagtcactgttctcaaagatcgccacactcgccaatctcgtggcgtcgcgttcgtgctctacgtctctcgtgaagacgcggctaaagcggcgcgttctatggacgccaagattcttaatggtcggaaactgac

SEQ ID NO: 124252 - DNA, 487 bp, Arabidopsis thaliana
acaatggttgacaatctcatcaagaaaacacttctatgggaggacgaaacacggaaatcatttctatatgatggtgttcgattggtatccatacttgaagattataaattgacaaggaaacaacaggaagaggaaaagagacgataccgggatcaaaagaagatgcaggatctgttaataaagcggagggaatcaatttatggatcaaaaccgagtccaagaagaagcaacagtgtaagaaagaccaacggatacaatggggatgcatctgtgcctcctacgccccgcagaaactcagctggagcaacaaataacgacataatgaccaccccaagatcatactcaagccatcgccaaaacggatatttcaaggaagtaagaagactgtcaacagctcctttgaactttgtggcaataccaaaggaagactctgtctctacatacacttcggtttgcggctctgaaccagattcaccgttatataact

SEQ ID NO: 124253 - DNA, 575 bp, Arabidopsis thaliana
gcgatggaacaagaagaacgttatcagtctcgtctcaaagtctcatcatcttccggcgccgattacgccaccgttacctgagatttaccgaatacctaatcctccaccaaagcttccggagatctcaattcctccgacacttacgctctctccatctcccaaacactccaatttcgtcaatttcctcgagaacaatctccctcaccatcaaacactaacgccacaaactcttcttggattcctccgttccaagatccgtaaccatccgctctacgctcattatgacttcgccgtctttaattgggcagctacactcgacactttccgtcatgatcacgattctttcctctggatgtcgagatcactcgccgccacgcaccggtttgacgatctttatcggcttctctcttttgtagctgcgaatccatgtccttgttcctcaggtatattctcttgtccagagcttgaacctattttccgatccgccattgatgcgtattgtagagctaggaaaatggattatgctttgttagcgtttgatactatgaagagattgatcgatggtaaaccaaatg

SEQ ID NO: 124254 - DNA, 410 bp, Arabidopsis thaliana
acggacgcgtgggcggacgcgtgggcggacgcgtgggatccgctttttgattccaaaccaaaccctaatttctcagctcgaagtttccatttcattgcttcttcttacctcgatttttcccgggtattagaattcggtcaatttactgaattatagtgttctcacatgccaactgattctacttcaaaatcgctgcgaatttctgcgatcagttacgaaaattttgtcaatgggttcgggtaatcatgttgatatagtcgatgtgagctcaggcgaagaggatgtcgatacacggggagacgtagaatacaccgattggctaaacggtgttatggaacccgtcgatgatacatctgacagtaccgatatagtcgaggttctttctgaggttagaggtggtgtaaattctc

SEQ ID NO: 124255 - DNA, 544 bp, Arabidopsis thaliana
taggtgcactatagaagagctatgacgtcgcatgcacgcgtacgtaagctcggaattcggctcgagtttctcctcaaaatatcagatcgataaccaacaagcgaaactagggttctctaatctcgacgaagatggcgatgcagaaagctaaggagatcgttaacagcgaatcagtcgttgttttcagcaagacttattgtccatattgcgtgagagtgaaggagcttttgcaacaattgggagctaagttcaaggccgttgagctcgacaccgaaagtgatggtagccaaattcaatcaggtctcgcagaatggacaggacaacgtaccgtgcctaatgtgtttataggaggaaatcacatcggtggctgtgatgcaacatcaaactttgcataaagattgggaagttggttccgctgttaactgaagctggagcgatcgcaggaaagactgcaacaacttctgcttaagggcacatccatatgtgattgcttctatcaagaataaagaggtttgagtcataaatgtgaacttgttttcgtgtc

SEQ ID NO: 124256 - DNA, 603 bp, Arabidopsis thaliana
  unsure (1)..(603): unsure at all n locations
tctctacgactcactattgggaaagctggtccgcctgcaggtaccggtccagagcagagagaaagagattccgagagagagagagaaggagggagagaaggagcttagtggtctcattaccattaccagctccatacgaaccgaaacgacgccgttcgctcaacccttttctctgcaatctctcttcctcccacgagtttctcagcttttctcggatcatctaattaagagaggagatcttgtctcacggtgggattgatttttctcttcacgaagatcgtgttccaggcaattaactgcagaaaatggtgatgtgggtctttggctatggctctcttgtgtggaacccaggatttcactacgatgagaaagtgttaggtttcatcaagggatataaacgtgtctttgatcttgcttgcattgatcatagaggtacaccagaacaccctgcaagaacttgcaccctcgagaaagctgaagaagccatatgctggggtactgcattctgtgtccgtggaggaccagaaaaagaacgtctggctatggagtacttggaacgtggaggggttaatttgattaagcaagttggttttaaggngttcc

SEQ ID NO: 124257 - DNA, 454 bp, Arabidopsis thaliana
  unsure (1)..(454): unsure at all n locations
cccacgcgtccgcccacgcgtccgcccacgcgtccgcggacgcgtgggcgagaagcagagcagagagaaagagattccgagagagagagagaaggagggagagaaggagcttagtggtctcattaccattaccagctccatacgaaccgaaacgacgccgttcgctcagcccttttctctgcaatctctcttcctcccacgagtttctcagcttttctcggatcatctaattaagagaggagatcttgtctcacggtgggattgattttcctcttcacggagatcgtgttccaggcaattaactgcaggataatggtgatgtgggtctttggctatggctcctcttgtgtggaccccagggatttcacctacgatgagaaagttgttaggtttcatcaagggggtntaaacggggcttttaatcnttnccttgcatttnatcataggggggttc

SEQ ID NO: 124258 - DNA, 613 bp, Arabidopsis thaliana
catcgattttttacctttctgtttgatcggctttttgtttttctgtaaaaagccatcttttgtgtttgatcctttctttttttttacctgattaaacaacttttctcctctgcattttttcgtgacccttttaaatatcttgtggccggtcctaaaagttctttatgcaaaggtttcttctttataagataaacaaaaggtgaagaaaccacaaccaaaaaaaataacttcttgttgagaaaagtttttttgagatgagagcagatttgattactatacagcaaacgctgacgccggaagcagcgacggttttaaaccagtcgattgctgaagccacacgtcgtaaccatggccacacgacaccgttacacgtggcagctactctcttatcttcttcctctggttatctccgacaagcttgtatcaaatctcatccaaactcttctcacccacttcagtgtcgagctctcgagctctgtttcagcgtcgctctcgaacgtctccctacaactagtacaacaacaaccactacttcgtcgtcttcttcttcttctccgtcgcaaacgcaagaaccgctactttcaaacgctttgaccggggctttaaaacgtgc

SEQ ID NO: 124259 - DNA, 810 bp, Arabidopsis thaliana
  unsure (1)..(810): unsure at all n locations
cagcactaatactgactcacattagggaaagctcgtacgcctgcaggtaccggtccggaattcccggtgtcgacccacaggtgcgcggacgcgtgggcgagaagtggacagagtagtttcacatttgatttcagtttcattccgcacaatcaaatcggttgatgatttgtttgacttctttcagagagcaggatgagctgaagaagaaactgatcgcgtacgatgacttcacatggaagggatcttcatcaacggaactgtctcagggatcggagatacttaagtatgttggaggtgtagacatgagcttttgcaaagaagattcttccgtcgcatgcgcttgtctcgtcgttcttgagcttccttctctccgtgtagtccaccatgacttctctcttctccgcctccatgttccttatgtccctggatttcttgcctttcgtgaggctccggttcttttgcagattctgcagaagatgagagatgaggaagcatccattctatcctcaggtactgatggtggatggaaatggaatacttcatccacgaggatttggcttggcgtgtcatttaggtgttcttgcttaacctaccaaccattggggtcggaaagaatcttgcatcaatgtgggatgggcctgaatcaaatcttgaggggttaaacaaggcgggttcaanttcccaaatnaaacggggcattnggnaaaactttncncttttggggangggaaacctttnggaattaacaatngggggggtnggggtttttnggccccanccttngggtttnttnaaagnncccntnatttg

SEQ ID NO: 124260 - DNA, 402 bp, Arabidopsis thaliana
actttttctggaaatggatagtgaaggagcttcaagcgagtcttcttcttctggagatcagctcgagaagtggacagaagagcaggatgagctgaagaagaaactgatcgcgtacgatgacttcacatggaagttatcttcatcaacggaactgtctcagggatcggagatacttaagtatgttggaggtgtagacatgagcttttgcaaagaagattcttccgtcgcatgcgcttgtctcgtcgttcttgagcttccttctctccgtgtagtccaccatgacttctctcttctccgcctccatgttccttatgtccctggatttcttgcctttcgtgaggctccggttctttttgcagattctgcagaagatgagagatgagaagcatccattctatcctc

SEQ ID NO: 124261 - DNA, 803 bp, Arabidopsis thaliana
  unsure (1)..(803): unsure at all n locations
ttgccctcctcgagtcgacggtatcgataagctggatttcaaatccgcggccgcgtggacctttggatcgaaaaatggaaaggtaaattaggtaaagaagctctggattccgtctcttcccgtcgtcggcgacggtggttttgcccgttggctctgaggttatatcaggctttaatttaagtggattgtcatcttctgagatatggaacaagtttttgtctggccaagctgctaccactatcggcttttctcattccaagaagcgctcgattggcggtttcttgtacgttctgatttccttgtgggctctttcgttaactgcacttagtggtcaaaccctcttctatgatctttaggggaaggtgtgaggcaaatttctgagacagggctgaagtctgcaaattcttccttcgcatagtcctagagaaacctctttgttcctctctttcatatcttgttcttatgggtgctggttgaagaaagatacatcaatttcttttctttttcagtttacaaatgtcgtttccttgagtctgaacccctgagtgagatgttgtgagcatagggtccttcctattagccaaaacagtctttcttgttggttccttcgcgtctttgagttctcagtatgtgttttcctcttctcttgctctctttcttttgcctaaatggtcaacccgtttatgttcgaagtaaataacggtcagtctacccagctggagaatcattgattttactgccttgggtgtcagtacttcctacgaacgactgggaganntatgctatataatcttcagaagtca

SEQ ID NO: 124262 - DNA, 883 bp, Arabidopsis thaliana
  unsure (1)..(883): unsure at all n locations
nnnnnnnnnnnnnnnnnnnnnnnnnnnnnnnnnnnnnnnnnnnnnnnnnnnnnnnnnnnnnnnnnnnnnnnnnnnnccacgcgtccgaaaatcgtagggtttttttttggtcatcacgagagaaccgcacattgaaaagggaaggaagagagatatttggcagagagagaaaacgttggaggaaggattgatatttgttggactttggatcgaaaaattgaaaggtaaaagaggtagagaagctctggattccgtctcttcccgtcgtcggcgacggtggttttgcccgttggctctgaggttatatcaggctttaatttaagtggattgtcatcttctgagatatggaacaagtttttgtctggccaagctgctaccactatcggctttttctcatttccaagaagcgctcgattggcgggtttcttgccccgtccttatttcccttgggggctcttttcgttaaccggcacttaatgggcaaaccccttttctttaatctttaagggaaaggggtaggcaaatttctgagacggggcttaaatctgcaaatctttccttccataggcctaaaaaaacccctttgtcccctttttcaattctgggccttaggggcccgggtagaaaaaaacactaaattcttttttttttaattaaaaagggggttcccttgtcttacccctgatgaaatggtggaactaaggcccttcctttgaccaaacgggctttttggtgtccttcccgctttgggtccacggggggttcccccttcttgggcttttttcttgcccaggggcaccccttatttcaaaaaataccggcccccccccgcgggaattttgttttctcctgggggagcctccacacccgggaaaatggcttt

SEQ ID NO: 124263 - DNA, 1645 bp, Arabidopsis thaliana
  unsure (1)..(1645): unsure at all n locations
tccacaaaactcaaaaaaatgtctcccattccaaaaccactcttcttcttcttcttcctcaactatgtgtctctctcagacctcactctctcttcacctcccactcacatctctccctatctccaccaccacaaactctcaccgcttcaccacctccctcctctcccggaaaaacccatctccgtcgtctccaccatacaacttccgatcaagattcaaatactcaatggctctaatcatctcactccccataggaacaccaccacaagctcaacaaatggttcttgacactggaagccaactttcttggatccaatgtcatcgtaaaaagcttcctccaaaaccaaaaacatcatttgatccatctctttcttcttctttctcaactttgccttgctcacatcctctttgtaaaccgagaattcccgattttacccttcctacttcttgtgactccaacaggttatgtcactactcttacttctacgctgatggaaccttcgctgagggtaatctcgttaaagaaaaaatcactttctcaaataccgaaattacccctccttttgattcttggttgtgctactgagtcttctgatgataggggcattttcgggaatgaaccgtggcgtctctcttttgtttcttaagctaagatttcgaagttctcttattgcatccctcccaaatnaaaccggcccggttttactccaaccggttcgttttaccttggtgataacccgaattcacacggtttcaaatacgtttntttgttgacttttcctgaaagtcaacgaatgccgaatcttgatcctcttgcttacactgttcctatgattgggattagatttggtttgaagaagcttaacatttccggttcggttttcagacccgatgcaggcgggtcgggtcaaacaatggttgattcgggatccgagtttactcatttagtagacgcagcttacgataaagtaagagcagagataatgacacgtgtaggacgaagattaaagaagggttacgtctacggtggaacagctgacatgtgtttcgatggaaacgtggcgatgatcccacggttgataggagatcttgtgtttgtgttcactagaggagttgagatacttgttccgaaagagagggttttggttaacgtaggaggtgggattcattgcgttggaatcggacggtcgagtatgcttggagctgctagtaatataatcgggaacgttcatcagcaaaatctttgggttgagttcgatgtgaccaatagaagagtgggtttcgctaaagctgattgtagcagagtagtgtgaggaaaagggttctgctacggttacaaacaagggtcttatggtggactcggttaaagatcgtcgttcgatgatgttaatcggacggtacatattaaaatagcagttttgtatgaaggaacttttattaggggctctgaacaatgtcctacaaataattaaaagtgttcacgttagatttttatgttgtaccgtttgtatattatatggttcatattaacttgttacataaaaatatcttttattaaaaaaaaaaaaaaaaaaaagggcggccgctctagaggatccaagcttacgtacgcgtgcatgcgacgtcatagctcgtagatggtgta

SEQ ID NO: 124264 - DNA, 988 bp, Arabidopsis thaliana
aagatttctaaattctcttactgtatcccaacccggtcaaaccgtcccggtttagcctcaaccggctcgttttacctcggagataacccgaattctcgtggtttcaaatacgtttctcttttgacttttcctcaaagtcaacgcatgccgaatctagaccctttagcttacactgtaccattacaaccccggtatcagaatcggacaaaagagactcaacatacccggttctgttttccggcccggcgcaggtgggtcgggtcaaaccatggttgattcgggttctgaatttactcacttagtcgacgtggcgtatgataaagtcaaagaagaaatagtgaggcttgtgggaaagattaaagaaaggttacgtgtacggttcgacagctgacatgtgttttgatggtaaccattcgatggaggagatcggacggttgataggcgatcttgtgtttgagtttgggagaggtgttgagatactcgttgagaaacaaagccttttggttaacgtaggaggtgggattcactgtgttggaatcggacggtcaagcatgcttggtgcagctagtaatataatcgggaacgttcatcagcaaaatctttgggttgagtttgatgtgaccaataggagagttggttttagtaaagctgagtgtagattattgccgtgagtaggtgaatattcttctacggtcgtgcgtattagttttgagttgtatctcattatgatgatcgttggatgtttgatcgaatggtgtataggaaatctgggatttttgtgggtcccgtagaaggacaactgtctgaagcaaacttctcaatctttattaggctctggaactatgtataaatgtttgtactatgataattacaagcttgtatattaaatggttaatataacttgttatcaaaaaaaaaaaaaagggcggccgctctagaggatccaagcttacgtacgcgtgcatgcggcgtcatagctcatctatag

SEQ ID NO: 124265 - DNA, 802 bp, Arabidopsis thaliana
tccctttgcggtaccggtccggaattcccgggtcgacccacgcgtccgaagattaaagaagggttacgtctacggtggaacagctgacatgtgtttcgatggaaacgtggcgatgatcccacggttgataggagatcttgtgtttgtgttcactagaggagttgagatacttgttccgaaagagagggttttggttaacgtaggaggtgggattcattgcgttggaatcggacggtcgagtatgcttggagctgctagtaatataatcgggaacgttcatcagcaaaatctttgggttgagttcgatgtgaccaatagaagagtgggtttcgctaaagctgattgtagcagagtagtgtgaggaaaagggttctgctacggttacaaacaagggtcttatggtggactcggttaaagatcgtcgttcgatgatgttaatcggacggtacatattaaaatagcagttttgtatgaaggaacttttattaggggctctgaacaatgtcctacaaataattaaaagtgttcacgttagatttttatgttgtaccgtttgtatattatatggttcatattaacttgttacataaaaatatcttttattacttgactcgtgttgaaagacttgtggatgaagagaattaaatttgagaattttatgagtgtttttgttctgtttttatatttatggtaccacttctacttttggtttaataaaaaaaaaaaaaaagggcggccgctctagaggatccaagcttacgtacgcgtgcgtgcgacgtcataatcttctatagtgttccta

SEQ ID NO: 124266 - DNA, 601 bp, Arabidopsis thaliana
  unsure (1)..(601): unsure at all n locations
cgtcaagctgctttagccatggctatggcggcgtctattatccaatcttctccgctctccttcaatagcaacaacgcaaagccacggattcatagttcaggatcgctcggcggaatcaaaagccaaaatagagtctctccattgagtgcggttggattaagctcaggccttggaagtagaaggaaatctcttttgatatgtcactcagccattaacgcgaaatgcagtgaaggacaaacacagaccgttactcgggagtcaccgactataacacaggctcctgtacactctaaggagaaatcaccaagcctagacgatggaggagacgggttcccaccgcgagatgatggagatggtggtggaggaggagggggtggaggcaactggtcgggtgggttcttcttctttggttttctggccttcttgggtctattgaagataaagagggcnaggaagattnccgagggagcagaaggcggtaataattnggcaccctggtacctattacagctcaggcccatttgaaccngttcgttaatgggngtaaatccttgattcagananaanaccggttatttaccggcgaatcctcacccgggnc

SEQ ID NO: 124267 - DNA, 469 bp, Arabidopsis thaliana
  unsure (1)..(469): unsure at all n locations
aggaaatctnttttgatatgtcactcagccattaacgcgaaatgcagtgaaggacaaacacagaccgttactcgggagtcaccgactataacacaggctcctgtacactctaaggagaaatcaccatgcctagacgatggaggagacgggttcccaccgcgagatgatggagatggtggtggaggaggagggggtggaggcaactggtcgggtgggttcttcttctttggttttctggccttcttgggtctattgaaggataaagatggcgaggaagattaccgagggagcagaaggcgataataatatgggccactcttggttatcttattacagctacaggactcattttgtatctgtttcgttgagtgggggatgatatgccttgtattcaagagaagagagacacggttgatttcaacaaagcttatattgaaaactttaaaaccaggaaaaaanaaatnggcct

SEQ ID NO: 124268 - DNA, 1175 bp, Arabidopsis thaliana
  unsure (1)..(1175): unsure at all n locations
atacgactcctatagggaaagccggtacgcctgcaggtaccggtccggaattcccgggtcgacccacgcgtccggagagatgtatctgaagagaccgatatggagcgatggcgcgtcagcaacgccggagaatccatcagaatcggagaccggagaagaatcagacgcggcgtcgatggtagtcgaagagctggtgacttctctcaatacacagagactttacagggagctgacactatccctcaggaccggtttacgcgatgcttgcgctgaattctccttccttcgcatccgtggtcttagatctcttctcaaaactctccgaactgtcgctgattcagattcaatcattcgtctcttctctcatacccaaaccatttccgatctccaactggttccggtgctttttcaacattcattgaaagaagcggaggatgataaagtgacgagcttggatcatatattcagtgtggagccgatgaagataacaagtccttctacggatgctgaggttgctgttgctcttagagttctcgaaggatgctgccttctccatcctcagagcactgtcctggctcataagcatggtgcagtccgcgtaatgatgaatgtattatcaacacgaggagtacttgagcaaggagcctgcttggatgccttaatctcagtattgctggattcatcagcaaatcaggtggattctggagcttgcaatgcattgaagaggttgcaatgctcatgcgagacaaacaagctgatgataacctaggttaagatgcggagagttcttactactggtagttgggcacgtaaatgggaaggatcgatctccaatagcgagtgtaaatgaagacatcaggcgcctcttgggtgaaaaatctgcttctttaatatgggcggngagtcaattcggttcaacaggtgatcctgaacaaagaatcacggcgcttcatatccaggctggtagagtgctcgagtctcttgacttgtactaactgtcaaactacttttgttttttccttatttacataataccaagttattattatgtgtaacaatgtaacaacactcatgaaaatagagttgtttaatgaaaaaaaaaaaaaaagnnnnnnnnnnnnnnnnnnnnnnnnnnnnnnnnnnnnnnnnnnnnnnnnnnnnnnnnnnnnnnnnnn

SEQ ID NO: 124269 - DNA, 917 bp, Arabidopsis thaliana
  unsure (1)..(917): unsure at all n locations
agacctatgcagtaaagctagatacccaataacatacagctcagctcaacctcaatcgctcttgatgcaatccaaagcccacctgttagccttcgatcaccaccacnatgtagcagtaggattcaatgtagcaaatgnagtatcaggacagagatgcacagttagatcggacttaagggctccggttccaaaagaatataaagtgtgcagcggttaatacagtgttttcacccaaatcagactgaattgatatctggagaccaaaatggaaatatacgtgtatgggatctcagagcaaattcgtgtagctgtgaactggtaccagaagttgatacagctgtacggtctttaactgttatgtgggatgggacaatggtagtcgctgctaacaaccgtggaacatgttatgtatggcgcttgttgcgtggaaaacagagtttgagccccttcataagctgcaagctcataatggccacatccttaaatgtctcctctctcctgcaaacaaatatctagcgactgcatcatctgataaaactgtcaaaatatggaacgtcgatggttttaaactagagaaagttttaacaggacatcaaagatgggtttgggactgcgtcttctcagtggatggagaatttcttgtaacagcatcatcggacatgacggctagattgtggtcgatgccagcaggcaaagaagtgaaagtgtaccaaggtcatcacaaagccactgtgtgctgtgcacttcacgattaaaaccttaataagaatcaaagctaaattatgaacaaactacgattgtgttatttgtgttttagtaaactcttgtacatttcaaaaaaaaaaaaaaagattgctcttatgttccctctctgatcaaacatttctcactatctcaccacnnnnnnnnnnnnnnnn

SEQ ID NO: 124270 - DNA, 626 bp, Arabidopsis thaliana
attattttttattattataaatctaaaaaagttttttttttttttttttttgttctcgaagcagtaaaatctactacaacagtcaaagagagagagcaaacatgctcgcttaattcacggaatcgagacgtttctacaaactcaattttatattttcagctggaatccgaactctgatatagaaagcacacaacgttcacctccagtgacttctctctatctctaaatctctcttgcgtcacttaaaaagtcggtgcttcctacttaagtgttcttgagagtgagacgtttcatttctgggttcaagggtgtagaataaacacttgagtgaagtttaaagcttgagaaagacagaggaaagaaaaatgggtcaaagactgaatctagtcttctggatttttgtctccattcttgcctttttgaattttggtatggctagcaagattgggatatgttatggaagaaatgctgataatcttccaagtcctaacagagtctctgagctaatccaacatctcaacatcaaatgtgttcgaatctatgacgccaacattgatgttcttaaaagcttttgcaaacactggaatcgagcttatgattggtgtccctaacgctgatctacttgc

SEQ ID NO: 124271 - DNA, 707 bp, Arabidopsis thaliana
  unsure (1)..(707): unsure at all n locations
tcgctaaacccaactactctctatcttgcacaaacgcctgacttttacaaagacaagcgcttttcaacacactactgatcttgagaatcctctcttcaaagccatggcgttagaactatggcaaactctcaaagaagcaatccatgcttacacaggtctttctcctgttgtcttcttcactgctctagctctcgccttcgccatttaccaagtcatctcaggctggtttgcctcgccgttcgatgatgttaaccgacatcagagagctagatccttggctcaagaggaggagccaccgattcctcagcctgttcaagtcggtgagatcacggaggaggagcttaaacagtacgatggctctgatcctcaaaagccccttcttatggctatcaaacatcagatctatgatgttacacaaagcaggatgttctacggaccaggaggaccatatgctttgtttgcagggaaagaacgctagccgagctcttgcaaaagatggcatttgaagggggaaagacttgactttgggatggcccctgggncttgggnccctttgaagcnagatgcncttcaaagaattggggggnccaangtccattnnggaaaggnttgccnnaangggttnggncctggccaaaagtggngtgggtcaanaaccctggaaaccggnaactttggnccttgnaccccccngnggaattgtttng

SEQ ID NO: 124272 - DNA, 614 bp, Arabidopsis thaliana
  unsure (1)..(614): unsure at all n locations
cttttacaaagacaagccttttcaacacactactgatcttgagaatcctctcttcaaagccatggcgttagaactatggcaaactctcaaagaagcaatccatgcttacacaggtctttctcctgttgtcttcttcactgctctagctctcgccttcgccatttaccaagtcatctcaggctggtttgcctcgccgttcgatgatgttaaccgacatcagagagctagatccttggctcaagaggaggagccaccgattcctcagcctgttcaagtcggtgagatcacggaggaggagcttaaacagtacgatggctctgatccctcaaaagccccttcttatggctatcaaacatcagatctatgatgttacacaaagcaggatgttctacgggtccagggggaccatatgcttttgtttgcagggaagagacgctagccgagctcttgcaacagatggcattttgcaggngaaagccttgacttggggtatctctggctttggccctttgagctaggttcgcctcaagaattgggggtcaagtcatggaaagnttnaaaggtngactgcaaagtggtggnaaactgaaccgantntntnacccaannatttg

SEQ ID NO: 124273 - DNA, 521 bp, Arabidopsis thaliana
cacgcgtccagagcaaatgaagaagacgaagcacactgagaattcaccggccagagatcaccaataagtgttgtagtttccggttacttcgaataaccttcaatggagcttccgttactctcgtatgctagctccgcgtcgttttcacggacaggcttatgctcttcttcttcttcctcctcaactagtatctatgagtttccggagagaagacggagtttaaaattgagattcaatggtggagaaaggtcacgaagcgttatagcttccgctgaacggagcagtgaagggattgagaagacaacagacaccgtcggtggcggaggaggaggaggagcaggcagatttgctggtactgccatggaggttactacacttgatcgtgggttttgctaactccaccaccgttgattttccgatctgggacaaaatcggcgccgtcgttagacttacttatggaatcggaatatatggagcaatggctgtagcaggaagatttatatgttcagtgactggaattg

SEQ ID NO: 124274 - DNA, 432 bp, Arabidopsis thaliana
cccacgcgtccggaagccccattttcacatctaaatctcacaaatctctctcaagcttcgatctttcttctagagacgagctagtgcttccacaaaccctaaactatgtccggcggtttcttccggggtacttccgccgagcaggatactcggttttctaacaagcaagctaaattgatgaaaagccagaaatttgctccggagttagagaatctggtggatatcactaaagtgaagatggatgttatgaaaccttggattgcgactagagtcactgagcttcttggtattgaagatgaagtgctgattaactttatctatggtctgcttgacgggaaggtagtgaatggtaaggagattcagataacgctaactggattcatggagaaaaatactggcaaatttatgaaagaactttggacacttcttcta

SEQ ID NO: 124275 - DNA, 483 bp, Arabidopsis thaliana
  unsure (1)..(483): unsure at all n locations
agagggaaagtacatgatcaagtcagtgcagaaactcgcggttgtagccaacctttgccttactagaaacgcaaaggcgcgtccaaagatgagcgaggtgttagagatggtgacaaagattgtggaagcttcatcgcctgggaatggtggcaagaagccgcagctggttccactaaagagtcaagaaacttctagagtcgaggaagggaagaataagaaggttcttgatggtgctgaaggaggttggttagaaaagttgtggaacccaaagaatgtgagagcttgttgattcggggtctacgtcagaaacaaattagtgaatttcaatgcctttgtttaaatactgtaatttaacaaacttatgagttttcttacattccattttttggtgtgattattaaacgatttatttgatattccgagtgatttccgaagattacgnaatnanaatncnangggcgggccgcncctnngangncccaa

SEQ ID NO: 124276 - DNA, 509 bp, Arabidopsis thaliana
acttttcttctctttctagaagaagaaaaccagagatacagagagattctctctctaccaaacccctggaaaaatctccagattcatcttccatagaccaaactaaactctgttcactgtactctctgtcattgtcctgtaagagaaattgaaaaccctaggagattttgaatttcgtaaaaccctaaacacaaaaatgaaaatcccagaaaaacccatcttcttaatcttcgtctctttgatcctagcttcgagcttaaccttcacagcgacagcgaaatcaacaatcgagccttgctcaagcaacgacacttgcaacgctttactcggctacacactctacaccgacctcaaagtctcagaagtcgcatctctcttccaagtagacccaatctctatccttttagctaacgccatcgatatctcttacccagacgtcgaaaaccatatccttccttcgaagctcttcctcaaaatcccaatcacttgctcctgcgtcgacggaatca

SEQ ID NO: 124277 - DNA, 452 bp, Arabidopsis thaliana
catatattctcctcatcgtcttcttcgtcgtgacgtctctcctccatcatcgtcacttgcaaatccagctctccatttcaactccacatcttcttcttctttagatccctcatctttctctccttctcctccttcctctcattcttctacttcgtcttttcctttgttcatttctctctctctctctagcttccaccttcactttaacttctcattaccctaatttttcaagacatatcaattgaaattgaaaagttgctcagaactctaatcatccccttcgttctcagttcttccaatcttcaatttcataaaaaccctaattttaactggtttgttttttggaaattggatttgtctacgttttggaattggctggaaacgcagcgaaggataacaagaagactaggcttgtgccacatcacatacatcttgcagtgagaaacgatgag

SEQ ID NO: 124278 - DNA, 506 bp, Arabidopsis thaliana
tcgctcgactctctctgtggacggcggctagtttcaaccaacagattcgagaatgcctaagcaaatccacgagatcaaggacttccttctgacagctagaaggaaagatgcacgatctgtgaagatcaagagaagcaaggatattgtcaagtttaaggtcagatgctcgaggtacctctacacgctctgcgtctttgaccaagagaaagccgacaagcttaagcagtctcttcctccaggtttgagtgtacaagacctttgaagatgaagcaaagttcttctgcagattggagttcctttggtgacgaatcctttgcatcattttataatttccttaggagagtttattttgtgtcgttaaatttatgttgagacttttcgagtttgagtgtgttttggatttaattcagtttgaaaaaccaaatacgttctcaactctggattcaatttggatttttattttcagaaaaaaaaaaatttttattaaataattattttattaatat

SEQ ID NO: 124279 - DNA, 583 bp, Arabidopsis thaliana
  unsure (1)..(583): unsure at all n locations
cggacgcgtgggcggacgcgtgggagaggacacagcatctgaaatcgtacaagtatctgaagaacataaattaaaaatctttactttgtaataatggcatcagagttttgatcggagaatctaaaagtctcgacttttcgaattttgttggtcgctttcttaaggacatgaatctcgcggtggctagttttcgcggcaatttcggcgtcttgtcgcaatgcagctcatgttgtagtcttcagtttcagccttttgtagctgctacttccagtctcaattttgggcaaacaggaacatctcgaaggaagaaggatctgaagcttgaaagagttttcagaaagagagagactttggttagagtgaccggagacgcaaacggaaccagaaggcaatgatgatgagggataataaagaaggcaaagagagctctgcagatgatcctcctacaaaaatttcctactgagttgaattcacagtccaacggttgttaattaagcgcccggncaatnagggggaaacaaagcccattcagttncnaggccgggnaaattggggtacaggggttcccctncnggggnacctt

SEQ ID NO: 124280 - DNA, 425 bp, Arabidopsis thaliana
aaatgaaactacaaaaacatccaactattaacatgacaaatcgtatattatccatttttaaaagttatggtgaggacatgaacatgtttcaaattaagtgtacctttcaagatttgtagtgttcaacacaagtcacaataacttaaagaaaaaatgtaattttcttgaaaaagatacataataatctaacgtacaaaaatgaaaaacagacatggcaagagcattagcagctccagatacagagcatccgaatggaacagaaggtcacgatagcaaaggaatgagtgttatgcaacaacatgttgctttcttcgaccaaaacgacgatggaatcgtctatccttgggagacttataagggtaattattacttgttatagtctcttcaaagacttcaatcttcagaaaaaaaaaaaaaagagggcg

SEQ ID NO: 124281 - DNA, 1051 bp, Arabidopsis thaliana
  unsure (1)..(1051): unsure at all n locations
ggtgtacgtcttttgcataagaagaaacagagagcattatcaattattaacaattacacaagacagcgagattgtaaaagagtaagagagagagaatggcaggagaggcagaggctttggccacgacggcaccgttagctccggtcaccagtcagcgaaaagtacggaacgatttggaggaaacattaccaaaaccatacatggcaagagcattagcagctccagatacagagcatccgaatggaacagaaggtcacgatagcaaaggaatgagtgttatgcaacaacatgttgctttcttcgaccaaaacgacgatggaatcgtctatccttgggagacttataagggatttcgtgaccttggtttcaacccaatttcctctatcttttggaccttactcataaacttagcgttcagctacgttacacttccgagttgggtgccatcaccattattgccggtttatatcgacaacatacacaaagccaagcatgggagtgattcgagcacctatgacaccgaaggaaggtatgtcccagttaacctcgagaacatatttagcaaatacgcgctaacggttaaagataagttatcatttaaagaggtttggaatgtaaccgagggaaatcgaatggcaatcgatccttttggatggctttcaaacaaagttgaatggatactactctatattcttgctaaggacgaagatggtttcctatctaaagaagctgtgagaggttgctttgatggaagtttatttgaacaaattaccaaagagagggccaattctcgcaaacaagactaagaatgtgtgtgtttggttagcgaataaagctttttgaagaaaagcattgtgtaatttagcttctttcgtcttgttattcagtttggggatttgtataattaatgtgtttgtaaactatgtttcaaagttatataaataagagaagatgttctcnnnnnnnnnnnnnnnnnnnnnnnnnnnnnnnnnnnnnnnnnnnnnnnnnnnnnnnnnnnnnnnnnnnnnnnnnnnnnnnnnnnnnnnnnnnn

SEQ ID NO: 124282 - DNA, 1463 bp, Arabidopsis thaliana
aaaggagatgaaaagcttcaatctcaaaacatagcagctctctcaataaaccaaacccaaatgcaagctgtgtagagagaaacggagtgaggaaggaaggagatgggaggggtgacgtcatcggtggcggcgaagtttgccttcttcccgccgagtccaccgtcttacaaggtggtgaccgacgagctcaccggactgttgcttctcagccctttcccccaccgcgaaaacgtagaaatcgtaaagcttcggaccaggagaggcacagagatcgtgggcatgtacgtgaggcatccgatggctacctccacgctcctctactcccatggcaacgccgccgatctgggacagatgtatgagctcttcattgagcttagcatccatctcaaggttaatcttatgggatacgattactccgggtatggacaatctactggaaagccgagtgagcataacacgtatgctgatatcgaagctgtttataagtgtcttgaagaaacctttggctctaagcaggaagatgtcatcctctacggccaatctgtaggcagcggacctacgttagatcttgcttcccggttgcctcaacttagagccgtcgtccttcacagccccattctctccggtttaagagttatgtattccgtcaagaaaacctactggttcgacatctacaagaatatcgacaaaatcccatatgtcgattgcccggttctcatcattcatggaacttcggatgaggtagtggattgttctcatgggaaacaactatgggaactctgcaaagaacaagtacgagccgctctgggtgaaaggagggaaccactgtgatcttgaacactaccctgaatacattagacacctcaagaagttcatagcaacagtagagagattaccatgtccgaggatgagcagcgaccaatcagagagagtgagagatgcgcccccgaggagaagtatggacaggagagtgaagccgaggcagagcacagagcgtagagagaaagagaagcccccaaagagtcagtcgaagatgagtagcagcagcagcaagctcaagatctcgtttgatcaacttgatcgctcgcggaggagcgttgactgccatgaaaagactcggaagagcgttgaccagattgagagggggaggaagagtgtggataggttggatagagttcgctccgagtaaaaaccacacactcacactcacacacgtataataggtatgtagatgaaaagagtacataactgtttctatttaccgaacaaaataacatgtggatgtcgctcctcagattattgatttgtaatcttttatgcaatttgggatctctctcgccatctccttttgaatcaacaaccttttgtggtgggcttggttttaaaaaaaacaaaaataaataaaaaaaataaagggcggccgctctagaggatccaagctcacgtacgcgtgcatcccacgt

SEQ ID NO: 124283 - DNA, 410 bp, Arabidopsis thaliana
ctcaattttttacgtttttatccgcttgtttgatcgttttctcacgtaatcaaaccaaaataacacagatctaccactaaaatacatattcatgatcaaaaagaagataattaagtagattctcatgaacgccgatttgttcaccgattgagccaaaatcgcggcggtccacgcagaaatagcgcttttttcgacgcctagtcgaccgattagtccgatgtttagaagcgtttgttttagagaataattatgccttcatttttgtcaagtttgtttggtttgggcattcaagcctcttttagaataggtttggttcttcctcgagtagtagcatctacagagagacagatttcctctacggttttaaaaagagcttctgaaagtgtctctttttcattcgctccgtacat

SEQ ID NO: 124284 - DNA, 770 bp, Arabidopsis thaliana
  unsure (1)..(770): unsure at all n locations
gggaagcacgcacgcctgcaggtaccggnccggaattcccggttcgacccacgggtccgcgcacgcgtccgtacggctgcgagaagacgacagaagggggagcaacaatggattttttcgacgaagacaggcctagattcgttttccaatctcgtccttcttcttctcacacggcggaggaagaagaagaagctagaatccctaacaagcttttcatttcaatctccgtctcaatctccctcatcatattatctctctccttcttctacttcgaatctgaacctgccaaatcgctactattatggctttccctctctttcctcgtcggtcctttcgctcctagctcgctcaccggaggtaagattcgcgtcggttatggtcagatcttggagccagaacagattcacgatgagtcatccacggataacgaacgtgaatccaggaggaaatcggtgaataagcgatctaaaggttcgacgaagagcgataatccgccggaaaatgcttctccggtgactgaagtttcgaggaaagtggtgattccncagtctaaggagagtggatctntgaatnaaactaaagattggnctnctgaagagatcgaaattttaaagaagcagttgattaagcatccagctggtaaacctgggagatgggagacggtggcttcagcgttcggaggaagatacaagacagagaatgtgattaagaaggcgaaagagataggtgagaagaaaatctatgagagtgatgattacgctcagttttta

SEQ ID NO: 124285 - DNA, 695 bp, Arabidopsis thaliana
gacaatacccgatgatggatctcccgtcgccatggccatcgattcttccaccgccgtaaccgtcgccaccaccaccactcgaagagttcctcctccgtgctggaccgacgaggaaaccgctgcgcttgtcaatgcctacaaggataaatggttcgccctccgccgcgggaacctccgtgcggctgattgggatgacgtcgccgcggctgtttcgtcctcgtccaccgttggaggtccgccgaaatcagcaatccaatgtcgacacaagatcgagaagcttcggaaacgttatcgcggcgaaaaacaacgagctcttaatcgaccaggcaagttctcttcctcttgggatttgttccctatcttggatgctatgggattcgctccggtgactccggcagccgtagaaacttacgatcccgatgtggatcatgatgatgagagtaacggtttggatggatttagggttagatcgaagaggtctgggaagtttagcggtggttactctgattcacctcgagaagtaggagatggatatggggtttagatctagggcaaggagtaacatgaaaatgttgggtggtttcaagtctgagtttgattcagatcacgattcaggaagtggatttggattgaaaaggaaatacaatgggaatccaaaggttagtgctgatttcgatgctgattctgatgatgag

SEQ ID NO: 124286 - DNA, 494 bp, Arabidopsis thaliana
taacttttgttgtttagttaaaaaagtcttctcatcctaaaaagtggtgtaaaaaatgagcgaatttctcatacacgtgaaatcggatccaatcgatgattccggcgaggaggtttctcttatctccatttgtcggcgtcacgtttatcgtcgttctcgtctctctctacttcagatcttccttcaagtctccacaacaccaatatcaaaagaggttattttctgctgaagaattggcattgtataatggtactgatgaaacattacctatactcttagggattcttggatctgtgttcgatgtgacgaaaggaaaatttcattacggtagtggaggagggtacaaccattttgctggaagagacgcttctcgtgcatttgtttctggcaactttacaagagatggacttacagattcgttacaagggttatctagcagtgaggtgaagagcattgttgactggcgaggtttctactccaggacctacactcct

SEQ ID NO: 124287 - DNA, 554 bp, Arabidopsis thaliana
  unsure (1)..(554): unsure at all n locations
atgatactccnnnnnnnnnnnnnnnnnnnnnnnnnnnnnnnnnnnnnnnnnnnnnnnnnnnnnnnnnnnnnnnnnnnnnnnnnnnnnnnnnnnnnnnnnnnnnnnnnncggccgcttcctcgcggcccgctcttccagaattctcttaaagtttcctactttcctggaatttcgtcctcaatctctcaagtttcatcggttttgatttgggtttgatcggaaaagtcatgggtaattgttgcggaacagcaggatcattggctcaaaacgataacaaacccaaaaaaggaaggaagaagcaaaaccctttctcgattgattacggtcttcaccacggtggtggagatggaggtggaagacctcttaagcttatcgttttgaatgatccaacaggtcgtgagatcgagtctaaatacacgttggggagagagctaggtcgtggagaattcggtgttacgtatctatgtactgataaggagacagacgacgtttttgcttgtaaatcgattttgaagaagaagctgaggacagctgttgatattgaagatgttagg

SEQ ID NO: 124288 - DNA, 639 bp, Arabidopsis thaliana
  unsure (1)..(639): unsure at all n locations
gttttgtcactatacatcatctatctgtcttctcactgacttttttttatatgccaagtgatcatcatacaggtctgtctctaattatctgggtgattcagaatttgtactcacagtaggtttcttgcagagaaaacaactgttcaaaccctaaacctccaaatcatttcttccctgcatgaaagatggaaactggagttgtcaccatccaagaaccagtctctacaaagactgatgttgggggagttcctgcagaagtaatacttgaaaaatcatccatggaagtacaaaaggtaaacctgagtactgttcttgatgatgagatcacaagtggcgccgatcgtggaaacaatattattacgggagaagcagatgttgcagaggttgtaaatggttcaggggataaagaaaccgaagaattaaaacgcgaaaatggagaagcgacaaagactatctcggttctagatgacagtaagatcgttaaagatgatcaagaatctattgtcgttccgtgaacctcaaagcctcaacgaaaaaaaaggagatgggaaggttatcttaagggaggggctttnngannttnnnanangagggnntcccccgggnancccaaangggtttttcccaaacccgggnttt

SEQ ID NO: 124289 - DNA, 522 bp, Arabidopsis thaliana
  unsure (1)..(522): unsure at all n locations
nnnnnnnnnnnnnnnnnnnnnnnnnnnnnnnnnnnnnnnnnnnnnnnnnnnnnnnnnnnnnnnnnnnnnnnnnnnnnnnnnnnnnnnnnnnncggccgcaaagaacttcttcaacttctctcctcaacttttaagtattccacacatacaaacacacacacacacttgacttttctcatataatttcgacagctcgtgaaggacaaagacatggagccttctcggaggagaatgaccagagacatgttgcttctaatcgtaacgatggcatggctcgtaaccggagacgaaggaggcataaagcaagaggagcgactgtttaatcttgggaagcttgagatgttcgttgacaagcttcctcatataccaacacttcatggctaccacttcgtcaatggcttcctcaaacccaaatctcttcacataggcatgttcttcaagaaatggaaattccacagagacttgcctgccacgccagtgttcgcatatggtacatcaaagcgttcagcaacagttcctggg

SEQ ID NO: 124290 - DNA, 743 bp, Arabidopsis thaliana
acccacgcgtccgtgaacaaaagaggagctcctcttcaggaagtgacaatactggtgggataactttcaaggccgatggcgaggatctcaagggaaatgattgtgtccgtgcccaacctgacaacggaatggacgaggaacaaagacaaaagcggagacgcatagaagttgctttgatagagtatcgtgaaactcttgaggaacaggggatgaaaaaccccgaagagatagagagaaaagtagaaataaacagaaagaggcttgaagtcgattatggcttatcaggacctaacgagggcaacagaaatcagaaatcaatactagagcggaaggagaagcgtgaagattcacaagagtcctctaaaaagcggcaccgtggggaaaacaagagccaaagtccgccacggaaatcatcaacgagggagagagatcatgacttggggagagacagggatagagagagacacagagacagagataggcaacatgatttgaacagggatcgagatcgacgtgaaaagagttcaagccacgatcgagacgataatgatagaagcaaagagagagacagggattggcgcagacgaggcacgagatgataatgatgattatgcttgttctcacctcatggtctgttctcaagattttaaccttttgtgtttttaaatccagaagatattgtagaacttgttctcagacacagcttgtaattttgtatcccaatttctgaaagatttctccct

SEQ ID NO: 124291 - DNA, 555 bp, Arabidopsis thaliana
gttttaataatcttttatcatacaatttgttctctctctctctctctctctctctaccataaagcaaatgtgatcagagacaaagcatacaaagaagttcctcattcaaaaaagatttctcagccatcaaaattctctttctcttcatccaacaaaaaaaaagcatacctctttttcttccatatagataagttaattaagaaaacgaattatcaggttttgtttcggctgatctgaggaagttcatctatggatacggctcagtggccacaggagattgtagtgaagcccttgggagaaatagtaacaaacacatgcccaaagccgcaaccgcaaccgcttcaaccgcagcagccaccgtcggtgggtggagagaggaaggcaaggccagaaaaggatcaagctgtaaactgtccgagatgtaactcaaccaacacaaagttttgttactacaacaattatagtttgacgcagccaagatacttctgcaaaggttgtagaaggtattggaccgaaggcggttcgcttaggaacattcctgttggcggtggctca

SEQ ID NO: 124292 - DNA, 1613 bp, Arabidopsis thaliana
  unsure (1)..(1613): unsure at all n locations
nnnnnnnnnnnnnnnnnnnnnnnnnnnnnnnnnnnnnnnnnnnnnnnnnnnnnnnnnnnnnnnnnnnnnnnccacgcgtccgcccacgcgtccgcccacgcgtccggtttcagattccccacagattttttagcacaaatcaaaatgtttctttttcgaaaatttatttaaatgataacgaaatttacatctccatttcgattgattcgcttcttcaactctctctcttcttcttcttctatttgcttctgtgaaaccctagattttggtgtgaggaagaagacttcaatggcggaagaagtagcagagaacgttaacgcagtcccggtttcggaagacgagctttacggatttaaacgatcggagatgtacagtggtactctcgccggttccgttggtccgtacggtcgtcatgttttcctttgttacaagagtcatgagacttggcttcctcgtgttgaaactgaaggacttcctcagcgtttcgcgaagttgtttaaggatcgtaaagctgatttcgctgttgagacgaagcttacggtgtgtggtggtggtggtgaatctgatggagatgtgttgattttcccggagatggttagatacaaggcgattcaggacacagatgtggatgcttttgtggaagatgtgcttgtgaaaggaaaaacatggacttctgggattcangaagagttgacctggtcctttgtgtttgtgtgcgctcatggtagccgagacaagagatggtggtgtttgtggaccagttcttatggagaagttcgagcagcgagatagttcacgtggactttcagacaaatcttttgtttgccgtgttctcatattcgtgggcacagtatgcttgaaatttgattgtcttcagccctgattcagctggaaatgtttctggccattggtatggctatgtgactcctgatgacgtgcctgcaatgcttgatcagcatattgcaaaaggagaaatcattcaaaacctttccagaggccagatgagactaagacccgagggtgaggaagctgagaaagaggatgagcataaaatcccaaacggaaacagtgtaatggtggaagaacgcgaacctgtggagcagaaagggttcacaggaggttgttgccaaggtgcaaacggagtttcatgttgccaagaacaagctgcagagccagtcaagaaagaaggatgcatgaagctaaactggttgaaatcgatggggaaagaagaggttctcttgggagcagcagtagtttcagctgtcgcaaccgttgccgtggcttacagcatttacagaaggtcaggttaagaacctgaaccaccctcctctttttacacttttaagaagaaactttatttttggtagccatattatagaagtaaaggaagaaaagaaaacatggagaggtaataatcttttggaactatataaccatcatttggtttcggtatgggcaatgcaggaatgggatgtaatcttgcttttgactcggtttagtttggtttatcttattatgttgtcattggaatatatcaatcttaaaaaaaaaaaaaagaagggcggccgctctagaggatccaagcttacgtacgcgtgcatgcgacgtcgtag

SEQ ID NO: 124293 - DNA, 733 bp, Arabidopsis thaliana
  unsure (1)..(733): unsure at all n locations
acgcaacctctatacgactcacttagggaaagctggcacgcctgcaggtaccggtccggtattcccgggtcgacccacgcgtccgcccacgcgtccgcccacgcgtccgagaagacgacggaggggggtcttacactgatttaattctcctaccaatctcaacttccgacgtctattcatcatgggtttgaaggaggaatttgaggagcacgctgagaaagtgaatacgctcacggagttgccatccaacgaggatttgctcattctctacggactctacaagcaagccaagtttgggcctgtggacaccagtcgtcctggaatgttcagcatgaaggagagagccaagtgggatgcttggaaggctgttgaagggaaatcatcggaagaagccatgaatgactatatcactaaggtcaagcaactcttggaagttgctgcttccaaggcttcaacctgatgaatcaaatcctcatctgcagtaactttatcttaagcatcaaaataacattgcataagacttgttcttgctcttgtgtttctatcatatttaagctatctactttgtgacatggtgtgatctcttaaaaatgcttgatattggttaaaacagagaatcatgatgcaaaaaaaaaaaaaaaaaaaaaacccaaacgcggccgctctagaggatccaagcttacgtacgcgtgcatgcgacgtcatagacttcntatagtgtgttgtctaaatt

SEQ ID NO: 124294 - DNA, 702 bp, Arabidopsis thaliana
  unsure (1)..(702): unsure at all n locations
ccagctannnnnnnnnnnnnnnnnnnnnnnnnnnnnnnnnnnnnnnnnnnnnnnnnnnnnnnnnnnnnnnnnnnccacgcgtccgcggacgcgtgggcggacgcgtgggtcaagatgaaaaagtgaatacgctcacggagttgccatccaacgaggatttgctcattctctacggactctacaagcaagccaagtttgggcctgtggacaccagtcgtcctggaatgttcagcatgaaggagagagccaagtgggatgcttggaaggctgttgaagggaaatcatcggaagaagccatgaatgactatatcactaaggtcaagcaactcttggaagttgctgcttccaaggcttcaacctgatgaatcaaatcctcatctgcagtaactttatcttaagcatcaaaataacattgcataagacttgttcttgctcttgtgtttctatcatatttaagctatctactttgtgacatggtgtgatctcttaaaaatgcttgatattggttaaaacagagaatcatgatgcaaactaaatccataagttatttttggtccgtcctcgatatggtcttagttaaaacagttgaattcaagatgaaaaaaaaaaaacaaaaaaagnnnnnnnnnnnnnnnnnnnnnnnnnnnnnnnnnnnnnnnnnnnnnnnnnnnnnnnnnnnnnnnnnnnnnnnnngatcaatcg

SEQ ID NO: 124295 - DNA, 713 bp, Arabidopsis thaliana
aggctacgcgcgagcactaatacgactttatatagggaacgctggtacgcctgcaggtaccggtccggaattcccgggtcgaccacgcgtgcgcccacgcgtccgcggacgcgtgggaaaactcaaaaagactcaaatccgtccttccattttcctcgtctctcttcttccccgtaaacccaaaaacaatctctgcaaagtcctcggttctgatggagctttcagaaacctatgcttgtgttccatcgacggagagaggtagaggaattctgatctctggtaactcgaagtccgataccatcctctacactaatggtcgatccgtcgtgactctcgaccttaacaatcctttaaaggtctctatctatggtgagcacgcttacccagctactgtggcgcgatattctccgaacggagagtggatcgcgtctggtgatgtgtcggggactgttaagaatctggggagcttacaacgatcatgtgttgaagaatgagtttaaggttttggctgggcggatcgatgatcttcaggggtctgtaatgggatgaggatcgttcctctggggatggcaaggcaaatttcttggtcggcttcttggggaatcaggacaaagggggaaattggtgggcatttaagaaagtcttactggtattaaccacttgggcgtccttttggacttgggggaggtttctggggattctatagaggcccc

SEQ ID NO: 124296 - DNA, 529 bp, Arabidopsis thaliana
  unsure (1)..(529): unsure at all n locations
caaaaaaaggcccaaagagtattttcctccgaattcgccgtcgactaatcacgagatggcgccgccggtgacggagcggtggtgcttagctttgattcttctctttctctccttgttcgtccaatcttcaacggcaatttactgcggtgctgaagattgttatgctcttctcggagtcgctcaagatgcgaacgcatcggatatcaagagatcttattataagctctctcttcaacatcatccagataagaatccggatcctgaatcgaggaaactgtttgttaaaatcgccactgcttatgagattttgaaagataatactactcgggcacaatatgattatgcaattgaacatccagaagaggtattttacaacaccgctcaatattaccgcgcgaaatatggacataaatcggatccccgtgctgttcttgttggtctattggtggtttatctgcatttcaatatctgancacggggcaaggtntaatnaggcataggncngttagngaccccgctacaaaaaaag

SEQ ID NO: 124297 - DNA, 453 bp, Arabidopsis thaliana
  unsure (1)..(453): unsure at all n locations
acgcgtcaacaaagatccttctcctcctcttttgttttcccttgccgtcgattttaaggttttatcttctccgtactgaaaccgactgataattttctccagggaatctacgaggaggatttgttgtttctccgtcgttttagagtttaacgatttctccgtcgtttgatttcttaattctatcctgttgagggaaacgagaatttggttttcgttttcgaatttagggttagagaagcggtttcgcattgggttcgttgactattgagccaatttgcgagaggaatttaaacgttacgagtttcttctttttccttccggaggtccgaagtgcgaaatctgttttgtttgatgaaattagggttttggaatcggaatttggatagtcgtttatgttgaataggcgaggattgcttangtangatatgattttgaaacggaccttgacgacat

SEQ ID NO: 124298 - DNA, 611 bp, Arabidopsis thaliana
  unsure (1)..(611): unsure at all n locations
acgcgtcaggataaagatgaaattagcgaatcttgggcacgcacaaaagtcagtaccggtttttcgtttgcttttaaacctgttggagcttttggtttttgttatcataatactatcttcccaaatttgcatgatttttacagcaaggagacacggatgaagattggagagggagtgcggatgcgatgggcaaggaggaaggagaggagaaaagtgcaggagacatgtcatttcgagtggcaaaacttgttagcggaggctgctaaacaaggatatacagacgaagaagagcttcagtgggattcttacaacatcttggatcaacagaatcaactggaatggctggaaagttttgagcagaggaaagccattaaaggagctaaaagtaacagaagagcgccaaaatctcctgancaaagaaggagaattgcagaagcaatagctgctaaatgggctgntccatcttaccgtgaaagantttnctccggcttggcaaaatatcacggtataccttttggtntcgagaaggcgtcgtagnaagnccaagggagcggttncagaacccttgaaagaaggcctcctccaangaaaagttccanggggtttcaggg

SEQ ID NO: 124299 - DNA, 506 bp, Arabidopsis thaliana
agtaccggttcgggattcccggctcgacccacgcgtccgaaaatggcgtttctctgttcgtctctcccaagttcatcctctatcgccattttcggcgacccaaacacagatggatcatcacgctcgtatctttcgattccttcattgaagttacggttccgtcccgtcgctgcttcctcacacatttgtgctccagcgatcgacaagtcgactttcgtcatatccgaatcggtgtcagaagatgagctttgggctgcagcttgtctccgcgtacgaaccttcaacgaactcaatccttctgcttacaatatccaagatcatagaagatacttggcagagcgtgaattcgaggcgcttaaggagagaacttcagggaagagggaaggggtttacgcgggtcgcttgcataaatgctacccttccattggcgcaattatcaagctcttctgaggatttatgctctgcatggtagtctctgatggcatagaagacagagttgggggggg

SEQ ID NO: 124300 - DNA, 582 bp, Arabidopsis thaliana
  unsure (1)..(582): unsure at all n locations
nnnnnnnnnnnnnnnnnnnnnnnnnnnnnnnnnnnnnnnnnnnnnnnnnnnnnnnnnnnnnnnnnnnnnnnnccacgcgtcncggggcgcgtgggtgaagttttgacggagtccctgactctaaaagagacatcaattccaaccaaagttgctagactcatgcttgtgtctgatattcttcataatagcagtgcacgtgttaaaaatgcatctgcataccgaaccaaattcgaagcaactctacctgatataatggaaagcttcaatgatctgtaccgaagcataactggaagaattactgctgaggctctaaaagaacgggttctcaaagtactgcaagtatgggcagattggtttctcttttcagacgcatacatatatggactacgttccacatttctccgatcaggagtctctggtgttacctcatttcattctatctgcggtgatgcacctgaaatagagaacaaaagttacgctgacaatatgagtgatattgggacgataaatccagatgctgcactgtgcaataggcaaacgagctgcaacgcaagagctgatgaatttaccaattgctgagct

SEQ ID NO: 124301 - DNA, 438 bp, Arabidopsis thaliana
tttgcatttaaccttcttttgtatatctctcttcctatatcattaacctgcgctggttaaagctcttcacctacgcacatcgccggcgatttatgatcatctgagtctttcgggtatattcacaggctagagaaagagatcttaatcggaaaagtttatatggaggttatggttggttcgtcgtttggaatcggcatggcggcgtacgttagagatcatcgcggtgtttcggcgcaggataaggctgttcaaacggctctgttcttggctgatgaatcaggacgtggtggatcacagatcgggattggattaaggatgagtaataataataataagtcgccggaggaatcttcggatagttcgtcgtctatcggagaaagcagtgaaaacgaggaggaagaagaagaagacgacgccgtttcgtgccaacgaggaaca

SEQ ID NO: 124302 - DNA, 741 bp, Arabidopsis thaliana
  unsure (1)..(741): unsure at all n locations
nnnnnnnnnnnnnnnnnnnnnnnnnnnnnnnnnnnnnnnnnnnnnnnnnnnnnnnnnnnnnnnnnnnnnnccacgcgtgcgctccacaatccccaaaattctttcaacacttgctctccattaatcttttagataataaacctaattgtttctgttttgtttttgtttctgtgagattcttccgaggcttgaagctcaatagctatggcttctctttcagtctcttcctcttcaaccatcatcgattcaagagctcctccttctcgactagcctccgcctccgcctcttctccgtcgtgcatttcacttcccacacttccgattcagtctcatacccgtgccgctaaagccactgcttactgtcggaagattgtgaggaacgttgtgacgagagctactactgaagttggtgaagctcctgccactactaccgaagctgagactactgagttacctgaaatcgtcaagactgctcaagaagcttgggagaaagtggatgacaagtacgctattggttctcttgcctttgctggtgtagtggctcttttgggggttcttcctggaataatttcggcaatcgatagggttccattggttcctggggttcttgaacttttagggatcggttacaacaggatggtcactttcaagaacctgggtttaaccaccaagggggtgtttttttgtggaaggaaagagccatcaaaggcattttggggggaccttttaaagggggagagg

SEQ ID NO: 124303 - DNA, 963 bp, Arabidopsis thaliana
  unsure (1)..(963): unsure at all n locations
tgtgtttcnngttttgtttttgtttctgtgagattcttccgaggcttgaagctcaatagctatggcttctctttcagtctcttcctcttcaaccatcatcgattcaagagcncctccttctcgacnagcctccgcctccgcctcttcnccgtcgtgcatntcacntcccacacntccgattcaagtctcatnacccgtgccgctaaagccactggcttaactggtcggaagattgtgnaggaacgttgtgacgagagcaacaactgaagttggtgaagctcctgccactactaccgaagctggagactactgagttacctgaaatcgtcaagactgctcaagaagcttggggagaaagtgggatgacaagtacggctattgggtcctcttgcctttgctagtggaggggctctttggggttctgctggaatgatttcggcaatcgataggcttccattggttcctggtgttcttgaacttgtaggcatcggttacacaggatggttcacttacaagaacctggtcttcaaaccagacagggaggctttgtttgagaaggtcaagagcacatacaaagacatattagggagcagctgaatcaaaggaggaagaagaagaagaagagcctttttgaggccattcatgaattggaatgaaggatatcaaaagaatctaacacaaaggccacgtccttccttcaatctttccttcttgtaactaaataattttcatcctttctctctctctgtctctggtcttttttagctcaaagtatcatccatttatgtcaaagtgttgtaaattcctcaagactatatatgagatgttttgtttcattttaaaaaaaaaaaaaaagggtccccatttagtcaaaaaaaaaaaaaaaaagnnnnnnnnnnnnnnnnnnnnnnnnnnnnnnnnntgacctannnnnnnnnnnnnnnnnngagagctggagtatca

SEQ ID NO: 124304 - DNA, 556 bp, Arabidopsis thaliana
catgcacgcctgcgtaagctcggaattcctctcgagctgggttaagcagtgctttacccttatttggccattcctgtcttccactttgtcatcttttccctttctgatgggatccgccgccgaactcacggagcccaccaccgggaccgagaagcttcaccagccaatagaagttgaagaagatgacgaacaaattgttgatttggagaggaaaacattccgtcatggaaagggacacgatactagtgtggacagtagtacaatcaccaacaccagctcgtcgtcgtcttctagcttttccggtgatggtggaacggaagagacccccgatttccacagcaacggcgatggagaacatacccgatttaataaaattgggaagggccccgaactagaaactggaaatgggttttcaccaaaaagcttgacgacgggaaagaaatgcttcggcttcttcgacggaaaacaagggttttaagggaggtgggggccatacctgagggtcataaggaggttaaaccgcgggccttgaagggggacgaaccccaatataaac

SEQ ID NO: 124305 - DNA, 489 bp, Arabidopsis thaliana
  unsure (1)..(489): unsure at all n locations
nnnnnnnnnnnnnnnnnaaaaaaacaaacaaattgaagagcgattatactatcacggagaactcaagatccggtgacgaatccaacttcttgtgacggagctcaagtcgagagagagaagactgtactagtagtagtagctgtggatttttgtgtcatcatcggagatcggaatcttcttcttcttcttcttcttggagcttctagaagtggagagaagggggaagatcaagcgacggatagtgataggttttgctgtatgtcagtggattgtgttgaaactgattttggtggatttggagaacttgtgaaccctattcaatggcctcagcttcgaaaaagacgtcggcatgtcctcaccacggtggctctcttccgcctcccaaactcgtctccgctgctcccgataccgctgctgtatggtccgacgctgacgatcagcgagcctctaaagtttctttggaatccgctatccgccctgtcgattcgt

SEQ ID NO: 124306 - DNA, 571 bp, Arabidopsis thaliana
gtcagagatccattcgatagcactttcctctctttctctcatcgtaaaaccgttcttcgttttctctatttctctcgtctctttcttctacccagatcactgattgattagtcgtgaattttactctactctttcatcaattttactgtgtttaattcataaaacaaaacaaacgatcgatttttgtttttttttggggatgaagatcagaagcaaaagcaaaggctatcgtcaagagatcaaatcaacttgcaccgactccaacactctgttctcaaaagatgtggttgcaacttcggagcttttttcatctgtgatatcgtagcgtgtgaaagacggataattctacagagacaatgcatcatcccattcggctagggcaattttcatctctatcttgtttataatctataatcttatagataggttaatttcaaaaaaggtttttatactatttttggtttttccaaacaaaatatttttctcaaaaaaattatttttaatgggttccccctccctctttcttcccccttctcaaataatttgtggggatgaacttcccggtttgggc

SEQ ID NO: 124307 - DNA, 846 bp, Arabidopsis thaliana
  unsure (1)..(846): unsure at all n locations
gagagacttcgtgtgtctgtactgcaatgaattgtgccatccatttagtagtttggaagctgttcgtaagcatatggacgccataggtcattgcaaagtgcattatggtgatggtggtgatgaagaagatgcagaacttgagcagttctatgactacagcagcagctatgtcaatggagacgagaatcagatggttgtgtccggtgagtcagtgaacactgtagagctttttggtgggtctgagcttgtgatcaccatgagacccgataacagagtaacgtctaggactcttgggtctcgagaattcatgcgctactacaaacagaagccagcaccgtcttctcagaagcatattgtcaactctctaacctccaggtacaagatgatgggtctagcaacagtgcagtcaaaggaggccatagtgaggatgaaggtgatgagagagatgaacaaaagaggagcgaaaagcagtgtcaggctcggaatgaagagcaacgtcatcaggaatctgcccaacaatgtcacctattagtcttgctcctcgattttcaggtctctcctctttgtttgattttgtgaccagagttttggtgagtaaatctatctaagtttttcactagtactcaagtatcttaggcccatttgggtctctgttttgtctgatttagtcttttgaaaatgttacgttttggctgagtttgtatctcttgcccagtgctttgtacactctacattaatctatatttcatttggtagaaaaaaaaaaaaaaaaaaagnnnnnnnnnnnnnnnnnnnnnnnnnnnnnnnnnnnnnnnnnnnnnnnnnnnnnnnnnnnnnnnnnnnnnn

SEQ ID NO: 124308 - DNA, 556 bp, Arabidopsis thaliana
taggaagccactactagaagagttatgacgtcgaacgcacgcgtacgtaagctcggcttttgttgcgacttttcttcttcttcttcctcaggaacttaagtttctgagtccatgaagatgccagtggcattggtctggctactggcattcactattctactgatcagtggggaaggcaataatgccatctgcaaggagaattttaagttagaccctagacctcatagtgtttcgatcctcgagtttggagcggttggtgatgggaagacgctcaacactattgctttccagaacgctgttttctatctcaagtcttttgcggataaaggcggtgctcagctttatgttccaccagggaaatggctcaccggaagcttcaatctcacaagccatctcactctcttcttggagaaaggagcaacaattcttgcatcaccggatccgtcgcattgggacgttgtcagtcctctaccgtcctatggtcgcggaattgaacttcctggaaagcggtacagaagtttgatcaatggagacaatctaatagacgtagtcatca

SEQ ID NO: 124309 - DNA, 734 bp, Arabidopsis thaliana
  unsure (1)..(734): unsure at all n locations
ctataggaaaagctggtacgcctgcaggtaccggtcggaattcccgggtcgacccacgcgtccgaatcatcttaaaatcacagatctttgggtatcaagtaaaactgtgaagtgatgtcgggaagaggaaagggaggaaaaggattgggaaagggaggagcgaagaggcacaggaaggttctgagggataacattcaaggaatcaccaagcctgccattcgtcgtcttgctcgtagaggtggtgtcaagcgtatcagtggtctcatctacgaagagaccagaggtgtcctcaagatcttcctcgagaatgtcatccgtgacgccgttacttacactgagcacgctagaaggaagacggtgaccgccatggatgttgtctacgctttgaagaggcaaggtcgtactctctacggtttcggaggttaatccgatttgggggattagggtttatgcaagtttggggatttcttcttgtttctgagatctgtgttaaatggtttgaattagtctaaagtaaatctaggagtgttagctactgcttttgttttctattgtgatgtcgttgttagccaatgcggtgtagttgaaaatctttgcaaacttaaagctaagaaaatctaatgaggatgaacaattttctccaaaaaaaaaaaaaaaaaaaaagnnnnnnnnnnnnnnnnnnnnnnnnnnnnnnnnnnnnnnnnnnnnnnnnnnnnnnnnnnnnnnnnnnnnnn

SEQ ID NO: 124310 - DNA, 626 bp, Arabidopsis thaliana
cccacgcgtccgtttgtactcgaagtaacatactttttacaatcacatttttgaagaactttcattccataaatctacagatctttgtgtatcaagtaaagagatgtcaggaagaggaaagggaggaaaaggattgggaaagggaggagcgaagaggcacaggaaggttctgagggataacattcaaggaatcaccaagcctgctattcgtcgtcttgctcgtagaggtggtgtcaagcgtatcagtgggctcatctacgaagagaccagaggtgtcctcaagatcttcctcgagaatgttatccgtgacgccgttacctacactgagcacgccaggaggaagacggtgaccgccatggatgttgtctacgctttgaagaggcaaggtcgtactctctacggtttcggaggttaatccgatttgggggattagggtttatgcaagtttggggatttcttcttgtttctgagatccgtgttaaatggtttgaattagtcaaaagtaaattcaggagttagtttttgtttctcgtttttcgttgttattagccaatgtgatgtagtagttaattatcttttgcaagctttgtgctaagaaaatctactcccaattatccatttgcttg

SEQ ID NO: 124311 - DNA, 523 bp, Arabidopsis thaliana
  unsure (1)..(523): unsure at all n locations
nnnnnnnnnnnnnnnnnnnnnnnnnnnnnnnnnnnnnnnnnnnnnnnnnnnnnnnnnnnnnnnnnnnnnccacgcgtccgcttttttcttaatttccaagaatcgtctcttttctctcaatcctccaattcccaaatttcaacaacaagacgaagcaaacgatgtggattgaaatcatctgcggtctcgtcatctacaaactcgtccgccgtttcttctacgacgacgaattctccgacgtcgaaacttccgattccactgctctcttctccgttgctcacagacttgagaaactttatggtggaaaagcttatgtaggacttcgaattccagatgccgacactgcttctagacaagacattgatgttgttcttgttactaaaggagatgttgtagtgatttctgtgaagaatctatcggggattgttacggtaactagtgatggtagctgggtttgtgaaggtggcaagcatcatactactgagactttcccggatcctctggcggaggtcaagaaacaagc

SEQ ID NO: 124312 - DNA, 1463 bp, Arabidopsis thaliana
  unsure (1)..(1463): unsure at all n locations
atgatttnnnnnnnnnnnnnnnnnnnnnnnnnnnnnnnnnnnnnnnnnnnnnnnnnnnnnnnnnnnnnnnnnnnnnnnnnnccacgcgtccgtttgctttcttattttgtcttctcacaatctgttcctatcaatcacacagataataatcctcagcttctctctcgctggatttcaacattcttccactcatcgcttctctttaccaaatcaaactcaacacttcactcaactcttatcggaccttccaaactatatccttcaatggatctatggactcttcaattaaaagacgtcacgatccgaaaccctatcttctcatcatcgatccctgagaaatcatcgtcgttttctaggaaactttgtgaattggagtttaggtttctcaatcgtaaggtttctgcttctccgtatcgttccttggttgttcgagctacctcgaagaagagtaacgacgattcttcttctcctggagatgcttctcaggaaaacaaaccttctaacggcaacaagtccggcgattccgcggctccgaaatcgttcggtttaaacacggattggagagagttcagagcgaacttgtttatgaaagagcaggaagaaaaggcggaagctgagggtcatgaatcggaacctataggtttgaaatgggcacatccgattccgtttcctgagactggttgtgttctagttgctacagagaagctagatggttatagaacatttgcgagaactgttgtgcttcttcttagagcaggtactagacacccacaagaagggccgtttggtgttgttatcaaccgtccacttcataaaaacatcaagcatatgaaatcaacgaaaaccgagctcgctactacgttttctgaatgttctttgtactttggtggtcctcttgaagcaagcatgtttttgttgaaaactggtgataaaaccaagatacctgggtttgaagaagtcatgccggggcttaactttggtactcgaaatagtttggatgaagctgcagtgcttgtaaagaagggagttcttaagccacaggagtttagattctttgttggttacgccggttggcagctagatcagctcagagaagagattgaatcagattactggcatgttgctgcgtgcagctcggatttaatatgcggagcttcttcggaaaacttgtgggaggagattttacagttaatgggcggtcaatactccgagcttagccgaaaacctaagctggatatctgaagttttctaagagaacttgaggcttttttataacttatatatattttctctattaagccgatttgtatagcttactttcgttggcttgtacgtgagaataatgcacttctatgctatttataaagatttgctttgtaaaaaaacaaaaaagnnnnnnnnnnnnnnnnnnnnnnnnnnnnnnnnnnnnnnnnnnnnnnnnnnnnnnnnnnnnnnnnnnnnnn

SEQ ID NO: 124313 - DNA, 854 bp, Arabidopsis thaliana
  unsure (1)..(854): unsure at all n locations
accctaaaaaaattcaaaagacgatcctcttctcgaagaaactcgattcttgtggattcgatttcattaaggaattttgaattgttgcctgtnatgggtggtttggctatggaggaaatgcctttatcggtgctattcgagcaagctaggaaaattcatcttgctgcttcagagtctggtgttgatcaggatgttgtgaagaaaggatgtgagatgtttcagaagtgcgaagatatgatcgggaagctggcgctgttttcgtctaacgagactaaagaagatattagcaccaacaatctcaaatatctttttggtgccttattatcttgcggagttgacagggaaaatccattcaggaggacccggattcagaattgtcaaacgcctcgtattgctaaagtctgaaggagttcctttccctctgtgaggcaatggagcttgttccggatgaggagttggaggcttcttcacgaggaggttctggtgcacctgctgatcgaacggctctcaagatagctcggttcatacgtcaaaaggctgcagaggcaaagcttcttgaaattaaagagaggaaggagcgacgtggacgttccactaaagcatcagctttgtcgactccggttgaatctggagaagatgatattccagatgatgacagcgaagaagagagagaggcctggctctcctcaattaacttggctatttgtaaggctattgatctgttggaaatgctaaagagagaagaggaaatgctctctgcaataaaggaaagacagttgaaggatggagaaggtggattttctcgggatgctcttgatgatcgtacaaagaaagctgaaacctggcacagagac

SEQ ID NO: 124314 - DNA, 462 bp, Arabidopsis thaliana
ccgcttctcttcttcgcctttttctttcaccgatctgtgttgccgagtgccgactcgccggaggcttatctccggcgccgggctggatctcgtcgtcgaattcgccttaatccaccgctgattctgaattttccgtgttctctcgtcgtctctgccaccgtcaccgtctcccgtcgccgtgttcgaccgctgattctgaattttccgtgttctctcggcgtctctgccaccgtcactgtctcccgtcgccgtgttccatttagccgaaggagtgatggatttggaactaggcgaaggcgtgatggaaaaactcgtgagcccttcaggggaagacatgaactcgcgagctcagcaaaattggaagaatgtaactgctgaagtgacccgtaattactctcggatcaccttttacttaattcgctaccacaggtgtcatcaccattctcggtgggttcatctttg

SEQ ID NO: 124315 - DNA, 1042 bp, Arabidopsis thaliana
  unsure (1)..(1042): unsure at all n locations
aattccacttacttttggggaaggttggtcccctggcaggtcccggcccggatttccgggcctaatcctcctttatctctctctctctctaagactatcgagcttctttcttttttcctgagtcttttagtctgatctcttacaagaatggcgttcgcaggaacaacccagaaatgcatggcatgtgacaaaacagtttatcttgtcgacaagttaaccgccgataaccgggtctaccacaaagcttgtttccgatgtcaccattgcaaaggaactctcaagcttagcaattacaactcctttgaaggagttctctactgcagaccacatttcgatcaaaacttcaagagaactggaagtcttgagaaaagcttcgaagggacaccaaagattgggaaacctgataggcctttggagggagagagacctgctggaaccaaagtttcgaatatgtttggtggaacacgagagaaatgcgttggttgcgacaaaaccgtgtatccaattgagaaggtatcggtgaatggaacattgtaccacaagagctgcttcaagtgtacacatggaggctgcacgataagcccttcgaattacatagctcacgagggtaagctatattgcaagcatcatcatattcagctgatcaaggagaaaggaaacttgagccagctcgaaggaggaggagagaatgccgccaaggacaaagtcgtcgctgcttaaagaaacaattcaatctctctgggatgattttgactatcgaagaatcaaaagagtcactacttctccatcgatcgataacatatattggttttgtttcttcctacgtttgtgtttttctttttggtctttaatatgtttttttttttttgggacctttgttcactcttttattgggtttcttgaaatgaaactagagaaacaaagaaataatggatgtttgcttatgagatatatatgtattacgttaagatgatataaattaattttcgtgaaaaaaaaaaaaaaaaaaaacnnnnnnnnnnnnnnnnnnnnnnnnnnnnnn

SEQ ID NO: 124316 - DNA, 448 bp, Arabidopsis thaliana
tgacgagagagcagagagagcttcttcttccggacactgagcagtgagagcacccatctccaacctcttcctgaacaagatgggaagcactgtgattttaagctcagatgatgaagattcagatattactgaatctgaaatggatgagtatggagacagaatgtacctaaaccttaaaggtgggaagctgaaagtgagactctctcctcaagcttttatctgtccttattgtccaaacaagaagaagactagttttcaatacaaagatcttcttcaacatgcttctggagttggtaatagcaattctgattaaagaagtgcataggtgaaagcaagtcaccttgctcttgtcaaataccttcaacaggatcttgctgattcagcttcagaagcagagcctttatcaaagtgtcagaaaaacggaaactctattcaagagtgcgatcat

SEQ ID NO: 124317 - DNA, 453 bp, Arabidopsis thaliana
caacattcctaacactacactccaagcaactagcttctctactactcaatactatgtttctatcggcatctatggcttcttcttcacttcacgttgctatcttctctttaatcttcttattctcactcgccgctgcaaatgaagtcaccgtcggtggaaaatccggcgactggaagatccctccttcctcttcttactcattcactgagtgggctcaaaaagctcgcttcaaagtcggcgactttattgttttccggtatgaatctggtaaagactctgttttggaagtaacaaaagaagcttacaacagctgcaacaccacgaaccctttggctaactacactgatggagaaaccaaggtgaaattggacaggtctggtcctttctacttcattagtggagctaatggtcactgtgagaaaggtcagaagctgagccctgttgtgatcagtc

SEQ ID NO: 124318 - DNA, 426 bp, Arabidopsis thaliana
aagaaaaaaagaataagattttgtcattcttcaaaatacgttctcgccatttgcgccattgattaattcaagtgcgttgaaggtagaggttagttctacacaaagcttgatcttttaggggttttctctagttattggagagtggtgagaattacaaactgcattatccgatctaaaatgggtgatacagagaagtgtaacagtgatatgatccagagacttcattcatctttcggcactacttcttcttccattcccaaaaatcccatttctcagctcgatttaaaccctaatttcatccgctcatcagctcctcaattctccaagcctttcagtgacagtggcaaacgaatcggtgttcctccgtcgcaccccaacttaatcccaccgacttctccgttttctcagatcccgaccacccgacaa

SEQ ID NO: 124319 - DNA, 503 bp, Arabidopsis thaliana
atacgactcacttagggaaagctggtacgcctgcaggtaccggtccggaattcccgggtcgacccacgcgtccgcggacgcgtgggttcgatttgttgattcgcgtgtgttggagctaaatttcgatggcggagatttacgaggaaggagatgaatcagtggatgtgaataaagaatcagaagtgaaaactgagctgggaaaagggggaggagatgagaatgttttgcagtttctagattcgttggatggatatttaacgcttatggattctgtgaattctaagcttcgagagggatggtttgatctagctagtgctcgacattctatgggaactttacgcatcaacagcactctcttagatcttaagtatcatcccgcttcttcaacattgcaagtgactgaccaagatggtgaatctttggggatcagtacctcatttttgctttgtccaagtgggcttccaagtgtgccggtagcaggaaaggcaaaggcttctctactg

SEQ ID NO: 124320 - DNA, 1157 bp, Arabidopsis thaliana
  unsure (1)..(1157): unsure at all n locations
gcaagatgtccattcagttatataattatggagaaggattgatgggtaaagttgcttctgataaatgtcacaagtgggttttcaaagaaccatctgaatctgaaccaaatcttgctaattactggcaaagttcttttgatgctcttcctccagaatggaccgaccaattcgaatcaggcattcagacaattgctgtgattcaagctggacatggtctgttacagctaggttcttgcaagattattccagaagatcttcattttgtgctaaggatgaggcaaatgtttgaatcaattgggttacagatcaggctttttaccctctcaacagcttcttctcttcaaaccgaaccgcgactccatcttcttccacggttccaaaccagatacctcagtctcaaggttttaactggggatcacactcacctttgttaccttcccctagctttcagaaccaactacctgcttcagctagattcggtttccttcaagataacaatgttcctcctcagatgcttcctccaatggaagagcatgaagacgacatcaaatggcctaatggtttgtcgttgttcaatgcgttgactggacgtgcagatgaagctagtaggcttttgtttaaccaggagcagaacccgatgaatgtcgaaaaccagaacgagttcttgaaccttgaaggtcatcatcctaacaagtttagaagaagctatacattgccagctcgaatggattcttcgtcatcatcaacctcgcttgatcagcaacaaccactggagtttaggaacaataactctggaagcaactcgggtttgttccctgacgttatggagacgtttttgaggtgattgacatgttcaagattcaggtttaaggacagattaaactaaaagctctcgatgctagttattagcttatgcttgttataaatacatgaaactctctgttcgttgtttcttccttcttgttgttgttgttgttattgtaccatattgtctgattgtttctccttttatgtcaacactcttttaacatttgaagatactttaaaaacaaaaaaaaaaaaaaaagnnnnnnnnnnnnnnnnnnnnnnnnnnnnnnnnnnnnnnnnnnnnnnnnnnnnnnnnnnnnnnnnnnnnnngcaatctcaaaccttttacc

SEQ ID NO: 124321 - DNA, 521 bp, Arabidopsis thaliana
  unsure (1)..(521): unsure at all n locations
cccacgcgtccgcgcaacttcttccttatcgacacctacactctcctgctacaatggcgactttcctaacaaatgttgtttcaatcaaacctacaatcttctcattccagtccgaatccttcactcctttgcatacacgggtcaatgtattctcctcgaaaccctttccttctctcgctggaactttctcccggagctctagaacgagattcattccttatgctgtaacggagacggaagaaaaacccgccgctttggaccctagttcagaagctgccaggcgtgtgtatatcggtaacatacccaggacggtgaccaatgagcagctcactaaacttgttgaagaacacggtgctgttgaaaaagttcaggtgatgtatgataagtattcaggaagaagccgtcgatttgggtttgctacaatgaaatcagttgaagatgctaatgctgtggttgagaaatttaattggaantnccgttaaaggnggtanntnaaaggtaanctttnaaggganccttta

SEQ ID NO: 124322 - DNA, 592 bp, Arabidopsis thaliana
  unsure (1)..(592): unsure at all n locations
ccccccttgagttcggaggtgttgattagcttggtatcgaattcggggtctcgctgtcggcatgttctcctccactccgccgcactcgtcgtgccggttttcgaacaagctgctcgatcttcgcgaatccagcacagcgagccaagaggaagctgcttgagctgatctccgaggaggatcgaggtctgagaacccagaaagaccccaagaagcgagatgaaatcgtgaacgccatcgaatccatgacggttatcgggcgcagctccatcaccacagacgactctctatctgccacgtggcggctcttgtggacgacggagaaggaacagttgttcatcatagaaaaggcaggcttgtttgggacgaccgccggagacgttttgcaggtgatcgatgtgaataaacggatcctcaataacgtcatcactttcccgccggacggggttttcttcgtacgctccgatatcgatatcgcttccccgcagagagtcaatttcagattcaaaaagtggggaatttaaangggaaaacttggnggtcccaatggcaacaatttnggaagggntggtttaaaatgggaaattgncgggga

SEQ ID NO: 124323 - DNA, 789 bp, Arabidopsis thaliana
  unsure (1)..(789): unsure at all n locations
nnnnnnnnnnnnnnnnnnnnnnnnnnnnnnnnnnnnnnnnnnnnnnnnnnnnnnnnnnnnnnnnnnnnnnnnnnccacgcgtccgatacgcgcttccatcaaccctttggtcttggaagccaaatcaaacctttccttcaatcctcaaattttcgaaaattttctcttttgctttacgttctctcaattcttatttgtaagaaagtttgttcctttaatcaatcaaatcaaagagacttttgaagattgtttcccaatttgcgtcaatcgggatcgagtcaaatctgaaatcttctccactcatcatctgactataagacttaatcaagggactttttgttcgggtttggttttaaacgtcttggattcgaagtggttaaggtatggatgaaaataatggaggttcaagctcacttccacctttccttactaaaacatatgaaatggttgatgattcttcttctgactcggtcgttgcttggagcgaaaacaacaaaagcttcatcgtcaagaatccagcagagttttcaagagaccttcttccgagattcttcaagcataagaatttctcaagtttcatccgtcagcttaatacatatggttttcgaaaagtgggtcctgaggaatgggaattcttggatggtggttttgttagaggtcggcctaccttatgaagacattcatagacgaaaaccggntcatagccactcgttagtggatctacaagcgcaaatcctttgacggaatcagaaagacggagcttgggaggtcagatagaaagactgaaaa

SEQ ID NO: 124324 - DNA, 429 bp, Arabidopsis thaliana
ccacgcgaccgcaataactgattactcttcttcttcttcctccgtcgttgtttcatgcgacgaatcggtttcagattcagtcgtggtatctctcgatcttctctatctttgtcatggatgatctgttacaccagcgagtcgagcagtctcaggtaactcctcctcatgacgattctaatatccatggtgattttgataacgaggctacggatgaatcgcgatccgaaacttgttctgttgtgatagagggaaactgcgacatggtgattgaattaggattggaatctggaagtgttatcgttgagaatttaggtgatagtgatattgatgttagcaatgattttgatgaacctgatgacgacgatttctttgtggggaggactgattttgggctcgagttccgcgatattgcatcttcggggaatgata

SEQ ID NO: 124325 - DNA, 395 bp, Arabidopsis thaliana
cccacgcatccgcacacgcgtccggatcgtttggattattctctctggatggaacgcttgatgggttatgctttgttcttaagttaagtgaaaatacttggctaaattataggggggaagacttctatgtccctttccttacttcacgtagctcgcccgttgaaactgaagctgcccaagtgagtaaacccagacgaaaaacagataaagaagtgtctgctagtggatttactaaagaaatcatcacggagataaggaacttggcaattgacatttcctctcataagaatcagaagacaaacgtcaaagaagtgcaggaaaacattctacaagaaattgagaaactggctgcggaggcatatagcatatttagaagcacaactccagctttttcc

SEQ ID NO: 124326 - DNA, 562 bp, Arabidopsis thaliana
  unsure (1)..(562): unsure at all n locations
gtccggatctaaatccgcgagcggccgcccttttttttttttttttttttaagctcacaacacctaaaaattaatcattcaatttcaaaggatatcacaatctaaccagaaatgaacctttgtttctgttttattacaagaccacacaagaaactctcacatgcaattctctctagaaagcactatagatagattacttaccaacagatcatagtaagaacacacgatcatatcatcgttcatactcacatctcagtatggctctcatataccccggctgaccacagactggagattccctcttgtcccgcacagtttgagtggaactgttgaatcagtgttgagaccattggatgttcttgatatcggataccttctttaaccatttcataaagcgggntcatttccctcaacttctcaacttgtttaaccgtaggtcgacggnttatcnatctctncctcgggggaacctaccaatcccaacctatcggnggngngcatgctnatccaacncaaggtttaaacatagagggncnaatcggcnagtaagncttcntaggnt

SEQ ID NO: 124327 - DNA, 525 bp, Arabidopsis thaliana
tgagtggaactgttgaatcagtgttgagaccattgaatgttcttgatatcgatcccttctttaaccgtttcatagagcgggctcatttccctcaacttctcaacttgtttaaccgtaagctcgcccgctttatcaatctcgtccttcgtggtagccctaccaatcccgagcctaatcgaagtgtgagccatgtcttcatccacacccaaagctctcaacacataagaaggctccggactcgcactagtacaagcactgccactagacactgcaacttccttcaatcccatcaacaaactctctcctgcaacataagcagtcgacccattcaaattccctacatatcgactatccattgatccattcacctctacaccatcgagcttctctctaaccccattcagcaacctctcctgtaaccccttaatccacttctcatcatactccatccggacgcgtgggtcgacccgggaattccggaccggtacctgcaggcgtgcgtgctttccctaacgtgagtcgtat

SEQ ID NO: 124328 - DNA, 469 bp, Arabidopsis thaliana
aaaatatcaaatgtgggcaacgaaactcgtctcggaaccaatcgttccttctctgaagctctctttgcaattgaaaatcaacaacatacgatacgagagaggattcttcgagagatgagcagcacaagcactagttctgctcttatccaccatttccgcctcaccactcgcaacttgggttcgcctacaaagcagcgttgtccttacgctgtaactttctgcaattcgtggagggaagctggactccgatactccgtcacgcaacgccggagcaaaggctttgggccggtgtcagctctcaatgacgacgattcaccaacagagaccacccccggcgttggctctgctgtagaagacagaccaccagattcatctgaagatagatcaagttcggtctatgagtttctgtatccccgtaaagaggagctccctgatgacaaagaaatgactattttcgaccatctcgagg

SEQ ID NO: 124329 - DNA, 428 bp, Arabidopsis thaliana
cccacgcgaccgcacacgcgtccgggatcccaccatgaatccaactccaactccaagctccgccggcaacagtgtctgcacagatgaattgaccaaccttcccccggaggactcgccactcgacagcgagaaggatgatagcgttgacttcagccaggagcaaggatcggagtcaaatgaagctattgacactgagaatggttcaagatccgtagacaagaaccaatactctgaaactgaagttgtagttagagcaaaagatttacagacagaacctgattcactggatgatgatgtggagattgtgatcaaaaaccaacataagtattacatatactgcccttgctgtggtgaagatatcaccacaacagtcaagctcgtgaagatatcagatcccaaacacacaacagaccatgacaaagctgttg

SEQ ID NO: 124330 - DNA, 814 bp, Arabidopsis thaliana
cagtaccgctccggaatttccgggtcgacccacgcgtccgggggtttgcttgtggacgatgaatttatacacggagaagaaagttcctgactgttcggaaaacatctctgtttttcgccggcgatggtttcacagtttacgactgcaagggaagtttggtgtttcgggttgactcttacggtggtcccaacacccgcgacaccgacgaggttgtcctcatggacgctcacggccgttgtctcctcaccctccgacgaaagaggccgagtttgcgacggagatgggaggggtatctcggggagagatcggacggccagaaaccgatcttcggggtaaggagatcttcgataatcgggaggaacagtgtgacggtggaggtgtacggggactaccagtgcagcgagtacctgatagaaggtagtttcggggcaaggaactgcacggtggtggaggcggagacgaggcggaaggtggcggagataaggcgcaaagtggatgcgtcaacgaacgtgatgcttgggaaagacgttttctcgttgaacgtgaagcccggttttgatggagcctttgcaatgggattggttcttgtgcttgatcaaatctacggcgacgatctccttgaggttggtgaggaacaggtgcaccctttccgaaaaaaatccttgattttgattttttcacccctttttttgagtttttggcttttctttcttttttttgggtgggggaccgccaaacccaaaaattcggaggtggggaaaaaaataaattcaatttaatttggtgaaggtttgggtggttccgggtttgggaa

SEQ ID NO: 124331 - DNA, 765 bp, Arabidopsis thaliana
  unsure (1)..(765): unsure at all n locations
nncacacgagtccgccaaatcctttacttactaacaaaaccttgagagcattttttatgaagatgatcactttggaatgttgtcggccgcacccagagtcaatatacataagcaacgagaagaaagattgttattaataccgagtgtgagataatgtgggcgccaatttcagtttcaagctttcatcttcgtcttcctctttaagttctgagatctagggtttttctgggtttctttgttctcactcttaaattctctttctgactctgtaagattggtcatgcccctgccctttgagcaatttcaagggaagggggttctgggtttcttagattcttcttcttctccgggatacaaaatctgggctaatccagagaagctccatggacgagtagaagaagatctctgctttgttgtcaacaatggtggtttctcggagccgacgtctgttttagactctgttagaagtccaagccctttcgtctcttcttcaaccaccacgctgtcttcttctcacggtggtcccagcggcggcggcgctgctgctgctactttttccggcgccgatgggaaatgcgaccaaatgggtttcgaggatctcgatggtgttctcttcggtggctcggccgggacaaagaacagagtatttttaggaataaatcatgggcttggccaaggtaatgggattccggggttccggaattttgggggggttttggaccattcgggttcttggattcccgaaccccgggttaattggataaa

SEQ ID NO: 124332 - DNA, 1132 bp, Arabidopsis thaliana
tcgattgtatcgatcagcttgatatcgaattcgcggccgcgtcacgaacgtgtccccgtcgattctttcttttcgactcagccgaaaccgccgtcgccaaaatctcagcttcttcgacttttaggtatccttggctcatccaccaccaccgttgatttaaccgctgttccggttatggctgatgatctcggtttatgtccgtggttacttcctaatgattccaacgaaccggctaaaatcgaaatcggaactgaaaacatgaaaggttcttctgactttatgttttctgatttcgatcggcttattgatttcgagtttccgaattcgttcaatcatcatcaaaacaacgccgggggggatagtcttgttcccggttcaggcgaaaacagagctctctcccgttaactaacagtgatcattgcttcgatattgatttctgcagatcaaagctctctgctttcacttacccttctcaatcagtcagccacagtgtttcgacttcttctattgaatacggtgtagttcctgacggaaacacaaacaactctgttaaccggagcacgatcactagctcgacgactggtggtgatcatcaagcgagctctatggatagagaagctagggttttgaggtacagagagaagagaaagaacaggaaatttgagaagacgattcgttacgcttcgaggaaagcttatgcagagtcacggccaaggatcaaaggccggtttgcgaaaagaacagagacagaaaacgacgacattttccttagtcatgtttatgcttcagcagcacacgcacagtacggtgtcgtaccaacgttctgattcgaatctacggtggataaacaatcaacctgaagacttcatatcttccaccgttgatttacagtcggtgtataataagtatagtgagtcttaccgtagacaaacatcttatcctctttaccgttttaattactttttttttacgcgctctcactgccactgtaactctttttttttttcttcctatatatgtatgcttatttttatttaggaaaatgttatgtaaaaacagacagagggatccactagttctagagcggccgccaccgcggtggagctccagcttttgttcactttaaaagggt

SEQ ID NO: 124333 - DNA, 847 bp, Arabidopsis thaliana
  unsure (1)..(847): unsure at all n locations
nnnnnnnnnnnnnnnnnnnnnnnnnnnnnnnnnnnnnnnnnnnnnnnnnnnnnnnnnnnnnnnnnnnccacgcgtccggatttctgcagatcaaagctctctgctttcacttacccttctcaatcagtcagccacagtgtttcgacttcttctattgaatacggtgtagttcctgacggaaacacaaacaactctgttaaccggagcacgatcactagctcgacgactggtggtgatcatcaagcgagctctatggatagagaagctagggttttgaggtacagagagaagagaaagaacaggaaatttgagaagacgattcgttacgcttcgaggaaagcttatgcagagtcacggccaaggatcaaaggccggtttgcgaaaagaacagagacagaaaacgacgacattttccttagtcatgtttatgcttcagcagcacacgcacagtacggtgtcgtaccaacgttctgattcgaatctacggtggataaacaatcaacctgaagacttcatatcttccaccgttgatttacagtcggtgtataataagtatagtgagtcttaccgtagacaaacatcttatcctctttaccgttttaattacttttttcttacgcgctctcactgccactgtaactctttttttttttcttcctatatatgtatgcttatttttatttagaaaatgttatgaaatcatataatttgggaaattataggtttctaattggctgaaaaaaaaaaaaaaaaaaaggaaagggcggcccgttcnnnnnnnnnnnnnnnnnnnnnnnnnnnnnnnnnnnnnnnnnnnnnnnnnnnnnnnnnnnnnnnnnnnnnnnnn

SEQ ID NO: 124334 - DNA, 718 bp, Arabidopsis thaliana
catccaagcaaatcaaatacccaactctcacacgttctcaaacaaaaacttcaaagagagagagagagagagttttgtgaactcaagaaaataaaaaaagttatagttaatgggattcggcttagagagtatcaaatcaatctccggcggatggggcgcggcggcgcgttcctgtgacgcttgtaaatcagttaccgccgccgtgttctgtcgagttgactcagctttcttatgcatagcatgtgacacaagaatccattccttcactcgccacgagcgcgtgtgggtttgtgaagtttgtgaacaagctcccgccgccgtcacttgcaaagccgacgccgccgctctttgcgtcagttgtgatgccgatattcactctgctaatcctctcgctagccgtcacgaacgtgtccccgtcgaaactttcttcgactcagccgaaaccgccgtcgccaaaatctcagcttcttcgacttttggtatccttggctcgtccgccaccaccgttgatttaaccgctgttccggttatggctgatgatctcggtttatgtccgtggttacttcctaatgatttcaacgaaccggctaaaatcgaaatcggaactgaaaacatgaaaggttcttctgactttatgtttgctgatttcgatcggcttattgatttcgagtttccgaattcgttcaatcatcatcaaaacaacgccggaggagatagt

SEQ ID NO: 124335 - DNA, 480 bp, Arabidopsis thaliana
  unsure (1)..(480): unsure at all n locations
acgcgtccgcacacgcgtccgcccacgcgtccgcccacgcgtccggagagttttgtgaactcaagaaaataaaaaaagttatagttaatgggattcggcttagagagtatcaaatcaatctccggcggatggggcgcggcggcgcgttcctgtgacgcttgtaaatcagttaccgccgccgtgttctgtcgagttgactcagctttcttatgcatagcatgtgacacaagaatccattccttcactcgccacgagcgcgtgtgggtttgtgaagtttgtgaacaagctcccgccgccgtcacttgcaaagccgacgccgccgctcttttgcgtcactttgtgaatgccgatattcactctgcctaaatcctctcgctaggccgtaacggaacggtntccccgntngaaacttttttttgggnttnanccngaaaacccnccnttgtcaaaaattttaaggttttttnggctttttgggta

SEQ ID NO: 124336 - DNA, 473 bp, Arabidopsis thaliana
gccacccacgcgaccgcatttcacggatatatttaatttggagccatgatgaattcaagaatttctattatcattgcgttatcttgcattatgatcacttcaattcgtgcatacgatcccgacgctcttcaagatctctgcgttgccgataaatctcacggaaccaaactgaatggatttccgtgcaaggaaacattaaacatcacggagtccgacttcttcttcgccggaatctcaaaacccgccgtcataaactctacgatgggttcggccgtaacaggagccaacgtggaaaagatcccaggcctcaacactctctccgtctccttagcacgtatagactacgcgccgggaggtttaaacccaccgcacactcacccacgcgccaccgaagtggtctacgctctagaaggagagcttggggttggatttatcacaacagcgaataagcttttcactaaaaccataaagat

SEQ ID NO: 124337 - DNA, 1209 bp, Arabidopsis thaliana
  unsure (1)..(1209): unsure at all n locations
tcggtgatcgccgtaccgccaaagattcacttcagtttcttattcaatggcttcaccggtttccgagatacaaccaccgggaaatctacatcaccggcgagagttacgccggacattacgttcctcagctggccaaagagatcatgaattacaacaaacgatcaaagaatccgttaaatctcaaaggaatcatggttggaaacgcggtgacggacaatcactatgagaacctaggaacggtttcgtattggtggagccacgcgatgatctctgatcggacgtatcatcagttgataagcacttgcgattttagtcgtcagaaggaatctgatgaatgcgaaaccctttattcttacgctatggagcaggagtttggtaacattgatcagtacaacatctatgcgccgccgtgtaacaagtcaagcgacggtggtggtagctacaatggttcttccggccgccggagtatgcggcttcctcaccttccccactccgtattgaggaaaatttccggttatgatccatgtaccgagagatatgcagagatctattataaccggcctgatgttcagaaagctcttcacgccaacaccaccaagattctcgtataaatggacagcttgcagtgaggtgctaaaccggaattggaacgacacagattcaacggttctccctatataccgggaaatgattgccggcggaattagagtttgggttttcagtggtgacgtcgattcagttgtaccagtgacagctactagatactcactagcaagacttagtttgagtaccaaacttccttggtatccttggtatgtcaagaaacaggttggaggatggacggaagtgtatgaaggactaacgttcgtgacggttagaggagcaggtcacgaggtgccattgttcaagccacgtgctgcttttgagctttttaagtatttcttgagaggcaagccacttccaaaggcttaaaaaaattgaagtcaagagagagattgtaacatttgaaatcatgcccgagaaaaatgaaaatgtaaagtttgggttatgagatggtatttaattaaatctagtctattaatgacagcaagtatttaattaaaaaaaaaaaaaaaaaaaaacaaagggcggccgctctagaggatcccagcttacgtacgcgtgcatgcgacgtcatagttcatctatagtgcagctcaatcannnnnn

SEQ ID NO: 124338 - DNA, 532 bp, Arabidopsis thaliana
  unsure (1)..(532): unsure at all n locations
gcttatcactttcaaggtggtttaagacaacactgattacatgattttgtattaacctatagtctaactgaaatggcataaaattaggtgtcttgacaaagccgcggtggttatagaaggtgacctaacacccgagggacctcccgcagacaagtggcggttatgcagcgtccaagaagtggaagaagtgaagtgtttgatccgaattgttcctatctggtcggccggaataatctcactcgcggccatgacaacacaaggcactttcacggtctctcaagctttgaaaatggatcgaaacttaggtcctaaattcgagattccggctggttcactctccgtcatctctctcctcacaatcggcatctttcttcccttctacgaccgcgtttttgtaccattcatgcggcgaatcaccggccataaatccggaatcacactcctccaaaggatangaacagggatcgttttcgcgatcttttctatgatcgttgcgggcattgtggagcgtatgagacgcatacgctccatc

SEQ ID NO: 124339 - DNA, 455 bp, Arabidopsis thaliana
cacacgagtccgcggacgcgtgggcggacgcgtgggttgatttttatttttctctctcaaagtttttcttgggagagcaacaatggcgatgaggaagcttttatcgaagaaactcttcaatatcacgaatgttgcttcacagagtcttatgaattgtcgcatttcgtcttcttcgttagccgtacgaaccagagttccgaatgattcaacagatacaaccaaaatcgcaccggagcctggagatttggcgatgtcgcgaaggttcatgcataacagtgctatgattaggccggcggagattatgcagatgccggtgggagagagtttgattgagaaactccgtgagattgatggaagcaaggatcggattcgattagacggactttctccgccggagagggagacgagtttgacggtggcggatacgaagaagctgcttagagcggcgcagatcg

SEQ ID NO: 124340 - DNA, 454 bp, Arabidopsis thaliana
cacacgcgtccgcgaacagtcgccgaaacattttcgccggcgttacaccggagaattcatccttctttgtcttattactctactacccaatttcagtttaaactcactatcttcccaatttgatgattcagtgattcaaattcgaaacttcaagcaatgttatcgacattgcaaccgccgcgttctctatcactcctccctctacgccggttccaaatatctaaaaccatcgtctccgcagcttcttcgaagaccatcgacacttccgttatctctccaccacaatctcaaattctcaccactcgtcgttcactcctctccggcgaaaccacagctgtcgaaatcgcaaaatcttacctttctcgtatccgtctcactgaacctcagctcaaatgcttccttcacgtatcggagaatgttctcaaagatgctcaagagattgatcaacgaatcg

SEQ ID NO: 124341 - DNA, 897 bp, Arabidopsis thaliana
  unsure (1)..(897): unsure at all n locations
gggggctactacgcctccaggtaccgggccggaattccctggtctacccacgggggcgagggcgcgtccagctaantgtgttggggccagaatttccgggacgacccacgcgtacgacaagggtatcttgagcgatgtagagcttcttttagagatcactgatgcctcacgtggcgctgtttccgcctttgtggaaaaaacaacaaatagcaaaggacaggtggtggatgtgtctgacaagcttacctcgcttcttgggtttggaatcaatgagccatgggttgagtatttgtccaacaccaagttctacagggcgaacagagataagctcagaacagtgtttggtttccttggagagtgcctgaagttggtggtcatggacaacgaactagggagtctaatgcaagctttggaaggcaagtacgtcgagcctggccccggaagtgatcccatcagaaacccaaaggtcttaccatccggtaaaaacattcatgccttagatcctcaggctattcccacaacagcagcaatggcaagtgccaagattgtggttgagaggttggtagagagacagaagctcgaaaacgatgggaaatttccctagaccatcgcgcttgttctttggggaactgacaacatcaaaacatttggggaagtctcttgggcaggctctttggatgattggtgtgagaccaattgctgatacttttggaaagagtgaacccgtgttcaagccctgtgagccttaaaaaaaaacttatggaaatgctctgaaggattccgatgttacgtttgttttaacccgggtttcaagggaggtccttttccggtggaatcctttcttttaattcgcaaccccaggaaaggaaacccttttttttttggacacccgattcc

SEQ ID NO: 124342 - DNA, 1016 bp, Arabidopsis thaliana
tatacgactcactttagggaaagctggtacgcctgcaggtaccggtccggaattcccggtgtcgacccacgcgtccgcgagaagacgacagaagggaagagttttctcaaacgcttcagggtcatactcagccaacatcagtcttgctgttgaaaactcgtcatggaacgatgagaaacagcttcaggacatgtacttgagccgcaaatcgtttgcgtttgatagtgatgctcctggagcaggaatggctgagaagaagcaggtctttgagatggctcttagcactgcagaagtcaccttccagaacctggattcttcagagatttctttgactgatgtgagccactacttcgattctgaccctacaaatctagttcagagtttgaggaaggataagaagaaaccaagctcttacattgctgacactacaactgcaaacgcgcaggtgaggacactatctgagacagtgaggctggacgcaagaacaaagctgctgaatccaaagtggtacgaaggaatgatgtcaagtggatatgaaggagttcgtgagatagagaagagactgtccaacactgtgggatggagtgcaacgtcaggtcaagtagacaattgggtctacgaggaggccaactcaactttcatccaagacgaggagatgctgaaccgtctcatgaacaccaatcccaactccttcaggaaaatgcttcagactttcttggaggccaatggtcgtggctactgggacacttccgctgaaaacatagagaagctcaaggaattgtactcgcaggtggaagacaagatcgaagggatcgatcgataaacaatgggatataagcctttcttcttgtaaatgaacttaaaactttatttttgtgtattacagtattctaccaaacgacatcatctctctgtgaataagagaatgttatgaatgaaaaaaaaaaaaaaaagggcggccgctctagaggatccaagcttacgtacgcgtgcatgcgacgtcatagctcgtttat

SEQ ID NO: 124343 - DNA, 678 bp, Arabidopsis thaliana
  unsure (1)..(678): unsure at all n locations
aacccttcatngtccnttcactnaacccccgggggcccttntgnccntggctgcccagaccaagctctgancnaagtgtccgnaggattgttccaggggtttgaggggttcgtgagatagagaaggggctgtccaacactgtgggatggagtgcaacgtcaggtcaagtagacaattgggtctacgaggaggccaactcaactttcatccaagacgaggagatgctgaaccgtctcatgaacaccaatcccaactccttcaggaaaatgcttcagactttcttggaggccaatggtcgtggctactgggacacttccgctgaaaacatagagaagctcaaggaattgtactcgcaggtggaagacaagatcgaagggatcgatcgataaacaatgggatataagcctttcttcttgtaaatgaacttaaaactttatttttgtgtattacagtattctaccaaacgacatcatctctctgtgaataagagaatgttttggctgacattttctgactttatatgaatgttgtggagcttcttctttcccctccatttcttatatcatattcatatgtgtgtattttatatgcgaagaaaatgaaaaagtagttaagtgtaaacnnnnnnnnnnnnnnnnnnnnnnnnnnnnnnnnnnnnnnnnnnnnnnnnnnnnnnnn

SEQ ID NO: 124344 - DNA, 493 bp, Arabidopsis thaliana
ggagattgaatcaaggacttttacgtgcgggcttcacgtcattggagagcctccatccgccatggaagctgtggccacactggtcaacattgctgctctagatcgtccggagatgagatttcagctcttccttctatattagctgagtgtgttggaagggagatagaggatgtttacagaggaagcgacaagggtatcttgagcgatgtagagcttctcaaagagatcactgatgcctcacgtggcgctgtttccgcctttgtggaaaaaacaacaaatagcaaaggacaggtggtggatgtgtctgacaagcttacctcgcttcttgggtttggaatcaatgagccatgggttgagtatttgtccaaccaccaagttctacagggcgaaccagagataagctcagaccagtgtttggtttccttggagagtgcctgaagttggtggtcatggacaacgaactagggagtctaatgcagcttggaaggcagta

SEQ ID NO: 124345 - DNA, 1096 bp, Arabidopsis thaliana
  unsure (1)..(1096): unsure at all n locations
ccgggtgcgagcccacgacgtcacgnnatgagccccatgggttgacgtattttgtcccaacactctaagttctacccagggcgaaccagagatggaggtgcgagaacagtgattgggttgtcctggggagnagtgcccttgaagttggtggtcatnggaccaacgaacttagggagtctaatgcaacgctttggaaggcaagtacgtcgagcctgtccccggaggtgatcccatcagaaacccaaaggtcttaccaaccggtaaaaacatccatgccttagatcctcaggctattcccacaacagcagcaatggcaagtgccaagattgtggttgagaggttggtagagagacagaagctcgaaagcgaagggaaatatcccgagacaatcgcgcttgttctttggggaactgacaacatcaaaacatatggggagtctcttgggcaggttctttggatgattggtgtgagaccaattgctgatacttttggaagagtgaaccgtgtcgagcctgtgagcttagaagaactaggaaggccgaggatcgatgtagttgttaactgctcaggggtcttccgtgatctctttatcaaccagatgaaccttcttgaccgagctatcaagatggtggcggagctagatgagcctgtagagcaaaattttgtaaggaaacacgcgttggaacaagcagaggcgcttggcattgatattagagaggcagcgacaagagttttctcaaacgcttcagggtcatactcagccaacatcagtcttgctgttgaaaactcgtcatggaacgatgagaaacagcttcaggacatgtacttgagcccgcaaatcgttttgcgttttgatagtgatgctcctggagcaggcaaattggctgagaagaagcaaggtctttgcagaatggctcttagcactgtcaagaagtccacccttccagaccctgggtttcttcagaagatttctttgactgatgtgagccactacttcgattctgaccctacaaatctagttcagagtttgagggagggataagaaggaaaccaagctcttacattgcttgacactacaactgcaaaacgcgcaggt

SEQ ID NO: 124346 - DNA, 573 bp, Arabidopsis thaliana
  unsure (1)..(573): unsure at all n locations
ggaaggaaagcgccaggacggtgctccaagtatgttaatggcgctagtgttgctggaatgtcgggatacgaggcatatattgtgagccataacatgcttctagcgcacgcagaagcagtggaagtgtttagaaaatgtgaccatattaaaaacggacaaattgggattgcgcataatccactttggtacgagccatatgatccgagtgatccagatgatgtcgaaggatgtaatcgagctatggacttcatgcttggttggcatcagcatccgactgcttgtggagactatccagaaacgatgaagaaatcagttggagatagattaccgagttttacaccagaacaatctaagaaacttataggctcttgcgattacgttggtataaactactatagctcgcttttcgtgaagagtatcaaacacgtggatcctacgcaacctacttggagaactgaccaaggcgttgattggatgaaaaccaacatagatgggaaacaaatagcaaaacaaggaggatcagagtggagtttcacatatccaacaagactcagaaacantttgaagtatgtg

SEQ ID NO: 124347 - DNA, 468 bp, Arabidopsis thaliana
ttccaaagtctgtttatttttttaatctctctctcttctctctcacccaatttcacaaacccgaaaccctaattttctcgggacactgaaatttttacagcttctttcctcttcttcaccggggagatttgtcggtactaaatctagggtttttgggtatcaccggagggttgaagagagagaaaaaaactcacaatggaatcagatcagggaaagctatttatcggcgggatttcatgggataccgacgagaatcttctgagagagtacttcagcaatttcggcgaggttttgcaggtcactgttatgcgagagaaagctactggtcgtcctagaggattcggattcgtcgcattctcggatcctgctgttattgatagggttcttcaggacaagcaccatattgataatagagatgttgatgtgaagagagcaatgtctagagaggagcagagtcctgctgggaga

SEQ ID NO: 124348 - DNA, 956 bp, Arabidopsis thaliana
  unsure (1)..(956): unsure at all n locations
gcgnnnnnnnnnnnnnnnnnnnnnnnnnnnnnnnnnnnnnnnnnnnnnnnnnnnnnnnnnnnnnnnnnnnnntccacgcgtccggtcccttcttccacatcagaacccatttgtctttgagtgagagaatcagctttcagagaaaaaagtatacctacagagagagttatggcggagagtggtggacgaaggatcggagtggcggtggatttctcggactgcagtaagaaggctctgagctgggcgatcgataacgtggttcgcgacggagatcatctgatcctaatcactattgctcacgatatgaattacgaggaaggcgagatgcagctctgggagaccgttggatcaccttttattcctatgagtgaattctctgacgctgctgtgatgaaaaagtatgcattgaagccagatgctgaaacccttgacattgtcaatactgccgctaggaagaaaacgattacagtagtgatgaagatatattggggagatcctcgtgagaagatttgtgcagcagctgaacagattcctctctcaagccttgtgatgggtaacagaggccttggtggtcttaagaggatgattatgggaagtgtaagcaaccatgttgtcaacaacgttgcatgccctgtgaccgttgtcaaggctcacatctgagtttgctcggagaactctaaataacaccaccgtgtattctataatttgtgtttttgtggtcggaatttctattgttaactgttgtgtgactggtgttttgttcatctgtatggataaacaacactccaccttctaataaatacagactcttttgatttttgggccaaaaaaaaaaaaaaaaaggntnnnnnantnnnnnnnnnnnnnnnnnnnnnnnnnnnnnnnnnnnnnnnnnnnnnnnnnnnnnnnnnnnnnnnnnnnnnnnnnnnnnnnnnnnnnnnnnnnnnnnnnnnnnn

SEQ ID NO: 124349 - DNA, 819 bp, Arabidopsis thaliana
atgatatgccagctctatacgactcatttagggaaagctggtacgcctgcaggtaccggtccggaattcccgggtcgacccacgcgtccgcgacgaacacagatacggcgtgtggtaataaataatgtcttctggcttgaaaatcatagaagaaccgcaaaaaccgattgagaagctgcagatttatccgacggctaatgctggtgtttctcccttttggcgagacaagtatgagcgagatgctaaaaagtattgggatatattttacaagcatcatggagacagatttttcaaagaccgccactacttggataaggaatggaatagctatttttccgttagtgggaaaagtgtcattcttgaggttggctgtggagctggaaacaccatctttccattgatcgccacatatccagacatttttgtttatgcatgtgatttttcaccacgagccgtcgaattggtcaaggctcatgatgaatacacagagacacgcgtttgtgcatttgcttgtgacttgacaggggatggtcttgacaagcatatttctccatcttcagttgatattgtgaccatgatatttgttttatctgcggtatccccagagaagatgtcctcagtattgcagaacattaggaaagttcttaagccaaatgggtgtatcctcttccgtgactatgctgtcggtgatcttgctcaggagaggttctctgggaaggatcagaggatcagcgagaacttttatgtgagaggtgatggcactcgtgcattctacttttctaatgaattcctagaaactttgttttctgaacaaggatt

SEQ ID NO: 124350 - DNA, 428 bp, Arabidopsis thaliana
accacgcgtccgagctgcccttgcagagatccaagagaatagtactagtcccatatttgaaatcaatagtaccatcctcacaaagctccttacagctttgaatgaatgtactgaatggggtcaagtttttatattagatgctttgtcgaggtataaggcatctgatcctcgtgaagctgaaaatattgttgagagagtcactccaaggttgcaacatgccaactgtgctgttgtgctttcagctgttaagatgatccttcagcagatggagcttattactagcacagatgtgattcgaaatctttgcaagaagatggctcctcccctagttacattgctttctgcagaacctgagatacagtatgttgcacttcgtaacattaaccttattgtccaaaagagacccactattcttgcccatgaaatca

SEQ ID NO: 124351 - DNA, 375 bp, Arabidopsis thaliana
aataaatccttttgtggaataatttcgtgatttcgtttgtgggttatccgaattttgtctgaatttgagtttttgagagggaaaggtttgttttggcgggggatggtggaaatgaggaaatctggaggtttaagaccggagtctgaatcggcggccaggtgccgagatgagctaccggcgaaattggagattgctgaagatgatttagaagaagagcatggtcctctcaacaaacgatctaggttatggagtcctgggacaagctcatcgacaatggcaccagctaagtataacccgcttgatgagcccagtcctcttggattgagtcttaagaagagtccatctttgttggagttgattcagatgaagataacg

SEQ ID NO: 124352 - DNA, 742 bp, Arabidopsis thaliana
  unsure (1)..(742): unsure at all n locations
aggacgcgtgggcggacgcgtgggctctttgtccctctctctttctctattactctgtctcctctgttccggcgatgttccaacacgcgccttcttccatttccctcatcatcatcttcctcttcaccattctatcacccgtttcacctgaaccggtcacagtccagccattccgggtcaaatcatccccacccgcaaccatacccgctttcccggagcaatccgatttctccggctgcccactcgatttaccagaagacctcttccacggcatcaagtcagcttgcagcggcaaaaagctccacaaaggaaaatgttgccccgtactaggcgcgtggctctactctgcttactcaaccactgctctaagccgttcgatttccgccgccgcaagaaactcatcctcctcctccgccgcggtaacgactcctgaagaagatatgcctttgcttcccgatgactcggagacttgcgttgacggattagggaaatctctgaggcagagagggattgagctcactagaccgaacgagacttgcgacgtcgtttactgttactgtggaatcagattgcatccgttgagctgttccgaggcttttagagtgaatgatgaagggagactcgtttggagacgggagagtttgatagattagaggcttgtttttttttaggtggaagccccaacaattctnntggttctnaaccnnttctttggttnaacaagngntttnnccagnctttt

SEQ ID NO: 124353 - DNA, 519 bp, Arabidopsis thaliana
  unsure (1)..(519): unsure at all n locations
acgactcactatagggaaagctggcacgcctgcaggtaccggtccggaattcccgggtcgacccacgcgtgcgctctctctctctctctgtcgtcaacaatggatagtccgacgagcatacgtagtaaaccactaccggagactctttctccatgcggtagtcaacgacggagaagcagctgcgactctaacccacctgagttcgagttctggcgtttaactaactcttcatttcctcaagctgattcagatctcctctccgccgacgagctttttcacgacggtgttcttctccctcttgacctcctctccgttaaatcagagcttcagtccgacccgaatatcgcagaatgcgacccggatccatctccttcgactggtagtttgattacagagcaaaaaagtgatcttgaacccggtttaggatccgagttgacccgagaaacaacggtttcgaagcggtggagagatattttcaggaagagcgaaaccaaaccgccggngaagaaagagaaggtg

SEQ ID NO: 124354 - DNA, 573 bp, Arabidopsis thaliana
  unsure (1)..(573): unsure at all n locations
ccgggccggcccacgcggaaccaccggaggagctcgatccattgattagaagatgacaactccacaagtgaagaccggtttgttcgttgggttgaacaagggacatgttgttaccagacgtgaattagctcctcgtcctcgttctcgcaaaggaaaaacgagcaagaggacaatctttatcagaaacttgataaaggaagttgctggtcaagctccctatgagaagagaatcactgagcttttgaaggttggtaaagacaaacgtgctcttaaggttgctaagaggaagttgggaacccacaagagagccaagcgaaagagagaggagatgtccagtgttctccgcaagatgaggtctggcggtggtggtgcaactgagaagaagaagtgaacgtcatcttaagtttgtgaatcgctcgtaaagagttatggtttcttgttgcaaaatcgttattatgattcctaagcttctcgaattatgtttttgttagaatatcggccttaaaggagggtttttgtttgaacccagtgtctcttttctccttatacctattttcccgcttttgnccaatt

SEQ ID NO: 124355 - DNA, 551 bp, Arabidopsis thaliana
  unsure (1)..(551): unsure at all n locations
actataaaatcnattttntntcacaaatctnattctctttngactncagtggcggcgcattcagagattcaaactcagagaaaatggtggcgacaggcttattcgtggggctaaacaaaggacacgttgttaccaaacgcgagcaacctcctcgccctaacaacagaaaagggaaaacaagcaaaaggactatttttatcaggaatctcatcaaggaagttgcgggtcaagctccctatgagaagaggatcactgagcttttgaaggttggtaaagacaagagagctcttaaagttgccaagcgaaagttgggaactcacaagagagctaaacgaaagagagaggagatgtccagtgttctccgcaagatgaggtctggtggtgctggtgcatccgagaagaagaagtgatgcgctgactctggttcagcgctctgtttcttctaaaccagttttctgttttttgaattttttgcagtaccntgtgtttcccctttggntatttttgtagcagagntaattaaatgttaaaacgggaccccttatggcttt

SEQ ID NO: 124356 - DNA, 460 bp, Arabidopsis thaliana
accacgcgtccggcaaaggtaaaaatgacaactccagcagtgaagaccggtttgttcgttggattgaacaaaggacacgtcgtcaccagacgtgagctagctcctcgtcccaattctcgcaaagggaaaacgagcaagaggaccatattcataagaaaactgattagggaagtagctggaatggctccttatgagaagagaatcactgagcttctcaaggttgggaaagacaagcgtgctcttaaggttgctaagaggaagttgggtactcacaagagagctaagaggaagagagaggagatgtctagtgttctccgcaagatgaggtctcttggtggtgctgctgctgctgagaagaagatgtagacatcttattaggcttctgtgttatggcatatttctttctattggaaatcaagttttggcttctgtatgctcaaaaagcgtttatgtgttgtgc

SEQ ID NO: 124357 - DNA, 787 bp, Arabidopsis thaliana
  unsure (1)..(787): unsure at all n locations
atacgactcaacttagggaaagctcgtacgcctgcaggtaccggtccggaattccgggttctctgcaatacacagcaatggcggcgagaggtgctatgcttcgatacctgagagtcaacgtcaatccaacaattcaaaaccctagagaatgtgtacttcctttctccattctccttcgtcgtttctccgaggaagttagaggctctttccttgacaaatctgaggtcacagatcgagttctctctgtcgtcaaaaacttccaaaaagttgatccttctaaggtaacaccaaaagccaatttccaaaatgatctagggttggacagtttggacagtgtggaagttgtgatggcattggaggaggaatttgggtttgagatccctgataatgaagcagacaagatccagtccatcgatctagccgttgactttattgcttctcatcctcaggctaagtgaaaagagaaacaaattcttcggtgttcatgcgtgcctcagctgtgtctacagattttgttaaagcctaataagaagtaaagaagcaaacaacattttctttttgtcatgagaatggataagcttttgtgttggctctactactctggtttcataagtattagatgtgtttctgcatgaattacgaggcctttcaaagaactttgttttctcttgattttatcttattaaacgcatcagacaaaaaaaaaaaaaaagnnnnnnnnnnnnnnnnnnnnnnnnnnnnnnnnnnnnnnnnnnnnnnnnnnnnnnnnnnnnnnnnnnnnnnnnnn

SEQ ID NO: 124358 - DNA, 975 bp, Arabidopsis thaliana
  unsure (1)..(975): unsure at all n locations
ctcaaatctctcctctcttctttcttcttcttcaatacaatacaatcaaaagaacagagagataaggttagagcaaaacactgtctgaaacaaacaacaaaaaaatggcttgctctaatctaacaacaatgtgggtttcatcaaaaccatctctttctgctgattcatcttccttatcattccgatctgttctcaagtgcccaactaacacttcctcacctccttcacgagcttcctctgtttcaccactccaagcgtctcttcgtgagctcagagaccgtatcgattcagtcaaaaacactcaaaagatcaccgaagctatgaagcttgtcgctgcagctaaagtcaggagagctcaagaagctgttgtcaatggacgaccattctcagaaaccctagttgaagttctttacaacatcaacgaacagcttcaaaccgatgatgtcgatgttcccttaaccaaagtcagaccggttaagaaagtagctctcgttgtcgtcaccggtgatcgtggattatgtggtggattcaacaatttcatcattaagaaagcagaggcaagaatcaaagagcttaaaggtctaggtcttgaatacacagtcattagcgtgggcaagaagggaaattcttatttcctccgtcgcccgtacatccccgtcgacaaatacctagaagccgggactttacctacggctaaagaagctcaagctgtggctgatgatggcttctctctggtttataagtgaagaagtcggcaaagtcgggcncttgtacacaaagtttggccctttgggcaaatcagaaccgggntccanacggaatggccttttcccctnaagggnaactggggcattaatgggacccgtgtgggtcctcngaaaatnggntttccgggtancggcaaanagggganttccngttnaaaagggctttgggnccanacggtttcccggtttgnatcngaaaccngtnngt

SEQ ID NO: 124359 - DNA, 581 bp, Arabidopsis thaliana
  unsure (1)..(581): unsure at all n locations
gaacctttacagatcagaggatccaatgtcgagattctcgctactaagcgctgaatttgatcaatctctgttctctttttccttcatttgattcccttttctgggtctctctaatttattggcgtcgttgtttccttatcctgaatccttatcttcaatcctctgttctgtttctcaaacctaaaaaagtttgaaactttcctgaaaaaatggcgactagaggaagcagatcggagaaagttaagagaattttccagcaattcgacgggaatcatgatggtgggcttaaccgtgaagagatggcggctcttgtcgtagctgttaaccctagggttaaattcagtgacgagcagatcaacgccattctcgatgaagtttttcgaacttacgctgaattcatcgatccaaacaagggtttgacctacgacggtctcctacgtacttacgacgacggtgccggagatgttgacagagatttcacgcattggggcttnagtaaacnctgttntancgnggttaaagggctnangggggtcggctnttccgntacggtnnaacctgtaannngaagaananaacac

SEQ ID NO: 124360 - DNA, 536 bp, Arabidopsis thaliana
  unsure (1)..(536): unsure at all n locations
agaggtttagcaaaccagagatagagagaggtttagcgaaaaatggcgatggccatggctcttcgaaggctttcttcttcaattgacaaacccattcgtcctcttattcgatccacttcatgttacatgtcttctttgcccagtgaagctgttgatgagaaggaaagatctcgtgtcacttggccaaaacagcttaacgcacctttagaggaggttgatcctgagattgctgacattattgagcatgagaaagctagacaatggaagggacttgaacttattccatctgagaacttcacatctgtgtcggtgatgcaagctgttgggtctgtcatgactaacaaatacagtgaaggctatcctggtgccagatactatggaggaaatgagtatataggcatggcaggaaaccttttgccacaaagggggggtcttttaagcgttttccggttagatcccccaaaattggggggggaattttccaacccttgttttggtgttcccggccaaatttcctgggnttcancgnnnttttt

SEQ ID NO: 124361 - DNA, 526 bp, Arabidopsis thaliana
aatacgactcacttagggaaagctcgtacgcctgcaggtaccggtccggaattcccgggtcgacccacgcgtccgccaattttgttatttttgttctctcttctctctcgttcatgtttcaaatctgtttctagggtttcacaaaccagagatagagagaggtttagcgaaaaatggcgatggccatggctcttcgaaggctttcttcttcaattgacaaacccattcgtcctcttattcgatccacttcatgttacatgtcttctttgcccagtgaagctgttgatgagaaggaaagatctcgtgtcacttggccaaaacagcttaacgcacctttagaggaggttgatcctgagattgctgacattattgagcatgagaaagctagacaatggaagggacttgaacttattccatctgagaacttcacatctgtgtcggtgatgcaagctgttgggtctgtcatgactaacaaatacaagtgaaggctatcctggtgccagatactattggaggaaatgagtat

SEQ ID NO: 124362 - DNA, 510 bp, Arabidopsis thaliana
  unsure (1)..(510): unsure at all n locations
taagacatcactcggtagaggccaggaancctttgatgtgttgngancaaattggtgcgcggccaagaccgggggggaaaccagtgcgaacacgcctgaaaatggttcagaggagtcggaatccccgcggccaaagcgtccgagaaatgaagaatgaagggaacctttcttccggatggtagatcataaaactgtggttttggtggagttgtagagtatgacttattaggagtagagctttcagtcttcttcaggccttttctcttttttttttctttcttaaaactctaattttctgattctcagctctctaggaagaaacaaataaagagcaattccatctttgtgatgtaattctgagtgcagagattttagatttagtgtttaggtggattttaaactagcttttatttcgagtttcttcctgtatactgcgttaatttcataattgcatgtatggaatcaactcatgtaagttagattaatcttcgaaaatatttttgcttttgc

SEQ ID NO: 124363 - DNA, 505 bp, Arabidopsis thaliana
cggtcgcgtgggtttatatattgtaacggtgaaaaatcgtcatctacttcttcttgaaaccctagttccaaaatctgcacacacactcagaagaagaagacgtcatctctctatctctgtctttctgctaatttcacgaagaatctgagaatatgccaaccatcagtgttggcagagaccgtttgttcgctgctcttggagaatcctatactcaggaaaaattcgaggaactgtgtttcagtttcggtatcgagcttgacgatgtgactactgaaaaggcaataatcagaaaagagaagcacatcgatgaagaagctgatgatgatgaagaaatcatctacaagattgaaattcctgccaacagacctgatttgctttgcctcgaagggcttgctcaatctcttcgcgttttcatcgagaaacaggagataccaacgtatactcttgctgacattagcaaagacaagatccttcaaatgaatgttaaacctgagacatcgaagat

SEQ ID NO: 124364 - DNA, 1068 bp, Arabidopsis thaliana
ggatcttgtcttggagtcgatcagtcggctgttagtatatttactgaagagatcattcgagctggatctgcagcagcattgtcgtcacttgttaaccgacttgacccagttcttaggaagactgctaacttgggaagttggcaggttattagtcctgtagaggtcgtcggatatgtcattgttgtggacgaattgctcactgtacagaataaaacctacgatagacctacaattatagttgcaaacagagtgagaggagaggaggaaatccctgatggtgcagttgcggtactgacacctgacatgccggatgtactatctcatgtttctgttcgagcaagaaatggaaagatctgctttgccacatgttttgattctggtatcttatctgacctccaaggaaaagatggaaaactgttgagcctacaaccaacctctgcagatgtagtctataaagaggtaaacgatagtgagctttcgagtccaagttcagacaacctggaagatgcccctccaagtatttctttggtcaagaaacagtttgcgggtagatatgctatatcatctgaggagttcacaagtgacttggttggtgctaaatcaagaaatatcgggtatctgaaaggaaaagttccttcttgggttggtatcccaacttcagttgcgttgccatttggtgtttttgagaaggttatctccgaaaaggcgaatcaggcggtgaacgataaattgctagtattgaagaaaactcttgatgagggagaccaaggtgctctgaaggaaatccggcagacactgttggggctagttgcacccccagaactggttgaagaactgaaaagtactatgaaaagttctgacatgccatggccgggtgatgaaggtgaacagagatgggagcaagcttgggcagccattaaaaaggtctgggcttcgaaatggaacgagagagcatacttcagcacgaggaaagtaaaactggatcatgactatctctgcatggctgttttggtccaagaagtcatcaatgcggattacgcattcgtcattcacacaactaatccatct

SEQ ID NO: 124365 - DNA, 760 bp, Arabidopsis thaliana
ggagttgttgtagacacagcagcttggtctctttcattggcacaaagagagaaaatctgaaattgagagagacagagaaaaatggcgtcgcttctgaaagcattcatcgatccaaagaagaacttcctcgctcgtatgcatatgaaagccatatctactcgccttcgcagatacggtctgaggtacgatgatctgtacgatcagtattacagtatggacatcaaagaggctatgaacagattgcccagggaggtcgttgatgctcgtaaccagcgtctcaagcgtgccatggacctctccatgaagcacgagtacctccccaaggatcttcaggcggtgcagaccccattccgtggctatcttcaggacatgcttgctcttgttgagagggaaagcaaggaacgagaggccttgggagctctaccactataccagcgcacactcccataagcattcctttccccttttcttgtggtcaacgctgcttctctgcataaatctgcaacattgatattttggtgctcactttctgaacagagctatttactatttgaaaaagcataaatctgtgatagttttcctaagtggatatgttgctagttacatttttatcgcttttgctggcttgaataaaatcgacgacgcaactcaagtctgtctcgatgattaaaaaaaaaaaaaaaaaaaaaaaagggcggccgctctagaggatccaagcttacgtacgcgtgcatgcgacgtcatagctcaactggagtgt

SEQ ID NO: 124366 - DNA, 858 bp, Arabidopsis thaliana
  unsure (1)..(858): unsure at all n locations
cgccttgtataatccgtttcactataggcaaagctggtacgcctgcaggtaccggtccggaattcccgggtcgacccacgcgtccgcggacgcgtgggagaacttcctcgctcgtatgcatatgaaagccatatctactcgccttcgcagatacggtctgaggtacgatgatctgtacgatcagtattacagtatggacatcaaagaggctatgaacagattgcccagggaggtcgttgatgctcgtaaccagcgtctcaagcgtgccatggacctctccatgaagcacgagtacctccccaaggatcttcaggcggtgcagaccccattccgtggctatcttcaggacatgcttgctcttgttgagagggaaagcaaggaacgagaggccttgggagctctaccactataccagcgcacactcccataagcattcctttccccttttcttgtggtcaacgctgcttctctgcataaatctgcaacattgatattttggtgctcactttctgaacagagctatttactatttgaaaaagcataaatctgtgatagttttcctaagtggatatgttgctagttacatttttatcgcttttgctggcttgaataaaatcgacgacgcaactcaagtctgtctcgatgatttatcattttcgaggtctggtttgctcttttattcttataattggtctctcagaggcgtttaagttttatgcattgaaatgtagaagtgccatgattccatattcttgggaatttggtcgagccatgttgatgtatcctttgcattgacagtttcatgtgagaaattaatgggagagaattatgagtttattaggcaccgatnaaaaaaaa

SEQ ID NO: 124367 - DNA, 511 bp, Arabidopsis thaliana
cagctctaatacgactcactataagggaagctggtacgcctggcgggaccgggcccgaatttccgggtcgagccacgccttcggggacccgttcggcccgcgttcggccaaccgttcggccaagccttcggccaaggcttccgaagaacctggggttaaagaaccagttccggtttggtttggttcatttctcacctcaccccggcacggagtccaaaccaccggtttatttctggcgttggtcgggaaatcagagttgagtataataaacacccttcacgacattctttgcttgtccaccttggtatctgaaattgggggactcttattataaaagatatgatgatttgttactctccaattacaacatgttctaggaatgctatcagtatcaagaggcatttaggctctcgcctctacggcgttgtggctcacggatcatctaaattctcctgctacagtcttttatcaggactttcaagaagacattataccggttttcgtgtatcgg

SEQ ID NO: 124368 - DNA, 774 bp, Arabidopsis thaliana
gcagcaccggatctggattcccgggtcgacccactcgtcaaattttcaacaaggataagagccggaagctcatcgccggtgaacggaactagggtttcattcatccccaaattgataacaagaaaatggctcatgcttgcgtctctacatcggcttcttctctcagattcacagctggattcgtctccgctagtcccaatggctcctctttcgattctcccaagctttctcttcctttcgagcctctccgttcaaggaagacgaataagttagttagcgatagaaagaattggaagaattcaactccgaaagctgtatattccggcaatctctggacaccggagattccgtctcctcaaggagtttggtccattagagatgatttacaagtcccttcttcgccgtattttcctgcttatgctcaagggcaaggaccacctcctatggtgcaagaacgtttccagagtatcattagtcagctcttccaatataggattattcgctgtggtggtgctgtggatgacgatatggcaaacataattgtagctcaactcctgtatcttgatgctgttgatcctactaaggatattgtcatgtatgttaattctcctggtggatcagtggcagctggcatggctatattcgatactatgaggcacatccggcctgatgggtccactgtttgtggtggtctccctggtcgtatgggagcttttctgcttaggggtggaacctaagggaaaaagataccgggtacccaaactccaggattat

SEQ ID NO: 124369 - DNA, 735 bp, Arabidopsis thaliana
cgatcaaagatgatatctcatcatctagatagtatttgtctcgatattagagacgtacacactttgtttagactcaaatcaatatgggatctttcgtgaaagaagagacgtcgtcgttgatgacagattttttggagaagtgcggtggttatgcggtggtggatggagggtttgcgacggagctacagcgccacggagctgatatcaatgatccactttggagtgctaagtgccttattacttctcctcaccttgttacaaaggtgcacttggattaccttgaatctggagcaaatatcatcataacagcatcttaccaggcgacgatacaaggttttgtggcaaaaggtctatcggtgggagaagcagaaaatttacttagaaggagcgttgaaatcacgtacgaggcacgtgagattttctacaacagatgcaccaagggttcatgggatttcgcctacgctggaaaagcttcccggagaccaattcttgtcgcagcttccgttggtagctatggagcttatctcgctgacggctccgaatacagtgggatatatggagattctgtgagtaaggagacattaaaggatttccatagaagaagagttcaaatcttagcaaaatctggagccgacctaatagcattcgagactattccaaataagctcgaagcagaggcttatgcggatcttcttgaggaggaagatatcgatattccggcatggttctcgttca

SEQ ID NO: 124370 - DNA, 413 bp, Arabidopsis thaliana
gtccgctctatttacttatccagaacgaagagagattcaaatttcgcaatgcgattctagtgaagcttctttttcttctgtacatggttatcgtcgtaaaatggcgtctatagacaatgttttctcactcggtactcggttctcaatcccagaaaaccccaagagatcgatattgaaacacgcgactacatcgagtttctccgcgagaactcaaactcgatggagagctccaattctgcgtcggtcgtttacagttttgtgcgaattgaaaactgggtcatctagctccggcgagacgaacaattcccctgctgctgacgatttcgtaactagggttttgaaggagaatcctagccaagtggaacctcgttaccgagttggtgataagctgtataatctgaaggagagagaag

SEQ ID NO: 124371 - DNA, 635 bp, Arabidopsis thaliana
  unsure (1)..(635): unsure at all n locations
agcttcnnnnnnnnnnnnnnnnnnnnnnnnnnnnnnnnnnnnnnnnnnnnnnnnnnnccacgcgtccgccccacgcgcccctgaacgacaactaaaaatataatttacaaaagaagaacaaaaaaatgtcgaaaacattcaaagccataagagaccggacatattcaggcgtaggagacctcatcaagctcctcccgaccggaaccgtcttcttgttccaatttttaaaccctgtcctaaccaacaatggacattgcctcctcatcaacaaatacttaaccggagttctcatcgttatttgtgccttctcttgttgcttcacttgcttcaccgatagttaccgaacaagagacggttacgttcattatggagttgccaccgtgaagggtctttggccagattcatcttcagtggatttgtcttcgaaaaggcttagagttggaggttttgtttcacgntgttcttctctcttatcggggttcagtgttattcccttgttggnngnaaanaaccgngnatttnttttatnctgggtttgggtcccctgggnaggctttntaaggtttttcccccggggntcggggaanttccgggggggttttaagggggtcccntgnanaggnncggnattgggg

SEQ ID NO: 124372 - DNA, 563 bp, Arabidopsis thaliana
tgattcttcagctctctacgactcactatttggaaagctggcacgcctgcaggtaccggtccggaattcccgggtcgacccacgcgtgcgaatcaaactcatcggagtctctcgaattcgtctttgaagaggaagagaagagaagaggcgagggagatatggattgggacaacgtagcagctgaggatgtgattgaggcgcttagagaagttgaatggtcgacgcctcctcgttcgtttggcgagttcttctctagattcgcgttccctcgctctttctctaaatggaagagccgtctcaaatgcaatctctactactataggacgaattactttatcttggtgattttcgttctgggtcttgcgcttgttacgagacctctggctcttgtgggtgctgctctaacagctttaagtatagctttccttaacgacagttttgcagctagttttaatgagaagtttataagaacgattaggcatttctccccacacatggctgcaaaaatgagacctccccacatgcctgtcatccgtggaagatcgacagcaagaaagacagta

SEQ ID NO: 124373 - DNA, 406 bp, Arabidopsis thaliana
actgagaacaaagacatccgcagaatcgatatccccagaatcactactctacaaattcgaatccaaagttcaaaccctattcttcgattttcgtagagcagattattgtttccctttaggtgtctccatagtttctgaagagagaaggatggattgggacagcgttgctgctgaggatgtgattgaggcgttaagagaggttgaatggtcggcgagtcctcgttccttggccgagttcttctccagattcgcgtttcctcgctctttctctaaatggatgagccgtctcaaatgcaatctctactactataggacgaattacttcatcctcttcgttttcgttctgggtcttgcacttatcactcgacctctggcaattcttggtgctgctcttacagctttaagc

SEQ ID NO: 124374 - DNA, 442 bp, Arabidopsis thaliana
cccacgcgtccgcggacgcgtgggctttctctctctttcgtttcccattttttctcttattactcatagatcctgattgatctgaaaaaatggtgaagaagcaatcgccattacacgttgtcggtgtgtctgttttgatggtgttgttatgcagtgttaattacagtctctgtgaaaagatcaaaacgtataagctcacaagaggaagcttaagtgttactttcactaactatggtgctgtcatgacctctcttctcctccctgacagacatggaaaacaagacgatgttgttcttggatttgatactgttgatggttacaagaatgatacaacatattttggagcaattgtgggaagagtggctaatagaataggaggtgctaaattcaagttaaatggtcatctctacaaaaccgatcccaacgaaggccgtaacactct

SEQ ID NO: 124375 - DNA, 686 bp, Arabidopsis thaliana
ctacgatcgaccatcgccgagtctgcttcttcttctctctctctctctctagtggtcacactcacttcacacccgtgaaaaaaccctaggaaccaaatatggtgaacctctcgagatccgtcgcgttgatctctgtattcctccttcctttacttagcttctctttctccgtcgataatccgacggatcggcgtgttcttgttcttctcgatgatttatcactcaaatcctctcattctatcttcttcaacactctcaagtctcgtggattcgatctcgatttcaagttagctgaagattcgaagcttgcgcttcaacgatacggccagtacttgtacgatgggttgatcatcttcgccccatcaacagaacggtttggaggatccttggattcgaaatccattgctgattttgttgattccggtcgtgacttgatcttatcggcggatactgctgcatctgatttgattaggggtattgccacagagtgtggggttgatttcgatgaggattcttcagctatggttattgatcatactagcttctccgtctctgatgttgacggcgaccacaccttgattgctgccgacgatttagtgaaatccgatgtcattttgggaaaaaccaagattgaggctcccgtgctcttcagaggagttgcacattcgttgaaccctactaacaat

SEQ ID NO: 124376 - DNA, 507 bp, Arabidopsis thaliana
  unsure (1)..(507): unsure at all n locations
cgagaatgatttagtgatcactccagggcctgcatacagtggttgtcaaacagatggtggacttacttttccactgaaccctcctggaataattaactcatataatgaggacccacacagcatagctgggggaagttcaggcttaggtcttttcaatgatgatgatgaatttgatacgcccctttggtcatttccttctgaaactccagaagcccctgggttccaactatttagatctgatgctgacgtttcaggaggtttagttggtttgcatcatcatagtccactaaactgttctcctgaaataaatggaggttatacccatggctcctgagacatcaatggcatctgttcctgtggttcctgggtctactggccgatctnaagcaaacgatggnctagttgacaanccccttgcattggtagggncggtcccncannttaaaaattttttgncaacaaaaccagatgttaantcagnngggtttnaaaccaantgntatttgc

SEQ ID NO: 124377 - DNA, 454 bp, Arabidopsis thaliana
tcattacctaaaagaaggatttattacggtgacgccgcttggagctctatctcagactgatgtggattgccaaaactactacaaagaatggcttcccaagattacaaaccagtcatgctcctcctcatccctttgatgctccaacatgagagaaaataaaaactctattaggaaattacccattgtggaccacaatttgtggtagacctattattatatcagtaccagttctttagttttcttaagtcttgacttactattgttgtgagcagcaaaatagttgttgttacaagtccattaattatcgtgagcagcaaaatagatatcgagtccgcgacactatgttgaaatatcaaggattcttaacaaaaacaaaaaaaaaagggcggccgctctagaggatccaagcttacgtacgcgtggatgcgacgtcaaagtcttgtagagtgcacct

SEQ ID NO: 124378 - DNA, 919 bp, Arabidopsis thaliana
ctgaatttccgggtcgacccacccgtccgagtggttcgacgaggaggaagaagaagaagaggaggagggaggatgaagaagaagaggcaccagacgagtttgcctacaagcccaatgggcttctctataagatggcacaaaagcccatttctataactgttcataggttggcccataaaccaattggtgtaccaaagagaaactctcgatggcctatggctgatgaattcgacaccaaatccgatctgtcgactccggtggttcactctctgccgccgaggccaagggtggctcagcttgctcgatcaacaaaaccaccgtccacggtggacgacaccgttggggccgcttgcttcaacacatgtgactactcttggaagtccactaacactgaatcatttggcccaaacacaaaaacccaatttcaagcccaaaactttgtcaacaaatcaatgggtgacggttggataaatggttgcaaggaccgaaggaggtctctcttgtccgttgagcctttctgcattgccacataagaagacccttaagaccaaaaaggggtaatttacaaagaagcataaattaagcttatgatattatctatatatgtgtatatgtagtcgagtatgtgttttactcgaatatatatgcatattaacccaataattgttgttgatcatggttttttctaccttatttttttcctctatatgttttaccacttaataccttgttggtttgtgggtaaaaagaaagataattataaaaagaaaataaagaatcaagagtaggagagggaagaaagttgaggagtgaaaattagaagtataatttattgtttttaatcaggttttttaccttgttggagtaagaaatatttaatgatgaatgttgtgtgttgtgcaaaagagatgaattatat

SEQ ID NO: 124379 - DNA, 715 bp, Arabidopsis thaliana
  unsure (1)..(715): unsure at all n locations
gttgcccaaccnttttgacccggggtccttttcccccgggnccagggngtcngttnccaataaaaaacccccgtccccgggncnccccntgggnccntttgttaaaacctnngcctaccctgnagnccccntacccngatcatttggccccnaacncaaaaccccaatttcagccccaaaactttgtcnaacaaatcaatggggtgaccggtggataaatggttgcaaggnccgaaggaggtctctcttgtccgttgagcctttctgcattgccacataagaagacccttaagaccaaaaaggggtaatttccaaagaagcataaattaagcttatgacattatctatatatgtgtatatggtagtcgagtatgtgtttttctcgaatatatatgcatattaacccaataattgttgttgaatcatggttttttctaccttatttttttcctctatatgtttttaccacttaatcccttgttggtttgtgggtaaaaagaaagatatttataaaaagaaaataaagaatcaagagtaggagagggaagaaagttgaggagtgaaaattagaagtataatttattgtttttaatgaggttttttcccttttaaaaaaaaaaaataaaaaaaaccaaacccgaagggcggccgctctagaggatccaagcttacgtacgcgtgcatgcgacgtcatagatcttgtagagtgcaccta

SEQ ID NO: 124380 - DNA, 897 bp, Arabidopsis thaliana
acgactcactatttggaaagctggtacgcctgcaggtaccggtccggaattcccgggtcgacccacgcgtgcgcggacgcgtgggctgttttccaagagaagtttatcttcactttgattgaagggcttagggatcttaaggttgctgtctggaatagcaacactctctccactgatgacttcattggcaatgcaacgattcaattgcagaaagttctttctcaggaatacgacgactgtacctggactttgcagagtaaaactgggagattcgctggagaagtacaactcctactgcattatgcgggagcaaagaaacataattacgggtctgcgccatcagcaccgtatgcacctcacgtacctcaatactcagcaccgccttctgcatctccgtattcaacagcaccaccatactctggaccatctctatacccacaagtacaacaataccctcagccatcaggataccctccagcttcagggtatcctcctcagccatctgcctatccacctccctcaacctcgggctaccctccgatcccttcagcttacccacctcctccgccatcctcagcttaccctcctcaaccataccctccgcaaccatcatattacccacaaggtccatatccaggacaatacccacctcctccatactagagcgtttggcgtttagaatttgacgggaagtggtcatgatgtatagattatagttatggtgttttctagaatttggcagacgaatttctttgttttgttttttttatatcatcttccttgtgctattgctagcgtgatggttaatttttgagttggtcagtgaaacttattgagaaggttggatcttttcatgtttaaccagatcgcagatatattgaatattactctaatcct

SEQ ID NO: 124381 - DNA, 452 bp, Arabidopsis thaliana
  unsure (1)..(452): unsure at all n locations
ttgctttctgtcaaaccctaataatcctcgattgttttctttcaaattcatgtcgatgatggcgggtatacaaggccagattctcgaggtcactgttgttgggtgccagaaattgaaagacacggaatggttttcaagacaagatccatacgtcgtccttgagtatggtggcagaagtcaccgtaccagaacctgcacagatggtggaaagaacgctgttttccaagagaagtttatcttcactttgattgaagggcttagggatcttaaggttgctgtctggaatagcaacactctctccactgatgacttcattggcaatgcaacgattcaattgcagaaagttctttctcaggaatacggcggctgtacctgggctttgcagagtaaacctgggagatccgctggcgaagtaaactcctacttcatatggggncaatggaaccattatt

SEQ ID NO: 124382 - DNA, 996 bp, Arabidopsis thaliana
aacgatctgatgagtagcagttttgtcatctctctcactctctcccgacgatggctcgcttagtattttctttaaaccttccatctagtcatggattcaatctcagtcctcgaaatcttcaatctttcttcgttacccaaacaggagctccacgatttcgcgctgttcgttgcaaaccaaacccagaatcttccgaaaccaaacaggagaaattggtaatagataatggtgaaacttcatctgcatcgaaggaagtggaatcatcatcatctgttgctgactcttcttcttcttcttcttcgggattccctgaatctcccaataaggatatcaatagaagagttgcggctgttactgtaatcgcggctttgtcgttatttgtatcgacaaggctcgattttgggatttctttgaaggatttaaccgcttctgcgttgccttacgaggaggcgttatcgaatgggaagccgactgttgttgagttctatgcagattggtgtgaagtttgtcgagaactagctcctgatgtttataaaatcgagcagcaatacaaggccaaagttaactttgtgatgctaaatgtgggcaacacgaaatgggagcaagagttggatgagtttggtgttgagggtattcctcatttcgccttcctcgatagagaagggaacgaagaaggtaatgtggtcgggaggctcccaagacagtatttagttgaaaatgtgaatgcgcttgcagccgggaaacaatcaattccttatgcccgagccgtgggacagtactcaagctcagagtctcgtaaggtgcatcaggttactgatcccttaagccatggataaagagagtggcatcactatcatgcttctggcagatgatagaagttgtttctaactctatagtgcacaaaaaaagtagacaggaaaggaaagtcggaaagtagcaatgtttcaaattgatcaaaagaatcccattggaactataaaaattgatatcggtttg

SEQ ID NO: 124383 - DNA, 586 bp, Arabidopsis thaliana
  unsure (1)..(586): unsure at all n locations
agctcctagcaatcagcctaatgaggtctatcttgtatgggatgatgaagcgatgtctatggaggaaagaagaatgtccttaccaaaatacaaagtgcccgatgaaaccagccagatgaactcgataaatgcagcgatagacagacgaatctcagagagtaggcttgctgggcggatggcgttttagaatttggcaccaaaccaaaccagcgtcaaagaaaaggcgatatggatgaaggctttgttacaacaacaagtcttcactcacttttgttcagatactgaatttatgatctgattttaagttattaactttccatctgttgtattctttagccaggtgagttagtttaccattacattgtttagggatctcagagatgttttttctcagaagtttagtcctttttttttttggtcgttggagacttggaggaagaactttgtctccttttcttctgaattgatcaaagtattatattatacagattcacccaaaaaaaaaaaaaaagnnnnnnnnnnnnnnnnnnnnnnnnnnnnnnnnnnnnnnnnnnnnnnnnnnnnnnnnnnnnnnnnnnnnnnnnnn

SEQ ID NO: 124384 - DNA, 504 bp, Arabidopsis thaliana
gtgtgagttgacgacagaagggggagaaacgaagagttaaaaaaaaagagaagaaaagccaaaagcttcggtcgcgcaagatcgcttcatttgtttctagagtgattcatggattctttaaactactaataatggatttttgttgtgtcttaatgaaataatgggagcagctgaagcaagagcattgtggcaaagaacagctagtcgttgctttgttgttcatgaggatgctaagatggctccgaggttagcttgttgccaacaccaacaatcttcttcgggcaacaccgaaaaaaacagcttttcttccggaagttttggagattcctctgatttctcttgtgataccaaatggtggcttaagggatcaactggttttgatgaggaggttacaaactcctttcttgaagataccaaatgcaagaaattgcatgaatttgtcgacttaatcggaatacgagaagaagaagactacagctttattagcaagaaagctgacgctac

SEQ ID NO: 124385 - DNA, 687 bp, Arabidopsis thaliana
gcaggtaccggtctcggattcccggctcgacccacgcgtccgcaaaattcccactcaccacacacaacaaaagaatagtgatcgaagctcatggcgtctcttgcaaccgtcgccgctgtgaaaccatccgccgccataaaaggactcggcggcagctcactcgccggagctaagctctccatcaagccttcccgcctgagctttaaacccaaatccatccgggctaatggtgtggtggctaagtatggagacaaaagtgtctactttgacttagaagatttgggtaacacaacaggtcaatgggacgtatacggctctgatgctccttctccttacaatcctcttcagagcaagttctttgagacattcgctgccccattcacaaagagaggattgctcctcaagttcttgatccttggaggaggctctttgcttacttatgtcagcgctacctctaccggcgaagttcttcccatcaagagaggtcctcaggagccgcctaagctcggtcctcgcggcaagctctgatctatattcatgttacctttctcttcttccttctaaaactcatcaacatttctcaatactgcaaacccttttaagtaattttatgtatattatgtttatctgttacatttgaaacgttttttcttcccctaattttacaaaaaaaagaaatcttttttt

SEQ ID NO: 124386 - DNA, 911 bp, Arabidopsis thaliana
gcgacaaaagaatagtgatcgaagctcatggcgtctcttgcatccgtcgccgctgtgaaaccatccgccgccatggaaggactcggcggcagctcactcgccggagctaagctctccatcaagccttcccgcctgagctttaaacccaaatccatccggtaactaaaacttttcatttattcattaattaggatcaaaatgccactataaccacactataaattcaaaatatattaatagatttttgctggctgaagtgtgttttaaacgatagatatagtgatgattaattagctttaaaaggattaaattctgataatttcatctcttgtttgtgattaaattagcttgaggttgttgtgttcatgtgtaatagggctaatggtgtggtggtctaagtatggagacaaaagtgtctactttgacttagaagatttgggtaacacaacaggtcaatgggacgtatacggctctgatgctccttctccttacaatcctcttcagagcaagttctttgagacattcgctgccccattcacaaagagaggattgctcctcaagttcttgatccttggaggaggctctttgcttacttatgtcagcgctacctctaccggagaagttcttcccatcaagagaggtcctcaggagccgcctaagctcggtcctcgcggcaagctctgatctatattcatgttacctttctggtcttccttttaaaactcatcaacatttttcaatactgcaaacccttttaagtaattttatgtatattatgtttatctgttacatttgagacgttttttcttcccctaaaaaaaaaaaaaaaaaaaaaaaaaaaaaagggcggccgctctagaggatccaagcttacgtacgcgtgcatgcgacgtacatagctggtggatagt

SEQ ID NO: 124387 - DNA, 859 bp, Arabidopsis thaliana
  unsure (1)..(859): unsure at all n locations
cccaatggactggccgttggaggggcccgtggcaggattccgggcggaattcccgcgtccgccacaaagagagaaattaacatggcgtcttttgcaaccatcgccgccgtacaaccttctgccgccgtgaaaggacttggaggtagctctcttgccggagctaagctcttcatcaaaccttctcgccaaagcttcaaaaccaaatccaccagagctggtgctgtggtggctaagtatggagacaaaagtgtatactttgatttagaagatttgggtaacacaacaggacaatgggatgtgtatggatctgatgctccttctccttataacccacttcagagcaagttctttgagacatttgctgctcctttcacaaagagaggtttgcttctcaaatttttgattcttggaggaggctctttgcttacatatgttagtgcgaactctaccggcgatgttcttccgattaagagaggtcctcaagagccacctaagctcggtcctcgcggcaagctttaaattagctttctaaaaactttcaaaaaggcagaaacttttctccccaattctatgaaccctatttatgttcnagaaaccttcccggcgcgaaaaattgctttcccggtcatttattttcaaaagggggcggccccctttaaaggaacccaactttcctccccccgtgccttgccaacaaaaaaaaaccttttttaataggggggcccccctaaaaattcacaaattccccgtgggccgcggggttgtttaacaaacccctccgggggacctgggggaaaaaaacacccgggggggtttccccccccacacttaaaaatcggcccttggggaagaaaaaaaa

SEQ ID NO: 124388 - DNA, 641 bp, Arabidopsis thaliana
  unsure (1)..(641): unsure at all n locations
gcttttttccttgcccggaaagcttaaaggcttttttcatccaaaacctttcttggcccaaaggcttccaaaaccccaaatccccccaaaagctgggttcttgtgtggcctaagtatggaagacaaaagtggatacttttatttagaaaatttggggaacacaacaggacaatgggatgtgtatggatctaatgctccttctccttataacccacttcagagcaagttctttgagacatttgctgctcctttcacaaagagaggtttgcttctcaaatttttgattcttggaggaggctctttgcttacatatgttagtgcgaactctaccggcgatgttcttccgattaagagaggtcctcaagagccacctaagctcggtcctcgcggcaagctttaaattagctttctaaaatctttcaaaaagtcagaaactttctccccaattctatgaaccctatttatgtatattgtactgtgttgtgttaattgctttgtaagctagtgattctgaaaatcagttatgatgaatcaatgaaattgccggccgagtctgctacancanannnnnnnnnnnnnnnnnnnnnnnnnnnnnnnnnnnnnnnnnnnnnnnnnnnnnnnnnnnnnnnnnnnnnnnnnnt

SEQ ID NO: 124389 - DNA, 595 bp, Arabidopsis thaliana
  unsure (1)..(595): unsure at all n locations
cggacgcgtgggctcacttactttggcaacaaacaaacaacaacaaagagagaaattaacatggcgtcttttgcaaccatcgccgccgtacaaccttctgccgccgtgaaaggacttggaggtagctctcttgccggagctaaggctcttcatcaaaccttctcgccaaagcttcaaaaaccccaaatccaccagagctggtgctgtggtggctaagtatggagacaaaagtgtatactttgatttagaagatttgggtaacacaacaggacaatgggatgtgtatggttctgatgctccttctccttataacccacttcagagcaagtnctttgagncatttgctgctnctttcacaaagagaggttttcttctcaaattttttgattcttggagggnggctctttgcttacanatgttagtgcggacctttaccggggntgtcttcccgttaagggggggncncaaggggcncctaagtcggncntgggggaaagntttaaatnggnttctaaaactttaaaaaggcagaacttttcccaattttttgncccnttttggnntggncccggnngggaatcctttaagggggtnt

SEQ ID NO: 124390 - DNA, 396 bp, Arabidopsis thaliana
cgcagattgagctccagagagggagagagagagaaagggggcgctttagggtttctgcagttcctggttcagtctcaccattctatttaagggttttaatctctctgcttcatttggtgactaacatttatcgtcgagggttgtgacgatctccgagaatgtatagcggatctagcgatggtgagagtcatgatacatcgacgcagaggaagatcccaccggcgtcttcgatgctttgggttagaaatctacgacgatatattggttccggtgccggattaggatccgaagctctaatggagcttgagacgaagagaatcttgctcgagatttttaaagagaaacaacaaaaaagccaagtagcatgcacaataccgagtttctacaagaagaaac

SEQ ID NO: 124391 - DNA, 1075 bp, Arabidopsis thaliana
  unsure (1)..(1075): unsure at all n locations
gcgttactgtgtgaaaaattcttcttcttcttcttctcagcgattgaatcgaaccaagagcgaaaatgagaaatttcagtgtcttcgagagattctctaaagcttttaaagatcatccttctctcaccaggattctcgtcgtctccacgatcagtggtggtggacttatagcgtattctgaggcaaacgcatcttatggagcaaatggtggtgctgttgttgaaactggaaccaagaagaagaaggtggtgctgctcggaactggatgggctggaactagtttcttgaagaatttgaacaattctcaatatgagggtcagattatatcgcctcggaactactttgctttcactcctttactacctagtgttacttgtggaactggtgaagctcgtagtgttgttgagccttttcgaaacattggatgtaagaatgttgatacttcttacttggaggcagaatgtttcaaaattgatccagctagcaagaacgtttactgccgatccaaacaaggccttagttcaaatggaaagaaagaattttctgttgactatgactaccttgtaatcgctactggagctcagtctaacacctttaacattcccggcgtggaggagaactgtcatttcctcaaagaggttgaagatgctcagagaatccgtagtactgtcattgattcatttgagaaggcaagtttaccnggnctaaacgaacaagagagaaagagaatgctacattttgtagttgttggtggtggaccnacaggtgttgagtttgcttctgagcttcatgattttnttaacgaggatctagtcaaactatatcctaaagccaaaaacttagtgcagatcactcttctagaggctncagaccacatcttgacccntgtttgncaagaggatcnncagagttttctnaaggnaaatttnnctagagntggtatttatgtgaaattagggtctatngggggcaaagtgaatgctaagggaatttcttcaaaaccccagcnngggngggctaacntttncctnntgggttaatttttggcacctgnatttgggccnncccnngccaa

SEQ ID NO: 124392 - DNA, 599 bp, Arabidopsis thaliana
acattaagaaaatagttgaggagacaagggctcgaataaagattctcgatggtcctccaggcacaacagaaagagctgttatggtttctggtaaagaagagcccgaatcatctctacgaccttctatggatggccttcttagagtccacatgcggatagttgatggtttggatggtgaagcttctcaagcccctccgccttcaaaggtgtcaacaagattactagtcccagcatctcaggctggaagtttgattggaaaacagggaggaacagttaaagctattcaagaagcatccgcttgtatagtcagagttcttggatcagaggatttacctgtttttgctcttcaagacgatagggttgttgaagttgtggcggaaccaacaagtgttcatagagccttggagctgattgcgtcacatctcagaaagttcttggttgatcgtagcatcatcccattctttgaaaatcagatgcaaaagccaactcgccaaatggaccatatgccaccaccacaccagtcatggggtcctcctcaaggtcatgccccaagtgttggtggaggaggctatggtcacaacccacctccatatatgcaa

SEQ ID NO: 124393 - DNA, 577 bp, Arabidopsis thaliana
  unsure (1)..(577): unsure at all n locations
ccctcgttttcgacgtatacaaagcttgattcaaatcgggccgcccgaatatcgggtgtatcaaaatctaattcctcttatcttctctcttcctctcctccctgggttctttcccaaaattcaacttccattaaaaggccactgccctttatcatgcctaaaattcctcaggatctaaataaaagtatagaacaatgggtggatgtgtgtcaacccattcaaaagcgattaggcctaggaggaaaggccgtcgtagatcttccaaacacttttctaaagtgtctgatattgttcctcatgctaatattaggaaggcctagtgacgttgggagccgagtttcttttgctatctcgcaagatgatgcatggtttgactctgtcagtgttcttgattcggatgaggatgaggactttatcagcttacctgaagaaaacgtaccatcaacgccatcagcgggtggtgcgactggtaacaatataccaaatggtcaagtagttcagtttgaatcttcttcgtgcttcgtggatgggtaaggaaagtacgaagaatccttgggcttcttcagnagcgggggga

SEQ ID NO: 124394 - DNA, 452 bp, Arabidopsis thaliana
atcactttctctcttcctttacagagaaagcagagagagagacaaagggaaagctaaatccgtgacccggatccgaaataatcgggttttcaaaatctaattcctcttatcttctctcttcttcttcttcctgggttcttcccaaaattcaatttcattaaaagggcactgccctttatcatgcctaaaattctcaggatctaaataaaagtatagaacaatgggtggatgtgtgtcaacccattcaaaagcgattaggcctaggaggaaaggccgtcgtagatcttccaaacacttttctaaagtgtctgatattgttcctcatgctaatattagaaggcctagtgacgttgggagccgagtttcttttgctatctcgcaagatgatgcatggtttgactctgtcagtgttcttgattcggatgaggatgaggactttatcagcttacctg

SEQ ID NO: 124395 - DNA, 542 bp, Arabidopsis thaliana
  unsure (1)..(542): unsure at all n locations
cagctctactacgactcactatttggaaagctggtccgcctgcaggtaccggtccggaattcccgggtcgacccacgcgtgcgccacgcgtccgcggaaacagagaaaaagagagaaaaatgctgagtagatcagttgcttctgctgttacaccggtctcatcttcttctctcttaccaaactcaaagcctatcttctgtctgaaaaccctctccggttatcgttcttcttctttctgtggcggctgtattcgtagaatcaaccataagcctcttcgaatgacgagttccaatattacaccaagagctatggccacacaacagcttgagaacgctgatcagctcattgattctgtcgaaactcttgatatgcttcgtgccaagggaaagagattggtttttgtgacaaacaactcaacanaatctagganacagtatggaaanaagttcgagactcttggcctgaatgttaacgaggaggagatattngcttcatcttttgctgctgctgcatacttgcagtctattaaatttccaaaagat

SEQ ID NO: 124396 - DNA, 519 bp, Arabidopsis thaliana
aagaagcggaaacagagaaaaagagagaaaaatgctgagtagatcagttgcttctgctgttacaccggtctcatcttcttctctcttaccaaactcaaagcctatcttctgtctgaaaaccctctccggttatcgttcttcttctttctgtggcggctgtattcgtaaaatcaaccataagcctcttcgaatgacgagttccaatattacaccaagagctatggccacacaacagcttgagaacgctgatcagctcattgattctgtcgaaacttttatcttcgattgtgatggtgtgatttggaagggagataaattgatagagggagttcctgaaactcttgatatgcttcgtgccaagggaaagagattggtttttgtgacaaacaactcaacaaaatctaggaaacagtatggaaaaaagttcgagactcttggcctgaatgttaacgaggaggagatatttgctttcatcttttgctggttctgcatacttgcctattattaatttcccaaaag

SEQ ID NO: 124397 - DNA, 513 bp, Arabidopsis thaliana
cacacacttcatcttctctaaaaccctaaaatttaaacacaagatgggtttggttagatcattgtgcttattaataaccttccttaattgtctcatcatctcggttcatggccaagccaccgcaaggcctggtcctgtttccggcactaggattgggttttacttaactacgtgtcctagagctgagactattgtccgaaacgccgtgaatgctggtttcagttctgaccccagaatcgcacccggaatactgagaatgcatttccacgactgttttgtccaaggttgtgacgggttcgatccttatatccgggagctaacaaccgagagaaccgccggtccgaacctcaatctccaagggatttgaagtcatagacaacgccaaaacgcagctcgaagccgcgtgtcctggagttgtctcttgtgctgatattttagcattagccgctcgtgacacagtcattctcgtaaaccttaattatttcataaacgttatacgtaattaatgcatta

SEQ ID NO: 124398 - DNA, 655 bp, Arabidopsis thaliana
  unsure (1)..(655): unsure at all n locations
gcggtccgaacctcaatctccaaggatttgaagtcatagacaacgccaaaacgcagctcgaagccgcgtgtcctggagttgtctcttgtgctgatattttagcattagccgctcgtgacacagtcattctcactcaaggaacaggctggcaagtaccaacgggacgtagagatggtagagtttctttggcttcgaatgctaacaatctccctggtccccgtgactccgttgccgttcaacaacagaaattctccgccttgggactcaatactcgtgatctcgtcgtcctcgtcggaggacacacgatcggaacagcaggatgtggtgtattcaggaacaggctattcaataccaccggacaaaccgcagatccaaccatcgacccaacatttttggcgcagtttcaaacacaatgttcccaaaacggcgacggttcagtgcgcgtggttcttgacaacggagcgggaagcactttgggacacttttttacttcaacaaacctaaggccgtgggggtggagttttcccaaatccggttcaagtcccttttggccngttccagncaattnnggcccnttggggaaaatttttnggnccctnngaagctcctttaaaggttttttttnngnggtaaatggnaaaanntaaatttnggg

SEQ ID NO: 124399 - DNA, 717 bp, Arabidopsis thaliana
  unsure (1)..(717): unsure at all n locations
tcaatacgactcactttagggagggctggtgcgcctgcaggtgccgggccggaattcccgggtcgagccacgcggtgcgctcgaacaaaaacaacaaacgcagagaaactcaaaactcgaaaacgtttcatatagcaacgatgctttcttcatctccaacttcctttactcatccatttctctcttcttctccgcctctatctccgatatctccgccgtctcgcacggctcggatctctccacctctcgtctccgcctcttgctcatacacctacacggaagattcgccgagactgcatcagatcccgcggcgattgacgacggtgccagcttcgctttacgatgttcttgaggttcctttaggcgcgacgagtcaggatatcaaatcggcttaccggagattagccaggatctgccatccagacgtggcgggaactgatcggacttcttcttcatcggcggatgaattcatgaagatccatgccgcttactgtacgctttctgatcctgagaaacgctccgtttatgatcggaggatgttgcgacggagcccgtcctttgaccgtcggaacctccgggttgggaaggtacgtcggacggaactnggaaaccgatcagtgttgtagtnagtaactcggtaccnagtaagagaccggtaattagtgaaaaacgagcataaatcctgaattaanangnagaacatgncgggacnatnta

SEQ ID NO: 124400 - DNA, 851 bp, Arabidopsis thaliana
  unsure (1)..(851): unsure at all n locations
cctcctcgaacaaaaacaacaaacgcagagaaactcaaaactcgaaaacgtttcatatagcaacgatgctttcttcatctccaacttcctttactcatccatttctctcttcttctccgcctctatctccgatatctccgccgtctcgcacggctcggatctctccacctctcgtctccgcctcttgctcatacacctacacggaagattcgccgagactgcatcagatcccgcggcgattgacgacggtgccagcttcgctttacgatgttcttgaggttcctttaggcgcgacgagtcaggatatcaaatcggcttaccggagattagccaggntctgccaatccagacgtggcgggaactgatcggacttcttcttcatcggcggatgaattcatgaagatccatgccgcttactgtacgctttctgatcctgagaaacgctccgtttatgatcggaggatgttgcgacggagccgtcctttgaccgtcggaacctccgggttgggaagctacgtcggacggaactgggaaaccgatcagtgttggtagtgagttaactcggtgaccgagttagtagaacgagttaattagtgtaaatacgaagccataaaatccttgtaatttaatcatagtaagctaacatggacgggaactagtgtgctaacatacgccatgtgcttaccgtacgctccctcccccacgagcgatcggtgccgtttgtatccgtgtttacgtaggatctacgcgttttttttaccttgtgaatcctattagtttaaataatcaatgaaaatcatataaaaagatattttcttttggtttaaaaaaannatnnanttnantannag

SEQ ID NO: 124401 - DNA, 577 bp, Arabidopsis thaliana
taggtgccactatagaagagtctatgacgtcgcatgcacgcgtacgtaagctcggaattcggctcgagcaagtttagagattttttgaaagaacaaacagatatcgaattcgagttttgcaaaaatggtatcggtggaggaacctttatctcattccaattccactcgctttccgttaacaaccgatttctacggttcatcatcgccgtcggcggcgaggttacaccgtcaagctggccggtcgatgagaacagtgagatctaacttctatcaaagcggagatcaatcttgctcattcgtcggctcaatcggcgataaatcagagtatgcgtcggagtttctctcggattccgtcatcgacatgagactcggcgagcttgctttgaaaaacagtaattctctcaattcaaacgcttcctcaatgaaagaggaagcgtttctcgacatttctcaggcgtttagtgatttttccgcttgtagtagtgatatctccggcgagttacagcgtcttgcttgcttgccgtcgccggaggctgatagaaatgagagcggcggagataacgaagcggagcatgat

SEQ ID NO: 124402 - DNA, 551 bp, Arabidopsis thaliana
ctcaaaaaaatctaacattactctctcaacacatctctctttcttctccatttccttcttctcgttcattctcttatttaagatttaaatctgctcaaatgcttgtaaacaaatttcaagttctttaaacgatttccttttcaagaaaaatccttctccttcttctttttaccacatagatcttcttgatctacaatggattctgtttctctttctgaggttactgtcattaaaggaacaacacatttgggttttatgcacagtttcagacagccattttgtggtgtcaaaatatctccaaagttctatttatccaaagttgatggaccaaaggcaatatcttcgagcagcaacacaaagagtcaatttgtttatggaggaggaagcatagctgcaacttcagattcaggttataagatgaatggagtaaacctaaaaagcagaacattgatgacttctgcagttaaagaaagatcattacttgatgcttatgatgatgagtatggtggagtaatagtagatcatggagaattaccatcaaacccttatgc

SEQ ID NO: 124403 - DNA, 902 bp, Arabidopsis thaliana
  unsure (1)..(902): unsure at all n locations
nnnnnnnnnnnnnnnnnnnnnnnnnnnnnnnnnnnnnnnnnnnnnnnnnnnnnnnnnnnnnnnnnnnnnnncaaaccacgccgagagtgagaactctgctcttcttcttcttcctccgccatagctacaatgcttagtctctcaatcgctacgccggggacggcggcgatttttcgtagaggaactgcttcggcgacttcaacttcgtcttcattccatggtgtcagaatccagcaccaggtttctgctcgcgtccccgcggcggcgacgatatcgtcgtcgtctcctaaaccgtcggtggtgatgatgtcgaaaagagaggcggaattgaaagagataagatcgaagacgacggagcagttacaagaggaggttgttgaccttaaaggtgagctctttatgcttcgtctccagaaatcggcaaggaatgagttcaaatctagcgactttcgtcgtatgaagaaacaagttgctcggatgttgacggttaaaagagagagggagatcaaagaagggataaagaaaaggttgtcgaggaaacttgacagacaatggaagaaaagcatagtaccaagaccacctccgtctctgaagaaacttcaagaagaagaagctgcagaagaagcagctgaagctgctaaatctgcttgaaaaaacccgctattgatttatggtctcttccttgttgtttcctcgagatgttgttaatctctgttatttgttgctgaaccatcttgtatttgtttttcttttggtgtaaacactttccttatcaagtagtttacatgaatcccttnnnnnnnnnnnnnnnnnnnnnnnnnnnnnnnnnnnnnnnnnnnnnnnnnnnnnnnnnnnnnnnnnnnnnnnnnnnnnnnnnnnnnnnnnnnnnnnnnnnnnnnnnn

SEQ ID NO: 124404 - DNA, 648 bp, Arabidopsis thaliana
  unsure (1)..(648): unsure at all n locations
gagaagtgagaactctgctcttcttcttcttcctccgccatagctacaatgcttagtctctcaatcgctacgccggggacggggccgatttttcgtagaggaactgcttcggcgacttcaacttcgtcttcattccatggtgtcagaatccagcaccaggtttctgctcgcgtccccgcggcggcgacgatatcgtcgtcgtctcctaaaccgtcggtggtgatgatgtcgaaaagagaggcggaattgaaagagataagatcgaagacgacggagcagttacaagaggaggttgttgaccttaaaggtgagctcttttatgcttcgtctcccggaaatccggcaaggaattgagttccaaatctaagcgacctttccgtcggtacttgaaggaaacaaggttgctccggatgtttgaccgggtaaaagaggacantgggcgttcaaaggaaggggggttaaagaaaagggttntccaggaaacttggcagcaatgggagaaaagctttgnccaagaccanctccggntctgaagaactncagaagaaaanctccnaaaacaccttaacnggaaacttnttaaaacccgattnttttggcccccctgtgtccccnaaangggaanccnggaattntgggnnaccttgt

SEQ ID NO: 124405 - DNA, 571 bp, Arabidopsis thaliana
  unsure (1)..(571): unsure at all n locations
cgctcganagtgagaactctactcttcttcttcttcctccgccatagctacaatgcttagtctctcaatcgctacgccggggacgngggcgattttccgtagaggaactgcttcggcgacttcaacttcgtcttcattccatggtgtcagaatccagcaccaggtttctgctcgcgtccccgcggcggcgacgatatcgtcgtcgtctcctaaaccgtcggtggtgatgatgtcgaaaagagaggcggaattgaaagagataagatcgaagacgacggagcaagttacaagaggaggttgttgaccttaaaggtgagctctttatgcttcgtctccagaaaatcggcaaggaatgagttcaaatctagcgactttcgtcgtatgaagaaacaaggttgctcggatgttgaccggtaaaagagagaggggggtcaaagaaggggtaacgaaacggttgtcgaggaaccttgcagccattggngaaagcttcgtcccagcccccctccgttttgaagaacttcagagaaaantccgaaaanactgaccntaacctntnaaaaccncatttttt

SEQ ID NO: 124406 - DNA, 529 bp, Arabidopsis thaliana
  unsure (1)..(529): unsure at all n locations
ccccaaaccccccggggnnntnnttcccaaaagggggnccggatttgaaggggtttaagtccgaccccgccggcccattcccggggggggtttgttccccttaaaggggggcgcccttttttgctccggctccccgagaatccgccaagggaatggggttcaaatcctttggcccctttcggtcgtttgaaggaaccaagttgccccggatgttgacggttaaaagagagagggagatcaaagaagggataaagaaaaggttgtcgaggaaacttgacagacaatggaagaaaagcatagtaccaagaccacctccgtctctgaagaaacttcaagaagaagaagctgcagaagaaacagctgaagctgctaaatctgcttgaaaaaacccgctattgatttatggtctcttccttgttgtttcctcgagatgttgttaatctctgttatttgttgctgaaccatcttgtatttgtttttcttttggtgtaaacactttccttatcaagtagtttacatgaatccctta

SEQ ID NO: 124407 - DNA, 1896 bp, Arabidopsis thaliana
cacgcacacggcatctacggcagctggatcggtggttgctaacgcgagtttgtaccagtacgcgcgcggaacagctactgggatggcgtcaaaggcgagaatcgccgcttacaaaatctgttggaccggcggatgttacgattccgatatcctcgccgccatggatcaggcggttgccgacggtgttcacgttatctctctctccgtcggagccagcggttccgccccggagtatcacacggactctatagcgatcggagcatttggagccacgcggcacggcatcgtcgtttcttgctccgctgggaattctggtcctaatcctgaaaccgcgacgaacatcgctccatggatcttaaccgttggtgcgtccaccgtcgatagagaattcgccgcaaacgcaatcacgggagacgggaaagtcttcacgggaacatcactgtacgcaggcgaatctctaccggattctcaactttctctggtatattccggcgattgcggaagcagattgtgttaccctgggaaattgaattcatcattggttgaaggcaaaatcgtgctctgtgacagaggaggcaacgcaagagtttagaaaggaagtgcagtcaagctagccggtggtgctggtatgattctggcgaacacagctgaaagcggtgaagaattaaccgccgattcgcatctcgtcccggcgacaatggttggagctaaagctggagatcaaatccgcgactacatcaaaacatcagactctcccactgcaaaaatcagtttcctaggcactttgatcggaccatctcctccttctcccagagtcgccgctttctccagccgtggaccgaatcacttgacaccggttattcttaaaccggacgtgattgctcctggagtcaacattttagccggttggaccgggatggttggtcctaccgatttagatatcgatccaagacgggttcaattcaacatcatctccggtacatcgatgtcgtgcccacacgttagtggactcgccgctctcctccgtaaagctcatcccgattggtcacctgcagcaatcaaatccgcccttgtaaccaccgcttacgatgtcgaaaactccggcgaaccaatcgaggatctcgccaccggtaaatcatcgaactcattcatccacggagctggacacgtcgatccaaacaaagctttgaatcctggtttggtttacgacatcgaggtcaaagagtacgtagctttcctctgcgccgtgggatacgagtttccggggattctagtctttcttcaagatccaactctttacgacgcatgtgaaacgagcaagctaagaaccgccggcgatctcaattacccatctttctccgtggttttcgcatcgaccggggaagttgtgaaatacaaaagggttgtcaaaaacgtgggaagcaatgtcgacgctgtgtacgaagtcggagttaaatctccggcgaatgttgagattgatgtttctccaagcaagcttgcgttcagcaaggagaagagcgtgttggagtatgaagtcacatttaagagcgttgtgctcggcggaggagtcggatccgtgccgggtcatgaattcgggtcgatcgaatggacagacggtgaacacgttgttaagagtccggtggccgtccaatggggtcagggatcagttcagtccttctgattgatcattgaaattgggctctggttgtatgttttcattaaaaagaaaaaagtcctgtcgggtttgttaaaagggccatgttgttaatgggccgatctgtatactcattaatgagccctcactcttgggttagaccactatgcatggggtgtgaatgagcagaaaatccgattggcagaaaaaaaagttcatccgaataaaataaagcggccgct

SEQ ID NO: 124408 - DNA, 745 bp, Arabidopsis thaliana
aaaacgttaaactgtgtgagacttcggagataaaatttcccagaaagcgtgaaaggttaaccggaagaaaatgccgtcacaagatgatgttcaaaatcttccaatcgatatcaccttcgctcaacttgaagaatggttggtggatcggaagagaattccggcggattggaggaagagggttgctgtgatcagagtcaaaatcttaaaagagttctcttctttgcctaaagagatcgatccattctttcaaaccctagatcctgaagtgatcggttacttggaggtcaaaaaggtgtatgagattctcctgaagacaactccggaaagccgcaacatctttggtcgactttcgggtgcttctggtgtttgggaagcaattgttcgtgcgtttgaaaaagatcacatttatcttggggaggcagctcagataataattcagaatgttaattacgaaatcccttatctgaaaaagcaagtgcaaaaggttcagcaacaaatgacagaacttgatcgtaaagaagctgatatcaaaaggagcgttgcactctcagcaacaaaatacgaggatgcttgccgagagcttggattgcagggaaacaatgtgaggcgtgagcttttggagactgcgagttcgcttcctagtacctttagcaagattctggaagttatcaacagtgactcagtaacaggggcaatggagtactactctgcctatgttcaagatgttcatactgagaaagataag

SEQ ID NO: 124409 - DNA, 526 bp, Arabidopsis thaliana
  unsure (1)..(526): unsure at all n locations
cccacgcgtccgcccacgcgtccgcccacgcgtccggtcttctcccatctctctctcttcctcctcagatctcacactctgaaaaatcccccaaagccatgtcttaccttcttcgctccgatccggtttcacgaatccacccagaacctcaatctctaacctctttcgaccacttcgatctcctccctgactctctcctcctcttaatcttcgacaaagtcgccgacgtcaaagatctcggccgttgctgcatcgtatctcgtagattccactctctcgtccctttcgttgagaacgttctcgtccgtgttgattgtgttatctccgacgatgattcctcttcctccgacgagaatcatcgattctctttaaacactgcatcgatctcagacgccggcggtgctggtggctccttcttccgccttgttccgtctcgtattcggttcaaatttcaaaccgtttaaatgttagggagatttaggncgaaaggtcgttttnttngtngatgggcggttttagggttacg

SEQ ID NO: 124410 - DNA, 675 bp, Arabidopsis thaliana
  unsure (1)..(675): unsure at all n locations
aagaagagtgaagttatgtgatcaagaggcgcagagagatagatcttcccacctgtcttccttcttctgacaccgacacttatccgtctgtcaccctttaaaccctatctttttctcaactaagcttgtgtttaatctcaccattaatcttgtcactacgcatcatctcatctccttcctttattggaaactccgactttacctggaatcgtacccgatttgatttcactcgagataaaataattagtgcaaaaaagttctcaccatctttctccgtcttgtcggtcacgtttttgtcctcgtagctaaaaaaatcagctttctacaactccgtaaggtggaagcttgagattatgcagaagaaacgagagatctgtggttatagagacaaattagacaagaccttatcttctcctgaactcactaatcacgagactctcaaatctcttctcagaaaccagcttgaagagtgtgatgaggaatatatttggataaaagaacagntgatgtatccangttnacttagcaaagcttagggagtgtttccatgacttgnccncnaagntttctaaattaaaccaaccgntgggtgnttggaaatttgaaccattntctttnnagntttgccgggntaatttncccgtnaaggccttggttggaggcctttnaaanant

SEQ ID NO: 124411 - DNA, 563 bp, Arabidopsis thaliana
accaagcgtccgcccacgcgtccgcaaaaaaaaaacagcttctaaaaataaaaaacaaaacaataatccagccaccgtaggggtaattccgtaaatttgtaacagaaactccattcccgcggcgtatgcagagggcaatcccgtaaacttaacccatctccggtgatgaataatatcaattccttcacgccggagtgattttccacaaaaaaataagatatgaaagcaaatcgcggcggcggagagcacggccaacacgaggctctaaagctttccagtttcttcttcatgccggagcggccacgtgattacctcgtgcttttcacacgtttctccgtcctcacgtgcctcatcgtctccgtatctcttgttctccgcgccacttttttatccccttccgctcgagactatttccaccacctacgggtctcaaattcaaccgccgtaccctcaaaaagccctagctctccctccgtccgcatccgtcggaccaaccaatatctcccatatcttcttctctatcgccggagcagctgagacatggatcgatcggagccagtaca

SEQ ID NO: 124412 - DNA, 542 bp, Arabidopsis thaliana
  unsure (1)..(542): unsure at all n locations
agtgaacatgccagctcaagcccaccacaaactcggccaagacaacgaggaatcaggaacggtcgagctctttgaagtatatgatgtggttgtatacatgggcatcattgacatcctccaagagtacaacatgaagaagaaagtggaacatacttgcaaatctatgaaatatgatccaatgacaatttcagccatcgagcctacactttactctaaacgattcatcgatttcctccttaaggtattcccagaaaaagcatagagagagagagatatcaacggaccattgatcttcctaaagatgaaaggttccatgatttgactcggcccgataatattctttcctggttcataacccataaaaagcttttaaggaattgggttggtattcttctttggccctaaggtccacttaccattataggattcttaaaaaacttgaaaaagttttcgtaaaaaaaaaaaaaaagnnnnnnnnnnnnnnnnnnnnnnnnnnnnnnnnnnnnnnnnnnnnnnnnnnnnnnnnnnnnnnnnnnnnnnnn

SEQ ID NO: 124413 - DNA, 588 bp, Arabidopsis thaliana
  unsure (1)..(588): unsure at all n locations
cacctatccacttctcatctcttcgttatcccctctctctaatggctaacgaagaactcactgagtcacagcaacaagaagacccaagtcaacaattacccaatgcagatgaagaaaagggctcagactccgactcaaactcagactcagacgcatcatcccaatcctccggcgacgatttctacatctccgagtcagaaaatgaagcagaaggagacaacacaatcttcaactacgtaagaccaagtgacatacctcctgacccaaacgcaaacccagaaaccaacattcgccgattcaatcgagtcctcgatggcaaacgagtgaagcgtatgcaagaagaagaagaagataaatacactttctatgaagatcttttcgatttccctagagacccagaacgttggaaggagcaagatttaagagagatttgggctgatggtccatttgggatgcggaacctggttgggatcntctttggnttatgaagntgnttggnatgttgttaacgntgggttaaggaggtngngtncttggtttaacccttttttgtncgattggaacntttncagtttncagnanatttgg

SEQ ID NO: 124414 - DNA, 511 bp, Arabidopsis thaliana
tctattccaattaatttaagggaaggttggtccccttgcaggtcccggtccggatttccgggttggaccaaggggtccggccgtcggaattttctctccccgacgctgataaccctagcggcttcaaattacagtcgcttaacgccgagttaggccaccgagtccgatacgaacctgattcggtcgctgtcgcgaagatccccgtagttttccaatttctggaaagagacgaagaaacccttttccagatgcaatgcctaatggctgatggagctctaattactttagattccgacgatattttagctacagaacatgttttagcagttggtaaagagtttcccgatgtggaaacttgcagaagaactttgaaagatttggctatagctctgcattttgatcttcggattgtgaaatcagatcgtagtcgattcatagccaaatgctctaaagaaggttgtccttggcgtatccatgctgctaaaggtccaggtgttcagacatttacggt

SEQ ID NO: 124415 - DNA, 470 bp, Arabidopsis thaliana
  unsure (1)..(470): unsure at all n locations
cctgcaggnaccgggccggaattcccgggttgacccacgggtacggccatgctctctcgtgtctgcccaaccctccgctataatcgtatctggtctgctcatgcgcgtgaaatgccacgcgccaccctccttctcctccaacccaacttcttccactcttcccccaaaactgctcttgtgaatcgtctcgatgttacttcatcggagttttcttccatgttccgtcggagcttccacgctttacgcagcaccgtaggagactggagaaagcttccgaaaccgccgggtcaggtttttgcggagaggagagaatacaggaagattagaaggagagctccgaagaagaaacaggaattggagcttagtgttagtatctgcatcgaagaacagcttcctgatgatctcgagattcagattattgcagaaatgcttcggctcaatggacctatggcaatgacattggctttcaa

SEQ ID NO: 124416 - DNA, 615 bp, Arabidopsis thaliana
  unsure (1)..(615): unsure at all n locations
cggaagcgtgggcggacgcgtggggggaaacaagaacaaaaacgtttgcttcattctctgaaagactctaatggcagccaccacgagacggttgctttactatgtgtccaaaagattctctaccgccggagtgcggcggagctatggcggtctgccacaatcgaattccaaatctcctccgtcttcttctcaacgattgatggaattggaatctgaattcagtgcccacaattaccatcctgttccggttgtgttttctcgcgcgaatggctcaactatatgggaccctgaaggaaagagatacattgattttcttgcagcttactctgcagttaatcagggacattgtcatcctaagatcatgaaggcattgcaggaacaagtggagaagctcactttaagttcacgagcggtttacaacgataaattcccggtatttgcctgagcggctcacaaaacatgttcgggtatgatatggtggtcccatgaacanggggcngaagggccgaaactgctttgaacagcaagaaatggggcatgaaagaaaanatncccaaggcgngggacatggccctggtgngggggttanggggnnataggaatggtccagggntc

SEQ ID NO: 124417 - DNA, 736 bp, Arabidopsis thaliana
  unsure (1)..(736): unsure at all n locations
cttcccttcaaccttcataatcagtggctccttcgcttattagtctttgtcaatcttaaatcgttgagtatccaaaaatcttaaactcaatggatccgtgctctttcgtacggatcatagtcggtaacttggccgttaggtttccgtcgtcgtcttcttcttcttcttcctcatcaggaccgtctgtttccggaatcaatccaacggctcctaactgttactgtaaaatcagattcaagaactttcctcgtgagattgtttctgttccggttatgttccgaactgaatctgaatccgagactcgttgctcctcctccggtaacgtatccaccgttgctgcttgtttcagtttaagtaaagctcagatcgaagcgtcgttgaagaaacctaaatttagtgttctctccgttgaggcttattcccgcggaaatagcgacggagacgacggtgttagcggcgcgtcgtgtggactcgctacggcgggtgagaagttgcttggtcgatttgaggtttcgcttgatttgaaatcggcggagacgaagagttttttggcgcataacggttgggttnctttnccgtctaagaaaacgagagtaaaactggntccnatccggngctccacggtaagcgtacgggtcgaaccntaacccgngattcgggtttnaattcgncggtnaaccntanttagnccncaggttttttaaagttcaaggaaaccanaaagaaagncgtnttc

SEQ ID NO: 124418 - DNA, 389 bp, Arabidopsis thaliana
  unsure (1)..(389): unsure at all n locations
attccaatagcttctaatattttaactacaaacattttaagtttccactaacaatgggtctaatcgccggtaaagtgcgtgtgtttgttttggggtttgctttggtcacagattttactatgggagaagcagagtttggtgatgagaagcccttgtttcctcaccctcaccctcatcctctcctccacaagaagggctttaaaaaagaattcggcgacttaggtggtggtggtggtatcagcggtggaggcggctttggagcaggtggcggttggattggaggcagtgttggaggctttcgtggaggaataggcggtggattttcgttgnggagggttnngaggtcgaagccngtanaagnagtttacggtcgctttcngcaaaaggac

SEQ ID NO: 124419 - DNA, 1403 bp, Arabidopsis thaliana
  unsure (1)..(1403): unsure at all n locations
nnnnnnnnnnnnnnnnnnnnnnnnnnnnnnnnnnnnnngcctgcaggtaccggtctggaattcccgggtcgacccacgccacgcgtccggaaaaacaaacgtactcaaatggctctttcttcaccttcaagaatcctctgttttgctcttgccttatccgctgcttctctctccctctctttcgcttcttcccacgattactccatcgttggatactcccccgaggatttggaatctcatgacaaactcatagaactcttcgaaaactggatctcaaattttgagaaagcttatgaaaccgttgaagagaagtttcttaggttcgaagttttcaaggataatctaaagcacatcgatgagactaacaagaaagggaaaagctactggctcgggctcaacgagtttgcggatttgagccatgaggagttcaagaaaatgtatttagggctcaagactgatatagtgagacgcgatgaagaaagatcttacgcagagttcgcttacagggacgtcgaagctgttcctaagtctgttgactggagaaagaaaggagctgtggcggaagttaagaaccagggctcttgtggaagttgttgggcgttttcgacagtagcagctgtcgaaggtataaacaagattgtgacaggaaacttgaccacattgtcagaacaagaactcatagactgtgacacgacctacaacaatggctgcacacggtggtctcatggactatgcctttgagtacattggtaagaaccggaggtctacgcaaggaagaagattatccttactctatggaagaagggacttgcgagatgcaaaagggtgaatctgaaacagtaaccattaatggacaccaagacgtacctactaatgatgagaagagtctcttgaaggcattggctcatcagcctctcagtgtcgccattgatgcatctggtagagagttccagttctatagcggcggcgtgtttgatgggcggtgcggggttgatcttgaccacggtgtggctgcggttgggtatggatcaagcaagggttcagattacatcattgtgaagaattcttggggaccaaaatggggagaaaaaggttacatcaggctgaagaggaacactgggaaaccagagggtctctgtggaatcaacaagatggcttctttccccaccaaaactaagtgatcatcagatcattctctcttatctgcatttgatcagcatcttacagtgtcttcgttttttctcttttgatttatcaacggaagtcttgtaacaactatgtgcaataatacctatatataagaagcagagaattgccaaattaaaaaaaaaaaaaagnnnnnnnnnnnnnnnnnnnnnnnnnnnnnnnnnnnnnnnnnnnnnnnnnnnnnnnnnnnnnnnnnn

SEQ ID NO: 124420 - DNA, 636 bp, Arabidopsis thaliana
ggcttatctctccgacgatcttcgtataaaacttagtccggcgggaaatcgactttcaaattcgcaggattctgtcgatattcttgtatagttgcgagtctacaagattcttcttcaccatctctgttaatttttccctaattctttcatctgagtgaaggaaatggatcctgaagctgtgaaggagtttatacgaagggaagttccagattgggacgatgaggtggtggcgatggctagattcaaggcgtttagtggtcagaggtccgattgggaacttaaatttcagttttggcgtgatttgatcatcaaggtttcgcgtcagtttgggttgttcatcattgatcctgtccaggtgaagaaggcgtggtttgatcgaggaggaatgacgcctttatgcattgatgatgttgtgttattgatgcatagtgaaggtgatgttgtgcggattagtgatctcgatgatcccggtagtggtcgtattgctcgtttattgaggacagtgaagaacttaatggttcaacagccagtgaagcaggaagagattctggaaaatacacttgttcttgttccactcttgaaggagaaggcggctgacgtggtgaagatattatctgagggacactggacttctac

SEQ ID NO: 124421 - DNA, 565 bp, Arabidopsis thaliana
tcaatacgactcactttagggagggctggtacgcctgcgggtgccggtccggggttcccgggtcgagccacgcgtgcgggaaaatctgaaacggaagctcagagagacaaggatgagatttttctcttcctttgataaatcccaatacctaattcccaaattcccttacttttaggcgccgaaagatagagagaaacatagatacgcattggttttttcttttttgaagattctcgcttcttactacatgtgtatcaatcgatctctacccagattctccggaggagctttgagtcttgtcgtatagatgcagtgaaggtcctttgttagatgggaaaacttgttcttgagttgtcaaaaggtattttctatgtttttggagtagaactgtttacaaggaagcagccaatatggagtttgattttggagaaatgtttttagtgttgttgtgaagaaatatcagttttgattgtttttggatttgatgggtaaagagaatcagttggagactaccgattgtggagtcagtgatcacggttctccacctatcaagaatgaagaacat

SEQ ID NO: 124422 - DNA, 578 bp, Arabidopsis thaliana
atgattctccaggtctctacgactcactattgggaaagctggtccgcctgcaggtaccggtccggaattcccgggtcgacccacgcgtccggagactctctgtagagaaaaaccctagacattttccggtgagaaatgagtatcactcgtagcgcgatcagatcgagtttgtgtctccggaaattggatccggaaatcagtcgtagctcgcttccgtttcttcaagagtggaggaaatgcctatctaccgccacggagcagcctcctcctgcctctccgttaccaccgcctccgggaggttctccgggagaagggaggttttatgggaagttttcaggcttttcaaaacatgctctgaagacagacataatgaacgtactcgagggctgcagtctgacatcagatgatctcaaattcaactatccgcgtggcggaaacttaactcctgcggcagtctttgtgcagttcccatccctttccgcatatgataaagcactgcggaatatcgcaaagaaaggaaagctttatagattagaaaaggctgctcgtgctaagtgggatcccattgttccttatga

SEQ ID NO: 124423 - DNA, 685 bp, Arabidopsis thaliana
aaccatataaagcttgttcttctccttccttctccaatttcgtaagctcaaagatttcgatttcgattttgattattgccaaaggtttaaagatggatattttcgacaactctgatcttgaataccttgttgatgaatttcacgctgatttcgatgatgatgagccctttggagaggttgatgtcaccagtgagtctgattccgattgcatggactccgattttgatttcgagctgagtcagagtaagacgaacaatgaaacatcagcgttagaagctaggaatggaaaagatattcaagggattccatgggagagcctgaattacacgagggatagataccgtgagaatagattgctgcactataaaaactttgagagtctgtttcgatccagagaagagcttgataaggaatgcttgcaagtagagaaaggaaagaacttttatgactgtcagttcaacacaaggcttgtcaagtccacaatagcgcattttcagctgaggaacttggtatggccaacatcaaagcacgatgtgtatttcatgaacaactactctctcatgcactggtcatctttgttgcaaaggggcaaagaagtacttaatgtggcaaagcccattgttccttcaatgaagcagcatggatcgtctgtcacagtctgtatcaagagtccagataagcacat

SEQ ID NO: 124424 - DNA, 394 bp, Arabidopsis thaliana
ctttttgcactctttgggttttctaacgatgatggcgtgaaagaaagagagagagagaacaagcagtgttcaagaagagagagagagaggaacaaaagtgtctctttttttcttctctgcattgcccatttatcctgtcgtctttgacgcttttgtaaaagctaaaaaagaaaaaagatgccaaacgacgacgaagactagagagagatagactaaagaaccagttgtctttattcttcttcttccttcttccttcttcactcttgagattctctgtttcttggtcttgagtttatccataaagatccggagataaaatgacgaaagtgtgtcctgaaatagaagggacattatctttatcagtggttccagtatcagtagatgtgagctttgc

SEQ ID NO: 124425 - DNA, 649 bp, Arabidopsis thaliana
acgcgtccgaccaagcgtccgggtttttttgtctagcgggcattggaatttacaacctcgtaaaatatgacagcagcgtttttaaagcgttcaatcctgcatatatctatttctttttcaagagaaactctgtaaatgcttggtatgcacttgggggttgcgttttatgtgcagctggatcggaagctatgtttgcaaatcttagctatttctctgttcactctatccagcttacttttatccttctggtgttaccttgcctcttgctgggttatttgggtcaagccgcatgcctctctgaaaacttcagcgctgccggggatgctttcttttcgtcagttccaagttctttgttctggccagtctttctcatttctaatgttgctgctttaattgccagtcgtgcaatgacaacagccacatttacatgcatcaaacagtcaatagcactaggctgtttcccacgtcttaaaatcattctcacctcaaagaaattcattggacagatttatataccggttcttaactggtcccttctggtggagtgtctgatcgttgtctgctcttacctcaaatatcttcccgattggaaacgctaatggcatcccagagctgtgaattttgatgactacaacaattttggtgaccc

SEQ ID NO: 124426 - DNA, 1627 bp, Arabidopsis thaliana
  unsure (1)..(1627): unsure at all n locations
cgttccggtttgttttgtggctgacgataaaacagagctcaaaagaaaaaaaaatctagggtttgtttgagactaagaggaagagaaagaagaagaagagaaaattcgtacaattccgccattaaagcttcaacctttaatggcgacaacgactctttcttccttctctctttctcttcctcaacttctccataaacccacaaagcctcttcctttcctcttccttcttcctcgattcaatcggagatttcgaagtctcactatcacttcttcttctacaacttcttcaaacaatttcagtagtaattgtggcgatgatggcttctctcttgacgatttcactctccattctgattctcgatcacctaaaaaatgtgtcctttctgatcttatacaagagattgagccattagatgtgagtttgattcagaaggatgttccagttactactttggatgcaatgaaaagaacaatctcaggcatgttgggtcttcttccatctgataggtttcaggttcatattgagtcactttgggaacctttgtctaagcttttggtatcttcaatgatgactgggtatacattgaggaatgctgaatatcggctttttcttgaaaaaaaccttgatatgagtggtggaggcttggacagccacgcttcgggaaacactgaatatgatatggaagggacgtttcctgatgaagatcatgtttcatccaaaagggatagcagaactcagaacctttctgaaacgattgatgaagaaggtttgggcagagtatcctctgaagctcaagaatatatcttacgtttgcagtcacaattgtcttctgtgaaaaaggaattacaagaaatgagacgaaagaacgctgccctacaaatgcaacaatttgttggcgaagagaagaatgatttgttggactatttacgatctttgcaacctgagaaggtagctgagttgtcagaacctgcggctcctgaggtgaaagagactattcattctgttgttcacggtcttttggcaactctatcaccgaagatgcactctaagtttccagcatcagaagttccacctactgaaacggtgaaagcaaaaagtgatgaagattgtgctgaacttgtagagaacacttcgttgcagtttcagcctcttatctcactgactcgggactaccttgctcgtcttctcttctggtgcatgctattgggacattatctcagaggtttggaatatcgaatggaactgatggaggtcctgtctttgacatgcgatgccaatgggtctgagaacgtcgcttgaagctatctttatacatctcaacattgtcttacatgcgtatcagcggccttgacactcttaaaccaacaaagtgggcaagtgactaggagacaggccagcctttgagctttagctcttgcacatatatgcagctttgtgctggcctgaaaattcatgggcgaggtaaagtgtaacataagaaatcacttctactaaaattatttttcgttgcattatcgtgtgatggatctgcaaagcaataaagctaagtgtaattgtattcaggaatatactcgtttggtcattaagtatagtttgtcctacaattantggctcagaaatagcaat

SEQ ID NO: 124427 - DNA, 576 bp, Arabidopsis thaliana
  unsure (1)..(576): unsure at all n locations
atacgactcatantgggaaagacggtacgcctgcaggtaccggtccggaattcccgtgtcgacccacgcgtccgattaaatggtgctccagaatttgtaagatcgggtggtgctatttaaatccaatatcagaaacacgtcgaacgagaccaatagagctagcttctgatacatttcgactttggcgtttctcgatctgttgtttctgctcccaaataaaaataaaaaaaaatcggatcggggatttccccaaatcgtaaaattaggttttgttcttcatttctagccctagcttagttttatcgttatcttattcattaaggtttgattctacctttgtttcgcttccctcctcgaattttgcaattccgttattaaaggatcctagtttttctggctcttgtactacgtcaagtttcatggattctcgagtttcgattctcttcgtctgtgcaatagccgtgtcatgctttacgtctgggtctgcttcatcaccagtggacttttccgtttgcaattacgaattcgagctgtttcgattcgatttagaggccaaatgtcctccttctctgtatc

SEQ ID NO: 124428 - DNA, 724 bp, Arabidopsis thaliana
  unsure (1)..(724): unsure at all n locations
gcannnnnnnnnnnnnnnnnnnnnnnnnnnnnnnnnnnnnnnnnnnnnnnnnnnnnnnnnnnnnnnnnnnccacgcgtccggaaaatggcgtcgtacacagtctcctttatccctttgacgctctctaatcctcggatctttgtttcgagacagaatggatctccctcgtcttcttctcggattcctctaacgtcttctctgttaggtaagaagcttctggcgacacaaccgtcgcatcgctgcttcgtccccaagctccggtgcttgacctcggccagcacggtcttaaacgtccctattgcgcaaccggagaatggttcttcggataagatcccaaaatggtcggcgagagctataaagtcacttgcaatgggagaattggaggctaggaagctcaagtatccaagtaccgggaccgaagccattctcatgggtattttagtcgaaggcactagcacagttgctaagttcctgagggggaatggagtcacacttttcaaggttcgagatgagacgttaagcctgctggggaaatcagacatgtactttttcagcccagagcatcctcctctaactgagccggctcaaaaggccattgcctgggccattgatgagaagaataaatctgatgtggatggggaactaaccacggcctacttgcttctgggggtttggtctcaagaggattcagcaggccgccaaattttggagaagctcgggttt

SEQ ID NO: 124429 - DNA, 1014 bp, Arabidopsis thaliana
  unsure (1)..(1014): unsure at all n locations
nnnnnnnnnnnnnnnnnnnnnnnnnnnnnnnnnnnnnnnnnnnnnnnnnnnnnnnnnnnnnnnnntaaaacagagccacgcgcaagagaggatttagcgagagagagacgttgaagaagatgactagtggaggaggatacggagatccgtcgcagaagattgattatgtgttcaaagtggtgttgatcggcgattccgcggttgggaaatcacagatactggctcgttatgctagagacgaattcagtttggattctaaggccaccatcggcgttgagtttcagactcggacgcttgttatcgatcacaagagtgttaaggctcagatctgggataccgccggccaagaacgatacagagcagtaacaagtgcatattaccgaggagcggttggggcgatgttggtgtatgacataaccagacgccaaacctttgaccatatcccaagatggttagaagatctacgtgctcatgcagataagaacattgtgataatccttattgggaacaagtcagatcttgtggatcaacgagctataccgacagaagatgcgaaagaatttgcggagaaagaaggtttgttcttcttggagacatctgcatttaacgcaaccaatgttgagagcgctttctccacggttttgactgagatccttcaacattgtgaacaagaaaagtctggctgcgagtgaagatcaagagaatggtaatcccgggtcgcttgctggtaagaagattgatattgttcccaggtcctggtcaagtgataccaaacaagagtaacatgtgttgtaactcttagataaaccaattcaattcttgaatgttacttgataacaacaatatatagatgttttaaagactctgattgggatatttctcctatctagagctgtgtgattcatttgttgcttaatgagcagtttttgtggggttttggggtgttgaatccaagtataacaaaccnnnnnnnnnnnnnnnnnnnnnnnnnnnnnnnnnnnnnnnnnnnnnnnn

SEQ ID NO: 124430 - DNA, 410 bp, Arabidopsis thaliana
cccacgcgtccgatgggattgagttttcccgggaccagcatttctcatgggaccgtaattccgaatcgatctctcactaggaatttgccatggtacagtcattggtatcgctctcaagatcgttgtttctcttcgaacacaaaggatactgatgaagatgaagaaagcagtgaaggagaggatgatgatgaggacgagggggaagactttgaggattcggcggatatggaagtagaaagggaatattcaccggcggagaaagtggaagaggcggaggagatagggtacaaggtgatgggtcctcttaaaccttcggagagacttttcaaaccctatgaaccagtgtttgccattgttcagattggttcgcatcagtttaaagttagcaatggggactccattttcaccga

SEQ ID NO: 124431 - DNA, 907 bp, Arabidopsis thaliana
  unsure (1)..(907): unsure at all n locations
aaaacgggcccccccgtttgaaagggtaaaaaccgactctaattcgaaaggttcttaaaaccgggttaatccaaattatccaaaattgcgaaagtggggttaaatggaaccttgggaatcctgaaaacagttcgaagaaagaatgccaaaacctgattgggtttctgttatcgtttctagggcaaagagagaaaaatggcttgaaaataccccggaaacaacgagtaacgacgagcttgttgtcttcgatacttcgattattccatggtgggcatggatgaagagataccatctacctgaagctgaacttctcaatggtcgtgctgcgatgatagggttcttcatggcttactttgttgatagtcttaccggagtaggacttgttgatcaaatgggaaatttcttctgcaaaacactcttgtttgtggctgtagctggagttctcttcatccgtaagaatgaagatttagacaaacttaaggatctgttcgatgagactacgttatatgacaaacaatggcaagctgcatggaaagagccagattcatcaacagtttcttcaaagaagtgaacaagttcttacaatctttcattttcctttttttgttatgcaataatctgtgaatcagtgaaagtttatctctactgaactactgatcttcagattttgtaatctttctgctttaaaaatctctatgaagtagtctcaaagataatgtatcgaaggtctttgacttgtaaagcagacctatttcgttttgacgcttgatagtttaatcaataagagattttattttttttaaaaaaaaaaaaaaaacccaaagnnnnnnnnnnnnnnnnnnnnnnnnnnnnnnnnnnnnntnnnnnnnnnnnnnnnnnnnnnnnnnnnnnnnnnnnnnagaaatcg

SEQ ID NO: 124432 - DNA, 1169 bp, Arabidopsis thaliana
atggccgttcgcagtaccgcacctgaatttccggtgcgccccacgcgtccgaactctgcctaagaaaaaaacgctcaatcgctgaaaaaaaaaaaaaaactcagagcagaggagatcgagagagacaaagagagagagagagagagagagagatcttaacaaaaaaatgtctatatccatggcgttattctctccgccgatctcttcctcacttcagaaccctaatctcatccccaagatctcaacctctcttctctccaccaagcgtttctctctaatctccgtccctagagcttcctccgacaatggtacgacttcccccgtcgtggagattccgaagcctgcttctgtggctgtagaggaagttccagttaaatctccagccgaaagctcctccgcttctgaaaacggcgccgttggaggtgaagcgactgattcgagtactgagacggtaatcaaatatcagaatgcgaagtgggttaatggaacttgggatctgaaacagttcgagaaagatggcaaaactgattgggattctgtaatcgtttctgaggcaaagaggagaaaatggcttgaagataacccggaaacaacgagtaacgacgagcttgttgtcttcgatacttcgattattccatggtgggcatggatgaagagataccatttacctgaagctgaacttctcaatggtcgtgcggcgatgataggattctttatggcttactttgtcgatagtcttactggagtaggacttgttgatcaaatggggaatttcttctgcaagacactattgtttgtggctgtggccggagttttgtttattcgtaagaatgaggatgtggataaactcaagaatttgtttgatgagactacattgtatgataagcaatggcaagcagcttggaaaaatgatgatgatgagtcattgggttctaagaagaagtgataacaaagattcttgctttctttttttgttgttgttgtaattaggagatgaacttaccaaatgtaatatcaagagatttgaacaatgtttcctcagattaccgttaatcatgtctagtctctacttaaaaaaaaaaaaaaaaaaaaagggcggccgctctagaggatccaagcttacgtacgcgtgcatgcgacgtcaagctcatcgaaggtcacggaatcca

SEQ ID NO: 124433 - DNA, 464 bp, Arabidopsis thaliana
  unsure (1)..(464): unsure at all n locations
attcaaactaactctgcaaaagaaaaaaaaactcagagcagaggagatcgagagagacaaagagagacaaagagagagagagagagagagagagagagagagagagagagatcttcaacaagcaatgtctatatccatggcgttattctctccgccgatctcttcctcacttcaaaaccctaatctcatccccaagatctcaacctctcttctctccaccaaacgtttctttctaatctccgtccctagagcttcctcccggcaatcggtacggctttcccccgtcgtgaaaattccgaagcctgcgtctgtagctgtagaggaagttccggttaaatctccgggcgggaaagntcctccgnttcttnaaacggnggcgttggaggtgannggctttttggggtcnnnngcggtatcaaatttcaaaatcngngtgggttnatgggncttgggtctaaacantt

SEQ ID NO: 124434 - DNA, 824 bp, Arabidopsis thaliana
  unsure (1)..(824): unsure at all n locations
anncaggttncggagnanangtttgggaaaaancccnaatttgggaattncntngaaaatccngtttccatgaggccanaggggaannaaaantgcctaggaaggagaatcccagaaancaacgngttaacggncgaacccagtgctttttcgatacatncgatttattccatggtgggcttggattaagagataccacttacctgaagctgaactcttaaatggtcgtgcggcgatgataggattctttatggcttactttgtcgatagtcttaccggagtaggacttgttgatcaaatggggaatttcttctgcaagacactattgctttgtggctgtggctggagttttcgtttattcgctaagaccgcgcgtccggataaactcaagaacttgtttgatgagactacattgtatgataagcaatggcaagcagcttggaaaaatgatgatgatgagtcattgggttctaagaagaagtgataacaaagattcttgctttctttttttgttgttgttgtaattaggagatgaacttaccaaatgtaatatcaagagatttgaacaatgtttcctcagattaccgttaatcatgtctagtctctactaanaaaaaaaaaaaaaaaaaaaaaaaaaaaaaaaaaaaaaaaaaaaaaaaaaaaaaaaaaaannnnnnnnnngggggggcccctntaaaggggccccgcttatgaaacgccaaatctcacgtacataggtctctaatagcatcaccttttttaaaggcgccggccgtcgtttacaccgcccggattggaaaacccctggagtggcaaacttatgg

SEQ ID NO: 124435 - DNA, 316 bp, Arabidopsis thaliana
acgtagataggaggaaaccaagcgttgatggcacatgcatgtagtaagccaatcgcatgcagcttgaaaaggaggatgagtgctcattgggtctaagaagaagtgataacaaagattcttgctttcttttttttttgttgttgttgtaattaggagatgaacttaccaaatgtaatctcaagaggatttgaacaatgtttcctcagattaccgttaatcatgtctagtctctaccctttaaccttaatctaattagaaaacaaaaaaggcccaataagaagcccatttttccaagtttattttctgaaaaaaaaaa

SEQ ID NO: 124436 - DNA, 616 bp, Arabidopsis thaliana
cggaagcgtgggcgcagtagggttgaagcggatagtacgccacctctatctctctctcaccctatcgaactcgcgaagaacatcttcttcttcttcttctccgtcttcgtcttcgcgagctctctcagtagcgcaataaaatgggggcttcgcttcctcctaaggaggccaacctcttcaagctcatcgtcaaatcatatgagactaagcagtacaagaagggactcaaggcagctgatgccatattaaaaaagtttcctgatcatggagagactttatcgatgaaaggactgactctaaactgtatggaccgcaaaactgaagcatatgagcttgttcgacttggagtgaagaatgatatcaaaagccatgtttgctggcatgtgcttggtcttttgtaccggtcagacagagagtatagagaagcaatcaaatgctaccgaaatgctcttagaatagatcctgataaccttgaaatactcagagacctctcacttctgcaggcacaaatgcgggacttatccggttttgtggagaccaggcagcagcttttgaaattgaagcctaatcaccgaatgaactggattggctttgcagtctctcagcatttaaacgc

SEQ ID NO: 124437 - DNA, 951 bp, Arabidopsis thaliana
  unsure (1)..(951): unsure at all n locations
nnnnnnnnnnnnnnnnnnnnnnnnnnnnnnnnnnnnnnnnnnnnnnnnnnnnnnnnnnnnnnnnnnnnnnnnnnnnnnccacgcgtccgcccacgcgtccgcggacgcgtgggattcgagattcttacatgcatccacaatttatgtcggatgtgatgaaaccacttcagattgagcagttgatggatcaagaagttgtcaatctctcaggaggagaattgcaaagggttgcattaactctgtgcctcggaaagcctgcggatatatacctgatcgatgagccaagtgcatatctcgattctgagcaacgtattgttgcttctaaagtcataaagcgatttattctccacgcaaagaaaactgcatttgtagtcgagcatgactttataatggcgacctatttggcagaccgggtcattgtgtatgaaggacaaccatccattgattgtactgcaaattgtcctcaatcactgctcagtggaatgaatctcttcttatctcatctgaacatcacattcagacgggatcccaccaatttcagaccaagaatcaacaaattggagtcgaccaaagacagggaacagaagtctgcaggctcatactactacttggatgattaggacaactaccaagagaatatagggcattgttcgaattccagaagggtcttttgctcagaggaagttgatctatgagctcggaatattttacgcagccatctgttttccgagtgcataagcacagatgtttctttctggtcaagcttttaattgttgtttcatcagttttacttctacattttctctctcacagcttttattaactgagcaataaaagtttaagaatctgtaacctttttttctttttggctttgtacttcctgagttgatgatttcaacatttactgtgatgttactactttggattttacaatctattgcctatttttac

SEQ ID NO: 124438 - DNA, 879 bp, Arabidopsis thaliana
  unsure (1)..(879): unsure at all n locations
cgcgtccgcccacgcgtccggttacctcgatgttaagcaaagactcaaagctgctcaagttgttcgttctctcctgaggcctaatagctacgtcattgttgtggagcatgatctcagtgttcttgattacttgtcggatttcatttgctgtctgtatgggaaaccaggagcctatggtgtggtgactctccccttctctgtcagagaaggaatcaacattttcttggctggatttgttcctacagaaaatttacgttttagagatgaatctttgaccttcaaggttgctgagactccacaagaaagtgctgaagagatacagtcgtacgctaggtacaaataccccacgatgaccaaaactcaaggaaacttcaggttgagagtgtcggaaggtgaattcactgactctcagattattgtaatgcttggggagaatggtacagggaagacaacatttattcggatgctggccgggttgttgaaaccagacgatacagaaggaccagacagagagataccagaattcaatgtttcgtataagccacaaaagatcagcccaaagtttcagaattcagttaggcacctgctacatcaaaagattcgagattcttacatgcatccacaatttatgtcggatgtgatgaaaccacttcagattgagcagttgatggttcaagaaggttgtcaatctctccaggagggggaatttcaaagggttgcattaacttctgtggcctcggaaagccttcgggtatnataccctgatncggtggngccaagtgnaatatntcgnttntaggcaacggnttttttnnttnntaaaggcnataaaggnggttttttttcccgnaaangaaaactncanttntngtcggggat

SEQ ID NO: 124439 - DNA, 381 bp, Arabidopsis thaliana
gccttttctcgatttcaaaactgaaagataaaaacagagagagctctagggtttcaaattaaccagagggaaacaacgaagaagaagaccaattctctctctttctcttcctctttttttttttggtttccctctgattccaaacacgattattttttctttttctttctcttttttcttttgcttttcgtttaccagaaaaagcgataagagaaaaattataggtgggtctgttattttcccggaagttatcattgagattcaataagagaaggagatatcattagctttcctggaaaaattcgacttttgggtttagttttcgtgttcttggtggttcaacggtgaacgagctctatattggcgctagttttggctatc

SEQ ID NO: 124440 - DNA, 1497 bp, Arabidopsis thaliana
aggaatcccacctgatactcagaaggagacctcggaacaagaacagaagacagtaaaagaaaccctggtttcagcttatgagaagaacatttctactaaactgagagctgaactatgcaatgcggaatcccacagctatgaatacaccaaagctgctggtaattttcactttttgaagtagttttgttatattctgcttctgctcttttacaccactaataatctgatgttatctgttctttaaatggagcagccaaaaacctcaagtcagaacaatggtgcacaacttggtggtatcagttcacccggctcctcccacgcggccgcagagagaggagattcgaatctttcaacaagctcaggattttccaagtcatcagtgttgcttttcttggtggccttttatggtggcatactccaaaatctcacatccaagatagaactgctttgctcttcttcttctcggtcttttggggcttctacccgctatacaacgcggttttcacatttccacaagagaaaagaatgctaatcaaggaacggtcttccggaatgtaccgtctttcctcctatttcatggctagaaacgttggggacctgcccttggaacttgcccttccaactgcttttggtgttcataatttacttgggatggggggacttaaacctgacccaacaacgtttatcctctcgctactggttgttctctattctgtccttgttgctcaaggtcttggcttagccttcggtgctctgcttatgaacatcaagcaagccacaacgttagcatctgttactacactcgtttttctcatagccggaggatactacgtgcaacaaattcctcccttcatcgtatggctcaagtacctaagctacagctactactgctacaagctgcttttgggtattcaatacactgatgacgactactatgagtgttcaaaaggagtctggtgcagagttggagacttcccagcaatcaagtcaatgggattgaacaatctctggatagacgtgtttgttatgggagtgatgttggtgggttatcggctcatggcttacatggcactgcatcgggtgaagttgcggtaaacgtgcagccgaaggtaacaacaactaagtaactccaagaagctccaaagaaaattttccccactgcaaccaaggaataatagtagtattagaaaagataaaagtcgtcgaattttggtcgattttacttacgtatccgagatatatatccgacgactttctttttattttaggctagatgatgatagtactcctaagtttgagaataaaacagtgagataatgtatgagataagaagggaaaccaagtatatactaattcccatttgcaaaaacagtgactaaactttcggtccactcttccatggaaatgattgttgtaaaaaaaaaaaaaaaagggcggccgctctagaggatccaagcttacgtacgcgtgcatgtgacgtcatagatcttctatagt

SEQ ID NO: 124441 - DNA, 377 bp, Arabidopsis thaliana
cccacgcgactggcttctcaacaatggcggctattccttcccacaacaaccttcttaccatcaaccacaagaactccataaccggttcttcttccctaaataccaatttctcagaaatcagttttcccgccaaattccgagtagctacgagagctttgtccagaaccgacgagtcgtcgttatccgccgtgatgtctcgcctcgagcgagaaaggcgggaaagacaaggtttattaatcgaggaagcggaaggagctggagaactatggatgacggcggaagatattcgccggcgagataaaaaaaccgaagaagaaagaagactaagagacacgtggcgtaagatccaaggagaagacgattgggccgggttaatg

SEQ ID NO: 124442 - DNA, 417 bp, Arabidopsis thaliana
actttgccagtatttcatccttaatccattcttgtggtcactttttcgtccttaacccatctagattttgattctaaagtcttgtgaatcggcagcggaagaagagtgaattgttcatccttatcttgccatggctatgtatattcgtgtgaagcgcatgaaaactacttactttatccaatgtgatccaacagagactgttttggatgttaagcaaaaactgtttgctctcattgagcaaccagttaacaatcagcgtctggtcttaatgtctaccgaagaagtattagaggattcgaaatccttagcagatcagaaggttgagaatgatgcagttgtggctttgactttgaagaaagatgataacgagtttgaggatgtcaacattgcacagcccaacgacttctcactttcatg

SEQ ID NO: 124443 - DNA, 449 bp, Arabidopsis thaliana
  unsure (1)..(449): unsure at all n locations
cccacgcgatccagtctctttctccgtcgccaccgttcctaaaacgtctcccgtcttcttctaatggcgatcaatcgtagctccgatcatgaatccgacgaaaacacccgtctttaccatccttaccagaactaccaggtcccgatcaaatctcagtatctatacaagcttccgacttctccggaatttctattcacggaagagtctctcaagcagcgtcgatcatggggagaaaatctcactttctacacagggacgggttatctagccggctctgtagccggtgcttcagctgggatcttctctggtatcaagagtttcgaaaatggagacacgacgaagctgaaaatcaacaggattttgaattcgtctggtcaggcaggtcgtaccttcgggtattagggggttggnntttttngggtnaacctnngangggnttttaaaaaggg

SEQ ID NO: 124444 - DNA, 537 bp, Arabidopsis thaliana
  unsure (1)..(537): unsure at all n locations
nnnnnnnnnnnnnnnnnnnnnnnnnnnnnnnnnnnnnnnnnnnnnnnnnnnnnnnnnnnnnnnnnnnnnnnccacgcgtgcgcaattttcctctctttacccagaagatttcatcagaacctcttcgccattaatgggttagtgttactttccccaaatgtagaattaagggtttagggtttttagttccaaattcaattcttaacgaagcaatttcaaatctttttttcatttcagttacagcgatgttttgtgcatcatcttctccaattacatctcctctctacccaaaagcttataaattttctcaaacaaaatcgaattcgaagagattttcctctctgcgtgcttcgttgcctgtttctgataacaagcttcttaaatttgaatacacaccatggcttattgttggacttggtaaccctggattaaagtattacggaacaaggcataatattggttttgagatgattgatcataatagctcgagccacggatttttttaataaacacatttaaccccagggttttatgtgg

SEQ ID NO: 124445 - DNA, 469 bp, Arabidopsis thaliana
aatcttgttcctttttgctctctctacccgattcacccactctgtttctcgattagtacggtgaaaactcactttggtttggtttgattcctctttagtctgtttttcgatttcgttttctctgattggtttggtggtgagatctctatcgtagtttgtcctttgggttaagatatttcatttgattggtgggtttgttttattgaagcttattgttgtgaaagttggagtctttctcagtttttaggttgaattattaagagaaagggaagatttttggtgtgaagttaggttatttggggtttgagaagtttgcaagtgaaaaaggttgtgaattgtgagtgatgaagagagggaaagatgaggagaagatattggaacctatgtttcctcggcttcatgtgaatgatgcagataaaggagggcctagagctcctcctagaaacaagatggctctttatgagcagct

SEQ ID NO: 124446 - DNA, 952 bp, Arabidopsis thaliana
  unsure (1)..(952): unsure at all n locations
nnnnnnnnnnnnnnnnnnnnnnnnnnnnnnnnnnnnnnnnnnnnnnnnnnnnnnnnnnnnnnnntgacctttaggacccacgcgcccgaacgttattaaccgattaaagaacgacatcaaattgttgtactctttgggagcgagtaaattcgtggttcaattgctagcaccattgggatgcttaccgatcgtgagacaagaatacaaaaccggcaacgagtgttacgagctgctcaatgatttggccaaacaacataacggaaaaatcggtccaatgttaaacgaatttgctaaaattagtactagcccctatggttttcagttcaccgtcttcgatttctacaacgccgttcttcgtaggattgcgacaggaagaagtcttaactacagattcttcgtaacgaatacttcgtgttgcggtgttgggacacacaatgcatatggttgcggaaagggaaacgtgcactcgaagctatgtgagtaccaaagatcttacttcttcttcgatggacgtcacaacacagagaaggctcaggaggaaatggctcatcttctatatggagccgaccctgacgtggtccagccaatgacggtccgtgagctaatcgtctacccaactggagaaactatgcgtgagtattgggaacccaacaacttggctatccgtcgtcggccgtctcgtgacttttacttgggcctcgccgcctattattagttggatggctttgagctgaatatttcgatatatatgagagctattgtcttataatgtataatcgatatcgtaacgtggaattatgcctatatgacgtcaaattatgcctttgacgttgtcgaataaactgcttttgaatatctgttgtatcctctaattttggtaatctatgccaaatagaataaatttataattgtcgttgtttgtaccaaaaaaaaaaaaaaaaannnnncaagc

SEQ ID NO: 124447 - DNA, 669 bp, Arabidopsis thaliana
  unsure (1)..(669): unsure at all n locations
atcgaaaatnagatgagagagagaggaggagtctctcatcgtgagtagggcttttaactccctccctactttgcctacttcttcttcttcctctgtggccactctacactgtccacacctacttcaagacacctttctcatccttgagatcggcgtcagatcctccgccgcttctcctcttcactatctccgtgttaaagatgatggaatctggcgctggtttcgtggccatggaagagaggatctctcctggaagtttcttccagtatcctctttctggattccgtgcttctcctaatcgatccccttgtcctccctctgatcgtgaaaggtacttgactgaattattgcaagagagacaaaagttgggtccctttttgcaagttatgccaaattgctgcagactgcttaatcatgaaaatcaggagggtctctagttttcctgatcttgatagatatgagcatggcagtccatttagatcccttggtcagccgacaaatgggaagctttgatttagagggattggtcgatgatgcaaagccgaggaaaactgtcaaccttccagagagcttcttccattttggcggggccttncccaattggggcttggttttgggattcccgggnnntccctaaacccnccccatttttgaaaaaaggggttnana

SEQ ID NO: 124448 - DNA, 878 bp, Arabidopsis thaliana
cggaagcgtgggaaaaatcatccggagctgttccctttggaacaatgtttgctctgatcttcctctggtttggaatctcggtccctcttgtctttgtcggcgcttacctcggattcaagaagccaccgctcgatgaccccgtgaaaaccaacaaaatcccgcggcaaatcccggagcaagcttggtacatgaacccaattttctcaatcctcattggaggaatcttaccgttcggtgcagtcttcatcgagctcttcttcatcctcacatccatctggctcaaccagttctactacatcttcggtttcctcttcctcgtctttgtgatccttatggtcacctgcgccgagatcaccattgttctctgctacttccagctttgcagtgaagactatctctggtggtggaggtcttacctcacctcaggctcttctgcggtctatctcttcctctacgcagccttctatttcttcacaaagctccagatcactaagctcgtctcagctatgctctactttggatacatgctcatcgcctcttacgcgtttttcgtgctgaccggaacaatcgggttctacgcttgtctctggttcacaagactcatctattcctcggtaaagatcgattgattcagaaaaacattcaaggagaagtacggaagaaagaaggcaagggaatataggtaattgattttcacaaggtttgttttttgctcaaataggggggctcttcctggttttcgctctgggttttggtttacaaggaaccaaaaggaaagggttttatatggaaaccttttctttttttagagtgtattctgtttgattttcccaaatgtcactttggattatcttccttaattgacaattatgtgattc

SEQ ID NO: 124449 - DNA, 809 bp, Arabidopsis thaliana
acccactatagggtaagctggtacgcctgcaggtaccggtccggaattcccgggtcgacccacgcgtccgaacctctctctgctcagcttttccgaccaaaagatccaagcgcaagatcaactcaaaatcaatggattatctcggaatcgacatgagctgcgcgatcggatctctccggaacggtgacttcccggagaaagattgtcttcttcctctaatttcaaagcttctcggttattgcctcgttgctgcttcaatcaccgtcaagctccctcagataatgaaaatcgttcaacataagagtgtacgaggcttaagtgttgtggcatttgagcttgaagttgttggttacacaatttcacttgcttattgtttgcataaaggtcttcccttttcggctttcggcgaaatggcttttcttttgatccaagctttaatcttggtggcttgtatctattattattcacaaccagtacctgtcacaacttggattagaccacttctatattgcgctgtggcgccaactgtgcttgctggacagattaatccgacgcttttcgaagctctttatgcttcacaacatgcgatatttctctttgcaagactccctcagatatggaagaactttaaaaacaaaagcactggagaacttagtttcttaactttcttcatgaactttgccgggtcaatagtgagagttttcaccagcttacaggaaaaagctccaattagcattcttacgggtttcgctcttggagtcgtcaccaacggaagcatcctgacgcatattctcttgtactcgaagcct

SEQ ID NO: 124450 - DNA, 735 bp, Arabidopsis thaliana
atgatctccagctccctacgactcacttagggaaagctggcacgcctgcaggtaccggtccggaattcccgggtcgacccacgcgtccgtacggctgcgagaagacgacagaaggggatctaatcacttttgcaattcaccggaacttagccgacgagcgctgatcaaatcaaccggagaagcaaagctatagatctactatctccttcacagttgctatcagagatgtataataatatgggaccccggcctggaatggcaatgcctcaggcaaatcctcagcctagcccatttgggaatccgttctctggacctggctctggacttatccggagtggcttgggagcttatggggagaagattttcggttctagctctgagtatgtgcagagcaacataagtcgctacttctccgatcctcaatactattttcaagtgaatgaccagtatgtgaggaacaagttgaagattgttctacttccattccttcacaggggacactggactcgaatatcagaaccagttgggggtagactttcatacaaaccaccgatatacgatataaatgcaccagacttatacattccgcttatggcctttggcacttacgttgttcttgctggtttgtcactaggactctatggaaagtttactccagaagctctgaactggctttttgtgaaaggaatggttggctggtttttgcaagtgatgctgctgaagataacattgctt

SEQ ID NO: 124451 - DNA, 597 bp, Arabidopsis thaliana
cccacgcgtccgctttgcaaatccttgaagaaatccaaaatccatagcaatggcgacttcgatagctcgattgtctcggagaggagtcacttctaacctgatccgtcgttgcttcgctgcggaagcggcgttggcgaggaagacagagttacctaaaccgcaattcacggtgtcgccgtcgacggatcgtgtgaaatgggactacagaggccaacgacagatcattcctttgggacagtggcttccgaaggtagccgttgatgcttacgtggcacccaacgttgtgctggctggtcaggtcacagtctgggacggctcgtctgtttggaacggtgccgttttgcgcggcgatctcaacaaaatcactgttggattctgctcgaatgtacaggaacggtgtgttgttcatgccgcctcggtcttccccaacaagggttaccagcagcggcaataattcgaccaggtatgtgacagtaggtgcctacagtctttctgaggatcatgtaccatcggaaccagagtgcatcatcggtcaacactcaatactaatggaaggctcactggttgagacccggtcaatcttggaagcgggttcag

SEQ ID NO: 124452 - DNA, 751 bp, Arabidopsis thaliana
cggagacaaggaagcagagaaggagaaggagaagaagaagaaggaagaggaagtcaaagctattcggattccagtggtgaggcttaagtttggagaagtagcagaagcgacctcggtggtagttttaccggtttgtaaagcagaggaaggggaaaagaagattcttgaagctccaatggagatcatagccggaggggattttaaggtggttgaggcggagaaaggatggaagagatgggtagtgcttccgtcgtggaacccagtggcagccattgggaaaggcggtgtggcggtttctttcagggatgatagaaaagtgctgccttgggatggaaaggaggagcctttactggtagtggccgatagggtgaggaatgttgtggaggctgatgacgggtattatctcgtggtggctgagaacggacttaagctagagaaaggatcagatttgaaggcgagagaggtgaaggagagtttagggatggttgttttggtggtgaggccgccaagagaagatgatgatgattggcagacaagtcatcagaactgggactgaattaatagaatcaatactcatatgctgtaactgattacggagtcatcatggtcatgtaaaaattttggataaaggtgggaactttttgtttttagattcccaaaaaaaaaaaaaaaaaaaaaaaacaagggcggccgctttaaaggattcaagcttacgtacgcgtgcatgcgacgtcataggttattgtaaaag

SEQ ID NO: 124453 - DNA, 667 bp, Arabidopsis thaliana
  unsure (1)..(667): unsure at all n locations
nnnnnnnnnnnnactatcgggaaagctggtacgcctgcaggtaccggtccggaattcccgggtcgacccacgcgtccgtcatcttcgtcttcctttcctccttcattcctcttttcttcgtctcccaccatttctgcagaagaagacaaataaaaaagctctcatttatcttcgtggagatctaaaagaaggaggaagacatttcttccctctggatctccaaaagtaagaacatttacaagaaacgagaggtttgggtggggaaggaaagaaggaggaagaggcaatgtcagctaggtattggtgtcacatgtgttcacaaatggtgaatccagttattggtgccgagatcaaatgccccttttgccaaagcgggtttgtcgaggaaatgagccgtgagattaatggcggcagcagtagcagtctaagggaggttcaagaccctgagattgattttggtacagaccgtgcattgtctctatggggtccaatcttgcttggaatgatgagtaatcctcgtagacgtagaaggtttaggaggacagagtttggtgtggataatgatgaggtcaatgtatctgatgatgttgatggaaatgacagcgtcgatattgatcgacatcatcatcgtcgtcatcgccacaggcaacaaggtagcagagcattg

SEQ ID NO: 124454 - DNA, 364 bp, Arabidopsis thaliana
gcgaactatacattacattcccttttcttcgtcttcatcttcgtcttcctttcctccttcattcctcttttcttcgtctcccaccatttctgcagaagaagacaaataaaaaagctctcatttatcttcgtggagatctaaaagaaggaggaagacatttcttccctctggatctccaaaaaaaaacgagaggtttgggtggggaaggaaagaaggaggaagaggcaatgtcagctaggtattggtgtcacatgtgttcacaaatggtgaatccagttattggtgccgagatcaaatgccccttttgccaaagcgggtttgtcgaggaaatgagccgtgagattaatggcggcagcagtagcag

SEQ ID NO: 124455 - DNA, 1212 bp, Arabidopsis thaliana
  unsure (1)..(1212): unsure at all n locations
cnnnnnnnnnnnnnnnnnnnnnnnnnnnnnnnnnnnnnnnnnnnnnnnnnnnnnnnnnnnnnnnnnnnnnnnccacgcgtccgaaaaaaaaaaaaaaaaaaaggagagagagagagagagagagagagagagaaacgaagaaaaaaaaagaagcaaaaaacattgtgggtctccggtgattaggatcaaattagggcaccagccttatcggaggaagaagccatgggtagaaaaaaagtcgagatcaagcgaatcgagaacaaaagtagtcgacaagtcactttctccaaacgacgcaatggtctcatcgagaaagctcgacaactttcaattctctgtgaatcttccatcgctgttctcgtcgtctccggctccggaaaactctacaagtctgcctccggtgacaacatgtcaaagatcattgatcgttacgaaatacatcatgctgatgaacttgaagccttagatcttgcagaaaaaactcggaattatctgccactcaaagagttactagaaatagtccaaaggttagcacaaagacacttttatctccctcttcttctgatgaaaaatacttttttttttcttttcttttggcgaattatgaatacagcaagcttgaagaatcaaatgtcgataatgcaagtgtggatactttaatttctctggaggaacagctcgagactgctctgtccgtaactagagctaggaagacagaactaatgatgggggaagtgaagtcccttcaaaaaacggagaacttgctgagagaagagaaccagactttggctagccaggtggggaagaagacgtttctggttatagaaggtgacagaggaatgtcatgggaaaatggctccggcaacaaagtacgggagactcttccgctgctcaagtaatcaccatcatcaacggctgagctttcaccttaaacttacagcctgattcagaagtttttacaaatttgtaaattataaaaagcttcataataatctcaacctttttatcttcctcgcgccaatgtggaaattaaggttaaaaataaaataaaacagaagctcatgcgaaagaattgtaaaactaagataaagctatagtagatctttattgtaccttcgtagacgatataagatttattcgtgtgttaaaaaaaaaaaaaaagggcggccgctctagaggatccaagcttacgtacgcgtgcatgcgacgtca

SEQ ID NO: 124456 - DNA, 532 bp, Arabidopsis thaliana
aaaaaggagagagagagagagagagagagagagagagagagaaacgaagaaaaaaaaagaagcaaaaaacattgtgggtctccggtgattaggatcttattagggcaccagccttatcggaggaatgaagccatgggaagaagaaaaatcgagatcaagcgaatcgagaacaaaagcagtcgacaagtcactttctccaaacgacgcaatggtctcatcgacaaagctcgacaactttcgattctctgtgaatcctccgtcgctgttgtcgtcgtatctgcctccggaaaactctatgactcttcctccggtgacgacatttccaagatcattgatcgttatgaaatacaacatgctgatgaacttagagccttagatcttgaagaaaaaattcagaattatcttccacacaaggagttactagaaacagtccaaagcaagcttgaagaaccaaatgtcgataatgtaagtgtagatactttaatttctctggaggaacagctcgagactgctctgtccgtaactagagctt

SEQ ID NO: 124457 - DNA, 409 bp, Arabidopsis thaliana
cacatatcggagatttgaagccatgggaagaagaaaaatcgagatcaagcgaatcgagaacaaaagcagtcgacaagtcactttctccaaacgacgcaatggtctcatcgacaaagcgcgacagctttcgattctctgtgaatcctccgtcgctgttgtcgtcgtatctgcctccggaaaactctatgactcttcctccggtgacgacatttccaagatcattgatcgttatgaaatacaacatgctgatgaacttagagccttagtaagtaattagctaagaacgtcattctaatattcttctggatgcggtttttggtgttatgaacgatagaagcgctgttcaagccggagaaacctcaatgttttgaactcgtaacaccgaacttaattctctagagttacagtt

SEQ ID NO: 124458 - DNA, 435 bp, Arabidopsis thaliana
  unsure (1)..(435): unsure at all n locations
aaaggtgagcgtcgcagtaaagaccagagggtaagcagtttttatttcttttgtgtgtgtgggtgtttaaagaagatagataaacagtgtttcgatcttctggtctcatcgagatattaaaagaaaatccagattacaaattctttttctatttttttgtggagtttgaatctatccatcttctgagagaagaaaagggaacaactttttttctccatttcacctaaaaaattgttcatcccaagtttctgtctttggtttcatctagtttcactcttggtgattctggaagataagtcgctgagttaaagttgcagatcttgaggttaagagaaagaaagtgagtgttgtgtaatggggggggtaaaagggcccaagaggaagtggnccccannggcanttttttttttcnannggggnnngnggaaaaaggtt

SEQ ID NO: 124459 - DNA, 428 bp, Arabidopsis thaliana
gactcaccacataaagtaaaagtctcatctcttcataaaatagctttaaaccaatcaagtagagtttcttctcaagtctttttattttatttttatcaatggcttcttcagcagtgtctctccaatccatctctatgacaactctcaacaatctttcatgtaatcaacaatttcatcgaagctctcttcttggttcctctaaatccttccaaaatcttggtatctcatctaacggttcagatttctcctatccatcaagtttcactgccaagaagaacctcactgcttctcgagctctctcccaaaacgggaatatcgaaaaccctagaccaagcaaagttcaagaactgagtgtgtacgaaatcaacgaattagatcgacacagccccaagattcttaaaaacgcattcagcttaatgttcggtctc

SEQ ID NO: 124460 - DNA, 341 bp, Arabidopsis thaliana
ccgcataaacccaaatacctgagaaggttgcttctgcagccaagagcagtcctgcatgggatgaagattggggctccccgagcaaagattctgctgtgggaaatcctgcttcttctcgtcataacacagacgatcagtttaacaaatccacagatcagtcacagccatcgatcatgtctactctgcccaacaagacaacagcgccaacaacatgccctgcagtggacatcgagtggcctccaaggcaatcttcaagcctcactgctccagcaactgataatcagacacaactaaacacaggaacatcatttgcttcgggtttcgatgagttagatccgttt

SEQ ID NO: 124461 - DNA, 717 bp, Arabidopsis thaliana
ggcgatgctttttcgacctcctccttcacaatgtagaagcttctctccttttgtcttcaactacagctccagagaagtttcttcgtcgtctcgtctctccttgaaaacctccggcgacgaagaaaactgggtttcacgtttccggtcgaaatctctcagttcggtgttctctggagctcttgctctcggtttatctctatcaggcgtggggtttgcagatgcaaaagttggtgttaacaaaccagaattgcttcctaaagagttcacttctgttatagatgttgctgatttcctctctaatggtcaggagaagagaattgctcaagaaatcgctaatcttgagaaagatacaggattcaagttgagagtcttggctcaaaactatcccgttacccctggactagcaatcaaagatttctggcaggtggatgatagcacaattgtgtttgtcgctgacccgacttttgggaacatattgaatttcaatgttggagctacggttgatttagacatacctcgtagtttctggagtcgactggctgggaaatacggcaatatgttttactggaaagagaagggagaagatgcatctattgaagctgcagtgatggcgatatcaagttgcttacgagaaccagttggtcgaaacaactgtgcagagatccaatgaagtatatgaccccatcaagcgtatatgttattatcataatatcattg

SEQ ID NO: 124462 - DNA, 492 bp, Arabidopsis thaliana
cggacgcgtggggtttatatatagagaattagatatcccctccaattactcaaaattattatcaaaataagaaagagctcaacattgttctctgactctataaataactgttcttggaaattttccaagagaacaagaaacaaaaacaaaacgttgtttaagtgtggttctatagatttcttgtgaatgtcttctgaacaaggaaatggatcgaatccttccacgtcaccggaggtagaagggactaaaacaatcccctttcgccggagattgcaaagaggacaaagagttttcgctccaaagctgatggaggctctacgtcgatcaagggtaagctctgaagaagctccggtaaggcatcttagtcgtagatggagagccacaacggcgcagaaggtatattccctaaagctctacgacgctcttcaacgatcgcggcggagcgcaacagtccgggacacggccgacaaagtccttgcgacgaccgctcgt

SEQ ID NO: 124463 - DNA, 627 bp, Arabidopsis thaliana
tctaccaaaacttctttctttctctctttttctatatctctagagcgcgttactgcgcgtcgtgagtatgtttttattgacgccattgaaattgggttaaatcggtttgaatcggattgaacaaaaactgtattaataataattcttcctctacttttctctctgattgattccaatcttctttcattttcttcttcttcttcttctggggaaggggcaggttaaaattatgccatctattcaaatcgtgcctatcctcagatcttaactcttttctctacgagattcggcatctgggttttattcttcttgagcaaaatgcaatcggataatggaaagcttttcatcggtgggatatcttgggacaccaatgaggaacgtctcaaggagtatttcagcagttttggagaagtgatcgaagctgtcatcttgaaagatcgtaccactggtcgtgctcgtggtttcggttttgttgtttttgctgatcctgctgttgctgagattgttatcaccgaaaaacataatattgatggcagattggttgaagccaaaaaagctgttcccagagatgaccaaaacatggtaaatagaagcaacagcagtagcatccaaggttctcccggtggt

SEQ ID NO: 124464 - DNA, 422 bp, Arabidopsis thaliana
gatcacatcctcacacacaaaaataaatcatcacaagaccagagttaaaagagagacatgtcgacttcattcacaatgatcggcggtgaaggtcccaacagttaccgggaacattcgaaataccagggagcactggttatagctgcaaaggaaaagatcaatgaagccatctccacgaaactcgatatcgactttacttcaaatcttgttaacatagctgattttggttgttcctctggaccgaacactttcaccgcggtacaaaccttaattgatgctgtggaaaacaagtataagaaagaaagtaatattgagggaatcgagttccaagttttcttcaatgattcttcaaacaacgattttaacactctcttcaagacacttcctccggctagactgtatttcgcaagtggagtaccggg

SEQ ID NO: 124465 - DNA, 461 bp, Arabidopsis thaliana
aaataataatagtgtaattaagtcggaggaaaacaacaagaacccagaaagaggaacgaagaaactaattcaaaggatcaagttcaccgcttcattttagtcattaaacaaagatggtgatgggaggagaagcatccatggaactggaccagtgttttcagaagatgaagatggaaggaatctcgatcaaagagtgggaagatatccctgtggagcttctgatgaggatcctttcccttgttgatgatcgtaatgtcattgttgcttctggtgtttgcactggctggagagatgctatctcttttggcctcactcgtctccgtctatcttggtgcaacaacaacatgaaccagctttggttcctttctcttgttcccaagtttgtaaagctgcagactttaaatctaaggcaggacaaaccgcaactagaggacaatgcagtggaggccatagcatatcac

SEQ ID NO: 124466 - DNA, 566 bp, Arabidopsis thaliana
cggcgttcttcaatcgaaaggtaaagagtttgaagaagtaagtcacagagaaagagaagatgtctgagaaaaagggaaggaaagaggaagtgattaccagagagtacaccattaacctccacagacgccttcacaaatgcacctttaagaagaaggcaccgaaagccatcaaggaaatcaggaagttcgcagagaaagctatggggactaaggacgttagggtagacgtgaaattgaacaagcaaatctggagcaagggaatcagaggtccaccaaggaggatcagggttcgtgttgcacgtaagagaaacgacgatgaagatgcgaaggaagagttcttctcccttgtcactgttgctgaaatccctgcagaaggactcagtggtcttggcacaaaggtcatcgaagaggaggattaagagaatcagtaggacaagttttgtttggttttttacttttgttgctgtgtttcaatttaaaagtcttgaccctttcactttcttcattgtagtgcatcttgaatttacttatgcagttttttgaagagaccctttttcttcttcatg

SEQ ID NO: 124467 - DNA, 1491 bp, Arabidopsis thaliana
  unsure (1)..(1491): unsure at all n locations
nnnnnnnnnnnnnnnnnnnnnnnnnnnnnnnnnnnnnnnnnnnnnnnnnnnnnnnnnnnnnnnnnnnnnnnnnnnnnnnnnnnccacgcgtccgggaacgatgaattctcgtagtaacaacacaagcactttggttcatcctggaccatctagtcagccttgtggtgtggaaagaaacttatctgtccagcatcttgattcttcagccgcaaaccaagcaactgagaagtttgtctcccaaatgtccttcatggaaaatgtgagatcttcggcacagcatgatcagaggaaaatggtgagagaggaagaagattttgcagttccagtatatattaactcaagaagatctcagtctcatggcagaaccaagagtggtattgagaaggaaaaacacaccccaatggtggcacctagctctcatcactccattcgatttcaagaagtgaatcagacaggctcaaagcaaaacgtatgtttggctacttgttcaaaacctgaagttagggatcaggtcaaggcgaatgcaaggtcaggtggctttgtaatctctttagatgtatcagtcacagaggagattgatctcgaaaaatcagcatcaagtcatgatagagtaaatgattataatgcttccttgagacaagagtctagaaatcggttataccgagatggtggcaaaactcgtctgaaggacactgataatggagctgaatctcacttggcaacggaaaatcattcacaagagggtcatggcagtcctgaagacattgagtaatgatcgtgaatacagcaaaagcagagcatgcgcctctctgcagcagataaatgaagaggcaagtgatgacgtttctgatgattcgatggtggattctatatccagcatagatgtctctcccgatgatgttgtgggtatattaggtcaaaaacgtttctggagagcaaggaaagccattgccaatcaacaaagagtatttgctgttcaactatttgagttgcacagactgattaaggttcaaaaacttattgctgcatcaccggatctcttgctcgatgagatcagttttcttggaaaagtttctgctaaaagctatccagtgaagaagctccttccatcagaatttctggtaaagcctcctctaccacatgttgtcgtcaaacaaaggggtggctcggagaagactgacccaacataaaaattgggaagctcagcttgagaacggagtttgggagggttggcaaaatcaagggcatcatcaccaatccaacttcaatgccttttgcaaacaaccccacccggcttcaccggctccaaatggatattgctttcctcctcagcctcctccttcaggaaatcatcagcaatggttgatccctgtaatgtctccctcggaaggactgatatacaagcctcacccaggtatggcacacacggggcattatggaggatattatggtcattatatgcctacaccaatggtaatgcctcaatatcac

SEQ ID NO: 124468 - DNA, 565 bp, Arabidopsis thaliana
  unsure (1)..(565): unsure at all n locations
ctcagagccacaccaacaacaatggcgtctctattcgcacacggtatctccagcttctctccacaacccacttccgattcctcaaaatcaccaaaagggtttcacccaaaacccgaatccttaaaattcccatctcccaaatccctaaatccaacgagaccgatcttcaaactcagagccgatgttggaatcgattctcgtcccatcggagcttctgaatcatcatcatcaggtacatcaaccgttagctcaactgataaacttcaacagtatttccaaaatctcgattacgataagaagtacggattcgttgaagatatcgattccttcacaatccctaaaggtttatctgaagagacgattcgtttgatttcgaaattgaaagaggaaccagattggatgcttgagtttaggttcaaagcttatgctaagtttctgaaactagaagaacctaaatggtcagataatagatatccttcgattaatttccaggatatggtgttattacctctgctcctaaaaagnaaccnacctttgaatnggtttaggtgaaggttggtccnca

SEQ ID NO: 124469 - DNA, 403 bp, Arabidopsis thaliana
attatcttctgcatcgccacatcgtctaaaaaaaatccccaaattcgtttctcttcgattcaaaatccctccgcaaaaaacccccaaacacgatcttcacccttgtgagatttccaatcgaaatcgagaagccatggataacagcagcagcatcaattccaccgcttccacggcctcaaatctgagcacggcttctctggaaaagctagatcaagcggcgagctgggtcagcaccaccgttatttccgccttcttcgcctccctcgagcgttgctcatgcgttaacctatctacctccgatgatgacgatgacggcgaagaatctcacaaccgtccccttgcgctctccgccgctcctcacccagacgacatcgtttagattcctttcggcggtaaatccttc

SEQ ID NO: 124470 - DNA, 1015 bp, Arabidopsis thaliana
gatacatcggtttttgtaagaaactcggaagaaatgttgtcgatacctggatttgtaaaccctgtcccagccaatgttctgccgtcagctctgtttgttgaagatggttatgatgcttacgttaagctggccatattgtttacaaaggccaatggaatcctagtgaatagctcctttgatattgagccttactctgtgaatcattttcttcaagaacagaattatccttctgtttatgctgttggccccatatttgacttgaaagcccagcctcatccagagcaggacctaacccgtcgtgacgagttgatgaaatggcttgatgatcaacccgaggcatcggttgtattcctttgttttgggagtatggcaaggttaagaggttctctagtgaaggaaatagctcatggacttgagctatgtcaatatagattcctctggtcactccgtaaagaagaggtgacaaaggatgatttgccagaggggttccttgaccgtgtcgatggacgtggaatgatatgtggttggtctcctcaggtagaaatactggcccataaggcagtgggaggctttgtttctcactgtggatggaactcaatagtagagagtttgtggtttggcgtgccaattgtgacatggccaatgtatgcagagcaacaactcaatgcgtttctgatggtgaaggaactgaagctacctgtggagctgaagcttgattacagggtacatagtgatgagatagtaaacgcaaacgagatagagcccgctattcgttatgtaatggacacggataataatgttgtgaggaaacgagtgatggatatctcgcagatgatccagagagctacgaagaatggtggatcttcgtttgccgcaattgagaaattcatatatgacgtgataggaattaagccctagccttttcttgtccaataagctacccccttgtttctttgtactacaccttgtttttgaaagagctacgaatgaaaaaaactgagatttgatttttatt

SEQ ID NO: 124471 - DNA, 733 bp, Arabidopsis thaliana
  unsure (1)..(733): unsure at all n locations
ggagcttatattattccttcgtccacaccattgactccttcttccaatactattccagcacaaggtggagatggtggagttgcttgggatgatggtgttcacgacagtgtcaagaagatatatgttggacaaggtgactcttgtgtgacctatttcaaagctgactatgaaaaggcttcaaagcctgtccttggaagtgatcatgggaagaagacattgcttggagcagaggagtttgtgcttggaccagatgagtatgtcactgccgtgtcgggctactatgacaagatttttagtgtagatgccccggcaatcgtctcgcttaagtttaaaacaaacaagagaacatctatcccgtatggactcgagggaggaactgaattcgtactggagaagaaagaccacaaaatcgttggtttctatggacaagctggtgaatatctttacaaacttggagtcaatgttgcgcccatagccaaatgatgtgaaaccaatctggatatccctgaaatttgaataaggttatgttgtgagtttatgaagttgtggtctagtgttgtattttgtttttcttaaggataatgcatctgtgtgctttgcttatctaaaatctaaataaagtgggtttctgcaaaaaaaaaaaaaaaaaaaaaaaagnnnnnnnnnnnnnnnnnnnnnnnnnnnnnnnnnnnnnnnnnnnnnnnnnnnnnnnnnnnnnnnnnnnnnnaaagtc

SEQ ID NO: 124472 - DNA, 482 bp, Arabidopsis thaliana
actctctctctctcgtcaggaatcgtctctgctctttcatcatcctccgagaattatcacacaaggtcactgcaaggtgtgtacgagagggctaaagtaaatggtgttgttgtgatattcatcttatttttgacagcttgaaatagaggagtttagcaatgcaaggagttcctggatttaatactgttccaaatcctaaccattatgacaaatcaatagtgttagatattaaaccgttgcgaagtttgaaacctgtttttccaaatggtaatcaaggtccaccttttgttggttgtccaccttttggtccttcctcatctgagtattcgtctttcttcccatttggagcacaacaaccaacgcatgatactccagatctcaaccagactcagaacacgcctattccatcatttgttccacctcttcgatcgtatagaacacctactaaaacaaatggccccagcagctccagtggaactaaa

SEQ ID NO: 124473 - DNA, 997 bp, Arabidopsis thaliana
tgacctaagcgttttgagatgacaacaaagtattcgtcgcgacggagagagagcgagagagacgatggaggaagaggagcacgaggtttacggtggtgaaattccagacgtcggagagatggatggagatatggaggctctcaaccccgatttggatatggctgctgctgatgatgatgcggttaaggagttggatgaaatgaagaaacgattgaaagagatggaggacgaagctgctgctctgcgtgagatgcaggctaaggtcgagaaggaaatgggagctcaagatcctgctagtattgcagcgaatcaagcaggcaaggaggaggttgatgctcgatcagtttttgttggcaatgttgattacgcttgcacacctgaagaagttcagcagcatttccaaacatgcggcactgtccatcgggtgaccattctgacagacaaattcgggcagccaaagggatttgcatatgtagaattcgtcgaagtggaagctgttcaagaggctctacaactgaatgaatcagagctacatggtcgtcaattaaaggtcttgcagaagagaacaaacgttcctggattgaaacagttccgtggtagacgattcaatccatacatgggttaccggttccgcagacctttcatgtctccttatatgtattccccatatggatacggaaaagctcctaggtttagaaggcctatgcgttacatgccgtaccaataaaaccgtcatcatggttaagcatagaagggattcgctaccagtgtggatgcgtgtattggctatacccatccttcattgagctttctttatgactttggctctttcgccttttagaactttgcgcgtaaacattttcgaacctagactggtattataagtttcatatcgttttgatatgatgcatataatgattggatcaagtgttgcttatataattgggactattgggttatagctgaaatctgttaaatgaaagtgttgactcttttt

SEQ ID NO: 124474 - DNA, 447 bp, Arabidopsis thaliana
cttcctcccactactgatactacaccgattttttcactcctctttttttcacaatgctcggtgttcaaaggattttccaggagcacatcatccgcagaggccggtggtgtattaggagggtctactcgtggttttttaacttgttgatgcagtcttattggaacgagattgaggattgcaaggtgaagatatttgataaactgagtgaaaaagctgaaaaggttttggagattggtattggcacaggtcctaatatgagatactacgctgctcgcaatagtaacgttactctatatgggttggatccaaatcccaaaatgaagaaatacgcacgcaaatccgctaccaaagcaggattgaaacctaaaaactttagattcaagcaaggagtacgagaagctataccattaaaagataactctgtggatgcagttgttgcaacactgg

SEQ ID NO: 124475 - DNA, 634 bp, Arabidopsis thaliana
tcagggaccgggcctgaatttcctgggccgcccactgcgtgagcgcaaaaaatcaaaaattcgccgagagcacaaaccctaatggcttctctctcaatggcttccgttaacgttagcttctgtcatcctttacgctcttcttctccaaaggtctcacttcgcagttccgttcatttcgcgacgagtctttcctcaagtcactccatttctgggcttcgcgctgttttgcctctgaagatttctacagttgcttcccccaattctcaaaagcttcattcttttaccgttttcgctcataagggctacaagatgaagacccacaaggcctcagcgaagcggttcagagtgacgggtagagggaagattgtgaggaggagatctggaaagcagcatttgttagctaagaagaacaacaagaggaaattacgtctatcgaaaatgacggaagtgaaccggagcgactatgacaacgtgatcggagctctgccctacttgaaagtcaatcgaaaggcgacttaagcagagcaggcttgatccttttcttacctgcaattctcattttgtaatctaaagttgtggtaatatccttttgtattgtgatataatttggtcaatgagttgatttttgtttcat

SEQ ID NO: 124476 - DNA, 591 bp, Arabidopsis thaliana
  unsure (1)..(591): unsure at all n locations
ggaaacttccggagacatcggaggaaccctaaattgaatgagaagaggagagtgagacgggagagaaagccagagcgagcgatagagcaaagacatggagagagaggaggagaagacgaaagagggctcatcgtataggtactgggtgagagaagccacctcagacgcagctcctcctcctctgccccaaaagctcagcaacaacgacgtctctctcaatactgctcctgcgtcccttggctctctctggaatcgggctggcacttgggaggagaagagtctcaccaaatgggctactgaccgattaaaggagctgttgggatcagtgggttcattgcagttctcttctggaaaagctgagattatagatgttaacagatgtttttggagatgctttcttagtcacagttcggaacaagaaaagagttggctatacttacgggctttcccttaaagtttagggagagtggtcattttaaggggatttttaaggaggtaaagggggcccccgcgatnccangttttnatttggggggctttangcccttanggnggttttaacncccccggggnaagggntttcccnnanct

SEQ ID NO: 124477 - DNA, 417 bp, Arabidopsis thaliana
  unsure (1)..(417): unsure at all n locations
cccacgcgtccggaaaaccctaatttctccatttcgaaactccaacgaattctctggtgattttaccaatggcgatggcaacatcgatgagtttgaatctaattggggcattcaaaggcttgtctctttcttcgacttcgtcttttcttagaggcgatttgagtttttcccccaaaacctctttcacggtgactcttcctctggaaaatcttcaagctccgattccgttgacaattgaatcggcccataagaaaggagctggtagcaccaagaacggtcgtgattctcctgggcaacgactcggcgtcaagatctacggtgaccaagttgctaaacctggtgctatcattgttcgtcaacgtggcactaagttccatgctgggcaaaaatgcttgggattgggaaagntccatacca

SEQ ID NO: 124478 - DNA, 431 bp, Arabidopsis thaliana
acaagagcgaaactagaaaaaacaataaggtgcctatgaggtgacgacctgcttgaacaagaggaagcgaaaggatgtgttaccctttctcttgttttcgtatagctattgaatgagtttcatccgatccacgattccgtctctgagctcagaatcataaaagcggaatccgaatctgatctcatgtctttctcattcttcaagccctctaggcctaaaacgcctcaagaggttgttaaagccatcagagacagtcttatggctctcgacaccaagaccgtcgtcgaagttaaagccctcgagaaggctttggaagaagttgagaagaatttttcttctctaagaggaatactttctggagatggtgagactgaaccaaatgctgatcaggctgtacagttagcattagagttttgcaaagaagatgttgt

SEQ ID NO: 124479 - DNA, 850 bp, Arabidopsis thaliana
  unsure (1)..(850): unsure at all n locations
cggacgcgtggggtgcttttttagtcgttctcgtcgagagacttatttatacacgaaaaaggaagaagaagactgttgaaagcgagagagagagagagagagagagagagagagagagagagagagagatggaggatatacaggaggaagagaacggtacggacgaggaggttctgggatcgagcttgaccatggagaaagtggccgcagcgaagcagtacatcgagaatcactacaaagctcagaacaagaacattcaagagaggaaagagagacggtggatcttagaaagaaagttggcgtcttctggagtgccaaaagaggagcatatcaacatgattaaagacctggagagaaaagagacagagtttatgaggcttaaaaggaacaagattagtgtcgatgactttgagcttttgactatcattggaagaggtgcttttggtgaggttcgcttatgtcgggagagaaagtctggaaatatttatgccatgaagaagttaaagaaatctgaaatggtcatgagaggacaggttgagcatgtcagagcagagaggaacctgctggctgaggttnaaagccattatattgtgaagctttactattcatttcaggatcccgagtatctgtatctgccttatggantatctccccggtggtgatatgatgaccttgctcatgagngaggncacattacgggaagatgttgccagnttttatattgctcaaagtntcctggccattgaatccatacaccgatacaactatatttcataggggtatcaaacctnataacctcnttttnngccaaagttgggcncatgaanctntcgccctttggggnnnaaaa

SEQ ID NO: 124480 - DNA, 601 bp, Arabidopsis thaliana
gctctctagtgaagaatccgccatggctgttccatttctaagctcttctctacaactcacacccacttctccgattctcttcactaaagtaacaccaacaccaataatccacaaccacagatcaacatgcactatacccacaaagcctcgtctacgtctcctccgccgctccgccgtcgctggaaccgccgtatctgatcaaacagaaggaggtggagatgttcttttaaaccctgaagaagagaaacgtgttgaggtggcggattatgattggacagaggaatggtatccattgtacttaactaaaaacgtccctgaagatgcgcctcttggcctcaccgtctacgatcgtcaaattgttttgtataaagacggtgaaggaacacttcgttgttacgaagatcggtgtcctcatcggttggctaagttgtctgaaggacaattgattgatgggagattggaatgtttgtatcatggttggcaatttgaaggagagggcaaatgggtcaagatttctttagctttctgcaagtgctaaaattccaaaggctgattgtgtgaagacgtttgttgtgaatggatcatcttggtgtttgtgtta

SEQ ID NO: 124481 - DNA, 832 bp, Arabidopsis thaliana
  unsure (1)..(832): unsure at all n locations
ggnnnnnnnnnnnnncttactatagggaccgctggtacgcctgcaggtaccggtccggaattcccggcccgacccacgcgtccgatcccaatcacttcgcttctaatcttaaagcctttaatttagtcttcgagccctctaatggcggatcagagcaaaaacactccagagatcttcgagctcaacaatggcaccatgcaggtcaagatctcaaactacggcaccaccatcacctctttgtctgttcccgacaagaacgggaaactgggggatgtagttctcggattcgactcggtggatccatatgtgaaagggcttgcaccatactttgggtgcattgttggtcgtgtggcaaatcggatcaaggagggaaaattcagtctcaatggagttaactacactttgcctatcaacaagcctcctaatagtctccacggtggtaacaagggtttcgataagaagatatgggaagttgcagggcacaagagagacggcgaaaaacctttcatcactttcaaatatcacagtgccgatggagaagaaggttaccctggtgcggtttctgtcacggcgacatacactctcacgtcagccacgacaatgagacttgacatggaagctgttccagagaacaaagatactcccatcaacttagctcaacatacatactggaacttagcaggtcatgactcagggaacatttttgggccctaagnttcagatattggggncttatatnangccggttgccggnntcacaagtccttcaggggnggtttttcctnnaangggctcccttcggtttnctttgggggggggtagggggcttttt

SEQ ID NO: 124482 - DNA, 649 bp, Arabidopsis thaliana
tacgactcactttgggagagctggtacgcctgcaggtaccggtccggaattcccgggtcgacccacgcgtgcgatttttttctcccagacccagttatcgagaagcttctctcgaatatgttttctgacgccggcggaggcgcaaatcgtcggcgtcgggacttagctcttccgatcaatttgctttggttacttcttatgcttttgtttacaacttctgtccgctactcgaaaactctgtttcaaccctctcgaatcatttctccttcaccggttttcaacggcggccaaaaaaccagctacggaggaagacgatgtggtccggcgtttgccctcctgttccaccctcttctcgcaaattcttcgccaaaatctttcttttccagcgatgcaatccctcaatcagaagcttttatcatctctccgccttttatttacagatctagatctgtttcaaccaccccaagagaatactcacaccggaattcgttgatggcaagagatgtctcttggaccgtcagatgcgccatctccggtggagtcgtcgtcggcgcacgacgttttcttcttatgggtgatggttccatggctctccgacaagcttacaaagcagctgcacgcttcaccgacgagggagacaacaaaagcc

SEQ ID NO: 124483 - DNA, 323 bp, Arabidopsis thaliana
acgcgtcacactgagggatactgagttgatgggtctctgcacactgaaaacttgaacacaccaaatctacatggacgaagcagagagctttgtcccgtttcagggtataaagaaagatgtcaaagggagactcaactgctacaagcaagattggatcagtggtctcagagctggatttaggattctggcaccaacaacttacatattctttgcatccgctattccggtgattacatttggagaacagttggcaagagatactgatgggaagattaccgctgttcaaaccttagtttcgactgcattatgtggagtgatacatt

SEQ ID NO: 124484 - DNA, 413 bp, Arabidopsis thaliana
cggacgcgtggaggaaagttatcaaatcagtttttgtggaattttgaatctcgtcgcttctgtgttggctatgactgaagttgcgagctcagtggtgtatgaagtgctcggacgcagagctcaggatgtggacgagccgattatggactacatcattaatgtcctcgctgatgaggatttcgacttcggtgaggaaggtgaaggcgcctttgatgccgtcggtgagctcctcgtcgctgctgaatgcgtttccgatttcgaagagtgccgtttggtttgtagcaaactgtcggataagtttggaaagcatggattggtgaagcctacacctactgtgaggagtcttgctatgcctgtgcggatgaacgatgggatggatgatggacctgttaagaagaagagccagagcctgt

SEQ ID NO: 124485 - DNA, 651 bp, Arabidopsis thaliana
gagaaagcgaatttgccgcatggacgcttgtctacggctacacaatgaaccatcttgctttcgcggttcatcgtcttaaacaccgtttcagcgacatcaaatgcgtcaaagagtattttgaagaaaagggtttcgaactcaacaaggatggaggagtcctcaaagtgagtgaagacggtctactgttacaagtgtcggctatgtcggagaaacttgtggttgaatttgcagacggagtaactcaaatcgtcccggcttcatacattgagttcgttgaacgtctagttcttccacagttcaaagatatgccgtgtgatgagatcaaagagtttcatagacgcgagggcttggagcaagctagcgcctaccacataatggaaagcacccgtttcacagcgtaaatatagaaccagcttgttttgttccgctcaatatgtcaagtatgtgtacgtactattaaaatgttttgtatcttatttggacaatttgtgtgtgagatatttctgttcttgtgttgtgaagtgacggtatcacttaatattacccgttaccgacgaataatggcaaacaaagtgtcatggtggggtgtggtatttgtggtgtttttgcatgtaatatcttttgatagtaacgtgacaaaagattttggtg

SEQ ID NO: 124486 - DNA, 650 bp, Arabidopsis thaliana
acgcgtccgagacaactaatgattgaagaaaatggatacgttgaacttgctggaagtaaccaattgtcaaagctttcattaccactagcacgggtctgtctctcaaatggtatatatctgctcaatgagtctctctcgaatgattctaaatcagatcttggatcaatattatccgtggggatgaatgagaccaaagaaggatcatcctctgatcatgaggaaggttacacgaacacagactcgaaagaggcaaaaggaggaatgagccaagaaataattcaaaactcactctctgcttttgaggatattcgtaatagagaaaagcagttgatgagacaggctctctttgccaatatggcttatgtagaattggagttggcgaatcctatcaaagccttgtcagctgctacttcactcttgcaacttgcagattgttcgaagatttatgttttcctaggccatatctatgcagcggaggccctctgcttgctcaatcgacccattgaagctggtgcacatttatccgcctatctactcggacaggatgattttaaactgccatatgcgcaagaagactttgaccagtggtggaagcacacaagttctgattgtgaagagacattggatcccttcacgggaaatactccgga

SEQ ID NO: 124487 - DNA, 437 bp, Arabidopsis thaliana
cggacgcgtgggcggacgcgtgggcggacgcgtggtttaagccctcactatcctctctctcaaatcgcggagtctccgaagtttctctgtcagacaaaatgcagtcgtcaacgtatgcggttaaaggaaacgctgcgtttgcgtttcagagacggaccttctcttctgacagatcgacgacttctaccggaattcgcttcgctggttataagagcttagccaccaccgggccactctactgttctggttctgaagccatgggagcgacgcttgctcgtgctgataacgggatccagagcgttatgagtttctcttctgtcaaagctcgatcggtcagagctcaagcctcatctgatggagatgaagaagaagctatacctctgagatctgaagggaaaagctctggaacagttttgccttttgttggtgttgcttgt

SEQ ID NO: 124488 - DNA, 478 bp, Arabidopsis thaliana
ttaatctctgtgtttccttctgttgatctttttggcacgatctctatttttcttccaaaaaaggaaaaataaaaagatcataacttcagaatcaaagtttctctttgttcacattgttctatccatctgcacatttgattcatgtagtgactaatctcacagtctcgttctcaaatttactttatctgcttgattcgtttcgtgaatccaaatttagtctgaagagaattaagcttggcgcttctttggtgagaagcaagatggatatcgggtgtaaagttctcgtcgttttcacatgtttcctcactgtgacagcagagatttacattgtgactatggaaggagaaccaatcattagttacaaaggtggtgataatggatttgaagcaactgctgtggaatctgatgagaaaattgatactacaagtgaactggtgacatcatacgcccgtcaccttgagaggaagcatgatatgct

SEQ ID NO: 124489 - DNA, 371 bp, Arabidopsis thaliana
tcatcctgtaaagctaaacaaataatcagaggaacgaaggagacagcttctgcgaaatcagcatgagagccaagtggaagaagaagcgtatgaggagattgaagaggaagagacgaaagatgagacagcgatctaagtagattcgggagtttgttttgtctttcttctttttagaaccaactcttatgtgagttttgttggttttgcaattttcaatttgaatgttttgttggaccaaatcgaatctatgttttctattagaattatgtttattacatggaatgatccttatgagttactgattctccttaaagttcttcaatctgcttaaaaaccacaaaaaaaaaaaagggcgcccgctcgcgatttag

SEQ ID NO: 124490 - DNA, 800 bp, Arabidopsis thaliana
  unsure (1)..(800): unsure at all n locations
ccatttggattttttccccattgggaaaaaggtttccggtttaaccttttttgaataaaaaaaaaaagttcccccctaggctcagggtttttttcgggcctttaagtccctgggaaggcccagaatacaagaggggttaaggccccctggcattgtcgtgggatggcataaaaaacctagcaaaaactgaactgttggtttggtatttggtattcttactgaagatcttacgtttgggactcaatgtgtatttgtggtcatcctatccagctgaaaacggctagggaagctgtgacgtttggtgttaccggagctgcacttggagctgtctttaatgctgcttttgcctggaaatactccaggagtccacatggtgctgcattgtccttcttaggaggaggtgtttttggttggacctttgggcaagaggttgccaaccccacactggaactttacaagttgggcacaatggcagccccagttaagttcatggaatggggggaacgtaagtttcaataaagggcccgaatttaaaacgaaaacggggggtgcttttttgtccagaggatttttttggggacaacatggaaaggtgattatccccccctttcccgacttttggctttgaaaccttttttaatttcccttttggaacaagtttgccctgttttaaaaaaacaacaagcctcatgaaaggtttgaaaattttaggaaatggattcccaggaaacnaaaaaaaaaaaaaaaaaaaaaaaaaaaaagggcggccgctttaaaggatcccagggtacggaaggggg

SEQ ID NO: 124491 - DNA, 492 bp, Arabidopsis thaliana
  unsure (1)..(492): unsure at all n locations
cccacgcgtacgcccacgcgtccgcccacgccgccgcccccgcgtgcagtgagaaggagattgattaatcgatctgagaaagatgggagattcggagtcatttgttgggaaaaattggaatggattgaaggatttctggagtgataggttatcatttttcgaaaattacaccagattcaccaaacgcgacgcgcctcttccttcttggtcttcctccgacgtcgaggaattcattgcctccgatcccgttcatggacccaccctgaaaacggctagggaagctgtgacgtttggtgttaccggagctgcacttggagctgtctctactgctgcttttgcctggaaatactccaggagtccacatggtgctgcattgtccttctaaggaggaggtgtttttggttggncctttgggcaagaggtcgncaaccacaaaattgnaactntacaagtngggccacaatggcaacccnaagtaangtcatggaattg

SEQ ID NO: 124492 - DNA, 632 bp, Arabidopsis thaliana
ccagagaaaaagtttgcagtgagaaggagattgattaatcgatctgagaaagatgggagattcggagtcatttgttgggaaaaattggaatggattgaaggatttctggagtgataggttatcatttttcgaaaattacaccagattcaccaaacgcgacgcgcctcttccttcttggtcttcctccgacgtcgaggaattcattgcctccgatcccgttcatggacccaccgtaatttccttctatctttctctcgctctgtgttttggaatctatagatattgttggtccattatctatgactcggctggtactcgattttactctgctgtcatcggtttatttttttcttcttcatttgattttccattggaaagtttctgttactttttgatataataaagttccactaggctaggtttttctggctttagtccttggaagcacagatacaagaggactaagcccactgcatcgtcgtcggatggcataaaaaacctagcaaaaactgaactgttggtttggtatttggtattcttactgaagatcttacgtttggtactcattgtgtatttgtggtcatcctatccagctgaaaacggctagggaagctgtgacgtttggtgttacc

SEQ ID NO: 124493 - DNA, 414 bp, Arabidopsis thaliana
acgcggacgcgtgggaaaattccggccttgttcttggaaagcttagtggacgtcacgctgtgaaagatcggctgaaagagttgggatatgaactcgatgatgagaaattgaacgctgtcttctcactattcagagatttaaccaagaataaaaagagaatcacggatgctgatttgaaggcattagtaacatctagcgatgaaatctctttggagaaattaaacggcgctaacggtttaaagtctaacggctatataccagttcctcaggtttcatcgaatgtgtaaacacgttgtatctcttgtatatttgtgtaccacagtaatatcaatttccatttgataatgccgtttttgttgtaatgtattaaaaacagtattaaataaaaggacctgctttatttcctaaaaggag

SEQ ID NO: 124494 - DNA, 942 bp, Arabidopsis thaliana
  unsure (1)..(942): unsure at all n locations
accaattctnatattaaaatccacaatactcaaatccccaaaataaacaaaccctaaaattcaaaacaatgaaatgttacaaaagctcatcaattcgctcaaccagtcaccacccattcttctacaaacaacaaccaatctcctctcttcaaccaacttcaatcccaacaactatctcttacccgacccgaacccgattctcctccacccggntccaatctcgattaacccacgacgatccagtaaaacaatcggaagacttatccttctacgatcttctcggcgtcaccgaatcagtcacactcccagaaatcaaacaagcttataaacaacttgctcgaaaatatcaccccgatgtttctcctccggatcgtgtcgaagaatacacagatcggtttattcgagttcaagaagcttacgaaactctctccgatcctcgccggagagttttatatgaccgtgatttgtctatggggttttctttttctttctccggtcgacgccggaaccgttacgatcaggaagtggtggaagagaagagtgagtggaaagcaaaatggcaaactcagctctcagggttaaggagaagaagcaatcagaaagataataacacgatgtcttgggctgcaagaatgcgtcgtcaacaccaagaattttcttaacatacgacatcgagtctttagccctgttatgtatagtcttttgattgttggtgtgtaatatagaaaccatagcatcagtaccccagcaaccttgtatagatgtaatgtagatactcttcgatgtgcttattccaatcggcggaagctctttccgttagataaataccctcattacgaaataagctttctttggtggtgcgtgtaaaaaaaaaaaaaaaaaaaagggcggccgctcctagaggcatccaagcttacggtacgcgtgcatgcgacgtcagag

SEQ ID NO: 124495 - DNA, 707 bp, Arabidopsis thaliana
  unsure (1)..(707): unsure at all n locations
tgganagnccccccccaagggnttccnttngggtncnnggagntngnttccgccccacctgggnatttncccggccccaattnncgnancntttccattgaagtgccancctgntanccccaaaggcgattggtcagctacagaaaatttccaagggtttaatgaagcttataatggtgctggtggcccctgctaaacgttttgaggtatgatttcacctggtatatatgagatccacaaatacactttacgggaatatctcgccagatttaagggaatgatactcacttgcaatgggctcggtatcagccaatcctcatcaccatggacacatcaattggctgagaccaccaaacaacagacgagcaaggatactgtataaactgaagcagaagttagaagagggctgtaaaactgtacaaaactggagctatagcgcttttatcgcgcattgatgatatagtgaaatgctttgattaggtctgttgtattgtttctttatcaatgtagaattagagaagcttgtattgtctctggcttctattaatacattcacacattggtgatggttcaaatcttttaccactctactattctcagcaaaaaaaaaaaaaaaaaaaaaaaaaaaaaagcggccgctctagaggatccaagcttacgtacgcgtgcatgcgacgtcatagtaacttctatagtgcgtcctaaat

SEQ ID NO: 124496 - DNA, 449 bp, Arabidopsis thaliana
tcggcgtgaagacgacagaagggggaggaaaagcaatccacacgattcgattcaaagttttcattttttctctaaaagtttggattttgatttcgttgctgaacggaaaaagaatcagctcctttcagtttagggttttgggtttctgtttggtctctatcagatgatgtgtgaggagattcttcctctgtttgtgtctgtttcagatggaagacaatgataagtctccccctaaggattactataagattctagaagttgattacgacgcaactgaggaattgatcagactcaattatcggaagcttgcattgaagtggcatcctgataagcacaaaggcgatagtgcagctacagaaaaatttcaagagattaatgaagcttataatgtgctgatggaccctgctaaacgttttgagtatgatttcactggtatatatgagatccac

SEQ ID NO: 124497 - DNA, 446 bp, Arabidopsis thaliana
cgacgaacagagcaaaagtttttgggaggcatgctctgaacaccatctgctccagggggaaggcattgttgggaaagcatttgaagccaccaaactcttttttgtgcccgaagtggccacatttagcaagactaactacccccttgcacaccacgccaagatatctggactacatgctgctttagcagttccattaaagagcaaatctggtttggttgagtttgtgttggaatttttctttccgaaagcatgccttgacactgaagcgcaacaggaaatgctcaagtcactatgtgtgacactgcagcaagatttcaggagttcaaatcttttcatcaaagacctagagttagaagtcgtattacctgtaagagagacaatgctcttctcagaaaacctgctatgtggagcagaaaccgtagagtcgttgacagaaattcaaatgc

SEQ ID NO: 124498 - DNA, 488 bp, Arabidopsis thaliana
caagaccttttctacaagttcaatgtaaattatcttcttttgatgtttcacaaactcgggtgtggaatatatatgcgtctgctggttcgtttagtagacgttacttgagtaattccacaatagagctaagaacagatgataatgtggttaggtttgctttcaacaatgtctctagtagtggtaacaatgttgtacctacaagaaaagagaagaaatggaaacgggctataattgtcaagaaaagcttaaagtgaatgagttaaggttttatcgtctgaaggctaaaaagaagatgaattctccaaaccctgaagttagaattcgttacaagcttgaaaaggctaagaggaaagaagaatggttgattgagaaactgaggaaatacgatgttccgaaatcaccagcggagccttatgatccagagagtttgacagaggaagagcagcattacttaaaacgtacaggtgagaagagaaagaactttgtac

SEQ ID NO: 124499 - DNA, 837 bp, Arabidopsis thaliana
  unsure (1)..(837): unsure at all n locations
acgtctatctctcacactgtttatctgattcgtcttctctgataatcaagagtagtagtgcggttctctggaaaatattcgatttttaaaagactctgatgatgacattaaactcactatctccagctgaatccaaagctatttctttcttggatacctccaggttcaatccaatccctaaactctcaggtgggtttagtttgaggaggaggaatcaagggagaggttttggaaaaggtgttaagtgttcagtgaaagtgcagcagcaacaacaacctcctccagcatggcctgggagagctgtccctgaggcgcctcgtcaatcttgggatggaccaaaacccatctctatcgttggatctactggttctattggcactcagacattggatattgtggctgagaatcctgacaaattcagagttgtggctctagctgctggttcgaatgttactctacttgctgatcaggtaaggagatttaagcctgcattggttgctgttagaaacgagtcactgattaatgagcttaaagaggctttagctgatttggactataaactcgagattattccaggagagcaaggagtgattgaggttgcccgacatcctgaagctgtaaccgttgttaccggaatagtaggttgtncgggactaaagcctacggttgctgcaattaaagcaggaaaggacattgctcttgcaaacaaagagacattaatcgcaggtggtcctttcgtgcntccgcttgcnaacaaacataatgtaaaagattctnccggcagattcagaacattntgncatatttnaaatgtattcaagggtttgcctnaagccg

SEQ ID NO: 124500 - DNA, 523 bp, Arabidopsis thaliana
  unsure (1)..(523): unsure at all n locations
tctccagctcatcnnnnnnnnnnnnnnnnnnnnnnnnnnnnnnnnnnnnnnnnnnnnnnnnnnnnnnnnnnnnnnnnccacacgancggtgcttcctatcttatttcctcctccttggtcaactctcttttcgattaaagttgcaaactttcattagttgtcttaggctcttgtgaatttctctatctaggggggtttagtttgagggaggaggaatcaagggagaggttttggaaaagggggggggggttcagtgaaagtgcggcagcaacaacaaacctcctccagcatggcctgggagagctgtccctcaggcccctcgtcaatcttgggatggaccaaaacccatctctatcggtggatctactggttctattggccctcagacattggatattgtgggctgagaatcctgacaatttcagagtgggggttctagcggctgggtcaaatggtactttacttgctaaacaaggaaagaaaattaagcctgctttgggtgctgaaaaaccaagcccttgtt

SEQ ID NO: 124501 - DNA, 1823 bp, Arabidopsis thaliana
  unsure (1)..(1823): unsure at all n locations
gccatttttatttttctctttcttctctcatttttattttcttttcttttttttcacctttttttttttcctttttttttctttcttcttcttcttacttgattttgaaccctagcttaaggggaattttctcgggaaacaaaagagatatttttatcgcagtgagaaagaaacacaaaaaatgcagaatcaaaggcttattaagcagcaacaacaacaacaacaacagcaacatcaacaagctatgattcaacaagctatgatgcaacaacatccttctctttatcatcctggtgttatggctcctcctcagatggagcctttaccaagtggaaaccttcctcctggttttgatccaactacttgccgtagtgtgtatgctggaaacattcatacgcaggtcacagagattcttcttcaagagatttttgcaagtactggtcctattgaaagctgtaaactcatcagaaaggataagtcatcatatggatttgttcactactttgatcgaagatccgctgctctggctatactgtctctgaacggaaggcatctgtttggacagcctatcaaagtcaattgggcgtatgccactggtcagagggaagatacatcaagtcatttcaacatttttgttggagatctcagtccagaggtcactgatgcaacattatatcaaagcttttctgtcttttccagttgttcggatgcgagagttatgtgggaccaaaaaactgggcgctcgagaggctatgggtttgtttccttccgcaatcaacaggatgctcaaactgccattaatgagatgaatggtaagtggttaagtagcagacaaatcagatgcaactgggccacgaagggcgctacttctggtgatgataagctcagttctgatggaaaaagtgttgtggaacttacaactggctcatcagaggatggtaaagagacattaaatgaggaaacacctgaaaataattctcagtttaccactgtttatgtgggaaaccttgctccagaggtaactcagcttgatctacaccgttacttccatgctcttggcgctggagttattgaggaggtccgtgtccaacgagacaaaggctttggtttcgtgagatataacactcatcccgaagctgctcttgctattcagatgggtaacactcagccttacctctttaacagacagataaagtgctcatggggaaacaagccaactccaccaggtacagcctcaaacccacttcccccacctgccccagctccagttcctggtctatctgcagctgatctcctaaactatgagaggcaattggcacttagcaagatggcaagtgtgaatgcgttaatgcatcaacagggtcaacaccctctaaggcaggctcatggaataaatgccgctggagcaactgcagccatgtatgatggtggctttcagaatgtagccgccgcacagcaactcatgtactatcagtaataaacctcagttcgtggcgccgatctcaagtttcaatctctttgctttttctcttttttttttgtttgtctagaacttgtttgtgtgtgtctgtttgtctctcacttaagttatctatataaagttttatctgcagttgtatgattagttatgtattcccatggattgtaagacaagcgaattacattcaataaaagggatttggatatccattctatgtgaaaaaaaaaaagaaaaaggnnnnnnnnnnnnnnnnnnnnnnnnnnnnnnnnnnnnnnnnnnnnnnnnnnnnnnnnnnnnngtcctaaannnnnnnnnnnnnnnnnnnnnnnnnnnnnnnatatca

SEQ ID NO: 124502 - DNA, 551 bp, Arabidopsis thaliana
atgttttaggtgacacttagaagagctatgacgtcgcatgcacgcgtacgtaagctcggaattcggcgcgagattccccttcttttcccggtactctctgtctttgcatttttactctcttgacgctaatgttcattcgggtttccgctcgacccgcgacattcgtcgaggatttcaaagccgcctggtcggaatctcacatccgtcaaatggaagacggaaaagctatccagctcgtccttgatcagagcactggatgtggatttgcttccaaaagaaaatatctattcggacgagtgagcatgaagatcaaactcattcccggagactctgccggtacggtcaccgctttctacatgaactccgatacggccacggtgagagacgagctagattttgagttcttgggaaacagaagtggtcaaccttactcagtgcaaacaaacatatttgctcatggcaaaggagatagagaacaaagagttaatctttggttcgacccatctatggattaccacacttacactatcttatggtcacacaaacacatt

SEQ ID NO: 124503 - DNA, 493 bp, Arabidopsis thaliana
tgttttaggtgcactatagaagagctatgacgtcgcatgcacgcgtacgtaagctcggaattcggctcgaggacagtttttagatggctaagatatattccccttcttttcccggtactctctgtctttgcatttttactctcttgacgctaatgttcattcgggtttccgctcgacccgcgacattcgtcgaggatttcaaagccgcctggtcggaatcgcacatccgtcaaatggaagacggaaaagctatccagctcgtccttgatcagagcactggatgtggatttgcttccaaaagaaaatatctattcggacgagtgagcatgaagatcaaactcattcccggagactctgccggtacggtcaccgctttctacatgaactccgatacggccacggtgagagacgagctagattttgagttcttgggaaacagaagtggtcaaccttactcagtgcaaacaaacatatttgctcatggcaaaggaga

SEQ ID NO: 124504 - DNA, 874 bp, Arabidopsis thaliana
gtggaacgctttccggatcaggaagattcctcatggtgaagaataaagactttaaggtttatggtgtggaacctacagaaagtgcggtaataagtggaggcaaaccgggtacacatttgatccaaggtattggggctggactcatcccagacaatttggatttcaacgttcttgatgaagtcatccaagtgacaagtgtggaagcaattgaaacagccaaacttcttgccctgaaagaaggattactggtgggaatatcttctggagctgctgcagccgctgcgataaaggtggcaaagcggccagaaaacgccggcaaactcatagttgtgattttccctagcggtggggaacgttacctatcgacctcattgttcgaatcagtcagacatgaagcagagaatttgccaattcaatgaggcttttacacggacctgactttgggtcggtttttggtgaaaaaagtacctagatttcggggtccgacatttacaccttgtcataaggtttcctcgaactttaagatttaatatgatgtatgatctctaatctctagcctctaaggtggactgtgctttgacattctattggtggctcttttctagctactatatgctgtagtctgctaaacttttgttgacactgaatctagaactatataaaggccatgttggattttaaccatcggaaacatgaaaattccagtcgggcgggccccttctaaaggattccaaggcttacactacgccttgcatgccgaccgccaatagtctccttcttaatggtgtgtaacccctaaaaattacaatgtaacctgtggccattcgctttttaacaaaaccggtgttggtcattgggggaaaaaccccctttc

SEQ ID NO: 124505 - DNA, 752 bp, Arabidopsis thaliana
  unsure (1)..(752): unsure at all n locations
ccatgattccgccaggctctaatccgactcacaaaaggaaaactgggaccccctgcaggtaccggtccggaattcccgggtcgacccacgggtccgacacatttgatccaaggtattggggttggactcttcccagccaatttgggtttcaacgttcttgataaagtcatccaagtgacaagtgtggaagcaattgaaacagccaaacttcttgccctgaaaaaaggattactggtgggaatatcttctggagctgctgcagccgctgcgataaaggtggcaaagcggccagaaaacgccggcaaactcatagttgtgattttccctagcggtggggaacgttacctatcgacctcattgttggaatcagtcagacatgaagcagagaatttgccaattcaatgaggcttttacacgacctgacttggttcgttttggtgaaaaagtacctagatttcggttcgacatttacactgtcatagtttcatgaactttaagatttcagatgatgtatgatctctaatctctagcctctaaggtggactgtcctttgacattctattggtggtttttttctagctaatatatgtgtaagtctgtaaaacttttgttgacaatgaatctagaactatataatggccatgtaggatttcaaccaaaaaaaaaaaaaaaaaaaaaaagggcggccgctctagaggatccaagcttacgtacgcgtgcatgcgacgtcatagnnnnnnnnnnngtaacgg

SEQ ID NO: 124506 - DNA, 616 bp, Arabidopsis thaliana
  unsure (1)..(616): unsure at all n locations
acctttgcccaggttgggctgaccacccngcattggnttcacgtctggtgagnctccnagtgcaagttggaccaattgaaccngccaaacttttgcccctgaaaggaggattactggtgggaatatcttctggagctgctgcagccgctgcgataaaggtggcaaagcggcccagaaaacgccggcaaactcataggttgtgattttcccctagccggtggggaacgttacctatcgacctcattgttcgaatcagtcagacatgaagcagagaatttgccaattcaatgaggcttttacacgacctgacttggttcgttttggtgaaaaagtaccaagatttcggttcgacatttacactgtcatagtttcatgaactttaaccctccagatgatgtatgatctctaatctctagcctctaaggtggactgtcctttgacattctattggtggtttttttctagctaatatatgtgtaagtctgtaaaacttttgttgacaatgaatctagaactatataatggccaaaaaaaaaaaaaaaaaaacaaaagggcgaccgctctagaggatccaagcttacgtacgcgtgcgttcgacgtcatactcttcgagagt

SEQ ID NO: 124507 - DNA, 457 bp, Arabidopsis thaliana
aattaaataatttattttcatcaactgatgaaacatcaattcaaccaagaacgaaacttcctctcgctcgcgctctactgacaatctgagatccagggattctattccagatcactctcaattctctcctccatatactatcgagcaaacggattcatcatcatactctgcgttgtctccagcagatcagaagaagaataagtagagaagaaacctcaatcaaagtcgttgttctttcttatttcggttatgcttgatttggtttctcctacttgttcaccaattcttcttctctgacccttcgttgactgcaaggttgctgcagaagcggacgctgtagttttatccttggtccatgtgttggtagcacaagggtatgagttgttgtaaagtgccagttcttattgaagcacaagttgaaatggtgtcggctaatgaacttgagaacaaaagccta

SEQ ID NO: 124508 - DNA, 408 bp, Arabidopsis thaliana
gataaacgaaacctttgttgataaagatggagaggaaattcatatcaaggttccagtaggaatgaacatccttgaagctgctcatgaaaatgatatagaactcgaaggggcatgtgaaggttctctagccgtgtttcacacctgccatgtgattgttatggacaccaaatactacaacaaactcgaagaaccaacagatgaagagaatgatatgctagatctcgctttcgggttaacagcaacgtcgcgattgggatgtcaagtcatcgcaaaaccagagctagatggagtacgcctagccattccttcagctactacaaattttgcggttgatgggtttgttccaaaacctcactagtcacttaatagtctcagagcaaatgatttttcgaaaaaaaacccattaca

SEQ ID NO: 124509 - DNA, 503 bp, Arabidopsis thaliana
cagctactaatacgactcacttagggaaagctggtacgcctgcaggtaccggtccggaattcccgggctttgcgctatcattgtctctgatttgcctttgttattgctgctgtgcccgtcaatcttatggttattcccgggttgcttatgctctatcccttatcctcctcatctcgttcacaatcgcagcaatgatgtgtttttctttacactggtcaagggaaatttcatgctagcacaaccgatactttggactatgtcgtgagtcaagcgaatctcacgtcagaaaacctcaggaatgtgtcagattatcttaatgcagctaagaaggttgatgtgcaatccagcattttgccacaagatgttctctcgagtatcgacaacatacagggaaagataaactcgtccgccacaactctttctgtgaaaacaatggagaaccaagacacgatacaaaatgtcttggacatcatgagacttgctctcgtcatcatcgctgctga

SEQ ID NO: 124510 - DNA, 554 bp, Arabidopsis thaliana
cccacgcgtccgccgatcttctcctcataaaaacacctcttcctcaacgaattttttatccatgagtcgcataatgggattgttcgatctcgagaaacacttcgccttctacggtgcttaccatagcaatccgatcaacattctaatccacatcatcttcgtttggccaatcttcttctcagttttacttctcctccactcgtcgaccccaattttcgacccctctcaattagggttttctcaatcgttgaccctcgacggcgttttgcgatttaacgttgggtttatattcgccttgatttatgctctgttctatatcggtttggataagaaatctggatttgtagctgctcttatgtgtttctcttgctgggttggttccagttttcttgctgttcgactaggatcttctcttgccttaaaggttgggttagcatctcagcctgttaatgttggaccgggcaagtttgttggccatgggggttttagggaaacgggcacctgcgctgttagacaatttactacaagctattcttatggttcctctcttcgtg

SEQ ID NO: 124511 - DNA, 497 bp, Arabidopsis thaliana
  unsure (1)..(497): unsure at all n locations
gtaannaacgggcccggccacccgtctgaaaaaatctttgtgcgaagcatgaaaaatgtcgtcgacccatcagttagtttcttcgatgatctcttcttcctcatccactttcttagccccttcaaattttaatctcagaactcgaaatgcttgcttacccatggcaaaacgggtcaatacttgcaaatgtgttgctacgccgcaagagaagatcgagtataagaccaaagtgtcacggaattcaaacatgtccaaacttcaggctggatacctattcccggagattgcaagaagaaggtctgcacacttgttgaaatatccagatgcacaagttataagtcttggaataggcgacacaactgagccaattcctgaagtgatcacttctgctatggcaaagaaagctcatgagttgtcaacaatagagggatattgttggttatggtgctgaacaaggtgcaaagccactgagagctgctattgcgaaaacattctac

SEQ ID NO: 124512 - DNA, 420 bp, Arabidopsis thaliana
cttttgttctttgagagacttatttctctctcggtttcttactcttttcggatcagaaatttaaaagcttttaacttttgtcttgctctgtttcatggacactgatttctcaattggtctctgtttttgttgagtgggttgagaagagagatggcgagaagtagatcgattagtggttatgggatatggaaatatttgaatcctgcgtattatcttagaagaccgagacgtttggctttgcttttcattgtcttcgtctctgtttctatgcttgtctgggatcgtattaatcttgcccgagaacatgaggttgaagtttttaagctaaatgaagaagtttcacggttggagcagatgttagaagagcttaatggtggtgttggcaataagcctttgaagactctgaaggatgccccagaa

SEQ ID NO: 124513 - DNA, 368 bp, Arabidopsis thaliana
atctctctctatatctctctctctcttcactctctctttctttcaaaatggaaaaactcatggttccgacatggagacccgacccggtttaccgtccaccggaaacaccactcgaaccgatggagtttttagctcgttcatggagcgtctctgctctcgaagtctccaaggctctaacaccacccaaccctcagattctcctctccaaaaccgaagaagaagaagaagaagaacccatctcctctgtcgtagacggcgacggcgacacggaagacaccggacttgtcaccggaaacccattctccttcgcttgttcagaaacttctcaaatggtcatggatcgtatcttgtctcactctcaagaagta

SEQ ID NO: 124514 - DNA, 788 bp, Arabidopsis thaliana
  unsure (1)..(788): unsure at all n locations
attgtccgtctgcaggtccccgtccggaattcccgggtcgacccacgcgtccgaggaaccactctttcgtgtcgcaataacaataagaaagaaagaaaaagaaaaccagagatggcgatgacgacagcatctacggtatttgttctaccggccaatgtcacctcggtcgccggcgcttcgtcgtccaggagctccgtgtctttcttgccgatgagaaacgccggttctaggctcgtagtcagggcagccgaagatcctgctccggcttcctcttcttcaaaagattctccggcagctgccgctgctccggatggagctactgccaccaaacccaagccaccaccgattggtcctaagagagggtctaaggtcaagattctaaggagagaatcctattggttcaagaacgttggatcagttgttgccgttgatcaggaccctaagactcgatacccggttgtggtccggttcgcaaaagtcaattacgccaacatatcgaccaacaactatgcattggatgaggtcgaagaagttgcagcttaaatgggagaattcaaaaactctgtgtattctataccggtttatccgtttgtaacttgacccaaaccgtatgtaccgcaaaagtttaccaattatttctcctcatctgaatcccgagaaaaaaaaaaaacaaccccgcgtacgtggtgccgtctcccccgaatggggggcgactgcctttatattgggggcgggggccgttttnnnnnnnnnnnnnnnnnnnnnnnnnnnnnnnnnnnnnnnnnnnn

SEQ ID NO: 124515 - DNA, 860 bp, Arabidopsis thaliana
gccccctttggaaattcgataggaccgtccgcggtaccggttccggaattcccgggtcgacccacgcgtccggaaaaagaaaaccagagatggcgatgacgacagcatttacggtatttgttctaccggccaatgtcacctcggtcgccggcgcttcgtcgtccaggagctccgtgtctttcttgccgatgagaaacgccggttctaggctcgtagtcagggcagccgaagatcctgctccggcttcctcttcttcaaaagattctccggcagctgccgctgctccggatggagctactgccaccaaacccaagccaccaccgattggtcctaagagagggtctaaggtcaagattctaaggagagaatcctattggttcaagaacgttggatcagttgttgccgttgatcaggaccctaagactcgatacccggttgtggtccggttcgcaaaagtcaattacgccaacatatcgaccaacaactatgcattggatgaggtcgaagaagttgcagcttaaatgggagaattcaaaaactctgtgtattctataccggtttatccgtttgtaacttgacccaaaccgtatgtaccgcaaaagtttaccaattatttctcctcatctgaatctcgagccggttttcttattctttcaccgagaaacagagcgtccatttgcccgtgcaaaacaattctcctgtacacgggggcggccgcttttagagggatccaagtttttcgtacccccgtgcattgcgaaccgtcattaacttcttgtctattaggtggtcccccttaaaatttaaaatttcacttggggcccggtcgttttttaaccaaccggtcgggggaccttggg

SEQ ID NO: 124516 - DNA, 763 bp, Arabidopsis thaliana
  unsure (1)..(763): unsure at all n locations
taggggaactatagaagagctttgacgtcgcatgcacgcgtacgtaagctcggaattcggctcgagaaaagaaaaccagagatggcgatgacgacagcatctacggtatttgtcctaccggccaatgtcacctcggtcgccggcgcttcgtcgtccaggagctccgtgtctttcttgccgatgagaaacgccggttctaggctcgtagtcagggcagccgaagatcctgctccggcttcctcttcggcaaaagattctccggcagctgccgctgctccggatggagctactgccaccaaacccaagccaccaccgattggtcctaagagagggtctaaggtcaagattctaaggagagaatcctattggttcaagaacgttggatcagttgttgccgttgatcaggaccctaagactcgatacccggttgtggtccggttcgcaaaagtcaatttacgccaacatatcgaccaacaactatgcattggatgaggtcgaagaagttgcagcttaaatgggagaattcaaaaactctgtgtattctataccggtttatccgtttgtaacttgacccaaaccgtatgtaccgcaaaagtttaccaattatttctcctcatctgaatctcgagccggttttcttattctttcacagaactgtgtttgggaaaattcaagttaaaaaaaaaaaaaaagctnnnnnnnnnnnnnnnnnnnnnnnnnnnnnnnnnnnnnnnnnnnnnnnnnnnnnnnnnnnnnnnngtac

SEQ ID NO: 124517 - DNA, 649 bp, Arabidopsis thaliana
  unsure (1)..(649): unsure at all n locations
gaaagggntttattccnccgnattccggccngaacccannnttgcnttgccgccagnattttcggnatttgttttcccggcaaatgnaccntcggtccccgcggttcgtcgtccagggncccgtgnctttcttgcccgatgagaaccnccgggttctaggctcgttagtcaggncagnccggaagatcctgctccggnttnccttcttctttcaaaaggattctcccggcagttgccgcttgctccggatggagctactgccaccaaacccaagccaccaccgattggtcctaagagagggtctaaggtcaagattctaaggagagaatcctattggttcaagaacgttggatcagttgttgccgttgatcaggaccctaagactcgatacccggttgtggtccggttcgcaaaagtcaattacgccaacatatcgaccaacaactatgcattggatgaggtcgaagaagttgcagcttaaatgggagaattcaaaaactctgtgtattctataccggtttatccgtttgtaacttgacccaaaccgtatgtaccgcaaaagtttaccaattatttctcctcatctgaagcggccgcgaattcgatatcaagcttatcgataccgtcgacctcgaagggggctaaaggc

SEQ ID NO: 124518 - DNA, 558 bp, Arabidopsis thaliana
  unsure (1)..(558): unsure at all n locations
cggcacgaggaagagagagagagaaagaaaaccagagatggcgatgacgacagcatctacggtatttgttctaccggccaatgtcacctcggtcgccggcgcttcgtcgtccaggagctccgtgtctttcttgccgatgagaaacgccggttctaggctcgtagtcagggcagccgaagatcctgctccggcttcctcttcttcaaaagattctccggcagctgccgctgctccggatggagctactgccaccaaacccaagccaccaccgattggtcctaagagagggtctaaggtcaagattctaaggagagaatcctatttggttcaagaacgttggatcagttgttgccgttgatcaggacccttaggactcgatacccggttgtgggccggttcgaaaagtcaattacgcaacatattggccacaactatngattggttggggcgagaagttaccttaatggggattnaaacctgggattattccggttcccggtgaactgccaacggtgtcgaaagtcattttcccactaccttccggtttttcttccaaat

SEQ ID NO: 124519 - DNA, 437 bp, Arabidopsis thaliana
aaagttacttatcgatggatgcattcatgtatatgagcaaattttatttgagttcttattggtaaatctgcagaatggtgaaatgacaaaatgaatctgccaattacacaacgtaactagctagctagtaggaatcgttaattgtgaacttgtaatttttgttcataatcagttaatcgctatgcaaaaattgtataattagtgacaaaaaattaaatttcaccacatcttatgttcataacatggttcaaatctaattgcatgtttatgtgtgtgtgacttgtaaccacatattttgttcataatcaatcgtttcttatcttgatataaattgttgggattcgtaggtcaagattctaaggagagaatcctattggttcaagaacgttggatcagttgttgccgttgatcaggtaacgcatttagtctccaatcaa

SEQ ID NO: 124520 - DNA, 381 bp, Arabidopsis thaliana
ttcctctctccttgtctctgtaccgcgtcgaaatatgagaaacgaatgatttgatcatcaatcaacgagaaacacacacggagaaagagaatctcaaattagctccagctcctgatcgattccgattttcacaattctttccttggatctgctcttaccttgtcacgatttcacttccctgtgtttttgatttatacttggtcatccaataacgaaactttgatcaaactggaactacagtttattggaactccctgaagcatttagatggcagaaaaagcttgtataaagcgtcttcaaaaagaatacagagcgctttgcaaggaaccagtctcgcatgttgttgctcgtccttccccaaatgacattcttgaatggcat

SEQ ID NO: 124521 - DNA, 395 bp, Arabidopsis thaliana
agcgttaggacaaagagatcgccgaccagatgctctcggtagtctcagtgttctaccagatgagaccatctgtgttcttctcgaataccttgctccccgagatattgctcacctcgcttgtgtcagcagtgtgatgtatattctatgtaatgaagaaccattgtggatgagtttgtgtctcagaagagcaaaacgtcctcttgaatacaaaggttcttggaaaaaaacagcattgcatctagaacgagttactcaagaaaatgacgcatacagaaaatgttttcattttgatggattcatgtcgttgtacttgtataaacgattctataggtgtaatacatctcttgacgggttctcttttgataatgggaatgtggaacgtaggagaaatatct

SEQ ID NO: 124522 - DNA, 743 bp, Arabidopsis thaliana
gccgagcactaatacgactcatatagggaaagctggtacgcctgcaggtaccggtccggaattcccgtttcgacccacgcgtccgcggacgcgtgggcggacgcgtggggttcgaatcagttgaactaatcttagaagtgagaacaccgttgcttccataattcccggtgaatcatttgttgttcgatttctccggcggagatggtgagtccgacgagagacgctatccaatcttacatgagcatcactggcgcgtccgagtcactcgcgattcagagacttgaggaacatggcaataatctccctgaagcgatcaatgcccactttagagatgtcgaaagaagcatttatgatgactcaagcttagacactcgttcagactacaatgttgtggaagataacaatcacgttcgtggtagcgagactaggccagttaacgagtctaggccagtccctggcgcacttccatctatactctcggctgctcgggcttttagaccgtctttgcttctagatcccaattacagacggaatatccttaggcagctcagtggctcctgctctctcttggaagcccttctccatcaattctcacacttcggggaggtcacttgggttccctgctcactctacctggggaaatgatcacactcgtcctcctggacttggagcggttggagacggttatgctaggcattcaccaagctatggatcccaggtccatggtgggacacatagggatg

SEQ ID NO: 124523 - DNA, 376 bp, Arabidopsis thaliana
cccacgcgtccgcccacgcgtccgcccacgcgtccgttcacagttgatgcaagatcatctccttcggttagtaaactcacacatcatattcggatgactagcaaagccatccttcaaagagttcctcgggtttatcagctctgcaatgatatagtacagctcttatcagactggagatcagagaattcgaacaaacctattatgagatggaaagcctttgcagacctctgccagtttaaggttccttccctgagaataaagtctcgcaacgagaacattcagattgtggagacaagacggcatgctatagccacatgcctccaccagatgggagaggtgatttactttgatgacttgggctttttgatactagact

SEQ ID NO: 124524 - DNA, 408 bp, Arabidopsis thaliana
agatggcttctgctatggacttatcttctcctccaacgtttttcttatccggaacttctacatcttccccatctctccgtcgtctctcctccatttccgtctctggattccgccgtcactctaatcggaagttacagatactttgccaagccacagctggaactgagcctcagagcggtctctctgtctctggctccaaattagccgcccgttctggtcaagaccgtcttttgaaggttccaatttcgaacatcaggaattttagtattatagctcatattgatcatgggaaatctacgttagcggataagttgcttcaggtgactggtactgttcagaacagagatatgaaggagcagtttcttgataacatggacttagagagagaacgaggcatcactatcaagc

SEQ ID NO: 124525 - DNA, 352 bp, Arabidopsis thaliana
actcagctcacctttagcttcttcttcttcctcttccgatttcaacgttgtgtttatcttcttcttcataattccgacgaatttcaccagagagaatcaaacccccgaggaatcttaattttctctctgtattatcatcttccaattcaagtgaagaaactcgtacgtggtcgtagtggagatgagttcggctctacctttgaagcttttgttgcctcttacaacaacttcattgctaccttctcctttccgatcggataaccctaacttctatcgccgtcgttcctcttcctctacttcgtgttcttctcaatcccaatcgtttcagcttttctctgttagacgacgccga

SEQ ID NO: 124526 - DNA, 894 bp, Arabidopsis thaliana
aacgtccagggcatttggttgacaaggtcttggacaaaaccggcatgaaaggcacaggaaagtggaccgtgcagcaagctgctgagctatctgttcctgctcccaccattgaatcctctcttgatgcgaggttccttagcgggcttaaagatgaacgtgtgcaagcagctaaagtcttcaaggcaggtgggtttggagatatcttgaccgatcagaaagttgacaagaaacagctagtcgatgacgtgaggaaggctctttacgcatccaaaatctgcagctacgcacaaggcatgaaccttatccgtgccaagagcatagaaaaggggtggggattgaagctaggtgagttagctagaatctggaaaggaggctgcatcatcagagcaatcttcctagaccaggatcaagcaacgccttatgccagggaacgcagagctagcctaaccttctttggtggatccagaggtttgcgaaaagaggttaatcggagagacagtcccgcgttggagaagagtcgtctgcttagctatccaactccgggtatcagcacaccgggtatgtctgcgagtctagcctactttgattcttacaggagagtagagattgccggcaaatctagtccaagcacagagagactactttggtgctcatacatatgaaaggactgatgtggaaggatctttccacaccgagtggttcaagattgcaagacaatctaagatctgagatctctcatcctcttgtattcttcttctccttcaataataagttccacacagtatgtttctttcctcaatgtgtgagataccttggcttatttatgattgtagcaactgagtttctcatctttgtgtttctttttcttaaaaagattaaaactgaagtctttgg

SEQ ID NO: 124527 - DNA, 556 bp, Arabidopsis thaliana
  unsure (1)..(556): unsure at all n locations
gaaaaacaaattaataaaaaaaaaagatcagaaattagtttgtgcagaaatcgaattggagaaaccgagtaactatggtagccacagatgagttcatcgtttttgaccagatctgattgttttcgtctttgccgttgaaataatcctccgctccttcttctcatcgatttctccgatcgcgattttggtttctcgctctcctctctcgctgtggattttgactccgagagaaggtttgattttcggtggatttcatctgacagacatgtcagacgctctttctgcgattccggccgcagttcatcgcaatctctccgataaactctatgagaagcgcaaaaattgcttgcgcttgagcttgagaatattgtgaagaatctaacttcttcgggtgatcatgaccaagatctcgaaaggcattgaggatgtttgttaagggnttttgccaaatctccnnaaagctaattcatcggaaggggtggccnaatttggctagntgctgaaacngtttgggtttctcanaaggtgncnaaaatnttnggnaaatagngccctc

SEQ ID NO: 124528 - DNA, 461 bp, Arabidopsis thaliana
tacgggtgcgagaagacgacagaagggtgcggctgcgagaagacgacagaagggtacggctgcgagaagacgacagaagggtacggctgcgagaagacgacagaagggaggtgaaagaacgaatctagagaagaagggtttgtgaaatggagtccagtgaggatgtggagaatctgagtagagctattgagaagcttcttcatgagaagaggaagagagaagcttctggtgacgccttcattgaagacgctgatgatcagcttttcctctctagccttatctctcagttggaatcaccaaaccccaaggggaaagaagatgtcataaccggagaagaagaagaaaaagaagaagaatctgcagattcttcaccatccaaaggaaaaagcgagggccagagacaattggaagaaagtatagaagaaatagctaaagacatcaagaaggtgaagaagcagaac

SEQ ID NO: 124529 - DNA, 395 bp, Arabidopsis thaliana
ggactcgaatccgatgaggacgagatacctgagcatcgcctgatccgtactggtccacgtgttgattccttcgacgtggaagcgcttgaagttcctggtgctccgagaaatgattacgaggacttgaccgttgggaggaaagtgttgcttgcatttcaaacattaggggttgtctttggagatgtaggaaccagcccgttgtatacgttcagtgtaatgttcagtaaatcacctgtccaagaaaaagaagatgttattggagcactgtcactagttttatacactttacttttggtcccccttattaaatatgttcttgttgttctatgggcaaatgatgatggtgaacgggggacctttgcgttatactcattaatctctcgtcatgccaagat

SEQ ID NO: 124530 - DNA, 388 bp, Arabidopsis thaliana
aagactagcagtgccataacaggaaggcgtgcaaagagggcaatgaagcgtgaagctgcaaacaaagctgcggaagcagtagcagctgcaaagcatgaggcccttttggttaggttgggaaggaagtgactgtggttgtatctctgtaattacatcaacccaccccaaccccaaatgaccaaatcctttgacttcgatacttgagaatctgtacatcagtagaatttaataatggtagaacttgttgaacctttgtcgttaagatgctttgtgctagatttgatttatttatctgcaactttcttgatcccttgcttgatgagtgaaaaatactctcgcttatgatgtgggaattgatcatatggaatgaagattaagtggttatggt

SEQ ID NO: 124531 - DNA, 429 bp, Arabidopsis thaliana
acccacgcgtccgagaagaggttaggcatctaaagaactttgattacgttgtggtgaatgccaaagggaggcttgatgatgcggttaaccgcgtggaatcgattatcgatgctgagaaatctaaagttcatcaaaggattgtcaggatttgatgtgcagagatgccattgtctgtaacaacatattggcttgctgtctccagacacggatccatcgaagaccgagacaattttattatcggtatgtgcggcaacccattccaaccaaagatttagatgaatcctggcccctgactacagagaacccttttgattaagcatcgtatctttatacatagctacatggattatgttatcatcatacagtatgtgattcatactcgcattttgaattttgttacttcataaatgtttatggagcattgttcat

SEQ ID NO: 124532 - DNA, 435 bp, Arabidopsis thaliana
cccacgcgtccgccttcacgtctctgcctttatcttcttcttccttcttctccatcatcatcagagagacgaagacgaagaagaagaacttcactggttattctctctccgtagccaaccactatggattctagagctattctcgattccgctttgtttcaactcactcctactcgcactagattcgatctggttctattctgtgggagtaagaaggagaagctagcttcagggatttttgaaccattcgtctctcatcttaagttcgctagagatcagatctctaaaggcggttactccatttctctgactcctccttcttctcactcttcttggttcaccaaatccacttttgatcggtttgtgagatttgtaaacacgcctgcgattatcgaaagatttgcgactctggagaaagagattttgcagattgag

SEQ ID NO: 124533 - DNA, 325 bp, Arabidopsis thaliana
agttgttcgtcaccaagacgaactttgtgagggagaaaaaatggcgaatttactggaaacatcaatctttttctcctctgctgataaattactgtctttcccgcctaagaattctcaaacccatcatctccctttctctgctttcatcaatggaggaagaaagatacgcaaaagctcaactatcacctttgctaccgacactgtcacttacaatggcactacaagtgcggaagtaaaaagctctgttgaggatccaatggaagttgaggttgctgaatgttacactatttcttcattttattactagattatttatttttttttt

SEQ ID NO: 124534 - DNA, 686 bp, Arabidopsis thaliana
aaagaaagaaacaggaagtggttcagtagcagttgcaatagacaaagacaaaggaagccaacatgctcttaaatggacaatcgacaatcttgcttctcgtggccaaaccatttctcttattcatgtcctctgcagatctcattcttcttcagatcttgaagaaggaacgccacaacagaaacagcaaatggagaagatagctaaagatctctttgtatccttccactgctattgttcccgtaaccacgcgtccggtcgagacattttgctggaagacgcagacaaagttcgagccattaccgaatatgtttcatcttctgcaattgagaacttagtcgttggatctgcatcacgtaatggcttcatgagaagattcaagacggatttgccaacaacagtgtcaaaatcagctccagatttctgcaatgtttatgtcatttcaaaaggcaaaattgcttcagtacgaaatgcatcacgtcctgctccttaccaaaattcgatgcagcaatgtgaaattgacaatcatcacccacatactcctgacaaagcaccaaagtaccatgaccatcccaattctgcaggtagtacaccatctagaccgcgcaaatcagttgaagcagatagatcgccgttggtgaaaaggaagccatatggggacttctatgattcagatagtgacctttcgt

SEQ ID NO: 124535 - DNA, 423 bp, Arabidopsis thaliana
aaatcctccagggtaactagaggtgggtcatcagatctctagggtcttctcattcttcattcccagatccgtagaatagaaaatgtttggccgatctgcgattcgtggaggaggattccgtgcagagaatctaggtcaaaacgcacttaccttaatcggtaacataggcttctcactcttcgtcttcggagtactaatcttcaccataatcgccgcaacttacgaaccagaagatcctctcttccacccatctgacaaaatcacaactttcctcacttccacatcaaacgctacacttagatccgatgactccgttgttaaaaccggtgaagatttcatgctcgctaaccaaaccgcatttgcagagtttatcaacataaacgatgttgaagccagcaccaatgagactactacagagggaga

SEQ ID NO: 124536 - DNA, 605 bp, Arabidopsis thaliana
  unsure (1)..(605): unsure at all n locations
atgaatnnnnnnnnnnnnnnnnnnnnnnnnnnnnnnnnnnnnnnnnnnnnnnnnnnnnnnnnnnnnnnnnnnnnnnnnnnnnccacgcgtccgcccacgcgtccgccaattccaccgctgcgacgagagaggagcacagagatctctcgtttcgtttttcccggaaaatctgaggaaataaaattaagcaaaagtttccatcgatcctctgagaaaaaattcgactctctagtccacgagttttttttttgttcacctctctctttttcgttaatctctctcaaacaacgcctcttcatcatttccttgtaattcactttcttctccgttttttttttttttgaatctctcttcgtccttcgccgtttcgatttcttgtttcctctacttgatgatgaaattttgatcagatctagtgtagaatagttaggatttacccagagagattatgtttatggatcgagagagacggagttctggtcgtaatgggactcctgaatatagcaatggcaaattccgagatgataatggttttggattcttagatcgattggaaaattgccgtgagaagagtcctcctagatcgaagatccttcggatcccgt

SEQ ID NO: 124537 - DNA, 441 bp, Arabidopsis thaliana
cctatattgactatctaggttgctccagtggtacccgggagcaacctatattgactatctagtgactgatgagttcgtgtctcctctgcaatatgcacatatttactcagagaagctggtccaccttccccattgctactttgtcaatgattacaagcagaaaaatcaggatgtgttggatccaaattcgaagcccaagcgatcagactatggacttcctgaagacaaattcatatttgcatgcttcaaccaactgtacaaaatggatcctgagatcgttaatacttggtgcaacattcttaaacgagtacccaacagtgctctttggcttctccgttttccagcagccggagagatgaggtttcgcacatatgctgctgcccaaggtgtacagcctgatcaaattatcttcactgatgttgccatgaagagtgaacatat

SEQ ID NO: 124538 - DNA, 442 bp, Arabidopsis thaliana
attgggagcaaattcccgttcttcaaccgccaccagttaaccatgacaaaattcattcagttgcgggaagtagaacaaggggctggtaagtcaccaccaccagttctagtcctccatgggcattacggaggctgcgttggcgaccttccaagctacgatgcttttgtcctcggtggtccgtactctgtccgtggctacaacatgggagagctcggtgctgctagaaacattgccgaggtcggtgctgagatcagaatacccgtgaagaacacacatgtctacgcttttgttgagcatggaaatgatttaggaagctcaaaggatgtgaagggaaaccctacagcagtgtacaggagaacgggtcagggttcatcctatgggcaggtgtgaaactcggttgggtcgagctgagtatgctgagatcacaacaatggaaccgggc

SEQ ID NO: 124539 - DNA, 621 bp, Arabidopsis thaliana
aacagaaacatgtccatggagctcaccgttctcggacccctcgccggtcggagtttcgcaatcgccggaaaacctaaacttctgcttcttcgaccaacaaacctccctcttctccgtctctcactcccgctttctcttcccaatttctcttcgtcctctcgttttaattcgcccatattcgctgcacaggagagtaacttgagtgtatccaacgaaaacgaaaccagtgagtggctgatgcaagatttttatacattgagaaaagatgtagaaatagcatcagctcgtgttgaagagattagagcttctgctaatttacaacaactagaacaagagattacaaatctggaatcaaaagctactgatacatcgttttgggatgatcgtactaaagctcaagaaactttatcgtctttaaatgatcttaaagatcgtatgcggttactctctgagttcaaaacgatggttgaagatgccgaaacgattgttaaactaacagaagagatggactctactgatgttagtttacttgaagaaagccatgggaaatcattaaaagagttgaaataaaatcttttaagataaaattttgaggctttacttcaagctttttaatcaggg

SEQ ID NO: 124540 - DNA, 299 bp, Arabidopsis thaliana
accacgcgtcagggcgactttgattctatcattcttgcttcttcttctagcaacaaagcttcctgaatcactagctggtcactgcaccaccacgacggcgacgaaaagcttcgagaaatgtatctctcttccaacacaacaagcgtcaatcgcgtggacataccatccacacaacgctactctcgacctttgtttctttggaactttcatctcaccttccgggtgggttggatgggggattaacccggattccccggcgcagatgactggttctcgtgtcctcatcgcctttccagatg

SEQ ID NO: 124541 - DNA, 457 bp, Arabidopsis thaliana
ccgatcttctcgttccattcttcttcctaattacaccatgcccaacatcaccatgggtttgaaacccgacccggttgctccaacgaacccgactcatcatgagagtaatgctgccaaagagattcgttacagaggcgttaggaaacgtccatggggaagatacgccgctgagatccgagatccggttaagaaaactcgagtctggctcggtacgttcgacaccgctcagcaggcggcgcgtgcttacgacgcagccgcgcgtgactttcgtggtgttaaggctaagaccaatttcggtgttatcgttggtagtagtcctactcagagtagcaccgtcgtcgactcttccacggcggcacggtttataacacctccgcaccttgagctcagcttatgcggcagcggcgcgtgtcgtcgtaagatcccgcttgtgcatccagtttactactataacatg

SEQ ID NO: 124542 - DNA, 528 bp, Arabidopsis thaliana
  unsure (1)..(528): unsure at all n locations
aggtncgaacggtgatcgcatcaagcttgnatcatcgtaattacgcggccgctatgtctatgggccaggagtgctttgagcagaatgtggtggagtgtgtcttctggggaaatggtgttgtctgcttgacagaaggagggcagttgatctgtattttcgatttcaagacaatgaagccttctaagttgcctgatgtgccggggttagcagaagatgatctgcttcagccaatctgcttgactgtgagggaacctaagtacacgatgtctgggatttgctgaggtgttggtagcagtttggcgatgataatttttgttgtggaggaggacaatgggtcaaaactatttagggttttgatgagcctaagtggttgattgactcctgagatgccagaatgaattgatttcttggggaatttgaatttggagttggcccagaaggtgacttgtatcccccctaatgggaaaaatttctaacaactcttcactcattaattgcccgatttttttnttttncnatngancaaaa

SEQ ID NO: 124543 - DNA, 642 bp, Arabidopsis thaliana
  unsure (1)..(642): unsure at all n locations
cttcttcttcactttcctatctctttcccaataaaaggagtctctcgctttctccaacttcgctatccaaaggcgtcgacgcctccaacattgcatcatggcttggtcgatagctcttcttacacctcctttttttggtcccggaaggcatgtgcaggccaaagaatacagggaaccaagagggtgtgtgatgaagatgagcagtttaaaagcacctgttctgagaattcaggccacagaatacagagaaccaagagggcgtgtgaagatgatgtccagtttacaagcacctcttctgacaattcagagcttctcagggttaagggcccccagtgcattagattatttgggaaggcctagtccaggtttccttgttaagtataaacttgcaaaatcatctgggagagaaaaagctagccgatgtgtacccaaagcaatgtttgagcggtttaccggggaaagcatttagggccatnatgctggctccagaggaancccggnacttngccaaaactttgttggnnctgngcaanacnggttggggcnnaattggnaagggctgggattcccccaagggnttaaaccctgggggnaancttaanttcccccgggggntaaaanaatttggggggggggggtnga

SEQ ID NO: 124544 - DNA, 565 bp, Arabidopsis thaliana
ctagatgtctggtttcctcttttgtttcgtccaaatctctactttttagggatcttgtccttctcttttctgctgattaaaaccctcgaatttgctccaattcgacgcgaaaaagggcattgagatggtgaatggagaatcatcaactagtacgtcttactctgatagtaacaatgacacaaatgatcaaggaggagactttgaatgtaacatttgtttcgaactagctcaagatccgattgtcactctctgtggccatctcttttgctggccttgcttataccgttggcttcaccaccattcacattctcaagaatgtccggtttgtaaagccgtggttcaagacgataagcttgttcctctttacggtagaggcaagaaccagactgacccgagatcaaaacgttatccgggtttacggattcctaaccgaccaacaggtcaaagacctgagactgctgctcctcctcctcagcctgaagctgcgagtaattttttcaactacggtattggtttgatgggtggaattatgccgatgatggcgactacgaggtttgggaatttc

SEQ ID NO: 124545 - DNA, 699 bp, Arabidopsis thaliana
  unsure (1)..(699): unsure at all n locations
nnnnnnnnnnnnnnnnnnnnnnnnnnnnnnnnnnnnnnnnnnnnnnnnnnnnnnnnnnnnnnnnnngaaaaaggtaactgctttttcatctcttaattataactcctttcctctcttctctctctctcttccatggtgggttcttcttttagtagatctctgcaccacccaaagcccaaagctcaaagctttgcacagaagatacagagagaaagaaccacatacaaaaaaaaagagtctacttttctttttgtttctacttgctatttattacttttcacaccacaccctctggtcaaatgtctttctctctactcttctttcctttggtctgagacaacagtagcaagagtccgtgaaagaagaaaacaaaatgttagaattttgaagaagatgagggaaaaggaagcaactttatctgtttatttgacttgagtctcttcgatctacatctggattttgcagcatttcttcttgaggaaaaatgaggaaacatggatggcagcttccataccatcctcttcaggtggtggctgttgctgtgttcttggctttagggtttgctttctatgtcttctttgctccatttgttgggaagaagattcatcagtacattgcgatgggcatttacactcctctgattacgtgtgtggttggactgtatatatggtgtgcggcttcagatcctgcagaccgtgg

SEQ ID NO: 124546 - DNA, 960 bp, Arabidopsis thaliana
cccacgcgtccgcggacgcgtgggcggacgcgtgggtttcgcagctgcctccttttcgtttgccactttttgatcaagcgaaactccaaaacacagagccatgccgccgaagttggacccgagccagatcgtcgatgtgtacgtccgtgtaaccggaggagaagtgggagccgccagttctctagctccaaagatcggtcctctcggtctcgcaccaaagaagatcggagaagacatcgcgaaagagacggccaaagaatggaaaggacttcgtgtcaccgtgaagctgacggttcagaatcgtcaagctaaggtaaccgtggttccatctgctgcagctctcgtcatcaaggcgttgaaggagccagagagagaccgtaagaaggtgaagaacattaagcataacggtaacatctctttcgatgatgtgactgagattgctaggattatgaggcctagatctattgctaaggagctgagtgggactgtgagggagattcttggaacgtgtgtctctgtgggatgcactgttgatgggaaagaccctaaggatcttcagcaggagattcaagaaggtgagattgagattcctgagaattaaggaacaatggagtttttttttcttcttatgggaatttgaaatgcttctgttgttatctttctcgttttaccatattttgtttttgtttgggaacttagctgctatgatgtttcacttagaatgactctcaagttttggattcttattattctctgtttcaaaaccccaatggttctctatcatcactgtttaatttctgcttttggtgagctctttgtttgattatggtgatgagaatctgaacctgcattggtgttgttgtatgtttgctaacaaaaaaaaaaccaaagggcggccgctctagaggatccaagcttacgtacgcgtgcagtcgacgtcatagatcttctatagttgtc

SEQ ID NO: 124547 - DNA, 701 bp, Arabidopsis thaliana
  unsure (1)..(701): unsure at all n locations
ccaccaaccccattnnccccgtncccngggaatntggcccccatnttttcnccaaaaccggccttncggtcccnccaaagaagccgngnanccacccnnaagggccgncaaanattggaagggcttcgtncnccgtaancctnccgntcagaatcgtcaagctaaggtacccgtggttccatctgctgcagctctcgtcatcaaggcgttgaaggagccagagagagaccgtaagaaggtgaagaacattaagcataacggtaacatctctttcgatgatgtgactgagattgctaggattatgaggcctagatctattgctaaggagctgagtgggactgtgagggagattcttggaacgtgtgtctctgtgggatgccctgttgatgggaaagcccctaaggatcttcagcaggagattcaagaaggtgagattgagattcctgagaattaaggaacaatggagtttcctttttcttcttatgggaatttgaaatgcgtctggttgttatctttcccgtttcaccaaattttgtttttgtttgggaacttaacggctatgatgtttcacttagaatgcctctccaaaaaaaaaaaaaaaaaaaaaaaaaaaaaaaaaaaaaaaaaaaaaaaacccaaagggcgaccgctctagaggatccaagcttacgtacgcgtgcgtgcgacgtcataactcttct

SEQ ID NO: 124548 - DNA, 1013 bp, Arabidopsis thaliana
aggtgcactctacaagactatgacgtcgcctgcacgcgtgcgtaagctcggaattcggctcgagaagaaacggtctcaatcttattttcagcgatggcgatgtcaattctaaagctaagaaatttatcggcactaagatcggcggcaaatagtgcccggatcggagtttcatcgaggggtttctcaaagctcgcggaaggcactgacataacctcggcggcgcctggcgtttctctccagaaagctcgcagctgggacgaaggtgtttcctccaaattctccaccacgccattgtcagatatcttcaaggggaagaaagtcgtcatctttggtcttcctggggcttacacgggagtttgttcacagcagcatgtgcctagctacaagagccacattgataagtttaaagccaaaggcattgattctgtcatctgtgtctctgttaatgatccctttgctatcaatggttgggcagagaagcttggtgccaaagatgcaattgagttttatggagattttgatgggaaatttcacaaaagcttggggctagacaaggatctctctgctgcattgctcgggccacggtctgagagatggtcggcttatgtagaagacgggaaggttaaggcggtgaatgtggaagaagcaccgtctgacttcaaggttacaggggcagaagtcatcttaggacagatctaaaaagtatttccagagttgctgtttcttctgagttgcaactgataataagtttgatccgaacatgtctcaaggatcagaccaagtaacagcttcacttcttttgttttgtttccacagtttcagtttaaataaaacttatgtgtcttgccgtttctcaccaaatgtaaatctggttcatattatgaataagacacccaatgtggttgagggatatgattttttgtgtccccattgtcaacaaaaaaaaaaaaaaagggcggccgccgactagtgagcttgttgacccaggaattaatccgggccgggacctgcag

SEQ ID NO: 124549 - DNA, 759 bp, Arabidopsis thaliana
ctcggtggagactattgatggaggaaacactattgtgaaaggtaaacatatcattgttgctactggctcgtgttgttaagtccttgcctggtattacgattgatgaaaagaagattgtttcgtcgactggagcgttgtctctatcggaagttccgaagaaattgattgttattggtgcggggtatattgggcttgagatgggttctgtttggggtaggcttggatctgaggttacggttgttgagtttgctggagatattgttccttcgatggatggtgaaattcgtaagcagtttcaacgttctcttgagaagcagaagatgaagttcatgctcaagactaaagttgtttctgtggattcctcctctgatggtgtgaagcttacagtggaaccggcagaaggaggagagcagtctattctggaagctgatgtggtacttgtctcagcgggaagaacaccgttcacttctggacttgatctggagaaaatcggagtggaaactgacaaagccgggaggattctggtgaatgatagattcttgagtaatgtcccaggcgtgtatgctattggagatgtgattccaggaccaatgcttgctcacaaagccgaagaagacggtgttgcttgtgtggagttcatagcaggcaaacacggtcatgttgattatgacaaggttcctggtgttgtttacactcatcctgaggttgcttcggttggtaaaaccgaagaacagctgaagaaagaaggtgtgagttacc

SEQ ID NO: 124550 - DNA, 429 bp, Arabidopsis thaliana
ccacaattcaccacggccacaattctactttgattcaataaacatctttttccataacggttcttcaacctccagaggtggttgggccaacattttttgacccggtggatgactactttgctaagggcagttggagcaccatgcaacaactaagttctcccccatcctcagcacagaaaagtttagctccaggtagcacctctgatgctataaatgaagtccgcttaaaaagacctatgagtcgcacagaggttccttccaacgacccatctaatcaatcgtcatcagaaaccaaggaaaaagagagtcttgaagtctccagtagttcatcttctgatatgatcagttttgatttgtcgaatggagatccatatcctcctcatcttcgcagtagctttagatgatgatcaatatgtggagtttcacgta

SEQ ID NO: 124551 - DNA, 511 bp, Arabidopsis thaliana
cgcctgcaggtaccggtccggaattcccgggttgacccacgcgtccgtacggctgcgagaagacgaccgaaggggatagagagagtttcttctcatgctctttctaccaaggagaagattttctcgttaattttgtttgacttgcctcttcgaagcaacctgattctgtggtctgaatcttttcaagggaagagaagataagctaaacaagagaatggtgacaggttgtgttgatcttcatcaatctttcaaatctgcagattcatcttctgtgccaattcctcctcctcttccatcaaaatctgatggactcaagaaaaaacttgggcatagcagcgtttcgacagccacaagagatatgtgggatcgtcttttcaatgacggatacaaagctgatgtagtcatctatacagataatggcagtatcatctatgctcatgccaacatccttggaactgcttccactgtgatcaaaggcatgttgaagcaagccaagagacatggcaagtgg

SEQ ID NO: 124552 - DNA, 418 bp, Arabidopsis thaliana
cacgcgcctctcgggtaattttcgcaggtgggtgtctctgttgatgatatgaaccaagaaaatggcttcaaattattgaacacaagaggtaagaaaaaagtgagataataaggaaattaaaacaataaattatcctttcggtgggattttttttgtcgtcttctattgtttttgtgagtgtgtgtgtttatataatggtaagagatctctgatctctcaagcttctctatagagagagtttcttctcatgctctttctaccaaggagaagattctctcgttaattttgtttgacttgcctctgccaagcaacctgagtctgtggtctgaatcttttcaaggctagagaagatatcctaaacacgagaatggtgacaggttgtggtgatctgcatcaatctttcaaatctgcagattca

SEQ ID NO: 124553 - DNA, 620 bp, Arabidopsis thaliana
  unsure (1)..(620): unsure at all n locations
cccacgcgtccgcccacgcgtccggtctttatatgcttgctaataagtggatggttgatgacagtaaacttcacgtcattcactacactctaggccctcttaagccttgggactggtggacagcatggctcgtgaaacctgttgatgcttggcatagcattagggtaaagcttgaggaaactcttcctggaactggaggtggtagtaaccaacatgatgaactcgtcgtcaagttccttttcttgttacctctttgtgcacttttgttctgcatttaccgatccattcagggccgtgagggttcattgtgctggagctcgttcagcaatcagattagatatctttattacaaagttagatctaatggaacacttggttatggcggtgtatctaccatgagtcccagctatcaaccccacagtggcaacggacagtccaaggntcctcaacacttaggcgcaggttcagttgtcgnctgttttactgctggtcctgttaacnnttggatttcctttgcgnttgtgccaggaaatnatgcatggctngnttgcttggggattaatnggcnttncaantcttcctttgttgggnntcctnctttgtnanacaggaagaaggtg

SEQ ID NO: 124554 - DNA, 654 bp, Arabidopsis thaliana
  unsure (1)..(654): unsure at all n locations
cncccccttgnctgggcccatttccagtcccctntnntgtaagtccccttttgtttgatggccgaactccccggaactncttggccgcttccaaggannccnaattttggncatacnccctttggaattggcattccatttttaagttcaggcnaaattggtaaggccaaagggaataaattggagcaaggaaagggtaaacctctcggggacttaccgaccgaggtggtcgggttaaagaagagccgaggaaggttgatggaatggttcaagcggcgagttagggaacaacaagattgtgctatatgtctagaccggttcaagaagggtgagaccttggtacacctaccatgtgcccataagtttcactccatatgcttattgccttggctagacaccaatgtttattgcccatattgtagaactgatatttggaattaaatgttatatttttgatgtcatatttcgagatgtttttttatggcttatcttaggttttaggaatttaaacataaaatgactagcgcaatcaataaaattttaactaaatttagcctcttttttaaaaaaaaaaaaaaaaaaaaaaaaaaaaaaaaaaaaaaaagggcggccgctttaaaggatcccagcttacggaagggggcattcgacctc

SEQ ID NO: 124555 - DNA, 608 bp, Arabidopsis thaliana
cccacgcgtccgcctccctaagcaaaactaaaacaagctatggctggtatgcttcccggagttgagtgtgcaaggaggcggcgcttccacggtggtgctcctccgattgaatcctcgaacacagcttctgtggcggctgcggcgggacacgtctggacacggcgaccatcgttctctctttacactaccaatcatgagagccaccaggcccatgtctccttctcggagagaagtgttaggaataaatcttatggagaagacaacgatgagaaacttgacggagcagccaaagaggcaaagcagaggcttaacaagcggctgagaatcccaccacgtacaaggttcgatttagtaaaaaacggcgtgtgatagtaaaaccaactcgtaaatttaccttaaaatgcaccgaagaagcttcaagcctttagctttatttgtcatgataatgacgcatgatgatgtattctaattcataacatgtggtatcacatgagcaatactattgtgagtttgtcttttggcggacaattatttcattacccctttagggttaaccccactttgtggccttgcgagcgcattttagcaggttctcgctatttattgtt

SEQ ID NO: 124556 - DNA, 578 bp, Arabidopsis thaliana
atactcaggttttattccaattattttagggaaggttggaccccttgcaggacccggtccgaatttccggggccgacccacccttccgttaagcaaacctaaaccaggctatggctggtatgcttcccggagttgagtgtgcaaggaggcggcccttccacggtggtgctcctccgattgaatcctcgaacacagcttctgtggcggctgcggcgggacacgtctggacacggcgaccatcgttctctctttacactaccaatcatgagagccaccaggcccatgtctccttctcggagagaagtgttaggaataaatcttatggagaagacaacgatgagaaacttgacggagcagccaaagaggcaaagcagaggcttaacaagcggctgagaatcccaccacgtacaagttcaggcaaaatggtaaagacaaagggaataaattggagcaaggaaagggtaaacctctcggggacttaccgaccgaggtggtcgggttaaagaagagccgaggaaggttgatggaatggttcaagcgccgagttagggaacaacacgattgtgctatatgtctag

SEQ ID NO: 124557 - DNA, 835 bp, Arabidopsis thaliana
  unsure (1)..(835): unsure at all n locations
gcgatgaattgggtaggtttgttgagcttacggggatccctgttgcgagtacgttggtggggctgggatcttatccgggtgatgatgagttgtcgttacatatgcttggaatgcatgggactgtgtatgcaaattacgctgtggagcatagtgatttgttgttggcgtttggggtaaggtttgatgatcgtgtcacgggtaagcttgaggcttttgctagtagggctaagattgttcatattgatattgactcggctgagattgggaagaataagactcctcatgtgtctgtgtgtggtgatgttaagctggctttgcaagggatgaataaggttcttgagaaccgagctgaggagcttaagcttgattttggagtttggaggaatgagttgaacgtacagaaacagaagtttccgttgagctttaagacgtttggggaagctattcctccacagtatgcgattaaggtccttgatgagttgactgatggaaaagccattataagtactggtgtcgggcaacatcaaatgtgggcggcgcagttctacaattacaagaagccaaggcagtggctatcatcaggaggccttggagctatgggttttggacttcctgctgccattggagcgtctttttgctaacccctgatgcaatagttgtggggtattgccggggatggaagctttttaaatgaatgtccaagagctggcccaatccctgtaggggaacttcccgtgaagaacccctttttaaacaaccagcattttgggatgggttatcaattgggagaccggttacagggaaccggccannattcccggggncggcnngnggc

SEQ ID NO: 124558 - DNA, 470 bp, Arabidopsis thaliana
cggaaaacgcgagggtaattaaaagtcagtgtttcatgacacaaggaacacctaacttctacatgcgtccgatcgaaggtttaaccattctcatcgatttagatacaaagcaagtgatcgagataaccgatacaggtcgggctatacccatacccggttcaaccaataccgattaccgcttccaaaagctcgcaaccaccgacaaaactcggcctctaaacccgatatccattgagcagccacgtggtccaagcttcgtgatagaggacaaccatctagtgaaatgggcaaattgggaatttcatctaaaacctgacccgagagcaggtgtggttatatcacgggtaagagtacacgacccggatactcatgagacacgtgacgtgatgtacaaaggtttcgtgtctgaactttttgttccgtacatggatccatcggacgcgtggtactttaagacttacatggacgca

SEQ ID NO: 124559 - DNA, 864 bp, Arabidopsis thaliana
aggaggtggttaatgcgagtcggaagtacagattacgtgtacatgtctgtgctccatcaaactctgcacttgatgacattgtgttgcggcttctgagttcgggtcttcgtgacgaacacgcccagacatatacacccatcaatagtacgaattggtctcaaggctcatcactctgttgcgtcagtatcactggatcaccttgtggcacaaaagcgtggctctgccatcgataagccaaaacaagggactacaggaactgatatagatagtatccgcactgcaattttggaagaggctgcgattgtgttcgctacccttagcttcagtggctctgcacttcttgctaaatctaaccgtggtttcgatgtcgttataatagatgaagctgcgcaagctgttgagccagcaactcttatccctttggccactaggtgcaaacaagtatttcttggtaggggatccaaagcaactcccagctactgtaatctcaactgttgctccggattctgggtacggtacaagcatgttcgagagacttcaaaaggctggctatccagtaaaaatgttgaagacccaataccggatgcatccagagataagaagctttccgtcaaagcaattctatgaaggggcactagaagatggatctgacattgaagctcagactactcgtgactggcataaataccggtgctttggtccattttgcttttttgatatacatgaagggaaagagtctcaacatccaggagcaactggttctcgggtaaatctagacgaggtggaatttgttcttctcatctaccacagacttgtaaccatgtacccggagctgaagtctagttctcagctagctattatatc

SEQ ID NO: 124560 - DNA, 857 bp, Arabidopsis thaliana
gccccctttgaggtcaatggccgtctccagtaccgctccggaatttccgggtcgacccacgcgtccgctcttctttatctctcatctcaatctcagccatcattatcatcatcgttgtgacatcggagttgacgtcacgttgtggtcgtgattgttatacgtggttggtttcgtcgtcgttcatcaccggattgttagaagaaaacagttcaagtggtggaattggtgatccgtttcccgtcacgtctgaaggattttgggcgagttctcaacggttctgcgtagatctcgttcccaagttttcagaatagttttcggatctaaaatcggaggtagaggttttaaagatctatttcccgacggatctgaaagaatcagatcgtgagtttggtgtcgttggaaagatcttgaggagagaaaaaagtagcaaatttcgttttcacgatccaagtttcatcttaaggtttttaggaagcgtttctggtcaccccggagcataattagaccaagcgacggtggataccggtagaggaagtgttagggaagacacggaactttttgtcgtcactaggaaaggtcacattgagaattgtgtgtagtcgctcaaattcgtcttgcttatggtgtattttggaaacctcagatttatttttctaatattgggatttttctttatacgaatttatttaacatagtttttccaagtggattttaaaaacttttttttggtaaagaacaaatcttcttggttttcttgaaaatttaaagaataattggataattttgacccgaaaaggattgtttatttttaaaaaaaaaaaaacataaaaagggggcgggtcggttttctaaaaagg

SEQ ID NO: 124561 - DNA, 598 bp, Arabidopsis thaliana
cccacgcgtccgcccacgcgtccggttggcggatatcccaaagttgctaaccgaagcagagtctctccacactctgttgaaatcgcctaatttcattttttccccagttttgcctcacacacaaatatatacacacatacgcaaaaaactcatgatgcatcattgctcaattacgaaacccactttctcaatttcgatctcgacccagaagcttcatcatcattccagtaaattcttgaatttgggtttcagaatccgatgcgaatccggggatgtttcgtcgccattgcggaccaaggcggtgtctttgtcgtcggagatggaggattcgtcgtccttgaagaagagtttgatggagttagaagggaagaagagtgagccttacccaggaggaatgccgaagatgggtccattcacagggagagatccgaatgtgaagaaacctgcttggttgagacagaaggcaccacaaggcgaaaggtttcaggaggtgaaagagtccctttctcgtctcaatctcaatactgtttgtgaagaagctcagtgtcctaatatcggcgagtgttggaatggaggtggtaatggtgtagcacctgca

SEQ ID NO: 124562 - DNA, 604 bp, Arabidopsis thaliana
  unsure (1)..(604): unsure at all n locations
anttaattcaccgcgnaatctggttccggatcggcgtttcccatccccggnactccgggaagaccgaccttttaagggtgaaattccgcaagacatcgcccgatgagctagaggatgcggtgcagcatttggaggaagccgactggttccgtagcagtagggcaaatagggcggactgtgatattgtataggcccagtcccaccaaaatgaaagcagaggcgaagaagaaggaagttgagagaatgtcaattactagaaggcagaaatacgcaaacactagacccactaaaccctttagaagagagtattcagagagacctgatggacgtggacgcagaggcggaagtagagttccaacggcttaaatttttacccgtttgtttgttttcatctcaagagtagtgatgcattttcatttctccaataataatacaattagaaatacaatcacattgatcttttatgccaaattctcctttgctgggaagctttgtgaagagtcgatctatcagtgaaaaaaaaaaaaaaagggcggccgctctagaggatccaagcttacgtacgcgtgcatgcgacgtcaagactcttctatagttgcaccta

SEQ ID NO: 124563 - DNA, 1008 bp, Arabidopsis thaliana
ccaagctacaatacgactcacctaagggaaagctcgtacgcctgcaggtaccggtccggaattcccgggtcgacccagagtgacagcgtcagcgtcttgttcatcgactcaccttatccacaatcttctccgacatcccaaaccaccgtctccggtctgtctcttcctcagacccttttgcttctccgcttcagtctctcaatccaatcaccgtaacaagcctcgatttcaatcattctcctcaaagccgcttccttgtcattctgcttcactcgtagtgaaatccttctcttccatcgatgaaccagatctcgaagaagacgaagagagcgaggatgaagatttcagcgcagaagaatacgaatacgaagacgaagaagaagaagatgagcaggacagtggagtggtggtttccgagagaggaattgaagattcggaagcatctgaggaggtttcggaaataggagataaagaggagaaaacagagaatacgaagaagaagaagagtcgaggctctgctttgaaactgtcgataaaggagaaaaaggaattggcttcttacgcgcatagtttgggtgataaattgaaatgtcaactcgtcggcaaatctggtgttactgattctgtcgttttctccttcctcgagactctcgagaagaacgagctcttaaaggtgaaaatacgcaagacatcgcccgatgagctagaggatgcggtgcagcatttggaggaagcgactggttccgtagcagtagggcaaatagggcggactgtgatattgtataggcccagtcccaccaaaattgaaatgcagaggcgaagaagaatggaagttgtagagattgtcaattactagaaggcagaaatacgcatacactagacccactaaaccctttagaagagaatattcagagagacctgatggacgtggacgcagaggcggaagtagagttccaacggcgtaaatttttacccggtttgtttgttttcattcttaagagtagtgat

SEQ ID NO: 124564 - DNA, 502 bp, Arabidopsis thaliana
  unsure (1)..(502): unsure at all n locations
cnnnnnnnnnnnnnnnnnnnnnnnnnnnnnnnnnnnnnnnnnnnnnnnnnnnnnnnnnnnnnnnnnnnnnnnccacgcgtccgatttctccaataataatacaattagaaatacaatcacattgatctttttttcacaaagcttcccagctgaggaggtttcggaaataggagataaagaggagaaaacagagaatacgaagaagaagaagagtcgaggctctgctttgaaactgtcgagaaaggagaaaaaggaattggcttcttacgcgcatagtttgggtgataaattgaaatgtcaactcgtcggcaaatctggtgttactgattctgtcgttttctcattcctcgagactctcgagaagaacgagctctttaaggtgaaaatacgcaagacatcgcccgatgagctagaggatgcggtgcagcatttggaggaagcgactggttccgtagcagtagggcaaatggggcggactgggattttgataaggcccgtccca

SEQ ID NO: 124565 - DNA, 1184 bp, Arabidopsis thaliana
  unsure (1)..(1184): unsure at all n locations
ccgggnncgacccacgcgttgcggcagctctgcattcttgttgttttcttctagtactcttgcagtcacacgaaatacgggcagtgaggagagagtaggagtgataatggcgagtggactaagcgagatcgggagcacgaagatgttcgatggctacaacaaaagatacaaacacttcagtgagacacttggatgttccatgaccttttccatctacttccctccttctgcttcttcttcccataaatctcctgtgctttactggctttctggcctcacctgcacggacgagaacttcattatcaaatcaggagctcaacgtgctgcttctactcacggcattgctcttgttgctccagacacttctccaagaggactaaatgttgaaggggaggcagacagttacgactttggtgtaggagccggattctacctcaatgctactcaggaaaagtggaagaactggcgtatgtatgactatgttgtcaaagagttgccaaaactcctgagtgaaaacttttcccagcttgacacaacaaaagcatctatatctggacactccatgggtggacatggagctcttactatatacctgaggaacctcgataaatacaagtctgtatctgcgtttgcaccaatcacgaatcccataaattgtgcatggggacagaaggcattcaccaattatctaggtgacaacaaagctgcttgggaggaatacgatgccacttgtcttatttcaaagtacaacaatctttctgcaacaattctaattgatcagggagaaaacgaccagttctaccctgatcagttattgcccagcaagtttgaggaggcgtgcaagaaagtgaatgcaccgctcttattgcgcctccatccaggatacgaccactcctactatttcattgccaccttcatcgaagaccacattagtcaccatgctcaagcccttgagctatagctcacttcatctgcttggaaaccggctttgggtttgtccaagtattagtatctcaataaagcaagtggacttgtaatgttttatgttcaataactcccctgtgtgctcttttgtctacgataataataagaaaatcatctttgattcaaaaaaaaaaaaaaagggcggccgctctagaggatccaagcttacgtacgcgtgcatgcgacgtcatagctcggct

SEQ ID NO: 124566 - DNA, 398 bp, Arabidopsis thaliana
atcgacttccagatcataattgctctagtgaataactaaagaaaatagatgaatagatggaagatagaagagaaagaaaaaaaaaattctaagtatctatcatcggttcactaattacttgagtgactgttggcgggtttctttgtatgtgttgtccggaaagaggaggactcaatgattattcgttcgccggaaccagaagtcaaaattttggtagatagggatcccataaaaacttctttcgaggaatgggctaaacccggtcatttctcaagaacaatagctaagggacctgatactaccacttggatctggaacctacatgctgatgctcacgattttgatagtcataccagtgatttggaggaaatctctcgaaaagtatttagtgcccattt

SEQ ID NO: 124567 - DNA, 736 bp, Arabidopsis thaliana
  unsure (1)..(736): unsure at all n locations
ccnnnnnnnnnnnnnnnnnnnnnnnnnnnnnnnnnnnnnnnnnnnnnnnnnnnnnnnnnnnnnnnnnnnnnnnccacgcgtccgcccacgcgtccgcccacgcgtccgctcttctccgtactctcttaactttcaaaacctcacgaaatcatgcttttaaacatttcttcttctccaatttctcatcgaattcctcatttcctctctgattttaacaatcccacttcaaatttccctccgaaatccaaaacccatctcccaaaatctaatctctccactttatcgaaccatagcctctacggcaccaagaacagagctttctataaaaacaagagaaacccttataacagaacacaagctctcggtcgattcgatttcggaagtctcgaatcagttctcgaagcttccgctgttctcactgcgatcatcgtcgtacacgagaccggtcactttttagctgcttctcttcaaggtatccgtgtgagtaaattcgcgatagggtttggtccgattctagctaaattcaattccaacaatgtcgaatactctcttagggcctttccattaggtggatttgttggattccctgataatgatcccgacagtgatatccctgtagacgacagaaatcttctcaagaatcgaccgattttggatagagtgattgttgtttcagctggaattgtcgctaacgttatcttcgcttacgctataatctttactcaagtggtatctg

SEQ ID NO: 124568 - DNA, 472 bp, Arabidopsis thaliana
ctactatttggtttctcccacttctctttctctcttgtcttcggcttgccgctttaagactcaagaagcggcggcaacatcaacggaaaccaccgtctccaccgggctttccgatcatcggaaacttgcatcagcttggggagctaccacatcaatctctatggagtctctccaaaaaatatggtcctgtaatgcttttgaagtttggaagtatcccaacggttgttgtctcttcttctgaaacagcaaagcaagctctgaaaatccatgacctcaattgttgtagccgtccaagcttagcaggaccaagagcgctctcttacaactacttggacatagttttctctccttttaatgattactggaaagaattgaggaggatttgtgtgctagagcttttcagtcctaagccagttcatttgattcaccccatcagggaagaggaacgtaagattctgcttaattcactctt

SEQ ID NO: 124569 - DNA, 532 bp, Arabidopsis thaliana
accaagcgtccggtctgaggcccgaaagctgcttcttactcgaaagtcgaaacccttgtgagagaacttggtgatgccgaagatggtaactccgacgagtactggaaccagtttattgagccattcgcagaatctgagggtcaagtggtctcttctctctcattgctttatcttaattaagactttccaggtattgagtaatgtaatacacgtatctacatgaagatgaggatataaatatccatttatgagaaaagaaaaaaagggacaaacaaaagttggcaagtttaactaagtgaaaagtctatggcggagacaacgagttggatcccagtatggtttcctctgatggtgttgggatgttttggtctgaattggttggtcaggaaggtgaatgtgtggctctatgagtccagccttggggagaacaggcactatctgccaccaggtgatttgggttggcctttcattggcaacatgttgtcttttctcagagctttcaggacttctgaccctgactccttcactcgca

SEQ ID NO: 124570 - DNA, 470 bp, Arabidopsis thaliana
cggacgcgtccgcccttgggttttagcagtgaagtttgcgaaaatggcgtcttcggtttttctatccagtttctcgtcatcgtcttctttgcaactctgctcttcctttcacggcgagtacttagctccgtcgagatgctttctcggagctccggtcacttcctcttctttatcactctccggtaagaagaactcatattctccgagacagttccatgtttctgccaagaaagtttctgggttagaggaagccattagaatcagaaaaatgagagagcttgaaactaaatcaaaagttaggagaaatccaccattaagacgtggaagagtatcgcctcgtcttcttgtacctgatcacattccaaggcctccttatgttgagtctggtgtattaccggatatatcaagtgagttccagattcctggtcctgaaggcattgcgaaaatgagagctgcttgcgagcttgctg

SEQ ID NO: 124571 - DNA, 469 bp, Arabidopsis thaliana
cggacgcgtgggcggacgcgtgggccttcttccatttttcaaattacaaacatacacaacaacaacaaaacctcttactcactccaatggctcgccttctctttcgtcttctcgtagaatccaacactccgtctccggcgattgataactccaccgccgcgttgaattctgatctcgtcgtcatcctcgctgctctcctctgcgccttgatttgcgttctcggcttaatcgccgtttctcgatagtgtctggctccgtcgtctcgcagccggaaacagaacagtctccggatctcaaactcaatctcctcaacctccggtggcagcggcgaacaaaggcctgaagaagaaagtccttcaatctctcccgaagcttacgttctcgccagagtcacctgagtcggagaaattcgcagagagcgcgatctgtctagctgcattctctgccggcgacgttgctcccagcctta

SEQ ID NO: 124572 - DNA, 1145 bp, Arabidopsis thaliana
ggtgatgaactcgatggttgaggagcaatgctttaaccaatccctggagaaacagaatgagtttccaatgatgcccttaagtttcaagagtagtgacgaagaagatgacgacaacgctgagagttgtctgaatggtttgttcccaaccgacatggaactagctcagttcacagctgacgtggagactctactcggtggaggggatcgagagtttcattccatagaagaactagggttaggtgagatgttaaagatcgaaaaagaggaggtggaggaagaggaaggagttgtgacaagagaagtgcatgatcaagatgaaggtgatgagacatccccatttgaaataagctttgactacgagtacacacacaagaccacattcgatgaaggagaagaagatgagaaagaagacgtgatgaagaatgtgatggagatgggagtgaatgagatgagtggtgggattaaagaagagaagaaggagaaggctcttatgcttagattggactatgaatcagtcatttccacttggggaggccaagggatcccatggaccgcccgggtgccatctgaaatagacctcgacatggtttgtttcccaacccataccatgggtgaaagtggagcagaggctcatcatcacaaccacttccgcggcctagggttacacctaggagatgctggggatggaggaagagaggctagggtttcaagataccgagagaaaaggaggacaaggttgttctccaagaagataaggtacgaggttcgtaaattgaatgcagagaaaaggcctcgcatgaaaggaaggttcgtcaagagatcttcaattggtgttgctcactaaagaacttaattaattatggatattaaattactttgctctcatcttgcttttttgttgctatagttttggtgattgttagctttctttttctgcattcatagagaattttgcacgtttttgtgagctacgtatgtacataaatatatcaccaaaaaatgtgactatcttgtaagcactgatttactatagtccatataacgtgaattttgattgaaggtaaaaaaaaaaaaaaagggcggccgctctagaggatccaagcttacgtacgcgtgcatgcgacgtcatagctcgtctatggtct

SEQ ID NO: 124573 - DNA, 556 bp, Arabidopsis thaliana
  unsure (1)..(556): unsure at all n locations
atttaccggtgacggaatcttacctctgacctaccaatcacgtcattccacgtcatctccccgtatcttctcacgtccttccacgtgtcccctctactcaccgacgccgtctccttcccgtttacccctcccgaacagaatattaacccaaaccctaaccctatctccctctttcacgagcttctgactcagatccggcgatatcgaattccatggaggacgatgaagacatccgatctcagggttccgattcacctgatccgtcttcctccccgccggcgggactgaatcacggttacggtggcttcggcaggtccgccttcttattctctgactcctccgggtaattcgtcgcagaaggntccggatgcgttggctctggcgctgcttccgattcaggccagcggtggagggaataacagcagtgggagaccaaccggcggcggcgggaanggaggattgttggagctnacagcttacggctntgttgattgattcntgggtgtngagagatacttggagcttngcagaggggaactnaagcagtaanccacta

SEQ ID NO: 124574 - DNA, 591 bp, Arabidopsis thaliana
  unsure (1)..(591): unsure at all n locations
atgatctnnnnnnnnnnnnnnnnnnnnnnnnnnnnnnnnnnnnnnnnnnnnnnnnnnnnnnnnnnnnnnnnnnnnnnnnnnccacgcgttcggcggctgcgagaagacgacagaaggggggagccgaagtgttgttttcttatagaaggattttgatttcttctgcaaaattcgatcgatagtgacgagaaagatcctaagatggcgaccgcaagcgagagttcttcatctaagagatggcttccacttgaatctaacccagatgttatgaatcagtatctctggggacttggtcttgcccctgatgaagcagagtgcaatgatgtgtatgggttagacgatgaacttctagagatggttccaaagcctgttcttgctgttctcttcctttacccaatcaccaaaaagagtgaagaagagagaatcgagcaagacaaggaaattaaggaaaaggtgcatagcgataaagtttactttatgaaacaaactgttggtaatgcttgtggaaccattggtcttcttcatgctattgggaatattacctctgaaatcaaactctccgacggatcattcttggatagattcttcaaa

SEQ ID NO: 124575 - DNA, 1086 bp, Arabidopsis thaliana
  unsure (1)..(1086): unsure at all n locations
gtcttgttttgtgatttatcaaacttccgtccaaagtggaacatgattaaagttaggtttcaattgattggataaggacaaagactggttgttgtgtcacatttcctctctctctcagattttacaggcaaatcgatttcactcgaagactggttgttgtgtaattgtgttcgtcgtctcaggttttcaatatctgtctctttgagttgtattgatgggttctgaaggaccaacgggtgtgacgattcatatcacagggttcaagaagttccatggagtagctgagaatcctacagagaaaatggctaacaatttgaaagaatatttggctaagaattgtgtttcgaaagatgtgaatcttggaagttgtactgtgcttgagactgctggtcaaggagctcttgcttctctctatcagttgctacaatccgcggttaacacaaaagagtcagagtcgttgaccggaaaaaccatatgggttcactttggagttaatagtggcgctacaaaatttgcaattgagcaacaagctgtgaatgaagcgacttttcgttgtcctgatgaattgggttggaaacctcagaatttgccaattgttccctctgatggtccaatctcaactgtaagaaagactaatcttcctgttgaagagataacaaaggcgttggagaagaatggctttgaagtgataacatcagatgatgcaggtcgatttgtgtgtaactatgtctattaccattctctgagatttgcagagcagaataagcccagatcactctttgttcacgttcctcttttcgttgccgtggatgaagaaacccaaatgagattcactgtttctctgctggaggtactcgcttctatttgcaagtaatgttatcccaaatgtggctattcttattcatgaaatgtgcatcatgggccgattgtctccccacgggaaaaattcgcttatcaataaatggaatataagttcccttctagtaaaataaaaaaaaaaaaaggaaaaaaaagnnnnnnnnnnnnnnnnnnnnnnnnnnnnnnnnnnnnnnnnnnnnnnnnnnnnnnnnnnnnnnnnnnnaacgg

SEQ ID NO: 124576 - DNA, 706 bp, Arabidopsis thaliana
gcctgcggtccggtccggaattcccgggttacccagcgggcgacgcctgccggaagacggagggagggggagagattggagctagttggagatgggaataaggttcatattgatggtgaacaagcaaggccagactcgtcttgctcagtactacgaatggctcactctcgaggaacgtcgcgctctcgaaggcgaaatcgtccgtaaatgcctcgctcgcaacgaccaacagtgttcgtttgtcgagcatcgcaactacaagatagtctacaggcgttacgcatctctcttcttcatggttggggttgatgacgatgaaaacgagctggcgattctagagttcatacatcttttggtcgagacaatggacaagcattttggaaatgtgtgtgagctagacataatgttccatctggagaaagctcatttcatgctggaagaaatggtgatgaatggttgcattgtggagacaagcaaagccaacatactttcacctatacaacttatggacaaagcccattaatgctaaacaccctgtttctatttctgttaatccgtttcatcactttgttacacacttcttcttgtattattattaacgatgcttcaaagagaggataatacaaaagaagcaggaaatcgaaaagtaccaattgggagtacaattcacaagaacccgatgataataaggatagttacattgtct

SEQ ID NO: 124577 - DNA, 401 bp, Arabidopsis thaliana
  unsure (1)..(401): unsure at all n locations
aagaagctcangatcatcttcgtttggtcgttgtcttggggtcctccgaatcaagaacccacaaataacattcgaggaatctgtgaacgacgacccaattgaacctaaagttgaagactttggacggatttagaaagaaagacccaacaagatgctgtagagcgaggcatctctctcgatttactgcgactctggagatgggttcaaatccgaagatccggtgactggaatcgaggagaatttggagagaacggttacgattggtgatgctattgacggcggcgagttcagttttgcgaaacacaaggaagaagatagtggtgaaggtgagagaggtgtttttgaagaggttattaagaagcttgggattggtgtgagagatgaactacgttttgagattg

SEQ ID NO: 124578 - DNA, 692 bp, Arabidopsis thaliana
  unsure (1)..(692): unsure at all n locations
aacaagaacaacagacacatagagatgagccgctgcggctctcttgggctctatgccccaaatgctttgccatctctctccttgaagccacgcagcgtcaaatctcctttctgtattacattctcacaccaaacccaacgacactcttcttcataatgttaacaagatgagagcaaaggcctgtgatatacttggagcaaagaagacaatcttggcagctcaactcggggcagttcttgccacgattgaccatccagccttagcaataacaggagttaacaaccagcaggaattgngcagtgttgtgctcgatatcgggatcatatccgtttggtacttcctagtaatgccaccaatcatcatgaactggctaagagtaagatggtacagaaggaagttcttcgaggtgtatttacagttcatgttcgtcttcatgttcttccccgggctactgttatgggcaccatttctcaacttcaggaagttcccaagagatcctaatatgaagaatccttgggacaaaccaacagacccagactctataaagaacgtttacctcaaatacccatatgcgacgccagaagattacgatctcgattaacagatagatccacaagtctgtttcatatcttgagactgtatgtatatactctgcattcacatgaacacaatggtatggcttgtgcatacac

SEQ ID NO: 124579 - DNA, 518 bp, Arabidopsis thaliana
  unsure (1)..(518): unsure at all n locations
acgcgcnnnnnnnnnnnnnnnnnnnnnnnnnnnnnnnnnnnnnnnnnnnnnnnnnnnnnnnnnnnnnnnnnnnnnngccacgcgtgcgcccacgcgtgcgcccacgtcgtccgcccacgcgtccgcccacgcgtccgcccacgcgtccggattacaggaagttctctatattcttgaggagagatgccgctttgaaaccagggtttgtggttaagaagctgaggaggggggaaaccaggaaagattgtgaagtaccaaaaggttatgaaagaggttaggcgatattttgactatacacatctaaatggaagtgtgaacgagatctggagacaagttactaagaagataccgctaatcaaactgatgattaatcgggagaagcgcatgatcaagagagatggaagtgaccctcaatggtcttggttatgctcaaaccaaaccgggatcatccatggggtctagtaaggttaaatgcctaccaagctcatgctaagcaacaaagtgtgatcattattaat

SEQ ID NO: 124580 - DNA, 429 bp, Arabidopsis thaliana
  unsure (1)..(429): unsure at all n locations
accacgcgtccggaaaaatgtcagagaaaggaggcaaggggctcaaatcctctctcaagtccaaagatggagggaaggatgggagctcaacaaagctcaagaagggtagaaaaatccactttgatcaagggactccacctgctaattacaagattctcaatgtttctcctgatcaacaaccatttcagagttctgctgctaaatgtgggaaaagtgacaaacctaccaagtctagcaaaaactctctgcattcgtttgagctcaaagatcttcctgagaatgctgaatgcatgatggactgtgaagcttttcagatattagatggaattaagggccaatttggttggcttgtctggaggtccggcaaattaaaattcccggtatccttttgccaggcattggcttatgttngngngttgtntcncttca

SEQ ID NO: 124581 - DNA, 428 bp, Arabidopsis thaliana
cggaatataaactctcgacgacgaaaatctcaaaaaccccaaaatctcctccaactccgagttatggctacatgttccctcttaccaccaccgtctttttctccgcgccggcgattctgtagtttttctcacaatcgccggtctctaccttcaatattcagtttcaacaaagagcgtgtctcacgaagagtcttctgtagctccaaagagaacgatataaacagagatcggaatcagtctacaggaattcaagtctacggcgaaatcgagaggttattaacagagactgtaaaaaattctcagagtagctccggtggatcctctgattggtcagaagttgagggagcatgggtgctgaaaccaagaaactcgaaaccgaagatggttgttcatttcattggcggtatatttgtcggtgcagcaccaca

SEQ ID NO: 124582 - DNA, 553 bp, Arabidopsis thaliana
cccacgcgtccgctgtctctcacttcttcttcctcacggcggcgacaatggcgacgttcactcatcaaaccccacaaacccatttcctctctcgccttcctctcagagctaaacctagacacttctccgcaagagtcaaaatgtctctccaagaatctgcgccttcactcgccgtcgttggcgttaccggagccgtcggacaagaattcctctccgtcttatccgatcgagacttcccttatagctccatcaagatgcttgcatcgaaacgctccgcagggaagcgtgttgccttcgatggccatgaatacacggtggaggagctcacggcggatagcttcaacggtgtagacatagctttgttcagtgctggtggatccataagcaaagagtttggtcctctggcggcggagaaaggaaccattgttgttgataatagctcggcttttagaatggttgatggagttccgcttgtgattcctgaagtgaatccagaagcaatgaaagggatcaaagttggaatgggcaaaggggctttgattgcaaaccctaa

SEQ ID NO: 124583 - DNA, 1056 bp, Arabidopsis thaliana
  unsure (1)..(1056): unsure at all n locations
ggtacactatagaagagctatgacgtcgcatgcacgcgtacgtaagctcggaagtcggctcgtgccaaattccaccgtctcttatatattcttaataccaaaaactaaaactcaaaaggaaaaaagaaaaagaagaagaggagctaaaaaaacgacgtcgtagaaggagattcttgccatggccacacatagtctctccttcttcttcagagttcttctcctcctctttcttactctctcagagagaattaaagggcaaggtgtgggaatcaactacggccaaatagcaaacaacctcccatctccggcaagagtcgccgtgctccttcgatcactaaacatcacaagagtaaaactctacgacgcagatccaaacgtcctcttctccttctcaaactcacaagtagatttcatgatcggtttaggcaacgagtatcttcaaaacatgtcaacagatccaaccaaagctcaagattggttacaacaaagacttgaaccacatatctcaaaaacacgaataacctcaatagttgtcggcaacgaaatcttcaaaaccaatgatcatgtcctcatccaaagcctattaccggctatgaaatcggtttacgctgctttaaccaaatcttggtttagagaaacaagtaaccgtaacttcagctcattctttagacattctttcaacatcttatcctccttcttcaggatcattcaaagaagagtttattcaatatcttcaaccacttcttgattttaattctcaaatcgaatcacctttcttgataaatgcttatccctttttngcttataaagatagtcctaaagaagttccattagagtatgttttgtttcaaacctaatcaaggtatgggttgntcccaacacttaatccttcattatggccaccatggtngttttggctcaagttngatgggggtttnacntcngncctttaaggcctttnggggcnatcccgttttcgggggtttcggggttttcgggaacccggtttggcnttcttanngggggtgggggttgnggtttgggggnttcncccgt

SEQ ID NO: 124584 - DNA, 683 bp, Arabidopsis thaliana
gtgacctatagaagagctatgacgtcgcatgcacgcgtacgtaagctcggaattcggctcgagcgcagttcaattagggtttcaatctctctgctctgcttgtcatcaccaccaccaccaccaccgtcgtcgtctctctgtatctctccggcgggttctctctctacttcccccggaggattaaaagatggaccagtcttttattttgatattccgttagcttgttcagttattgtagaagctgtaccgtcaagacttttaatatctcaaatggatgatggtgggcatcgtgagaatggtcggcataaagcagcagttcagggccagtggttgatgcagcatcagccgtcgatgaaacaagtgatgtcgataatagcagagcgcgatgcagcgattcaggagagaaatctggcgatatcagagaaaaaagcagcagtagctgaaagggacatggcgtttcttcagagggacaccgccattgctgagcgcaacaatgcgataatggagagagacagtgctcttacagcactccaataccgtgagaactctatggttactgctcctgctgccaatatgtcagcatgtccaccaggatgtcaatatcacgtggtgtaaacacttgcaccatccgacatgcatcatcatcataacaacatacatacctcagttgactgaaatgcata

SEQ ID NO: 124585 - DNA, 606 bp, Arabidopsis thaliana
aggtttttagatctttttggtctcttcagtcggaactgaaaattcatggcgactcgctcgctcttccatagtcttagatgtcgattgacgaataatggtgttctcggaagcaatttcattcgaaacgccgaatcgtcacgattctccaagtcgtacaatgctgacgcagcaatcggaaactcccttgtcgaggaatcggaggagaaagacgatctgaagagcaggattttcagattgagacttccgaaacgtagcgcgactactgttctcgagaaatggattggagaagggaatcaaatgactatcaatgaactccgagagatctccaaagagcttaggagaactcgccgttacaagcacgctcttgaggttacagagtggatggtacagcatgaagaatcaaagatctcagatgctgattacgcctcacgcatagatctgatttcaaaagttttcgggatcgatgcagctgaacgctactttgaaggtctggatatagattcaaagacagctgaaacctatacttctctccttcatgcttatgctgcctccaaacaaaccgaacgagccgaggccttgttcaagagaatcatttgagagtgatag

SEQ ID NO: 124586 - DNA, 703 bp, Arabidopsis thaliana
  unsure (1)..(703): unsure at all n locations
tgatctccnnnnnnnnnnnnnnnnnnnnnnnnnnnnnnnnnnnnnnnnnnnnnnnnnnnnnnnnnnnnnnnnnnnnnntccacgcgtaccaccaatcttctctcttcttcttcttttatgtttcttcttttagtttttgttttttcgatttaatctgatcatcaaaaccctgctctctcaagatcatgcttactaaaagaacccatcccatgatcggaaagatatcggagctcctcgtcggtgtcaaccgatccacggcggctcctttcttcgacgtcttgatgacgagccctaaaagcccactggatttcaagattctccctcagatatctcaaagaaacagctcaaagagattctacgatgacaatcttggtggctctgttggtctagggattgtagccgcgctcgagaactcaaacactcgtcgaatcacgagcgtttgtagatcggaaccgaaccaacccggccggtctgatccggtttcagttcatgagccatggtggaagcacggacggagaaggccgaggagattttcataatggccggggggggtttcaacgtttggtgcaattcccccatgggccaagtggggcttttttggtcaaagggttttgcaaaaatgggtttagtgtttnaagaaggcaacggtgcnatcgnnaanttttgggncnttcgaaggattcncnaattccaagttttnggc

SEQ ID NO: 124587 - DNA, 453 bp, Arabidopsis thaliana
cacgcgtcccaataatcgaaggatataactctggagatttgtgtaagcattcttctttgagattttccgaggtcacaagtcagtacacaaaggaagttccttttttgggttttggggtctgctttgtgtcagtgattttaggattgcttcatttgccacacatttccaatctcttaagtagttggcggcgaagatgggtttcctgatagggggctcttgcttcgtcccttctgttcctctacactctcgattcctttcatctccttcttcttcttcttcttcttctccttcttcgtctcagtttgggcttctgtgttcgagtaatgtcgccaagttcaagcgccgacgaccaacattggcttctttaaaccaggaagatgggtacgagtatgacgttgcttccgccaaaatgagggctttccttcttgtgggtatctctgttcttcccttttt

SEQ ID NO: 124588 - DNA, 494 bp, Arabidopsis thaliana
cccacgcgtccgcccacgcgtccggcttttttgagctgtcagcagcattcttatcaacaaagacgagacgacagtgactgttccgagtagcaccgctaaaacagtaagaggtgtgtgttgggataatgtcggaagtagagggcgaaaaccgggctatcgtgtgtgacaatggaactggaatgatcaaggcaggatatgctggagaagatgcaccaagtgttgtgtttccaagcactgtgggtcgtccaccacatacgggagggatggtaggaatgaatgagaacgatttatttgtgggagacgacgctgaagccaggagcggtatacttacacttgactacccaatggagcacggggttgttagcaattgggatgacatggagaagatttggtaccattacgttttacagggagcttcgtgtggctcctgaagaacaccctgtgcttctcactgaagctcctcttaacccgaaagccgatcgtgagaagatgac

SEQ ID NO: 124589 - DNA, 526 bp, Arabidopsis thaliana
aagattctaaaaccgtaacccacaaatctcgtctttaaagacaccattaaagctcaagaatctctgtgtgagagacttcaagaacttggatccgagccatatccaagaagaaaaatggcgggattcaccatgagcttgaacttgcttctactagtagcaatggtagctacaaacatcctctcactctaccacctctcctccaccacaaatttcttccaatccaccgtcaaatcctcacaatcctctgttcccacagttcccgatcacctcctccgtcagctccacactatccgcgccgctattaaccacctcacaactcaccaaccagacaaatcaacttcaacctcgacctcacgcgccgccgtctcctcctcctcctcctccaccgcgcctaaagagcttttaatctactctaagctctcacctatagcttcagcttgtcataactaccctgaccttcttcatgagtatatgaactacactcctttctctctttgtccttctgacaccgatctcgtcgagaaac

SEQ ID NO: 124590 - DNA, 633 bp, Arabidopsis thaliana
gtgatcaacaaaacaccccaaaaagtaaagaaaatggccgcaattacatcagctaccgtcaccatcccttctttcaccggcctaaagctcgccgtcagctcaaaacctaagacattatccaccatcagtagatccacttccgccaccagggcgccacctaagctcgctttgaagtcctctttgaaggatttcggtgtcatcgcagtggcaacagcagcttcgatcgttttagctggaaatgcgatggccatggaggttcttttaggatccgacgacggttcccttgctttcgtaccatctgaattcacggtggctaaaggagagaagatcgtgttcaagaacaacgcagggttcccacataacgtggtgttcgacgaagacgagatccctagtggtgtggacgcaagcaagatctctatggatgagacagcgcttctaaatggtgcaggggagacttacgaggttactttgacagagccaggctcttacggtttctattgtgcgccgcaccagggtgctggtatggttgggaaactcaccgtcaagtaaattgtctagatattctcttgttcgtgtaggagcttacatattcatgatttataaatctaatttggaagagaatgttggattgat

SEQ ID NO: 124591 - DNA, 1121 bp, Arabidopsis thaliana
  unsure (1)..(1121): unsure at all n locations
cgacttttttagggaaagctggtacgcctgcaggtaccggtccggaatttccgggtcgagccacgcgtgcgcccacgcgtccgtaaggtgatagttaaggatcttgtaaagcagaggattgcaaccattggagaaaacatcaaagtgaagagatttgtgaggtacactctcggagaaggccttgagaagaaaagccaggactttgctgctgaggttgctgcccaaactgcagctaaaccgaaagctaaagaagagccaaaagctgaagaggccaaggaagctgttgcaagcccaccaactacagtggtttcagctgctcttgtaaagcaactgcgtgaagagacaggagctggaatgatggattgcaagaaggcattggcggcgacaggaggagatcttgagaaagcacaagaattcctcagaaagaagggtctctcatcagctgataaaaaatcaagccggcttgcatcagaagggagaatcggttcgtacatccacgattctcggattggagttctgatagaagtgaactgtgagactgactttgtcggaagaagcgaaaaattcaaggaattggttgatgatcttgcaatgcaagcagtggctaatccacaggtgcaatatgtttcaatagagggcattccagaggagataaagcagaaagaaaaagagattgagatgcaaagagaggatcttttgtcgaaaccagagaacataagggagaagattgtggaaggaagaatctcaaagaggcttggagaatgggcattgcttgagcagccttacatcaaagacgacagtgttctggtgaaggatctggtgaagcaaacagtggctactcttggggaaaacatcaaagtcagaaggtttgtgaagtttactcttggagaagataactgatgagacagacgaagtaaagttttcaaataagggagctctgttttgtgtcatggagtttaaagtaaaagtcttcctttttgttttgtagacaaaatcttcagtattccccttttgattaggttgcggcccgggaaattcctcaaggccgggggatcccactaattttaaagcgccccccccccggttgagnnnnnnnnnnnnnnnnnnnnnnnnnnnnnnnn

SEQ ID NO: 124592 - DNA, 554 bp, Arabidopsis thaliana
cgggtatcttaaatgtcgtgatggacggtggagacagcgtcggaggaggaggaggagatgatcaccaccgtcacctccaccatcaccaccgccctactttcccttttcaactactcggaaaacacgaccccgacgacaaccatcaacaacaaccttccccttcctcctcctcctctctattttctctccatcaacaccaacaattatctcaatcgcaacctcaatcgcaatcgcaaaagtcacaaccgcagacaacgcaaaaagagttattacaaacgcaagaggaatctgcggtggtggcagctaaaaagccaccgttgaaacgagcgtcgacgaaagaccgacacacgaaagtagacggaagagggaggagaataaggatgccggcgttatgtgcagctagggtttttcagctaacgcgagagctaggtcataaatccgacggtgagacaatagagtggcttcttcaacaagctgaaccatctgtaatcgccgccaccggaaccggaacaatcccggcgaatttcacttctttaaacatctctctccgttct

SEQ ID NO: 124593 - DNA, 415 bp, Arabidopsis thaliana
gcccctcaaggtatcttccagaagcaacgtgaagacctgcaagagaaaattttcagattcagctatggcggacgaagcaaaagctaaaggaaacgcagctttctcctccggtgacttcaattccgccgttaatcacttcaccgacgcaatcaacctaacaccaaccaatcacgttctcttctcaaaccgttccgctgctcacgcatcgcttaatcactacgacgaagctctctcagacgcgaagaagactgttgaacttaaaccagattggggaaaaggttatagccgtctcggtgctgctcacttaggtctaaatcagttcgatgaagccgtggaggcgtattcgaaagggcttgagattgatccaagtaacgaaggtttgaaatcaggtttagctgatgcgaaagcttctgcg

SEQ ID NO: 124594 - DNA, 698 bp, Arabidopsis thaliana
  unsure (1)..(698): unsure at all n locations
cctgcaggtaccggnccggaattcccgggttgacccacgcgtgcgaaaccttcttcaagatcttcttggtgttgatttatcgcagccttcagcacaacctggtgccatgcagccatcgcaagctggtgcggatattcttatggatctgttgtcaatcggaactcctgcccctgtgcaaaatggctcggcgaatggagacttattatctattcaagataacaatgctccaatagcgccttctttgacttctcccactgcgccttcttcgatgatggatttattggatggatttggtcccaccccaccaaagagcgaggacaagagtgcagcatatccgtccattgttgcatttgaaagcagctccttgaagattgagttcaacttcacaaagcaatcagaaaatcctcaaacgacagacattgtggccaatttcataaatcttactcctaacgtgtacacagaatttcttttccagggtgcaagtttccaaaggtttctncnaactttaacctgggtccccggtnagcagnaaatttntttttccagnttaacggggaacatcaanncaaactttgggggtnccaaattggccaaaaggggnaggaaccccttttttttnggggttgggggtggtnnaaaggtttatggnaaggtnttttgggggngggcnaanctaaanttccccgggggnttttttc

SEQ ID NO: 124595 - DNA, 732 bp, Arabidopsis thaliana
  unsure (1)..(732): unsure at all n locations
cnnnnnnnnnnnnnnnnnnnnnnnnnnnnnnnnnnnnnnnnnnnnnnnnnnnnnnnnnnnnnnnnnnnnnnnccacgcgtccgctcttctttctgactcataacccaaatttctgagaatcagagccttattcaagagaacaccaagagtttggtggaagttgttgaaattcgaagccgatcgcggactcgtttgctcttgattacgtcgcaatccgtacgattttccgatcaaacttaagagtgaaggagatagatttgtagaaaaaggaagagaataagagtgagcttgtggccaaaaaagggatgcctttgaacttaggcaacgatggcgatgggtcttcccggattattttgactgagcctcgcggatctactgctgaggtgcttctatttggaggacaagtcatttcttggaaaaatgaaaggagggaagaactgctttatatgagcagcaaggctcaatataagccacccaaggcgatcagaggaggaatacctgtttgctttccacagtttggaaactttgggtggactttgagcgaccattgggatttgccccggaacaaatttctgggtcaacattgttgaaagatcccttcggcctttanctcctncttaacaaaccaatcatcctgttgatcctggtatttgaaggccncagaagnttgccttttnagngccttgggccgnatnagtttttaaancncccggaattnggaattttntattt

SEQ ID NO: 124596 - DNA, 818 bp, Arabidopsis thaliana
  unsure (1)..(818): unsure at all n locations
gcaagtaccgctccggaatttccgggtcgacccacgcgtccgtctgaatatgaattggagtatgaagtgctatcagcaggctcaggtgatccatgggataatattgaagaaagatgggtttctgcaagtgaaacgcattcacatgccgatgctggcggatccacttcacaggaaaacctccatgtagaaaatagtatggtgaaaccgaataaagttgatgaagagctgctgccgtcagggtcaaggttagagctgcaaaatgacactgacagagcaatagtaacagatgaaaaacctttgggcatagaaaatgaaaaatgttacgagtttgaagatgtggaacagttgatgtcagaaataggaaacatccgggacaacttgcgattgatgcctgatttccagaggagggaaatagctgcaaatttagcgatgaaaatggcttccatgtttggaggtgacactgatgacgaggaagaacctgagtgagtctgtttatatcagatattgtaaaagatcagcgtgagctacggtttaatcctttctttatacaatctttatcaaaaaaaaaaaannatnannaaaanaaaaaaaaagggggaggaaaagnaagggtttgggcaagaaggaatgttttataagaaaaaagggtgtgttcttgaatagcgtctttttccagagtatgaatttcctttatatcctctcgaccgggcaaaaatttaagggggggggccgcgcccctttttttaaagaagaattatcaaaatgttttttttttcccgccgtggttgttcgtaaacagcgntttaacgtcttttttt

SEQ ID NO: 124597 - DNA, 815 bp, Arabidopsis thaliana
aaggttagagctgcaaaatgacactgacagagcaatagtaacagatgaaaaacctttgggcacagaaaatgaaaaatgttacgagtttgaagatgtggaacagttgatgtcagaaataggaaacatccgggacaacttgcgattgatgcctgatttccagaggagggaaatagctgcaaatttagcgatgaaaatggcttccatgtttggaggtgacactgatgacgaggaagaacctgagtgagtctgtttatatcagatattgtaaaagatcagcgtgagctacggtttaatcctttctttatacaatctttatcaaagtccgtgtcttgttttttgatagattctggcagtaatagtcagttgcacgatgtaatacttatctgggccgacctgttatgtatcgctttactttttctttagatacgtaagagctctaaaatacagccttatacagaaaacctagttggtaacacttggcgaagcaattgttggcatacatgtaatagaaaataaagaccggatgatggatttgttctgcattcattttgaatattagtcaatatcattagcaggaacgttcttcacaaaggagaattggtttccaggactaatatctccagtatattctatctctgtgttctgatcaccaaccctgacgagagtgtgcccctctattggttcaggggataatggctcagcttcaagatcagacatgctttggtcctcgaaattactcatataagaggctgtcgagtgaccagtggtcttggagcggagtagagtggctccagaggcgtgaaaggatgaggtag

SEQ ID NO: 124598 - DNA, 528 bp, Arabidopsis thaliana
taatacgactcacttagggaaagccggtacgcctgcaggtaccggtccggaattcccggttcgacccacgcgtccgtacggctgcgagaagacgacagaaggggacgacacacaaaaacaacaatggagctactcacaagcttgaccaactggttaactccgacgactctcttcctcctcctcaatttcacgatcgccaccattttcatcaccaaccggttcagttcctgttcaagaaaacacaaccaacatcaagatggttacgggtcgtcgggtcatgaccaaaatcaggcacggtttggcagacctccttcgctcatagacagagtaaagtccatcaacttccatctgtacaattctccttcaccagaatccgagatccactactccgggtcggatcctaacccgaacccacctccttctctcttgcaacgggtcaaatccatcaacatgccttacttcaagttcccacaacacaattctgaaagagagtacgctgctggtttacggggttatgacccaacccga

SEQ ID NO: 124599 - DNA, 428 bp, Arabidopsis thaliana
gacgacacacaaaggcaacagtggagctactcacaagcttgaccaactggttaactccgacgactctcttcctcctcctcaatttcacgatcgccaccattttcatcaccaaccggttcagttcctgttcaagaaaacacaacccgacgagactaaccgggtcgacccgatcgacaagatcccggaggatgacgtcacgaccgaacctagattcggagctccatcactcttgcagcgggtgaaatccataaagcttccttctttatacagatccgacccagatccaacaccagaagtgcaaacacatacgaggacgacatcggagtcgagtaaaccggcgacgaagaagaagaagaaagctacaaagaagatgatgaaatctgctagcgagagacacatcggccgtgaagaggaggagacagtttagg

SEQ ID NO: 124600 - DNA, 286 bp, Arabidopsis thaliana
gagaaaagataaagaaaatgggtttgagaagaacatggttggttttgtacattctcttcatctttcatcttcagcacaatcttccttccgtgagctcacgaccttcctcagtcgatacaaaccacgagactctcccttttagtgtttcaaagccagacgttgttgtgtttgaaggaaaggctcgggaattagctgtcgttatcaaaaaaggaggaggtggaggaggtggaggacgcggaggcggtggagcacgaagcggcggtaggagcaggggaggaggaggtgg

SEQ ID NO: 124601 - DNA, 430 bp, Arabidopsis thaliana
tattgacttgtcaagattctcttcttcttcttattcttcctgctactccaaactcaggtccctccgtccatggcagcaaccttacctctatctccgatcaatcatcagttgtgtcggttcgggaacaactctttgacgactcaccggttctgttctcctggcttcttgatttcttctccttgtttcattggtttgaccggaatgggctctgctactcagttacgtgctcgtcgttctctgatctcttcagcagttgcgacgaattcgctgttgcatgacgtcggagccaccgtggcagtgcttggtggagcatacgcgcttgtcttaagcttcgagagtctcaccaagcgaaacgtcattcaacagagtttgagcagaaagcttgtgcatatactctcaggtctgcttttcgtacttgcgtggccaatct

SEQ ID NO: 124602 - DNA, 375 bp, Arabidopsis thaliana
gcgtccgcccacacgtccgcccacgcgtccgcccacgcgtccgcacgggagtcctgttcaggcgccgcagcagcattcagattattgtctgagttcggtcagcgatggaatctctggtcatttcgaggattctggctttcggatgtgatgaagaaagggggagacttattgggatggctttagtttaatagggttttactcattttatgtgaatagggaaagaaataggattgggtattttcttatacagatgatgatgatgatgatcaaagaataaaaataatgtatagggaagctttttgtaaacacaaatatgtttggtaaccattttggtattttgaatcaatgcatatggtttgttttctcgattaaaaa

SEQ ID NO: 124603 - DNA, 940 bp, Arabidopsis thaliana
  unsure (1)..(940): unsure at all n locations
gcactatttgctacgacaaatgggtaaagaaatcctccatacagaatcaaagaagactgacaaattagtcgacaatattcagagttccatgatcgcaacaaaggaaatcgagatcactcgttcaaagagtcgccgaaagaacaacaaggaaaagagagtggtttgcgtagtggatcgaggcagccggtccagtgacctatgggtttggcgaaagtatggtcaaaaacccatcaaaagttctccttatccaaggagttactatagatgtgccagctcgaaaggttgttttgctaggaaacaagtcgaacgtagccgcactgatccaaatgtttcagtaattacttacatctctgagcataaccatccattccccactctacgcaatactcttgccggctccactcgttcctcttcctccaaatgctcagatgtaactacttctgcctcatcgacagtctcccaagacaaagaaggaccggataaatcccatttgccttcctcccctgcttctcctcccttaatgcggccatggtggttaaggaggaggacatggagcaatggggcaatatggagttcgatgttgacgttgaagaagatacctttcatacccgaattatttccagaggataccttcgctgatatggacaagcttgaggaaaattctcagactatgtttctctctcgcagaagcagcggaggcaacatggaagcccaagggaagaactctagtgatgatagggaggtcaatttacctagtaaaattctgaatagatagttactattatgcaatgttaataataatctgtttgattttttaacatttgttcggacatccaaaccggccgnncncaatttattnctttancgataatatatcnnnnnnnnnnnnnnnnnnnnnnnnnnnnnnnnnnnnnnnnnnnnnnnnnnnnnnnnnnnnnnn

SEQ ID NO: 124604 - DNA, 857 bp, Arabidopsis thaliana
cttttctgtccagagagagaagcttttatctttcatcgccgttaacagggctattccgttgccgtgttcttgccgtcaacatgattttttcattgccgtagacatggctttccgttgccgtgtttttatgtcgtcgcttttgttaggtgttgtttgtttgcttccaataaaggggaattgtctttcgtctctgtctttacagagttttatgagagatgacacacctatcttatatgtttatagtttatacaagtgtttttatgtttgttggatttgaagcgaagcttaaccatcttatggtgacttagatctatttagaacctttagttggtggcttttctccggatcgtcatgttgggtatacggattactgaaatttcaaggatagtttgcaaataaaattgaagaaaagaaagaaatttccttcgcgattttaagatgccttttagccgtgatttcaattgttcggagttttgattcgttttgcaaccagctttgtcggtgaaaatcagaagaatcaatagtcgaatttcagttatcggcaatgattttcttcaccagaatcagcatcttagatggcggtggtgatgtcggaaagcttttagaattttcatccaacacgtgtaccactgttgacacgtttgtttgggaatgaaactaatgataaactttcttcaagttgaagcaatatattgtgtgggcctttatgggctgtaatctgttttgtaacccatgttgttatgaataaaatcctaatcttgcgaaaaaaaaaaaaaaaaaagggcggccgcttctagaggatccaagcttacgtacgcgtgcatgcgacgtcatagctcatcgataggtcacgaaat

SEQ ID NO: 124605 - DNA, 416 bp, Arabidopsis thaliana
cgcacgcctacgtaagctcggaattctgctcgaggagaggttaagcggaagtgacgaaagcgaagaaggtttcggaagtaaatatgtcttccttggggagcagcaaatccctgagggatgagatggaggtaacaaccgccgatgtttttccggaggttaacgccgccgctgtgacggaaaatcttgatcggaacgagcttgtgcttgctgacggagtcgtgtcggctgaggaaaggaatattgagccagacaatcgtggagagaggaagatagagagcgagtcgcctccagaggatgatgtttgcccgatctgtttcggctcctttacggggccgtgtcgggggaattgtggtcattggtattgcggaaatggcatcttgcaggactggaactatgctgcaatatctaggccttgc

SEQ ID NO: 124606 - DNA, 766 bp, Arabidopsis thaliana
  unsure (1)..(766): unsure at all n locations
nnnnnnnnnnnnnnnnnnnnnnnnnnnnnnnnnnnnnnnnnnnnnnnnnnnnnnnctatccaattggagacgaatcatatcgagcgatggatttggcagaactgtgggcgattttcggacccggattctccggcgccgttttcggaaccgggtggtggttttgggtcgacgccgtcgtttgcagttccatccaagttcccttcgtccattaccttcccggcatattcgcttctctcggagctttgatgttcaattgcgtcagaaaagaagacattgattactctccttacgacgaaggcgagtggagattgaagctgtggcttttcatagcgtatgtcgtagcatttgtttccttagctgcttctgttggcttgctgattcaagattcggttgtgaagactgggccttcaacttggactggtgtggctggtgtctttcaatgtgtatttgtattgataagtgggctaatgtattggacatcgcactcagagtagcgcacaggcacatacttcatctccgactcagattcatactgtgacaacttacaagttcctctcgtttctctactatgtaaattcctgtgtcttgtcttgtcaccttggcattgtgtgcgagattcctctgttgcatcagtgtgtgtttctgttaaaactttgtgtgaatgttattgaaaatactccaaatcaaccagttgtccaaagaaaaaaaaaaaaaaaaggggcggccctcttgaggatccaagcttacgtacgcctgcatgccnnnn

SEQ ID NO: 124607 - DNA, 686 bp, Arabidopsis thaliana
gcagcacccgaccggaattcccggggcgacccacgcgtccgcgtctacgcttacaatcgatcgtcccccatctccaattcagttttggacagagcaacctgtgatcgtgtcggttggggtagaagagatcgaagtgggagcaaaatcatgatgaatcggctattcgggaaacccaagcaggaggctaatgctctccaaactttagacaagcttaacgagacgcttgagatgctagagaaaaaggagaaagtactcttgaagaaagctggtgcagaggttgagaaggcaaaagaatactcccgggctaagaacaaacgagcggctatacagtgtttgaaaaggaagaggttatatgagggacaagtcgaacagcttggggatttccagctcgcgtattcatgaccaaatgattatgttagaaggtgcgaaagccacaaccgaaactgttggtgcatcgaggagtggagcttctgctatgaaagtcatgcagaaagcaacctacattgatgatgtgcggtaagacactggggcgggattcactgcagtaaaaccgccgaacttgatatccaggttcccaagaaggaatttgggctgagctccctaatggggggggcaatactggtttagacatttctaactcaagggattggaaggcctttgccattttatttaacgcttcggcttgt

SEQ ID NO: 124608 - DNA, 604 bp, Arabidopsis thaliana
  unsure (1)..(604): unsure at all n locations
caaacaaaaaaaaacttcaacgccgtttcttcttccattaatccaacgccgtttcttcttccattaatctcatctctcaatcaaccaaaagcttcccatctcaaatccctcagtttgattttctaggcaaacaatcatctgccaccatgtttatgaatcggctattcgggaaacccaaacaggagactagtactctccaaacgttagacaagctcaatgagactcttgagatgttagagaagaaggagaatgttcttctcaagaaagctactggagaggttgagaaagctaaggaattctcccgggcgaagaacaaacgcgcggctatacaatgtttgaaaagggaaaggttatatgggcaacaaggttgaacagctcggggattttccagctccgtattcatggtcaaatggattatttttaggaggtgcctaaggaacaccagagcctntagnttgcttttagggctggngcttnttcaattgaagctttcaggnagnaacaaaccttgttgtttttgccaggcaattggtnggncnntgccanctngggcntgnccggtcccgngnattgtngcccnttgggnnnntnttttgggtgttgt

SEQ ID NO: 124609 - DNA, 574 bp, Arabidopsis thaliana
  unsure (1)..(574): unsure at all n locations
ccctngntcggtcggatccggtaccccggncggggntntccatgaggcatcggaancaccaatntgggntgggatagccctggcngggtcatgggcaaccggggacntgaaccngaccnaggagccttggcgactccaatggggccaccgcccacgcgtccgggatgagcttgcagcagagcttgatgaactagaaagtgaagagcttgaatcgcaacttctacagccggcaacaacagctcctccattgccttcagttccagtgcctgcagggcgtcaaccggctcgtcctgttccccagaagcggactgctgaggaacaagaactcgctgcattacaggctgagatggccctctaaggttattcacctctccgagcagagacatgtatgcattgatagacacgaacagacgatgtatataaggatctgaatcagattaattcggagcgaaaaacttttataatccccgtcgttaatgttatctgcaatttgagtgttcttcacataatttatcttttgtaatttttgtatctttttatgacactttttcctttggttaataatcactttact

SEQ ID NO: 124610 - DNA, 962 bp, Arabidopsis thaliana
  unsure (1)..(962): unsure at all n locations
nnnnnnnnnnnnnnnannnnnnnnnnnnnnnnnnnnnnnnnnnnnnnnnnnnnnnnnnnnnnnnnnnnnnnnnnnnnnnnnnnccacgcgtccgaagatacccaaacaaaaaaaaacttcaacgccgtttcttcttccattaatctcatctctcaatcaaccaaaagcttcccatctcaaatccctcagtttgattttctaggcaaacaatcatctgccaccatgtttatgaatcggctattcgggaaacccaaacaggagactagtactctccaaacgttagacaagctcaatgagactcttgagatgttagagaagaaggagaatgttcttctcaagaaagctactggagaggttgagaaagctaaggaattctcccgggcgaagaacaaacgcgcggctatacaatgtttgaaaaggaaaaggttatatgagcaacaagttgaacagctcgggaatttccagctccgtattcatgatcaaatgattatgttagaaggtgctaaagcaacgaccgagactgttgatgctttgaggagtggagcttctgcaatgaaggcaatgcagaaagcaacaaatattgatgatgtggataagaccatggacgagatcaatgagcaacccgagaacatgaaacagatccaagaagcattggcgactccaatgggggcagcggctgacttcgacgaggatgagcttgcagcagagcttgatgaactagaaagtgaagagcttgantcgcaacttctacagccggcaacaacagctcctccattgccttcagttccagtgcctgcagggcgtcaaccggctcgtcctgttccccagaagcggnctnctgaggaagaagnactcgctgcattanaggcttgagatggccctctaagggttattnacctttccgngcagngncatgttttcatttgntaggcancgnccagncggtgttttntaaggttctt

SEQ ID NO: 124611 - DNA, 800 bp, Arabidopsis thaliana
  unsure (1)..(800): unsure at all n locations
atgannnnnnnnnnnnnnnnnnnnnnnnnnnnnnnnnnnnnnnnnnnnnnnnnnnnnnnnnnnnnnnnnnnnnnnnnnnnnccacgcgtccgcccacgcgtccgcccacgcgtccgcccacgcgtccgcggacgcgtgggacacaacttccaacgatcacacacaaatggcgatgacgtcagcagctaccggatttattctcacggccaacgtcccggcggcaataggcggtggttcttcaaagagcaccaccattgtgtctttcttgccgatgagaagcttcggttcaaggctagtagtcagagcggcggaagatacacctccggcaaccgcctcgtcggatagttcttccaccaccgctgctgctgctccggcgaaagttccggccgctaaggctaaacctcctccaattggcccaaagagaggatccaaggtcaagattctaaggaaagaatcatactggtacaagaacgttggatcagttgtggccgttgatcaggacccgaagacccgatatccggttgtggtccggttcgccaaggtgaattacgcgaatatatcgaccaacaactacgcattggacgaggtggaagaagtaaaatgagagacatggtttatctctaaaccggttcgtctgtttgtaatcttaaacaaaaccgtatgtaccaaaaagttaaccaacaattcatcttttatcttttacaatctcaagatcgatttaaaaaagaaaaaaaaaaaaagggcggccgctctagaggatccaagcttacggacgcgtgcatgcgaagtcatacgcctaa

SEQ ID NO: 124612 - DNA, 805 bp, Arabidopsis thaliana
cccacgcgtccgagagattgtaaaaaaatctcaaatcttttccttcacaactttcaaatctaatggctcctgctttgagtagaagtctctacacatctcctttgacttcagttccaatcactcctgtctcttctcgtctctctcatctgagaagctcgtttctcccacacggcggcgctttaagaaccggcgtttcgtgtagctggaatctcgaaaagagatgtaaccgattcgccgtgaagtgtgacgccgccgtggcggagaaagagaccactgaagaagggtcaggtgagaagtttgagtaccaagctgaggttagtagattgtgggatttgattgtccatagcttatacagtcacaaggaggtgtttctcagggagcttgtaagtaatgcaagtgatgctttggataagctgaggttcttgagtgtaacagagccttctttgcttggggatggtggagatcttgagattaggattaagcctgatcctgataacggcaccatcaccataactgatactggtattggaatgacaaaggaagaacttattgattgccttggaactattgctcaaagtggtacttcgaaattcttgaaggctctaaaggaaaacaaggaccttggtgctgacaacggtttgatcggacagtttggtgttgggttttactctgctttcttagttgctgagaaggttgttgtgtccaccaaaagccccaaatctgacaagcaatatgtttgggaatcggttgccgatagtagctcgtatctgatcagagaagaaacagaccctgataacattctacg

SEQ ID NO: 124613 - DNA, 681 bp, Arabidopsis thaliana
aaaaactgtatcttctgcaatctctgagtcctttcagagaggaataggtgacaaagcagttaatcagcttgacaaatctgttaatataaagcttgaagcaaccgtagctaggcaaattcaagcccaatttcagacctctggcaagcaagccctccaggaaggtcttaggtcaagtgtggagtcctcagtcataccttcctttgagaaggcatgcaaggccatgtttgaccaaatagactcagccttccagaaaggtattgctgagcatacaaatgcagcccagcaacggtttgactctggacactcccagcttgctcatactctaaaggaatcaattacttctgcgtcgtcagttgctcaagccttaagtcgtgagttagccgagacccaaaggaatctcttagctctcgcagctgctggagcaaattctggtgggtctaattccttggttactcaactaagtggcggacctttgggtgctcttcttgaaaaggttgaagcacctatggacccaacaacagaactatcgaggttgatatctgaacggaagtacgaagaatctttcacttcggccctacagagaagcgatgtctctatagtatcatggctttgctcacaggtggatctacgtggattactggcgatgaatccgcttccactgagccaaggcgtgcttctttc

SEQ ID NO: 124614 - DNA, 990 bp, Arabidopsis thaliana
  unsure (1)..(990): unsure at all n locations
aaacaatnnnnnnnnnnnnnnnnnnnnnnnnnnnnnnnnnnnnnnnnnnnnnnnnnnnnnnnnnnnnnnnnnnnnnnnnnnnnnnnnnnnnnncggccgctgattctccatctgtttgctttccataacttgtcgatttggttttgtcattgtgttagttatcttgtgagtttgaatcacttttctaggcttccaagctagtgaggtgtgattttgagattatggccaaagctaggaaggcaggacgtagggttccttcacgacgcttcagggcaagagcaaaaccatacaaatttccatcttctaaaagacttgtggcgagaaacatgtttgcggaagattgttcaaagtgtctagagaagagggattgggagaatgttatatgttcggtttgcatggagtgtccacacaacgctgtccttcttctctgctcatctcatgacaagggatgtcgtccttacatgtgtggaaccagtttccggtattctaattgcttagatcagtacaagaaagcgtcagctaagctgaagacatcgggccatcaacagatcaataagtctgagcttggaaatctcacatgcccactttgtagaggacaggtgaaaggttggacaatcgtacagcctgctcgtgactttttgaatcttaagaagaggatctgggtgcaggagaactgtgtgggatgctggaaccttcaaagagctgaggaaacacatgaaagtggaccaccctagtgcgaagccgcgtgaagtggatcctgatgtggagcagaattggagaaggcttgagatcgagcatgaccgggacgatgttatgagcacgattaggtcgacaatgcctggtacagtggtgtatggtgattacgtaattgaaaggaacaatgccaacggttcatattcagacgagggtggtgatgatgattggatcgatgctgcatttggtaggaaattttgtgaatgttttcctttctgttacatgctttttggggca

SEQ ID NO: 124615 - DNA, 388 bp, Arabidopsis thaliana
agagaaactccgataccagagcttggtggagcagtggagacgcttccacgcgaatctcgcagtcccactcgtcttcctccttccctctcttcctttgaataccttacctctctcggtctcgctccctccctcgattcaagcctattcgtcttcttacgctgtgtcttgaaacccttatctttttcatttcaatccctgaaggggtgattttgagattatggccaaagctaggaaggcaggacgtaaggttccttcacgacccttcagggcaagagcaaaaccatacaaatttccatcttctaaaagacttgtggcgagaaacatgtttgcggaagattggtcaaagggtctagagaagagggattgggagaatgttatatgttcgggt

SEQ ID NO: 124616 - DNA, 1104 bp, Arabidopsis thaliana
acgactcactatttgggaagctggcacgcctgcaggtaccggtcagagtcttttattgcagaaatttcgatcgtttttgttgtgtgtacagagagattatcgtgttttgttggcaatcgccattaaaccttcttccctctaacccaatcaaatttgcggctctttcttttatcttctcgcctcggttttagcaaaccctttagttatcttcttcctcaagcaatttttcttttggattagattggtgttttcttttggtttgtgtggtgatgatgagaaggcaacgagatgaacaacaatctagggttttctacgatctatcatctcttgttttgaatcttctccgttctcctcctatgccgatttctttacctgatcatttccccgatccgcccgctagaattcgtcctcccttttcttcgcatcgtttttcgtcttcttcgccttctttggctcatatttctccgtctggattcgcgtcgttgctgcttggtatatctgtggctcttatgctatgtggatctgtgactttcttcatcgggtttctcttgatgccttgggttcttgctctgattttggttttctatgtcgctggcatcgtttctgccatttctatggtcgggaggtcgattctctgttacgtcttgacgccaccttctccttccggaaaggagatttctgaatggaagcttctgtgaaatgattaaacaacagaggtgaagaatctatacatcatccggaagcagagcagagcgaagcagaacaaaaaaaagaagaagaaggattgattatataaacacatatatccgatagagtttttctatgttctttatctgtattttgttgggggggtttgggaaaatcatgtggatatcagggagttttatatttctttacatttcgaaaaaagaatttttctatttaactactgttagaaatagagaagccttgttatttgtgctttcatgtatgtcgtttttatgtaacatgatcatttcttaaagcatacaaaaagattttaggaaaaaaaaaaaaaaaaaaaaaaaaaagggcggccgctctagaggatccaagcttacgtacgcgtgcatgcgacgtgcatag

SEQ ID NO: 124617 - DNA, 891 bp, Arabidopsis thaliana
gccggccctatacgactctcttagggaaagctggtacgcctgcaggtaccggtccggaattcccgggtcgacccacgcgtccgcccacgcgtccggtaatttccggtgcccttttgtacattaaggatgatttcgaagttgttaagcagagcagtttcttacaggaaactattgtaagtatggctttagttggtgccatgattggtgctgcagctggaggttggatcaatgactactacggtcgtaaaaaggcgactctttttgcagatgttgtctttgcagctggagctatcgttatggctgctgctcctgatccgtatgttttgatatcgggtcgtctcttggtcagtttaggagttggtgttggttttgtgactggtccggttatttagcggaagcatctccatcggagttagagggggacttgtgagcaccaacgtattgatgatcacttggtggacagtttctttcatatctcgttaattctgctttcacacaggttccaggaacatggagatggatgcttggtgtttaggcgttcccgctgggattagttaatcctcatgcttttcatgccagaatcccctcgatggcttttcatgaaaaatcgtaaagcggaagccatccatgtgctcgccagaacctatgacatcttggcgggtagaagacgagatggatcatcttttagcggctggagaggtggaaaacaacgaagcgcctggtggctactggatgtttaagatcccagactgagactgctttttgccggagaggacttaagcgttcagggggaatggttcatacagttttcctcagcctcgatgtcatggtgggattactttccacccacttgttctggtttattgcgttgctgaagtggggaaagggggg

SEQ ID NO: 124618 - DNA, 642 bp, Arabidopsis thaliana
  unsure (1)..(642): unsure at all n locations
gtctaattccaaattcttccctagtttgaaaaatcttctgtattctgaaaagagattttatgcgtatcgctgaggtacgaagaaaacagattccttgccatttcccaaattttgtcattgagtcttggcatttcaaccaatcgcaatttattgaaattccggcgagtcattagatttttttggattccgtttcaaggtacggtgctttttcgcagattgagaagagcttaataagaaagatgacattgacgatcccaaacgcacctgggagctccgggtacttggatatgttcccagagagaaggatgtcgtattttgggaattcttacattctgggtttgactgtcactgccggaatcggtggccttctgttcggttatgatacaggtgtaatttccggtgcccttttgtacattaaggatgatttcgaagctgttaagcagagcagtttcttacaggaaactattgtaagtatggctttagttggtgccatgattggtgctgcagctggaggttggatcaatgactactacggtcgtaaaaaggcggctnttttttcagatnttgtctttttcaagcttggangctnatccgtaaatggttgttgcttcctnaaccccgaatgttttnaanatnnggngc

SEQ ID NO: 124619 - DNA, 711 bp, Arabidopsis thaliana
ctatacgacttacttagggaaagctggtacgcctgcaggtaccggtccggaattccccggttgggacaacaaggatcactcatggcagtggtggatgttcatcgtttcgctgagtcaatcacttgccatgcttggagtcctgatctctccatggttgctctctgtcctaacaacactgaagttcatatctataaatcattgtctcaagaccactgggagagggtacatgtcctccaaaagcatgaccaaattgtttctggaatagattggagctcaaagtccaacaaaatcgtcactgtttctcatgacaggaactcgtacgtctggagcctggaaggagctgaatgggtaccaactctcgttattcttagactaaatcgtgctgcactttgtgtccaatggagccccaaagagaacaagtttgctgttggaagtggtgctaaaactgtttgtatttgctattatgagcaagagaataactggtgggtcagtaagctaatccggaaaaggcacgaatcttcagtcacatctgtggcttggcatcctaataatgtccttctggcaacggcatcaaccagatggaaaatgtcgggtattttcaaccatttttcaaaaggagttgacaccaaagggttccaaaagcaggcttcaccagcggaaacgaaatttggggagcaaattcttcagcttgatctctcatattcttgggca

SEQ ID NO: 124620 - DNA, 464 bp, Arabidopsis thaliana
aaaaaaaaaaaaaaaaaacatctgtctctttcacttcacgtttgcgactgtgtcgtcgtccacctccggatctcatcggcgtttcatcataattatctgtccatctattcaccgtacgactccgttttaggaatctgtggatgtcaatttgagagaaaagactgtcttcattacaacacatttgggacaacaaggatcactcatggcagtggtggatgttcatcgtttcgctgagtcaatcacttgccatgcttggagtcctgatctctccatggttgctctctgtcctaacaacactgaagttcatatctataaatcattgtctcaagaccactgggagaggttacatgtcctccaaaagcatgaccaaattgtttctggaatagattggagctcaaagtccaacaaaatcggcactgtttctcatgacaggaactcgtacgtctggagcctggaaggagctg

SEQ ID NO: 124621 - DNA, 1223 bp, Arabidopsis thaliana
  unsure (1)..(1223): unsure at all n locations
nnnnnnnnnnnnnnnnnnnnnnnnnnnnnnnnnnnnnnnnnnnnnnnnnnnnnnnnnnnnnnnnnnnnnnnnnnnnnnnnnnnnccacgcgtccgcaaggatctcagaaaattgcttatctccctaatttcttcatctccctctaaactctcttccagaatccttgctcaattctcttcatttgtgatctcggctctcttatcacgaagacttctcccggcggcaccgtcttcacatttctgctcgtcattctcaaggaaccaaggtagaagctcactctctgtgaacgaaacatttgccttttgttcggaacgaaatctcacaaattggttctatgatctgcgcgattcgcgtcgtcttctctctggatctgaagtaattgattgccattcgttagctactgtctgccaattttttatgtttgtcctctctctggaacccttgaatgattcaactccatccaagtctcgtcgtccttgtaattaccacccgtccggcgattcatggaaggcattgttgtattggttaagaaacacagccattgaagcgatgctatcatcaaggttttcctttttggggatcggcagttccagtgaagtcaatgactccgtgggtgtttctggaagcaagatcaaaccatctctaagtgttcaaacggataaagatgtgtataggcctggagattccatttttgtaactattgaggttgctaattctcatgacaacgcctctaatccctccattttggttgaaaagcttagttttgaggttaaaggtctagagaaattggacattcagtggttttctactcaaaaaccttcaccaggaagcaaaggacgaagagattttcaggtgaacacatcttcctagacagttcaacaccatctttgatttcaaatcaaatcctatcccctggtgctaagatgacattaatggttcgagctatactcccacagattataccaccttcttataaaggtgctactttacgttacctttactacattaagagcacattatgcggaagatggatggcattagaaaacagtcaattttacaaagactcaacacaagatttcattgaagtggagactcgaataccattacaagtatgggtaattcagaagaacaatgggctgctattagaggaagatcaaatcgatggtattgttccaaccagtaccattcagacagaaatatattggaaagagatggatggggac

SEQ ID NO: 124622 - DNA, 779 bp, Arabidopsis thaliana
  unsure (1)..(779): unsure at all n locations
nnnnnnnnnnnnnnnnnnnnnnnnnnnnnnaaagctggtaccgcctgcagggtaccggtccggaatttcccgggtcgacccacgcgtccgaaaacacaagcgtagaaaacaaaactcaactaattgtgttatcacccaaaagagaagagcaaacacaatggctttcgctttgaggttcttcacatgctttgttttgacagtgttcatcgttgcatcagtggatgcagcaataacatgtggcacagtggcaagtagcttgagtccatgtctaggctacctatcaaagggtggggtggtgccacctccgtgctgtgcaggagtcaaaaagttgaacggtatggctcaaaccacacccgaccgccaacaagcatgcagatgcttacagtccgctgcaaaaggggttaatccaagtctagcctctggccttcctggaaagtgcggtgttagcatcccctatcccatctccacgagcaccaactgcgccaccatcaagtgaagtggggaataacgacatcatttgcctgaagagtatggtttcgtatacgtaaaataagacggctatctaagctgatatttaccttgtctttgtttgtcttgatggctttgtaatcttttgctttgttatgttgtatacttgtgtcttaacatgtttaagatatgataatatatagtatcggtaccttattaaaaaaattaaaaaaaaaaggcaggccgctctagaggatccaagcttacgnnnnnnnnnnnnnnnnnnnnnnnnnnnnnnnnnnnaacgaagt

SEQ ID NO: 124623 - DNA, 421 bp, Arabidopsis thaliana
gacttgtgcacagaaagttaaagttaaaaatgtctcaaagtatgtcataagtgcagcaaagaaccctgaatttgcgcagaaattacatgctgtgttgttagaaagtggtgcatcacctcccccagatttgtttatggatattaacccacataacttgagggggaagaatttgcttcaagagctccgccaagaaagtagcaattctatggtttctggtattccatgctacccagaaaaggtagctgaacaactgagagaatctgaaaggaaccccacagccgagagttaccaacaatcagtggaggtcgatttgtcaatgaagaggaactttgatttggataatactggtaaagcttcttcatccgaaaatatggaggttggcactgctgatggggagtctgctgtttgtgatagtcatgac

SEQ ID NO: 124624 - DNA, 524 bp, Arabidopsis thaliana
aaccccactcactttagggaaagcacgtacgcctgcaggtaccggtccggaattcccgggtcgacccacgcgtccgggacaaacccaagatctgaaaaagtttttgtcttttctctcccaatcgcctgattcaagcctaaagctcggtttttttcttctgggtatttaggggttaagtgtattgtagaaaagcatggcgagtttgagtgggagttggagagatgcgtataaaggaatgtcatcggataatataaagggtttagtattggctttatcttcaagcttattcattggtgctagtttcattgttaagaagaaaggtctcaagagagctggtgcttctggtctcagagcaggttctggaggttattcttacctgcttgagcctctctggtgggtaggcatgataacgagtgagttcccttcatatttaaagtgatgggaggggaattggcaattttgctggttatgcctctgcccctgccatttaataactcctttggggctctaagcaaattatcagg

SEQ ID NO: 124625 - DNA, 1147 bp, Arabidopsis thaliana
cggcactatacgactcacttagggaaagccggtacgcctgcaggtaccggtccggaattcccgggtcgacccacgcgtccggcgaagaaaactttcctactttgtttcaatccaaacgagtcaaaatgcttctcaagactgtttcttcatcttcttcttcagctctctcgctggtgaatttccatggcgtgaagaaggatgtgtctcctttgttaccttccatttcatcgaatcttcgagtttcttctggaaaatctggaaacttaactttctcttttcgcgcatctaaaagctcaaccaccgacgcgctaagcggcgtctgtcttcgagccgtttaaggaagtaaaaaaggagctcgatctcgtccctaccagctctcatctctcactcgctcgacaaaagtactcagacgagtgcgaagccgccattaacgagcagatcaatgtggaatacaatgtctcgtatgtgtatcacgctatgtatgcttactttgatcggataacatcgcgctcaaaggtcctgccaagttctttaaggaatcaagtttggaagaaagagagcatgctgagaagttaatggagtatcagaccaaacgtggtgggagggttaagttacagtccattgtaatgcctctttcagagtttgaacatgttacaaaggagatgctctttatggcatggagcttgctctgtcactggtgaaactagttaatgagaagctcttaaaccttcacagtgttgcttcgaagaacaatgatgtccacttggcagattttattgagagcgagtttctgacagagcaggtggaagcaatcaagttgatctcagaatatgtggctcaactgcgacgagttggcaaaggacacggaacatggcatttcaatcagatgcttctggaagggtaagcagcttcgagggactcttgtgtctactgtgtttctatatgtgtctactttatgtttagttctttagcttttacgattttgtgaggtagtagacttctttttctgtaagagacaaaagacatgatcacataactttatattctggtataaggttcatcaaaaaaaaaaaaaaaaagggcgaccgctctagaggatccaagcttacgtacgcgtgcatgcgacgtcatagactcttctatagtg

SEQ ID NO: 124626 - DNA, 582 bp, Arabidopsis thaliana
  unsure (1)..(582): unsure at all n locations
ttcaggtctctacgactcactattgggaaagctggtccgcctgcaggtaccggtccggaattcccgggtcgacccacgcgtccgaggagatgctctttatggcatggagcttgctctgtcactggagaaactagttaatgagaagctcttaaaccttcacagtgttgcttcgaagaacagtgatgtccacttggcagattttattgagagcgagtttctgacagagcaggtggaagcaatcaagttgatctcagaatatgtggctcaactgcgacgagttggcaaaggacacggaacatggcatttcaatcagatgcttctggaagggtaagcagcttcgagggactcttgtgtctactgtgtttctatatgtgtctactttatgtttagttctttagctcttacgattttgtgaggtagtagacttctttctctgtaagagacaaaagacatgatcacataactttatattctggtataaggttcatcacacccaaaaaaaaaaaaaaagggcggccgctctagaggatccaagcttacgtacgcgtnnnnnnnnnnnnnnnnnnnnnnnnnnnnnnnnnn

SEQ ID NO: 124627 - DNA, 1304 bp, Arabidopsis thaliana
  unsure (1)..(1304): unsure at all n locations
cgccnnnnnnnnnnnnnnnnnnnnnnnnnnnnnnnnnnnnnnnnnnnnnnnnnnnnnnnnnnnnnnnnnnnnnnnccacgcgtccgcccacgcgtccggaagaagctgaaccagacgaaccataaaccgaggcgagagaggagagagcgagggaggtgatctcttaccacctcttcgtctccggcggcgagaaattcagtttcaatcggagaagagaggaaaaacaaagcgatacgcgagagaaaaagttgtgcaacgatgtcaaagaagaaatcggctgccatgacgcttaaggacttccatggcggctcaataccatctgatctccctctcccttccgctcctggagtgactccgaaggttattccggatcgacctgtttttgatagagcgccttgggggaattcaattggcaggccagatcagagagcaagaccgagttcgtctcatgctattagaaatctcgatgataaatcactgtttctgcctcacaatgtcaatatcggacgtaatttcagtgaagatgaacggaagcctctggatggtcactctgctcctcgtagagtggtcagtgatgatgtttttcggtttgcgaataaccgtttggagatgaaagcagactcggttttagctgggaggcatagtggttgggcagctggtcctttgactcattctgggactggtaatattgagaacccagtggcaggaaatcactctaatatttggaatgggaggaaggaggtatcagttgctaacaatgagcctggacagtctccatggactaaacaaccagctgtttcgaatttggtccatacaagtgcgcttgaccaagtgtcttcaggaggatggcagtccaagcttttggttccttctcagatgggttttgatgttgttaagcattcagagatagataccagagtttataagactaatagccctgtgattagtcaaggggttgagccacatggaacacatgtagaacgggcactgattgctgaagatgggatccagcgtgggaaaaaactctcccgtgagtatgggaaaatccctggtccaacttatgtgggtgctaagggaagcggaaattgtagccaaacaccaacggttaaacctcatccaaaatactcttgacgttaagccctgctggacattttggtgcagccaactgccccttcttaagttttggaaanccctagggtgancctgtttccttgggcaaaacccctttnaaagttttggggancctttnattncggaaacntgnaaagngtttaggcctttnaacnggaanttgncaagaanta

SEQ ID NO: 124628 - DNA, 451 bp, Arabidopsis thaliana
cggacgcgtgggcaaacaccaacgataaacctcatccaaaatactctgacgttaagcctgctggacatttggtgcagccaactgccccttctgaagttgtggaaagacctaagctgaacctgcttcctcggacaaaaccacttgaaagtgtggagaaacctgtgaatgacgaaaaactggaaaatagtgcttcagtccttatacaacgtgaaaatgcgacacagaaaagtttcaacaattcaaaatctggtttgtctacagatgagattcctaaccagccggctgagcggcccaagttgaatctgaagcctgtggcacagttgcttgagcagccagaagttaaaactgaaaaggacagaagtgcggtttttggtggtgccagaccacgagagctgttgttgaaggagagaggcattgatgagcccgagcatacaaattggatcaaccgaca

SEQ ID NO: 124629 - DNA, 738 bp, Arabidopsis thaliana
  unsure (1)..(738): unsure at all n locations
nnnnnncggacgcgtgggctctctgtttcttttctttttgtttcattttcttatctcctcacactcttcgaacaaggaagaaccctaatctcaagatgaatagggagaagttgatgaagatggctaataccgtccgcactggcggaaagggtactgtcagaagaaagaagaaggctgtgcacaagaccaatacaactgatgacaagaggcttcaaagcactcttaagagaattggagttaactccattcccgctattgaagaagttaacatctttaaggatgatgttgttattcagttcatcaaccctaaggttcaagcttcaattgctgcaaacacatgggttgttagcggttctcctcagaccaaaaaattgcaagatatccttcctcagatcatcagccaacttggaccagacaacatggacaacctgaagaagctagcagaacagttccagaaacaggcttctggtgaaggtaatgccgcctcagcaaccatacaagaagaggatgatgacgatgtcccagagcttgttggagagacattcgaaactgctgctgaagagaaagcaccagctgctgctgcttcttcttagagagaaaagagcgagaccacatccaaaaaaaaaccgcactttgatttttacatatctttataatatgtttgttcgctcgatcctttttgtagtttccgaccagaatcttgttttccatctaatgacttaaggtttttatccaatt

SEQ ID NO: 124630 - DNA, 474 bp, Arabidopsis thaliana
cgacctccattctcttccacttctttcttgttccaaaaacctaaacctctctctctctctctctctatctcttgaaaaatcaacaaaacattggaatcaatttctctatgttttgattctattttaaagatccaatattctttctccattgagattaagcttctttctcgctgtcgtctctctatagatcttggttcttagtcccttttgaataataatgatggtggagatggattacgctaagaaaatgcagaaatgtcatgaatacgttgaagcacttgaagaagaacagaagaaaatccaagtctttcaacgcgagcttcctttatgtttagagcttgtcactcaagcgatcgaagcttgtcggaaggagttatctggtacgacgaccacctacatcagaacagtgttcagaacagaccacaagtgtttgtggtggtcctgtctttgaaagagttattcctatcaagaaaa

SEQ ID NO: 124631 - DNA, 544 bp, Arabidopsis thaliana
  unsure (1)..(544): unsure at all n locations
aatttccagagaagtcgttcatcatttgcaatttctcgattagttctgaatcatggcgttgagcaccagcatcagatctgtatctaagatcattgcttcttccgaagcatcagtctccagatctggtcagtaccaatagaagtatctgctgaattggttttgcatttctttgtttttccccttttttgttgtctagggttttggttgatttcccaggaatcgattattctaaggtttttgtttgattgcctagatatcaatgtttctgattagccgcggattgattccgatgcgattcttcgttgattgaattctgggatttgaaacttctctgctcgcgaatttgtcatagaaacacgctttaatggcgtgatgcgaaacagcattgtttatgattaggctgaaaaattgtcatcatgaaattaggaaatgcatattttgatgtttccttggtttcatggaaattttccatggtccgtgttttgataggttttgggttgaccacgtgaaaggctccatgtcaacctattgacaactttgnttt

SEQ ID NO: 124632 - DNA, 565 bp, Arabidopsis thaliana
aaaatttccagagaagtcgttcatcatttgcaattttctcgattagttctgaatcatggcgttgagcaccagcatcagatctgtctctaagatcattgcttcttccgaagcatcagtctccagatctgtgactagaagcttccactcgactggagttaagaagatgagcggaggaggacatggtggttacgatgaatactacctccacgcaaaacacatgtacaatttggaccgcatgaagtaccaagctctcaagatgtctctcggtgtattcaccgctttcagcatcggtgttggggttcctatcttcgcagtcgttttccagcagaggaagactcaatctggttaagtccctcaggatgctcttgttcacagcttgaataatttgtatgaattctcaaactctgcttttgcaagagagtttttctttctccctttggatcttagccacaagtcttatcgttatgggtaagtcttctgtgtcttcctcttttgctggctgtttgatgctgtaataatgataatctgacagatatatttttttttactttgattggaagtgaaa

SEQ ID NO: 124633 - DNA, 1006 bp, Arabidopsis thaliana
tttgtgtttgccactacacttgtgaaactgaatattggaaacaatttcgctgacatggtatcgctcccgagatcaataggcaaccttgagatgcttgaagagcttgatataagcaataatcagatccgtgttctacctgactccttcaaaatgcttagtaccggaccggaattcccgggtcgacccacgcgtccgcacattcctcctcgtgatatagctgaaaagggccctcaggccgttgttcaatacatgaatgatcttgtggagacgagaaacgcgaaatctctaatggttaagccaaagaagagctgggtccagatgtgcttcttctcgaaatccaacaagagaaaacagagcagcatggagattgtctaacacagctgataatgtctctgaccctaaatcaggtaattctgttaaagctgttgacagcacaagtgacaaacatatccagctatcttcttcacacgacaatgcattgatttgcattgcaactccaagtactgtagatgtttcactattcattctttgtttgtttctttcttcactattcacatgtatcaatgtgcacaacattgtttcattcatgtctctccacatatcatagagcccatcccaaaacagaatcgaaccatgtcccttgtagattgaggttttcattaagctcttaccatgtttgtctatcgcctctggttttgtttctttggttcgaaacttaagacactcacatctgtgtatatggatagagatgtgatgtaaatgtgatggctttgaagtttagaggagagatgtgacatgagttggccttgaacgtggttttgtctacagagtaacttggttaaattaatacttcccttggaaataatgccaactttttttttttgggttccagagagacccactttaaaggggtgcggctcgcgttcttagaggaatcccaagctttaccgttcccgccgtggccatggcgaacgtcaataccttttttcttatagggggcccaccc

SEQ ID NO: 124634 - DNA, 761 bp, Arabidopsis thaliana
  unsure (1)..(761): unsure at all n locations
acgcgtccggtcttctttagctagcctcaaagagctggatgtgagtttcaacgagctcgagtcagtgccagagagtttgtgttttgccactacacttgtgaaactgaatattggaaacaatttcgctgacatggtatcgctcccgagatcaataggcaaccttgagatgcttgaagagcttgatataagcaataatcagatccgtgttctacctgactccttcaaaatgcttacaaagttgcgtgtgtttcgtgctcaggagaatccactacacattcctcctcgtgatatagctgaaaagggccctcaggccgttgttcaatacatgaatgatcttgtggagacgagaaacgcgaaatctctaatggttaagccaaagaagagctgggtccagatgtgcttcttctcgaaatccaacaagagaaaacagagcagcatggagattgtctaacacagctgataatgtctctgaccctaaatcaggtaattctgttaaagctgttgacagcacaagtgacaaacatatccagctatcttcttcacacggcaatgcattgatttgcattgcaactccaaggtactgtaggttggttcactattcattctttggtttggtttctttcnttcactntttcancatgggatccaatgnggcacaaccattngtttcaatccagggttttcccnaattttnanagggggccttnccnaaaaaaggattgggcccntngcccnttgnnggttgngggttttnttnaagg

SEQ ID NO: 124635 - DNA, 458 bp, Arabidopsis thaliana
cactatcacaatcataaccacaaaaacaaacactatgggacacctcaaaagtctcttcacaattcttttcctaatagctatgtcttcaaccgtaacatttgccggtaaaatacccgcgatcatcgtgtttggcgactcttccgttgatgccgggaacaacaactatatcccaactgttgctagaagcaactttgagccatatggacgggactttgttggtggaaagccgaccggacggttttgtaacggaaagattgcgacggattttatgtccgaagccttagggcttaaaccaatcattccggcgtacttggatccttcttataacatttcggattttgcaacaggtgttacctttgcttctgctgccactggctatgacaacgccacttctgatgttctgtcggtgcctcctctctcccaacaactcgaatactacaaagaataccaaacaaaac

SEQ ID NO: 124636 - DNA, 463 bp, Arabidopsis thaliana
acccacgcgtccggaaaaattctcaaattctctaacaaagagctctgtgttttttggaaatctgaatcgttgttcgaggtttaatgttaccatttccggcaatgaacttgaagaagtctcgatcggaaaactcatcagttgcttcatctggaagtaagattgaggagcagactgagaaatcagctgaaccaacaaccattaaggtgcagaaaaaagccggttctccagggaggtcgatagatgtctttgctgtgcagtgtgagaagtgcatgaagtggtggaagattgatactcaagatgagtatgaagatatcagaagtagagtacaagaggacccgtttttttgccagacgaaagaaggtgtgtcctgtgaagatgttggagatctaaactatgattcctccagaacatgggtcatcgacatgcctggcttgttctggacaccaagagggttcaaaaggat

SEQ ID NO: 124637 - DNA, 419 bp, Arabidopsis thaliana
  unsure (1)..(419): unsure at all n locations
ggtacgacttctgtaaatncnattcgtgacttatggcctcgcgtttgctatcgacgacgacactcgtcacaccgccggcttatttcaacaaatcgccggcgtttttaacggccagagttggggtgagaagaggaagggctaacgttaaggctgtgagcaatagttcgcaaggagccgtcgatggaaccgtttacaaaggtgtttacggtccttggaccattgaccaagccgatgtcaaagaggttattttgtacagatcaggactagtaactgctgctgcatcttttgtagctgcttcttctgctgcctttttaccaggagactcttggttaagtgaaacaatcaagcaaaaccatgatctgttttactttgttggtgctagtggtttggggctaatctctgttctaatacatatatat

SEQ ID NO: 124638 - DNA, 880 bp, Arabidopsis thaliana
  unsure (1)..(880): unsure at all n locations
ttttaggtgccactatagaagagctatgacgtcgcatgcacgcgtacgtaagctcggaattcggctcgagcgaagaagattctccttctctccgtcagacaaatctacgaacaagcgagcctgagcttaagaccaaactcatagagatgggtttcttctcttttcttggaagagttctcttcgcttctctctttatcctctccgcttggcaaatgttcaatgatggtggtcctgcagctaaagaattggctccaaagcttgatttggttaaggcacatttatcttctagattaggagtaacattgcccaaaatagaggtgagacaagtcgttgctactattattgccctgaaaggagtcggaggcttactctttgttatcggaaacaccttcggtgcttatcttctggcttcctacttggtggttttcggtcctattctctatgatttctacaactacggacctcaggaacgtcatttctctcttctgttgacagagttcttgcagagcgttgcactctttggagcgttactcttctttatcggaatgaagaactcgacacccgccaagaagaatttgttagaagagggcaacctaagccgcaaagctgcctagtatcaatattagttttcttctggttttgccatgagcaagcaataccttgccttttccttttttcccgacaaaatctttccttagaacttttgttttctttctgttttaggattcttagattagctcatgatcttatactaatactgtgatttgatattggggatcttgaaagttttggtttgttgaaacnggaaaaaaaaaccannnnnaaanaaaaaaggggggccgntctaggggtccaagtttcgnncgngncatnngcggna

SEQ ID NO: 124639 - DNA, 439 bp, Arabidopsis thaliana
tcttcataatttcttatccgctcttactctctctacaatcaaagcatggcttctgcgaccgccacgtggacacctacctccctccagcttcgtctcgctttgagctccggcgtgcgtcggaaatctcccgccgtttacttacgaccatcgcgattggccaggaaatcgggttatggaattgtctgtgtttcgcagaagcctgaagttgatgcgtggaccggatcggattcgtcaaagtcgtcggctgataatttggctgggtgggatgattccgataacgatgacaagaagtcttccagagttaagaagaagagtttgattgaaggtgtacttggggctggagtggctggaatcattttgtttcttgggctaagctatgcagcagcatcttttagcaagcgaacaaaaaaacaggaaatgcattcgttgacttctcagc

SEQ ID NO: 124640 - DNA, 763 bp, Arabidopsis thaliana
  unsure (1)..(763): unsure at all n locations
gtgataatggattttttatacacactttttatttaaaaacaaaacaaaaaaaaaaaagttgagaagaaaaactctcacaatatagaaatggcaaaatgggtgcaaaatacaaccacattttctttcttttttttgtattgattaaataaaaactatctcttataagttgcaaccaagctcacatcttcttcttcaagtttttgctcctcaagctctataagtctcgcaaacacaccgaccaaaggagcagtattgtacgtacaagcctccgtttgaacgtaattacccctccggtcatcaaaatcatcctggtgatccggtcctccaaccaaagccccgactaaaacactcggatttggctcggaccgtccataccaattatcatatccttgagtacatcctataaaacctttgtgctctttaaaagaagcgatagacgcgcctcgatgatgaaccctaatcgggtattttggaccgtacccgactagataacttgtttccattggatttgatcctaaaatgtaatcgatttgagatttcgcaaagccaagcatctcgtcaggagttacggttccttcgtgacactcgagatcggtgtttgattttcggagatgatcagaatatacggttaggaggaccggatcaccaggatgattttgatgaccggaggggtaattacgttcaaacggaggcttgtacgtacaatactgctcctttggtcggtgtgtttgcgagacttatagagcttgaggagcanaaactt

SEQ ID NO: 124641 - DNA, 735 bp, Arabidopsis thaliana
  unsure (1)..(735): unsure at all n locations
nnnnnnnnnnnnnnnnnnnnnnnnnnnnnnnnnnnnnnnnnnnnnnnnnnnnnnnnnnnnnnnnnnnnnnnnnnnccacgcgtccgcggacgcgtggggttttgatcccacattcctaaagctccagaaattgatcaaaatgggagaagctggtcaatccagagacggagaatctgtcacgcctcttgttggcggtggtaatggggacaatgcggttgcaccacaagtgtttaattctttaccagctcttaatgaagctgcttcttatataactcaagcaacgtcttacttagggagctgtttttctgactattcagtagaatatggtggcaaggatactatttcccacccccatgagttgttacgatcaacttccggagttgacgggaattccccagtgagtgtatgcatttcgcctggtgaaaggttttcaacttcttcagaggcatctacatctgatgccaacagcccgtcgagggaatctacagagattcttgcacaggcaacaaatgcaatagtgacttccaatcggttaaattaaatggaatttaaatgttccagggctcattgagcnggcacggaggactgttcgtggcttcggagatgacatangatgggtacagcgtgccccggagatgcctcctggtnaangatgcacctgataggctcaataaattctggagacatcgggcatgggttcacaggcctccaatacaggggtgacttattggtcca

SEQ ID NO: 124642 - DNA, 422 bp, Arabidopsis thaliana
ccgcggcttaggacaatatgatccgaatcgttgaagaaactgtctccttgtgtctatgtttcggtttgatcccacattcctaaagctccagaaattgatcaaaatgggacaagctggtcaatccagagacggagaatctgtcacgcctcttgttggcggtggtaatggggacaatgcggttgcaccacaagtgtttaattctttaccagctcttaatgaagctgcttcttatataactcaagcaacgtcttacttagggagctgtttttctgactattcgagtagaatatggtggcaaggatactatttcccacccccatgagttgttacgatcaacttccggggttgacgggaattccccagtgagtgtatgcatttcgcctggtgaaaggttttcaacttcttcagaggcatctacattt

SEQ ID NO: 124643 - DNA, 1321 bp, Arabidopsis thaliana
  unsure (1)..(1321): unsure at all n locations
cctcgacatgaaaactcgtgcccccttcgtttctccccctagtatcgccggctcctnnnnnnnnnnnnnnnnnnnnccgggccggcccacgcgtccgcagagaaccgaaagaagaaaacaaaactctcgaagtcgcaacagaaaagaaacgagagagatatggtggtaggcggcggaggagaaggagatcagaagagaagcagcggagaaatgatggcgatggcgagtttattcaacgatcagcagaatccaattcaacagtttcaggttaaattcaaagaagtagaaactaatttcaagacatggttgtcgaaacagtcgattccggtggaagccgccgtcgtatccaccatgagcggtgtacaaggagctttcattggtggtctcatgggaacactctctcctgaaatgcctcaagccggcgttgaccctcaagccatagcttcgatgaaacaagctcaggctcttgtgggtggtccttgggtccaagctcggaattttgctgcaattactggtgtgaatgctggaattgcttctgttatgaagcggattagaggcaaagaggatattgaatctgcgtaagtttcattctttgtgatttggttaccattgagaatgaaagtaatggttttaagtttgcagagtggtggcagcgttaggatctggatttgcatactcattggtgagccaaggattgcaaggacaacctatgaatgcaatcactactgctgctggttttgctgtttttcaaggagtgttttttaaagtgagtgatcatattgaaaactctctctactcatggaaacctgtttataagcattttttttggtttgattccctagttgggagaaagaattctctaacccgagtactgaagatccattttccccaagaggaaggccaatgctagtgaagctaggtttggagaaatacgagaagaactccaagaaaggacttttaccggatcccacattgccattgctccactgataagcgcgctgaaaagatgcgaacatcccccccagggccaagacttatgatactagatcatatccagagggacccggagataaagggcaaacgaaagtaggagccatgttgtttaatcaaatatgttttgatggtaacgatcttcaaacacatatgtaatgccttttacttttagctgctattgccatgaagagctcttgttagatacttctgtttctattaccaatgtttgattatctttaaaaaaaaaaaaaaagggcggccgctatagaggatccaagcttacgtacgcgtgcatgggacgtcatagctattctatagtgcgcctaaa

SEQ ID NO: 124644 - DNA, 576 bp, Arabidopsis thaliana
ttaaattcaaagaagtagaaactaatttcaagacatggttgtcgaaacagtcgattccggtggaagccgccgtcgtatccaccatgagcggtgtacaaggagctttcattggtggtctcatgggaacactctctcctgaaatgcctcaagccggcgttgaccctcaagccatagcttcgatgaaacaagctcaggctcttgtgggtggtccttgggtccaagctcggaattttgctgcaattactggtgtgaatgctggaattgcttctgttatgaagcggattagaggcaaagaggatattgaatctgcagtggtggcagcgttaggatctggatttgcatactcattggtgagccaaggattgcaaggacaacctttgaatgcaatcactactgctgctggttttgctgtttttcaaggagtgttttttaaattgggggaaagattctctaaaccgagtactggagatccatttttcacaagaggaaggacaatgctagtgaagctaggtttggggaaatacgggaagaacttcaagaaaggccttttaactgatcccacattgccattgctca

SEQ ID NO: 124645 - DNA, 428 bp, Arabidopsis thaliana
  unsure (1)..(428): unsure at all n locations
tgtttccatgtgcttcgcaagagcgatcctccgtttgtcccatcaacaacattcatcaaacaaggactttcatcatttatcactttcgtagttacacacttcaacgattcaaggatatcgaatacagatcttaaagatctacttctccagtcaatatccgtcctggtacagtacaaagagtacttggaagctttcgagaacaatgaggcagctactcgacacatgcctgcagcactactggcagcgtttgacaacagatcttggatccctgtcacaaatatatttcttcgtctttgcaaaggttctgggtttaggttctttaaagaacgngggagtcttcggtttttngtcntactgttttcctgggngtttctangnggttgcttgtntcaattnnttggnngnntttnactttnttactttttttt

SEQ ID NO: 124646 - DNA, 622 bp, Arabidopsis thaliana
  unsure (1)..(622): unsure at all n locations
tgagacgaagcttgatgagaacaatcgggcaaggccttatagagattacacaacacagatagattacacactgagaaacagataatggtagctgaggccttgcccaaatgccctgaagctccactcgtacttggactccaacccgcagctcttatcgataacgtcgctcctgttgattggtctttactcgatcaaattcccggtgatcgcggtggctccattgccgtgcaaaaggatgagttagagcacatgctaaaagagcttgatgcacatatcagtgtggctccattaaagaagatggctggaggaagtgtgaccaatacagttcgacgcttgagtgttgggttcggtgtagccactgggattattggtgcctatggagacgatgaacaacgccaattgtttgttagcaatatggggtttagtggtgtgagtatctcaaggctncaggaaggaggaaggttncactgntcagtgtgtttncttggttgatgacccttggtaatcggaccaatgcggccatgtctctcgggtcctntnaagatcaaggcaggtgnattaagcaaanagggtttcnnaagggcctnagggggtgggnctnaanaaaancngnncttaattt

SEQ ID NO: 124647 - DNA, 541 bp, Arabidopsis thaliana
gttcaagaggtttcagtattcttgggttcattcatcgtcagatggcaagagtactaacacttgattttcagctagattgtctagattacgatactgagaattggtaccatgctgatctcgatttcgagacattccagttgcttcagaaggagaaaggagaaagcttcttctcatttgccagggacatgactattagatcaacaaaagcaatgatacagccagctttggtaactgaaggtcgtgatacttggaggtcaaagcttctatgggtttcacgggtttttcctatgcctcttgtgggtcttttcctaatcggggctttttgtgctgactttggagatcagacctcagactatccagaattagaagcactttcacggcttgactttggagctgctatgaaggttttccttgctaagagattgacatccgagctaacactagagacatcagatatagaggaaaaatctgtcatcattggtgagagaaaccgagcagctacggaagctttaagaagagcaatagagcaaggacacaagag

SEQ ID NO: 124648 - DNA, 529 bp, Arabidopsis thaliana
ttaggagcactatagaagattatgaggtcgtactgccgcgtacgtaagctcggaattcggctcgagttttgatgagaatgtggaacttgtcgatcggtttcttagcgaagaagctgatcgagtttatgaagtcgatgaagctgttactggaaacgctaaaatctgtggtgaccgtgaagctgagtcctcggctgcagcctcgtcggaaaattatgtgatcgccgaggaggtgatcttagttcgaggacaggacgaacagagcgactcggctgaagctgagtccatttcttctgtctcgccggaaaacgtggtagcggaggagattaagagtcaaggacaagaggaagtaacagaattaggaagaagtggttgcgtagaaaacgaagaaagtggtggagatgtcttagtcgctgaatctgaggaggttagagttgaaaagagtagtaatatggtggaggagagtgatgctgaagcagagaatgaagagaaaacagagttgactattgaagaagatgatgattgggaagga

SEQ ID NO: 124649 - DNA, 767 bp, Arabidopsis thaliana
agtataattacattctttgcctttctccttcttcttctttagatcctaagtatcttactttcctttttcatcatcttcttcgatcatggaggttttcttagagatgcttctcacggcggttgttgctctcttgttttctttccttttggccaagctcgtttctgttgctacggtggagaacgatttgagttctgatcagccgctcaagcccgagatcggtgtcggtgttacagaggatgttcgttttggtatgaagatggatgctcgtgttctcgaaagccagaggaatttccaagttgttgatgagaatgtggaacttgtcgatcggtttcttagcgaagaagctgatcgagtttatgaagtcgatgaagctgttactggaaacgctaaaatctgtggtgaccgtgaagctgagtcctcggctgcagcctcgtcggaaaattatgtgatcgccgaggaggtgatcttagttcgaggacaggacgaacagagcgactcggctgaagctgagtccatttcttctgtctcgccggaaaacgtggtagcggaggagattaagagtcaaggacaagaggaagtaacagaattaggaagaagtggttgcgtagaaaacgaagaaagtggtggagatgtcttagtcgctgaatctgaggaggttagagttgaaaagagtagtaatatggtggaggagagtgatgctgaagcagagaatgaagagaaaacagagttgactattgaagaagatgatgatggggaaggaattgaga

SEQ ID NO: 124650 - DNA, 892 bp, Arabidopsis thaliana
  unsure (1)..(892): unsure at all n locations
nnnnnnnnnnnnnnnnnnnnnnnnnnnnnnnnnnnnnnnnnnnnnnnnnnnnnnnnnnnnnnnnnnnnnnnnnnnnnnnnnnnccacgcgtccgaccacgcgtccgcaaaaacataagctaagaaaacgaaactcaactaattttgttatcacccaaaaagaagttcaaacacaatggctttcgctttgaggttcttcacatgccttgttttaacggtgtgcatagttgcatcagtcgatgctgcaatctcatgtggcacagtggcaggtagcttggctccatgtgcaacctatctatcaaaaggtgggttggtgccaccttcatgttgtgcaggagtcaaaactttgaacagtatggctaaaaccacaccagaccgccaacaagcttgcagatgcatccagtccactgcgaagagcatttctggtctcaacccaagtctagcctctggccttcctggaaagtgcggtgttagcattccatatccaatctccatgagcactaactgcaacaacatcaagtgaaatggaagcttacgtcgtcgttttggcgttaagagtatggtttaccagaagtactagaataaaatacggctatatatcttagctgatattaccatgtatttgtttttgtctcaatgctttgtcttattttcatatcatatgttgtattgatgtgctaaaactatgataatagtaccttattagtcatcttctttctagatatctcctccaacgcatacgaacgtaataataatatgtgaagagttttataactattaagtaaccaataatattaagttcctagttttggagtgacattatttaaaaaataatattaacgaagaaacatgctaatgattttctccttaacccaaaaaaaaatctctatcat

SEQ ID NO: 124651 - DNA, 410 bp, Arabidopsis thaliana
gggaggtgaagctggcaaagatgctgagatgggggaggagcttaaaatgagttttacatcccctcagtcagcagtgcaagaagatgatggaggggagtcaaagacggaggggagtagtgaaagcagcaaagcaagatctggaagtcacagagattttcagcaagaagaggacgttatttaagataagcattcttctcgaccagctaacaataggaaacagtacgataacaatgcacctcatcagagcagaaagaatcaggacagagggaaggaaatggaaagaacacgagcggcgagcataggtggtagagagaactctaatccacatatggagctcgattctacttagatctactcaattgcaagtcgcgaggattttgataaaagaaaagagcgagatgtttattgcg

SEQ ID NO: 124652 - DNA, 821 bp, Arabidopsis thaliana
  unsure (1)..(821): unsure at all n locations
atgannnnnnnnnnnnnnnnnnnnnnnnnnnnnnnnnnnnnnnnnnnnnnnnnnnnnnnnnnnnnnnnnnnnnnnnnnnnnnccacgcgtccgcccacgcgtccgatttggtcacgtgagctgcgtcatgccgttaacggaagagaatgtggagagagtgttagacgaagtacgaccatctctaatggccgacggaggaaacgtggcgttgcacgaaatcgacggacttgtggtggttttaaagctacaaggagcttgtggttcgtgtcctagctcatcaatgacgttgaagatgggaatcgagagtcgtcttcgagacaagattccagagatcatgtccgttgagcagtttcttgaatccgagacaggaggtttagagctgaacgatgagaacattgagaaggttctctctgagttaaggccgtacctatccggtactggaggtggggggcttgagttagttgagattgatggttacgtggtcaaggttcgactcactggaccagctgctggagtcatgactgttcgtgtcgcgttgactcaaaaactgagggaaacaattccttctataggtgcagtccagcttctagagtgacattaacctttttattttgtaacttatatacaaggcccatttttgattcaatatattttatttcccattatataattaggacaactaatccaataaccctttttgtttgnnnnnnnnnnnnnnnnnnnnnnnnnnnnnnnnnnnnnnnnnnnnnnnnnnnnnnnnnnnnnnnnnnnnnnnnnnnnnnnnnnnnnnnnnnnnnnnnnnnnnnnnnnnnnnnnnnnnn

SEQ ID NO: 124653 - DNA, 513 bp, Arabidopsis thaliana
acgactcactatagggaaagctggcacgcctgcaggtaccggtccggaattcccgggtcgacccacgcgtgcggatgggtcatgctcgaactcgtaccggtatcatctccgtcgcttttaaattcttcaggtctctgttccctcgccatcaccgtactaacagcatgaagataaaaacaggaacgtttttgggggtttcgatatcattgattcttataaacttagctgcgatcatggaacgtgcagacgagaatctattgccttcggtttataaagaagtgagtgaagcatttaacgcaggaccatcagatttaggctacttaacattcgttagaaactttgttcaaggacttgcatcaccattagcaggagttcttgtcattacctatgatcgtcccattgttcttgcaataggtactttctgttgggctttatcaactgctgcagttggagccagcagctacttcattcaggttgctttatggagagcagtgaatggttttggattggcaa

SEQ ID NO: 124654 - DNA, 537 bp, Arabidopsis thaliana
acgagggatctctctctaattggcgctcctttactaattgccctttaattccatccatcttcggattcttttcaaatcaacaaaaaaagtacaaatcggatccctacaatatcctctccactcttcacaaatccttctccgagatctacaaacgctgtttcattcttccgattacaatggcgacgagaagacgtactttgctcaaggtcattgtcctcggtgacagtggggttggaaaaacctccttgatgaatcaatatgtgcataagaagtttagtatgcagtataaagcaacgattggtgctgattttgtaaccaaggagcttcagattggggaaaagcttgttactttacagatttgggatactgctggacaagagagattccagagtcttggtgctgctttttatagaggagctgattgttgtgctttggtttatgatgttaatgtgtttgaggtcttttgataatcccgaaacttggcatgaggggtttcttaaacgggcaagtccatcagattcaaagacatttccgttt

SEQ ID NO: 124655 - DNA, 513 bp, Arabidopsis thaliana
ggaagtgaaagcattattaggaggcaaaaaattgtcggtccttccaagtgtccagcccttccatgcaatagcatatcctattgaccctattcttgcccttgaaatcagtcgtaaatacgctgcacactgctccataatcgcttctcgttttggactacctccttttacccatccagctgggctccctgtaaaacgtgagggaggatttaagagattaaggattggatacgtgagcagtgattttggtacccatccgttgtcacacctcatgggatcagtgtttgggatgcacaacagagaaaacgttgaggttttctgccatgctctgagtgcaaatgataatactgagtggagacagcgaatccagtcagaagccgagcattttcctggacgtttctgctatgtcatctgatgctatcgccaatattataacccaggacaaaatccagatgctcatcaatctaaacggttataccaagggggctagaaatgaaatatttgccatgcagcctg

SEQ ID NO: 124656 - DNA, 499 bp, Arabidopsis thaliana
aactcattttagggaagagctggtccgcctgcaggtaccggtccggaattcccgggtcgacccacgcgtccgacaggagctagtgagaagaatgctcttcaggctctcaaagccagtgattggcaccttgaagcagcgtttgatgtgttttacagccagcctcaaccaagaagcaatgctgctgaagtaagacgcttggaggagctctacaatagatataaagacccgtattctgatatgattcttgcggagggtatctcggttctgtgtaatgatcttgaggtggaaccgcaagacatagtcacgttggttctttcgtggcatatgaatgctgcaacagcgtgtgagttttccaggcaagaatttatcagtggattacaggcattaggtgtagattcaatcgggaagttgcaggaaaagctgccatttatgcgttctgagcttaaagatgaacaaaagttccatgagatatacaactttgcttttgggtgggcgaaag

SEQ ID NO: 124657 - DNA, 793 bp, Arabidopsis thaliana
  unsure (1)..(793): unsure at all n locations
agctctcnnnnnnnnnnnnnnnnnnnnnnnnnnnnnnnnnnnnnnnnnnnnnnnnnnnnnnnnnnnnnncccacgcgtgcggaagagagtccggcggagagagaggaaagtgaagaagcaatcgtgagagactctctcgagtcttccctgagtcactcctctcctctcacacctttttgcttcgcgattaagagtcagagagagagagatagtaaacatcgaacgtcttccatttcatcttccttcgattaccttgttagggttttgtattttggcttctggattcttcttcactatgcataagttgagcagaagcaaccgtgacaaacttcagcagttcgtggctatcacaggagctagtgagaagaatgctcttcaggctctcaaagccagtgattggcaccttgaagcagcgtttgatgtgttttacagccagcctcaaccaagaagcaatgctgctgaagtaagacgcttggaggagctctacaatagatataaagacccgtattctgatatgattcttgcggagggtatctcggttctgtgtaatgatcttgaggtggaaccgcaagacatagtcacgttgggtctttcgtggcatatgaatgcttgcaacagcgtgtgagttttccaggcaaagaattttatcagtgggttacaaggcattaggtgtagattcaatcggggaagtttcaggaaaaantgccatttttncgttctgagcttaaangttgccaaaaagtccntgnggtttcaacttttnctttttgggtgccgaaaaangggcannana

SEQ ID NO: 124658 - DNA, 637 bp, Arabidopsis thaliana
acgacaaatctcctcctttcgtacataaaacaaagaaaccctctctttttctcatcttcttcaattttcaaaactcagaatccttcttcatcgtcgctacatttttctgtgcttctcggcctcgcctcccgaacaacaagactcaaaaggtagaaagaatcggacatggaagaagcagttgtaacgaggtattggtgtcatatgtgttctcaaactgtgaatccagtcatggaagctgagatcaaatgtcccttttgtcaaagtgggtttgttgaagaaatggaagatgacgacgatcatgattcttctgatccggctgatgttagagcaaacaactctctttgggcgcctatcttgatggaacttatgaatgatcctgtgcgtcgtaggagaaaccagagtgttgagtctgttgaagataatcaaaacgaggtacagaccgagaacaatgaagacgatggagaaaatgatttggattggcagcttcaagagattctcaggagaaggagaagacattccgctgctgttttgcagttgcttcaggggatacgagcagggttgtctgtagaatctgagagtactggtaatggaggtaataatccgggacgggtgatcttgatcaatacctccaatcaga

SEQ ID NO: 124659 - DNA, 417 bp, Arabidopsis thaliana
agatcagctgggctatacggatcgttgattgtggacgtggctaaaggaaagagcgagagattgagatacgatggtgagtttaatctcttactcagtgactggtggcatgaggctattccctcccaagaactcggtctttcttccaaacctatgcgctggatcggtgaagctcagagcatattgataaatgggaggggacaattcaattgttcattagcggcgcaatttagcaacaacacatcattaccaatgtgcacgtttaaagaaggtgatcagtgcgccccacagatactcccacgtggagccgaacaagacttaccgaatcagactctccagcaccaccgctcttgccctccctcaactttgggctgtttccaggggccacaagctagtggtggtcgaagccgacggcaacta

SEQ ID NO: 124660 - DNA, 933 bp, Arabidopsis thaliana
aaaccactgcgaaaaatatgataagccttaggtttcaaccaagcaccaccgtcggtgttttatcggcgtcagtgagccgcgccggttttatcaagcggtgcggttcgactaaaccgggaagggttggccggtttgttacaatggcgacggcggcgagtcctcttgaaatctgcgttaaagcttctatcaccactcccaacaagctcggagactgccctttttgccaaaaggtgttactgacaatggaggagaagaatgttccttatgacatgaaaatggtggatttgagtaacaaaccagaatggttcttgaagattagtccagaaggtaaagtcccagttgtgaagtttgatgagaaatgggttccggattcagatgttataacacaggctttagaagagaagtatcctgagcctcctcttgctaccccacctgaaaaggcttcagttggatcgaagatcttttccacatttgtcgggtttctgaagggcagaagattcaggggatggaactgagcaagttttgttgggtgagcttacttcattcaacgattatatcaaggacaatggccctttcataaatggagagaagatctcggcagcagatttgtccttggcaccaaagttataccacatgaagattgcattgggacattacaagaactggtctgttccagattcacttcctttcgtcaaatccaacatggagaatgttttctcgagggaatcattcacgaacacacgggcggaaacagaggatgtaattgctggttggagaccaaaggttatgggttaagagattttgatgttgacctcaagcttccttgtcttctactaaatgtaaaaaacataataatcaaatcttcttcaactgttaccaatgatatataccttgaatccttgatcgcttatatgatgaaaactatattgtgtc

SEQ ID NO: 124661 - DNA, 1006 bp, Arabidopsis thaliana
  unsure (1)..(1006): unsure at all n locations
ccaaccctgaaacatggctggtctttctttctcgtctttctatcaaagtgtcattaatagaaagacgagaaagaaagaccaaccctgaaacatggctgaagaacaacaaaactcagatcagagcaatggtggaaacgttattccaactcctgaagaagttgctacgttcctgcacaaaactgttgaagaaggtggatgggaaaaatgttgggaagaagagataacaccatgggaccaagggagagccacacctctcattgttcatcttgtcgacacttcctcactcccacttggccgtgctctggtccccggctgtggtggaggacacgacgtcgttgcgatggcaagtcctgaacgcttcgttgttggattggatatttccgaaagcgcactcgcgaaagctaatgagacttacggctcctcaccaaaggcagagtacttttcgttcgtgaaggaagatgttttcacgtggcgtcctactgaattattcgacctcatcttcgattatgtgttcttctgtgccattgaaccggagatgagacctgcatgggctaaatctatgtatgaactcttaaaacctgacggcgaactcataactctcatgtatccgattaccgaccacgttggtggacctccctacaaagtagatgtctctaccttcgaagaggtgttggtgcctataggatttaaggcagtgtctgtcgaggagaatcctcacgccattccaactcgtaagggcaaagagaagctgggaaggtggaagaagatcaattgatccctaagaaagagatcttactgtttggtaagagtgttatatgtgtgatctacaaagagtaaaatgattatcttcctttatttgctctatgtatgtttcaatgttgatccttattatgagtaacaataatgtttattatcaaaaaaaaaaaaaaagnnnnnnnnnnnnnnnnnnnnnnnnnnnnnnnnnnnnnnnnnnnnnnnnnnnnnnnnnnnnnnnnnnnnnnnnnnn

SEQ ID NO: 124662 - DNA, 675 bp, Arabidopsis thaliana
  unsure (1)..(675): unsure at all n locations
atgtctnnnnnnnnnnnnnnnnnnnnnnnnnnnnnnnnnnnnnnnnnnnnnnnnnnnnnnnnnnnnnnnnnnnnnnnnnnnccacgcgtccgtatttttaaaatgaaaattttaatatagaaaaatatattcttaacaatttcagatttttgtgataaaaaccgaatctagtttgaattagtatgatacggttttggactcaacatcgtttttgttatgaagacgcaatataacttcatttacatttcttaaaggaagtttaattttggtgtagtttttcttcatttattttggttgctcttcagttttgttattggttttttaagatgtgaatgtaaaaatattatttgtaattagaaaaaaaaaactatttaaactgaattaaaatcatccagttggccttttatgaatttcactacttaattaagattgaaccaattttacttaattaagattgaaccaatattatttggttagcctccctagtgaaacattttcataatgaaatgattgttacttaacattgtgaataaatatgttatgaatgtgagtagggacacgacgtcgttgcgatggcaagtcctgaacgcttcgttgttggattggatatttccgaaagcgcactcgcgaaagctaatgagacttacggctcctcaccaaaggcagagtacttta

SEQ ID NO: 124663 - DNA, 490 bp, Arabidopsis thaliana
acccacgcgtccgataaaaaaatggcctcaaagagctcaaccaccatttccctcatcatcatcctcctcatcagcctcgcagaagcaaacctcttaagctcgcctacaccgaccaacaactttggctcatgtcccagaaacccattgcaactaggcgtatgtgccaacgtccttggcctagccaatgttacagctggcgaccccagagcacgacagtgttgcactgccctcaatggcctcactaatgttcaagtaaccgattgtctctgctttatcttcaggccgattccgttggttttcggtattgatgtggccgttagagaaatcttttttgcttgcaatagggtttttcctatcggtttccagtgtccaccaccacagtaactactacttaattcccctaaataagagccctatccggtgtttccttgcactataagtttgctggtaccaaaagtatgggtttatctattaatgttttacagtgttg

SEQ ID NO: 124664 - DNA, 501 bp, Arabidopsis thaliana
agaaacctgggcaggacccacgcgtccgaataaatatcacttgttaaatggcctataccgaaatccaatccacaatgattttgctacacagaaactagcaactaaaaagaaaagtaagtggtcgaccatcgatcatggaccagcctcacgcgcttctagtggctagccctggcttgggtcacctcatccctatcctggagctcggcaaccgtctctcctccgtcctaaacatccacgtcaccattctcgcggtcacctccggctcctcttcaccgacagaaaccgaagccatacatgcagccgcggctagaacaatctgtcaaattacggaaattccctcggtggatgtagacaacctcgtggagccagatgctacaattttcactaagatggtggtgaagatgcgagccatgaagcccgcggtacgagatgccgtgaaattaatgaaacgagaaccaacggtcatgattgttgactttttgggtacggaactgatgtccg

SEQ ID NO: 124665 - DNA, 593 bp, Arabidopsis thaliana
acccacgcgtccggctgctgctgctgctccagtgagtgctcctgtgacagctaaccaattactggcaaatggtggcgggcttgctgccatgccaggtgtccttccggttactgttcctacccttcctagtgaaggggcaggccgtgctgcagccatggttgctgccatgaatctgcaacataatctggcaaagattcaagctgatgcaatgcctgagcactatgaagcagaacttgaaatcaatgacttcccacaaaatgctcgttggaaggtcacccataaagaaactttgggtccaatatcagagtggactggagctgctattaccaccaggggtcagttttatcctacaggacgtataccgggacctggggaacggaagctgtacttattcattgaagggcctagcgaaaaatcagttaagcacgcaaaagctgaactcaagcgtgttcttgaagacattacgaatcaggccatgtcctcacttcctggaggagcatccgggagatactcagtcctttaatgaaagcaacattgaggtgtgtgtttataaggggttcaaatcactgagagttttattaaacaagtattat

SEQ ID NO: 124666 - DNA, 436 bp, Arabidopsis thaliana
ggagacgagagaaagagaaggtaatcggccacgatgacgatggcgacgcctttcagtggggctgcgaactctattgtggcggcgaggaccgttctgataacgggagtgagcaaaggtctgggaagagccctagctctcgagctggccaagaggggtcacactgtgataggatgcgctcgtagtcaagagaagctcaccgctcttcaatcggagctttcctcttcgaccaatcatctcctcctcaccgctgatgtgaaatcaaacagcagtgtcgaagaaatggcacacacaattgtggagaagaagggtgtcccagatatcatagttaacaatgctggtaccatcaataagaacagcaagatttgggaagtctctgctgaagattttgacaatgtcatggatacaaacgttaaaggagttgcaaatgtgctgcgcc

SEQ ID NO: 124667 - DNA, 390 bp, Arabidopsis thaliana
ctctcttcttccttctccagttactttggtctccgccatggctacacagagtttactttcctctttcgtcacttgactatgactgacctaccatagttagttagatagggagagatacgaagaccaagaagatattttctcagcttggtttctcttatatccttctgggtttcgcaaaactgcaagcaaaattgtctctttttacgatttgcggcggcgttagggtttcgtttagattttgtgattcgtgagtgtgttcacgctttgggaggaagcagttatggtgaggaaacatggttggcaacttcctgctcacaaatttcaggtggttgcgattacggtgttctgcttattgagtgtagcatactatgcgtttttcgctccttttgt

SEQ ID NO: 124668 - DNA, 785 bp, Arabidopsis thaliana
  unsure (1)..(785): unsure at all n locations
nnnnnnnnnnnnnnnnnnnnnnnnnnnnnnnnnnnnnnnnnnnnnnnnnnnnnnnnnnnnnnnnnnnnnnnnccgagcgtgcgcccacgcgtccgcggacgcgtgggtttacatgcagtatcagagtcaaaatccagctcagagatgagtggtgttgcaaaggatgaagagaaatctgatgaatatagccaagacatgactcaagctatgggtgctgttctaacttacaggcacgagttaggaatgaactacaactttattcgtccagatctaattgttggatcctgcttacagacccctgaagatgttgacaagcttcgtaaaattggagttaaaaccatattttgcttgcaacaagatccagacctggaatattttggagtagacataagcagcatccaagcctatgctaagaaatatagtgatattcagcatattcgctgtgaaattagagactttgatgcatttgatttgagaatgcgtcttccagccgtggttggtactctttacaaagctgttaagggaaatggaggggttaccataatgtgcacctgcactgctgggaatngggaggggctcctgctgttgcggttgacatacatgttccttgggtnaaaggctataagctttttggagctcataaaattccttttgggcaaaaggcgggntttccgagnttggttctttcggaaatnaccaattgnttntttccaggccnangggggaggcttttccntgcnctaaganaggggtncccggggaattttgcctcatggtgggcaggt

SEQ ID NO: 124669 - DNA, 504 bp, Arabidopsis thaliana
  unsure (1)..(504): unsure at all n locations
gaaaattattataattaccagattttttatctatcgtcgaacttgggactgagaaagtagcagcttcgtttgcttcctctgatatttttctacactctctgtctctctctaaagatgaattgtcttcagaatcttcccagatgttcagtctcacctctgctgggattcgggtgcattcaaagagatcattcttcttcttcttcttctttgaagatgctaatatcgcctccgatcaaagccaatgatccaaaatctcgacttgttttacattatcagagtcaaaatccagctcagagatgagtggtgtttgcaaaggatgaagagaaaatctgatgaatatagccaagacatgactcaagctatggggtgctgtttctaacttaccaggcacgagttagggatgaactacaaactttatttcgtccagatctaatttgttgggtccnggctttcangancccctnangatgttnncaaagcttnggaaaaattggggtnaaaacc

SEQ ID NO: 124670 - DNA, 580 bp, Arabidopsis thaliana
  unsure (1)..(580): unsure at all n locations
gaaatgagaaaattcaattgaagaaaagagtaaagaagaagtctcttgttcggttggatttttcaggaatttcattttcgtgagcttacttgttcgttcatataaagaggtggaatttgatttatatgaattttgatttctgggtttacgaaattgatcggtttctgggttggaacttgaagttatgagcaatcttcgagctatctgtagaccatactctgtgttctcttcgattgtgtgttgtagtagacatcaaagtcgatcactttttagggtttcgattaaaaacgtcgcctttagaaaccagagttcgaattcgtcttggtttaggtctaaaaattcgaatctttggtttcgtttgaatcagaggaagactctagttagagcatcgaattggagccaagagaaatctccttacggtactctcgcgttgggataggaaatgcagaggnagnaccagattaaaggtagcatacagaagnttagcccaaattctantccatcctcatngtttatnattggaaagggggccncttnaagaagnaggggcancagangcangttcnttaagntncagnct

SEQ ID NO: 124671 - DNA, 637 bp, Arabidopsis thaliana
  unsure (1)..(637): unsure at all n locations
tatacgactcatatagggaaagctggtacgcctgcaggtaccggtccggaattcccgtgtcgacccacgcgtccgtacggctgcgagaagacgacagaagggcacggctgcgagaagacgacagaagggtacggctgcgagaagacgacagaagggtacggctgcgagaagacgacagaaggggggatttttcaggaatttcattttcgtgagcttacttgttcgttcatttaaagaggtggaatttgatttatatgaattttgatttctgggtttacgaaattgatcgggttctgggttggaacttgaagttatgagcattcttcgagctatctgtagaccatactctgtgttctcttcgattgtgtgttgtagtagacatcaaagtcgatcactttttagggtttcgattaaaaacgtcgcctttagaacccagagttcgaattcgtcttggtttaggtctaaaatttcgaatctttggtttcgtttgaatcagaggaagactctagttagagcatccgaattngagcccaggggaatctnccttacggtactcncggatttgggtagaaatcccagggganggcccagtttaaggntgcnatnccagnntttcgcccanattttnnnaccccgg

SEQ ID NO: 124672 - DNA, 435 bp, Arabidopsis thaliana
aggacgcgtgggctcactaaagctgtagttgtgcgttaaccctctaaggagcttgtaaaaatgctaatactgtttgagacgccaggtggttttgccatcttcaaagtattaaacgaaggaaagctctctaatgttgaggatttgggtaatgagttctcgaccgcaaagttagcccgaaagatggtgaagctagtagcttttgacaagtttgacaacacagctgaagctcttgaagcagtggctaaattgcttgagggaactccaagcaagggtctacgcaagtttttgaaagctaactgtgttggtgaaacattagctgttgctgattctaagcttggaaatatcatcaaggagaaactgaaaatagtctgtgttcacaacaatgctgttatggagctgttaagaggtatcagaagccagctaacttaacttata

SEQ ID NO: 124673 - DNA, 338 bp, Arabidopsis thaliana
cacgcatccgctctttcaagtttaacacatgagctgaggttaattaaatcacctgcagaactcaaattgatgagagagtctgcatcaattgcgtgccagggtcttctgaaaacaatgttacattcaaaggggtttcctgatgaaggcatcttatcagcccaggttgaatatgagtgccgggtaagaggtgctcagcgaatggcgttcaatcctgtagtccgtggtggttcaaatgccagtgttattcactattcacgaaatgatcagcgtattaaagatggtgatcttgtcttgatggacatgggttgtgagttacatggttatgttagtgatcttac

SEQ ID NO: 124674 - DNA, 857 bp, Arabidopsis thaliana
  unsure (1)..(857): unsure at all n locations
cataccactcactatagggaaagctgctacgcctgcaggtaccgggccggaattcccgggtcnacccacgggtgcgggcacgcgtccggagatcgagaaaggagaagaaggaatcaagagagtagaaaggaaatgaatctatacgcgcacgatctttctcttctcgatttcaattacaacgtctccggtcccttcggcgagccactatctcaccgcttcctctctcctggccctttcttccaaggcgaagaagacgattaccgccgtaatacgagctacagtcacgacggagctaatggacgagaaccggacacagattcaagagcatctccgccgcatcgccacgacgggaggtctccgttacctctgggaatggattggagttctcctcctcgtcatttggaaggaagggacacggtttggccacatgatcatcgaactggttggagttactgtgtcactgtcccttcttgggttgaccttcccaagtcaagcgtttcagatcctgccgtgttttatagagtgcaagtagcgatacaatctcctgagggaatcacttctgctaggctggtacttaggaggttcaatgatttcttggagttatattcgtctattaaaaaggagtttgtgaagaaaagcttaccccaggcaccaccaaagaagattctgaggatgagaaaccagacacttttggaagagaggaggtgctctctggaagattggatgaatagacttttgtcagatattgatatatccagaagcgctcttatagctacatttcttgagcttgaagctgctgtcaggtcttattttaatgatgaatatcaagaaactgaagatacctctggggacattcc

SEQ ID NO: 124675 - DNA, 919 bp, Arabidopsis thaliana
acccacgcgtccggaaggacacagatcattgatctttttaaccaagacaagtatctgaatgccatccaaactagtgctccacacttgctgcgctacttggcaactgctttcattgtcaacaaaaggagaagaccacaattgaaagaattcattaaggtcattcagcaagagcactactcctacaaagatccaattatcgagttcctggcatgtgtgtttgtcaattatgactttgatggggctcaaaagaagatgaaagagtgtgaagaggtcattgtgaatgatccattccttggcaagcgagttgaggatggaaacttttcaactgtaccactgagagatgaatttcttgaaaatgcccgcctattcgtctttgaaacctattgcaaaattcatcaaaggattgacatgggggtacttgctgaaaaattgaatctgacctatgaggaggccgagagatggattgtgaacctaatccgcacctcaaagcttgatgccaagattgattctgagtcaggaactgtaatcatggagcctactcagcccaacgatgcatgaccagttgataaaccacaccaaaggcttatcaggacgaacatacaagttagtgaatcagctcttggaacacacacaggcgcaagcaactcgttagtcaaaattttgctgtggaagcctttccttcataaaactcacattcggttgactggaattattttctttttcttgctctgagttcaccttttactttgaaaaagattattatggagttgttctatttgaaatgttggatccacagattggacacattttcccccccgaaaaaaaaaaaaaaaaccacaaacccgaagggcggccgctctagaggatccaagcttacgtacgcgtgcaggcgacgtcaagatcttctatagttgtccta

SEQ ID NO: 124676 - DNA, 783 bp, Arabidopsis thaliana
  unsure (1)..(783): unsure at all n locations
nnnnnnnnnnnnnnnnnnnnnnnnnnnnnnnnnnnnnnnnnnnnnnnnnnnnnnnnnnnacggacgcgtgccaccgtcttcgacgacggcaaattcgtggaagctgtttcatcgattccggcttcactgaagcggcgtcgctcgacgtttattattccgacgactaggcctttgaggcagtttctgattaacttcaggcgataatggcaaacagaacagatccgttggcaaagaatataagaggaacgaatccgcagaatctggtagagaagattgtgcgaacgaagatttatcagcacaccttttggaaggagcagtgctttggtctcacggcggagacattggtggacaaagctatggagctcgaccatctaggtggtacctttggtggtagccgcaagcctactccgttcctttgcctcatattgaagatgcttcaaactccaccctgagaaggaaattgccggggagtccataaaatggtgacctccaatatttcgaattcttgggccgttctaccggcggccactgggacggaggtgagggtatcgctacctgaaccctttaaataactaccggaggggaaaaaaagtatctgggggaaggtcccctgccacatgggacaagcccttgggacctttaccaggatattctggtaattgcacgcccctctaaaaagggggccccttaacaaagggtttttgacccgggaaaaggtttggaacccccttgaaaaagaagaagggggaacagggcgccctggggcccgaaggagaggacccc

SEQ ID NO: 124677 - DNA, 587 bp, Arabidopsis thaliana
  unsure (1)..(587): unsure at all n locations
acccacgcatccgacgaaaccctagttctctctccggcgaaaaccatggtggcgcaaaacagtcggcgggagcttctagcagcttccctgatcctaactttagctctaattcgtctaacggaagcaaactccgaaggggacgctcttcacgcgcttcgccggagcttatcagatccagacaatgttgttcagagttgggatccaactcttgttaatccttgtacttggtttcatgtcacttgtaatcaacaccatcaagtcactcgtctggatttggggaattcaaacttatctggacatctagtacctgaacttgggaagcttgaacatttacaatatctgtatggaatcatcactcttttgccttttgattatctgaaaacatttacattatcagtcacacatataacattttgctttgagtcatatagtgaactctacaaaaacgagattcaaggaactataccttctgagcttggaaatctgaagngtctaatcagtttggatctgtacaacaacaatctcaccggggaaaatcccatcttctttggggaaaattgaagncacttgtttttttgcggntttac

SEQ ID NO: 124678 - DNA, 703 bp, Arabidopsis thaliana
  unsure (1)..(703): unsure at all n locations
aggttgagactttggagacaagagttgagaaacttgaagaagagctaagagaagttgcagcgctcgagatttcgctctattcggttgtaccagaccactctagctcagctcacaagcttcacacacctgctcgaagaatttcaagaatctatattcatgcttgtaaacattggagtcaaggaaaacgagcaactgtcgctagaaactctgtgtctggtctcattttagctgctaaatcttgcggaaatgatgtttcaaggttgaccttctggttatcgaacatcatttctctcagagagatcattttgcaggcttttggtaaaactagtgttcctagtcatttcacagagacctctgcatcaaatgggagtgaacataatgttttagggaaggtaagaaggaagaagaaccaatggactaagcagtcaaatggttttaagcaggttttcgaagattggcaggaatcacaaaccttcactgctgcattagagaaagtcgaattctggatttcctctagaattgttgaatctgtttggtggcaggttttcactcctcacatgcaatcacccggaaaatggcggtaaaacaanggggcatatctttggggngntnnttgngncaaggnnggttttncatccagcctnttggaaaacggttttcaaagttncactttcgggggttttnccntttnnggggagcccgg

SEQ ID NO: 124679 - DNA, 428 bp, Arabidopsis thaliana
cgcgtaccgctcattactcccctttctcaatgatcataaaacctacttcgattctactccttatcaactgaatgaccgaaaaacctcaccttttttctttttccgatcatggggaatctgatcagtttgatcttctgctgcgggagacggcagaggagcaatattcctccggcgatggaaacggctcctcttgaactcccaccgaacagatttgtattcgccgccgtgccaccatatctggaccctatccctaactacggttgaccaggatccaggtaactgccttcctccgccagtaactgagccgccgatgctaccgtacaatttcaaccatttgcatcactatcctcccaacagttaccaactacctcatcctttgtttcacggcggtagataccctatactgccgcctcctacgtacgtccacc

SEQ ID NO: 124680 - DNA, 384 bp, Arabidopsis thaliana
acgcaggtaacaaagcttccttcaatttctcctttttcagatcaatcaatttccttctctggttccctttcctgacgcaagtttcctcctttggtttttgtcgatctctaagctcagacagagattcgaatgacctaattgtatcccgtcttatcgagactttacacagattcttctgggattttagcttacacagtcgttatctacttgttgcgtccaattgatttctctgaatcagaaaccctaatttcgtgggtcttgtgcagtctctaaagtttgcacactctctcagaatcgagccaaggtttcgtctagaaattagggtttcttagttttttcatggtggaggatatattttaggccgatttgagggctttccatcag

SEQ ID NO: 124681 - DNA, 387 bp, Arabidopsis thaliana
cccacgcgtccgcgaaggttctctcgccggagaagaaattatgcagggtttggcggcgaccaccaccaaccgtggctctctcaccttcctcgctcccaggaaccatagtccaatttcaaagaaatttgtgaatccaagagtgttctttcccaacgttgattcatccgcaaaattaagattatcagctagctcaatttcacggagatgtccacgacagattgctcctctttcagcaactgcatctgtggactttgcagcagcagcaacatcatccaaccagctctttgctaatggcttgccaccattagctcctggtttgagaagacaccggagaccgatagagcctgcaggagtggctaaagatgacttctttaaaatcaaactgcc

SEQ ID NO: 124682 - DNA, 437 bp, Arabidopsis thaliana
ccgtccgacatagtcctttttttttataaaggttttttcacaaccaaatttccattataaatcaaaaaataaaaacttaattagtttttacagaagaaaagaaaacaatgagaggtaaatttctaagtttactgttgctcattactttggcctgcattggagtttccgccaagaagcattccacaaggcctagattaagaagaaatgatttcccacaagatttcgtttttggatctgctacttctgcttatcagtgtgaaggagctgcacatgaagatggtagaggtccaagtatctgggactccttctctgaaaaattcccagaaaagataatggatggtagtaatgggtccattgcagatgattcttacaatctttacaaggaagatgtgaatttgctgcatcaaattggcttcgatgcttaccgattttcgatc

SEQ ID NO: 124683 - DNA, 641 bp, Arabidopsis thaliana
tttcaccattaaaaatcccaaagagtctggagaaatgggaaagattcttcatcttcttcttcttcttcttaaggtctctgttcttgaattcatcattagtgtttctgctttgtacttcacctgcttcacatccttctctttctcctgtttacacttccatggcttccttttctccagggatccacatgggcaaaggccaagaacacaagttagatgcacacaggaaacttctaatcgctctcataatcacctcatcttctctaggactaatacttgtatcttgtttatgcttttgggtttattggtctaagaaatctcccaaaaacaccaagaactcagaaggtgagagtaggatttcattatccaagaagggctttgtgcagtccttcgattacaagacactagagaaagcaacaggcggtttcaaagacggtaatcttataggacgaggcgggttcggagatgtttacaaggcctgtttaggcaacaacactctagcagcagtcaaaaagatcgaaaacgttagtcaagaagcaaaacgagaatttcagaatgaagttgatttgttgagcaagattcaccacccgaacatcatctcattgtttggatatggaaatgaactcagttcgagttttatcgtc

SEQ ID NO: 124684 - DNA, 561 bp, Arabidopsis thaliana
  unsure (1)..(561): unsure at all n locations
aacggaattaatagtaatctaatcggaagattcaagcgagaaatcgatttggttgtctgttaatttgttgggaaataaattgaaataggagattgattggatggtgagaaggcaagaggaggagaagaaggcggagaagggaatgcgtctggggaaatacgagctagggaggacgctcggcgagggtaatttcggtaaagttaaattcgctaaagataccgtctccggtcattccttcgccgttaaaatcatcgacaagtctcgtatcgccgatctcaacttctcccttacagataaaaagagagatcccggcctctgaaaaattttgaaacatcccccccattgttaggtttccatgagggtccttggcttgccaaaacgggaattttattttgggaatnggacccttttttccccggggggattttttccgccaaattttttttccccccggaaattttccagaacctttttgggggaaaaatntttcnncagnttttcngtnggacnccctnctttcntggaaaaggttttnccccngggtnttaaagntnggaattt

SEQ ID NO: 124685 - DNA, 534 bp, Arabidopsis thaliana
gaaagataaaaatttcaccgcggacttctcgtatggcgtcactagattctctagtgagcttctttatatctactcttttaatcactgtcgtgacctcgcaaactcgatgccgaaatttcaagtcgatcatcagtttcggcgactcgattactgatactggaaacttactcggcctctctagtcctaacgatcttcctgagtcagcctttccgccatacggagaaaccttcttccaccatccgtctggtcgtttctccgatggccgcctcatcatcgacttcattgctgaattcttagggattccacatgtgcctccgttttatggatctaaaaatggaaactttgagaaaggagttaattttgcggtgggaggagcaacagcactagaatgttctgttcttgaggagaaaggaactcattgttctcaaagcaatattagtttaggaaaccagcttaagagcttcaaagagagtttaccatatctttgtggctcctcatcaccagaatgtagagatatgattgaaaatgcattta

SEQ ID NO: 124686 - DNA, 380 bp, Arabidopsis thaliana
  unsure (1)..(380): unsure at all n locations
gcacgagcacttatctctcttcttcattncttctctcttcaagctccaagatgtgtttaagttcttcagaaacattttcagacacacccacgagattaggtttatacctcaaaacacaaagtcacgttcgtatccctcgtctctccaggaggagacggatgtggcgggaagagaaaaagatggagatgatcaatctaaagctttacgtggagaatcaatacatcataagagagaacgagaaacttaagaagaaagctcttcttcttcaccaagaaaacaaaactctcttctctctgcttcagaccaaaaaactctcctctggtccataaataaaatcttaccatcatcaccaatcactaagatcatcatattcttctttc

SEQ ID NO: 124687 - DNA, 1375 bp, Arabidopsis thaliana
  unsure (1)..(1375): unsure at all n locations
nnnnnnnnnnnnnnnnnnnnnnnnnnnnnnnnnnnnnnnnnnnnnnnnnnnnnnnnnnnnnnnnnnnnnnnnnnnccacgcgtccgcccacgcgtccgaaaaaaacaaaaatttaggaccggtgggtttgaagtttgaggtgttcaacggaagtgctccttctttgttctctactacatattcatggacaaagatggcaaacattatattcttggatcagccagtaggatctggcttctcctactcaaaaactccaattgataaaactggtgacataagtgaagtaaagaggacccatgagtttcttcaaagtggctaagcaggcatccacaatatttctccaaccctttatatgtagttggagattcttattccggtatgattgtcccggccctcgttcaagaaatctcacaaggaaattatatatgttgcgaacctcctataaatctacagggttatatgcttggaaaccctgtaacatatatggactttgaacaaaacttccgcattccatatgcttatggtatgggattaatctccgacgaaatctatgagccaatgaagagaatctgcaacggaaattattacaatgtggatccatctaacacacaatgtttgaaacttactgaagaatatcataagtgcactgccaaaataatatccatcacatattaacaccagattgcgatgtacccaatggaacatctcctgattgttattatatccatatcatctaattgattgttgggctaacgacgagagcgttcgcgaagcttttatattgaaaaggtagaaaggaaaatggcgcgatgtatcgactatttctacaatcacgacattgtaagcagcataccatatcacatgaataacagcatcagtggatcccgatctcttatttacagtggtgatcacgacatcgcggtcccttttcttgcaactcaagcctggataagatctctcaattactcccccattcataactggaggccatggatgataaacaaatcaaatcgctggatacacgagagcttattccaataagatgacatttgctactatcaaaggaggtggacacacggcagagtatagaccaaacgagacctttatcatgttccaaaggtggatcagtggccaacccctgtaacaaaaggcttatgaccttcacctataattatctaccaactaatatccacgttaagcgcagttgtttgtgttgaaatgtttttgttgtttgctttgttgcattcttttgtgctttatgttacaattttatgtgttttatgtactacagttcattattgtgcgttaaaaaaaaacaaaaaagggcgcccgctttagaggatccaagcttacgtacgcgtgcatgcgacgtcat

SEQ ID NO: 124688 - DNA, 981 bp, Arabidopsis thaliana
  unsure (1)..(981): unsure at all n locations
agctctctacgactcactatatggaaagctggcacgcctgcaggtaccggtccggaattcccgggtcgacccacgcgtgcgctcatggaatggcattaatctctgatgaactatacaagtcattggagagaatctgcaaaggaaattatgtgaaagtggattcacttaacacaaaatgctataaactaatcaaagattatcaaaagtgtattcataaactgaataagtatcatatattattacctgactgcgatataacatctcctgattgctttttatataggtatactctcataaccttttgggccaacaacaagagcgttcgcgaagctctgcaagtcaataagggaagtataggaaaatgggtacaatgtaactataaaaatatttcctacaattacgatatcaagagcagcgtcgcataccatatgaagaatagtattgatggctaccgatctcttatctacaatggtgaccatgatatgatggtgcctttccttgcaactcaagcctggataagatctctcaattattccatcactgatgattggaagccttggatgataaacgatcaaattgctggatacacgagaagttattccaataagatgacatttgctactatcaaaggaagtggacacacagcagagtataaaccaaaagagacctctatcatgttcaaaagatggatcagtgcccagcctttgtaaaagaggatgatggtctttgcgtatgtagaataaaactatgtaacataaaaaatgtttgtatacaatataatcatctacttggtaattaagtcctaccgctacacgtgattttttgttttgatgtagactactgaatcccttgcctgcttgaattcaaaattttaatttgtnnnnnnnnnnnnnnnnnnnnnnnnnnnnnnnnnnnnnnnnnnnnnnnnnnnnnnnnnnnnnnnnnnnnnnnnnnnnnnnnnnnnnnnnnnnnnnnnnnnnn

SEQ ID NO: 124689 - DNA, 868 bp, Arabidopsis thaliana
  unsure (1)..(868): unsure at all n locations
nnnnnnnnnnnnnnnnnnnnnnnnnnnnnnnnnnnnnnnnnnnnnnnnnnnnnnnnnnnnnnnnnccacgcgtccgcccacgcgtccgcccacgcgtccgcggacgcgtgggtgagtttgaaaataaagtttctgcttctgcttgtcttgtatcatcatgttgattctgcctctatcgtcaagtttcttcctggttttgaaggccctcttcctttcgaacttgaaaccgggtacattggtattggtgaggacgagaatgtgcaatttttctactatttcatcaaatctgaaaacaatccaaaagaagatcctcttcttatatggttaaatggaggacctggatgttcttgtcttggtggtattatttttgagaacggaccggtgggtttgaagtttgaggtgttcaacggaagtgctccttctttgttctctactacatattcatggacaaagatggcaaacattatattcttggatcagccagtaggatctggcttctcctactcaaaaactccaattgataaaactggtgacataagtgaagtaaagaggacccatgagtttcttcaaaagtggctaagcaggcatccacaatatttcttccaaccctttatatgtagttggagattcttattccggtatgattgtcccggccctcgttcaagaaatctcacaaggaaattatatatgtngcggacctcctataaatctacagggtatatgcttggaacccctgtaccatatttgggccttggaccaaacnttcggattccaatgcttanggtttgggttaatcnccggcgggaattttttggcccattnggggntttgnaacngggatttttttncaatggggggcccnttttna

SEQ ID NO: 124690 - DNA, 538 bp, Arabidopsis thaliana
  unsure (1)..(538): unsure at all n locations
atatcatatggattacagcatccatggatatcgatctcttatttacagtggtgatcatgacatcacaatgcctttccaagcaactcaagcctggataaaatctctaaattactccatcgttgatgactggaggccttggatgataaacgatcaaatcgctggatacacgagaacttattccaataagatgacatttgctactgtcaaaggaggtggacacacggcagagtatctaccaaacgagagttccatcatgttccaaaggtggatcagtggccaacctttgtaatagaaggcctcttttagaggcttattgcctgtacgtattacatatattaatattcacgctacgcgcaattcttttgttttgagatgtttacagaaaataggataaaaagtttgtccttgacattttgccttcctcaggattgctatttggtatcagggaatcaaaaaaacacaaaaaagnnnnnnnnnnnnnnnnnnnnnnnnnnnnnnnnnnnnnnnnnnnnnnnnnnnnnnnnnnnnnnnnnnnnnn

SEQ ID NO: 124691 - DNA, 1029 bp, Arabidopsis thaliana
  unsure (1)..(1029): unsure at all n locations
nnnnnnnnnnnnnnnnnnnnnnnnnnnnnnnnnnnnnnnnnnnnnnnnnnnnnnnnnnnnnnnnnnnnnnnnnnnnnnnnnnnccacgcgtccggttgattctgctgctatagtcaagtctcttcctggtttagaaggccgtcttcctttcgaactcgaaaccgggtttgtaaaatgtacattggtattggagaggaagaggacatacaattgttctactatttcatcaaatctgagaacaatccaaaagaagaccctcttcttctatggttagatggaggacctggatgttcttctctcggtggccttctttttgagaacggaccggtggctttgaagtctgcggtttacaatggaagtaatccttctttgttctccactacatattcatggacaaagatggcaaacataatatacttggatcagccagttggatctggtttctcttactcaagaactccaattggaaaatctagtgacacaagtgaagttaagaatatccatgagtttctccaaaagtggttaagcaagcatccacagttttcttccaatcctttctatgctagcggagattcttattccggtatgattgttccagccctcgttcaagaaatttcgaaaggaaattatatatgttgcaaacctcctataaatctacagggctatgtactcgggaacccgataacgcactttgaagtcgacccaaactatcgcattccattttctcatggaatggcacttatttcagatgaactatacgagtcaattaggggagcctgcaaaggaaattatttcaacgtggatccacgtaacacaaaatgtttgaaacttgtcgaggaatttcataagtgtaccgacaaactaaatgaattccatatactatcaccagattgcgacacggcatctcctgattgctatttatatccattttatctcattagcttttgggccaatgacgagagcgtccgcgatgctcttcatgttaataagaggagtattggaaaatgggagcgatgtaactatctgagt

SEQ ID NO: 124692 - DNA, 508 bp, Arabidopsis thaliana
  unsure (1)..(508): unsure at all n locations
nnnnnnnnnnnnnnnnnnnnnnnnnnnnnnnnnnnnnnnnnnnnnnnnnnnnnnnnnnnnnnnnnnnnnnnnnnnnnnnnnnnccacgcgtccgcccacgcgtccgaatttttgcaaaagcaacgtacccatcttatcattattttataaagatcctatgtctatccgtaaatggactaatctttagacacacagagaatataatgagtttgaaaataaagtttctgcttctgcttgtcttgtatcatcatgttgattctgcctctatcgtcaagtttcttcctggttttgaaggccctcttcctttcgaacttgaaaccgggtttgtaatttttttttttttttaaccaatgcatttatttgtgtatgtaaacaagcattcttcttaatgaaggtacattggtattggtgaggacgagaatgtgcaatttttctactatttcatcaaatctgaaaacaatccaaaagaagatcctcttcttatatggttaaatggaggacctggatg

SEQ ID NO: 124693 - DNA, 544 bp, Arabidopsis thaliana
aggtctctacgactcactattgggaaagctggtccgcctgcaggtaccggtccggaattcccgggtcgacccacgcgtccggtaacgcggagctactttgtaattataaagatttattgtttcccataaactggttaaatgattttagaaactaaagtaaaatgagcttgacactagagtttctgcttcttctgattgtacttatcttgagtcaccatgctcattctggctctattgtcaaattccttcctggttttgaaggcccccttccttttgaactcgaaaccgggtacattggtattggtgaggaagaggaagtgcaattattctactatttcatcaaatctgagaagaatccagaagaagaccctcttcttctatggttaagtggaggacctggatgttcctctcttactggccttctttttgagaatggaccggtggctttgaagttcgaggtttacaatggaagtgttccatctttggtctctactacatattcatggacaaagatggggaacataatattcttggatcagccagt

SEQ ID NO: 124694 - DNA, 518 bp, Arabidopsis thaliana
ctccccctgcaggtcccggcccggaattcccgggtctacccacgcgtccgagatccttgtatcctaagatgactcattctttagaaactaagagagaatggaattaacactaaaattgctggttctgcttctgtttatcttaaatcatcatgttggttctggctctatcgtcaagtttcttcccggttttgaaggccctcttcctttcgaacttgaaaccgggtttgttagttctctcttttgcaacaatgtgttttgagtttggagtttgtaattagtcattcttttgactaaaggtacattggtattggtgaggaagaggaagtgcaattgttctattatttcatcaaatctgagagaaatccaaaagaagaccctcttcttctctggttaagtggaggacctggatgttcttctatcactggcctttttttccagaatggacctttggctttgaagtccgaggtttacaatggaagtgttccttccttgtctctactacatattcgtggactaag

SEQ ID NO: 124695 - DNA, 513 bp, Arabidopsis thaliana
  unsure (1)..(513): unsure at all n locations
cccacgcgtccgattaaattctctcattttcaagaaaatatctgaaaaaacagaaacttaacagaagcagcttcgatcaagagatggcttcacttacttcaatagccacgccttacccatcttcatcgcaggctttgcgtctgaaatcctccggaaacactcttttctctgccggagttcgatcggcagcaatggtttccggtcacaaaacgcttaagattcaatgcacttcaaccaaacctgccaaacctgcagctgaagtcgattggagacagaagagagagcttctattggagaaaagggtgagaagtgtggacgtgaaggaagctcaacggttacaaaaagaaaacaactttgtgattcttgatgtaagaccagaggcagagtacaaggcgggtcatcctccgggagctatcaatgtggagatntacagactcataaggnaatngncggnatgggacatagctcnccgtcttggctttnctttctttggtatcttnnctatgcacanaa

SEQ ID NO: 124696 - DNA, 549 bp, Arabidopsis thaliana
  unsure (1)..(549): unsure at all n locations
nnnnnnnnnnnnnnnnnnnnnnnnnnnnnnnnnnnnnnnnnnnnnnnnnnnnnnnnnnnnnnnnnnnnnnnnnnncttttttttttttttttaattaattacttaattcataatataacaaattttaaattacatttcaagataaccaaacaaggacgtttttcttgtgattttgttattcataattggacatgactcgtaggccaccttttataaaaaaccagctgatttttttcttgggaaaaaagaaaaatacagaaaaaattacataaagaccacaaaactcaagaatacaaaagtaaaaataagaaaagtaaaaaaagtaaaaatatgaggggtcaaagagacctattgaaaatcttttgacccggtgaaagtatagccatgggatcaaacatagctttcctatcaacaaatctcgaccatcggtttccaaaatggcgaatccattcctcttgagacttgtgatgaggaagatacaattttgaaatcaattccgtttttgacacaccattgaacgatctcttggttttgagctaccattttctt

SEQ ID NO: 124697 - DNA, 1604 bp, Arabidopsis thaliana
  unsure (1)..(1604): unsure at all n locations
cccgcgngaccggnccggatncccgggttancccacgcggcgaggttaggtttttaagtcgcacctctctctctcactgccgcatcttttcttagggttcttgtttcgctatctcttaaacacaaacagctctgtccgaataatctctcttcaagtacctcttttttctgattctgtatatcgccatgaattactgatttccctctctataaacccatcaaagtaaaccaatttctcctgtgacttgtacctaactcgatcttaccagactggtgatggcgtctttgaaccctttcgatcttctaggagatgatgctgaggatccaagccagctcgctgtggctttgtctcagaaagtcgagaaagctgctgctgctgttcagcctcctaaggccgctaagttcccaaccaagccggctcctccttctcaagcagtgagggagtcgaggaatgctcctcaaggaggtcgtggtgggactggtggacgtggtggattttcccgtggcaggggtaatggtggatacaaccgggacaacaggaacaatgatgctcctggaaatgagaatggattttttggaggatacaggagaccttctgaagatgctgatggagcaagccgtggtgggtctgttggtggataccgtgttggcggtggtcgtgaaggacctcgccgtggtggagttgccaacggggaatctggtgatgttgaacgcccaccgaggaattatgaccgccatagcaggacaggtcatggtactggcatgaaacgtaatggtggaggtcgtggaaactggggcactactgaagatgatatccctccaacgtctgaggaacctaccacagaggttgagaagagccctgttgctgagaagcaaggaggtgaggatgaaacccctgaagcaaagaaagaactcactgcggaagagaaagcacagaaagaagctgaagaagctgaagccagggagatgactctagaagagtatgagaaaattctggaggagaagaagaaggctctgcaagccacaaaggttgaggaaaggaaagttgacaccaaagtgtttgagtccatgcaacagctctctaacaagaagaacaccgatgaagaaatcttcatcaagctgggatctgacaaggaaaaacgcaaagatgctactgagaaggccaaaaagtcgttgagcattaatgagttcttgaagccggctgatggaaagaggtacaacgggagaggtggaggctcccgcggaagaggaggtcgcggtggtcgtggtgaaggaggaaaccaaaggtatgcaaaagaagctgcagctccggcgattggagacacagctcagttcccttcgttgggctagtaaagacccctggtccttcagcctcgctatctctgtctttcgtttctctttggttgaattttgttagttttataattttttgttacactttctgaaggtcttttctgcgaaactattacgttttttaagttatgaaaaaaattattaagataaaaaaaaaaaaaagaaaaaagnnnnnnnnnnnnnnnnnnnnnnnnnnnnnnnnnnnnnnnnnnnnnnnnnnnnnnnnnnnnannnnnnnnnnnnnnnnaatcg

SEQ ID NO: 124698 - DNA, 715 bp, Arabidopsis thaliana
  unsure (1)..(715): unsure at all n locations
cnnnnnnnnnnnnnnnnnnnnnnnnnnnnnnnnnnnnnnnnnnnnnnnnnnnnnnnnnnnnnnnacctgaacccacgcgtccgcccacgcgtccgggttcgctgccgccgaaatttccgatcaaccttaataaggaatatgacgtctctgtcggtaaatgatcggaaggattttgtagatgggcagatgaagtactggcgtcaaatagccgaatccgatggtttcgatatcgatgatgttccagtaccaagaggaaccagagctggactgtggtctgtcgactgtaaacacccacgttttaggcttagggcttgtttacccaagatttatgctatggttggtcttcaccgttacaatttgctcagggggacaaacttcgagcaccttgagttactaaaatacaacgagtcaatgaactgtgtgtgctcttactatataaacttcgttgcagtagatctttctagccagttgcagaaaacttttcagattcgagttgatgaaaaaagttttggagatttggatttgacggtctctgttgctaaacctaatgatgaatagaaagtgaccaccgagaagcgtttcacacatcactttcattgggaagcagctgccgatgatttctacagatgtgcactgcctgaatggccgtcagttggtgatctgaagcagcaaaagctactttacatggtgaagaaatgcgagttgcagtccaatg

SEQ ID NO: 124699 - DNA, 768 bp, Arabidopsis thaliana
acggacgcgtgggtgaacagcaagaatctcaactctcttcaccggcaatttcacccgatgagctctacaagtttgtatttacttctgtggaggaaatgatggttgaggaatcagagtacctagttgctatcatcaccgagttccttcgcagtataagtgcagaaaaactcaaagtggatttgaacatctatgtgatgaccatcaaacttttagcttacagtaagcgatttgcagaactgtcgctattcaccacaaacaagataatcgaaccatcaaaggaagtcgcgttccaacttctggatagtggtcgtcaaaatatccgggtaagaaaacttgggcttgatatgttgagacagctctccttgcaccatgattacatctcctcccttgtgcaagatggatactatcttgaagctctgcgatatgctcagaagcataaggtgacgagtgtgcgatcgtcgatgttcctagaagcagcattcgcgtcgaatgatatgcagcatttggctgcaattttgagggtcttgtcggaattgattcccgggtttaaagaaacttctgaatattacaccttttatggtcttctcaatgacaccagttcctcagttgctgtctgaagagaatctcataccacattttatgttcaagaaagtaaaatgatctctggttcttcgactggatcttgataaataaatgctgttgaacattttctggttcctatataagaataactataagaattggttttaagacatctataatgacgag

SEQ ID NO: 124700 - DNA, 1109 bp, Arabidopsis thaliana
ccggttgctctcgattatcatcagcagctcccttcaaaaaccctaactctctgagctcgatcgacaagtgataatggccaacagtaatttgccgcgaagaatcatcaaggaaactcaacgtcgggacaacccagccctccgagctcccggcataagtgcctctccagctgaggataatattttgaattataacgctacgatgctgggtcctacacaatcatcttatgaaggatgagacctcaagccggagctcttttcgcctgaagaataccctatggcagctcccaaggctaggttgctcacaaagatataccatcctaacattgacaagcttggaagaatctgtcttgataattctcaaggacaaatggagccctgcactacaaatactaacagcgctcttaaggtatatgagctgattacataagatcatttcctgctacaaactattgttttcttggagcttgacttccgctcctataatattaacgcgagcaatccttatcaagtattcaagctcttctgagtgccccaaaaccaaatgatccgctttctgataccattgctcagcactggcacgagtactgaggcaaaagctgtggatccagtttaaggatggaccccgtctttctgcaactcggctccaatgaattaaattggaaggtgtgaaccaacagcgaaaagtatcttctttctaatcgccttagatgaacaatattacccattcttgcgccgaaaaaatatcttatattcttcacaacagaactccaagtaggctttcattcgaatcgcaagaaagcgctctttacactaatcttctatcggcactgggagcttatatttatacgtacaacgctctctgtatcaaacttggacctatctgtagtggaaattctctctctcctattaaaatccaaccccctcgggtgaatcttttactcactctccccgaaatggaaatcaaaataacgttccgcttacttttattaatttttggaacgattctcggtgacacacggtcccttcttggccgcgtatcaacacaatcctcctcactaacaatatatacaagcagcattggggcccggccccctcacctttaaaaggca

SEQ ID NO: 124701 - DNA, 858 bp, Arabidopsis thaliana
  unsure (1)..(858): unsure at all n locations
ttnnnnnnnnnnnnnnnnnnnnnnnnnnnnnnnnnnnnnnnnnnnnnnnnnnnnnnnnnnnnnnnnnnnnccacgcgtccggcacgaaactagagacgacgaagcgtactcgattattatcagcctttggtagcttcgttctctctcaaaaaccctaacttctctgtgacgatcgaatccgatagcgtgcgataatggccaatagtaatcttccccgacgaatcatcaaggaaactcaacgtctgcttagtgaacctgctcctgggataagtgcgtctccatcagaggaaaatatgagatatttcaatgttatgattcttggtcctactcaatctccttatgaaggaggagttttcaagttggagctctttttgcctgaagaatatcctatggcagctcccaaggttaggtttctcaccaagatttaccatcctaacatcgacaagcttggaagaatctgccttgacatactgaaagacaagtggagtcctgcactacaaatacgaactgtgctcttgagtatccaagctcttttaagtgcaccaaacccagatgatcctctgtctgagaacatagctaagcattggaagagcaatgaggcagaagctgtggaaacagctaaggaatggactcgtctttacgcaagtggtgcttaaagaagactgcaaatggagaaagatcattgtcatttaaataacattatatatggtgaaactctatctcaaggttttatctgaatcctttttctgaaaacagaggaaaaagatttgtcctctctgaatttgtataactgggggggtctaagactcgtttacccatatctggaatctaactttcttcaattgtccttgctttttg

SEQ ID NO: 124702 - DNA, 913 bp, Arabidopsis thaliana
  unsure (1)..(913): unsure at all n locations
gaaagatagagaaaggaaatcgaattaaaatcttcgtcagattcgagagacgacgacgacgaacttgttgttctcgattatcatcagcagctcccttcaaaaaccctaactctctgagctcgatcgacaagtgataatggccaacagtaatttgccgcgaagaatcatcaaggaaactcaacgtctgctcagtgaaccggctcccggtataagtgcctctccatctgaggataatatgcggtatttcaacgttatgattcttggtcctacacaatcaccttatgaaggaggagttttcaagttggagctctttttgcctgaagaataccctatggcagctcccaaggttaggtttctcacaaagatataccatcctaacattgacaagcttggaagaatctgtcttgatattctcaaggacaaatggagccctgcactacaaatacgaacagtgctcttaagtattcaagctcttctgggtgcaccaaacccagatgatccgctttctgagaacattgctaagcactggaagagtaatgaggcagaagctgtggatacagctaaggaatggacccgtctttatgcaagcggcgcatgataaattggagggtgaaaactgaaaagatctctttcatccaaataacattacatttgctgaaatctatctcaacatcaaagttataagaaagcttttattttgctggttatttccccccgccactgctctgtaatctctctgaatcacactgtatcattactcctaggatcaatactcgttcttatatttgaagttcgtcaaagtcttttgagtaaaaaatatctatatttctctnnnnnnnnnnnnnnnnnnnnnnnnnnnnnnnnnnnnnnnnnnnnnnnnnnnnnnnnnnnnnnnnnnnnnnnnnnnnnnnnn

SEQ ID NO: 124703 - DNA, 842 bp, Arabidopsis thaliana
  unsure (1)..(842): unsure at all n locations
cgaaattccgggttggacccacgcgtccgagctccgggtataagggcctctccatctgaggataatatgcggtttttcaacgttatgattctgggtcctacacaatcaccttatgaaggaggagttttcaagtgggagctctttttgcctgaagaataccctatggcagctcccaaggttaggtttctcacaaagatataccatcctaacattgacaagcttggaagaatctgtcttgatattctcaaggacaaatggagccctgcactacaaatacgaacagtgctcttaaggtatatgagctgattacataagattatttcctgctaaaaactattggtttcttggagcttgacttctgctcctattttattaacgtgtgcaatccttataaagtattcaagctcttctgagtgcaccaaacccagatgatccgctttctgagaacattgctaagcactggaagagtaatgaggcagaagctgtggatacagctaaggaatggacccgtctttatgcaagcggcgcatgataaattggagggtgaaaactgaaaagatctctttcatccaaataacattacatttgctgaaatctatctcaacatcaaagttataagaaagcttatattttgctggttatttccccccgccactgctctgtaatctctcttaatcacactgtatcattactcctaggatcaatactcgttcttatatttgaagttcgtcaaagtcttttgagtaataaatatctataaaaaaaaaaaaaaagnnnnnnnnnnnnnnnnnnnnnnnnnnnnnnnnnnnnnnnnnnnnnnnnnnnnnnnnnnnnnnnnnnna

SEQ ID NO: 124704 - DNA, 665 bp, Arabidopsis thaliana
  unsure (1)..(665): unsure at all n locations
ctgtccgtttgcggtaccggtccggaattcccgggtcgacccacgcgtccgcatggtctgttatactgatggatcatgtgctgcttgcacttatcatgtatatatagcgaaagcttggaagaatctgccttgacatactgaaagacaagtggagtcctgcactacaaatacgaactgtgctcttgagtatccaagctctttgataagtgcaccaaacccagatgatcctctgtctgagaacatagctaagcattggaagagcaatgaggcagaagctgtggaaacagctaaggaattaggactcgtctctacgcaagcgggtgcttaaagaagactgcatatgggggaaagatcattgtcctttaagcaacattcttatatgggggaactcttatctcaagggtttatcctgaatcccttcttctgaaaacagggggaaaaggtttgtaccccccggcattttgtataactagggggatctaagactcgtttacccatatctggaatataactttcttcaaaacacaaaatacagagnnnnnnnnnnnnnnnnnnnnnnnnnnnnnnnnnnnnnnnnnnnnnnnnnnnnnnnnnnnnnnnnnnnnnnnnnnnnnnnnnnnnnnnnnnnnnnnnnnnnnnnnnnnnnnnnnnnnnnnnnnnnnnnn

SEQ ID NO: 124705 - DNA, 587 bp, Arabidopsis thaliana
agcggcacatgccaaaggaacgcagcttgctggtgaagccatagctaatgtcaggacagttgctgcatttaactcggaggcaaagattgtccgtctctacactgcaaacctcgaaccaccattgaaacgatgcttctggaaaggacagatcgctggaagtggttatggtgtagctcagttctgtctttatgcatcttatgctctcgggctatggtacgcatcatggcttgtgaaacacggcatctctgacttctccaaaaccataagagtcttcatggttctgatggtctcagccaatggtgcagcagagacactcacactggctcctgatttcatcaaaggtggtcaagctatgcggtctgttttcgaacttcttgaccggaaaaccgagattgaacctgatgatcctgataccaccccggtcccagaccggttacgtggtgaagtcgagctcaaacatatcgatttctcttacccttcaaggccagacatccagattttccgtgaccttagccttcgtgctagagctggcaaaaccctagctcttgtgggtccaagcgggtgcggaaaaagctcagttatctccc

SEQ ID NO: 124706 - DNA, 602 bp, Arabidopsis thaliana
ctcctacgacttactatagggaacgctggtacgcctgcaggtaccggtccggaattcccgggtcgacccacgcgtccgcggacgcgtggggttttataaagagttactttggcaaaatggaaaatccggcgaagagagtgttgatgacatccaacggcgacgaggtgtcccgaaacatcgctttccatctagccaaacacggttgcaagttggtaatgatgggaaatgagggttccctaaggagcattgtagacaagattagagattccattgagggagccttccctgccgatgttatagcactcgacatggaatctgactctgaagttgcttttcatgccgctgtccaaaaggcatgggaactttccggccatttcgatgcttttctcaactcttatacctaccaaggaaaggtgcaggacattcttcaagtctctcaagatgagttccacagaatcacaaagatcaatctcaccgctccatggtttctcttgaaggctgtagccacagggatgaaggcccatgggtcaggagggctcattgtcctcatggccactatcgccagcggagagagggcgctttaccctggcgctgatgcctac

SEQ ID NO: 124707 - DNA, 455 bp, Arabidopsis thaliana
aaaaagaaaatcgagatcggaaactccgcacggttcccgcctcaaccaaatcaaaaaccctaatttccccaccaatcagatcctccacaattatcccaccgacgaatcctatcaatctctctagatgactgaagatagcagcaaatcagtgtcggaacaaacccgacccgttttgagtgatttgacgaatcttccaaagaaaagagggatttcatcgattttgggtgatttgcttgatgaatctggtaagaccgttgctcatgaagtttcaaaagagaagttttcaaagaggttgtgtttagtcgtagatgatttggttaaggaaaatgctacacctttggatacaattcaagggtcttgttcgtttgataagaatacttctggtgatgctgttgacaaagaagagtatcatgatgctgtaatggaattctccagtggagattgcaaagcattga

SEQ ID NO: 124708 - DNA, 749 bp, Arabidopsis thaliana
tccgcaatttcgggtcgacccacgcgtccgaagatttgctctgtccagagctccaaatttcaagaacataaacactacacacaaaacactgaatacgatgttgcttggaaagagacaacgaccaccgatcaacagaaccacaagtctatcggagataaagttcgatctaaaccttcccagcgagtcagagccatcaaatcaacagaagccaaccgttgcgagcccgtacggttccaacggtcaagctgtaacagcagccgttgatcaaaaccgtgggttcttagatcaacggctcttatccatggtcacaccgagaggtaacctgaggagacactcaggcgatttctccgacgctggacatttcttgagatcttgcgcactttgtgaacgccttcttgttcctggccgcgacatctatatgtataggggagataaggctttttgtagctcagagtgcaggcaagagcaaatggcacaagatgagaggaaagagaaaggtaaatcggcggcaccggcgaaagaaccggcggtgacagctcccgcgagagcgaaaccccccaatgggagagctgcacccgccgtgtaatccccattttcatatactttctagctctatatatgtgtgggttgctatggggttgtctatgaattatcaggggtaatacatttttgaagctttaggcgtttaaaaaaaaaaaaaaggcggcccctcttaaggatcccagcttacgttcgcgtgcatgccacgc

SEQ ID NO: 124709 - DNA, 461 bp, Arabidopsis thaliana
acttcccttgagcttccttggtgttcttcgtattgtcgtcgcgactgagagaaggccacaaaagcttcgtttatttccttcagatccgatatagtgagagagagagagagagaggcagcttacggcggataaatatgagcagcagcaaggtcggcggcggagcaaggaaaggaattcaggatattccgtcagggtctagaaaaatagtacaaagcttgacggaaattgtaaactctcctgaggctgagatctatgctatgcttaaagagtgcaatatggatcctaacgaaaccgttagtcgcctcctctctcaagatccatttcacgaggtaaagagcaagaaagaaaagaagaaagagactagggatatatcagattctcggccgcgtggtgctaataacacctacaaaccgggtgctagaggtggttctgctcgctacgccggacgaagtggatctacc

SEQ ID NO: 124710 - DNA, 839 bp, Arabidopsis thaliana
  unsure (1)..(839): unsure at all n locations
nnnnnnnnnnnnnnnnnnatacgactcactttagggaaagctcgtacgcctgcaggtaccggtccggaattcccgggtcgacccacgcgtccgcgagtaacgacgagagatgcttcttcaggcggcggtgcagaaccgcaatgttccactggcttcttccgcctcctactctcgtctccttcgctgcagatctcctgtcgtctccgtagctgctctctcgaagaagacggcagcaatcgtgtgctccatctcccaggtttatggctacggcacggtggactacgagagaaggccgattgtccagtggaatgccatctacaagaagatttcgctgatggagaagccagagcttggcgctgcttccgtcttgaatcagtgggagaaagccggccgcaagcttaccaagtgggagctctgtcgggtcgtcaaggagcttcgcaagtacaagcgtgccaaccaagctctcgaggtgtacgactggatgaacaacagaggcgaaaggtttcggttgtctgcaagtgatgctgcaatccagctcgacttaatcggcaaagtgcgtggcattccagacgccgaagagttcttcctccagctccctgagaattttaaggaccggagagtttatggttccctcctcaatgcctatgtgagggccaagtcgagagaaaaggctgaagccctgctcaacaccatgagggacaaaggttacgccctgcacccgcttcccttcaacgtcatgatgactctctacatgaacctcagggagtatgacaaagtcgacgctatggtcttcgagatgaagcagaaagntatacgtctcgacatttactcctacaaca

SEQ ID NO: 124711 - DNA, 1039 bp, Arabidopsis thaliana
  unsure (1)..(1039): unsure at all n locations
cgccggcannnnnnnnnnnnnnnnnnnnnnnnnnnnnnnnnnnnnnnnnnnnnnnnnnnnnnnnnnnnnnnnnnccgggcgtgcgcccacgcgtccgtacggctgcgagaagacgacagaaggggagagcgcatcagataaacggctaaaaagcaaattctctggaagaagaagaagacgaagatgcaaccgacagagacgtcgcagccggcgccgtcggatcaaggccgccggcttaaggatcagttatcggagagtatgagcttcagtagccaaatgaagaaggaagacgatgagttgtcgatgaaagctttgtcggcgttcaaggccaaagaagaggagatcgagaagaagaagatggagatcagagaaagagttcaagctcagcttggtcgtgttgaagatgagtccaagcgtctcgctatgattcgcgaggaacttgaaggttttgctgatcccatgaggaaggaagttactatggtgaggaagaagattgattctctcgacaaagaattaaagccattggggaatacagttcagaaaaaggaaacagagtacaaggatgctcttgaagcattcaatgaaaagaacaaggagaaggtggagctgatcaccaagctacaggagttggagggagaaagcgagaaattcaggttcaagaagctggaggagctaagcaagaacattgatctaaccaaaccttagtgttggacgagcagagtcgctgggatttggctattcaaagttctaaaaaagtcactttttagagtattttcattgttcttttatgattctagtaatatatataatttataaaataaaaagtaagaagatatgtgtttgaactagatgttgcaaagaaaatgtaacaaagttacgatggcactacattatcgacgtgattggcagaattgtaatagtaatgtaaagaaactatgtttgttccggagcattttcgaaaaaaaaaaaaaaaaaaaccccccccccagcggccgctatagaggatccaagcttacgtacgcgtgcatggtacgtcaag

SEQ ID NO: 124712 - DNA, 1214 bp, Arabidopsis thaliana
  unsure (1)..(1214): unsure at all n locations
nnnnnnnnnnnnnnnnnnnnnnnnnnnnnnnnnnnnnnnnnnnnnnnnnnnnnnnnnnnnnnnnnccacgcgtccgcggacgcgtgggcggacgcgtgggcgttattatctcatcttggtccgaaaactatggagatccatctgaaaacaaagaccttcttacccagttcaagaacgctgcatctgccattgcttctgatgagaagatcgcattactcggtgctattcagtctctgtttgaagggtccatgtacacctttgtgtttctctggactcctgctttgagcccaaacgaagaggacattccacatggtttcatatttgcaacattcatgctggcttcgatgcttggtagctccattgcctctcgtttgttggcacattcgtctccaaaagtagagagctatatgcagatcgtatttgtgatatcttctgctgctctaatgcttcctgttgtaacaagcttcttggtggcgccctcaggtgtaaaaggtggaagcatatccttctctggatgcattcagttaatgggtttctgcacatttgaagcgtgtgtaggaatcttctggccatctataatgaagatgagatcgcaatacattccagaggaagctagaagcaccatcatgaattttttccgcatcccactcaacatctttgtctgccttgtattatacaatgttgacgcgtttccaatgaccgtgatgtttggaatgtgctctgtattcctttttgtggcctctatattgcagaggaggttgatgaatgtagccgagatccacaagtcaagatcacaagagtggtcagcagaaaaggagatgacctcagaagctgaccctctaaacccataataaccaaatcaaccatgacataagaaaaaagaagaaacgccgttccgtttctcttgatgattttcctacttgtcttaatatgttcgttggtcataaagtctttccacttgtttagttatatttggattttgtgccttcaccagatgtagcaaacacaccctaatacctctgcacgtcagcttatttgggctttggccactattcttcttgaatctttcaactttttttttatgtgcgtcaaaaacaatctttataagtcgattttggccctaaaccataaaaaaaaaaaaaaaaaaagggcaggccgctctagaggatccaagcttacgtacgcgtgcgtgcgacgtcntagctcttctatag

SEQ ID NO: 124713 - DNA, 639 bp, Arabidopsis thaliana
  unsure (1)..(639): unsure at all n locations
cnnnnnnnnnnnnnnnnnnnnnnnnnnnnnntggtacgcctgcaggtaccggtccggatttcccgggtcgacccacccgtccgccgcacgcgtcccgcccacgcgtcccgcccacgcgtccgtacgggctgcgagaagacgacagaaggggattcaggacatggctaaccgaacagacaactcgaatcgctgttcgaatggtaaaaagccaaatgatggaatgagactcattatagcgacattcgtaggaatagttgtcggtttcttcttggggatatctttccctacactatcactaacaaaactaaattttccctctggcattcttccctctgttgatattacttacgtagaagatgagacaccagaaacatcgagtgaaacgcttttgcatacatggtcatctaggggtccgttacatggggctaattcaagtgatgcaccgcattggaagatttgggttccatcgaatccccgaggtgcagagatgctgactcctggtatcattgcacctgaatcagattactacttacgcagactttggggattacctgaggaggatgttcctgtgaagccaaagtatctcattgcgtttactgtcgttttggcagaagtgacgttgtgcttggtcaagagttt

SEQ ID NO: 124714 - DNA, 643 bp, Arabidopsis thaliana
  unsure (1)..(643): unsure at all n locations
agcaaagctccatcctttgtggttgtgtcgtagatagccattcgagtggttaaaagttaaaaacttttatgtccacttgaatccttttttgtttctttttggattttatctgatcactcgttttgtgtctctgaatctctatcccgtggattcgcatctggatttgtttttttttcatttttattcgagcggctaacctttctcggatccatctgatatcgattggattctctctaatcaatcgttgaaatggcggatgcgtggaaggatttagcttcagggactgttggaggagctgctcaactagttgttggtcatccatttgacactatcaaggtcaaacttcagagccaaccgactccagcaccaggccaacttccaaggtacaccggtgcaatcgatgcggttaaacagaccgttgcttctgaaggnaccaaaggtttgtataaaggtatgggagctccacttgcaancgttgctgccttcaatgcggtttgttcactgtgaaanggcaatggaagggctgctaaggctgaagtggagtncctttgnccattagcaacagttgtggcggtnagngntggttcgcggtcgtcctgctgccaccgngtgnnaggcggtnaancagggtacgggcnncagc

SEQ ID NO: 124715 - DNA, 1301 bp, Arabidopsis thaliana
  unsure (1)..(1301): unsure at all n locations
gaggctgaccgcctgcagtccggccggattccgggtctaccagcgtcgatggatttgacatctcgggttgctgctggtgatcatctgggggatcttagaatcaaaggacggaaagtagtaagaccaatgctgaagcccagcaaagaaaatgatgtatgtgtcatcggggttggtatgcctgtggatgtgtggtggtgtgatggatggtgggaagggatcgtggtgcaggaagtttctgaagagaaatttgaagtttacttgccaggcgaaaagaaaatgtctgctttccatcgtaatgaccttagacaatctcgggaatggttggatgatgagtggctaaacataagatcaagatctgatattgtgagttctgtcctatctttgacgaagaaaaaagagatggaggtgaaacatgatgagaagtcgtctgatgttggtgtttgtaatggtaggatgtcaccaaagactgaggctaaacgcaccatctctcttccagtagctacaaccaaaaagtcactacctaagcgaccaattccagatcttctaaaaagatgtccctagtcacttcttgaccttaaaagtgggaaaaatccatcgagggagcggaatcgagttgtcagttgctgtccacacgatcctagcttgaatgatggtttctctagtgaaagatctttggattgtgagaactgtaagttcatggaagatacttttggctcttcagatggacagcatttgacaggtctattaatgtcgagatgatcatcagcttggacctagttacttttcttcttgtgaggtacatattaccctgatgggcatctgctcaatgcgattttgggttttaagattactggtaactcgcaagatttcttgggatggattataggattagctcgtaatggcatccaaattcgtttgtgtacttatgttgtgacagtagggcatagtgctttaattcaatcagcaaaattttggatgcagtagaagtaggtaataataccattccctcgctagtgttttaggcttaatcagtgtttttctcttagaattaagttatcattttactctctttagcatagagatgattcgttttctttttggtctggtgggatctttcttttcatgtaacctatgtaacattaaataaaattatcttgttaccttgatctcaacgccgccgtctatatgatacgtacctttcttacttgttgaaaaaaaaaaaaaaaagnnnnnnnnnnnnnnnnnnnnnnnnnnnnnnnnnnnnnnnnnnnnnnnnnnnggnnnnnnnnnnnnnnnnnnnn

SEQ ID NO: 124716 - DNA, 511 bp, Arabidopsis thaliana
  unsure (1)..(511): unsure at all n locations
atcaggagaccttgcccncngngcccccattgccngncttttatgccgngntgaccnccacttggcccagtacttttccccctgggnggtccatattcccccngggggcctccgccccaagccgatttggggctttaaggattcctggtaaccccgcaaggattcctggggatggattatagggattagctcgtaatggccatcccaaattccgtttgtgtacttatgttgtgaccagtagggcatagtgctttaattcaatcagcaaaattttggatgcagtagaagtaggtaataataacattacctcgctagtgttttaggcttaatcagtgtttttctcttagaattaagttatcattttactctctttagcatagagatgattcgttttcttttggtctggtgggatctttcttttcatgtaacctatgtaacattaaataaaattatcttgttaccttgatctcaacttcattgtctatatgatacgtacctttcttacttgttg

SEQ ID NO: 124717 - DNA, 406 bp, Arabidopsis thaliana
gtcctagtcctgttggtactttgaatgtatcatacgcatgtgacatgaaaggtgactgcaaatctagtccagattctgttttggctgttacagatgcttctatattcaagggtgacgaagatggttcttcccatcacattaaaaagggttcacttattgaagttctttctgacgatagtggcatcagaggttgttggtttaaggctctggtattaaagaaacacaaagataaggttaaggtccagtaccaagatattcaggatgcagacgatgaatctaaaaagctagaggaatggattttgacatctcgggttgctgctggtgatcatctgggggatcttagaatcaaaggacgggaagtttgtgaggcccattgctgaagcccagcaaagaaaatgatgtatgt

SEQ ID NO: 124718 - DNA, 426 bp, Arabidopsis thaliana
ataagtgataatctattaatcatctaggtggcagaggcagcatcgttgagaacgaagaagcttgaaaaagttgcgagctcagagaatctggaagtagcaaaatttggcggctttaactcagcaatttgttctgtacatggtattttgagaagagagcattcagctcacagttacgctctgcctatccagcttctaaatctactcactttggtcgagtcatggcttcttctggatctgaggcaaaagctaattacgcacccatatctaccaatgaacctgttgtgtctgttgattggctccactctaatcttggagatgctgatataaaggttttggatgcctcatggtacatggcacatgagcaaagaaatccaatccaagagtatcaagttgctcatattccaggtgctctcttctttgatttga

SEQ ID NO: 124719 - DNA, 622 bp, Arabidopsis thaliana
gctggaattaattaagtactctcttgttttctaattcaatcactggagaaggaagacttgttggtttcaccaaaaagtctcttcttcaatttttttaattcagaggcagtagtagtacactcagatataaaagaaaccaaaacgatcggaatcttcttccacttgttcttttaaaagattaaagcttttttttttctcttaaagcaaaaaaaggaaaactttccccctcgcgtctctctcttttgacctcacattcgctgaatcactcttctgggttttttttttttttgcttttttctttgccctagatcttaaagacaaggaggatcagattatacttttttgagatctgggttcggacaaagattctgtctttctgcattctctaccgtttcgattcagctcgaggcaatgccaatctaaaaggagtaggtgaaaaaagattcaatttttgtatgcctatcaattagaaaggagaacaggggacgtggttagattggtttcaatgggtgagacgcagaagattttgcaagggccacgtcaccacacatctctgaagaagcccttatgggttgttttgacagtctcagtgaccatcatgcttctaatctgtactcacatg

SEQ ID NO: 124720 - DNA, 514 bp, Arabidopsis thaliana
cactactctagggaaagctggtacgcctgcaagtaccggtccggaattcccgggtcgacccacgcgtacgattttgagagggagaaaaagggcgatcgattagggtttttgtgttttcgtcttagtatcgaagatgatcggagctgtgaactcggtggaggctgtgataacgtcaatccaaggtttatcggggagtccagaggatttatctgcacttcacgatcttttgagaggagctcaagactcgctccgagccgaaccaggtgttaatttctctactcttgaccagctcgacgcctcgaagcactctctcggttacctgtatttccttgaggttcttacctgtggtccagtgtcgaaggagaaagctgcttatgagataccgataattgcacggttcatcaattcttgtgatgctgggcagatttcgtttggggagctataaatttgggtctctttggaaatttttgaaagaccttgttctagccctgggaaacccgttggaaggattggg

SEQ ID NO: 124721 - DNA, 564 bp, Arabidopsis thaliana
  unsure (1)..(564): unsure at all n locations
atgatatnnnnnnnnnnnnnnnnnnnnnnnnnnnnnnnnnnnnnnnnnnnnnnnnnnnnnnnnnnnnnnnnnnnnnnnnnnnccacgcgtccgcacttctctgcatatatttgcttctccgtttctcatttctcaactctcaaactcaaatcacttcctttgtctcagtgactctagtctatctccaatggctgaacgagtctatcccgccgattcaccaccacaaagcggacaattctccggcaacttcagctccggcgaattccccaaaaaaccagcaccaccaccatcaacatacgtaatccaagtcccaaaagatcaaatctaccgtataccaccgccggaaaacgcacaccgctttgaacaactctctcgtaaaaaaaccaaccgcagtaactgtagatgctgcttctgctcattcctcgccgcggttttcatcttaatcgtcctcgccggaatatccttcgcggttctctacctaatctaccgtcccgaagctcctaaatactccatcgaaggattctctggttccggcttcaatctgaaatcaacatcttcgatttc

SEQ ID NO: 124722 - DNA, 367 bp, Arabidopsis thaliana
tgaacctatagagccaacgaaaccagaggacagtgaacaaagaattgtataattcgatctcaactcgttcctttgttgattctttactccgactattatgaggattgtacgtgcgacggagacgttctcggcggagcttaaagagttcatgtgcgccgctgtgcaaaggaggaaagacgacgacggattcagaggctctcgtggcggtggtaaatctagaaatgccatggatcttgattctgacgccggaaacagattggtttgtgttactggtggtgtttcttaccttggtcgtgccattgttaaacgtcttcttgttcatggatactccgttagaatcgtcgttgattgtccagaggacaaagag

SEQ ID NO: 124723 - DNA, 944 bp, Arabidopsis thaliana
ttttaggtgccactatagaagagctatgacgtcgcatgcacgcgtacgtaagctcggaattcggctcgcggatgcattgtacaaggtgaaagaccccgaggttaaatgtttcattgagaaatgcttggccaccgtatcgcttagagtctctgctcgtgagttactagatgacccttttctccgtatagacgatggtgagtttgatttaagatcagttgatatggaagattcggtcgggccactctataggcagccgcaccatcttcctgactactacaattacccgtcgaatagtagctctttgaatcgtcagtactcaaatggcaactacccgtcgaatagtagctcattgaatcgtcagtactcaaatggttataatagtcatcacgagtatcagaatggatgggcgtataatccagctgagacagaggagactcacggcatcgagctctttgaatctcgaaacaatgatgatcaagaagaagaaaagaaatctggtaatgttgacataaccatcaaagggaagaggagagatgatggtggcttgttcttgcgtcttaggatcgctgacaaagaaggacgtgtccgaaacatttacttcccatttgacattgagacggacaccgcattgagcgttgcaacagagatggtagcggaactggatatggacgatcatggagtcacaaaaatagccaacatgattgacggtgagatatcttctcttgtacctagttggagaccgggacctgaattcgaagaatgtcttgcggctgcggcggcggcaaatgctgcgagcatttgcaacaactgcgtatcaaaccgcacctcaatgggctcggtgaatggatttcctgagaaccaatcctggggcaaatgtgatacaatgttgcagaaacgggtgcggtgagactcatggtcggtttgaagagatcacgatccagaga

SEQ ID NO: 124724 - DNA, 519 bp, Arabidopsis thaliana
ctcacttttcctcggatgcattattgtccgtgagatcagagattcaccctctttagattttgcgcagaaacttttgcccacaattttgtattcgtcaaatctgagctgagatctctagagtgagaaaatgagcatcactaatgaagaagcagtgaagcaattgcgtgctttaatggaagatgttgatgattcactcagagagtcgtatcggaacattcatcaagggtatccgacagagaatttgttacgctttcttaaagccagggatgggaatgtccagaaagctcataaaatgttgctcgagtgtttggaatggaggactcaaaacgagattgacaagatactaactaaacccattgttcctgttgacctgtacagaggaatcagagacacacatcttgtcggtgtgtctggttactctaaagagggtctccctgtcattgccattggtgtggggcttagcacatatgataaaggccttcgtcactactatgtacagtctcacattcaaatgaatga

SEQ ID NO: 124725 - DNA, 499 bp, Arabidopsis thaliana
cacgcgtccggaatctgatttctccacaaaaaaactacatcgatcatcgataatagatcgtactacaatactatattctcaaaacgatggtgtttccggcgtgtgtacagtgcggaacaagacaaaacccctgtcggtgcaaagtggttggaccaactttagggttcgtggcttttctgataaccggaatcatcgagtggccagttggtgcggtggtgtatatctttaaacacgccaagggtcgtcgtataatgggtcatccggccagaaaagtttatcccaaagtctctcgatctattcccatttgactttcttgtcattaattataatcatgctttgtatttgcttgacaaataatgattccactttttagatatatgtgatcacataagggatctaagtccagaattagtatccgttataatgaccaaataatgttatgttaaaattgatactttgtttcttggctttcaagttgatttacttgatgtgacccttt

SEQ ID NO: 124726 - DNA, 1003 bp, Arabidopsis thaliana
  unsure (1)..(1003): unsure at all n locations
gatgtactccgcggcccggggggggaggattcgccgagctcctatacgactcactatagggaaagccggtacgcctgcaggtaccggtccggaattcccgtgtcgacccacgcgtccggggggaaagagcagagaagagagaagaggaagcttgtagaaatcgatggcgacgatagtgcagtgtctttcttcctgtgcgaccctcgaatcccaattcaaagtcctttcgcttaagggaatctcttgttcgtcaccatcttcttccttctccaatcgtcgtggtgcttcggctaccttatcctcttcccttagcttctctcagagcgtttctcaatgcgtcgccttctcaaccgggaatttgtgggtacagaagccaatgaggcaattgattgtgtgtgaggctgctgctcctaccaagaaagctgattcagctgcaaagagagctcgccaagctgagaagaggcgtgtttacaacaaatctaagaaatctgaagcccgtacccggatgaagaaggtcttggaagcacttgaggggctcaagaagaaaactgatgcgcaagctgatgagattgtgacggtggagaaactgataggagaggcttattctgcaattgacaaagcagtgaaggttaaagcactacacaagaacactggtgcccgtaggaagtctcgattggctaggaggaaaaaagccgttgaaattcaccatggttggtacgtcccagacgcagctgctgcagcaccatcagaagctgtgcccatggctgcataagaacatggggataacggaaatttgtttttgttactagatctttcaaaatcaaaatctgtttctttataatgtacatttagtcgctttcagactcttcgcttgttaagttcgatctaagcattttgtcttctactctaaaaaaaaaaaaaagggcggccgctctagaggatccaagcttacgtacgcgtgcgtgcgacgtcatagtcttctatannnnnnnngtcctaaaaa

SEQ ID NO: 124727 - DNA, 593 bp, Arabidopsis thaliana
agaaacagctctttgtctctctcgactgatctaacaatccctaatctgtgttctaaattcctggacgagatttgacaaagtccgtatagcttaacctggtttaatttcaagtgacagatatgccccttattcatcggaaaaagccgacggagaaaccatcgacgccgccatctgaagaggtggtgcacgatgaggattcgcaaaagaaaccacacgaatcttccaaaatcccaccataagaaatcgaacggaggagggaagtggtcgtgcatcgattcttgttgttggttcattgggtgtgtgtgtgtaacctggtggtttcttctcttcctttacaacgcaatgcctgcgagcttccctcagtatgtaacggagccgaatcacgggtcctttgcctgacccgcccggggttaagctccaaaaaagaaggtcttagggcgaaacatcctgttgtcttcattcctgggattgtcaccggtgggctcgagctttgggaaggcaaacaatgcgctgatggtttatttagaaaacgtttgtggggtggaacttttggtgaagtctacaaaaggcctctatgttgggtggaacacatg

SEQ ID NO: 124728 - DNA, 524 bp, Arabidopsis thaliana
aatacgactcacctagggagagctgcgtacgcctgcaggtaccggtccggaattcccgggtctacccacgcgtccgaacctttgtagagagaacccatagttcgataaaacattctttttgcaactgagacttggcaacttggttttactcaaagtaagatttcttcttgttgatggtgataagttcaatatgatgaaaagtttggctagtgcggttggagggaagacggcgagggcatgtgatagctgcgtgaagaggcgggcacgttggtattgcgcagctgatgatgcctttctttgccatgcttgtgacggttcggtccactcggcaaaccctcttgctcgtaggcacgagagagttcgcttgaaatcggctagcgccggaaagtatcgccatgcctcgccgcctcaccaagccacgtggcatcagggatttacaccgtaagctcgcgcccctcgccttggatggccagaagaacccaccacaacgggtttcttcatgaatccttgtgcccgacaatgtc

SEQ ID NO: 124729 - DNA, 565 bp, Arabidopsis thaliana
acccacgcgtccgtctcacttcttttcaacgacacaacacagaaactattttttcctttcgatttttgaatcccatagacgttacgttgacgagaaatacactctcatcagaaaatcaaaaaaaattctcatcctcagaaaataaaataaaagcttcaacttttttctgggttttttttttttagaatttggttttgtgtttttgatcttgaggttgtaaaatgggtgaatctgcagttctggttcattcttattccttcgcagctcctattactcgtaacgattctcatgaggagaatacgattcatgcgttaagtcaatcaatatcatttgggaaattcatgacagagaatctagaatgggggaaatggtcaagcttttcacataaaaagtatgttgaagaagcagagaaatactcacgccctggatctgttgcacagaaaagagcccgctttgaagctcattacaagagaacagctgaagctaagaaagctgcaacggaagaacaaccatccgttactcctgctgaagttttgcttcatactttggaaacacagcctcctcc

SEQ ID NO: 124730 - DNA, 1813 bp, Arabidopsis thaliana
  unsure (1)..(1813): unsure at all n locations
aggaaccggaaaaaggttcaaaaaaggcaggccgatgtcggcggcgagatcgtttttcgcctgtgcttctgttggttcgacgaaggtttacgtcgccggaggacatgatgatcagaagaacgctctccgatcggcggaagtgtacgatgtagagaaagacgagtggtcgatgcttcctccgatgacggaaggaagagacgagtgtcacggattctcgatggcgacggatcctggattttgtgttttgagcggttatggaacggagacgcaaggccaattccgatctgacggcgagatttacgatccgattacgaattcatggtcgacaatcgagaatgtctggccgtttcccgatttgagtccgagaggtcgcaccgccgcggctgctgctgaattccccggagattttagaggttgtcggttatggtgttttattgatagcgagagacagagtcagcctcattgggaagttgaagacgattcgatgaaatggaaggtaattatggatacgattcggcttccggtgacgacgatgacttcggtttttgctggaagtttgagtggccaagcggtggcaatgattggcggtggtggtgaagaaagtggaacgatgatggtgaagacgacggcggagaagaatggcgggaagtggagccacgtcaacactccctctggtttttcgagtcttcctttctcgtgttcttcaatctacgtttgaagaatctctgttgtagaacactttgacttaagtcaacgttaatagttaatacttaatacataaatcaagtgagagtgggtgatactttaatctgggtttttctttatttatacaacatcaaatcttagtatcgatgtaaaaagaatggtattttgataattgaacaaagtcacacaatgaaaagaatggctaggagaagtgttcaaagtaattgccagtcatcttcatgttcctcaccagagatctctgtagatgtctctgtactgctgctggtttctgcaatcccgcagtcatttcttctgtgagattgagtcacagtgaagagaggagcacccattagagtctccggctagctttgttgctcggatacagaaatcatcaaaatcatctttgtgctggcaatagaatccgagagctagtgacgggtcgagtgactcaagtggaacataacggagggtattgcaatggtaagacgatgtgccaacatcttgattttctttcttgactgtcacttaccttaccaacccattaccgataaggctcaatcagtgagactgaaatatgatatgaagcacatggactgagtaatatcagtccccaaaccaattagacaatagataaatgaatgtgatggagacaatataaggaaaatatatatggaccaccttatatgtctcaaacttcagatcgaagtgttaagttttttcttggaactacaataattctagtttgattctaaaataaagatttataaggagtgatcaagaaaacctgttgaacatcatgcggatcaaggtagaaacctttgtcttcttgaactccaactatgtaagttgatgcacctggtttgccgcccaaaatgccgaggctttgagggaacgtgaaagtggctatcagagatggaatgtacctggggttcactctgtcaagcccgagaaccagagggaccaagagaagaattggcggccactcagtttctccttctgaaaattccaaacaagttttggtcggacgcgtggnnnnnnnnnnnnnnnnnnnnnnnnnnnnnnnnnnnnnnnnnnnnnnnnnnnnnnnnnnnnnnnnnnnnnnnnnnnn

SEQ ID NO: 124731 - DNA, 561 bp, Arabidopsis thaliana
catcattcagtctccttctatcctctaaaactcttctaaagaagaaaacagaggaacgagaagaagaagaagagtgaacaatgaagatcggtgcagggaacacgaacacaaaactaatccttcttcatccttacatccaaaaacaaacgagcacgactcgtttatggcttctcgctttcgtctctttcttcaccatagtttttctcctcactcttctctacactagagacacaatcccttccaaaaacacctccgtcgccgcagccgtagctgcagtcgtcaccggaggatccacaccttcagcatcatctcccatctccaactccaacttaccaactagtgcaatcaacgctttgcttcactacgcgtcaagatccaacgatagtttccacatgtcttacggagagatgaaatcaatctctgacgtcctccgccgctgcgctccaccgtgtaatcttctcgttttcggactcacacacgagactctcctttggaagtcgttaaaccacaacggtagaacagtgttcatcgaggagaatcgttactacgcggcttacttcg

SEQ ID NO: 124732 - DNA, 917 bp, Arabidopsis thaliana
  unsure (1)..(917): unsure at all n locations
agnggggggaaatnnngccggatttcggcttgatgttacacggccttgnaacccngcaannanccgggcttctcnccccaaactcggtgcaaaagaggtcccttaccctagccgttgtcgtactggtcgccaatccaaccagttctgataaagacgcggagagccgagtagagaagccattacctatgtatgtgccacgagacgagcaatttgaagagtcgaagcaggactcttttgctgcagggaggctaagagcagtcttacaccacctaattccgtcgctcaaagccagtattgtagctgaggactttgcagacttcggcgagatcgatcgtctttataaagaaggcttgttactcaagttagggtttcaagatgacatctttaagaagtttcctctccctaaggtcgtagttgataccctccaagaatctactaaaggactcctcaaatacgacactcccaaaatattatcgaaggataaaaacgcatggttaagagatgacgaattcgcacgtcaagccatagctggaatcaatccagtgaacattgagagagtcaagacttttccaccggtcagcaatcttgaccccaagatctacggtccacaacactccgctcttactgacgaccatatcattggtcacctcgacggattctccgtacaacaagcgttggaagagaatagattgtatatgttggattaccatgacatattcttaccgttcctagaccggattaatgcgctagacggacgcaaagcctatgctactcgaactatcttcttcttgactcgtctaggcacacttaagccggtagccattgagctaagcctccctccccatggtccaaaacatcggtccaagcgtgtgcttacacctccagtcgatgcaacctctaattggatgtggcagctc

SEQ ID NO: 124733 - DNA, 522 bp, Arabidopsis thaliana
  unsure (1)..(522): unsure at all n locations
ttntgggacacaagcatggtgnnaaaatcacacctgcctgcattcnnccggccctntcttgcgcataaagttccccaaccggatatgaatgggncgcttacaaggacaatggcagcaatcctcacggtnccttcccacccattatgaaaaggttcagatgctgctgagtgaccggttccccgggttttacatggttcctgagagtggaccgtggaactatagcttcactggagtgaagcactcgttgagcatgaaatccagtgtcaaactcggatccccaaaggagttctatcacgaggagcatcgacccactcatttcctggagttcagcaacatggaggaggctgccattacagagggagatcgcgaggacccatttacttgagatatactcaattttcttaccgtgtgtgtgatttagctttattttgcagtatagacttgtaagatgttgtactgtcttgtgctttcctcagatagatagtaaggtccctaaatcttaaaaagatggtttgccactat

SEQ ID NO: 124734 - DNA, 1297 bp, Arabidopsis thaliana
  unsure (1)..(1297): unsure at all n locations
gcgtcttggccagctagcgaaatggaaaactgcagaagaggttgctgcacttntccnatctctccctgttgaagaacagccaaagcagattattgtnacacggaaaggaatgttggntccccttnaggttcacttgcttgatttccccaacattgtcattaagggaagcgagctgcagctgccgttccaggcttgcctaaagatagagaaatttggtgacctgattttgaaggctacagaaccgcagatggtcttgtttaatatatatgatgattggttgaagagtatttcttcttatactgccttttcaagacttattttgatccttcgtgcgcttcacgtgaataatgagaaggctaagatgttgttgaagcctgacaagtccgttgtcactgagccacatcacatctggccctctctcactgatgatcaatggatgaaggtggaggtagcacttagagatcttattctttctgactacgcaaagaaaaacaatgtgaatacctcagctctgacacaatcagagatccgagatattattcttggagctgagattactccaccctctcaacagaggcaacagatagctgagattgagaaacaggcaaaggaagccagccagcttactgcagtcacaacaagaactacaaatgttcatggtgatgagctcattgtcaccaccacaagcccttacgagcaatctgcattcggttccaagacagattggcgtgtacgtgcaatatcagccactaatctttacctttagggtcaaatcacatatatgtgaactcagatggcataaaggaaaccggatacaccttcatcatgccaaagaacattttgaagaagttcatatgcgttgcggatcttcgtactcaaattgctgggtatttatatggtattagtcccccggataatccccaggtgaaggagatccgttgtgttgtgatggtgccacagtgggggaaatcatcagctagttcacctgccgtcatctcttcctgagcatgatttcctaaatgatcttgagcccttggggatggttgcacacacagcctaacgggctgccccagctatcaccacaggatgtaacctctcattcccgtattctggagaacaacaagcaatgggatggagaaaaatgcatcatcctgacctgcagtttcactccgggctcctgctctttgacgtcatataagttgacccaaaccggatatgaatgggggcggcttaacaaggacaatggcagcaatcctcacggttaccttcccacccattatgaaaaggttcagatgct

SEQ ID NO: 124735 - DNA, 506 bp, Arabidopsis thaliana
atttctccggtccgattctcccaaatctctgccagaaccctaaaaacactctgcaggagctttaccttcagaacaatggcttcaccgggaagattccaccgactttaagcaactgttctgagctggtttcgcttcacttgagcttcaattacctctccgggacaatcccttcgagcttaggctctctatcgaagcttcgagatctgaaactatggctgaatatgttagaaggagagatccctcaggagctcatgtatgtcaagaccttagagactctgatcctcgacttcaacgatttaaccggtgaaatcccttccggtttaagtaactgtaccaatcttaactggatttctctgtcgaataaccggttaaccggtgagattctctaaccggttaaccggctattcgacagagaaatccagttaagattggcacagttacttaaaccggaagggatttcaccggttaaatcgttgaagtcgaggatcagagtctctaaggtcttg

SEQ ID NO: 124736 - DNA, 468 bp, Arabidopsis thaliana
cttttaataccttcaaatttatcaacaacaaaaagccaaagaaacacaatgctaaattcttcatatctatccttcgcacttatctttttctgctgcattttgttctccgctctcgcttcgtctttgcccgtttccgaccctgagcttgttgtcgaggaagtacacagaaaaataaacgagtccatatcaagaaggaagctagggttcttctcgtgcgggagtggtaatccaatcgatgattgttggcgatgcgacaaggattgggagaaaaaccgaaaacggttagcagactgtggtatcggttttggcaagaacgctattggcggtcgtgatggtgaaatctatgtggtcacggatccaggaaacgatgatccagtaaaccctagaccgggaacactaagatacgcagtcattcaagatgaaccgctatggatcatttttaagcgagacatgacgattcaactaaaa

SEQ ID NO: 124737 - DNA, 670 bp, Arabidopsis thaliana
  unsure (1)..(670): unsure at all n locations
atgatacgccagctctatacgacttacttagggaaagctggtacgcctgcaggtaccggtccggaatttccgggtcgacccacgcgtccgcccacgcgtccgtctctctctgtctcttgtcttatcatttatctctctaacggcgaggcaatgggttttccggtgggatattctgagctacttctcccaaaaatctttttctacttgttatctttcttaggtttgatacgtaaactcatctccacaatgttcaagatcattggtctaccagatttcttagaacctgaaccggtttcaacctcatggcccgacccaccacccacgttgaccaaacctgactcagcagcaatactagccggagagatgttaccggttgttcgattctcggatataaaccgaccggaatccgagtgttgcgcagtgtgtctctacgatttcgagaacgacgacgagatccgacggctgacgaattgtcgacatatatttcatcggggatgtttggaccgttggatgatgggttataatcagatgacgtgtccactttgtcgtacacagtttatacctgatcatcttcaactggagtttaatcaaaggctctggtctcaatcttctggctgttctctcaattcttgtnanaacactagggggtaatntntcaaaaaaaaanggc

SEQ ID NO: 124738 - DNA, 957 bp, Arabidopsis thaliana
  unsure (1)..(957): unsure at all n locations
ccggcttagacggcgaggcgccgaggcgcgcgcaaaactgtgtccgtctctctctctctggcttttgtcttagcattcatctctctaacggcgaggcaatgggttttccggtgggatattctgagctacttctcccaaaaatctttttctacttgttatctttcttagggttgatacgtaaactcatctccacaatgttcaagatcattggtctaccagatttcttagaacctgaaccggtttcaacctcatggcccgacccaccacccacgttgaccaaacctgactcagcagcaatactagccggagagatgttaccggttgttcgattctcggatataaaccgaccggcatccgagtggtgcgcagtgtgtctctacgatttcgagaacgacgacgagatccgacggctgacgaattgttgacatatatttcatcggggatgtttggaccgttggatgatgggttataatcagaagacgtgtcccctttgtcgtacacagtttatacctgatcatcttcaactggagtttaatcaaaggctctggtctcaatcttctgctgtttcttctcaacttcttgatgaatcatcatcttaggacgtattaaatctttgtccaaacaaaaaaaaaagacatattaaatcctttttttttggtactttcattgggaattgggtttggtgtgagatcgatgtaaatattaaacaaaaaaaaaaaggtagtggttacaggttaatgaaaaaagaaagaagaagaaaatttgtacttatccatccctgaaagatgaaattacattttgagttattataaagttgtaaactttttttttttttgttaaggaaaaaaaaaatcatttgctataacagataaaaaaaaagtgtgttagtttttnnnnnnnnnnnnnnnnnnnnnnnnnnnnnnnnnnnnnnnnnnnnnnnnnnnnnnnnnnnnnnnn

SEQ ID NO: 124739 - DNA, 390 bp, Arabidopsis thaliana
gcttttagtctttattaacgccaaaagcggaggtcaactcggtccttttcttcacaggagacttaatatgctattgaatccagtacaggtctttgaacttggctcttgtcaagggccagacgctggtttagacctatgtagcaaagtgaagtattttagagttttggtgtgtggaggagatggaacagttgcatgggtgcttgatgctattgagaagcgcaatttcgaatcccctccacctgtcgctattcttcctttaggcacaggaaatgatttatctagagttttgcagtggggaagaggtatttcagtagttgatggacaaggaagtctaagaacgtttttgcaagacattgatcatgctgcagttacaatgttggatcgatggag

SEQ ID NO: 124740 - DNA, 505 bp, Arabidopsis thaliana
gctcgtgttacctctttagccaaacaacacccccaaacaattactcttatagagagagtagaagaagacgacgcttaccccaaaactcgaatccctaggaggttttggtaatatgaattgagaagtccacgcacgtgtgtatctctattaccgtcagattttggtttaaaagcagttatttttactagtcttgtaagaatgagtttaacaaagaaagcaagtgaaccaaagctaagtggtactagtatcaagccaacaactttaaaccctcatgctgctgagtttgttccgtttactctacggttctccttcatctggaggtacaagtactttggatacaaagacttttagcttcttctaggtctgtttgggaaagcggttttggacaggacagattcatctgcgtcacatcattcagatggaggagcacgtcaggctctggagtcatcaacttcctgatgatataactccagatttgctttgatgactcaagaatgacaattct

SEQ ID NO: 124741 - DNA, 474 bp, Arabidopsis thaliana
acacccccaaacaattactcttatagagagagtagaagaagacgacgcttaccccaaaactcgaatccctaggaggtaacagcttaagctctccgattaccccaaactgcaaaatttctcatctttctctctctttatcttgttttcaacagcagcctttacctttttcttttaacctctgatcttgttatcttccatggatccatttccttaaaggttttggtaatatgaattgagaagtccacgcacgtgtgtatctctattaccgtcagattttggtttaaaagcagttatttttactagtcttgtaagaatgagtttaacaaagaaagcaagtgaaccaaagctaagtggtactagtatcaagccaacaactttaaaccctcatgctgctgagtttgttccgtttactctacgttctccttcatctggaggtacaagtactttggatacaagacttttagcttcttctag

SEQ ID NO: 124742 - DNA, 601 bp, Arabidopsis thaliana
  unsure (1)..(601): unsure at all n locations
ggggagaaaaagagatggaaagaaaaaagttttcttcaaaatttattcatttgctcattgtgtttttgcttctttgtacgtttctttctcgtaccgaatctgctcttccttatcaccatgaactgttcttggggaggaagcggatgaattattataagcccaacagtgccataggaacaccatcatcaactagtgaccacgctccaggcagtaatgggaggaagttgatgagtatatatagacccaatggagacatatttacaggaccatcaggcagtgggcatggtgggggtcgcactccagccccctagtatatatatattaatgtgtaatcaaggactcacaagcgaagcttttaattctcgatcacgtataacgtatgcgttggtgtagtatatgtttaatttctgttttcacaagccaagtttttcattttctcgaattatgtaatgtataattatgtgtgttggtgggccccggtatctcctagtggttcttaaattaatttcccaaattggtgtggttttaaaaatttaataatggtgtttttggttggtnaaagttttncattntncggttttaanaaaaaaaaaaanatntc

SEQ ID NO: 124743 - DNA, 920 bp, Arabidopsis thaliana
  unsure (1)..(920): unsure at all n locations
ctctatcaaagccgcccaatcctccactccaaaaatggcttatctccggcgagcagccaccgcattggttctcattttccagctccatctctttctctctctctcaaatgcacataacataacccgaatcttggccaaagaccctgatttctccactttcaaccactatctctcagcgactcatctcgccgacgagatcaaccgccggcaaacaatcaccgtcttggccgtcgataactcagcaatgtcctccatcctctctaacggatactcactctaccaaatccgcaacattctctctctccacgtcctggtcgattacttcggcaccaagaaacttcaccagatcaccgacggctccaccttcactgcctccatgtttcaatccaccggatccgccaccggaacttctggatacatcaacatcaccgatataaaaggcggtaaagtcgcttttggtgtccaagacgacgatagcaagctcacagctcactacgtcaaatccgtctttgaaaagccttacaacatctctgttcttcacatcagccaagtcttaacctcgccggaagcagaagctcccacggcggagtcccagcggcctcatcctcaccacaatcctcggaaaacaagggtgcaaagctttttttccgacaattcttgaaggtcaacccggngccgncaaaaacggttccaaggttaccgtnggacggaggggttttaacgggtgttttntnccttccggcaaggggttttgggaaagtttattncggaatttaaaatccnntttttccggggnacaagncttnngtagggttttcccgggattcgggtttccagtggttnaaatggtttgtnaggnacggggggttaaangttgggcggnggtnaaagttttttccgnaaattnggggggngnntgc

SEQ ID NO: 124744 - DNA, 678 bp, Arabidopsis thaliana
  unsure (1)..(678): unsure at all n locations
ccccggnncncctttaaatngtncccccggttcagaattccgaccccgccatgccggtttcccagccgttacaaatccttagatcaggtaccgcccccgttaccccgttaccgccggaaggttaccgccaagtttgagtccaccgttcaaaatgacggagaagacgtgacgctggagacggacgttgtgacggcgaaggtaatggggacgttcaaaggatcaagagccattgattagtttacaagatcgataaagtgttgttgcctagagaaatctacaaggccgttaagacgtccgctccagctcctaagtcgagtaagaaaaagcctaagaacgcggaggctgacgccgacggacctagcgccgatgctccgtcagatgatgatgttgaggtggctgacgataaaaacggcgccgtatcagcgatgattactcgaacaagtaatgtcgtaacggccattgtcgggctctgtttcggagtttggcttatgtgaagtgacgtggcatttacctcgctttgggaatcttgttttcctttttctttgtgatctgtcggtttaatttattttacatattcttttttttgttcacgttgatacttggtgtggagatttggaataattaattgttcccacttgtgttggatctgatatgttttattctaaaaanatgtgaatt

SEQ ID NO: 124745 - DNA, 772 bp, Arabidopsis thaliana
ccggatccgccaccggaacttctggttacatcaacatcaccgatataaaaggcggtaaagtcgcttttggtgtccaagacgacgatagcaagctcacagctcactacgtcaaatccgtctttgaaaagccttacaacatctctgttcttcacatcagccaagtcttaacctcgccggaagcagaagctcccacggcgagtcccagcgacctcatcctcaccacaatcctcgaaaaacaagggtgcaaagctttctccgacatcttgaagtcaaccggcgccgacaaaacgttccaagataccgtagacggaggcttaacggtgttctgtccctccgacagcgctgtcggtaagttcatgccgaaattcaaatccctttctccggcgaacaagactgcgttagtgctttaccacggcatgccggtttaccagtcgttacaaatgcttagatcaggtaacggcgccgttaacacgttagcgacggaaggtaacaacaagtttgatttcaccgttcaaaatgacggagaagacgtgacgctggagacggacgttgtgacggcgaaggtaatggggacgttaaaggatcaagagccattgatagtttacaagatcgataaagtgttgttgcctagagaaatctacaaggccgttaagacgtccgctccagctcctaagtcgagtaagaaaaagcctaagaacgcggaggctgacgccgacggacctagcgccgatgctccgtcagatgatgatgttgaggtggctgacgataaaaa

SEQ ID NO: 124746 - DNA, 1027 bp, Arabidopsis thaliana
  unsure (1)..(1027): unsure at all n locations
agaggaatgggttgctccgccggattaatctcaatcgatctcgctaacaatctcctcaaagcaaaccctaattcttacgctgtcgtggtaagcacggaaaacataaccctaaactggtacttcggaaatgaccggtcaatgctcctctgcaactgcatcttccgaatgggcggagctgcgattctcctctctaaccgccgtcaagaccggaagaagtcaaagtactcgctggtcaacgtcgttcgaacacataaaggatcagacgacaagaactacaattgcgtgtaccagaaggaagacgagagaggaacaatcggtgtctctttagctagagagctcatgtctgtcgccggagacgctctgaaaacaaacatcacgactttaggaccgatggttcttccattgtcagagcagttgatgttcttgatttccttggtcaaaaggaagatgttcaagttaaaagttaaaccgtatattccggatttcaagctagctttcgagcatttctgtattcacgcaggaggtagagcggttctagacgaagtgcagaagaatcttgatctcaaagattggcacatggaaccttctagaatgactttgcacagatttggtaacacttcgagtagctcgctttggtatgagatggcttataccgaagctaagggtcgggttaaagctggtgaccgactttggcagattgcgtttggatcgggtttcaagtgtaatagtgcggtttggaaagcgttacgaccggtttcgacggaggagatgaccggtaatgcttgggctggttcgattgatcaatatccggttaaagttgtgcaatgattggttgaaccggataatcatatatgtaattgtgttcttcttgattttattttttaattgttgatgtaagttgtcgattgaaaatcatataatttaattaatttatggatgtgtgtttggtatacgttagttgattattcatcctnnnnnnnnnnnnnnnnnnnnnnnnnnnnnnnnnnnnnnnnnnnnnnnnnnnnnn

SEQ ID NO: 124747 - DNA, 543 bp, Arabidopsis thaliana
ccggaactatacgactcacttagggaaagccggtacgcctgcaggtaccggtccggaattcccgggtcgacccacgcgtgcgctctgacctcactgatctccaatggcgaaaaccctagctcgctccacagcgtcacgcatcaccaagcgcttaatctccacctccggagccaccactccttccccttcttatatcctctcccgtcgatcaaccccggtgttctcccatgccgtcggattcatctcttccttgaatcgtttcacaacgattcgaactcgaatggataggtccggtggatcgtactctcctctaaaatccggttcgaatttcagcgaccgagcacccactgagatggcgccgttgtttcctggctgcgattatgagcattggttgattgtaatggacaaacctggaggcgaaaacgctactaagcagcaaatgattgattgttatgttcaaaccctagctaaaattatcggcagtgaggaagaagctaagaaaaagattataatgttatctgtgaaaggatttttgatttggtt

SEQ ID NO: 124748 - DNA, 588 bp, Arabidopsis thaliana
tttttcttcttcttgtttctgtgttaccgatctggctctgtcttcttcttcttcttcttcttcgtttacgtctctgtgaaatgctcaagctgattagggtttatcaactttttctcaactttcttgttatctccttcgttatcctctctgtcttctcagcttagcagctattgtgcatttgaagctgtactcggaagaaaagcccatagaagagtcaaatataacaaaaaatggctgcggagcttgtaagttctgcaacaagtgagaagcttgcagatgtggactgggccaaaaacattgagatctgtgaattagctgctcgagatgaaaggcaagcaaaagatgttatcaaggctatcaaaaaacgcttgggaagcaagaacccaaatactcaattatatgctgtccagttgctagagatgttgatgaataatattggagagaatattcataagcaagttatagatacaggtgtactccctacgcttgtgaagatagtaaagaaaaaatcggatttgcctgtaagagagaggatttttcttcttcttgatgcaactcaaacctcgcttggtggcgcttcagggaaat

SEQ ID NO: 124749 - DNA, 619 bp, Arabidopsis thaliana
caaatcagtttttaaaaataagggaaaatcctaataaaggagaagaaaaacagatctgaaatcccgcttgatactccaccgactttaaactactggtttttgtttgatttaagtatagtgttaatgactcctctctccaccttcctttgattctacctatcacttcccttgccgttgctccatcttcatcactagtcactatacaccaatcttagatccgggaagctaatttctcttctccgatcggtgaatgcagttacattgacctcggatctaaccaagctcttctggtttccagctctctggaattcaaaaaaatggaggagaaatccaagtcaagaggttggtgcggttggttcatcgccattattgtgctagcttctgttatcctcgccgtcgtttacactgttaaattgagaacgaagaaatccggtgacgatgacggtggcggtcccgttcctggacctcccggcgccattgataagaaatacgccgacgctcttaagctcgctttgcagttcttcgatatccagaaatctggtaaattggagaacaataagataccttggagaggagattcaggtcttaaagatggaagtgaagataatctggatctttc

SEQ ID NO: 124750 - DNA, 561 bp, Arabidopsis thaliana
caataccgaacctaccttcgatatctctagtctgtttttgtcgtaaatccattgatcatgccgcctggtgccaaaaagagaaaggctttgaagaagaagcagcaggagcaggaagccactggagtcgctaccaacaacaaaggcttcaatggtcatggacatgatgaacatggaagccaagatgagagagacagtgatggcaatttgagttcccctggatctcaaggaaatgaagaatttgggactagagatccatcacctcctccattatctagtttagggaaagacattgttaaagagaaagcagaagatgcagactttactgggggacaagtagcgaaaggtgaagacgttattgaagttggaagaggaagaacggatcacgaggagaatggtgtaaacaaacaactcaattcctgtcctgaaaatttttctcaaacttcttggggggctgatagtacttcaaggtttggaaatttcacctcctccttgattctgtcaagcctatgggttcttctgtctcaaaagttgtgatggctgacaaaagtaagcaagttgaga

SEQ ID NO: 124751 - DNA, 858 bp, Arabidopsis thaliana
ggtttaaccaacgcgtccgccgaggtggaatcgttagagccgaatacctccggtactgatggtgttgttccggtggagaatcggacggttagaatcccgacggtgaacgagaattgctttgaaatggattttaccggaggatctaaaggctttgcttatggaggtggttacaattgcatcagtcacagcgtgtcatcatcgtcgatggaagtgggagtggtgccagatggtggttcggtggctgatgtatcgtatccttacggtggtcctgcaaccagtggagctgatccggggacacagcgggctgttccgctgacttcagctgagagagaagcgagggtaatgaggtacagagagaagaggaagaacaggaagtttgagaagactataaggtatgcttcaaggaaagcgtatgcggaaatgagaccgagaatcaagggacggtttgcgaagcggacggatacaaatgagagcaatgatgtggttggtcatggtggtatctttagtgggttcggacttgtacctacattttagatattgagagagggagagactctaaaatggaagatggtgggtggtttggtgtttgttttagtaataaggtttttaacgaacgtttaatttaaacgagtttgtttgttttttgttgatgagtatttttagttgttgtgggcgatgaagaggaagagaagtgagtgggtggtgtttaactgtttataagtaacttgttttgtatatatcgtgattttgaaaaaaaaaaaaaaaaagggcggccggctcgcgatctagaacctcgagccgaattccgagcttacgtacgcgtgcatgcgacgtcatagctcttctatagtgcaccta

SEQ ID NO: 124752 - DNA, 559 bp, Arabidopsis thaliana
  unsure (1)..(559): unsure at all n locations
agncccaagggncggccantaccgaccttcgggcctcaaccaggacctnaccgggcgacaacggctntcccctacccccccccaaaaaaaacccgggatattggggccccgaaagcaangggaagacccggaagtttgaaaaccccataagggtatcctccaaggaaaccgtatccggaaatgaaaccccgaatcaagggacggtttcccaaacggaccggatacaaatgagagcaatgatgtggttggccatggtggtacctttagtgggttcggacttgtacctacattttagatattgagagagggagagactctaaaatggaagatggtgggtggtttggtgtttgttttagtaataaggtttttaacgaacgtttaatttaaacgagtttgtttgttttttgttgatgagtatttttagttgttgtgggcgatgaagaggaagagaagtgagtgggtggtgtttaactgtttataagtaacttgttttgtatatatcgtgattttgaatatgttcttgtttaaaaaaaaaaaaaaaaaagggcggcccgctcgc

SEQ ID NO: 124753 - DNA, 492 bp, Arabidopsis thaliana
  unsure (1)..(492): unsure at all n locations
acgcgtccgaatgattgtctgactaaaatttagggttatgcgagcaacatgtgtaaaattaatctgtagttagaagaaatatcatgataatccttaatttaagtatctaattatgtattaatcaaagaattttggtctcttctttttcatttgttttgtttaatcaagtgtagatctaatcatattcacttataagttataatctatagtatttgtcagtttgattgtacttattataatggcttgatccaatggttggtgtaatttaggtgtcatcatcgtcgatggaagtgggagtggtgccagatggtggttcggtggcttgatgtatcgtatccttacggtggtcctgcaaccagtggagctgatccggggacacagcgggctgttcccctgacttcagcctgagagagaagcgcgggtaatgaggtcccagaggaagaggaggacaggaagtttagaaggctttnaggnntcctcaagggaagcntt

SEQ ID NO: 124754 - DNA, 933 bp, Arabidopsis thaliana
  unsure (1)..(933): unsure at all n locations
ctgcagtaccggtccggaattcccgggtcgacccacgccgccgtctctttccctaaacacactgattattttctctccgacgccgccatgtctctgctctcagatctcgttaacctcaacctcaccgatgccaccgggaaaatcatcgccgaatacatatggatcggtggatctggaatggatatcagaagcaaagccaggacactaccaggaccagtgactgatccatcaaagcttcccaagtggaactacgacggatccagcaccggtcaggctgctggagaagacagtgaagtcattctataccctcaggcaatattcaaggatcccttcaggaaaggcaacaacatcctggtgatgtgtgatgcttacacaccagctggtgatcctattccaaccaacaagaggcacaacgctgctaagatcttcagccaccccgacgttgccaaggaggagccttggtatgggattgagcaagaatacactttgatgcaaaaggatgtgaactggccaattggttggcctgttggtggctaccctggccctcagggaccttactactgtggtgtgggagctgacaaagccattggtcgtgacattgtggatgctcactacaaggcctgtctttacgccggtattggtatttctggtatcaatggagaagtcatgccaggccagtgggagttccaagtcggccctgttgagggtattagttctggtgatcaagtctgggttgctcgataccttctcgagaggatcactgagatctctggtgtaattgtcagcttcgacccgaaaccagtcccgggtgactggaatggagctggagctcaatgcaactacaagcactaggccaatnagaaaccgtttggagggttagaagtgatcaaagaaagcggtaaggaagatcatctgaaagncaaggncaatttt

SEQ ID NO: 124755 - DNA, 701 bp, Arabidopsis thaliana
  unsure (1)..(701): unsure at all n locations
aaggagaggaaaaaaaaaatacaagctcttttgttataaacacacactctcaggagagaaggtgtattgatcgtcttctctttccctaaacacactgattattttctctccgacgccgccatgtctctgctctcagatctcgttaacctcaacctcaccgatgccaccgggaaaatcatcgccgaatacatatggatcggtggatctggaatggatatcagaagcaaagccaggacactaccaggaccagtgactgatccatcaaagcttcccaagtggaactacgacggatccagcaccggtcaggctgctggagaagacagtgaagtcattctataccctcaggcaatattcaaggatcccttcaggaaaggcaacaacatcctggtgatgtgtgatgcttacacaccagctggtgatcctattccaacccaccaagnagnacaaacggttgctaagatcttttagccaccccgncgttgccaaggaggggcctttggtattggggtttnagcaagatacactttgnttgaaaaggntgtgaccttggccaattggttggcctttttggtggtaccctgggccttagggcctttctanttnggtttgggggtgcaaancatttngtnggnattttgggggncctnaaggcttttttngnggnttgnttttggtaatnggggatcngncnngggcctgta

SEQ ID NO: 124756 - DNA, 497 bp, Arabidopsis thaliana
ctgcaggtaccgggccggaattcccgggtcttcccaccggtcgtacgttactggagctgatctcacgtatattttggatcgtaatcatggacggcgaagattttgccggaaaggcggctgctgaagccaagggattgaacccgggattaatcgtgctgcttgttgttggaggtccgcttcttgtgttcctaatcgccaactacgtgctttacgtttatgctcagaagaacctacctccaaggaagaagaagcccgtttccaaaaagaagctcaagcgggagaagctaaagcaaggagtccctgtccctggagaataaaagccagcttaagcttccttcacttgtgcctccttcaaagcggtttttgttcggttaccaaatttcacccttgcgggttttttcttcctttacttctgtcatgaggattatcttgagtcctgtatgatttcacatggagagtgtagactattgttttggtctgacttgtttttccttcat

SEQ ID NO: 124757 - DNA, 669 bp, Arabidopsis thaliana
  unsure (1)..(669): unsure at all n locations
tttgttcattttgatgggaggtactttcatgtcactgcctgctgagtatcgggatttcttcatacggaatcttcatgatgctttatcaggacacacttctgccaacgttgaagaggcagttgcttactctgaacatagtgcaactaaatgcattgggatgacaattgaaacgaggccagattactgccttggacctcatttacgacaaatgctgatttacggttgcacccggctagagataggtgtccagagcacatatgaagatgttgcccgtgacacaaatagaggtcatactgttgctgctgtagctgactgcttctgcttggctaaagatgctggtttcaaggtggttgcacatatgatgcctgatcttcctaatgttggggttgagagagacatggaaagtttcaaggagtttttcgagagcccatcttttagagcagatgggttaaaaatatatcccacccttgtgatccgtggaactggactttatgaactatggaaaactgggaggtaccgaaattatccacctgagcagcttgtggtatagttgcaaggatctttcatggtacctccatgggcacggtatntagngtncagcgtgtattccatgccnttggtacggnaggggtggaaaggaatnttcgtacctgcnttccgaatggtttg

SEQ ID NO: 124758 - DNA, 595 bp, Arabidopsis thaliana
  unsure (1)..(595): unsure at all n locations
aaaatnccgtccntccnngggatttccccatnttnncaaanactttcaaaccggtttaacaggatccccgtccaatnccnatccgtttcggtcatccnnggtttcccntccatgaaaacttccaccattcccccagcgtggttagtggttaccggcattagttttacagctgcccctggttccggcttacttcaagggctcatcatcttccacttatacggtcaggaaccacttacaccgattccggaaactggaaactccaagaaaccaatggggaaccaacaacaacaacaaacaaaggggaagttctcgtcgttccggaccattggattacagctcgagccataaaggagggtcaggatcaaacagcacaggtcctagtcctcttcctaggtttgctgtctcaagatctggtcccatctcatataaacagcataactaagtaacaacactcccacattctacaaaagagacaaatttgtttctttttccccaaaagaaaaagacaattatgtagagagattagatttgtacaaatccctcgcaacagtcttcttgttatgtattggattgtaattcagaaaacctattatgc

SEQ ID NO: 124759 - DNA, 939 bp, Arabidopsis thaliana
  unsure (1)..(939): unsure at all n locations
cacgcgtccgggtacgaagagcttgtgggaatagctgtgctgattttgtttatggatttctcgataagtcttcaaagaagggacctgagtattggctgttatggaaatatgaaggagaatcaacacttgctggtttgatgcagagtaaagaatttccttataatgtagaaactatcatccttgggaaagttcaagacttgcctaaagggttggaacgagaaaacaaaattattcagactatcatgagacaactcttgtttgcattggatggtcttcactcaactgggattatccatagggatgttaagcctcagaacattattttctcagaaggttctcgttctttcaagattatcgatcttggagctgcagctgatttgagagtgggaattaactacattccaaaagagtttctccttgatccaaggtatgcagcacctgagcaatacatcatgagcacccaaactccatctgcaccttcagcacctgttgcagctgcactttcccctgtcctgtggcagatgaatttgccagataggttcgatatctatagcattggcctcatcttccttcaaatggcattcccatccttacgatctgacagcaacctcattcagttcaaccgccagctgaaaagatgtgactatgacttaacagcttggagaaaactagtggagcctcgtgcaagcgctgatctccgtagagggttcgagctttgtagatcttagacgggtggnaatcggatggggaacttttaacatcgatggtccggtacaaagcaagncaaagaatcagcggaaaaagcagctcttgctcaccatatttcgnttgncaaggattttctcgcgttgtccgcaatgcaaaantttngnatgcaantanttnaggggtnnacaacnagggcttcagttnngngnaaatttgggaaacagttattgc

SEQ ID NO: 124760 - DNA, 525 bp, Arabidopsis thaliana
acgactcactatagggaaagctggcacgcctgcaggtaccggtccggaattcccgggtcgacccacgcgtgcgtcggaagacgacagaagggggatcatcaaaagtcgggtgaattgtagccactatggcagtctcctcactctcaatccgctgtggtggtttctcaccaacaatctcccacaagacagaaattctctgtccaaatccatcactcaaagcttgttgtttactttcatccggtggtaaggccgactcctcggagagtacttaccaaaaaggcagcggaaacaattggaagagaaggcaagctcttgtgggagtaggaactttagtggcaacttcaattccagcaactttgcttcttgctgaagagataccaaaaagctactcgccttttgtggatcgagaagacgggtattcttactattacccatcagactggagggaatttgacttcagggcacatgattcagccttcaaagatagatacttgcaactgcagaatgtgcgggtcaggttcatac

SEQ ID NO: 124761 - DNA, 515 bp, Arabidopsis thaliana
attcgactcacattatggaaagctcgtacgcctgcaggtaccggtccggaattcccgggtcgacccacgcgtccgcccacgcgtccgggaacaggatcgcttctacagatatttcacccatgtcaagtttaacagtgagaagggtatcgcgcgaagatatacaactggtataattttgttacagagggatgcgttgaatcagtgaaaggaaataattttgttagccatgagatcttctctttttttttgtgtgtttctcttcacctgtgcattggaattattaaggaaggccttcagcttttgtgtgtaaacctctttagaatatgtgacatactaattctttctggcctgtccttgtttctttgcaggttcagaatctaattgaacgatgcctccagctttacatgaaccagaaagaagttgttgacactcttctagaacaggctaagatcgaacctggttttacagaactaggtaacctccacacttgctggatttttttgaacctgattggg

SEQ ID NO: 124762 - DNA, 388 bp, Arabidopsis thaliana
acttcattgactctttttctctatctctctagatcgaaagggaaaaggagatagagattgaagatgcgtgacgcaatcatcgccgatcctcttctggccatcgaccatgaaacagtcgcagagaagaagaaacagagcaaaaatctaaagatttctcttttactgcttctgattctcttagcaacttcaggttattatagctttagtgacaacattacaacagttttcttatcaagacaagctattgatgatgatcatagtcttagccttggaaccatcagtgacgtggttgaatctgagaatggtgttgtggctgctgacgacgctcgatgttccgagatcggtgcctctgttcttagaagtggcggtcatgcggtggacgccgccg

SEQ ID NO: 124763 - DNA, 419 bp, Arabidopsis thaliana
atcgtggcaatggagccagcgccagagatcacacttcgtggagttttgaacggccattccggctgggtgaccgctattgcgacatctccagagaacagcaatgtcttagtctctgggtctcgcgacaagaccgttcttatttgggacttgaccaaagaggatcccgccaacttcggaactcctcgccgtgctttcactggccactcccacttcgtctccgatgttgtcatctcttctgatggccaatttgttttgtctggttcttgggacggaactcttcggctttgggacatcaacgctggtgtctgccaccgtcagttcgtcggacacaagaaggatgtccttagcgtcgctttctccgctgataaccgccaaattgtgtctgggtctcgtgacaagaccatcaagctctggaacac

SEQ ID NO: 124764 - DNA, 646 bp, Arabidopsis thaliana
agtaaactactcaagtccctcccttttccggcgtcgctattctcagtctcattctgtctcccccatggaagctcggattttgcagtcttcttcttcctgttattcgtctctttacgctgtcaatcgatcccggttctcttctgtgtcatctccgaaacctttctccgtcagctttgctcagacgacgagaacaaggactcgtgtattatccatgtcgaagaaagatggtcgcactgataaagatgatgacactgatagtctcaattacaaagattctggtgttgatatcgatgctggtgctgagcttgttaaacgaatcgcaaagatggctcctggaattggtggatttggtggtctctttccattaggtgatagttatcttgtagctggtacggatggtgtagggactaaattgaaattggcatttgaaactggaattcatgacaccattggaatcgacttggttgctatgagtgtgaatgatattattacttctggtgcaaagcctctgtttttccttgattactttgctactagtcgtcttgatgtagaccttgctgaaaaggtcattaaagggattgttgaaggttgtcggcaatcggaatgtgctctcttagggggagagactgcagagatgcctgacttt

SEQ ID NO: 124765 - DNA, 590 bp, Arabidopsis thaliana
  unsure (1)..(590): unsure at all n locations
acgcgcnnnnnnnnnnnnnnnnnnnnnnnnnnnnnnnnnnnnnnnnnnnnnnnatcaaaatttttgtcaatttgaagcctcgcggccgcttctttcaccgccgcagttaaaaacctcgtgtgattcttcttcttcatatagattcccagaaacatcgaaactggtgaaccgtgtacgcttcgtcgttagtgatgcggagacgaaagatatcgccggaaaatcattggcctagattcaatccattagagactcatcggagacgtctacgttagcgtacccaatcctcctcctcttctgggttgtttgctgatcacacatatcttctttcttcgattctctctcagggcgtgtcctgtgtaatcgtttagtggatgtgcaatgcaaaggtcgtgtagaactagaagaagagtttctgtgaacaagtttaatggaaggaacagcttttacaaagtctctttgtctcttgtttttctcctttgggttcttctcttcttttccaccttgttgattagtcatggagatggtgccaaagatgagcctttgaacgactctatgggaatggctgatccggatgatggtcagtcagatga

SEQ ID NO: 124766 - DNA, 443 bp, Arabidopsis thaliana
aggtcttttattggtttgaatgagattagtgaaggcagcttctcttctgatttcttcaaccaaacctccgtctagggttttttactcttcccatctccgccgcccttttttctctcacttccgtttttcttcctcttcgtcgacgtcttcctccgtcgcagtcatgccgggttccgaaccatcggagactcagtggccagcaaagagagtccgggatacttatgtcgatttcttcagaggcaaaggccacaagttctggccatcaagccccgttgttcctcataatgatcctactcttctcttcgctaacgctggaatgaaccagtataagccaatatttttgggtacggccgatccaaatactgagcttagcaagctatctcgggcatgtaacacccaaaagtgtattcgtgctggtggaaagcataatgatttggatgatg

SEQ ID NO: 124767 - DNA, 879 bp, Arabidopsis thaliana
  unsure (1)..(879): unsure at all n locations
cccgcgcttccgcacgaatcacgaatctctctctctttcacacacttcacactttcaatatacactctcattatgactaccgaagagaaagagatcctcgccgccaaattggaagaacagaagatcgatctcgataagcccgaagttgaggacgatgatgataacgaagacgatgactctgatgacgatgataaggatgatgacgaggctgatggactagatggagaggcaggaggtaagtcaaaacaaagcagaagtgagaagaagagtcgcaaagccatgctcaagcttggcatgaaacccatcactggtgttagccgagtcaccgtcaaaaagagcaagaatatcttgtttgtcatatcaaagcctgatgtgttcaagagtccagcatcagacacatatgtgatctttggagaggcgaagatcgaggatttgagctctcagatccagtcgcaagcagcagagcaattcaaggcaccagatctcagcaatgtgatctcaaagggtgagtcatcgagcgctgcagtggttcaggatgatgaggaggttgacgaggaaggtgttgagccaaaggacattgagttggtgatgactcaagcaggagtgtctaggccaaatgctgtgaaggctctcaaggctgcagatggagatattgtctctgccatcatggagcttaccacctaaaccaaagtcttttctacttagatgtggtttaacctgagttatgtgccagagattgtccaaagaattcggaaatttttggtttcaatgtttttcatgaagtgattttcgatgttgtatcagtataaacctcataagtttttgattttcagtttgattttatattgaatatcaagtccnnnnnnnnnnnnnnnnnnn

SEQ ID NO: 124768 - DNA, 774 bp, Arabidopsis thaliana
  unsure (1)..(774): unsure at all n locations
atgatatcacttttaatggctttcccgggcttgggaaatgttgggggggggaaattggtgaaaccggaataaccaatttcccccccgcgtccggaaaaagagtcgtaaagctatgttgaagcttgggatgaaaccaatcactggtgttagccgtgtcaccgtcaaaaagagcaagaatatcttgtttgtgatatcaaaacctgatgtgttcaagagtccagcttcagatacatatgtgatctttggtgaggccaagatagaggatttgagctcgcagctgcagagtcaagccgcagagcagttcaaggctcccaacctcagcaacgtgatttcacagggagaaacatcgagtgctgcaactgcagctgctgttcaagatgatgatgatgaagaggtagacgaggagggagtagagccaaaggacatcgagcttgtgatgacccaagcaggagtgtctaagccaagggcagttaaggcgctcaagctcgctaatggagatatagtctctgccatcatggagcttaccacctaaatccgaaacttttcctactttgatgtgcttttcgtgtttttgttttcccattttcctttcaagtgattttgcatgttgtatcattatatactatacgtttggactcatttcatattttagaaatttgagtggattttcatgagtttaaaaaaaaccaaaaaagnnnnnnnnnnnnnnnnnnnnnnnnnnnnnnnnnnnnnnnnnnnnnnnnnnnnnnnnnnnnnnnnnnnnnnnntcattcg

SEQ ID NO: 124769 - DNA, 919 bp, Arabidopsis thaliana
  unsure (1)..(919): unsure at all n locations
cacgtgggacgacgcaagactctatactgagtcatatgacgacagaaggggatcaaaggggtttttagggtttcgtcactcgccgataatcctctctctctagaaaacatgactgccgaacagaaagtggagctcgccgccaaattggaagagcagaagatcgatcttgataaacctgaggttgaagatgatgatgacaatgatgaggatgattccgaggacgatgacgaggcggagggacatgatggggaggccggtggccggtcaaagcaaagcagaagtgagaaaaagagtcgtaaagctatgttgaagcttgggatgaaaccaatcactggtgttagccgtgtcaccgtcaaaaagagcaagaatatcttgtttgtgatatcaaaacctgatgtgttcaagagtccagcttcagatacatatgtgatctttggtgaggccaagatagaggatttgagctcgcagctgcagagtcaagccgcagagcagttcaaggctcccaacctcagcaacgtgatttcacagggagaaacatcgaatgctgcaactgcagctgctgttcaagatgatgaagatgaagaggtagacgaggagggagtagaggcaaaggacatcgagcttgtgatgacccaagcaggagtgtctaagccaagggcagttaaggcgctcaagctcgctaatgnagatatagtctctgccatcatggagcttaccacctaaatccgaaacttttccgtactttgatgtgctttcgtgttttgtttcccatttccttcaagtgatttgcatgtgatcatatatctatacgttgactcattcaatttagaattgatgcatttcatgaaaaaaaaaactcgagctgaattccgagcttacgtacgcgtgcatgcgacgtcatagctcttctatagttcac

SEQ ID NO: 124770 - DNA, 427 bp, Arabidopsis thaliana
aaaagagttcataaacaaaaacctactcccagaaagttcttccaaatctctcgccatggttgctctcttctttcgtgaggtggagtttttctaaatttaattatactttaaattgctaagtccaaactctttcgcttttgattcatcggtaatacaagtttaagaaaaaaaattcttatatttatctctcaaatcgagtttcgagtgtttgatttgattcgtaaaatcaatggcgacgagcaaacctcaaagatcgccggctgaaattgaggatataatcctccggaagatattttgtgtaaccctaacggaatcaactgattccgatcctcgtattggttacttggagatgacggccgctgtgattctcagcgaaagtaaagagcttttgctttctcgcgaattgatggagagagttcttatagat

SEQ ID NO: 124771 - DNA, 857 bp, Arabidopsis thaliana
  unsure (1)..(857): unsure at all n locations
nnnnnnnnnnnnnnnnnnnnnnnnnnnnnnnnnnnnnnnnnnnnnnnnnnnnnnnnnnnnnnnnnnnnnnnnnnnactcaaaccacgcgtccgctccgatcatatggcgtttgccggcgttttgccgattgttttcttgcttatattatcatcagcggatctagcagcgagtcaatcacagcccggtccaacaaatcaaccgtataactacggcagactaagtccagccatggcagtgatcgtcgtgatcctaatcgctgctctcttcttcatgggcttcttctctatctacttccgtcactgctcaggcgtaccagacgccggtgtttctccagctggtggagctagatccagagcaaccgtcaacgcggcggcgcgtggtctcgacgtttcagttgtcgagacttttcctacgttcttgtactcagatgtgaaaacgcagaagcttggtaaaggagagttagagtgtgcgatatgtttgaacgagttcgaagacgacgaaacgctgcgtttgcttcccaagtgtgatcacgtgtttcatccgcactgcatcgatgcttggctcgaggctcacgtgacttgtcccgtttgcagagcgaatcttgctgaacaggtagctgaaggtgagtcagttgaaccgggaggaactgaaccggatcttgaattgcagcaggttgtggtgaatcctgaaccggtggttactgcaccggtaccggaacaattggtgactagtgaagtcgattcgaggagattacctggtgtaccggtggatcttaaaagagttaaattctcgagatcgcatacgacgggacattcggtggttcaaccgggagaatgtaccgaacggtttactcttc

SEQ ID NO: 124772 - DNA, 566 bp, Arabidopsis thaliana
cttcctgtatattttttccttcataatatattactatccttctcgtttattaatacaaacttgaattcttcttcttcttaactttgtctgtcaattcacatatatatagggccaccatcacataagtggcgtcataacacatcatggtgaacgaagaaatggagtcatcacttaaagtcatcgacgtggcacgagtcacaccatcaaactccgactcgtccgagtcactcactctcccactcaccttcttcgacctcctctggtacaaacttcacgccgtcgaacgagtcatcttctacaaactcaccgacgcaagtcgtcctttctttgactcagtcatcgtcccaaacctcaaaacatctctctcctaatccctctctcactacctcccactcgccggaaaactcgtgtgggaaccacttgatcccaaaccgaaaatcgtctacaccccaaacgaccccgtttcattcaccgtcccccagtcaaacgccgacttctcaccttttaccggcaaaaaaccgttccccaccaccgagttataccctgtagttcccgagttacatgtc

SEQ ID NO: 124773 - DNA, 558 bp, Arabidopsis thaliana
atgatacttcagctctctacgactcactattgggaaagctggtccgcctgcaggtaccggtccggaattctcttctctgtaaattactctgatttttgtagaaatcgaaactgggcttgatcaattttgactctttgcatccaatttcgattctaatctccgtaattgttctccgaatcgggtcaatttcaagttgggaaacaaaccctagcgaacctccattgatgtgatctctctctctctctcacaacttgagaatcaactctctagaaaatatcagaaaatcgttgaaaaaatctggtcttttctggagggaaatgccaggggtagctgtgaagctctatagcgtcttctttaagttactattgaaacatcgtcttcagaatctgatttcaatttcagctgctgatggcttatctgattcctttggtgtttcgacccgatccgatgaatccgtcgccgccgcgaatccgtctttcaccgacggtgttgccaccaaagatatacacattgatccaatgacgtcactcaccgtagggatctttcttcccaatctgc

SEQ ID NO: 124774 - DNA, 726 bp, Arabidopsis thaliana
  unsure (1)..(726): unsure at all n locations
ctntacgactcactatggggacagctggtacgcctgcaggtcccggcccggatttcccgggtcgacccacgcgtccgagccaacactagtcactgcaatatcgagcttggagaaatggagaaggaaagccatgaggagaacaaccacactatctcaggtgatttaacggcaaaacggaaacgaggtcgtccgaggaaacaattgaagctggaatcgaatgagcactctcttggtcattctccaagttttagcaggagtcagcagcagtctcgccagaggaatgacgatgaagctatggttggacagccgattagtggtgtgattgaggcgacatttgaagccgggttcttgctttctgttaaggttgggaattcagatagcatgcttagaggtgtggtcttcaagcctggtcactgtgatcctgtatctgttgataacgatgttgctcctgatgttccaatgataagaagaaacagtgatgtgatgcctcatgatggctcagctaaaagaggtcgggaaatctagatccccggagaagccggggtagtggtggtagaagcagagcattggttcctggcccgattcagcccgctcatccaacaataccaaatattcttatttgtccccgtggtgcttcaccccggccatctagagaatggggtgagcgggtcccgatcgacacagtccatgcaaccgaacagggttcaagcgagggagcgagaacgg

SEQ ID NO: 124775 - DNA, 598 bp, Arabidopsis thaliana
caagctctaattctactcacttatggaaagctggtccgcctgcaggtaccggtccggaattcccgggtcgacccacgcgtccgcgagaagacgacagaagggtacggctgcgagaacacaacagaagggggataacgaaaagctcgccgagaaagcacaaatggcgggcgtgaaatctctgcaacctagactcatatcttcctttctcggcaacaattctattagatcaacgcaaccacttattcatctctttcgcttcgatttaggaagaagacatgtttcgatgcaattatcaagaaccttttctggattaaccgatctcctgtttaatagaagaaatgaagatgaagttattgatggcaagagaaaacgtctgagaccgggaaatgtatctcctcgtcgtcctgttccgggtcatataacaaaacctccttatgttgattctcttcaagctcccggaatctcaagtggacttgaagttcatgataagaaaggtatagaatgcatgagagcttctggaatacttgcagctagggttcgagattacgctggcactttggttaagccaggcgttacccctgatgaaattgattaagca

SEQ ID NO: 124776 - DNA, 1058 bp, Arabidopsis thaliana
  unsure (1)..(1058): unsure at all n locations
acacagcttcacgtcgtcgtctttgagtcgccggagctgtagctactgatttggtaccagaaagagagtgcgacggtggacgatgacgctttttcacttcttcaactgtgcgattctcacattcggtcctcacgccgtctactactccgccactcccttatctgaatatgatacacttggaacctccgtgaaagctgctgttgtttaccttgctactgcattggttaagcttgtttgtttggcgacttttctgcaagtgtctgagactgaagtgtttgacccataccaggaagcattgaaagcgatgattggattcatagatgtcgctggtctgtattatgctctggcccagctaacacacaggaacatctcccagaatcataagtttcaggctgttggtcttgggtgggcattcgcggattctgttttgcacaggttggcacccctcttgggttggtgctcgaggactggagttcacttgggattatgttttgcaagggcctgaaccccaatgcaaatctggtgttcacgatatctctagctgcactaggttcattaatgtggctacgcaagaacaagccgaagagtctgatccccatcatatacacatgtgcagtcatcattgcaacaatgccttcgatcacaagctatctaaagagagtcaatggatggcatttcccgaaaattgttgggtttgagctggcgacttctctggtaatggcttttatcagttgtcaactcttcatcctctgtcagagaccgtctttgtgagtgattccacttcccagcagagctttttgttaatgggaaactcttgcgacgcacttgccttgttttccacaggactcggttccatgaaaactttgatctttcccatctttatttgtagaagaatattgaaccatcttttcataacttattgatttgggaagtgtcattcgttagagcatagccttagcaaaaataacaaaaaaaaaaaaaaagggcannnnnnnnnnnnnnnnnnnnnnnnnnnnnnnnnnnnnnnnnnnnnnnnnnnnnnnnnnnnnnnnnnnnnn

SEQ ID NO: 124777 - DNA, 1247 bp, Arabidopsis thaliana
  unsure (1)..(1247): unsure at all n locations
tcctacgactcactatagggaacagctggtacgcctgcaggtaccggtccggaattccccggttctctctatttccagatcgaaacatctctcttcacaaaatgcctttgtcacggtccctcctttcgcggaggatctcgaactcttttaggtttcatcagggagagacaacgacggcaccggaatccgaatcgattcctccgccgtcgaatatggccggttcttcgtcatggtcggcgatgctccctgaattattaggcgagatcattcgtcgcgtggaggagactgaggaccgttggcctcaacgtcgtgatgtagttacttgcgcttgcgtttctaagaaatggagagaaatcactcacgatttcgctagatcctctcttaactctggcaaaattactttcccttcttgcctcaaattgccaggtcctagagacttttctaatcagtgcttgataaagaggaacaagaagacatcaacgttttacttgtatcttgctctaacaccatcattcactgataagggaaagtttcttctggcggcgcggaggtttaggaccggtgcttacactgagtacatcatatcacttgatgctgatgatttctctcaaggaagtaatgcctacgtcggaaaattaagatcagattttcttgggaccaactttacagtatacgatagccaaccaccacacaacggagcaaaaccttcaaatggcaaagccagtcgcagatttgcatcaaagcagataagccctcaagttccagcaggcaactttgaagtcggtcatgtttcttataaattcaaccttttgaaatcaagaggtccaagaagaatggtaagcacactccgatgcccatcaccatcaccttcatcatcatccgctggactctcgtccgaccaaaagccatgtgatgtaaccaagataatgaaaaaacccaacaaggatggttccagcttgacaatactaaagaacaaagctcctagatggcacgagcacttgcagtnctggtggtctgaacttccatgggcggggttaccgttgcttcgggcaagaactttccagcttggttgcggccggttgaccaaagtcaaccggagcggtaaaggggttgaagnaaccagtttttnttcagtttggnaagnggggggttgcacttnnctttgggttttggnnaaccttttttnaatttaanggttttngantttttttcaaaagtttggnnanaatttttcctgggggtaancc

SEQ ID NO: 124778 - DNA, 584 bp, Arabidopsis thaliana
aaaagccatgtgatgtaaccaagataatgaaaaaaccccacaaggatggttccagctggccaattctaaggaacaaagctcctagatggcacgagcacttgcagtgctggtgtctgaacttccatggacgagttactgttgcttcggtcaagaactttcagctggttgcgaccgttgaccaaagtcaaccgagcggtaaaggcgatgaagaaacagttcttctacagtttggtaaagtgggagatgacactttcactatggattatagacagcctctctctgcatttcaggcttttgctatctgtctcacaagtttcggcactaaacttgcctgcgagtgaaacccaacaaaaggcaacagaaaagaaaaagtgaactggctttgcaaaaatgtaatgttttgatgtaatcatgtgtaagtgtaaacacaaaggtatgtggaaaggagaagcacataagtattattatgtaagaaacattatttaaaacccataatcataatgtatctcttaagtaaaaaaaaaaaaaaagggcggccgctctagaggatccaagcttacgtacgcgtgcatgcggcgtcatag

SEQ ID NO: 124779 - DNA, 1375 bp, Arabidopsis thaliana
  unsure (1)..(1375): unsure at all n locations
acgtcaggcttccccgagaaattgggataaaaagaagcaacaccgatcacaacgtctccctataccatctccttcagatccacacactctctcttatatctctccggcgaaaactttccgatcaccgacaaaaaaaaaaaatggttgcagacgcaaacggttcatcatcaagctcatttaacttcctaatctacggtaaaaccggatggatcggtggtttactcggtaaactctgcgaagctcaaggaatcacttacacttacggctccggtcgtcttcaagatcgtcaatcgatcgtcgccgacatcgaatccgtgaaacctagccacgtgttcaacgctgctggagtcaccggtcgtcctaatgttgattggtgcgaatctcacaaagttgagacgattcgtactaatgtcgccggaaccctaactctcgctgacatttgcagagagaaaggacttgttctgatcaattacgctacgggttgtatatttgagtatgattcgggtcatcctctcgggtcgggtattggattcaaggaggaggatactcctaatttcaccggatctttctactctaaaaccaaagctatggtggaggagctgctcaagaactatgaaaatgtatgcacgttaagagtgcgaatgccgatatcatcggatctaacaaacccgagaaacttcatcacgaagattgctcggtatgagaaagttgtggacatcccaaactcgatgacaatcctcgatgagcttctcccgatatcaatcgaaatggcgaagaggaacttaaccgggatctacaatttcactaacccgggtgttgtgagccacaacgagatcttggagatgtacagagactacattgacccgagttttacttggaagaacttcacattggaggaacaagctaaagtgattgtggcgccaaggagtaacaatgagcttgatgcaactaagttgaagactgagttccctgagttgatgtctatcaaagagtctctgatcaagttcgtgtttgagcccaacaagaagactgaagttaaagcttgaaatgtggttttgtaaggtaaacggttcttaaccccaaaaaaacaaatcaaatgaaagacaaaaaaagtttgggtttttaaaagaagtatcttttttttttttgggtttatgggctgaaaaaattgttgtgttttttgtattttatttttttgtttttctttttcccaatgttgttgtattgttaaaataaacttttgtttcattacaaataagaaatgtactattttgcattaaaaaaaaaaaaaaaaaagnnnnnnnnnnnnnnnnnnnnnnnnnnnnnnnnnnnnnnnnnnnnnnnnnnnnnnnnnnnnnnnnnnnnnnnnnncatt

SEQ ID NO: 124780 - DNA, 1120 bp, Arabidopsis thaliana
  unsure (1)..(1120): unsure at all n locations
nnnnnnnnnnnnnnnnnnnnnnnnnnnnnnnnnnnnnnnnnnnnnnnnnnnnnnnnnnnnnnnnnnnnnnnnnnnnnnnnnnccacgcgtccgcccacgcgtacgcggacgcgtggggaaaaatctgtgaggacgaaaactctccgtcgttccggcgagtttctccagtgatcggcaaagtctttccggcatctattgaatttctctaaaccaattagaatattatcggtcttgataaaataaaatggttcaaagtcagtcgttaagcacattaacaatctgtggaagtgtaaaagtttcaagcttgttgaggaatcgtttaaattcagtgaaagcttcaagcttgatcggtgatcgatgtgtttcgtgtcagtttttgcgtaaatcaccgtcctttagaagccattggaagtcattaaagcaaagaaatttgttgagggttgaagctagatggccatttcaaggaggtggtgaacaaggtttagacccgagctctgagagaagcgagagtcctaatgaaggtatattgacctttttctttcagctggatttggctactcgtgtacagtatgcaatgaatctggagcagtacgacattgcgcaacaactaagagaaaagctaactgaggtggaagaggagtcgataaggctgcaggaagggaaaagagggtcatcagctaaaagtgaagctcaagacaagggtattagcattataaggctacggtgagcagtttcattcgtcatcatcttgtttctcttgtgtatgtgtaaacattggagtataccatcttcactgtttatttgatatcattgcagtgcagatctccagaatgccattgacaagtgagggattacgggttttggcagctaaggttacggggatgaaatctcaaaagcttnagggcangantcattaggctgtatcttncgaaagcctttggctttttnngaaaagcagagtatgcatttcggtttgggcagaacctttnggcacaaaactttttgggtaccgggctttagtttntggatggcccnatttcntggaacnaagcccttggntggnccnccaggggttaaaagtncccggggcccctnancctttatnagggntgggntagaa

SEQ ID NO: 124781 - DNA, 904 bp, Arabidopsis thaliana
aaaagagggtcatcagctaaaagtgaagctcaagacaagggtattagcattataaggctacgtgcagatctccagaatgccattgacagtgaggattacggtttggcagctaagttacgagatgaaatctcaaagcttgaggcagaatcattagctgtatctgcgaaagccttggcttttgagaaagcagagtatgcatttcgtttgggacagaaacttagacacaaaacttttggttaccgggctgtagtgtgtggtatggatccaatttgcagtgaatcaagctcttggatggaagctgcagaggttgaaaagttacctcgtggatccaatcagccattttatcaggttctagtcgatgttcggacgcacccagatctactagtggcatatgttgctgaagacaatctgttcgctcctgaaaaacccgataaggaaaggtttgatcatccatacatttcttttctctactatggagctgacacagctggagatttcatccctgtcaaacaattgcgtgagaagtacaacagacctcggcatgaagttccttttgattcacaagacgaagattaagatgaaaacctgagagttcacaacgcagactcgagcacaaaccacacaaaaaaaacagaactctagcatagctcaaagcatctagcatccaacttagagatgttctgttggttttaaaccccaggaaaaggaaggtagcccctaggccggccggttctggtaaaaacccttgaaccaagccaccttaatccaagaaggcttggtgaataaaggcttcttggtccaccctaaaaaaaaaaaaaaaaggccggcccgctctagagatcccaagcttacgtacgcgtgcatgcgacgtcatagctcttctatagtgtcacataaatcaatc

SEQ ID NO: 124782 - DNA, 1030 bp, Arabidopsis thaliana
  unsure (1)..(1030): unsure at all n locations
cagctctatacgactcactatagggaaagctggtacgcctgcangtaccggtcccgaatttccggggtcgacccacgccgtccgccacgcgttccttccggttgggaaaaccaccaaagggaaaagaaggtccttaacttaaaggggagcttcagaacagggttttaaccttattaaggttcctgccaaatctccaaatggccttggccaggaaggataccggttggccacttaagtaccaaaatgaattctcaaacctggaggcaaattcataacctgtttctgcaaaagccttggcttttgaaaaagcaaagtatgcatttcgtttgggacagaaacttaaacacaaaacttttggttaccggcctgtagtgtgtggtatggatccaatttgcagtgaatcaagctcttggatggaagctgcagaggttgaaaagttacctcgtggatccaatcagccattttatcaggttctagtcgatgttcggacgcacccagatctactagtggcatatgttgctgaagacaatctgttagctcctgaaaaacccgataaggaaaggtttgatcatccatacatttcttttctctactatggagctgacacagctggagatttcatccctgtcaaacaattgcgtgagaagtacaacagacctcggcatgaagttccttttgattcacaagacgaagattaagatgaaaacctaagagttcacaaccgcagactcgagcacaaaccacaaaaaaaacagaactctagcatagctcaaagcatctagcatccagcttagagatgttctgttggttttatacccatgtagatgtagttatcacttagcagttagcacgactgttcttgctatatacactgaaacaagtcaactttattcaagaatgctttgtgtataaatgcttctttgttcgccctaactgacttatccagaaaagccaagacaactaacttactgctaaaaaaaaaaaaaaaacaaatnnnnnnnnnnnnnnnnnnnnnnnnnnnnnnnnnnnn

SEQ ID NO: 124783 - DNA, 695 bp, Arabidopsis thaliana
gcctgcaggtaccggtctggaattcccgggtcgacccacgcgtccgacgtttgagaattacggcggaccggctaagcatcaggccgtggcactccgcgttggtggagaccaccctgaggtttaccgtggcaacagtatcggttaccaagacgcgctttacgtacattctaaccgacagtttttccgcgaatgcgaactttatggaacggtcgattttatattcgggaatgcggctgtgatcttacagagttgtaacatttatgcgcgtaaaccaatggctcagcagaaaattactattacggctcagaaccgaaaagatccgaatcacaatacggggatttggattcatgcttgtaagctactagcaacaccggatcttgaagcctctaagaggaagttatacgacgggtctcggacgtccgtggaagtagtattctagagttgtgtacacgatgtcggatatgggcgaccatattgacccgcgacgatggatggagtggaatgagacgtttggcttggactcgctgtactatggagagtttatgaacaaagggttgggatcatgagatggtcaacgaactaaatggcctagatatcatgttgatagctcaccggatgacgctattggattgacaggtggatcagttcattgctgtgtcttggtggcggccatacagcggagtggccttcttttc

SEQ ID NO: 124784 - DNA, 469 bp, Arabidopsis thaliana
tatacatcaaccaactttttcttttgttgttgttttttagcttacgtggttcttcttcttctccttatgagttcaatatctgcaaatccacaaatctggattcacacctgagaagtttgttaatcggtacatctctagatttttgcaatcggagatggagatcgaatccgtcgcagctggttcttgttccaaggagaatcaaatgatctacaaggaatggttcgaattctccgattcagacggcgatggccgtattactggtaacgatgcgatcaagttcttcactatgtcgaatttgcctcgtccggaattgaagcagatctgggctattgcagattcaaagagacaagggtatcttggtttcaaagagtttattgttgccatgcagcttgtttcgttggctcatactggacatgaaatatcgcatgaagctcttattagcgatgttgatttcaaaaatatcaatcct

SEQ ID NO: 124785 - DNA, 361 bp, Arabidopsis thaliana
acggtgctttgagggatcagagagatggtgttggacctagccctgagatcttggtgaaaattggagagaacactggtcttagatcaaaccaggagattctgattgaagctgttgctctagagaggcagaaagagatggctgagcagtctgagaataatgcagaagtcgagttccttgaccaactgattgttattgtaaaccgcatgcatgaacgtcttcttctgatcaaacagactcagacttctagtgtcgccattcttgccgacttcttttgccctctgtcacttgaagtaatgactgatccagtgattgtgtcatcaggacaaacatatgaaaaggcgtttatcaagagatggattga

SEQ ID NO: 124786 - DNA, 382 bp, Arabidopsis thaliana
acatgttgagaacattgggattcattactaccaaacattgagattgtggaggaagaacttcttggcgagacagaaacaaatcatggctcttggatttgatgacaaattcgtaaggacgtgggaatattattttgattattgcgcagctggattcaagcctcttactcttggaaactaccagttggtgttctcgcgtccagggaacgtagctgcttttgcggattcatacagaggattcccttctgcttattgtgtcccctgagaggcatccacaacgtttgattgcttatatttttcgatctatacaatgtttgattgacctaaaacactagtattgattattgatttgtttggtgtaaaaaattgtgaaagtttgttgaat

SEQ ID NO: 124787 - DNA, 745 bp, Arabidopsis thaliana
  unsure (1)..(745): unsure at all n locations
acccacgcgtccgctgaaaacaagatacagattgatgaagatcagtggtgttgttatctgtattgttggtgtcgtcatggtagttttctcagacgtccatgcaggggatcgagctggtggaagtaatcctgtcaaaggagattttcttgttatagctggagctaccttgtatgctgtcagtaatgtcactgaggtaagcaagagttcctagtgaagaatgcagacgtgactgagctcatggcttttttgggccttttcggcgcaattattgctgccattcagataagcatatttgaacgtggtgcagtcagagctattcagtggtcaactgaggcgattttactttacattggaggcgcactcgggttatttctgttttacacattaatcacaatcttaatcaagaataatggttcaacaatgttcaacctctcgtngctcacatcagacatgtgggctattttaanccgcacttttggttaccacgaaaaggttgattggctctacttcttggcatttgctactacagctactggactgatcatatactcaatgaaggagaaagatgaggaggaacaaagaagtggagaagtggtaagtgngaggaggaagctgttcgatgaggaggatggtgactcgntccacagcaaacccttataggntnttccacctgaaaccntaatcaaatcaaaagncnncngggtttancnttggctttnaancatttccntgnacctttgggggt

SEQ ID NO: 124788 - DNA, 564 bp, Arabidopsis thaliana
aggtttaccaggtgttcgagaaaattcctctgtggaaccaaatgttgaagatgtattagaagtgaatgagactgatagcgtcaaggaaactgttgtaagtgcgattgtgccggttgatgaagtggaagagaatcgtcaggtagaaacatctccttctctggctgcatcgtcagactcattgacagtgacgccatgtctatctttggatcctgcaactgcttcaaccgcacaagatttaccactggtttcagttccaactaaacaagagcaatccgcagattcgccggtggttaacagattgtcggttactcctgttcctaggacaccggctcgtgatggttataattggagaaaatatggacagaagcaggttaagagtcccaagggctcacggagttactacaggtgtacatacactgaatgttgtgctaaaaaaattgaatgctccaatgattcaggcaatgtggtagagattgttaacaaaggtttacatactcatgaacctccccggaagactagcttctctccgagagagattagagttacaacagctatccggcctgt

SEQ ID NO: 124789 - DNA, 1381 bp, Arabidopsis thaliana
  unsure (1)..(1381): unsure at all n locations
nnnnnnnnnnnnnnnnnnnnnnnnnnnnnnnnnnnnnnnnnnnnnnnnnnnnnnnnnnnnnnnnnnnnnnnnnnnnnccacgcgtccggtcccaattcccaacactgtcactcaaaaagaatcttcaaacaatgaatctcaacgtcgtcgttttactcctactccttctaatctcatccgccacgtgttgtccgccgtcagaccgccgtgcacttctagctttccgatcagctcttcacgagccttacctcggcattttcaactcatggacaggccaagactgttgccacaactggtacggtattagctgcgactcgctcactcaccgagtcgccgacataaatctccgcggcgagtcagaagatccaatcttcgaacgagctcaccgaaccggttacatgaccggacacatctccgcctcgatatgtgagctcactcgtctctccgccattacaatcgccgattggaaaggtatctccggcgaaatccctaaatgtatcactcgtcttccttttctccgtacactcgacttaatcggaaaccaaatctccgggggggattccatacgacattcggaagattaaaccggttagctgttttaaacgtagccgataaccgaatctccggttcaattccaaaatcattaaccaatctctctagcttaatgcatttagatctccgtaacaacttaatctccggtgtaatcccgtcggacgtcggaagattaaaaatgctcagccgtgcgttattatccggtaaccgaataaccggtcggatcccagaatcattaaccaatatctaccggttagctgacgtggatctctccggtaaccaactctacggtacaatcccaccgtctctaggacgtatgtcggtactagccacacttaacctcgacggaaacaaaatctccggcgagatacctcaaactctgatgacgtcgtcggtgatgaatctgaatttgagccggaacttgctacaagggaagatacctgaagggtttggaccaaggtcttacttcacagttcttgatttgtcgtataataatctgaaaggaccaataccgagatcgatctcaggtgcgtcgtttattggtcatttggatcttagccataaccatctctgtgggaggattccggtaggttcaccgtttgatcatcttgaagcggcgtcgtttatgtttaacgactgtctttgtggtaaacctttaagagcttgcttgaaaaattgatttttatatgtaatttgagttttttcattagagaccattattatatttatggttatgcattttataaaaaaaagatttaaaattgtatgctacgtttagttgaattatgggatgattaacaaaatatataaacttccagtttcattcgtc

SEQ ID NO: 124790 - DNA, 980 bp, Arabidopsis thaliana
gtcgacccaagtctctatactgagtcatgataacagaaggggggatgaatctaaagcaattgtcagatttcagcatctcccatggaggaatcaagattcgattctgaagatgttgattatgctgagattgttgttgttcgtcatggtgaaacatcttggaatgccgagagaaaaatccagggtcatttggatgttgagttaaatgatgcaggaagacaacaagcacaaagagttgcagagcggttatcgaaggagcagaagatatctcatgtatactcttctgacttgaagagagcctttgagactgctcagatcattgctgctaaatgcggcaagcttgaggtgcttaccgatcgtgatttgcgggaaagacatttaggagatatgcaaggacttgtgtatcaagaagcttcgaaaattcgcccggaagcttacaaggctttttcatctaaccgcacagacgttgatattccaggtggaggagaaagtcttgacaaactttacgatagatgtacaactgcattacagagaatcggcgacaaacataaaggtgaaaggatagtagtagtgactcatggaggtgtgatccgatctctctacgaaagagctcgtccaagtgcaagaaaagttgaaaagatactcaatacatcggtcaatgtgttccgtttattcgacggagacaaatggaccatccaagtttggggtgatgtgagtcatctggaggaaaccggcttcttacaatcaggttttggtggtgatagaacctctggttagagagattctatactcttagtcttcttccccttggaagagcatttatgtaatttaagtttcactccataacttttcaatttttaacatttgaccccattactttgataaagtgatttgggaggattgataaagtaaattgctataaatttctacagtcaaatgttatatggttcactaagtacattgaatccaaagcattcgtgatt

SEQ ID NO: 124791 - DNA, 362 bp, Arabidopsis thaliana
ctcgattacttcctttttaatttccatggctctctaaaaatctctctctctttctctctctcttacttgtattgttacgatctctgcttgaagattatggacggcgccgatggaaccgttcgcgtcaagcctggtcgcggattcgaaacggagacggatgttgcggtttcgtcgccagtgacacgtcagaaagctgctgcagctaagcaattcatcgagaatcattataagaattacttgcaaggcttgctcgatcgtatggagagactcagggagttttatagtatatgtgcagaagcttaaatatctgttgttgatcatgacgatgatttttggatatttattattgtgtttaacttttt

SEQ ID NO: 124792 - DNA, 465 bp, Arabidopsis thaliana
  unsure (1)..(465): unsure at all n locations
cacacataagaaaagaaattaacaaattatcacaaaaatacgttttcttgtataataatttttctctagatttgtcgcttaccttttgaaattctccggcgatgaatctcgccgggaaaaggaatattccggttattatttctgtttccgttactagtgactcttaccatcgccgtcatgtcttccgtgaacatcgtcggacctgaaaaatccttctcctagactttttttttttctttcttctctttgttattattattctttgcttcgtttttgtgaagaagatgatccgctgatttcagaagttttcttcttctggtttttagctgagaggttttggtagattctgtttctccttcttcctctgtgggttttcgaatccagttttgggatttttgaacggattttgttaaagtcccctttnagagagccctgagatnttttnccgagcagngngtttttgna

SEQ ID NO: 124793 - DNA, 342 bp, Arabidopsis thaliana
agaagagccaatcgggttgatgtcttgattccagatattattcagtcgtctgagagtgtactcattctggagtacatggatggagtacgtttgaatgatgtggaatctctagatgcttttggtgtggataaacaaaagatcgttgaagagatcactcgtgcatatgcccatcagatatttgttgatgggtttttttaatggcgaccctcatccaggaaattttcttgttagtaaggaaccacaacatcgtccaattttacttgatttcgggctttcaaagaaaatctcacactccttgaaacaagcactagccaagatgtttctagcatcggcagagggaga

SEQ ID NO: 124794 - DNA, 449 bp, Arabidopsis thaliana
cccacgcgtccgttttcatttgagcttctctctgataaggtcacttcctctgacccttttatctaagctcaacgctgcaactctcgccgtcggttacttccccattttccttccttcttccgattcaaagactcaatttttattctccggcgttgaggattcatctcctaaaaatctctgctttatcttttgatttgagctgatttggagaggagaagaagatagatagataggtaattcggattgatatctcgaaaaatggctcagattcagcatcagggtcaaaatgccaatggtggtgtagctgttcccggtgctgctgcggctgaagctgcggcggctgcggctggagctgcggcggcggctgccggagctgcgcagcaagggacgacgtctttatatgtcggtgatcttgatgcgaccgtgacggattcacagctggttgaggc

SEQ ID NO: 124795 - DNA, 591 bp, Arabidopsis thaliana
  unsure (1)..(591): unsure at all n locations
gccnnnnnnnnnnnnnnnnnnnnnnnnnnnnnnnnnnnnnnnnnnnnnnnnnnnnnnnnnnnnnnnnnnnnnccccacgcgtccgcggacgcgtccgcccacgcgtccgctcagcttttgtggtgaatattgaagaaagtttctctgatatttgttagatggaagaagattgcgagtttcgacattgggatgagttgattccagatgctcttggtttaatctttagccacttacctcttcaagaagtactaacagtggtgcctagagtttgcaaagcatggaacagagctgttactggaccttattgttggcaagagattgacattgagctgtggagtaaccgttttcaccagtctgatcatcttgaccggatgcttgagatgttgatccctagaagcgctggctctttgcgaaaactctccgttactggccttcgaaatgactctatcttctccttcattgcacaacatgctggttcacttaagaccttggaaggtgccaagaaggggtctgactaattcgggtgtgggaaaccgagctgaaaagctttcgtctctcacttttttggattgagctactggtggaaaatag

SEQ ID NO: 124796 - DNA, 396 bp, Arabidopsis thaliana
  unsure (1)..(396): unsure at all n locations
ggaagtagatctctcttttctctttctctttctcctctctctctctttccttactcagcttttgtggtgaatattgaagaaagtttctctgatatttgttagatggaagaagattgcgagtttcgacattgggatgagttgattccagatgctcttggtttaatctttagccacttacctcttcaagaagtactaacagtggtgcctagagtttgcaaagcatgggacagagctgttactggaccttattgttggcaagaaattgacattgtcctgtggagtaaccgttttcaccagtctgatcatcttgaccggatgcttgagatgttggtcnctagaagcgctggctctttgcgaaaactctccgttactgggcttcganatgactctatcttc

SEQ ID NO: 124797 - DNA, 500 bp, Arabidopsis thaliana
accgccgtgacttagccactccgcttatttattgcagttcacgaccaccgtatcctcgtaatctccgttatctcgaaccgaatcgaaaaatccctaaattcctgtgaatttattactaaaattagctcaccttatagatttaccagagatgatgggctcagagaatgacgaagagtcccatctccactcatccaaagaagagatggagaaactctttctccgcgaagatggcgatcccttgaccaaaagcaatgtcaacggcgataaatccaactctaattatcgcagcgctatgtcaactctcttcgactcgcgtcacccgtcgattgtcgtaactccagctgattccgatccactttttgcgccaccgtcttactacagcgaatctcggagtcctcgttctaaaccaaacggcggcgactgagtcagctcttacctcgagcctccgtcttacgcggatgttatcttcagccctttcgatgatatcttcgagatcaatg

SEQ ID NO: 124798 - DNA, 405 bp, Arabidopsis thaliana
gagagagtctcctctctcttctctctctatatcgctcctcatgatccgattttttatataatttataaaaaatttatgtgataattacagatacacgttatttgtgtgtatattgatagagacaataaccattggaatctgaccatggatctcttttcttcttgagatatttttcatttctttctcctgttctcgtctcccagatctgttcgtcaatcttaccattggaaagcttcaagcttcctttttttctctatctggggacgggaccgttgtataaaagagttagaccagacgacggcacaatgtatttcttcggtttgtccaaagaagaagtgttgtcacagaaacatgttgtatcatataaagagacttctaagcagaacccaatcaatatggtcactc

SEQ ID NO: 124799 - DNA, 686 bp, Arabidopsis thaliana
  unsure (1)..(686): unsure at all n locations
aggtgacacttacaagactttgacgtcgcatcgccgcgtacgtaagctcggaattcggctcgaggcaacctgtctaggaggtcgtggaacgccgcctttgcagctcccgttactctgtatgggtgcgctgggccactgtgctggtggtcacgctcgtggccctgctcgtcccaaattttgcagacttcttatctctggtggggagcagcgtctgcgtggtgctgggctttgtcttgccatcactatttcacttgcaggctttcaaaaacgagttgagcatcacaagaatagtggtagacgttctcgttttcctcattggtgttatgatagccattaccgggacctggactgcagtacatgagatcctgacatccaaggcctgagcttcttccattgtttatttttgtcagtatgaaaagagaagcattgttacctccagcgaacacggcattattattgttattctgttactctcctcacttgtttatttgagtcttattactctatttgtaagaaagacgcaccatggaaaaccaataagaaaaatactcttagaatcaaaaaaaaaaaaaaaaggnnnnnnnnnnnnnnnnnnnnnnnnnnnnnnnnnnnnnnnnnnnnnnnnnnnnnnnnnnnnnnnnnnnnnnnnnnnnnnnnnnnnnnnnnnnnnnnnnnnnnnnnnnnnn

SEQ ID NO: 124800 - DNA, 496 bp, Arabidopsis thaliana
acaaagacaagttcggtagagcgctggggctagccatgggcttaatctcgatcatgtacggtgcgttcgggctgctacggtacatggcttacggagaggagacgaaagacatcatcaccaccaacctggggacaggagtggtgagcactctggtgcagctgggcttagcaatcaacctcttcttcacattcccccttatgatgcaacctgtctacgaggtcgtggaacgccgcctttgcagctcccgttactctgtatgggtgcgctgggccactgtgctggtggtcacgctcgtggccctgctcgtcccaaattttgcagacttcttatctctggtggggagcagcgtctgtttggtgctgggctttgtcttgccatcactatttcacttgcaggctttcaaaaacgagttgagcatcacaagaatagtggtagacgttctcgttttcctcattggtgttatgatagccattaccgggacctggactgcagtaca

SEQ ID NO: 124801 - DNA, 635 bp, Arabidopsis thaliana
tacgactcactttagggaaagctgctccgcctgcaggtaccggtccggaattcccgggtcgacccacgctgccgctctgaagctctgaggaagacatgatttcgtctctctcagcttcttcttcattggtttcttctttcgtcgccgttaaagcgactccggtcaccggacctctgattccccgtcgcgatcttctttctattcgtatcagagctagctcgaatcagaatagttctggttattgttttccagaaaagtttaaatcttttgccaaatcagcgattctcatcggtgctgctgtttcaatgaccggaaagttttcaactttaccggataaagccgagtctccggttacgactatcgaaaagacctacgaggaagtgaaagaagagaaactgtctgagatcacgccattatctgagcttttggattccactcctgaggccgtcgagacgctgagatcactcctgcagcagaagctagagaagggagaagatgtataagcttttaagctattatagagactagtttctggacaaccagaagaaactgagtggattttcttatttggcttttcttttatgtttatatttttttttctttttattctctatttctttttcttttaagtattt

SEQ ID NO: 124802 - DNA, 480 bp, Arabidopsis thaliana
aaaagaattcatcaaaggagagagagatcgacaatggcaccttcgtcatcaagcggtttaaccttcaagctacatcctttggtaatcgtcaacatatcggatcactacactagggtcaaaactcagctcaatcctcctgcttcaatctgcgcaagcggccatggctcaaacaacggcgaagcaatgttccagcaaaaccctagggtttacggatgtgtgatcggtgtccagagaggtcgtactgttgagatattcaacagtttcgagcttttatatgatccttctactcaaacccttgatagatctttcctcgagaagaagcaagagctctataagaaggtgttccctgatttctatattctgggatggtactctacgggaagtgatgctgaggaatctgatatgcatatccataaagctttgatggatatcaatgaatctcctgtttatgtgcttttaaaccctgctatcaatcacaca

SEQ ID NO: 124803 - DNA, 520 bp, Arabidopsis thaliana
atacgactcatttagggaaagccggtacgcctgcaggtaccggtccggaattcccgggtcgacccacgcgtccgctgagcggtacggttaattcatttcttatctatcacacaaagttgaatcgtaaccctaagcgaattcaacaatcgagagagcgagagagatcaattaaccccagcgaatcgaatatgccgaagaagatgggtctgaacagcaaggcggaggtcgccaaatctcgtaagaacgccgcggaggctgagcagaaggatcgtcagactcgggagaaagaggaacaatactggcgcgaggcggaaggtcccaaatccaaagcggtgaagaagcgagaagaggaagcggagaagaaggcagagaccgccgctaagaaattggaggcgaagcgtctggctgagcaggaggagaaagagttggagaaggctttgaaaaagccagacaagaaggcgaatcgcgtcactgtgccggttcctaaggtcacagaggctgagctcatccgaagacgcga

SEQ ID NO: 124804 - DNA, 739 bp, Arabidopsis thaliana
  unsure (1)..(739): unsure at all n locations
ccggaatttccgggtcgacccacgcgtccggagaaagccaaaccggtatattttctttaaacaggatatatagatgaaccaagaagagcacgtaaagcttctgggcttatggggaagtccttttagcaaaagagtagagatggtcctaaaacttaagggcataccttatgagtacattgaagaagatgtttatggaaacaggagccctatgcttctcaagtacaaccctatacacaagaaggtccctgtcctcatccacaatggtagatcgatagccgaatcattggtgattgtcgaatacatcgaagatacgtggaagacaactcacacgatcttgcctcaagatccttatgaacgtgccatggcccggttttgggctaagtatgtggatgaaaaggtaatgttagcagtgaagaaagcttgttggggaccggagagtgaaagagaaaaagaagtgaaagaggcttatgagggtttgaaatgtttagaaaaggagcttggagataaactttttttcggaggagagacaattggatttgtcgatatagcagctgatttcataagatattggttagggattttccaagaagcttcaagcgtcacgatcatgaccgcggaagagtttccaaaacttaacgtagtcgaagattcgtggaaaaacttattaagaatntgccctangagactcggctgttgaagctgttgaggtcattataacgatagactgatatgtgtaaaa

SEQ ID NO: 124805 - DNA, 592 bp, Arabidopsis thaliana
  unsure (1)..(592): unsure at all n locations
tntgtttccnnatncnccgangtccnggagccacncccccntcttccccaaacccttagggccgtcccatcccccggtttggccnaagtntgtggttgaaaaggctaatgttcccagttgaagaaagcttgttggggaccggagagtgaaagagaaaaagaagtgaaagaggcttatgagggtttgaaatgtttagaaaaggagcttggagataaactttttttcggaggagagacaattggatttgtcgatatagcagctgatttcataggatattggttagggatttcccaagaagcttcaggcgtcacgattcatgaccgcggaggagtttccaaaacttcaacgttggtcggaagatttcgtgggaaataactttattaaggaagtcttgccccctaaggagaagctcgtggctgttttgaaggccatgtttggaagtgttacatctaattaaacgtaataagaccatcgtaattcattgtttggtaacagaaaaaattgatatctatgtcatctttatttttatattttcgtcttctttggtaaatgttttcttctatatggttattctataaataacactttcccc

SEQ ID NO: 124806 - DNA, 567 bp, Arabidopsis thaliana
  unsure (1)..(567): unsure at all n locations
cggacgcgtgggcggacgcgtgggcttaaaaaccaaatctttcatcatcttccttcaccagttgactctctttcaatctatctctgaatctctcactctcctacccgaaaaccatgaactccaacgaccaggatccgattccgttcagacccgaagacaacaacttctccggttccaaaacctacgccatgagcggcaaaatcatgctaagtgcaatagtaatcctcttcttcgtcgtcattttaatggtcttcctccatctttacgctcgttggtatctcctccgtgctcgtagacgtcatctccgtcgtcgtagccgtaaccgtcgcgctacgatggttttcttcaccgctgatccttccaccgccgcaacttccgtcgtcgcttcacgtggacttgatccaaacgttattaaatctcttcctgttttcactttctccgacgagactcataaagatccgatcgaatgcggccgtttgttttcgggatttcgagagagccagaccgggtcgggttttttcccaattgtcaaaaatantttttaatgttgattggnanttnaaatgg

SEQ ID NO: 124807 - DNA, 580 bp, Arabidopsis thaliana
  unsure (1)..(580): unsure at all n locations
cggatattagattgattcggttggaaggggaaaagatcaatttctctctcttctctctcttcaattattcagagagaggaacacgatctttgtttctccatccggtttgtttactagttttgtctctggtatggttcagctttgtctccggcgaggtccggctttgtttcggctatctgttgccgctttttgttttttctgttgaataaattatgcgatctatgttagtgttgtggttttaggtgattcgtctttgcctaaacacaattctctccaacataagattgatgaatatgatgcttgagttcgtgaaccgttgacgtttaattgggaagattttgaagttgaatttccatgaagttgaagatttgtttttagagctttggaattgacaattgctatcaccggattcaacatgcatatcgcgggggtctngggttctaatgggggcaacaaatctccttcgggcggcgaccacggagttctcccgaccctccttcttctcacggggctttcaagcaccccaaacccttctcatgacacggggtttaagggcctgttaaaaaaaacccnccttnct

SEQ ID NO: 124808 - DNA, 543 bp, Arabidopsis thaliana
  unsure (1)..(543): unsure at all n locations
tgcctaaacacaattctctccaacataagattgatgaatatgatgcttgagttcttgaaccgttgacgtttaatcgggaagattttgaagttgaattttcatgaagttgaagatttgtttttagagctttggaattgacaattgctatcaccggattcaacatgcatatcgcggtgttctgggtttcaatggagtcaacaatcttcttcggcggcgaccagtgattctccgatcttcttcttctcacgtgtcttcagcacctaaccttttcatgacacgtgttttaggttctgtttcaatgattcttctttcttcctgatgcggtttcctacttgggcttcatagttgggcttgaaaagtcttacacttatgtttagttgaatttggctctgttgtttgtctcaaactttggcttatgttgatataacaaaatggaatttgcatttaaaaaaaaaaaaaaaaaaaaaaaaaagnnnnnnnnnnnnnnnnnnnnnnnnnnnnnnnnnnnnnnnnnnnnnnnnnnnnnnnnnnnnnnnnnnngtc

SEQ ID NO: 124809 - DNA, 1170 bp, Arabidopsis thaliana
  unsure (1)..(1170): unsure at all n locations
cnnnnnnnnnnnnnnnnnnnnnnnnnnnnnnnnnnnnnnnnnnnnnnnnnnnnnnnnnnnnnnnnnnnnnnnccacgcgtccgcccacgcgtncgaacagctgcaagaagacgacagaaggggatgactcgagacattaacgacttttaaaactaagggacgaaccttaagcaaaagctcttgcattactcaaattcttctgccacttggtttgcgatggacagttctggagcagatctagatagaattgaggcacaaaggtcaatgttagtttctcatgatcaacggaaagatttctctcacagcggaggagttggcaccacgtcacctacgggcgacaccgaacctgtgccaaagttccgtactaaccttaaattgtcggatcttttcgctctccctggtgaagatgtcgagatgactccggagatttttggtggaatgagtaatggggaaaaagaatgtctggagaagttgagaagcaatggaacgccaatggaacgtgtcaagagcaatacaggagattcaattcttcatattgctgctaaatggggtcatctagaactagtgaaggagattgtctttgaatgtccatgccttctattcgagcaaaactcaagccgtcagacaccgctacatgtggctgctcatggcggtcataccaaagttgttgaggctcttgttgcatcggtaacatctgcttcagctagtctgagtactgaagagagtgagagactgaatccacatgttcttaaggacggagcatggaaatactgctctgtactacggccattgaaaggaccgctatttggcagttggctacctgtcttggtgaacccggccaaggatgctccttttcttggaaataacaaagggattaccttccttgtacgaagccgtagacgctggaaataaatttgaagaccttgtgaaagcaattttgaaaaccacagacgacaacgtggaccctgaagtgaggaagtttaacttagattcgaaattgcaagggaacaaacatcttgcacatgttgctttgaaggccaaaagtataggtgtccttgatgttattcttgatgaatatccaagtcttatggacgagcaagatgaagatggtaggacttgtctttcatacggagcatccattgggtattataaaggactatgcaacatctt

SEQ ID NO: 124810 - DNA, 362 bp, Arabidopsis thaliana
actcgattgctctcaaaaaccctaattcccaacggaagattcctcctccgtcgtttcaacgagccggcgattacgacaccaccaaacgtcgtctgtttcagccgccgcttttcatccatcccacaagtcatcgagcttgaaatcgattctaaaaacgaagcggaagcagcaattctcaaaaagctaaacgaattcgtacgaaggatcatcgttcataattcgactccagattggcttccttttgcacctggctcttccttttgggtacctcctcatcagattacggctacaaagatcgccaatttggtcgataaggtgactaatccgttgacggaggaagagtctctttcgctttcgtctcc

SEQ ID NO: 124811 - DNA, 694 bp, Arabidopsis thaliana
tcgttgtacgcgtgggcggacgcgtgggggcgtatcccggttcgcctatcttgatgaagctcctcgtcttcatctttttatcaacttttgtagtcactaacgtgagctcggaaactaagtgccgggagttcaaatcgatcatcagtttcggagattccattgccgacactggaaacttgcttggcctctcagatcctaaagatcttcctcacatggcgtttccaccgtatggagagaacttcttccaccacccaactggtcgtttctccaacggccgcctcatcattgatttcatcgctgaattcttgggtttaccgcttgtgcctccattctatggatctcataatgcaaactttgaaaagggagttaatttcgcggtagggggagcaaccgctttggaacgttcctttcttgaagacagaggaattcattttccttacactaatgtgagtttaggcgttcagcttaatagcttcaaggagagtttacctagcatatgtggctctccttcagactgtagagatatgatagaaaatgctttgattctcatgggggaaattggagggaatgactataactacgcgttcttcgtggacaaaggcattgaagagatcaaggagctgatgcccctggtgatcactactatttcttctgcaatcacggagttgatcggtatggggggaagacacatttt

SEQ ID NO: 124812 - DNA, 377 bp, Arabidopsis thaliana
ggtaattctctctatccagaagtggagttagcagtaaacgttggtctttgttgtgggtctgaaagtattagcgtcgctgtttccaagtaatcctaaatcagttcacaagaatctgatttgaacagattgtgatgttctgttttctttctcttttttccttttaattctcgcaatatgcaaaagtatgagtctttttacccgagaaaatagcagttttcccgagaaaataaaccagaggtccctaaagctaaagctaaaactaaaagcttaagtagtgtggattttctagatgccaagtttcgttttttgagccttttaagctcttttctggatttcgtttttctcgtttcgctctattcttcgccgagcaagtaatc

SEQ ID NO: 124813 - DNA, 911 bp, Arabidopsis thaliana
  unsure (1)..(911): unsure at all n locations
nnnnnnnnnnnnnnnnnnnnnnnnnnnnnnnnnnnnnnnnnnnnnnnnnnnnnnnnnnnnnnnnnnnnnnnnnnccacgcgtccgagacaagaacatgcaagtcaccattgcctttaatcactttggagaaggtcttgttcagagaatgccaagatgtagacatggatattttcatgtggtgaataatgattatacacattggcaaatgtatgcaattggtggaagtgcagctccaacgattaacagtcaaggcaataggtttcttgctccaaacgaccatgtctttaaagaggtgactaaatacgaagatgcaccacgaagcaaatggaagaaatggaattggagatcggaaggtgatttgttcctaaacggtgcgttttttacgccttcgggtggaggagcctcttcaagctatgctaaggcttcgagtttgtcggctagaccgtcctcattggtggcttcagtcacgtccaatgctggtgcactcttttgtagaaaaggatcacgatgttaatccaatccatcttttcaaaattatatatataatccatccaatctaattaattaaaaagataaagaagaggatgcatgttgtccctggtatgtcaatttttcgttaccctttagtttttttttattgtggggagggttaaagtagtaagatggattcgatgtgtatactaaagttatgtgtggattccctttggaccaatgggtttctttaaaactttttggagtagggaccaatgtttatgttgtggtggggataatgtctgtacaattgctaagcaattattggttaattctttaaaaaaaaaaaaaaaaaaaaaaaaaaaaaaaaaccaaagggcgaccgctctagaggatccaagcttacgtacgcgtgcgtgcgacgtcatagctcttctat

SEQ ID NO: 124814 - DNA, 526 bp, Arabidopsis thaliana
  unsure (1)..(526): unsure at all n locations
gagtttgtcggctagaccgtcctcattggtggcttcagtcacgtccaatgctggtgcactcttttgtagaaaaggatcacgatgttaatccaatccatcttttcaaaattatatatataatccatccaatctaattaattaaaaagataaagaagaggatgcatgttgtccctggtatgtcaatttttcgttaccctttagtttttttttattgtggggagggttaaagtagtaagatggattcgatgtgtatactaaagttatgtgtggattccctttggaccaatgggtttctttaaaactttttggagtagggaccaatgtttatgttgtggtggggataatgtctgtacaattgctaagcgattattgttgatttcttatatattgtatcaacatcttaattattaacatccgtgtgttaacagaaaaaaaaaaaaaagnnnnnnnnnnnnnnnnnnnnnnnnnnnnnnnnnnnnnnnnnnnnnnnnnnnnnnnnnnnnnnnnnnnnnnnnnnnnngaatcg

SEQ ID NO: 124815 - DNA, 583 bp, Arabidopsis thaliana
  unsure (1)..(583): unsure at all n locations
aaaaagacttgtttgagagatctcaaggaagaagaagaaggggggaagcagataacatgtctgcgattgtttgcgggaagagatctctgttcgaggacttagccgccgcttctcctcccgtctccaagaaactccgttgcttttcttcatcttcttcgtctcgtttttctcctccgattcctccttcttcctcacttcttctcgatcacctcgccgcgattttccccgatatggataagcagattcttgagagggcaatcgaggaatgtggagatgaccttgattcagccattagatgtttgaatcagcttcgtttagaatctgccaataagaattctgattctgctacaaaccaatctcctgttgtaatccaggaaccaaatgttgaacctcaacagcaaggatcagccaaggagggaccaaatgtcttgaacttggatggtacagagtgggttgagcttttttgttaggggaatgatgaatgcttctgacatgaaagacgcaaagcccgtgttgcaaaagcattggaagctttgnggaagcaataatggacgactggnnctgcgaatgaaatccaacagga

SEQ ID NO: 124816 - DNA, 1496 bp, Arabidopsis thaliana
  unsure (1)..(1496): unsure at all n locations
nnnnnnnnnnnnnnnnnnnnnnnnnnnnnnnnnnnnnnnnnnnnnnnnnnnnnnnnnnnnnnnnccacgcgtccgcccacgcgtccgcggccgcgtcaccgccaccaagacgagaagaatatgacgacggaggcgaattctacggcggaggagggttatagtgtacagagagacttttggcgtcaagcggcgaaatccgatggtttcgatttagagaacatctcacttccaccaggtacgaatggaattgtcatgggactgattccctacgactgtcaacgtgcaaggcattatccgtttcctgtcttggtcaaactttatgctaagtttgggcttcatcgttacaatatgttgaaggggacaagcttccagctcgctaccctaatgaaattcaacatgttaccgaactatatttcctctttctacatgactctgcttgcacatgatcccgatccagctgctggctcatcgcagaaaacctttcaggttcgagttgatgaacaacaatttggcactttgggtataaactgctccattgctagacctaaacacgaagtgtccaccaagacgcccttcatacctcactttcatggtggcgcattgggcgatggtatattcaaaggtgaattgcctgattgtctctcagatgatgctttgaatgcactgatggaggctgtctccaaagatgaattgcctgagcatgtcttagatgatgctttgtatgcacgggccggtggtatcttccaaggtgaattgcctgattggccctcagatgatgctttgaatgatggaaaacgattttacatggtgaaggaatcagagtggcaagccactgattggatttctatgtatttggaacttgtaattactacaactgataagtcgatcagtatcaagccagaagttctgtccaagttggagattgtgaaagtggcgatagaaactgctaccaaagatgaggagccgtctaatgagagactcaaagcctacagggcacatgtctacataacgtttaagggcttggcagagcctcgagcccatgagcgggtttttgagattggggagcatgttgaacgccaagctatagttagaagagtcatgggccatagaggagacttgactctcaagggtaagctttgtggtggtcaatatatcaaaaagcgttctctggctctcaagagtggaaaaaagtcccagaagtgtaaaaagcaagcgctcgtcggctaggcgttcgtatacatgggcgtctgcgtaatgttaagatccattttgaaaatgtggatcagataaataaactaagctattaattttgtgcgtttggattctttgacttatggttttatttaagtgtgacgctttttttcttttttaatacaatgagttaatctaaaaaaaaaaaaaaaaaaaaagggcggccgctctagaggatccaagcttacgtacgcgtgcatgcgacgtcatagctctactggagttcacaggnnnnnnnnnnnnnn

SEQ ID NO: 124817 - DNA, 509 bp, Arabidopsis thaliana
  unsure (1)..(509): unsure at all n locations
ctcagatcgagtctcttaagaactcgatcattcgaaatcaactcgaagatcttcaattccatcaaactcaaggagtttcgtttctctgatttcttcgattgagataaggagtaaatggcgacagatgatttttttagcttgcagagagaatattggcgacaagtggcggaatccgatggtttcgatattgagagtgttcaaataccaccatctatgtatggaaggatcaatggactgattccccacaactgtgaaatcaatacgccgcttccttaccgtgtcttgggcaagcactatgctaagcttgggcttcatcgttacaatatgttgaaggggactaaattcgagttcggtcgcctaatgaaattcaacatgttacaaaactgtgtggcctctttctacataactttggaagcatacgattacggtgttcctggcacatcacatcctcaaacctttcaggttcgatttgctgaaaaaaatttggaagttggnttgccgggcctttt

SEQ ID NO: 124818 - DNA, 436 bp, Arabidopsis thaliana
accgacgagaagaatatgactacggaggaggagtccctttctgcggcggaggagtccctttctgcggcggaggagggttacaatgtacagagagactattggcgtcaagcggaggaatccgatggtttcgatatagagaacattaaactaccaccaggtatgcatggacgggtcatgggactgattacctataactgtcaactttgttaccgttatccgtttcctgtcttggtcaaactttatgctaagtttgggcttcatcgttacaatttgatcaagggaacaagcttcgagctcgctgccttaatgaagttcaacatgttacaaaactatatgtcctctttctacatgactctgcttgcacatgatcccgatccagctgctagctcatcgcagaaaacctttcaggttcgagttgatgaacaaacaattggca

SEQ ID NO: 124819 - DNA, 821 bp, Arabidopsis thaliana
  unsure (1)..(821): unsure at all n locations
nnnnnnnnnnnnnnnnnnnnnnnnnnnnnnnnnnnnnnngcggttgcgggtcgcggttcgggggtcgagccacgcgtcgcgcgagagatcttaacacaaaacaaagcaaacaccaaaaaaaacagagatgggtttggttacagatgaagtgagagctagggcagagaaatacacaggagatgagatatgccgtgagaagacaaaggagtttctcaaggaagtttctatgcctaatggtttattgccattgaaggacattgaagaagttggttacgacagagagacaggtattgtctggctgaagcagaagaagagcatcacccacaagtttgaagccattggtaaacttgtctcttacgccaccgaggtcattgcacaggtggaggtcggaaagatcaagaagcttaccggtgttaaggccaaggagcttcttatttgggtcactctcaatgagcttgtcttggagcagccgacaagttcagggaagatcaatttcaggacaccaactggtctgtccaggactttcccagtgtctgctttcgttgttcctgaagttgagaagcctgcaacggagaagaacaatggaaccactgaggtcaaagaagctgttgcagtcacagatgcttagtctctctaatcttattaatcttatccttccaatcatgaattactttctgctatttgctgcttaatttccttttatcaataagatgatacaatttcagatttggaattaatagatacctgtagggatcaatatccttttnnnnnnnnnnnnnnnnnnnnnnnnnnnnnnnnnnnnnnnnnnnnnnnnnnnnnnn

SEQ ID NO: 124820 - DNA, 401 bp, Arabidopsis thaliana
  unsure (1)..(401): unsure at all n locations
accacgcgtccgattgacctgacagtttcttacgccggcgagcgaactcgacgaagaagacaacttccttttgttgcacctgtgagtctgcgaccatggctatgcaatctggtattgggttatcgaagattttgattctagctggagcaggttatactagtacgattctggttaagaatgggaagatggcagatattttgggtgagcttcaggctttggttaagcgatttgagaaatctggagatcatgtagatgatgattctgatgccatgactactcagatgcaacgattagcaatggaggttcggcaattggcttcgtcgcggcagataactgttatgaatggagctcaaggagctgattttacaccgtttattgtcncggcagcgacattgggagca

SEQ ID NO: 124821 - DNA, 657 bp, Arabidopsis thaliana
aaaaattacttctctttccttcgatcatcgtcttcctctggttctcagatctttgaatcgagcagaagcaattttaaatctcctatcagtgaatttttattactggagaagtaataaggcaaagatggtgaaaatgacattgatagctcgtgttactgatgggttacctctagctgaggggctcgatgatggacgtgacttaccggattcagatatgtataaacaacaggtcaaagctttgtttaagaatctgtccagaggtcaaaatgacgcttcaagaatgtccgttgaaactggcccctatgttttccattacatcatagaaggacgtgtttgctacttgacaatgtgtgaccgctcttacccaaagaaactcgctttccaatacctgggaggatcttcaagaatgaatttgaacgtgttcaatggggcctaaacattgaaacagctgctcggccttatgcctttattaaatttgatacattcatacagaaaaccaagaaactgtaccaagacactcgtacgcaacgaaacatcgccaagttgaatgatgaactctatgaggttcatcaaataatgacccggaatgtgcaagaagtcttaggtgttggtgaaaagctggaccaggtgagcgagatgtcgagccggttaacatct

SEQ ID NO: 124822 - DNA, 430 bp, Arabidopsis thaliana
atctttcttcctcttctctcattgaaatcgaacgaggatggggaagaagaaatcgaaggtaacggagccggaatctcaaaacgatgaatctcagacaatcttctccactctcttctccggcgaggttgaaagctctggctttgcgagtctcttctccgctgataaccctttccggcgaaaacaacctcaagaaatcaaagagtcgtcaattcctgatgagaagaaaggggataaacgaaatgcagagaacgaagaagaagaagaagaaacagatttgcctgtgaagacgaagaaatctaaaaaggaaaaaaagcttacagattccggcgacgagaaagagacgatttcggaggctgtagaagaaagtgggttggtttcaaagaggaagaagaggaagagagatgagattgagaacgaatacgagacgaag

SEQ ID NO: 124823 - DNA, 523 bp, Arabidopsis thaliana
gtcacgctaaactttgcgtgcctcgaaggagaaactaatctggttgctctagagaggcttgttgctaggtctccaaacctaaagagtctgaagctaaatcgtgcagtaccgttagatgcactcgcaaggttaatggcgtgtgcgccgcagatagttgacttaggagtagggtcttatgagaatgacccagattccgagtcttacttgaaactcatggctgtcataaagaaatgcacctcgttgaggagtttgtcgggttttctagaggctgctcctcactgtctctcagctttccacccaatatgtcataacctcacctccttgaatcttagttacgcagctgagattcatggtagccaccttattaagcttattcagcattgcaagaaacttcagcggttatggattttggatagtataggtgacaaagggcttgaagttgtagcttctacatgtaaagagttacaagagcttagggtttttccatctgatttactcggtggaggcaacacagctgtgaccg

SEQ ID NO: 124824 - DNA, 491 bp, Arabidopsis thaliana
cctgcaggtaccggtccggaattcccgggttgacccacgcgtgcgagagacagagtcattccactatggatgatagttcttcaacttgttctaatgattctatccgatcgggggtaaccaatgggtcctaccaagggaattccttgaatttccgaaaccagaagtcgccgaacaaaggaaagaaccaacaagtgcctgcaatgactgatgcccacagtttagcgagtgaaacagatgatcaaccctcaacacttggaacagaccccaagggtcagaattattcttccgaggcaagcaacgttggtgaatctgattgggttgttgtctcccacatccaggagccagagggttctcgaaatcgtattcctgttgggagggaacgcaaaacggttcaatccattgtgaactcggtcgacatggatcgacctaaagagaaaagcactgctgtactttcttctcccagaaatgttgccaagaatccttcaccatta

SEQ ID NO: 124825 - DNA, 526 bp, Arabidopsis thaliana
  unsure (1)..(526): unsure at all n locations
nnnnnnnnnnnnnnnnnnnnnnnnnnnnnnnnnnnnnnnnnnnnnnnnnnnnnnnnnnnnnnnnnnnnnnnnnnnnccacgcgtccgaaacggagagaggcggagaggagaaggaagacggcgtgaagcaatggtgtcgctgaagatccagaagcggctcgccgcatccgtaatgaaatgcgggaaaggaaaagtttggctcgaccccaatgaatcgggcgatatctctatggccaattccaggcagaacattaggaagcttgtgaaggatggtttcattatcaggaagcctactaagatccactcacgttctcgggctagggctttgaacgaggccaagcgaaagggtcgtcactctggatacggtaagagaaagggtacaagagaggcaaggctaccaaccaagattctttggatgaggagaatgagggctgtgagggcgtttcttgagcaagtaccgtgaggtcaagaagattgatagggacatgtaccatgacatggtcatgaaaaggaaggggtatttttt

SEQ ID NO: 124826 - DNA, 499 bp, Arabidopsis thaliana
caagaaaataaaaataaaaatggaattagttgaagagaccattcctaaagaagggaaaaagatgggagaaagaattgtggtcgacaaagcttatctttaccaagaagacaaaccactcaccgtctgcaagacttctctcttctacaccggcgatggcttcgccgcctatgactgccgtggtgatatcatcttcagggttgattcttatggacctgacacaagagataacgatgagattgtcctcatggacgcgaccgggaagtgtctccttaccgttaaacgaaagagaccaactctacaccaaagatgggaaggttttctcggcgagagatcggaaggtcagaaaccgatattcagcgtccgtagatcgtcgataatcggacggtgtacgatggaagtagaagtttacgacggaacaggagaagagtacattatcgatggagacttctcgcaacgaagctgtctcatatacgacacgaagaaatgtactgtggctgag

SEQ ID NO: 124827 - DNA, 697 bp, Arabidopsis thaliana
aatgaattgggcaaaattccgtgaaactgggagcccagaagacaccgacatgtcttctactccgatctcgtccgacacgacggcggtgtccaaagtgatcgatccaaattacgtattaatggttgctgatttcttcaaagctatttccccagacgaatcttgcaacgatttcacctctttcgactctttctccgtcttatttcaaaacaataccagagctctctccatcgcacgcggccgtgtctcgtgctccgtcaccgtcacgccaggcatatccaatttctttaaggggttacatggaggagcggtggcatcaattgcagagagagtagcgatggcttgtgtgaaaactgttgtgtctgaagacaaacatctgttcattggtgaattgagtatgtcttatctctcttctgctcctatttcgagtgaattgttggtggagggaacggtggtgaggactgggaggaatctgtcggtggtgactgttgagttcaagatcaaggagaccatgaaagtcacttacctatctcgtgctactttttaccattctcccatctctaagctttaaagctttttcacatgctcagtgatcttttgctgatctatttacattcttctgttcaataaaacaagattctgtatacagatattactgtctttaatcagtttatacaacactactacattatcatccaaa

SEQ ID NO: 124828 - DNA, 930 bp, Arabidopsis thaliana
  unsure (1)..(930): unsure at all n locations
acgcgcannnnnnnnnnnnnnnnnnnnnnnnnnnnnnnncgcctgcaggtaccggtccggaattcccgggttgacccacgcgtccgtacggctgcgagaagagacagaagggggccctccatctttcttcgtgattgagagaatcttcaacgaaagaaagcaactttttttgggtgaaattcacagaacaaccaaggtttttcttcttcttcttcttctccagttcctacagaatcatgcctgacaagaacatcgtagaggacgttatcggtgatttggtggataacttcacggagactgttcagaagaacgaacatggttcctccttcttcgaacaagaagattccgtcagttctcgtttcaaccgtttgtttgatcgccagaagccaattcatcatgtcttaggcggtggcaaatctgctgatgtgttgttatggaggaacaagaagatctctgcaagtgttttgatgggagctaccgcaatttgggtgctttttgaatggatcaatttccatttcctgcctctcgtttgctatgccctcttgcttggtatgattgcacaattcgtttggtctaacgcctctggattcttanaccgctcacagtctagagggccctccctagttcttccaaaggatttctttgctggagtcggggtgggccgtggaaaagaagttaaccgcggtttggtgtttcttcaggacttggcttgtaaagggaatttgaacaagtcctattggtgtattcgactatggtagctgcatgggtcggagcttgtgcatttcccaactgtttgatatccggttgtgggccccccatgccggttctttgaaagatcagacaaacggatggttttggatctatgatctgaattatatcttacagaactgaactggttctataaatcaagggagttgatagaacgggtgc

SEQ ID NO: 124829 - DNA, 548 bp, Arabidopsis thaliana
  unsure (1)..(548): unsure at all n locations
tcggcttnnncccccggttganaccccngttccctnaattcccccgnacgggnttgtccccacncgttccgggngattggtgatctggtgcggttgacccggacccgaggagagtttagccccacgggtcgtcctaaggtgacaagtccaagttcgaccccagtcaataaccgggcgtttgtcacaagtgttttagtccaagagtgagtggaatcaggttgggtcagatgagtcctcgagtcgtcgggaatagtccaaagccggcgagttgtgggaggagtcccttgaacccgtcgtcatcgaactgagattatatattcaggaagcttaataaaacaactaatctaatgaggatggattaagaatgtttaattagttaattaatttgatctttagctcttgaaaaagaaaagagcttcttgaatctctctttagtttatgttttgtgtgtttaatcccctttcgtggtgtttcatcttcagtcttatgtaaaatactaaaatgtctgtcttatttcgttatatatgtaaaattcgttaaatattttc

SEQ ID NO: 124830 - DNA, 777 bp, Arabidopsis thaliana
  unsure (1)..(777): unsure at all n locations
tacgactcctatagggaaagccggtacgcctgcaggtaccggtccggaattcccgggtcgacccacgcgtccgccagtattaagttttttttttaataattcagaattgaaagcaaaggaaaaagaagaaatcgaaatcggaaactgtatattgttgttcttcgattcctcctcgctctacgccgcgtcctctctctcaaattcatcggaagcaaccttcttctcccatcatcgcctgaatccaatggcaacgataaggaacttgaagataaaaacatcaacatgtaaaaggattgtgaaagagcttcactcttatgagaaagaagttgagagagaagcggctaagactgctgatatgaaggacaaaggtgctgatccctacgaccttaaacaacaggaaaatgtgttgggtgagtctaggatgatgattccggattgccacaaacgtctcgagtctgcattggctgacctcaagtccactttggcggaatttggaagagaccgggttgagaagggaaggtccagaggttccgaaggcttccaaagaaagacagtcgcggatgtggagaagcagtttcccactgaagatgcctgatttagccagcgatgagtgttaaatctgtattctgagaatggctatcatctgtaagaatctttatatctaaggttgcttggcgactgtatacactananaaaaaaaaaaaaaaaaaaaaaaaagggcggccgctctagaggatccaagcttacgtacgcgtgcatgcgacggcatagctcttc

SEQ ID NO: 124831 - DNA, 845 bp, Arabidopsis thaliana
  unsure (1)..(845): unsure at all n locations
ctcacttagggaaagctcggtacgcctgcaggtaccggtccggaattcccgggtcgacccacgcgtccgaaagagaagtcgaaatgccagtttcagctccatctccgcctcgtcttcattctccgttcattcactgtcccatcaatttcactccttcttctttctcggcgaggaatctccggtcgccgtcaacatcttatccccgaatcaaagctgaactcgatcccaacacggtagtcgcgatatctgtaggcgtagcaagcgtcgcattaggaatcggaatccctgtgttctacgagactcaaatcgacaatgcggctaagcgagagaatactcaaccttgttttccctgtaatggcaccggagctcagaaatgcagattgtgtgtgggaagtggtaatgtgaccgtagagcttggtggaggagagaaagaagtctcaaactgtatcaactgtgatggtgctggttccttaacttgcactacttgtcaaggctctggtgttcaacctcgataccttgatcgaagggagttcaaggacgatgactaaataccttgctctaaggaacatttcttttcttctcccttctcacatttcttcattggacaatggctgttttgttccccaaacatgttgagagaacatcatgacatggatattgtaattgtgaaaaaaaacccccagagttcaatcaaatgtttttttttgtnnnnnnnnnnnnnnnnnnnnnnnnnnnnnnnnnnnnnnnnnnnnnnnnnnnnnnnnnnnnnnnnnnnnnnnnnnnnnnnnnnnnnnnnnnnnnnnnnnnnnnnnnnnnnnnnnnnnnnnnnnnnnnnnnnnnnnnnn

SEQ ID NO: 124832 - DNA, 635 bp, Arabidopsis thaliana
  unsure (1)..(635): unsure at all n locations
attttttaagtcggaacctgaagtattttagtccgtttgtgataaagaaaaccgagactgtaccggtttatcttcagacccggttgtttgtccggtttggtaaaattagaacctaacctttttatccagaactggagactttggaagaactgtagaagtgttgttctcttcgtatcgtcctcaatcctcatggagactattatcaggctgttttgagcaaacgctgtgataaagaggctttctttcttgctagcaagtacacacgagtgacatggcggcatcaacttcaacccgattccttgttctgctcaaagatttttctgccttcagaaagatatcatggacttgtgctgcaactaattttcaccgccaatctcgttttttatgccatgttgcgaaagaagacgggtctcttactcttgcaagccttgatttggggaacaaaccacggaaatttgggaagggtaaggcgatgaagcttgagggaagttttgttactgaaatgggtcaaggtaaggtaagagcggtcaaagaccggtaaaaattgaaaagttntccaagggaaaaaaggccnnctgngatnagnggctnccntttggttttnttncaaaaacccntttnngggggctttgccc

SEQ ID NO: 124833 - DNA, 530 bp, Arabidopsis thaliana
acgactcactattgggaaagctggcacgcctgcaggtaccggtccggaattcccgggtcgacccacgcgtgcgcccacgcgtccgtcttctcttccggcgatattcccaaggcttgggagcaataacaataacaacgctatgttattaagcaacaacatcatttccattgaatcgatatctccgacgagaagctttcagattccgatgagtaaaatgagctgttgctctcggtgtttgcagagttatgaaaacgacgtagctaaggtggaaaaagatttaaccggagataaccggtcggttttgccacagtggttgcagaacgctaaagctaatgatgatggtgacaagaaactgacgaaagatcaacagattgtggagttgcagaagaaatggaacgacttatgtttgcgtttacatccgaatcagtctgtgtctgaaagaatagctccttctacgctgtctatgatgaaaataaacacaagatcggatataactccaccggggagtccggccgggaccagattggttt

SEQ ID NO: 124834 - DNA, 334 bp, Arabidopsis thaliana
gcgtccgttctggtgagaaaacggagtcggttgaggttttaatgttttttgatgacaaaaatggtgagggggagggaaaaattggagacggtgggaaagacacggaatcagaaagtgatgaaaccaagcaaaaagagaaaacacaactggaagagagctcagaagaaaacaaatctgaggatagtaatggaaccgaagagaatgctggtgaatctgaagaaaacaccgagaagaagtcagaagaaaacgctggtgaaactgaagagagcactgagaagagtaaggatgttttcccagctggtgaccaggctgaaatcacaaaggagtcaagcac

SEQ ID NO: 124835 - DNA, 497 bp, Arabidopsis thaliana
  unsure (1)..(497): unsure at all n locations
ccccntgcccntncccgactcgngtncctttgtgatctgactgagcncccntgctaggtttcgggaanccaagccattgtcagagcagtccgttcatggccccgtgatcgaagtttccgaaggtgatgccaggaatatccctatgtgaagttgtagataagcatcatgcttctattcttgttgtgggaagccatggatatggagctatcaagagggcggttctcgggagtacgagtgactactgcgctcatcatgctcattgctcggtgatgatcgtgaagaagcctaagatcaaggtctgaaacctaagggaaggctactcggtcaaagcaaagtctctgcatagtcttctaattcagaagaataaagtgaaataatattagcttgatgtgaaacaacgattcaagaccaattatacatttgcatctatatgtgtaattgtttactacatacaatgttttggtatccttagacaatcaatattcgtgtgttataat

SEQ ID NO: 124836 - DNA, 543 bp, Arabidopsis thaliana
cggacgcgtccgcccacaaattctctttttctgtgcaaacactttggaggattcttctaggcttctttctaccacaaacacaagagcgcgttttcttcacgccggcgaacaacgtcagagtcatggccaccggagatgggaaatcggtgatggtcgtcggagttgacgacagcgagcagagcacttacgccttggagtggacgctcgatcgtttcttcgctccttacgctcccaattatccttttaagctcttcatcgtccacgccaaacctaacgccgtctccgccgttggtctcgctggtcccggaactgcggaggttgtaccttatgttgatgctgatctgaagcataccgctgctaaggttgtcgagaaagccaaagcaatttgtcagagcagatcggttcatggcgcggtgatcgaagttttcgaaggtgatgcaaggaatatcctatgtgaagttgtagataagcatcatgcttctattcttgttgtgggaagccatggatatggagctatcaagagggcggttctcgggagtacga

SEQ ID NO: 124837 - DNA, 619 bp, Arabidopsis thaliana
gctggtacgcctgcaggtaccggtccggaattcccgggtcgacccacgaaccctaaatccccaaaatggaataatcaaaatttcatcaggagatctctaaaatcgaaatctacttgatcccgcaacgaagaaatgttaagaagaagactcttgtcgatcatatcaacatcactcatcaattcttcgtttcatcaaaccgcgaaacccagattcatcatttcttcaccacttcttcaatgccgtccttctccgatctctactcaaattccgacctctacgagcagggctttgtcgtttcaaggaatcagggcttatagtttattgagcttgaacgatctgagagacaatgtgccgagaaaactcaagacgaggaaaggaagaggtattgggtctggtaaaggtaaaactgctggaagaggtcacaaggggcaaaaagcgagaggaacgatgaagtttggtttcgaaggtggtcagactccactacgacgtcgttaccccaacgggggctcaagaacaaatttaagctccattttcagccggggcgtctaggaagattgctaactcataacgctggaagatagatctcatgattgattcatgaaacctcaggtgtgggagc

SEQ ID NO: 124838 - DNA, 485 bp, Arabidopsis thaliana
cccacgcgtccgggatccttcctgatttcaaaatttcttctgcccaccagcagcagcagcagatgaagaaggttaaacagattcgtgtcttaaagcctttcgatcttctctcggaagagctcgtctttatcatccttgacctcatctctcccaacccttccgatctcaaatccttctctcttacttgcaaatctttctaccagctcgagtccaagcaccgcggatccttaaaacctctccgctccgactatctccctcgcatcttgactcgttaccggaacaccaccgatctcgatcttaccttctgcccgcgtgtcactgactacgcgcttagcgtcgttggctgtctctccggacctacgcttcgctccctcgacctctcgcgctctggctccttctccgccgcgggactactgcgattggccctcaaatgtgtcaatttagtcgagattgacctgtccaatgcgactgagatgagagacgcc

SEQ ID NO: 124839 - DNA, 648 bp, Arabidopsis thaliana
  unsure (1)..(648): unsure at all n locations
aaaaaaacaggatccgctgggtcttttttataatgatgaagttcctcgctttcaacgccaaccaaaaacctccagaaagctaattagggaaacatttgaaaaaactcagtgatctgctcttctctctaattgcaatggattcattgagattaatatctaagagcatcaagattgaaggaaccccatttggttcctctcaccaacgcaatcaaattttcctcaaatccgtcgctttcttccttttgatcggtctcgcttaccgttttctcatcactaattccacccgtttctccggttcccaccgttcgatcctcgccggaatctctcccgccggatccttcaggtctcactgccatcactcaaacttcagcctctgtcgattccccagcaaacatcacaaccattgcttcacagaatgtttcaaccaagtgtgatatctttatcgggaattgggtaccagacccatcagggccaatctacancaatgtctnttgccgtcatatncaaggttaccaaaattngcttgaaaaacgggaggncagatntgaattacctngntgggggatggnaccntgggttgangttttcccggggttnaccctgggaattccttgaaatntgggggcaaagggnngggnttnncggggg

SEQ ID NO: 124840 - DNA, 676 bp, Arabidopsis thaliana
  unsure (1)..(676): unsure at all n locations
atgatactgccnnnnnnnnnnnnnnnnnnnnnnnnnnnnnnnnnnnnnnnnnnnnnnnnnnnnnnnnnnnggctcattgacacaaagagagtgggagagagacatgacgggctgtgtgaattctatttctccgccgccggtgactttataccggcatcgtgcctctccgtcacggtcgtccttctcattatccggcgatgccttacactctctttaccggcaccgacgtgtatcaagatctccgtcgattatcgctcccaaatttcagattgtggcggctgaaaaatcggagcctctgaaaattatgatatcaggagctcctgcttctggtaaaggtacacaatgcgagctgattactcacaaatatggtttggtgcatatctctgctggagatttgctgagggctgaaatcgcttctggaagtgaaaatggaagacgtgctaaagaacatatggagaaaggacaattggtccctgatgaaatagttgtaatgatggtaaaagatcgtttatcacagacagattcagagcaaaaaggatggcttttggatggatatccaaggagtgcatcacaggcaacagctcttaagggatttggattccagcctgatctattcattgtcctcgaagttcctgaagaaattctaattgaaagagttgttgggcgtcgattggat

SEQ ID NO: 124841 - DNA, 908 bp, Arabidopsis thaliana
tcatagcctaaaccaaagaaaacccttatttgcgatccccacttgttgttcatcaccaagccaagctccatgtcctagtcactccacagattccctatcatcatcaattcgtttcaaacttagttcctttcaaagtcttgtacatatatacacacacctattattctcttggtgtgtttgtgtgttacatatacgtgtgagtacatactttgttgtaaaagtggatcggaggtatggaaagggaccggttccaccggaaacatcggcggcggcggatgataattcgtcttggaacgagactgatgtcaccgccatggtctccgctctcagccgtgtcatagagaatccgacagacccgccggtcaaacaagagcttgataaatcggatcaacatcaaccagaccaagatcaaccaagaagaagacactatagaggcgtaaggcagagaccatggggtaaatgggcggcagaaatccgcgatccaaagaaagcagcccgtgtctggctcgggactttcgagacgggcagaggaggctgctttagcctatgacccgagctgccctcaaattcaaaggcaccaaggcttaacttgaacttccctgaacgggctccaaaggccctactatccaccacaaccatttctcatgcaccaagaggagttagtgaatccatgaactcacctcctcctcgacctggtccacctttaactactactacttcgtggccaatgacttataaccaggacatacttcaatacgctcagttgcttacgagtaacaatgaggttgatttatcatactacacgtcgactctctttagtcaacctttttcaacgccttcttcatcttcttcttcctcccaacagacgcagcaacagcagctacaacaacacaacagcagcgtgaaga

SEQ ID NO: 124842 - DNA, 694 bp, Arabidopsis thaliana
  unsure (1)..(694): unsure at all n locations
aggnnnnnnnnnnnnnnnnnnnnnnnnnnnnnnnnnnnnnnnnnnnnnnnnnnnnnnnnnnnnnnnnnnnnnnnnnnnnnnnnnnnnnnnnnnnnnnnnnccacgcgtccgcccacgcgtccgtacggctgcgagaagacgacagaagggtacgaaaagggtacggctgcgagaagacgacagaaggatacggctgcgagaagacgacagaagggtacggctgcgagaagacgacagaagggggaaaacgaaagttccgaagaagaagaagaagaaggagaaaagatgatttaccgaaagtggagtttgctgtccggcccaccggttatcctcggcggagcggtaattgctgccgtcgccgtcggattcgtcttgcaaaacgtaacgaaaggggagcagaagaagaatgtctcaacaaacaagtgagaagacaaatggagagatgctacaaaatgtggtgatcatgtgatttgatacaatttagttcttgcagtgtataagctcaataatgcttttgtaagcttttgaatacacagatctttgtggtgtttttagattcttgttactaataatgatatttcattttccaaaaaaaaaaatgaaatttattcggtgcatnttnaggnntttncnancnnnnnnnnnnnnnnnnnnnnnnnnnnnnnnnnnnnnnnnnnnnnnnnnnnnnnnnnnn

SEQ ID NO: 124843 - DNA, 614 bp, Arabidopsis thaliana
  unsure (1)..(614): unsure at all n locations
nnnnnnnnnnnnnnnnnnnnnnnnnnnnnnnnnnnnnnnnnnnnnnnnnnnnnnnnnnnnnnnnnnnnnnnnnnnnnnnnnnnccacgcgtgcgtgaagacgacagaagggtacggctgcgagaagacgacagaagggtacggctgcgagaagacgacagaagggggaaatttgagtaccaagagagctctttttcatcctaaagagatcttcaaatttagatttcaacacataaaagttggtgacatgaagaatgaaggaaaggaagtgtgcagaagctaaggtttaagagaccccactcctcccatttcgagtttttgggtatctttgaacatttgggagtgtgtgtttttgggggtaataggatacaaaacttaaaagctgtttgttttgtttgtactgttttgttcttgggtttgtctcgtactaatcaagtaaaacaaatgtctcgtactctatgactctctctttctaaattggtattagatgaaattaccccatatattttgatggcaataagaggaataaacaccataaaagcggccgctttaannnnnnnnnnnnnnnnnnnnnnnnnnnnnnnnnnnnnnnnnnnnnnnnnnnnnnnnnnnnnn

SEQ ID NO: 124844 - DNA, 517 bp, Arabidopsis thaliana
ttgtttacgaggtagtctttaaggtgaagctagaggatccggcctatggatgggacacgccggtgaacctaaagctagtcttgcctaacggtaaggagaaaccacaagagaaaaaggtgagtttgagggaacttccaaggtataaatgggtcgatgtcagagttggcgagttcgtacctgagaaatccgctgccggagagatcactttctcaatgtatgagcatgtggctggtgtttggaagaaagggctctccctcaaaggtgttgcaattcgtcccaaacagtaataattgttatggcatagaaaaacataaatctccatatgcaccaatggaccttctcaacatatatttcacatcatgtcatgtgtgtataataaggttgttctatcgtatttttagttttaataataactttaatgttggtgttgaataaactcaaaacgagtgttttgacggttgttaggttccaagcttacgtacgcgtgcatgagacgtcatagtcttgtataggtcac

SEQ ID NO: 124845 - DNA, 506 bp, Arabidopsis thaliana
  unsure (1)..(506): unsure at all n locations
cggtcggttacncgggtcgagacacacgtttgangaaaaaaaggtaagggtgcgaaaaaaacacaaaaagggaaaggttggatatactcttaaattcgggacgatgaatcgattttatagctccgatattgttattcatgatatttctttcattcgatatcatcgcaatctaattcatctgagtaagtttacaagcgaaagatttctcatctctatgggattaaatcccgagatattccaaagaaaaaaaaaataataataataaacgattaaattatggaagtaaatattcttgcatttattgctactgcactcttcattctcgttcctactgcttttttgcttataatttacgtaaaaaccgttagtcaaaatgattaatttgaataaaattttactatcaaaaaaaaaaagatttcaatttctcgtcttaaatcaaaggaacgcattagactcagtagtagtatcctaaggggtccgctagtatggtagaaagagatctcttt

SEQ ID NO: 124846 - DNA, 812 bp, Arabidopsis thaliana
ccgctctcccataatttcgtgtaggaaaatggaataggatcgcgtgtaggacatttgccaagagtacctatatatacttttctttctatgaagtcaaggaattttaaatagttcgaattcaaccaaggaaagaggtttttttttaataaagataaaatgtgtcttccctaatgaataggctctttttaaagattagagtcgatgtcgaataaaaaactcgtaagaaaaattaactcgttaattttttttgaatattttcgtttttttaccgggactcgtctttgtcacattccctttctttgttttccaaaaagatgataaaccctttcaatttttttatttcaaattgaacttcgtacttgttttctctatattgatttctattgtttatttaaggttctttagaaactctttttgtaaagaatcgaagttttttatgatacttcatcagatgattgtacaaggaaagtaaactactaggttttagaaaggaaagccgggaaaaagaatcataaagaacttttttttttattggatcgggaatctcattatgtattcggtgtggataaaagatcttcctatgttatactattaaattcttgacgatgaatcgattttatagctccgatattgttattcatgatatttctttcattcgatatcatcgcaatctaattcatctgagtaagtttacaagcgaaagatttctcatctctatgggattaaatcccgagatattccaaagaaaaaaaaaataataataataaacgattaaattatggaagtaaatattcttgcatttattgctactg

SEQ ID NO: 124847 - DNA, 411 bp, Arabidopsis thaliana
tacggctgcgagaggacgacagaagggtacggctgcgagaagacgacagaagggtacggctgcgagaagacgacagaagggtacggctgcgagaagacgacagaaggggacgatgaatcgattttatagctccgatattgttattcatgatatttctttcattcgatatcatcgcaatctaattcatctgagtaagtttacaagcgaaagatttctcatctctatgggattaaatcccgagatattccaaagaaaaaaaaataataataataaacgattaaattatggaagtaaatattcttgcatttattgctactgcactcttcattctcgttcctactgcttttttgcttataatttacgtaaaaaccgttagtcaaaatgattaatttgaataaaattttcctatcc

SEQ ID NO: 124848 - DNA, 671 bp, Arabidopsis thaliana
  unsure (1)..(671): unsure at all n locations
gccgagcactaatacgactcatatagggaaagctggtacgcctgcaggtaccggtccggaattcccggtgtcgacccacgcgtccgcccacgcgtccgcccacgcgtccgctgcgagaagacgacagaagggtacggctgcgagaagacgacagaagggtacggctgcgagaagacgacagaagggtacggctgcgagaagacgacagaagggtacggctgcgagaagacgacagaaggggagaaaccacaagagaaaaaggtgagtttgagggaacttccaaggtataaatgggtcgatgtcagagttggcgagttcgtacctgagaaatccgctgccggagagatcactttctcaatgtatgagcatgcggctggtgtttggaagaaagggctctccctcaaaggtgttgcaattcgtcccaaacagtaataattgttatggcatagaaaaacataaatctccatatgcaccaatggaccttctcaacatatatttcacatcatgtcatgtgtgtataataaggttgttctatcgtatttttagttttaataataactttaatgttggtgttgnnnnnnnnnnnnnnnnnnnnnnnnnnnnnnnnnnnnnnnnnnnnnnnnnnnnnnnnnnnnnnnnnnnnnnnnnnnnnnnnnnnnnnnnnnnnnnnn

SEQ ID NO: 124849 - DNA, 516 bp, Arabidopsis thaliana
  unsure (1)..(516): unsure at all n locations
cgcctcgtttttttttgnnnnnnnnnnnnnnnnnnnnnnnnnnnnnnnnnnnnnnnnnnnnnnnnnnnnnnnnnnnnnnnnnnnnnnnnnnnnnnnnnnnnnnnnnnnnnnnnnnnnnnnnnnnnnnnnnnnnnnnnnnnnnnnnnccacgcgtccgtacggctgcgagaagacgacagaagggtacggctccgataagacaacaggagggtacggctgcgagaagtcgacacaaggatacggctgcgagaagacgacagaagggtacggctgcgcgaacccccccccagggtacggctgcgagaaccccacagaagggatggcatgagctttttgttatttgtttctaatatttggactcctatgtgttgtgtgtatatgattcataattaatactatatttatggattgatttctttctatagaaaaaaaaaaaaaaaacaaacccaaaaagcggccgctctagaggatccaagcttacgtacgcgtgcgtgcgacgtcataactctnctatag

SEQ ID NO: 124850 - DNA, 530 bp, Arabidopsis thaliana
  unsure (1)..(530): unsure at all n locations
tgggcaattttgactcggataccatttttccccaggggaacaccctatgcccccgtttttcgccaagcttttatcacccttccctttagagaaaaatttgtatcccccccaggtacccgttccggaatttccgggttgaaccccgcgtccccggacccgtgggcggacgcgtgggagacgacagaagggttcggctgcgagaagaccacacaagggtccggctgcacaagacgacagaagggttcggctgcgagaagacgtcagaagggtacggctgcgagaagacgacagaagggtacggctgcgagaagcagacgcagaagggtacggctgcgagaagacgacagaagggtacggctgcgagaagacgacagaagggtacggctgcgagaagacgacagaagggtacggctgcgagaagacgacagaagggggctaaaaaaaaaaaaaaaaaaaaaaaacaaagcggccgctctagaggatccaagcttacgtacgcgtgcatgcgacgtcatagaacttctatagtn

SEQ ID NO: 124851 - DNA, 690 bp, Arabidopsis thaliana
  unsure (1)..(690): unsure at all n locations
atgatatcgccgnnnnnnnnnnnnnnnnnnnnnnnnnnnnnnnnnnnnnnnnnnnnnnnnnnnnnnnnnnnnnnnnnnnnnnccacgcgtccgcccacgcgtccgcccacgcgtccgcccacgcgtccgtacggctgcgagaagacaacagaagggtacggctgcgagaagacgacagaagggtacggctgcgagaagacgccagaagggtccggctgcgagaagacgacagaagggtacggctgcgagaagacgacagaggggtacggctgcgagaagacgacagaagggtacggctgcgagaagacgccagaaggggagagaagcaaaagaaagtgacactaacgtgtacatattccggtgaccggggagtctctaaatcctatggtgaagctcttctctgcaaaatctcaaccatcaagcgtttgatatgtccttcaaggaaacaataactcagagttgcttgatgtttgcttttattatcattttctctttccaataaaatgaatcttttatgtcgaatgtgattggatattgtttagataaacaaaaaactctcaatagcaataataatcataggccaagtggaaaaaaaaaaaaaaaaaaaaaaaaaaaaaagcggccgctctagaggatccaagcttacgtacgcgtgcaggcgacgtcataactcttctatagttgtaccta

SEQ ID NO: 124852 - DNA, 632 bp, Arabidopsis thaliana
  unsure (1)..(632): unsure at all n locations
ctcttattaaacacgggattacatcatttgtgacgttgaaccacttcgactatcctcaagaactcgagaaccggttcaagagttggttaagctccgagatgcagaaagatttcgggtacttagctgatatatgtttcaaacattttggagaccgagttaaacactggatcacgattaacgaaccaaaccaacatataagcttagcatatcgaagtggtttgtttccaccagcgcggtgctccatgccatacggaaattgtactcacgggaactcagaaactgagccttttatagccgctcataatatgatcctcgcacatgcaaaggcgattcaaatataccgaaccaaatatcaaagagaacaaaagggaatcattggcattgtggtacaaacatcatggtttgaacccataagcgattcgattgctgataaaaatgctgccgngagagctcaatcattttattcaaattgggttctagatccccgttgtgtatggggaattatccgggaggaatggtgatctccttggtcagctttgcnaaaatttttngggcaattnanttgccngcntattgggctttaaannngcctttttggggtttanncccgttccaaggttcntcntcaagnt

SEQ ID NO: 124853 - DNA, 1035 bp, Arabidopsis thaliana
  unsure (1)..(1035): unsure at all n locations
gcagaaccagcttctttcttccgaagagaaaccaaaaacaaaagaaaatggaaatggtgacaagttttgtatatccaccacctccatcaatattgctcaattgtatgagcgtcgttggtgtagctgctctggccaatatcggttggtctgaaatcagaggaaatcatctcaaatactccaaattcggcgtatcatcatcatcaccacaaccacagaaggagcgattcggcagcatctcaagccgaaatggaatgcttttgctatacacacctgcgtttctagcagctgcgtcttctttcttcgtcgtaccttctgatgatctcaggtttcttcttctcaaatccgcacttgccctccatttcttcaagagggtattcagaggttctgttcatacataaatacagtggagggatggctttagactcagctttcaccataagtagcagctatttctcatccacagcattgatgttatacagtcaaaatctcaccttgggacttaccgagccgagtttcgatatgaaactcgccggagttgtgatgtttgtggtgggaattgttgggaatctgtatcaccatgttttgctggctaagctaaggaaagaagatgggaagaaagagtacaagataccaaaaggaggtctctttgatataatcatatgccctcactatctatttgagatccttgtgttttggagcttctttctcatctctcagaccatttattcattttctttcgctatgggaacaatgctctatctcattggtcggagttatgctacaagaacttggtatctttccaagtttgatgacttccccaagcatatcaaggctctcattccctttgtattctagagttttgttgttgttgtttcaagtgtctgaataaaactaagagaccttataggctcatttgtttaagttgaatttaataataaatcattagaaaaaaaaaaaaaaaaaagnnnnnnnnnnnnnnnnnnnnnnnnnnnnnnnnnnnnnnnnnnnnnnnnnnnnnnnnnnnnnnnnnnnnnn

SEQ ID NO: 124854 - DNA, 488 bp, Arabidopsis thaliana
  unsure (1)..(488): unsure at all n locations
aaattgcagaagcagcttctttcttccaaagagaaaccaaaaacaaaagaaaatggaaatggtgacaagttttgtatatccaccacctccatcgatattgctcaattgtatgagcgtcgttggtgtagccgctctggccaatatcggttggtctgaaatcagaggaaagcatctcaaatactccaaattcggcgtatcatcatcatcaccacaaccacaagaaggagcgattcggcagcatctctagcagaaatggaatgctttttgctatacacaacctgcggtttcttagccccttgcggtcttcttttcttcgtcttaccttctgatggatctcaagggttcttccttcttcaaatcccggacttgccctcccatttttttccaagggggggtttcggggggtnttttcccaaaaaaaaantaccagggggggggggttgcctttnaggcncagtttttncccaaagggggggngtttttttttt

SEQ ID NO: 124855 - DNA, 472 bp, Arabidopsis thaliana
  unsure (1)..(472): unsure at all n locations
tnaatttttttttgaatctccagagttgtttcccgttgttagattcatcgatttcgaatcctatcccgaagaattgttcttcaatctcgtgtttctccgacggcttctccggatatatcagtcgactgagaagagaaggatttgtttcggttgtgaaatcggagaatcgctgcataggaaagcgatgataacaagatcgaatctagcagagcagctgagggaatatcagattcgatctaagcatgattgggcttctgtctctttcttctcgtcgacctcgaatttttcttcttctagggtggatgttgtagtctttgtcatctgggagctagtcatcttagcattcttncgtgtttcagcgggtttccntgtacttcaagcgggtacaactcgcattcatcttngnatgggcactttnctgcnacnaatttcatgaggcacaaagcaagtaaggtnagccnggggnagaatt

SEQ ID NO: 124856 - DNA, 391 bp, Arabidopsis thaliana
cgaaaatctcaaaactttaagatcctttatttctgatctctcttcgaagtttcggtttttggtttcttaattgtcaagtcatttcatcgatgtcaggatatcctccgactagccaaggttacggttacggttacggcggcggtaatcaacctccaccacctcaaccaccttactcttccggcggaaacaatcctccctacggatcatcaacaacctcttctccttacgctgtaccctacggcgcatctaaaccacaatcatcatcctcttctgcgccgacgtacggatcttcatcatacggagcaccgcctccttcagctccgtacgcgccttctccaggagactacaacaagccgccaaaggagaaaccatacggaggaggctacggagc

SEQ ID NO: 124857 - DNA, 901 bp, Arabidopsis thaliana
ttgaagaatcagagaagggtgggaagaaggaaaatttcatcagaaccagattacatgcctttgtggagtatgaaaaccggaccggcattcccggttcgacccacgcgtccgataatgagcaagactggagaaatgggttgcgagttaagcttcttgaacaatcagcaggaaagtttgcacagagaagaccagctaggaaggaagtcgataaagaaaaggacactacaggcagagttcatgatcaaactggaggagagaaaaacaaaaagacgcgtgaacatcaaaatcaccgtctccatcattctgataatcctgctgatgatgacggtggcaatcatcagaaggataaaaatggaaacaaaggcagagttgtaggacaaggaaggcgacagaatcatcaaggcggcaacggcattggacatggaacagcttcatcatcttctcatcctaattatcatcctgttgaggtctcaaagcgtccacctggcccgagaatgcctgatgggacgagagggttcacaatggggcgtggtaaagcgattcctcctcccacatctactcaaaccagtcatgaagtttgatcggttctgcatgttcggttgtatcattgtgtggttttatttacattaaaaaatgtgaaactttgtatgtaattagaattgagatgttgttttggatttgagtttccttttggcatattcaagtcctccaaatcttcactttggggagttagatttgtgttcgcagttttggtgaatgaaaaaatgatccatttgataacactaaaaaaaaaaaaaaaaaaggcggccgttctaaagatcccacttacgaccgtgcatgcacgcataccttttttttgggtacctaaatcaatcctggctgcgtttaaacgcggatgggc

SEQ ID NO: 124858 - DNA, 771 bp, Arabidopsis thaliana
gttcccgaattaaatttaagccaaagaacttgaaaaaaaaatggggtttgcgaagttaaaagcttctttgaacaaagcagcaaggaaagttttgcccagagaaagaccagctaggaagggagtcggataaagaaaaggacactccaggccgagttcatgatcaaactggaggagataaaaacaaaaagacgcgtgaacatcaaaatcaccgtctccatcattctgataatcctgcttgatgacgacggtggcaataataaattggaaacaaaggcagaggtggaggacaaggaatggcgacaggattcatcaaggccgggcaaccggacattggaacagctttcatccatctttcctcattcataatttttcatcccctgttggggtcccaaagcgtccacctggcccgagaatgcctgatgggacgagagggttcacaatggggcgtggtaaagtgattcctcctcccacatctactcaaactagtcatgaagtttgatcggttctgcatgttcggttgtatcattgtgtggttttatttacattaaaaaatgtgaaatttgtatgtaattagaattgagatgttgttttggatttgagtttccttttggcatattcaagtcctccaaatcttcactttggtagttagttttgtgttgtaagttttggtgaatgaaaaaatgatccatttgataaactaaaaaaaaaaaaaaaaaaagggcggccgctctagaggatccaagcttacgtacgcgtgcatgcgacgtgaag

SEQ ID NO: 124859 - DNA, 483 bp, Arabidopsis thaliana
  unsure (1)..(483): unsure at all n locations
ccggcactatacgactcatatagggaaagctggtacgcctgcaggtaccggtccggaattcccgggtcgacccacgcgtgcgtacggctgcgagacgacagaaggatacggctgcgagaagacgacagaagggtacggctgcgagaagacgacagaagggtacggctgcgagaagacgacagaagggtacggctgcgagaagacgacagaagggtacggctgcnagaagaggggggaagggtacggctgcnagaagacgacagaagggtacggctgcnagaagacgacagaagggagaatcagagaagggtgggaagaaggaaaatttcatcagaaccagattacatgcctttgtggagtatgaaacggtggacgcagctgaaaaagcggcagctactttgaataatgagcaagactggagaaatgggttgcgagttaagcttcttgaacaagcagcacgaaagtttgcacagagaagaccag

SEQ ID NO: 124860 - DNA, 259 bp, Arabidopsis thaliana
aaaaaattccagttctcgagaagaacaagaatctgctctgctctcgtttctgtttttcgctctccggccaatctactaaagggtgcggacgtgattctcgagataaaggagagaaagaagaagatggagatcgataaagcgatcggagaaagtgacgataagaggttgtagactaagtacaatatcgccatcttcgtcattaaaagagctcttgctctttactctattgatgaggtccgctttagttttaaaggaaaga

SEQ ID NO: 124861 - DNA, 710 bp, Arabidopsis thaliana
  unsure (1)..(710): unsure at all n locations
ctaggtttgttgtgtgtacttagttatttacaggaagctgcctgactctattatccgacgacttgaaatggagaaggaactacttgaaatagaatggcctactgttaatttggatggtgatctgaagcaaatggcgctcagactatttgataaagggatgcgttccgtacaacatggtaccaacaatggaatacaaaagcgacctgctgggctatttgctctgaactacgccctgtttatgattgcagtagatgagttagaaagccgtacggacattttgaaggcatctgttcaactctacccaacatgcttggagctaaaattgttagcagttaggatgcaatcaaatgagttaaaggatatgttttcgtctgggtttgaagagcttctcaagcaggaagcaaaagaggcgtcatgcatacagtgtatttggaatcagtatgctgaatatgctttggaaggaggaagctacgatttggcaagagaactcatgtcccggtggtaccggttcagtatgggatgttttgtcccatacgtttaaggcagtacggggcantgaagnaggaagggggtgtaatattctggnatcagctttnttcaggnncttaaattttnaatcgggnncaggtggntttgtgttttgggtnccttaancccccncttnaaaaacnctncttcagggaaccttgccttngggtcnnttnncattt

SEQ ID NO: 124862 - DNA, 275 bp, Arabidopsis thaliana
caatctttctctttctctctgttcttgctctcgcaaatcgcaatggattcgtttgatttcgatgacgtgaaagcagagagggcgcagggcgttgcggcgtttcaaccgcttctgtagaattggccgtttcttccgtgcggcggaggtttgcgtcgctctactcttcatcttttggacattttcgcaacttcctttcgtcgttcaaatctccggagcgtttctccgccgtagcgccgccgtcatatctactcctctgttcgttttcctcctcggga

SEQ ID NO: 124863 - DNA, 543 bp, Arabidopsis thaliana
caacttaaacacaaaaaccaacaattatcaatcttcgatgacgcatctcaacaaaaaacagaggttagagaataaccataacaatactgtgaacaaccatttcgaagacttacatgacgatctcatcatctctatccgccgcaaactcgcttcctccgcttcttctccttccgatttcctcaccgttctctccacatgcaagagattgaatcggttaggattacatcctctggttttatctaaagccggtactcaaaccctagccgtcacggcggagaaatggtcagattcttctcataaattcctcaaactctgtgttaatgccgggaaacatcggcgcttcgtacttctctcggaatgatccgattttactgtctacaaaatccagtgagcggcgcgtcattaatggctaaagcggcgattaaatcacacgcgccggcgctttattcgttatcggggattcagtttaacggaagcggcggttcaaaaaccgataagaatctacgcgccggcgttgctctttgtgcacgctctgcttattta

SEQ ID NO: 124864 - DNA, 823 bp, Arabidopsis thaliana
  unsure (1)..(823): unsure at all n locations
tagagacttggctgcacaaaagaacataagcgagcttgaggcgctagccaatgctgaggttgagaaatttatatccctttggtgcagtaagaagaatttcagagaagattatgagaagagaatcttgcaatcacttgattctaggcagctgagccgagatggacggatgaggaaccccgatgagaagcctctgattgctccagaggcagcaccatcaaaggcaacgccttctgaaaccgaggttgtccctaaagctaaggcaaagccgcagccaaaggaggaaccagtttctgcacctaaaccagatgctactgttgctcagaatactgagaaagctaaagatgcagtaaaagtaaagaatgttgctgatgatgatgatgatgaagtatatggtcttggaaagccgcagaaggaagaaaagccggttgatgcagctacggcgaaggaaatgagaaagcaagaggagattgctaaagccaagcaagccatggaaaggaagaagaagctggcagagaaagctgctgctaaagctgctataagagctcaaaaggaagctgagaagaaagaaaagaaggagcaagagaagaaggccaagaagaaaaccgggggcaacacagaaaccgtgacttaggaagttcccagaagcttctaagggaggagatttnaagctcccggtgcaggggggtggaacccccaggaagggagaaaattttttcaagggggggacccctttagggaccagggccccccgggtngggggcccctaaacggttccccagggggntcctttagggttanaagtcggcttatttctttgggtttt

SEQ ID NO: 124865 - DNA, 884 bp, Arabidopsis thaliana
  unsure (1)..(884): unsure at all n locations
gaaagccgcagaaggaagaaaagccggttgatgcagctacggcgaaggaaatnagaaagcaagaggagattgctaaagccaagcaagccatggaaaggaagaagaagctggcagagaaagctgctgctaaagctgctataagagctcaaaaggaagctgagaagaaagaaaagaaggagcaagagaagaaggccaggaagaaaaccggaggcaacacagaaaccgagactgaggaagttccagaagcttctgaggaggagattgaagctccggtgcaggaggagaaaccgcagaaggaaaaagtcttcaaggagaaaccaattaaggaacaggacccgcggtaggggaccagaaacgatcccaagagcgatccttaagcgtaagaagtcgactaattactgggtttatgctgctccagcggctctggtggtactgttgcttcttgtcttgggttactactacgttctctagatcgaacggagtgatcaagcgaagctgtcttgttgtagtttggaatactttaaaactgggatttttgccttcttgactcttaaaaaactcataagcttatgcatcttttacatacgagtagagactcttttcttttaagtactttttacaatcttctcttctgttgttgaggctttaaactttgaaggaaggaaaagatacaacacacttacaaataacaatttgtctttttggagnccggatttttttttttttggtctctgnttttcncgctttcttttgatgcaacatgcaaccaacccaatnagtgttnaggggctangcaaaggtttaatntaaaggggaaggggtacnaccaaaggggccaccaaatgggggnatttcncccctttangnaccggagntttntnnag

SEQ ID NO: 124866 - DNA, 852 bp, Arabidopsis thaliana
  unsure (1)..(852): unsure at all n locations
acgcacacnnnnnnnnnnnnnnnnnnnnnnnnnnnnnnnnnnnnnnnnnnnnnnnnnnnnnnnnnnnnnnnnnnnnnccacgcgtccgcatttttcatcgttgatcagtcgtcgatcctcttgagtgatttgattttagactttctagttatcaaactcgaaagatggattctgtccttgtagtgggcattgcatcggttattctcggtgcgttgatcgctgtactcttcttcggtagctacttccggaagcggacatcggaggtgcaatccatggccaaagcggagcctcaggatccgatccggaatccaaagtcgaatcatcctgctccgaagaagaatcatcccaaatctcaagcgtccgataagaatcagaacaaacggcatcatcctttagatttaaacacgttgaaaggccacggtgatgctgttactggactctgtttctcgtccgatggaaagagcttggccacagcttgcgctgatggagtaatcagggtgttcaagctagatgatgcatcaagcaaaagcttcaaatttttaaggataaatcttcctgctggaggacatccaaccgccgtggcatttgctgacgatgcctcatctattgttgggggctttcatcatatgtctggttcatctttgtacatgtacggtgaagantagcaaaaggatcagcaagggaagccttctcttcctagtatcaaatgggaccaccatcatattcatgagaagagatcagtgcttaccatctctggagctactgcaacttacggtactgctgatggaagtgttggcattgcctcttgttctgaaaggactgatatcgtncctttggcatgggaaactggga

SEQ ID NO: 124867 - DNA, 388 bp, Arabidopsis thaliana
ctcgatttctctgctccatcttcttcctcgtcttctcattctctctcgctctggcacagtagaaactgagctcacgaaagcaggtagtcagtgtttttgtttcgaactcttccaacatgcagaaggaaattgctggtgatgctccatcagcaccaaccactcgtgttcggcatcggcagcgaaacagcgatgttggtgcaggggcaggcaaaccaaatggaaaccatttacttgtcaatgacagcaaaaaatacaaatcgtttctcattcgagcatactccactttctggatgataggtggttttgctcttatagtttacctgggtcatctctacattacagccatggtggttgttattcagatattcatggcacgagaactttttaa

SEQ ID NO: 124868 - DNA, 798 bp, Arabidopsis thaliana
  unsure (1)..(798): unsure at all n locations
ggcaccatacgactcactttanggagagctggtacgcctgcaggtaccggtccggaattcccgggtcgacccacgcgtccgggaaaagcagctctcaagagaagttcatcagttagaggaagcgggatcgagactcctttcagcgaaagaccttctccgaggtctgaatcgatgagatcatatgcagtgggggaggttcagtgccatgcaccagactctcctactgagtttataagtagagatactaggaaacttttggcagagagattgaagaatgttttgagaaaagagatgactccttcacatgattctgtgaccaaatctagtagccgtttgcgacctactgtgtcggatgcagcgaaacaagctgaggaaatcaatcaagaagatgttcctaagaaagagtctttatcaccaagaaatctcaaaagatcactatctgctcctgtctcagggacatcgtttggggtagctttggttagaggaccggcatgttttgacaggcgcacagatcatgaggaagcacgaggctacaataacagagcgagaagaaacagaatcagaaacagaacctgttgttgttgatccaatcaggaggaaagaaagattcaatcttaggaagaaagtgtccagctttagatcaactcttagaggaagaatctttggtaagaagatacgttcaatgatcgaatcaaacagtttcgaggatgaatcaatcaaagacttcgtgaccggatcgaagtttaacaacttttacgatcgaaatgagaattcaacagaagtgcctccaagccctgc

SEQ ID NO: 124869 - DNA, 538 bp, Arabidopsis thaliana
atccttttattttattttattttgtcttaaagcttttggcgagtttgcttgtgtgtgagtgtgtggttatggactctccgttcaaacctgatgtcgtcagaggtcaagtggctctcatcaccggtggtggatccggtatcggttttgagatctcttctcagtttggcaaacatggagcttctatcgctatcatgggacgacgaaaacaagtcctcgatgacgccgtctctgctcttcgatctcttggaatccaggctattggattggaaggtgatgttcgtaagcaagaagatgcgagaagagttgtggaagcaacttttcagcattttggtaaacttgatattcttgttaacgccgctgctggcaattttctggctgctgctgaggatttgtctcctaatggcttcagaacagtcttagacattgatgcggtaggaacattcaacatgtgtcacgccgctctcaagtatcttaagaaaggagcgcctggaagagacttcataagcggtggaggtttcgttttttacaatagcgcgac

SEQ ID NO: 124870 - DNA, 531 bp, Arabidopsis thaliana
  unsure (1)..(531): unsure at all n locations
cccacgcgtccgctcacttttctgaaaaagttgtacgtccaaaatctccaaacccttttttaagaacaaatctcaatccatggcaatcatcgatcaaaattgagaatcacacaagcttcacaatgtcatcatcatcatcaacgacgacgaacacaacaacagaatcagattcatcatctctacctactcacatcggtagatcaaattccgacggaatcatcgacactacaccatttcttcctcccaccgttacaagaaccataagcgtagatgaagaatccaatccaattcatcgatccgctagacgacaaggtctaagagaagcagcgaggttcctccgtnacgntggtagccggagaatnatgcgtgaaccatcgatgctcgtnagagaaaccnctnctgngcaattagaagagagncaaagtgattgggcgtatttctaaaacctgtggtgtttntttgacatttttgtggaatctttgcttttttttngccatcggnttttgcctgttntagatanttttgcccggt

SEQ ID NO: 124871 - DNA, 431 bp, Arabidopsis thaliana
  unsure (1)..(431): unsure at all n locations
ccgaccgacgcgnccgaaaaaaaacagcttcttcttcaaagcgagacctatctgagtcgactcgtaacgagttgatttttttttgttttcttctctactggtttcgcttttcgagcttctcgtctccgttaatcgttaaatctagctcattgatccgatatccattgttttctctcgccggcgcgtcattgtcattcgtcgtcgagttctgattgttttaactatggaagctcgtcgtggagtctaattcattattgagcttgaggattggttcggttgatggtcttttccaccgtttgaaagagttcttcagtttaacatctggtgttggatctagtcacctgtattgaaagtgggaagaaactaacttgtgcagccatagtcgcaaaggctgtgattttttgtctccacactcatgtcacgtaagcttg

SEQ ID NO: 124872 - DNA, 717 bp, Arabidopsis thaliana
  unsure (1)..(717): unsure at all n locations
ccacaggtctatgacatcagcactttcatggacgaacatcccggaggtgacaatgttctcctcgccgtcaccggtacgtacgagtacgagttggtttattccggtttagtttgaatttatcggtttgtaattttgtgagtttttatgaaaatttaaagggaaagacgcgtcgatcgatttcgaagatgtgaaccatagcaaagatgccaaggagctaatgaagaaatactgtatcggtgacgttgaccagtcaacggttccggtgacgcaacagtatattccgccgtgggagaaggaatctacggcggcggaaacaactaaagaagaatctggaaagaagctgcttatctacttaattcctctcttgatactcggcgttgctttcgctctcagattctacaacaacaagtagaccaaattatgatgaacagattgataagagtttcttactgttcttggttttcgtttgttggtaataacgggcttcttatgtgaagatttgggccatttggcccatcgctcagaattggactataatgtcttatttattttatgttaatgggccgtatcagtaggccctttgttgatatatgccaatcccaatttcttttagtnnnnnnnnnnnnnnnnnnnnnnnnnnnnnnnnnnnnnnnnnnnnnnnnnnnnnnnnnnnnnnnnnnnnnnnnnnnnnnnnnnnnnnnnnnnnnnnnnnnnnnn

SEQ ID NO: 124873 - DNA, 713 bp, Arabidopsis thaliana
  unsure (1)..(713): unsure at all n locations
gccnnnnnnnnnnnnnnnnnnnnnnnnnnnnnnnnnnnnnnnnnnnnnnnnnnnnnnnnnnnnnnnnnnnnnccacgcgtccgcccacgcgtccgcccacgcgtccgtacggctgcagaaaacgacagaaggggacgagcaaccaaaagtaatcatatggcgaatctaatttcgtttcacgatgtggctaaacataagtgcaagaacgattgttggattctcatccatggaaaggtctatgacatcagcactttcatggacgaacatcccggaggtgacaatgttctcctcgccgtcaccgggaaagacgcgtcgatcgatttcgaagatgtgaaccatagcaaagatgccaaggagctaatgaagaaatactgtatcggtgacgttgaccagtcgacggttccggtgacgcaacagtatattccgccgtgggagaaggaatctacggcggcggaaacaactaaagaagaatctggaaagaagctgcttatctacttaattcctctctttgatactcggcggttgcttttcggttctcaagattcttcaaacaacaagttnggccnaaattnttgatgancaggattgataagggggttcttaccttgtnccttggntttccgtttgttgggaaataacggggctttttnttttnaaggttttgggcnatttgcccatngnnnagaatttggccttaaaggcctaattncttc

SEQ ID NO: 124874 - DNA, 369 bp, Arabidopsis thaliana
acccacgcgtccggttcgtagaaactagaaactcttcccctcacgatcttgctttctttattttgcttcaaccctagtttatttgaagtctctagtataaagttctctgtttcaagttactttctcagcacgagcaaccaaaagtaatcatatggcgaatctaatttcgtttcacgatgtggctaaacataagtgcaagaacgattgttggattctcatccatggaaaggtctatgacatcagcactttcatggacgaacatcccggaggtgacaatgttctcctcgccgtcaccgggaaagacgcgtcgatcgatttcgaagatgtgaaccatagcaaagatgccaaggagctaatgaagaaatactg

SEQ ID NO: 124875 - DNA, 375 bp, Arabidopsis thaliana
cgaagacttcgtcgcatagactttgtagatttatcgttgagagtacctcaaacaaaaaaaaattgaaaaccaaattagggtttttaatttccagattgttttgtttatttgaataaatctccgcaagtttcaattaggttgcaaaaatcgaggaaattttcttcgattcaaaaaaaatgggaaaattttgttgcttcacttccgcttctgaggttgtgggaggacaatcatcatcacgatcaggtaaaggaagaagtgatgaagggatgatcaagtatggttttagtctagtgaaaggaaaagctaaccatccaatggaagattatcatgttgctaactttaacaacatccaagaccatgaattgggtcattttg

SEQ ID NO: 124876 - DNA, 1030 bp, Arabidopsis thaliana
cctgcaggtaccggtccggaattcccgggtctgacccacgcgtccgtacgcgcgagaagacgcgaggaggcggcgtcgtgcgtttagcgttgttttgaagctctctctttcaaattctgttcgtctctcgcgatctctctctctctctcagatagctccgaaactttcacgcagagttaagtgaagcaggatgggattgtcattcgccaagctttttagcaggctttttgccaagaaggagatgagaattctgatggttggtcttgatgctgctggtaagaccaccattttgtacaagctcaagctcggagagattgtaaccaccattcccactattgggttcaatgtggagactgtggagtacaagaacatcagtttcacagtgtgggatgtcggcggtcaggataagatccgtcccttgtggaggcattacttccagaacacccaaggtcttatctttgtggtggacagcaatgacagagaccgtgttgttgaggctagagatgaattgcaccgaatgttgaatgaggacgagctgcgtgatgctgttctgctcgtatttgctaacaagcaggatctcccaaatgctatgaatgcagctgagatcacggataagcttggtctccactctctccgtcagcgtcactggtacatccagagcacatgtgccacttcaggcgaggggctttacgaaggtcttgactggttgtccaacaacattgccggcaaggcgtagagggaaagttcgtggtggagttgatttgctgagcaaatctggatgcaggggcaaacattatctgaattttttttttggtttccgttttcgttattgttctgcttttttttttgggatatgtcgatggattttgtgattgtacgtagaacttagaaaaaaactaccttttatatagttttggtaaaactgtaatcgaagatttcacctactgctttcgtggttttggtcacagaagtcatataggaagtacgcacgcgtggagcggccgctctagaggatccaagcttacgtacg

SEQ ID NO: 124877 - DNA, 649 bp, Arabidopsis thaliana
  unsure (1)..(649): unsure at all n locations
ctgaggccccctttcgaggtcgactgtatcgataagcttgatatcgaattcgcggccgccgcgatctctctctctctctcagatagctccgaaactttcacgcagagttaagtgaagcaggatgggattgtcattcgccaagctttttagcaggctttttgccaagaaggagatgagaattctgatggttggtcttgatgctgctggtaagaccaccattttgtacaagctcaagctcggagagattgtaaccaccattcccactattgggttcaatgtggagactgtggagtacaagaacatcagtttcacagtgtgggatgtcggcggtcaggataagatccgtcccttgtggaggcattacttccagaacacccaaggtcttatctttgtggtggacagcaatgacagagaccgtgttgttgaggctagaagatgaattgcaccgnatgttgaatgagnccgagctgcgtgatgctgtcctgcccgaatttgctaacaagcaggnnntcccaaatgncatgaatgcanctgggatcccgggaaccttggcccaanntctccggcagggcactggaaatccagagccatggcactcagnggggggtttcnaggctactggtgcaaaaattcggaagggtagggangc

SEQ ID NO: 124878 - DNA, 778 bp, Arabidopsis thaliana
  unsure (1)..(778): unsure at all n locations
cttctctcttctcctctgatcccaccacacttttgaactttcactcaatggcgatgcagcttcctccgacgacactttacgccggaagatcctccgtggtcttacctccgacgactccaaccctccagagatcatctttcttgccttattactcgatgaggctactcggaaacaagaagtctctttccaaatcctctgctcctagattctccatgcgtgtctcctctaagcaagcctatatttcccgtgattgcgggtatatttacaatgatagaactccatttgacaagttacctgataactatttctgtccagtgtgtgctgctcctaaacggcggtttagagcttacatgcctgatgtgagcaagaatgtcaacgacaaagatgtgagaaaggctagaaaaggtgagctccaaaaagaggaagccgtcgggaaggctctacctataggaattgcagttggggttttagctctcgcagctctttacttctatgtcaatagcccctcatgaatgcagtatcaagagagactacactctgcttttggaatcatttttttgttctggataaacattcatcttcgacttgttgaccactactgtaatgaagtaaagtattgagctttttatgtgccaaaactatattgaaaggggctgagatgagatgaataaaaaggctaagtgtgataaaaaataaaaaggaaaaaaaaaaaaaaaaaaaanaaagggcggccgctctagaggatccaagcttacgtacgcgtgcatgcgacgtcatg

SEQ ID NO: 124879 - DNA, 599 bp, Arabidopsis thaliana
  unsure (1)..(599): unsure at all n locations
aggagggggggagaaaagagnggggggaacgtgnttgngtgacactctaanaaaatctatgacgtcgcatgcacgcgtacgtaagcttggatcctctagagcgggcgccctttgtgtgtttgggtttgttctgtataaacattcatcttcgactgggggaccactactgtgatgaagtaaagtattgagctttctatgtaccaaaactatattgaaagtggctgagatgagatgaataaagaggctaagtgtgatacagagaagatcagacaatagaaaagggggtgcaaattggctagtcttgcaagatgagggacccttggattggtttatcgatagaagattgataaaggatgttcaaagcagacaagttttcgttgatgctcgatgatgtcgctggcttgaactcgtacggaccttcctttggtccccaaacctggtttcgattctcatcaaagccgcgatcccagaggggtatctcattgtttttcaaaactgcaagatctgaagtaccatagctagccccggtccatgaatttggaaatccaccaggtgaagttgagccttcgtacaagcaacgtttcccacggtcacaacaa

SEQ ID NO: 124880 - DNA, 449 bp, Arabidopsis thaliana
cccacgcgtccgcgattatgaaattctcgaaaccgaccctggtcttacggagacgatgataccttcctcaagtcccatggagtcaagacatcgactctcgttctcaaatgagaagacaagtaggaggagatttcaaagaattgagaagggtgtcaagttcaacactctgaaacttgtgttgatttgtataatgcttggagctttgttcacgatctaccgttttcgttatccaccgctacaaattcctgaaattccaactagttttggtcttactactgatcctcgctatgtagctacagctgagatcaactggaaccatttgtcaaatcttgttgagaagcacgtttttggttgaagcgtgtttcatggtattgctcttataaatcttaacgataacaagattgatcgtttcaaggaggttactaaaatctactttgttcatgtatctt

SEQ ID NO: 124881 - DNA, 900 bp, Arabidopsis thaliana
  unsure (1)..(900): unsure at all n locations
nnnnnnnnnnnnnnnnnnnnnnnnnnnnnnnnnnnnnnnnnnnnnnnnnnnncccacgcgtccgcccacgcgtccgcccaaaacaagatgagctcctctgactcttcttccgccgaatcccgtctagccacggctaagacggttctcaccaccgcggcttcggtggctgcgaccgcaatgctagctcgatctttagtccaagattatttgcctgacgaggtgcatcactacatttcctatggattccgttccatctttggttacttctcatcccaaatgacgataatcatcgaagaatttgaaggttttgctcacaatgaagtctttgaagctgcagaggcctatctagccaccaagatctctccttctaacaaaagaatcaaagtgagtaaacatgagaaagaaaacaactacaatgtcaccgtggagcgtgacgaagaagttgttgacacctacaatggcgtcaaattccagtggatcctccattggcgtcatgtcgagtccagcacttccacacccacgggatctaaactccacactgagatctgaggtncgatcattcgaactcaacttccacaagatattcaaagacgtagctcttgaatcttacttgccattcatggtgaaaagagccacgttgatgaaagcagagaagaaaacactcaagatcttcactctctccccagataacatgtatgggaactactctgacgcgtggacctctgtactcttgacatccttctacctcaaactctagcatggatcagatgcaagcccaggtgatggaagatcagacaattcgtaagcgaaagacttataaagggctggaagcttgaagaaggtactgctgacggtcacagccaggaagcagctgtcgaccctgcatcattacttgatttc

SEQ ID NO: 124882 - DNA, 531 bp, Arabidopsis thaliana
atacgactcactttagggaaagctcgtacgcctgcaggtaccggtccggaattcccgggtcgacccacgcgtccggaaatcctcaattctctgaaactttgtttttgcaccatataggtgattgcattgacagaggaagttcttgcaactgcaaagcaaaatgagatttctctatcagatgccggagttagtgctgaagcaactcctggctcacccgatttatagggtgcttgggaaaagacgggtttaaggaatgacccaatccatgagggtaagttccctgttggaactaaagttcaagctgtctttagtgacgatggcgagtggtatgatgcgaccattgaggcacatactgcaaatggctattttgttgcttatgatgagtggggaaacaaggaagaggtggatccagataatgtgaggccaatcgagcaaaatgctatttgtcgaagctgagagattacctcaagcctccaaaaatgctctcaaaagaaagattgagaaagctgcaagttctgattatcagacaaa

SEQ ID NO: 124883 - DNA, 508 bp, Arabidopsis thaliana
tatacgactcttatagggaaagctggtacgcctgcaggtaccggtccggaattcccgggtcgacccacgcgtccgggaatctgcgtgttgtttgaaatagcaacatcatttaacagctagcagataaagtggagttttctttcagttctggggtttgaaaggtgagtatgtttttgagtggcatgtaactccggcagtggagtttgggtcagccaaaagcagttgttggcgtatacataaaagtaggagagttagcaaagaattcatcatttctatcttggttatttgtgttgtgcaggtgtgcttatatgggtcatgatggccagcctgcttctatctcctgatttctcgtgtttgatccctgaagttctacttctgaaaatctttactgatatattgtgtataattgctagaaatcctcaattctctgaaactttgtttttgcaccatataggtgattgcattgacagaggaagttctttgcaactgcaaagcaaaatgagatttc

SEQ ID NO: 124884 - DNA, 393 bp, Arabidopsis thaliana
cataaaatatcttcgcgacaaagaaccatcggagaagaggaagaagatcagtgtagagctatcgggaaatttatctgaagaggaaactgaaattgagatcgaagttttgagtttgggtaaaaaatggtaggaggagtagaagaattgagtattgaacagttagcttcgagtatctctacctacaaagaacaactcgaacaggttaggcagcttttgtcagaggatcctaggaactcggaatatgcagacatggaaaaggagcttaaagaggtgattgcattgacagaggaagttcttgcaactgcaaagcaaaatgagatttctctatcagatgccggagttagtgctgaagcaactcctggctcacccgatttagagggtgcttgggaaaag

SEQ ID NO: 124885 - DNA, 427 bp, Arabidopsis thaliana
cacaaacgaagcagaacaagaagaagaagaagaatagagagagacgtagagagagagagacatacgctgagccttttgggtttctcttagacagaagatctttagtgtgtgtccctacaatgtctgtcaagagtaataccttctcgtcggctgagattcccgatgtggcagaccaaccacgcgaccgagttaaccccgaagctacacaggatctacaggagaaggatgagacgaacgacgagaaagatggagatgaggaagtgaaacacgacgaagcggaggaagaccaagaagtagtgaaacccaacgacgccgaggaagatgatgatggtgacgatgcagaggaggacgaggaagaagaagtagaagcagaggaagatgaagaagcagaggaagaggaagaagaagaagaggaagaagaagaaga

SEQ ID NO: 124886 - DNA, 828 bp, Arabidopsis thaliana
ggggccgctggtcgcctgcggtaccggtccggtattcccgggtcgacccacgcgtccgtacggcgcgagaagacgacagaagggggcgccgcgctttctctctctaaacttagctcagcctatcgattaattcctctccggaataaggaaatttcacctcgatttattgattagtcggaagaattcggaaccaattctgaaccagacctgaaattttccaatggggcggaagaagccgagtgctcgaggtggagatgctgagcagcaacctcctgcgtcatctctcgttggtgctactaaatctaagaagaaaggtgctcaaattgatgacgatgagtactcaataggtactgagttgtctgaggagtctaaagttgaggaagagaaggttgttgttatcactgggaagaagaagggtaagaaaggtaataagaagggtacgcagcaggatgatgatgatgatttttctgataaggtttcggctgcggggggtgaaagacgatgttccctgagatagcttttgttgggaagaagaagtcgaaaggtaagaagggcggtggttctgttagctctgccttgcttgatgatgaagatgagaaggaggataatgaatctgatggtgacaaagatgatgagccagttgcacctgtggagaatgctggtgagaaggaaggagaagaagagactgctgctacgaataataaaaaaaaaaaacaaaaaaaagcggccgctctacaagatgctagcttacgtactcgtccatgatacgtcataacacttctacaatgtcacctaaattcatctcattggccgtcgtcttacaacatc

SEQ ID NO: 124887 - DNA, 435 bp, Arabidopsis thaliana
caagattcctcaaaaggaaagaagagaaagaagataagagatatctggttggtcggagatggagatgatcggaggagacgatacagatacagagatgtacggagctctagtgacggcacagtccttaaggttgcgtcatcttcaccactgcagagagaaccagtgtacctctgttctcgtcaaatacattcaagctcctgttcatcttgtttggtcactggtgcggagatttgatcagccgcagaaatacaaaccatttataagcagatgcactgtaaatggtgatcctgagatcggttgtctcagagaagtaaatgtcaaatctggtccagcaaccaccagtacagagagattggaacagcttgatgatgaagaacacatcctcggtatcaacatcattggtggtgatcatagacttaaagaatactcttcgat

SEQ ID NO: 124888 - DNA, 693 bp, Arabidopsis thaliana
  unsure (1)..(693): unsure at all n locations
nnnnnnnnnnnnnnnnnnnnnnnnnnnnnnnnnnnnnnnnnnnnnnncccacgcgtccgcccacgcgtccgcccacgcggccggggttgtaaagcagtggacagagacgacgatgagtacgatgaagccaagccggagcgacgaaatatccgacccggaacagcagatcaagaacgcgaaccagatcagagctgatttcgattccttggctcccaaacgacccactaaacccactcgaagcgaaccgggatttcctggatctttctctgcttccgacaaaatcaccgaccatcctgaagctgacaaattccaatctctccagtcacaaactcatggtaaagttctaggtgagggagattcatctgcagttcaagatgagttcctggaaacagagtattactcaaatctcaccgccattgataagcaacatcacacgaccggaagtgggtttataaatgtggtgaaggaagacaacggtgaagaatccgaggccgtaaccgccgccgtaatcggagacggaggagaaaaagcggtttacagaagcaatcccggcgacaaacgaatggatttcctgcgacgggagggaagaattttggatttcgggaatactttcggtctttaaacccaaacccggggtagcggaggaggtttccttggaaaccgggatcccttttcgagaaaaaatggggtttt

SEQ ID NO: 124889 - DNA, 690 bp, Arabidopsis thaliana
  unsure (1)..(690): unsure at all n locations
cgcctgcatgtaccggtccggaattnccggttcgacccacgggtgagtgcgtgtgttgtaaaaaaggggacagagacgacgaggagttcgatgaagccaagccggagcgacgaaatatccgacccgggacagctgatcaagaacgcgaaccagatcagaggtgttttcgattccttgggtgcaaaactatttttttttcgggaggggaagcgaaccggggaggcccggatctttatatgcttcccgacaaaatggccggccgtcccgaagctgacaaaatccaatcttctccagagacaaaactcatgggaaagttctggggggaggagatcatctgcgagtcaggatgattccgggaaacaggaggttactgaagtctgccgggcttggttaggcacagcgcccgaccggaagtggggtttataaatgggggggaaggaagacatcggggaagaagccggggccgttgccgccgccgcaatcggagacggaggagaaaaagcggtttacagaagcaatccggcgacgaacgaatggattcctgcgacggaggaagattttgattcggaatcttcgtctaaaccaaaccggagcgagagttcttgaactgatctttcgaaaatgttttatcttcttgtttcagatgttctgtttcttgatattatggcaataaaatattaaataaataaa

SEQ ID NO: 124890 - DNA, 468 bp, Arabidopsis thaliana
  unsure (1)..(468): unsure at all n locations
ggatcgcttccgttcaatgtaacccgaaacagagcaatctgaaattatcttagggctatagttatggatattttcatggatttcttcaataaaccttctgttacagagacattcgtcgacgttttgctatgtgtagttccgatttgggtcgctgttatgatcgggcttctgatcggttggtcttggcgtcctagatggactagcttggtttatttaggtttccgttctaagcttcggtttctatgtactgttcctcctggatttggtgctcgtcgtatttggcttgctttcaccgctctctctgcttttcccggtcgttcaagactcggtccaacctccaataaatcctcggttaatgacggtttctctaaaaccggtcggagaagaagcattttcacgagctagtggtnaaagntacagggnanggggaaanntttttttaccanaaagggtttanngcaatttttt

SEQ ID NO: 124891 - DNA, 484 bp, Arabidopsis thaliana
atgaactccagctccactacgactcactttagggaaagctgctacgcctgcaggtaccggtccggaattcccgggtcgacccacgcgtccgctcgtcgtatttggcttgctttcaccgctctctctgctttttccgtttgttcaacctccaataaatcctcggttaataacggttcctctaaaccggtcgaagaagaagcattttcacgagctagtgataaagttacagagaaagagatggatgttgtgacagagaaggatttagagcatttgttgcatctgcttgaagctggaaatgctagttttgagtggcaatctatgatggataagtctactccgaatatgagctatcaagcttggcgtcatgagcctgagataggtcctgttgtttatcgtagtcgaactgtttttgaggatgtaacaccagacattgttagggatttcttctgggacgatgagtttcgacctaaatgggatactatgc

SEQ ID NO: 124892 - DNA, 444 bp, Arabidopsis thaliana
accacgcgtccgcagacttacaaatctagtccatataatacaataagcccacttttcttcttctctcatcagagctttttcttctctcctcatttttcgtataattcgatttgcgaaaaatggtcgagggagagtccaaggcattgtggattattttggccaccgtgtttgcagtcgcggcggtggcaccagcggtgcatggacagcaaacgccgtgttacttcgtgtttggagactctgtcttcgacaacggtaacaacaatgccttgaacaccaaggccaaggtcaactatttaccttatggtatagattactttcaaggtccaaccggtcggtttagcaacggtcggaatattccagacgttatcgctgaactagcgggtttcaataacccaattccaccatttgcccgagcattacaggcacaagctaacatcggactca

SEQ ID NO: 124893 - DNA, 579 bp, Arabidopsis thaliana
gaatggttcagtgcctcccacgcctcgtagaggctcggtagggacaacaactcctgacgttcttctaaccccaagatcttactctggtcatcatcgccaaaacgggtatttcaaagaagttagaagactctctactactcccttaaactatgtggccatgcaaaaggaagatactgtttctactacctacacatcgatttatagctctgagccagactcgcctctccaaggctgacttgactctcttttccaccggatttgtggagtaatgttaatggtaaaaaaagaaggaagtgaagaagaaggaaggagacttgtgaatacagaaggtgactgacttttaggagatatggtgagataagagtaaatgcaatccatgtgaaattagttattctttagaggttacaagttttctattttgaagtgaagaatactattgttttgtgtaatgccagtgtgaaagtgtgtgaatggtcattgttgtgcgtacgtatttgtgtataatatacgtatttgctataaaaaaaaaaaaaaaaaaagggcggcagctctagaggatccaagcttacgtacgcgtgc

SEQ ID NO: 124894 - DNA, 407 bp, Arabidopsis thaliana
acccacgcgtccgctttctaaaacctctggggttcttgttaaagatgatgtctttgctcccaaatcccgacccgattccaatacaaacccatctttcgtcattccgtggggaaaaggtgattgaagcaataaaaaatgagctggatcgtggtggccaagttttttatgtcttgcctcggattaaaggactagaagaagtgatggattttcttgaagaagcatttccagatattgacattgctatggcacatggaaagcaatactcgaaacaactagaggaaaccatggagagatttgcgcaaggaaagatcaaaatcctcatatgtactaatattgttgaaagcggacttgatattcaaaatgcaaataccataatcattcaggatgttcaacaatttgggctcgct

SEQ ID NO: 124895 - DNA, 575 bp, Arabidopsis thaliana
agttctagatcgcgagcggccgccctttttttttttttttttttttttttttttttttttttttttttttttttttttttcttttcaatgtcgacaatggcatcaatgaaatccagccaaaagtcttggaccagcaatagtgatacataagtacatacaacaacaactaaaacttattcaccaagacaatttattaccttgtttctaatgaatcaagaatctgatccttatttcactgaaaatggccaaacctccaaagaatatccggctaagagaccccgaaacaacaacaagacacataaacaactaatttggattatacgttaaatgaaggagtaatgaagttcgagaagagacttatgaggaggagatgaattgtttatatgttggagccgaatccgccaccgcctggagtaagaatctgtaagatttcaccggcttctacgtgtaccgtattcttgcctccaagatagattcttcgtttgtctttagtgatgagatagtttgctccacggagtccattttggccaccgttcaatccacgtggcgagtgaactcttctctctgagaggatg

SEQ ID NO: 124896 - DNA, 654 bp, Arabidopsis thaliana
  unsure (1)..(654): unsure at all n locations
cgaaaatcaatcggaatcaggaagacaaaaatgagcggagtttcgacggcggcgtactttgcgcggcgagcggctcagaaggagagagttcgaatcctttaccgtcgtgcccttaaggatactctcaattgggctgttcatcgccatatcttctaccgtgacgcttctgatctgcgtgagaagttcaatgtcaaccaagatgtggaggatgtcgacagaatcgacaaactgattgctcatggtgaagcagaatacaacaaatggcggcaccctgatccttatatcgttccatgggctcctggtggctcaaagttctgtagaaacccgactccgcctgctgggattgagattgtgtacaactatggtctagaagacaacccataataaacctagcttccatattgtcacacccatcaataaaattgaagcatccggtggctatggtttggagataaattaaactgacttttcaaggggttgnaacttttagggggccaattggtaattttcnaaaaaggttccggncccagaaaagnaaatcttggttcaaacttggggtaaaaaccttcanccaaaaaaattccggggggnccttaggcaanggnggtnccccctgaaactttcngaaaanngggggaatcctganccngggtc

SEQ ID NO: 124897 - DNA, 558 bp, Arabidopsis thaliana
  unsure (1)..(558): unsure at all n locations
ctcaattgggctgttcatcgccatatcttctaccgtgacgcttctnatctgcgtgagaagttcaatgtcaaccaagatgtggaggatgtcgacagaatcgacaaactgattgcncatggtgaagcagaatacaacaaatggcggcaccctgatccttatatcgttccatgggctcctggtggctcaaagttctgtagaaacccgactccgcctgctgggattgagattgtgtacaactatggtctagaagacaacccataataaaccttagcttccatattgtcacacccatcaattaaaattcgaagcatccggtggctatggtttggaggtaaatttaaactggcctttcaagggttgaaactttgtgggggcccatttgtaattttcaaaagactgtttcggttcccgtcaaggcaaattctttgtttcaaactttgggtttatatcctttctatctcatttccggttgtctgaggcatggtnttcgccntgaaactngcagaaacacaaattntgggttttttcttttacntggtgaatggacngnttngggtc

SEQ ID NO: 124898 - DNA, 553 bp, Arabidopsis thaliana
agagaaaacaccggtccggtaattcccgggtcgacccacgcggccgcaattcctttcaactttcaaaatcgaagatctcttaagccatgaacgatcttctctccggctcgtttaaaacctccgtcgcggacggttcatcgccgccgcactcacacaacatcgagatgtcaaaagcgaaagtctccggcggaagttgccacggtggtaacaacctagacacgttcttcctcgacgtggaggttgtaaacgaagaccttaaagagctagatcgtctctgtcacaacctccgatcgagcaacgaacagagcaagacgcttcataacgctaacgcggtgaaggagctgaagaagaagatggacgctgacgtcactgctgcgcttaagacggcgaggcgcttgaaaggaaacctcgaggctttagatcgggctaatgaagtcaaccgaagtttaccggaaagtggaccgggttcgtcgtcggaccggcaaagaacttcggtggttaacgggttgaggaagatgcctgaggatgagatggaaaaatttagtcgagtgag

SEQ ID NO: 124899 - DNA, 360 bp, Arabidopsis thaliana
ggaaacgaaacgaactatggatttgaagaaagcatctttgtttttattccttcttctctgtctccacctgcaactgcaacaccactttgctcacgcggtctcgcgatcttcaacaagtttagccttcgttgatccaaaccatgatgatctcccgtttcaagaagtagaattgaagccagacggtgacgtaatcgaagccaatttaccgaaattaacagtcgttgttaagaaaggcggcggaggaggaggcagaggtggaggcggtttcggcggagggggacgcagtttcggcggaggagggagttctagcagaggcggtggaggaagttctagcagaggcggaggagggagttctagcag

SEQ ID NO: 124900 - DNA, 644 bp, Arabidopsis thaliana
  unsure (1)..(644): unsure at all n locations
atctaaccctctcgatcctctctcgcctgttgaaaaagcacgacgcaagagctaaggatcaaaaaggaagacgaagaaagagatggatccagacgctgttgcaaaggctttcgttgagcactactactccaccttcgatgcaaatcgtccagggttggtttctctataccaagaaggatccatgttgaccttcgaaggccagaagatccagggctctcagaacatcgtcgctaagctcaccggcctccctttccagcagtgtaagcacaacatcaccaccgtcgattgtcagccttctggtcccgccggtggtatgctcgtctttgtctccggcaatcttcagctcgctggtgaacaacacgctctcaagttcagccagatgttccatttgatatcgaatcagggaaactactacgtgttcaatgacatattcaggttgaactatgcctgaggaatttgatgccagaggtacatggaaccatttttggaagcttgaaaagagagtggtggaaagtttgggacttttcaaaaactgtttgagttggttttaggtttggaacattaagctttgtttcaggtggtttgctgtctgtttttattttaatcaatgggctatttaacctttttangnccctttttttggg

SEQ ID NO: 124901 - DNA, 553 bp, Arabidopsis thaliana
  unsure (1)..(553): unsure at all n locations
nnnnnnnnnnnnnnnnnnnnnnnnnnnnnnnnnnnnnnnnnnnnnnnnnnnnnnnnnnnnnnnnnnnnnnnnnccacgcgtccgatttgttatctctcatctctctctctctttctctctgagctttgctttttatcaaacaagcatcatcatcacatccacttccttcttcttcctttctctgtctgtctcttaacccaaatgtggactctttgagccgttattagatctctgccgcttcaataatggggagcttatcttctgaggaagacgacgaagtctcttccgagagatgcggaagttacagtcccagcgccgacattagcgagtccgagagttccagcagcttctcctgccaccgcttcgacggcgagggtgcctctagctccatcccttcttcccctcgagttgtcgctggtagaggattttacttcccggccccagtcatgccttccggtgatcggcggcaaagatgtggtctgggatgacaaacaaccagacaacgatttatccgaaattgagatgatgaaggagagagttgcttagcttcttt

SEQ ID NO: 124902 - DNA, 1025 bp, Arabidopsis thaliana
  unsure (1)..(1025): unsure at all n locations
ccnnnnnnnnnnnnnnnnnnnnnnnnnnnnnnnnnnnnnnnnnnnnnnnnnnnnnnnnnnnnnnnnnnnaaccacgcgtccgctttaaccatcacttcaaagttcaaactcttttttttttttttgtttgatccaaattttaacaaaattatggatcgcaatttcctcctaacagttacattgatctgcattgtcgtcgccggtgtcggtggccaatctcctatctcttctccgaccaaatctcccaccactccttctgctccaactacttcccctactaaatcccccgccgttacttctcccactacggctccggcgaaaactccaactgcttcggcttcttcaccggttgagtcaccaaaatctccggctcctgttagcgagtcgtctccaccaccgacacctgttccagagagctctcctccggttcctgcaccaatggtttcttctccagtgagctctccaccggttccagcaccagtagctgattctcctccagctccggtagccgctccggttgctgatgtaccggctcctgctccaagcaagcataagaagactacaaagaaatcgaaaaagcatcaagctgcacctgctccggctccggaacttctcggtccacctgcaccaccgactgaatctcccggacctaactccgacgctttttctcccggtccttccgccgacgatcagagcggagcagcgagcacaagggtgttgaggaatgtagcggtgggagcggttgcaaccgcatgggccgttctcgttatggcattctaaattatttatcatttcacctctgatattttttagtttttatatttttgaccctaccattgtctctttctttacgaatttggtaatgagtattatttaattgattatacagtttgttttcttttattttatttacctggaaataataagaattcatnnnnnnnnnnnnnnnnnnnnnnnnnnnnnnnnnnnnnnnnnnnnnnnnnnnnnnnnnnnnnnnnnnnnnnnnnnnnnnnnnnnnnnnnnnn

SEQ ID NO: 124903 - DNA, 683 bp, Arabidopsis thaliana
cccacgcgtccggagagagttttatttttctttccgagaaaattcgagaaaaataatctgggacaaaaaccatcgttcatttcttatagagaaagcttgagtgagggaaaagctttctacacgaaactagtctccagctttttgctctgtatttgtccagatttgtttgttgttgaggccaacatttgaagatattttcaagaaaatgggagtgaaagtagcaacaagctccaccttccatcaatgggtggctcatcctatagttcatcattcctcttccctttctcaaaccctagcttcctccgccgtttcttctccttcaagacgacggatcatcggaaacgacggacgttcttctctgtcttgtcgttccgtgatgcagagccagaggcttaatccttcttctcccttcggcacttcttcgacaaatctccgtcactccaagtcctgtgagctctgggaatcaacaaaacgacctaaaacacagttgattcgcagagcttttagcgcaaacgtcgatccgttttccgaggaagagtttgcgaaaaagatgcaggagctaactctcaaattccaagtctctaacgaagaagaagacaacgaatcggatacacgcattgacgattacactcgaaagatggacatagtaggaagccataataatttcaggtcagattcaatgg

SEQ ID NO: 124904 - DNA, 983 bp, Arabidopsis thaliana
  unsure (1)..(983): unsure at all n locations
nnnnnnnnnnnnnnnnnnnnnnnnnnnnnnnnnnnnnnnnnnnnnnnnnnnnnnnnnnnnnnnnnnnnccacgcgtccgcaaaaatggaagtgaaagggaaagagacagcttcggttctgtgtctgagcaaatacgtggatctatcgagtgaagagagtcatagatactatcttgcgcggcgaaatggcttgcagatgctccgagacagaggctacgaagtctccgacgaagatatcaatctctcccttcacgattttcgaactgtttacggtgaacgtcccgatgttgatcgtcttcgcatctccgctctgcatcgctccgattctaccaaaaaggtaaaaattgtcttttttggtactagtatggttaaagtcaacgcaatccgcagtgtagtagcggatatacttagccaagaaaccataactgggctgatattggttctgcaaaaccatgtaaccaatcaagccttgaaagccattgaacttttttctttcaaggtcgagatattccagataacggatctgctagtcaacataaccaaacattcactgaagccacaacatcaggtgttgaatgatgaagagaagacaacacttctcaagaagttcagcattgaggaaaaacagcttcctcggatttcaaagaaagatgctatcgtccggtactacggattagagaaagggcaagttgtgaaggtgaattacagaggcgaactcacggaatcgcatgttgccttccgatgtgtgtggtgaagaaaccaattaaaaaccatcttgtgaacttattttcaggaaaaaataacttgtatgtttctaaggttttgtttttaatcctagaagatccgttgctttgaacacaagaaaaaaagttaaggaaaaaaaaaagatcctttgcttgtaaaaaaaaaaaaaaagggcggccgctctagaggatccaagcttacgtacgcgtgcatgcgaggtcatagctctactatagttca

SEQ ID NO: 124905 - DNA, 474 bp, Arabidopsis thaliana
accgcgtcatgtagcagaagtcgtgtgctgctactggaaggatcagagtgagagtgagtccatgtcccagctgaagaaatacatcttccaagttgaagaaggcaaagaaggtagcgatggaagaccatcagttggtccagtgtaccggagtatctttgccaaggacggatttcccgacccgatcgaaggaatggatagttgttgggatgttttccgcatgtctgttgagaagtatccaaacaatccaatgctgggacgccgcgagattgtagatggaaagccgggtaagtatgtctggcaaacataccaagaagtctacgacattgtcatgaaacttggaaattctctcagaagtgttggagttaaggacgaagcaaaatgtggtatctatggtgcaaattctcctgagtggattatcagcatggaggcttgtaatgcacatggactctattgtgtaccgttatatgatacact

SEQ ID NO: 124906 - DNA, 1014 bp, Arabidopsis thaliana
  unsure (1)..(1014): unsure at all n locations
nnnnnnnnnnnnnnnnnnnnnnnnnnnnnnnnnnnnnnnnnnnnnnnnnnnnnnnnnnnnnnnnnnnnnnnnnnnnnnnnnnccacgcgtccgcggacgcgtgggccgattcagagagaacaccgaatatgaccgccgattcaaccgtcgcactcgttcatagcgtcgtttctaacggtgatgtctccaacggaaacacctccgcttcctctaagaaatctcgtgagattgaccgtcgccgccgcagacggaagcagaagaagaacaacaaagcatcccaagccgatgtagatgcatcggacgtttctgctgcttctgaatccaaagagaatacagatccccagccacaggtttgtgagcagattgtgatagagtatgttccagagcaagctgaatttgaagatggttttaacgatgagtttaaggaaatcttcgagaagttcaacttccgcgaacctcttgcctctgaagaagacggtacgaaagatgagtctgaggagaaagaagatgtcaaaaagaaggttaactctgattctgattcagacgacgacgagcaggataatcagaacaaagagaaaggcatctctaataagaagaaaaagcttcaacggagaatgaagattgctgagctgtagcaggtttccgctaggcctgatgttgttgaggtctgggacgcgacttcagcagatccaaagctgttagtgtttttgaagtcgtaccggaatacagttcctgttccaagacattggtcgcagaagagaaaatatttgcagggaaagcgtgggatagagaagcagccatttcatcttcctgatttcattgctgcaaccggaattgagaagattagacaggcttacattgagaaagaagatggtaagaaattgaagcaaaagcaacgggagagaatgcaaccaaaaatgggaaagatggacattgactaccaggtacttcatgatgcatttttcaaataccaaacaaagcctaagctgtcagctctaggcgatttgtattttg

SEQ ID NO: 124907 - DNA, 306 bp, Arabidopsis thaliana
  unsure (1)..(306): unsure at all n locations
gcgagaagaaggaggagatgagcaagatccgttcgtctgcgacaatgccacatcgcgaccagccgtcaccggcgtcgcctcacgtcgttacactcaactgtatagaggattgtgcgctcgagcaagactccctcgccggcgttgctggtgtcgaatacgtcccgctcagccgcatcgccgatggtaagatcgagtccgccaccgccgttctcctccattccctcgcgtatcttccacgagcagcttaaacggcgacttcgtccttaacagctcattctctgccttggntctgctgatcgcccttgt

SEQ ID NO: 124908 - DNA, 438 bp, Arabidopsis thaliana
accacgcgtccgcgaagcagcaaccttcgcgccgccgagagataacgagaaaaaatggggaagaggtcgaaaacatcaaggaaagggaaaaaagcatggagggctaacattagctccgaggacattgaagatttcttcgagaaaactaccagagatgctctctccggtggcaatctctccgctgctcccagcgaagacttgttccacgtcgataaatcccatgaccttccggtgaagcgaaagattgagaaacatagagagagagtgctccgtgttgacagtatcttaaagaagaatccatttgtccagttagtgccatcttcaaagccaaagttgaagaaaagtaagaagacaatcgttatagaagacaaagcacctaaacaagttcaaaaaagtgttggtgacgattctgtaatggccgacttgtggggtgatgat

SEQ ID NO: 124909 - DNA, 284 bp, Arabidopsis thaliana
actcaatactctaagatatgctgatcgagtcaaaagtctatctaaaagtggaaatagcaagaaagatcaaactgcgaattcaatgcctccggttaataaggatcctttgttgggcccaaatgatgtagaagatgtctttgagcctccacaggaagtgaatgtaccagaaaccaggaggagggtggtcgagaaggacagcaacagcagtacgtcgggtattgacttcagacagcctacaaattatcgtgaggaaagtggagtcccatcattctcaatggacaagg

SEQ ID NO: 124910 - DNA, 604 bp, Arabidopsis thaliana
  unsure (1)..(604): unsure at all n locations
taggtgcactatagaagagctatgacgtcgcatgcacgcgtacgtaagctcggaattcggctcgagcaaaattttcttgagaactttttttgaagagttatgattgcattagctgcttcttcgttggggaatacaccgattgcttcgtttaaccgtcattttagattccggttacatccacgaaaccctctgatacaagcagcggtttcaccttcgtcttcttcttcttctcctactgcttcatctggctttgatttgagttctctcgaatccgccattaacaagaaagatagtaatggtgttaaggaagctctcgataaattgagtgaagaaggttgggctaagaaatggagctcccagccgtatctttcgcgccgtacgacatcactgcgggagctgacaactctcggtatcaagaatgcagagactctggccatccctagtgtcaggaacgatgcggcttttcttttcacagtagtcggatcaactgggttcatagctgtacttgccggccaacttcccggggactggggattctttgtgccttacttagttgggngcatttcnttggtagttttagcccgtcggaagcgtttcancaggg

SEQ ID NO: 124911 - DNA, 683 bp, Arabidopsis thaliana
  unsure (1)..(683): unsure at all n locations
taggtgcactatagaagagctatgacgtcgcatgcacgcgtacgtaagctcggaattcggctcgaggtctgttgacagtatgcagacaagtaatgctggagggtctgtgtcaatgtctgtcgataacagtagcgttggttcgagtgatgctcttattggccatcctggtttgaagcctatgcgccatccctactctctctcggatggccaaagcgtatttcggccaggaaaagttactcatgcacttaacgatgatgccttagcacaagcgttgatggatagtaagtatccaaccgagggactggtgaactatgaagagtggacaatagatctgaggaaactacatatgggtcctgcttttgctcaaggggcttttggaaagttatacagagggacttacaacggagaagatgtagccattaagctactcgagaggtcagatagcaaccctgaaaaggcacaagccctcgaacagcagtttcagcaggaagtttctatgcttgcatttttgaagcatcctaacatcgttaggtttattggtgcgtgcatttaaacccgatgggtgtcggtgcatcgtggccttgattatgcaaaaggaggggccttttaaancagttttttgcctnnggggcaaanccgggtttgcctttaaaggtttgctgttttcnagnngttggtttttc

SEQ ID NO: 124912 - DNA, 510 bp, Arabidopsis thaliana
aagaaaaaatccaaacaaatagaattttgccgtctgaaattcctaaaactataaaacacagcttccttcttctcctatatatccatcggcgacgcctggatcatgattctttccggaaactgataagaggaacaaaaatggcttcttcttctctggagattgttaaattgtgtggctctcctgtatcgtttccccgccataaatctcccataaaattggaatgtagaaaaagggttttcagattacccaattctaggagttggcatcgtcttagggtttcttcatctgctctcaatggtggtgataatcagtccaaaggtgaagaacctccagaatctttatttatgaaagaattgaagagacgtggtatgactcctacttccttgcttcaagactatgaagtggatcaggatgagatcaaaaccggtaaagaaaccggaaacagctctaaaacgactgcaactactccggccttcgataaaagcttgttaaatcagagagagagatctt

SEQ ID NO: 124913 - DNA, 741 bp, Arabidopsis thaliana
aacgctttcgaattgtgctgatgggcttattgatgctgttatggcttctactgctattactatctccaataattacttcacacaccacaatgaggttatgttattgggacatagtgatacctatacaagggataaggttatgcaagttacaatagcttataatcattttggtgaaggtcttattcagagaatgccgaggtgtacgcatggatattttcatgtagttaacaatgactatacacattgggaaatgtatgcgatcggtggcagtgcgagtcctaccattaacagccaaggaaatagatatctcgccccaagaaaccggtttgctaaagaggtgacaaagagagactatgcagggcaaatggcaatggaggcattggaattggagatcagaaggagatctttttttaaacggagctttcttcacacgttctggatcaggtcttggacgctcgctacgctggagccttcaagtttagcagccaaatcatcatctcttgttggcgtcattacctacaatgccggtgctcttaattgcagaggtggtcgccggtgttaatagttactaaagtctatcttcttttggtttcttgcattatacatggcaatagcactattgaatgtcgaggcttgatttaaaattgcctcaactgtattataaagttgtaatgatttgtttcaccgccaattattgatgtatctataaaagcaaacaaagttggaactctccaaaaaaaa

SEQ ID NO: 124914 - DNA, 527 bp, Arabidopsis thaliana
cactattgggaaagctgacccgcctgcaggtaccggtccggaattcacatatctctccaacactaaaataattgtaccgactctctctctctctctctccgtaacaaaaaaatcaccaatggcaaaacaatatctctttgtactcctctcaatctcctatctcttatcactggagctcacggcggccaccgcagcctcacagaccggagcttccaaaaaagccataaacttcatccaatcttcttgcaaaaccaccacataccctgccttatgtgtccactcactctccgtctacgcaaacgacatccaaacaagccctaaacgtttagctgagaccgctatagccgtgacactaagccgagcccaatccacgaagctcttcgtctcgcgtctaacacgtatgaagggtcttaagaagcgcgaggtcgaagccatcaaagattgcgtcgaggagatgaacgataccgttgaccggttgaccaaatctgtcaagacctgaagttgggtgggagcgcccaagaccaaac

SEQ ID NO: 124915 - DNA, 340 bp, Arabidopsis thaliana
cccacgcgtccgcccacgcgtccgtctctccacaatttgctgctttaacctctctctctctctctctcatcacaccatgtgggatgtggctatagcagtcttcactgcatcttcctcctcactttcttctctctctttctcttaatttctttttttccagatttttctctgattcccatcttttccctcgaatgatcggttgagagaagatggtttcagagacttggtttcgtaatctgtggaggtttccaaagaaacatgatggtcataaagataaggcggttctaggagtattagcgtttgaggttgcgagtttgttgtcgaagcttgttcatttgtg

SEQ ID NO: 124916 - DNA, 509 bp, Arabidopsis thaliana
gcgacgcgtcagcggacgcgtgggcggacgcgtgggtttagatttgaggactctctgtcttttcttatttcggagaatgttctttttctagggttttgaaattctaagagattttctgaagaagaaaacaaaatgggtcctcttgtcgaagcgactgagttctcgaaagaacaagcactcaccgacgctgcagaaaatctccttaaacctcatttctcaactgatgcgactctcagtcttctcgaggtaatggagtctctgctcgccactgtcgagcaagatctttcttcatcagtacaaaaggccctacatccaccaatgagggctttggtatccgctgatcttttgagaaaccctgattctgatgttagggtttctgttgtctcttgcttgaccgaaattatgaggattactgctcctgaggccccttacaacgatgagcaaatgaaggacatcttccaggtgacaatagaagcctttgaaaaacttgctgatgcttctagtcgcag

SEQ ID NO: 124917 - DNA, 463 bp, Arabidopsis thaliana
cccacgcgtccgctcaaattgaagtttccatgggaggccacgaaggtttcagcaaccaacgcctctcctccgccacatggttctctcatttccgtgcttcagctctccgatctaaatcactgccccctccgtcctcgcagactgccgttcgctccacctctggcgactctctggttcgtcgcctcggccttttcgacctcatactgttgggcgtcggcgcttccatcggcgccggtgtcttcgtcgtcaccggaaccgtcgctcgcgatgctggacctggagtcacaatcagcttcttgctagctggagcatcgtgtgtgttgaacgctctctgttatgctgaactttcatctcgtttccctgctgttgttggtggagcttacatgtactcttactcagctttcaatgggtaatcccagttttttttagtttatatttcatctcttggcttttgcttttttta

SEQ ID NO: 124918 - DNA, 766 bp, Arabidopsis thaliana
  unsure (1)..(766): unsure at all n locations
cnnnnnnnnnnnnnnnnnnnnnnnnnnnnnnnnnnnnnnnnnnnnnnnnnnnnnnnnnnnnnnnnnnnnnnccacgcgtccggtgataaagaataaagagagccagtcgagggtaaaacgaaaggccaccattttcaatctttccacaataatggcggctactagagtgttaactgcagcgacggccgtgacccaaaccacctcctgtttcctcgccaagcaagctttcactcttccggcgaagaaatcctgcggcggatttggtggtctctgcttcagcagaagagctttggtgttgaaatctaagagacctttctcctgcagtgccatttacaatcctcaggttaaggttcaagaagaaggtccggccgaatccctagattatcgagttttcttcctcgatggttctggaaagaaggtttctccatggcatgatataccattgaccttaggcgatggagttttcaactttatagttgaaatacctaaagagtcaaaagcaaaaatggaggttgctactgatgaagatttcactcctattaagcaggatactaagaaggggaagctcagatattatccgtataacattaactggaactatgggttgcttcctcaaacatgggaagatccatctcatgcaaattctgaagttgaaggatgttttggggataatgatccagttgatgttgttgagattggtgaaacacaaaggaagataggcgatattctaaagataaagcctttagcttgcttagctatgattgat

SEQ ID NO: 124919 - DNA, 263 bp, Arabidopsis thaliana
  unsure (1)..(263): unsure at all n locations
aagaagaagaagaagaagagatcagctgagcaacaatggccaccgcgatacctctcttcgcctctttcaagtatgccgatagtctcaccgtcgttggaatctctttctgcacggcgttggtctgcgaagcattctcatggatcctaatctatcgcacaagctcttacaaatcgttgaaatcttccattgacaaagcctctaagaagcttgagacgatgaagacagataatccttcctcgaagctaacaaacaagaaatcgnag

SEQ ID NO: 124920 - DNA, 618 bp, Arabidopsis thaliana
  unsure (1)..(618): unsure at all n locations
aagtcattcccagagaagaatccagatatagatatgctgggatgccagatacagaagcagtgaccaaccccacagacagaactgtggctcatttgctctttcataggccttttgatatgttggcggcaaagcgaatggaaggaccagaatcacccgcttcttcgaagatgggaactgaagaaaaagggaattttcctaaatgcagcatacgagagactcacttaactaagcagaaagctcaaaaggaagaaggacctgcagattcacttgctttggggaatgcacccaactctggatctagtagtactgttggtgagagggttgttgaagcatcccaaggaaacaaaagaaaattgtgaaatttagaagtttaggttgccgtgttagagaggagctttgggtatttctgcagactagacagcatctttctgcggctctttgaaacaatctcctgactgcncctttcttgtgaagcccttattccttgtaattagatttttttttttttgttncttttcgaaaacctcttttgttatacgcattttggaaaacgtgtngtttgcaatgtttttccccnnttcgaaaccngattcaatctcttnatacaattgtnngnnc

SEQ ID NO: 124921 - DNA, 967 bp, Arabidopsis thaliana
gccacgtgtcatcttcctgaaatattgttttttgtttggaggtaactgtatcttctcaagctttcttcttctacaacacatctagagctttgcaacaatggaggcgagtgcgaatgaaccagctatgaaaagcttgaaatccaatccttcaggaccgataccgaactttttcgtatcgctctcttcggcatttacgcaaacacctcttgtgcgttcgaacaaacccaatttgcttcttctaccaccagttgcagactccgtcaaattgattcaagactttcatcagtctctgatttctgctactgagaaatttaaaggattcctccattcgctcgcctctaagaaccctctctttcaggaagcggttcgcctatcttccgaatttcacattttgtgcgacgagattcgtttgagaaacactacaagggtgaggtttgcgatgtctaatcacggatttgcagcggttctgcctggagattcagttgcaggattggtggttgctaatggtttgatcaatttcctcaacatatataacaccatccttgtcgtccgtctagtactcacctggttcccgagtgctcctcctgccattgttaaccccctcagcactttatgtgatccatacttgaacattttccggggattcataccgcctcttggaggattagatttgtctcccattttggcgttccttgttctcaacgccttcaccagctcggctatggcacttccttgcgaactcccgtcagctgatggagccgtttctccagcttctagtgagacaaagtggatgagaaggagaaggttgagcagccacaaagaccacagaccgagctcagcttctatgacctgaacctgtctaaaatatctactcttttctgcgcttcaaatgtaaaatctacctttcgagtaatttcattactctgcatctttggatttctgagttttgtataaattttctttagaa

SEQ ID NO: 124922 - DNA, 389 bp, Arabidopsis thaliana
cgagaaatctttttgggcgacgttggttgctcggtgctctttctccgatctgtctccattttcggtgatttaaagtcaggatttggctgtggagatgtcttcacttacctccgtcgaattgaattttctggttttccgatatcttcaggaatcagggtttacacacgctgcattcactctaggttatgaggcagggattaataaatccaacattgatgggaatatggttccacctggtgctcttatcaaatttgttcagaaaggtcttcagtacatggagatggaagctcatttgagcaatagtgaagtggacattgatgaggatttctcattctttcaacccttggatctgatttcaaaggatgcaaaggcactgcacgatatgctca

SEQ ID NO: 124923 - DNA, 750 bp, Arabidopsis thaliana
gagcttgtataagtatttgtgacaataatcccaaagaaaacccaataaaatacagataaacctgtcgaaccggttgatttagcacaataagcggtccatgaaacgtcttctacatcaaagttcgtaaatttccatgaaacgtctttgagcaccgaggaagaaagtttaaaattcctaaagaaacacacaaattaaaaaaggcaaaacctaaaccccatatttatttgtctttttttctttatcagagaattttaaaaaggtaaaaatagattatattctattccttcagaaaatttttatcgtcctaaaatcttcgtagcctgcaacaaagaaagactaagaaagaactaaaatattttgcttcgtctaattacttttttcctttggatttaattctcagccatcgccgccgttttcggcggtgtaaaaaatgaagaaccgtaggaaacgcggtggtttaagcagtgtcgacgtcgttgtttcatggagaagatttttccgatttgtttctttgttcgtcttctccttcgttctcttctctgctttcttcatcttcttaggcaaaattcgaccggtggtgcggtcttcggtcaaccgcagttcttcgtggttctgtaccggtggttaaggtgatcacgatccatgaagcagttgagttttccgaccaaacattgattttcctaaaataccctccatcttctcggttttttacgaaagaggacctcttttgcgttttctccgacgtaaacg

SEQ ID NO: 124924 - DNA, 554 bp, Arabidopsis thaliana
aaagcacgtacgcctgcaggtaccggtccggaattcccggttcgacccacgcgtccgtgcttcctcaatctaaggatttccatgaacaaggaactaaaatgagatctcttctctttgtactatcactcatttgcttttgctctcaaacagcactttcatggaagaaggaagagtttcgcagctgtgaccaaactccattttgtaaacgcgctcgatctcgtactcccggcgcgtgttctctaattgtcggcgatgtttccatcactgatggagatctcgtagcgaagcttctaccgaaagcgcctaatcaaggcgatggggatcagatcaagccgttgattctttctctctcagtttacaaggatgggatcgtgcggcttaaaatcgatgaggaccattcgttgaacccgccgaagaagaggttccaagttcctgatgtggtagtgtctgagtttgaggagaagaagatctggctgcagaaagtagcgacggagacgatctctggagacactagtccgtcttcacgtggttatgtatccgatggttacgaggcg

SEQ ID NO: 124925 - DNA, 618 bp, Arabidopsis thaliana
  unsure (1)..(618): unsure at all n locations
aangnaacttgnccctcagtccgtccggatcccggccccccccgcccgagttcgcttactctctcgttaaagctctcagagagggtatctcgatctggttggttcctttaaccatctgtaactatggcggcagaaccgaaggcagcgactgctgaagtagtgaagatggatctgtttgaggacgacgatgagttcgaggaatttgaaatcaacgaagattggttggagaaagaagaagtgaaggaagttagccagcagtgggaagatgactgggatgatgatgatgtcaatgacgacttctcacgtcagttaaggaaggagcttgagaatggtactgacaagaaataaggtcgaagattgtgaaagacaggtcttcacatttaggaaatctttgttttcttttatgatctggaactttgtttgtactgcatcattttgggtttatgttatcggttctgcttttcctttgcacattttactattccttggatgcaaatttcttatctttgcaagataatacatttacgctggtgcgttcaaaaaaaaaaaaaaaaaaaaagggcggccgctctagaggatcctagcttacgtacgcgtgcatgcgacctcataacttga

SEQ ID NO: 124926 - DNA, 726 bp, Arabidopsis thaliana
aacctccttcgtacttcatcgttgctggctttgtatttacaactgtctctgttccatatcttcgatctgagtatggaaaagaatatgaatttgacgcgcctgtcaagctattggagaaacatcttcatgcaatggctcaatccgtggacgagcagcttgttgtagtttcacaggttcttgtttctgacattaacattggttatgaagagattgtcaacacccaggttgtcgcctttaatggcaaacctgtgaaaaacttgaaaggtttagctgggatggtggagaattgtgaggatgaatatatgaagtttaatctggattatgatcagattgttgttctggacactaagacagcaaaggaagcaacattagatattctgaccacacattgcataccttctgctatgtctgatgatctcaagactgaagaaagaaactgaaacagaaggaaccataaccagaaggagagaaagagagatttttgtccatggaaggacataaaagcaaatacagtcatggaaagacaaagagaagctcaaaccataatttgatttttcttgattctgttttgtatttggaaaaatatgcaagaagaaatacgttggttattttttctctcatttattttctttgaagtttgaacttggttgaacaaaaaaaaaaaaaaaaaagggcggccgctctagaggatccaagcttacgtacgcgtgcatgcgaagtccagac

SEQ ID NO: 124927 - DNA, 496 bp, Arabidopsis thaliana
aaaaaaaagaagggcataaaaataagagcttcaggaaccagcaaagggaaaaatcggttcgcggcttcttctgctttgccgagaccctaagcttgattcgatctaactctggcttatcaattctgatcttgtcgtttcgcaatggtggtctgcaaatgcaaaaaggctaccaggctgtattgctttgttcacaaggcccctgtttgcggcgaatgcatttgtttcccggagcatcaaacttgtgtggtccggacgtattcagaatgggtgatagatggagagtatgatcagccaaagtgttgtcaatgccaagcaacatttgatgagggggcaggtcatcaagtcactcggttaggttgcttgcatgctatacatacaagctgcctggtttcgcttatcaagagttttcctcctcatactgcacctgctggttatgtgtgcccagcatgtagcacacctatatggcctcctatgatggtaaaagatgcaagatctc

SEQ ID NO: 124928 - DNA, 1171 bp, Arabidopsis thaliana
  unsure (1)..(1171): unsure at all n locations
nnnnnnnnnnnnnnnnnnnnnnnnnnnnnnnnnnnnnnnnnnnnnnnnnnnnnnnnnnnnnnnnnnnnnnnnnnnnnnnnnnnnnnnnnncggccgcaccgacagattcatcatacccgagataagcaactacgcgagtatttggttcattctactcttcatctcaattgctgtgactggaatcctggagctgagatggagcggtgtgagcattgaggattggtggaggaacgagcagttctgggtcattggtggcacatccgcccatctttttgctgtcttccaaggtctacttaaggttcttgctggtatcgacaccaacttcaccgttacatctaaagccacagacgaagatgggatttttgcagaactctacatcttcaaatggacagctcttctcattccaccaaccaccgtcctacttgtgaacctcataggcattgtggctggtgtctcttatgctgtaaacagtggctaccagtcgtggggtccgcttttcgggaagctcttcttcgccttatgggttattgcccatctctaccctttcttgaaaggtctgttgggaagacaaaaccgaacaccaaccatcgtcattgtctggtctgttcttctcgcctccatcttctcgttgctttgggtcaggatcaatccctttgtggacgccaatcccaatgccaacaacttcaatggcaaaggaggtgtcttttagaccctatttatatacttgtgtgtgcatatatcaaaaacgcgcaatgggaattccaaatcatctaaacccatcaaaccccagtgaaccgggcagttaaggtgattccatgtccaagattagctttctccgagtagccagagaaggtgaaattgttcgtaacactattgtaatgattttccagtggggaagaagatgtggacccaaatgatacatagtctacaaaaagaatttgttattctttcttatatttattttatttaaagcttgttagactcacacttatgtaatgttggaacttgttgtcctaaaaagggattggagttttctttttatctggccgtctgaagtttatatgctaaaaaaaaagcggccgnnnnnnnnnnnnnnnnnnnnnnnnnnnnnnnnnnnnnnnnnnnnnnnnnnnnagtgatttcnnnnnnnnnnnnnnnnnnnnnnnnngtt

SEQ ID NO: 124929 - DNA, 704 bp, Arabidopsis thaliana
  unsure (1)..(704): unsure at all n locations
tcctttnacccccaacccccgccnctgggccccaaggattgggtgggcnctagctaaaccagnggaccagccgggggccnctttncggnagcncttntccccttangggtaatccccanntnaacccctttcttgaaagggnctgttgggaggccaaacccggacaccaaccnatcggncattggtctggtctgtccttctcgcctccatcttctcgttgctcggggtcaggatccaatccctttgtggacgccaatcccaatgccaacaacttcaatggcaaaggaggtgtcttttagaccctaatttatatacttgtgtgtgcatatatcacaaacgcgcaatgggaattccaaatcatctaaacccatcaaaccccagtgaaccgggcagttaaggtgattccatgtccaagattagctttctccgagtagccagagaaggtgaaattgttcgtaacactattgtaatgattttccagtggggaagaagatgtggacccaaatgatacatagtctacaaaaagaatttgttattctttcttatatttattttatttaaagcttgttagactcacacttatgtaatgttggaacatgttgtcctaaaaagggattggagttttctttttatctaagaatctggcggccgcgaattcgatatcaagcttatcgataccctcgacatcgagggggggccgtggc

SEQ ID NO: 124930 - DNA, 668 bp, Arabidopsis thaliana
  unsure (1)..(668): unsure at all n locations
ggggnccncggggcccctttngggnnccttcccccnnggggtttccccnntnccccnttttggaaggcttttgggnagccaaaccgggccccaccccggcattgncgggctggtntncccgccnccatttcccgttgctttgggtccggnacaatccctttgtggccgccaatccccaatgccaaccactccaatggcaaaggaggtgtcttttagcccctatttatatacttgtgtgtgcatatatcaaaaacgcgcaatgggaattccaaatcatctaaacccatcaaaccccagtgaaccgggcagttaaggtgattccatgtccaagattagctttctccgagtagccagagaaggtgaaattgttcgtaacactattgtaatgattttccagtggggaagaagatgtggacccaaatgatacatagtctacaaaaagaatttgttattctttcttatatttattttatttaaagcttgttagactcacacttatgtaatgttggaacttgttgtcctaaaaagggattggagttttctttttatctaagaatctgaagtttaaaaaaaaaaaaaaaaaaaaaagnnnnnnnnnnnnnnnnnnnnnnnnnnnnnnnnnnnnnnnnnnnnnnnnnnnnnnnnnnnnnnnnnnnnnnnnnnncatt

SEQ ID NO: 124931 - DNA, 528 bp, Arabidopsis thaliana
  unsure (1)..(528): unsure at all n locations
cttctcgccccctttatcttgttctttgggtcaggatcaatccctttgtggacgccaatcccaatgccaccaacttcaatggcaaaggaggtgtcttttacaccctatttatatacttgtgtgtgcatatatcaaaaacgcgcaatgggaattccatgtcccagattagctttctccgagtagccacagaaggtgaaattgttcgtaacactattgtaatgattttccagtggggaacaagatgtggacccaaatgatacatagtctacaaaaagaatttgttattctttcttatatttattttatttaaagcttgttagactcacacttatgtaatgttggaacttgttgtcctaaaaagggattggagttttctttttatctaagaatctgaagtttatatgctaagcttttcactttcctccntnttntntnagcggccgaccccctgatcaacgctctataggatcccagcttnnnnnnnnnnnnnnnnnnnnnnnnnnnnnnnnnnnnnnnnnnnnnnnnnnn

SEQ ID NO: 124932 - DNA, 437 bp, Arabidopsis thaliana
gcagaatggttacgtgggtttatagcagattatggtgttccagtaatggtggtagtgtggacttgtatatcatacataccttggaaaagtgttcctcaagggataccaagacgtcttgttagtcctaatccatggtctcctggtgcatatcagaattggactgtcattaaggagatggtggatgtacctgtgctttacattcttttagcggttgttccagcgtcaatgattgcggttctttactactttgaccatagtgtagcctcgcagctcgcacagcaggaagatttcaatctgagaaagcctcctgcttaccattatgatctgtttcttctaggtttcttgacaatcctttgcggtctcatcggaattcctccatccaatggtgtcatccctcagtctccaatgcacacaaaaagcttggcaacactgaatca

SEQ ID NO: 124933 - DNA, 513 bp, Arabidopsis thaliana
  unsure (1)..(513): unsure at all n locations
ctcaggcaatgagtgaggcaagtccaactcgcccagttacaatacagtggtatataatgaccagtccatttactcatgaaccaacacaaaaattcttcaagagtcacaagtattttggccttgaaccagatcaagtcaccttttttcaacaaggaactctgccttgcatttcaaaggatggcaagtttatcatggagacacctttcagcctatccaaggcgccggatgggaacgggggagtttatacagctttaaaatcttcaaggttattagaagatatggcttcgagggggattaaatatgtggattgctatggtgttgacaatgttctggttcgagtagctgaccctacttttctgggatacttcatcgacaaaagtgcagcttcagctccaaaagtagtgcgaaggcatttccacaggaaaagttgggtattgtaaggnggggaaaggtggccttgctgtggttggtcacaggnttnccgctntgntntcaactatacaacaggcggtc

SEQ ID NO: 124934 - DNA, 759 bp, Arabidopsis thaliana
  unsure (1)..(759): unsure at all n locations
ggccccccctcgaggtcgactgtatcgataagcttgatatcgaattcgcggccgcaagacctgctcctatgccgtactggtctttaggatttcatcaatgtagatggggataccataatctatcagttgttgaagatgtggtggataattacaaaaaggctaagatcccacttgatgtgatttggaacgatgatgatcacatggatggtcacaaagatttcacgttgaatcctgtggcttatcctcgtgctaagctattggcgttcttggacaaaatccacaagattggaatgaagtatattgtgatcaatgatcctggtattggtgtcaacgctagctacggtacatttcagagagccatggctgctgatgtgtttattaagtatgaaggaaagccattcttggctcaagtgtggcctggtccggtttacttccctgatttccttaacccgaagacggtttcttggtggggtgatgaaatcaaacggttccatgatttagtccctattgatggtttatggattgacatgaacgaggtgtcgaacttttgttctggtttatgcacaatccctgaaggaaagcagtgtccaagtggggaaggtcctggttgggtttgttgcttggactgcaagaatataaccaagactagatgggatgatcctccttacaagattaatgctactggtgtcgtagctcctgttgggttcaagactattgctacaagtgctactcattacaatgggtgttcgnggagtacgg

SEQ ID NO: 124935 - DNA, 616 bp, Arabidopsis thaliana
atcaaactcgtacctaacgagccttatactctttacactgaagatgtttcagctatcaatcttaacactgacctttatggttcgcatccgatgtatatggatctaagaaacgttggaggtaaagcttatgctcatgctgttcttcttttgaatagtaatggtatggatgttttctatagaggtgattctttgacgtataaagttatcggaggtgttttcgatttctatttcatcgccggaccgtcgccgttaaatgttgttgatcagtatactcagttaatcggaagacctgctcctatgccgtactggtctttaggatttcatcaatgtagatggggataccataatctatcagttgttgaagatgtggtggataattacaaaaaggctaagatcccacttgatgtgatttggaacgatgatgatcacatggatggtcacaaagatttcacgttgaatcctgtggcttatcctcgtgctaagctattggcgttcttggacaaaatccacaagattggaatgaagtatattgtgatcaatgatcctggtattggtgtcaacgctagctacggtacatttcagagagccatggctgctgatgtgtttattaagtatg

SEQ ID NO: 124936 - DNA, 418 bp, Arabidopsis thaliana
cccacgcgtccgctaggccagtcaattctgggaggagagaggccgccggaggagagagaaaaagagttgggggatagctttttgatttctccttctccatcttcgacctcgagagaagctaaaaatggcagaagaagcggatacgaacatcgagatctggaagattaagaaactaatcaagggacttgaatcagctagaggtaatggaacgagtatgatctctcttattatgcctcctcgtgatcaagtatctcgtgtcacaaagatgcttggtgatgaatatggaactgcttcaaacattaagagtcgagtcaatcgtcaatctgttttgtctgccattacttctgctcaacaaaggttgaagctttacaacaaggttcctactaatggtcttggtctctataccggcaccattgtt

SEQ ID NO: 124937 - DNA, 647 bp, Arabidopsis thaliana
  unsure (1)..(647): unsure at all n locations
aangcccttttgnngccaggntgcgaatncggacccntccnantttgatttctaggaaaccccccncactttttccagggtccagatccgtacactaagacggaatatgtatcgtgcccgtcttgtggaagaacgcttttcgacttgcaagaaatcagcgccgagatccgagaaaagacttcccatttacctggcgtttcgatcgcaatcatgggatgcattgtgaatggaccaggagaaatggcagatgctgatttcggatatgtaggtggttctcccggaaaaatcgacctttatgtcggaaagacggtggtgaagcgtgggatagctatgacggaggcaacagatgctctgatcggtctgatcaaagaacatggtcgttgggtcgacccgcccgtggctgatgagtagatttcaaaacggagaaagatgggtgggccattctttgaaaactgtgagagaagatatatatatttgtgtgtgtatatcatctgtttgttgtgtattgcatcatcattttgaacaaatgtccaaatctcttaagttgataaaaattattaaagcgtacgtacgcgtgcatgcgacgtcaagactcttctatagtggtacctannnnnnnnnnnnnnnnnnnnnnnnnnnnnnnnnnn

SEQ ID NO: 124938 - DNA, 1172 bp, Arabidopsis thaliana
  unsure (1)..(1172): unsure at all n locations
gggtatgccattcaaggatctggcaactgttgattcaatcttattaaagagagctaccgcctgtagatgatcaagtggctcgtttggctctaaaacggttgattgatgtcagtatgggagttatagcacctttatcagagcaactaacaaagccattgcccaatgccatggttcttgtcaacctcaaggaactatctggtggcgcttacaagcttctccctgaaggtacacgcttggttgtctctctacgaggcgatgagccttacgaggagcttgaaatactcaacaacattgatgctacgatgattctccatgatgtacctttcactgaagacaaagttagcagagtacatgcagctcggaggctattcgagttcttatccgagaattcagttaactttcctgttattcatcacataaacttcccaaccggaatccacagagacgaattggtgattcatgcagggacatatgctggaggccttcttgtggatggactacgtgatggcgtaatgctcgaagcacctgaccaagattttgattttcttaggaatacttccttcaacttattacaaggatgcagaatgcgtaacactaagacggaatatgtatcgtgcccgtcttgtggaagaacgcttttcgacttgcaagaaatcagcgccgagatccgagaaaagacttcccatttacctggcgtttcgatcgcaatcatgggatgcattgtgaatggaccaggagaaatggcagatgctgatttcggatatgtaggtggttctcccggaaaaatcgacctttatgtcggaaagacggtggtgaagcgtgggatagctatgacggaggcaacagatgctctgatcggtctgatcaaagaacatggtcgttgggtcgacccgcccgtggccgatgagtagatttcaaaacggagaaagatgggtgggccattctttgaaaactgtgagaggagatatatatatttgtgtgtgtatatcatctgtttgttgtgtattgcatcattcattttggacaaatgtccaaattctcttaagttgataaaagttcttaggccaaattaaatttaatataaaaaaaaaaaaaaaaaggcnnnnnnnnnnnnnnnnnnnnnnnnnnnnnnnnnnnnnnnnnnnnnnnnnnnnnnnnnnnnnnnnnnnnnn

SEQ ID NO: 124939 - DNA, 466 bp, Arabidopsis thaliana
  unsure (1)..(466): unsure at all n locations
ctctctctcatcttttatttttcttttagaaaccaaacttttcagatttctctctctccatttggcgatagaagaagtcatgtaccaatcatcatcctccacgtcatcatcatcgcagagatcatcgcttcccggcggcggaggactgatccgttacggctcagctccgggatcgtttctaaactctgtggttgacgaagtcatcggaggaggctcatcaaacgctcgtgacttcaccggctatcaaccgtcgtcggataacttcatcggtaactttttcaccggagctgctgactcatcctcgctgagatccgattcgacgacttgtggagtcaacaactcatccgacggacagaaacagctaggcaataacaataataataatagtaataaagatatcttcctcgacagatcctacggtggattcaacgagatctcgcaacaacacangagcaacgacatcgga

SEQ ID NO: 124940 - DNA, 578 bp, Arabidopsis thaliana
  unsure (1)..(578): unsure at all n locations
nnnnnnnnnnnnnnnnnnnnnnnnnnnnnnnnnnnnnnnnnnnnnnnnnnnnnnnnnnnnnnnnnnnnnnnccacgcgtgcgcttaattccttgattaagaaaccccagaaaaaccctaaacccttgaagcgtctccttctctagttctttgcaagcggaaatgtatcgagtgctatcaaagttatcttcttcaattggctcgtctacttccaggaaactggtttctgggcggattataagtagcagaaactatgcggccaaggatatcagtttcgggatcggagctcgggcagctatgttgcagggtgtatccgaggttgcagaagctgtgaaagtcactatgggaccaaagggaagaaatgtgataattgagagcagttatggcggaccaaagatcacaaaggatggtgtcaccgtggcaaaaagcatattcatttcaagctaaagctaagaacattggtgccgaactcgtcaaacaggttgcaagtgccactaacaaggttgctggagatggtaccactgtgccactgttttgactcaggcgatactcatcgaaggctgcaagtccggggctgca

SEQ ID NO: 124941 - DNA, 423 bp, Arabidopsis thaliana
cggacgcgtgggttcgccttcaagcttcttcacaaatccataagtcagtcggagaataaagaggaaaggtctgataaacacggaagctgcaagagaatttatcaatcatctagttgctgagaggcattcgctgttgttgctggttcctttggtcttagctttctgggcaattgaaagatgggtctttgctttctccaattgggttcctctcgttgtcgccgtctgggcttctcttcagtatggaagttaccaaagggcactacttgcagaagatctaaccaagaagtggaggcaaaccgttttcaatgcgtcgacggtaactcccattgggacattgtccaatggctgaacaagttactgtcttgaaattttggctaaactatatggaccaggaactctctcttagggtttcttctatggtgg

SEQ ID NO: 124942 - DNA, 647 bp, Arabidopsis thaliana
  unsure (1)..(647): unsure at all n locations
nnnnnnnnnnnnnnnnnnnnnnnnnnnnnnncttctctgaatcgctgccgcttcaacgatagactaaaagaatccaaacctcagtagccatggaaggcgaagagaagaatgattatagaaacgaggaagaagatttcaatacaccacaacaactacaaaagaagcaaaggaaagggaaaaaaatagcaacggaaacagaggatgaaaacgaagaagacaagagagttactctcaaagtcacgcaagtcgccgagagacccgatagaatctctccgatcgtcgcctatttctctacaggatacgatccttgtaaagtagatccaaaaacaggcaagagagttcatgaaactcccaaggttactgtttacaagcataaggatgattctaagaagaggattcaggttgttgtaagtcctccaggcgcaagagttgagttcgtcggaactaattacacaggcgagcaagctgctatgcagacgaatacttatagagttggtggttttaatagagaggctaaaactntgaggattcttcctgttgctcacaataagataatcagattggagcctagagttaaagctcaagaaacatatgaggaagatgcttcaggaagtgctgtcgcaaagaacttgaagactaaaacagga

SEQ ID NO: 124943 - DNA, 374 bp, Arabidopsis thaliana
gtctcgttctcttctctttaccgccgtcatctaggtctgctaatatcaagtgaaggagctcgaaatggccacagttccaggacagttgatctgggagatcgtgaagagaaacaactgtttcttggtgaagcaattcggtagaggtaatgccaaggttcagttcagcaaagagagcaacaacctcgtcaacatcaactcgtacaagcactctggtttggccaacaaaaagacagtgaccattcaggcggctggcaaggaccaaggtgttgttctcggtaccaccaatgactatgagacaaaacatgcctatgctctctgttaacaagtctatcctcaataatgagttctcgttgtttattaatgtttttgttata

SEQ ID NO: 124944 - DNA, 715 bp, Arabidopsis thaliana
  unsure (1)..(715): unsure at all n locations
aggtctcnnnnnnnnnnnnnnnnnnnnnnnnnnnnnnnnnnnnnnnnnnnnnnnnnnnnnnnnnnnnnnnccacgcgtgcgattgcggctcagcaaaagttacctaaggaagcagaaactgcagtaaatggtgatgttgaacttggatgttccccgtcttttcgggatcccgagaagcagatatatggatgcgagcattacaagcgtaactgcaagcttcgagctgcttgttgtgatcagttgttcacttgtaggttttgccatgacaaagtaagcgaccactccatggatagaaaattggtgacggaaatgctctgtatgcggtgcctcaaggtgcaacctgttggtcccatctgcacaacaccttcatgcgacggattcccaatggcaaagcactattgcagtatttgcaaactttttgatgatgaaagggccgtttaccactgtccattctgcaacctttgccgggtcggggaaggactaggaatcgattttttccattgcatgacatgtaactgttgcctagggatgaaattagtaaaccacaagtgcctcgagaagagcctcgagacaaattgccccatctgctgcgaatttcttttcacatcgagtgaagcagttagagccttaccatgtggtcactacatgcactcagcttgcttccaggtttgcaaatctctctttctctcattaaacttaaattaacttttaacgc

SEQ ID NO: 124945 - DNA, 484 bp, Arabidopsis thaliana
agaaaactaacacaagtagataaatataaagaaaaatgcttgataagcttattattggggttgccggagggattaccggagggattcttggaacggtcgatgggtttgccaaaggggtcgggatatggcccaataattatcagagcaccggtcgcttcgagaacaacaatatgacgagtccgggaaactacggcaatggtaatggcggtgcagtgaaggcatccgagaactccggcggccgccgccagaaagacagggagtaaaggactcctgaccacacccagtaatgattatgtatccaaaataataaatgtatacgatgtatgtataagatggacatgtttcagtatcttaccaaaaatataggagacttttaatgaaaagtcttcttgtttaattttatgaactttatgattaataaaaggagtgtgtttaataaaaaaaaaaaaaaaaaaaaaaaaaaaaaaaggcggccgctcgaatt

SEQ ID NO: 124946 - DNA, 753 bp, Arabidopsis thaliana
cccccccttggtcgattgtatcgataagcttgatatcgaattcgcggccgccttcttcctctagacatgaatttcaaccatttcctcttctcacccatggccatacggtttctggagagattcgcacgcctgatacacaatctgtgcgaactacatcaggtcctttgggtccttctgacaggaatgctatttcatctccatatattgatccacggcaacctgtccctgtaagaatcgtggacccgtcaaaagacttgaactcttatgggcttggtaatgttgactggaaagaaagagttgaaggctggaagctgaagcaggagaaaaatatgttacagatgactggtaaataccatgaagggaaaggaggagaaattgaagggactggttccaatggcgaagaactccaaatggctgatgatacacgtcttcctatgagtcgtgtggtgcctatcccatcttctcgcctaaccccttatcgggttgtgattattctccggcttatcatcttgtgtttcttcttgcaatatcgtacaactcaccctgtgaaaaatgcatatcctttgtggttgacctcggttatctgtgagatctggtttgcattttcttggcttcttgatcagcttcccaaatggtaccccattaacagggagacttatcttgtccgtctcgctataagatatgaccgagacggtgaaccctcacagctcgttcctgttgatgtgtttgttagcacagtggacccattgaaag

SEQ ID NO: 124947 - DNA, 614 bp, Arabidopsis thaliana
  unsure (1)..(614): unsure at all n locations
accctttcgtcgtcaaggtctagctttctcaaatcctctctctctcgtttctccgattccgatatcaccgtctcctccaccggaaaatccataacgcgattaggtttttagcctagttccttaatctctggttattgattctttcaatttctgatcgatgacattgtccaagcgattggctctattgggagctcaatctgcgattactctcgctaaacctcgaggtctcggttcctctctcgggttacttgatcgtcgtccatttccgtatcgtcaattttctgagctcacgaaagctaatgggagacgtgcttttctcgttgatacattggctctggtgaggagtcttgaagctcaaggagttccatcgaaacaagctgaggcaataacttctgctattactgaggttttgaatgatagcttggaaaatgtccctgggccttttttgcgccgaaaggggaatccagaagnattgaaatgttcaaggttcaaattttctcggaatttaaatctgaggcaaaagttcntaggggnacaatttnactnttttcaacggggggctgaaaattnngggnggnattgngaagntcgagtngcnaggccgnantttnagg

SEQ ID NO: 124948 - DNA, 727 bp, Arabidopsis thaliana
  unsure (1)..(727): unsure at all n locations
ccngctctctacgactcactattgggaaagctggcacgcctgcaggtaccggtccggaattcccgggtcgacccacgcgtccgctcgctttcggtgacaatgggaagctcgtcgaaggaagagacggcgagtgacggagatacggcgagcggtggcgcctcaccgtccaacgacggcagactcttctcggagggcgagcgtgttctcgcttaccatggtcctcgcgtctacggagccaaggttcaaaaggtcgagcttcggaaaaaggagtggaaatactttgtgcactatcttggttggaacaaaaattgggatgaatgggttagtgcggatagattgttgaaacataccgaggagaatcttgtcaaacagaaagctctagacaaaaagcaaggagttgaaaaaggtaccaagtctggccgttccgctcagacaaaaactagaagctctgcagacacaaaggctgataaagatgacaccaagaccaatgctgcaaaagggaagaaacgaaagcacgagtcaggcaatgagaaaggataatgtacggcggagaagctaatgaagatccaaattcccgcatcacttacaaagcaactcactgacgactgggagtatattgcgcagaaggacaaggttgtgaaacttcctcgttcacctaacgtcgatgagatattggtccaagtcccttgaattcaaaaccaagaaaggatggaatggaactgattcg

SEQ ID NO: 124949 - DNA, 501 bp, Arabidopsis thaliana
tattccaatcactattaggaaaggtgggacccctggcgggacccggcccgaatttccgggttcaaccaagccttccgaaaaaggggagtttttttctctgctctcatgtcgattctggtttatgtagcaaaatcagtagatggggacccatgacatgattgtcttgccaacagttgggatgaatgggttagtgcggatagattgttgaaacataccgaggagattcttgtcaaacagaaagctctagacaaaaagcaaggagttgaaaaaggtaccaagtctggccgttccgttcagacaaaaactagaagctctgcaaacacaaaggctgataaagatgacaccaagaccaatggtaggcaacatattaatttacgctccctttgtagttcagggttctcccaacaatttccaaggaaatgatttggtagactgggtgcaacttaaattatttaagctggtgtatagatgattacattttctgttgcagctgcaaaaggg

SEQ ID NO: 124950 - DNA, 483 bp, Arabidopsis thaliana
  unsure (1)..(483): unsure at all n locations
cggctcgagattttgtcgatctggtaggaagaagaagtacaagagaacaagaaaaagtcaattcctttcgttagtcggcgaattctagaaacgatgttcaatttctggggatcaaaagaccaacaacaagggcaatctcgtcctcaggaagcttcttcacagtcgccatggtactcgccttctttagttagctcgccaagctcatcccggcctcaaagttcaggtcagatttcagcacaagtatcaccgggtgaagcagctggcattatcgtcttcttgaaagacaaaagcgtggatgaactcaggaagcttctctctgacaaagatgcgtatcagcaatttctgctctctcttgaccaggtcaaagtccagaataatatcaaagatgagctccctaggggaaccattgcagctagcttggggcaacttgggggagggggcccccgtaattgggcctanaanccatttnnganttttcggana

SEQ ID NO: 124951 - DNA, 421 bp, Arabidopsis thaliana
ccaaaactaagagaaactaaacaaattcaaatgaccaccaccgataaatccgccggaatcgtaactgactcggaagccggaccggagacttctcttctcctcaatcctcacgaaggatctaccaaaaaagctccttctgattcctaccacttcgcttacatcatctacttcaccctcggcgttggctttcttcttccatggaacgcattcatcaccgccgtcgattacttctcttacctctatccttccacggccgtcgatcggatcttcgccgttatctacatgctcgttgctcttgtttgtctattcgttatcgttgtcttctatgcacataagagcctcgctagctttagaatcaatctcggtcttttactcttcgtaatcgccttgcttgtggttcctgttttggatctggtttatg

SEQ ID NO: 124952 - DNA, 827 bp, Arabidopsis thaliana
  unsure (1)..(827): unsure at all n locations
gttcaaaatcatttcttctctcttccgtcaaaattattattctctcgcagtcgtcaagagcttcttctacaacaatgcagacgacgagaagtgttcaagtaaataatgtctcagatctagccacagagagagagattcacgagtttttctccttctcaggcgacatagaacacattgaaatccaaaaagaatttggacagtctcgaatcgcatttgttacatttactgatcccaaagccctcgaaattgccttgttattatcgggtgcgacgattgtggaccagattgttacaataacacgagctgaaaactatgttcagaggcgtgagacacaggaagtaagaatgttggacaacgcgatgcctcttggtcttcaagagagtactacacagactaaaacgaacatggatggtaatagtagagcatacgttagcaaagcacaagatgtggtggcaacggttttggcaaaagggtctgctcttggacaagatgcagtgaataaagccaaggctttcgacgaaaagcaccaattaagagccaatgcttctgctaaagtttcatcttttgacaagcgagttggtcttactgagaagttatctggttggaattcctgctggttaatgagaaagttaaaccggttgtcaaaagcttcaagtctccggttaaaccnatnggcaggcaataatttgcagccgananggaagttaaaccggcncnggggtcagctggccaatccaaccnaggnacgtnnctcctggaacctncttgggttaagnggncctttaggnaaanggcgaanttggccagggttccnggccnaaacccaa

SEQ ID NO: 124953 - DNA, 477 bp, Arabidopsis thaliana
ctagttacatatcttcaacaaagtgaatctcatgaggatattaccgaaaagcggaggaggtgctctttgcctcctctttgtgtttgctctttgttcgggggctcattcccttagctgtgacgtcaaggttgttggcgatgtcgaagtcattggctactcagaaatcagcaaaatcaagatccccaatgcattctcaggacttcgagttacgatagaatgcaaggcggccgattcaaaaggccattttgtaacgaggggaagcggagaagtggacgaaacaggaaagtttcatcttaatattcctcatgacattgtcggtgatgacggaactctaaaagaagcttgctatgctcatcttcaaagtgccttcggcaacccttgtccggcccacgatggccttgaggcctccaagatcgtgtttctatcgaaatccggccaaaaccacgttttgggtctcaaaaaaagtcttaaattctc

SEQ ID NO: 124954 - DNA, 511 bp, Arabidopsis thaliana
  unsure (1)..(511): unsure at all n locations
nnnnnnnnnnnnnnnnnnnnnnnnnnnnnnnnnnnnnnnnnnnnnnnnacacacaacaacaacacccacgcgcgaattttcgatttccgaataacataaccgatcggcggagacatgacggcggcacaagggaactctaacgagactctgttttcttcttacaagatgggaagattcgatctctctcatcgagtggttctggcgccgatgacgcggtgcagggcgttgaacggagtaccaaacgcggcgttggcagagtattatgctcaacggaccactcccggcggttttctcatctccgaaggcaccatggtctctcccggatccgcagggttcccacatgtgcctggaatctattcagatgaacaagtagaagcatggaagcaagttgtggaagcagttcacgctaagggaggtttcatcttttgtcaattatggcatgttggacgtgcttctcatgcagtgtatcaacctaatggaggatcaccaatatcgtcaacgaacaaaccat

SEQ ID NO: 124955 - DNA, 593 bp, Arabidopsis thaliana
  unsure (1)..(593): unsure at all n locations
cccacgcgtccgcccacgcgtccggttcactgacatgaagacttcagaggacacaatgcgtgggttttatgcagtcaccccgagctttcagaaggacctacacttattgttcaggtacttacaactggttcttggccaacacagcctgcagtaccttgtaatctcccagctgaagtttcagttctctgtgagaagttccgttcttactaccttgggacacataccggtagaagattgtcctggcaaacaaacatgggcacagcagatatcaaagccatctttggaaagggtcagaaacatgaactgaacgtgtcgactttccagatgtgtgttctcatgttgttcaacaattctnatcgactcagctacaaagagatcgaacaggctacagaaatcccggcagcagatcttaaacgctgtttgcagtcgctagcttgtgtaaagggcaaaaacgtggtnaaggaaggaccccatgtgcaaaggcataggnngaggnnggnttttttngttttgacggccaagtnccttggcangtttttccaaaggggaggntcggganntttggtttccccaaagggaaccanaccccgngg

SEQ ID NO: 124956 - DNA, 373 bp, Arabidopsis thaliana
atcaaattcaaacagataacatttttcgtcaaaagaatcagtaaaaactaaacattttgactatatcctacttgaatcaattcttcggctgattttgaagttttgtgacattcagatattctaaggttttgtggtaaatggaatcgaatcacgaaggcaacgcgatacaagtgattgaccaagtaacaaccatgacccatctgtctgacccgaatccgaaaaccaaaccgggtatgatgctcatgaaacaagaagacgggtatttgcagccggtgaagactaaaccggctccgaagagaccgacttctaaagaccgtcacacgaaagtagaaggacgaggtcggaggatccgaatgccggcgggttgcgctgc

SEQ ID NO: 124957 - DNA, 334 bp, Arabidopsis thaliana
aggacgcgtgggctcatcgtctctgactcgctgcacttagtttcagatcatataaacgaatttggtgattgatcggtgcatgacgagcgcatcggaactcttctctacacgaagatcacgtccgggtcgatccgacccggctttagaatccgacacttcttcctatcgacaccactcacaccatcatcatcgccgtcacggcgtccatcatcataatcagcgtcatgattccgacggctgtgatcctctccggcgacccactccccgtctccgacgcttctttcaccatccgattcacgaacgtagtagacctattcgtgatgttcaaggcact

SEQ ID NO: 124958 - DNA, 1262 bp, Arabidopsis thaliana
  unsure (1)..(1262): unsure at all n locations
cccacgcgtccgcggacgcgtgggtgaagaagctccagaacacgccatagctatggctcttctctgtccttctcttccctctccgaattctcgtcttttcaggtgcaggagcagcaatatttcgagcaagtatcatggagcctcaaaggagctgatgattgctcgttctggtgtgtctacgagatcaatttcttcggaaaaggggctttctcgtagggatttagtgctcattggtctctcttctccgttgtctatgttcttgccattgtcttctccagtcactcatgcagaagaagacgtgaaaatgagtggagaagaattgaaaatgggtacaatggtggatgatattaatgcttattcttatgcttacccattggattatccatctgagaagcttgtcttcaaatgggttgaatcaagaaagcctgaaagatactcttcagctgcaccactctctcctgatgcacgtttacggattgtttctgaacgagttgacctaactgacaacctcgtcatttctatttcgataggtcccccaaactcaagattaacatcaaaagaaaagaaaacatggtccgctaaagaagttgctgattctgttttgtctgataaatcagcattgcgtgtcacctcaagtcagcgtcttgaagagagttcggttcttgatgctcatgctagtgatattgatggggagccttactggtactacgagtaccttgtccgcaaatcaccaaccaaaattgctgaagcatcaaagctttacagacactatatttcttcaacagctgaacgtgatggatacttatacaccataaatgcttcaacccttggcaagcagtgggacaagatgggaccggtgttagaaagagcagtaggatcctttaggcttcttcctcctactgatagttatgttcctccatacaaggacccatggagggtttggggatgcttccatctgccccatgaaatttcttttttcgaaattgtcgttaattttgataggagaggaggttatgaaagttgtagggtgagaaatgagccaagcgaagtgatttttccaaatccgcatatcttgttccccatcagagggattgggattgagatataactagccttttttttttcgccccnnnnnnnnnnnnnnnnnnnnnnnnnnnnnnnnnnnnnnnnnnnnnnnnnnnnnnnnnnnnnnnnnnnnnnnnnnnnnnnnnnnnnnnnnnnnnnnnnnnnnnnnnnnnnnnnnnnnnnnnnnnnnnnnnnnn

SEQ ID NO: 124959 - DNA, 539 bp, Arabidopsis thaliana
ctcatccacaattttacgccaccgaacatttcgccaaaccacacattttgtctgctttctacttcgccagggaaagtggccagagctcatctacttcgcaagaactaagcaatctcttgtaagtcaaaaggcagcacaagcaatcatgttgccaaagttcgatccaacagaccaaaaagcttgtctgtctcttcttgaggatgtgactaccaacgtaaagcagattcaagattctgtcttggaagcaatactttcacgtaatgctcataccgagtatcttagtggtttcctcaacggtcaagctgataagaaaagcttcaagaagaatgtacccgttgtaacctacgaagatattaagccttatatcgatcgtatcgccaatggagagccgtctgatctcatctgtgatcgacccatcagtgtactcttgactagctcaggtacttcaggaggagttccgaagctgattcctttgacaacagaggatttggaacagaggattacgttttcttctctctatgcacctctactctacaagc

SEQ ID NO: 124960 - DNA, 391 bp, Arabidopsis thaliana
cctttatccaatctctcctccatagttctgaagcctcgagagagaggggccagaaggtcaccctgaacagaggttttgcagacaatagaaagcagtaagcaagcatgttaccaaagttcgatccaacaaaccaaaaagcttgtctgtctcgtcttgaggatttgaccaccaacgtaaagcagattcaagattccgtattggaagcaatactttcacgtaatgctcaaactgagtatcttagaggtttcctcaaaggccaagtcgttaagcatgacttgaacaaatacataccacaacgtgacctacgaagattttaagtcttatatcgaccgtatcgctaatggagagccgtctgatctcatctgtgatcgacccatcagtgtactcttga

SEQ ID NO: 124961 - DNA, 787 bp, Arabidopsis thaliana
ccgccccctttgatttgcactgtgccgtctgcagtaccggtctcgaattcccgggtcgacccacgcgtccgcaaaaacagagatgtgacctcttaccggttaaagatgatagcagttcaactatcaagtgaccatagcacaagtgtggaagaggaaatttggcggattagatctgaacatccggaagatgaccagtcgatacttaaagatagagtcaaaggccaactaaaagtcactcgagctttcggtgctggatttctcaaaaagccaaatttcaatgaagctttgcttgagatgttccaagtagagtacattggaacagacccgtacatcacatgcgaaccgtgtaccgtccatcacagactgacttcaagcgatcgtttcatggttttatcctcggatggattgtatgaatacttcagcaacgaagaggttgttgctcacgtgacttggttcatcgaaaacgttcctgaaggcgatcctgctcaatacctcattgcagagcttctctctcgtgctgccaccaagaacggaatggagtttcatgatctgttggatattcctcaaggagatagaaggaagtaccatgatgatgtctctgtcatggttgtgtcacttgaaggaaggatttggcgctcgtctggacaatattatccagagagaaaacaaaaattcaatagataaattaaccaaacacaaaaaaaaaaaaattaggttttggcttattgttttcaaacaatctttcaatttcccggaagttcaaaaaaagaagaaaataattctgttt

SEQ ID NO: 124962 - DNA, 436 bp, Arabidopsis thaliana
  unsure (1)..(436): unsure at all n locations
tgaacgttggggatagtcgggctatcttagcccaagaaaggctccatgatcgtcactctaatcctggctttgggaatgatgagggtatcgggcataagagtaggtctcgagaatcacttgtgctgtattgaactggatagaatatcagaggaattctccaatacacaatcaagcaactccaatcagtgtgtcaaacaaaaacagagatgtgacctcttaccggttaaagatgagagcagttcaactatcaagtgaccatagcacaagtgtggaagagggaatttggcggnttagatctgaacatccggaagntgnccagtcgggtacttaaaggtagggtcaaagggccacctaaaagtcanttcgggcttttgggtgcttgggtttntcaaaaaggcccattttnnatnnagnntttnttttngntnttcccngt

SEQ ID NO: 124963 - DNA, 1117 bp, Arabidopsis thaliana
tggccgtcgtctgccgtaccggtcctgaattcccgggtcgacccacgcgtccgagtcaagatatgacagaagagcaagcgcagagctcaaatcgtggtcccacatcaagagaagaagttttgtgcttcttgaacgagcttggttggcttttccagaagaatcagacctctgagcttcgggaacaatctgacttttcccttgcccgcttcaagtttttgctagtttgctcagttgaaagagattactgtgctctcatcagaacgctcctcgacatgttagtagagagaaatttggtgaatgatgagctgaacagagaagccctggatatgcttgctgagattcagttgttgaatcgtgctgttaagaggaaaagcacaaaaatggtcgaactactcattcattacctggttaaccccttgacactcagttcctccagaaagttcgttttcttacctaatataactggacctggcggtatcacacctttacatctagctgcatgtacatctggttcagatgatatgattgatctactcaccaatgatccacaagagattggattatcgagctggaacactcttcgcgatgcaaccgggcaaactccatacagctacgctgcaataaggaacaaccataactataactcattggtggctcgtaaacttgcagacaaaagaaacaagcaagtctcactaaacatcgagcacgaggtagttgaccaaaccggtctgagcaagagattaagtttagagatgaacaagtcatcatcatcttgtgcctcgtgtgcaacggtggctttgaagtatcaaaggagagtttcaggttcacaacgtttgttcccaactcctatcattcactcaatgcttgcggttgcaacggtctgcgtttgcgtctgcgttttcatgcatgctttcccaatcgtcagacaagggtctcacttcagttggggaggtttggattatggctcaatctagagaactatactatataaaagtattataatttattcttttggtttctcgaagacaaaaaaaaataagaaaaagaaaaaaagggcggccgctctagaggatccaagcttacgtacgcgtgcgtgcgacgtcataatcttctatag

SEQ ID NO: 124964 - DNA, 601 bp, Arabidopsis thaliana
atgacctccagctctatacgactcacattagggaaagctcgtacgcctgcaggtaccggtccggaattcccgggtcgacccacgcgtccgaaccggtctgagcaagagattaagtttagagaggaacgagtcatcatcatcttgtgcctcgtgtgcaacggtggctttgaagtatcaaaggagagtttcaggttcacaacgtttgttcccaactcctatcattcactcaatgcttgcggttgcaacggtctgcgtttgcgtctgcgttttcatgcatgctttcccaatcgtcagacaagggtctcacttcagttggggaggtttggattatggctcaatctagagaactatactatataaaagtattataatttattcttttggtttctcgaagacaaaaaaataagaaaaagagaagagactttggtacaaatagaaggaaaagctcagagacatgactgtgacacacgaccaatagtgactccagtattactcgaggaagtttcaccgtcgggatgttttttctttctttctttcaattatatatatattttggttttgctaatttgttctgtatttccttgtacgtttcctacttttt

SEQ ID NO: 124965 - DNA, 515 bp, Arabidopsis thaliana
  unsure (1)..(515): unsure at all n locations
nnnnnnnnnnnnnnnnnnnnnnnnnnnnnnnnnnnnnnnnnnnnnnnnnnnnnnnnnnnnnnnnnnnnnnnnnnnnnnnnnccacgcgtccgcatatgggtagctacatggcaatggaggtaaccagggcagtgtgtagacaaaccatatttgacgagttgaatgtaaatagtttcaaagtccaaaatgtacaccctggttttcttggacgctgtttcattgaggtggagaatggattcaggggtgacagttttccattgataattgccaatgcatccatctgcaaagagttgaatcgtctcggagaagagtttcaccccaaaagtcaagatatgacagaagagcaagcgcagagctcaaatcgtggtcccacatcaagagaagaagttttgtgcttcttgaacgagcttggttggcttttccagaagaatcagacctctgagcttcgggaacaatctgacttttcccttgcccgcttcaagtttttgctagtttgctcagttgaaagagattac

SEQ ID NO: 124966 - DNA, 725 bp, Arabidopsis thaliana
cccaggcgtccgggtgctgttaaattatttgattccaggtgttatgacaagggtccctttgacacatttctggtgggtggggatactgctgaggttaacgatataaaattcagcaacgatgggaaatccatgctcctaacgactacaaataacaatatctacgttcttgatgcatatcgtggagagaagaaatgtggttttagtttggagccttcacagggtacacccatagaggccaccttcacaccagatggcaagtatgttctgtcaggttcaggtgatggaaccttacatgcgtggaacatcgagaacccatctgaggtggcgaggtgggaggacaaccattaggagtagttgtcgtgtctggaaatgggcccccacgtagagccatggttcgttgctgcttctacggttctcacattctggatccccaaacgacggtgaatcaccagcccccgccgatcctcctaccgatcaacaacagtgacgacatatatgtttccattatgcacttgtgtatcgttttttaatgttgacaattagaaaaatttggaagcagtagtatgttaatccaatttagagtttatgaatttgagtctagatggttaccatatgttttttttaaaaaaaaaaaaaaaaaaaagggcggccgctctagaggatccaagcttacgtacgcgtgcatgcgacgtcaggctgttctataaggaacgaataacaaccgg

SEQ ID NO: 124967 - DNA, 555 bp, Arabidopsis thaliana
  unsure (1)..(555): unsure at all n locations
nnnnnnnnnnnnnnnnnnnnnnnnnnnnnnnnnnnnnnnnnnnnnnnnnnnnnnnnnnnnnnnnnnnnnnnnnnnnnnnnnnccacgcgtccgctctttccttttctcacgccgagatttctgcgactgctctaatcttacgaccttataagaaacgacgcttattttcactctgcttgagctcttcatcgtgtcacacagcacgatcttggacgtcgttttaagcgcaaaacaaaggaaaaagactgacgtttatacatactaaatactggtttggagttttgccttttggactcagaaaactcaaaagagagagagagacatttctgtatcttatcgggttttgtgttgtcagaaagaagctcaaggacaaaaaaaaaagcaattatttttagggttcaaacgaagcaaaatttggaactttcagaagttgtgggtggtggcttcttgaacaataaagctttttcttagactcttcttccaatttgtgactctacctatctctctctccgtatggaattctctagagacgctggaatgatgatggagaataag

SEQ ID NO: 124968 - DNA, 427 bp, Arabidopsis thaliana
cttcaacaacatttgggggtttcatttcaatcgcatttctagggtttctttctctacgattcaatagattcggacgaattgggggattctgaccagagagaagctatggaggaaaacgaagaggaagaagaattgcggccaacggcgctatacacggtcggtggttcagacgaatttacctttgtttctcccgatgggctctccggtcaatacacgggccctgatcacgacggcgtagttcttcagactgaaaatccggcgccgactaactgtcttgcttactacttcgaggttcatatcatgaatgctggtgaaaaaggagagatcgcgattggtttctccaaggaacacatctatagcgaaggatatactgtcagaagctgtgcctacattggtaacagtggactcatatgctctcaaaatggag

SEQ ID NO: 124969 - DNA, 435 bp, Arabidopsis thaliana
attgaaaacacgagcttcctaaaccctagcagcagagtcttccgtaaacccagctctcttagctctcacgcctcgtcaattgttgacctgtaggatagatatgggcaacgagagcaaaacctcggctttggaatcggagcagaaggctcttcttctccgttcggtagctcaatacttggaacgatgtggtttttccaaatgcttcaagaaattgctctccgaagctgaaatcgagaagaaggaattgaacactagtttacctgatttagaggaaattttcagcgagtttttgaacaagagagatcatgaagctgcagctaatggaaataccgaggcgaatgtagtggaagctgtagagaatgtaaagaaggataagaggaggaagaaggaccaggaaacaaaggtgggaggttactgagggagggagggtcaaag

SEQ ID NO: 124970 - DNA, 773 bp, Arabidopsis thaliana
  unsure (1)..(773): unsure at all n locations
cttgccatgttcgccagctttatccgctcccttaggaaagttgtacgcctcaggtacggtcgaatttcccgggtgaccccacgcgtccgcttctccggaagcttttgttcaatcttctggctgaagaaacgaggactcatgcctggattaacattctcaaacgaattgatctcacgtgacgaaggtttacactgtgatttcgcttgtctactctacacgctactcaaaacaaagcttagcgaagaacgcgtgaaatcaatcgtctgcgacgcggtcgaaatcgagagagagtttgtgtgcgacgcgcttccgtgcgcgttggttgggatgaaccgtgatttgatgagtcagtatattgagtttgttgcggataggcttttgggtgcgcttgggtacgggaaggtgtacggtgttactaatccgttcgattggatggaacttatttcacttcaagggaaaacgaatttcttcgagaaacgtgttggtgattaccaaaaggcttccgttatgtctagcgttaatggtaacggcgcgtttgataaccatgtcttctctctcgacgaagatttttaaagagcgtttgttttgatgctataattacgattctactcttgtattattaccgtgtattatccttggtttttgaattaatgaataattagttgcttttaaaaaaaaaaaaaaaaaaaaaaaagggcggccgctctagaggatccaagcttacgtacgcgtgcatgcgacgtcatagtcttcntataagtcacctaattaat

SEQ ID NO: 124971 - DNA, 820 bp, Arabidopsis thaliana
  unsure (1)..(820): unsure at all n locations
aggtttnattccaaaaaaaaccnttaaaaanncccttaaaaaaccttaaaccccttcaaagatgccttcaatgccagaagagccgctcctaacaccaaccccagacagattctgtatgttcccaattcactacccacagatctgggaaatgtacaaaaaagccgaagcatcattctggaccgccgaagaagtagatctatcacaagacaaccgcgactgggaaaacagtctcaacgacggtgaacgtcacttcatcaaacacgtcctcgctttcttcgctgcatctgacggaatcgtactagagaatctcgcttctcgcttcatgtccgatgttcaagtctctgaggcgcgtgctttctacggtttccagatcgcgattgaaaacatccactcggagatgtatagtctccttctcgatacttatatcaaagataacaaagagagagatcatctctttcgtgccattgaaacaatcccttgcgtcgccaagaaagctcaatgggctgtgaaatggatcggcggggctcagactttcgccgaacgaatcatccctttcgcttgcgtcgaaggtaccttcttctccggaagcttttgttcaatcttctggctgaagaaacgaggactcatgcctggattaacattctcaaacgaattgatctcacgtgacgaaggtttacactgtgatttcgcttgtctactctacacgctactcaaaacaaagcttagcgaagaacgcgtgaaatcaatcgtctgcgacgcggtccaaatctagagagagtttgtgtgcgacgccctttcctgcgcgttgtttgggattaac

SEQ ID NO: 124972 - DNA, 662 bp, Arabidopsis thaliana
  unsure (1)..(662): unsure at all n locations
ggcgcacgcgtcacgcttcacagaccagtgtcttctgtagagcaaagtnttcataatcccttcaaagatgcgcttcaatggccagagagagccgctcctaacaccaacctccagacagattcntgtnnatgttcccaattcacttacccacaccgatctgtggaaatgtacacaaaaaggccgaagcatcacttctgggaccgccgaagaagtaggatctatcacaagacaaccgcgactgggaaaacagtctcaacgacggtgaacgtcacttcatcaaacacgtcctcgctttcttcgctgcatctgacggaatcgtactagagaatctcgcttctcgcttcatgtccgatgttcaagtctcggaggcgcgtgctttctacggtttccagatcgcgattgaaaacatccactcggagatgtatagtctccttctcgatacttatatcaaagataacaaagagagagatcatctctttcgtgccattgaaacaatcccttgcgtcgccaagaaagctcaatgggctatgaaatggatcgacggttctcagactttcgccgaacgaatcatcgctttcgcttgcgtcgaaggtaccttatatttactattcggacgcgtgggtcgacccgggaattccggaccggtacctgcaggcgtacca

SEQ ID NO: 124973 - DNA, 670 bp, Arabidopsis thaliana
ttggcggcggctgcgcccctgccgtaggctgggttcctttgaagcggccgcccttttttttttttttttttaaacaggctttttttttgggataaaaatccccgaacaggcttctcgaacccaaacaaattccaaacatttttaatattcccctcctctattttccctcttcacgtcaaaaattcaaaaaccccaaaaccctataatctcctatataaatatccagccctagatcttataattcatcaatcacacaatctcttcaatcaaatctcttcttcaatcaaatcttcaaatcccttcaaagatgccttcaatgccagaagagccgctcctaacaccaaccccagacagattctgtatgttcccaattcactacccacagatctgggaaatgtacaaaaaagccgaagcatcattctggaccgccgaagaagtagatctatcacaagacaaccgcgactgggaaaacagtctcaacgacggtgaacgtcacttcatcaaacacgtcctcgctttcttcgctgcatctgacggaatcgtactagagaatctcgcttctcgcttcatgtccgatgttcaagtctctgaagcgcgtgctttctacggtttccagatcgcgattgaaaacatccactcggagatgtatagtctccttttcgatacttat

SEQ ID NO: 124974 - DNA, 545 bp, Arabidopsis thaliana
  unsure (1)..(545): unsure at all n locations
gcttgtggacctaaatcaaaaggaatgactcctcttcaccttgctgccaaaggaggtcacatcgaagttatggacttgcttcttgaacgtggagccaacatggaagctagaacctctggtgcttgtggctggactcctctccatgctgcagctaaagaacggaaaagagaagctgtcaagtttcttgtggggaacggtgctttcttacctgatgatataaccgacagtaggttcaacccgccggttcagtactgtcacggcttggaatgggcttatgaagagaggaagaaactcagtgaagatacttctttatcttgtggagacacttcttgcagttctgcgaattgattcttgtcttttgttatctttcttgcaatggctcataagtcgaagagacacaaaaccaaaggtttgtaatcatgttgtattgaaatatgaaatgatacatttatcaaaaacaaaaaaaaaaaaaaagnnnnnnnnnnnnnnnnnnnnnnnnnnnnnnnnnnnnnnnnnnnnnnnnnnnnnnnnnnnnnnnnnnnnnn

SEQ ID NO: 124975 - DNA, 532 bp, Arabidopsis thaliana
  unsure (1)..(532): unsure at all n locations
catttttcgtttcttcacattcacaaaacatctctctctttcttctcccattcactcactatcttgctcctagaaaaagatggcgagaatgagtttgatgatcatgatgattatggttgctgtgaccatgattaacattgctaagagtgatcccattgcaccatgttacttcatatttggtgactctttggttgataatggcaacaataatcagcttcagtcattagctagagctaattactttccttacggtattgactttgctgccggtccaaccggtcggtttagcaacggcttaaccactgtcgatgttatcgctcagcttttgggtttcgaggactacattacaccttacgcttctgcaagaggacaagacattctccgaggagttaactatgcttccgctgctgccggaatccgagacgaaaccggcagacaattgggaggtcgaatagcatttgcagggcaagtagcaaatcacgtgaacactgtntcacaagtagngaacatacttgggtatcaaaacgaagcc

SEQ ID NO: 124976 - DNA, 1215 bp, Arabidopsis thaliana
  unsure (1)..(1215): unsure at all n locations
cccacgcgtccgaaatcttacatttccaccaatccttcacttcctttcacgatccaaaacaaaacacaagaaaatgcaacaaaatcttctccatctctgaactcaaaaactcattcactgagaaaaatggagacccttctctcccctcgtgcgctctctcctcctctcaatcccaaacctttgtcccttcaccagaccaaacccacttcacattcattgtctctctcaaaacccaccaccttctccggtcctaaacacctctccacccggttcactaaaccggaatcaagaaactggttaatagatgcaaagcaaggactagctgctttagctttatctctaactctcactttctcacctgttggcactgctttagcctctgagttcaatatcctcaacgatggtccacctaaagaaacttacgtagtcgatgacgctggtgttcttagtcgagtgacgaagtcagatcttaagaagcttttgtctgatcttgaatacagaaagaaactgagactcaatttcatcactgtccgaaagctcaccagtaaagcagatgcgtttgagtatgcagaccaggttttggaaaaatgggatccttctattgaagaagggaacaataaggggattgttgttttgataacaagtcagaaggaaggagctattactggtggtcctgcttttattgaagctgttggtgaaaacattcttgatgctaccgtctccgaaaatcttcccgtactagcaacggacgaaaaatacaacgaggcggtatatagcagtgcgaaaaggttggttgcagctatagacggtcaaccagatcccgggggtccaaccgtaaaggatagcaagagagaatcaaatttcaagacgaaagaagaaaccgatgagaagcgaggacagttcagtcttgtcgttggaggattacttgtaattgcctttgtagttcccatggcacaatactttgcttatgtctccaggaagtaagtaagtaaactcggttcactctcgtaaaccaaaccgatcaggtcagaactttgatttacctcggttatttggttatggtttcttggtaaattggtttatttgaccggtataagtaaataataacagaaacctnnnnnnnnnnnnnnnnnnnnnnnnnnnnnnnnnnnnnnnnnnnnnnnnnnnnnnnnnnnnnnnnnnnnnnnnnnnnnnnnnnnnnnnnnnnnnnnnnnn

SEQ ID NO: 124977 - DNA, 680 bp, Arabidopsis thaliana
  unsure (1)..(680): unsure at all n locations
gcgacgtattactggaaaaatgtaaccctcttttttcggcgcttctcccctctcagccggacctttgcccttgcgggaccaaacccacttacattcattgtctctctcaaaacccaccaccttctccggtcctaaacacctctccacccggttcactaaaccggaatcaagaaactggttaatagatgcaaagcaaggactagctgctttagctttatctctaactctcactttctcacctgttggcactgctttagcctctgagttcaatatcctcaacgatggtccacctaaagaaacttacgtagtcgatgacgctggtgttcttagtcgagtgacgaagtcagaatcttaagaagcttttgtctgatcttgaatacagaaagaaactgagactcaatttcatcactgtccgaaagctcaccagtaaagcagatgcgtttgagtatgcaagaccagggttttggaaaaatggnatccttctatttgaggagggnaccaatangggggattgttgttttntaccaggcaggaggangggctttactggtggncctcttttattaagcttttggngaacaatttttntggnnccnctncgaaaatttcccgtccttgaacggcggaanncaacggggggttttnagtgaaagttgtccctnggggacnnnccggcncna

SEQ ID NO: 124978 - DNA, 356 bp, Arabidopsis thaliana
ctctctcgttcccttgcccctctccctctctcgtcctcggatttttctcgtgcttcactgataatccagcttgacgatgtcgttgacggagctagacgacgggctggttcgcaagatggccatgggcgcactcttctcggattttggagggaagatacattcggtgggtttccataggactgatgatctattggtcacatccagcgaagatgattcacttcgcctcttcgatatcgccaacgctaaacagccgaagattacataccataagaaacatggcaccgatcgtgtatgctttacccatcatcctagctctctaatttgctcttctcgatacaatttggagtccactggtg

SEQ ID NO: 124979 - DNA, 585 bp, Arabidopsis thaliana
  unsure (1)..(585): unsure at all n locations
tgatgaatcaacaggcattgttgactacgatatgctcgagaaaactgctacacttttcagaccaaagcttattatcgcaggagctagtgcatacagccgagattttgactatcctcgcatgaggaagatcgcagactcagttggtgcttttctgatgatggatatggctcatatcagtgggcttgtggctgcttctgtggtagctgacccttttgagtattgtgatattgttacaacaacaactcacaagtctttgagaggtccgagaggtggcatgatcttcttcaggaaggatccaattaatggggttgatcttgaatctgccgtgaacaatgctgtcttccctggtttgcagggggggccctcataaccacacaattggaggattagcagtctgcttgaaacacgcacgatcaccggaattcaaggcgtaccagaaaagagttgtgtctaactgtagagctctagctaaccggttggttgaactcggggttaagctaggtttctggtggcagcgntaaccactttggttntcgtcgntcttngacccatgggnatggattgtccncgggttttgaaaatntt

SEQ ID NO: 124980 - DNA, 1142 bp, Arabidopsis thaliana
  unsure (1)..(1142): unsure at all n locations
caatcactggcctcattgctcactttgtgtagtgcttacaagaaggaacttgactatactgtgctgtcaaatcttattgctataagctacaaagttgtgaagattggagcagatgcaaatcaagaactgatgtctgggattaaacatttcttcattggcgttttccagtttgctgctgggaaacttggttgggatcctaagcaaggcgagagccatctagatgctatgctgagaggggaagtcttaactgcacttgctgtgtttgggcatgatgagacactaaaggaagcagttcgaagatttgatgcatttttggctgataggaacactccgcttctgcctcctgacattagaagggctgcttatgttgctgtaatgcagagagctaacaaatcagacaaatctggttatgagtctcttctgagagtttatagggaaaccgacctgagccaagagaaaacacgaatcttaggttctttagcatcttgcccagacccccactatagttcaagatgttcttaacttcgtaaggtctaataaggtccgtaatcaagatgcactttatggacttttccggtgtaagttgggaagcacgtaaaagtagcttgtaaatggctacagaaaaagtgggagtatataggaaacacatggggctccggatttctcataacacgcttacataagtgcagttgtatcgccgtttgcgtcgtttgagaaagccaaagaagtggaggagttttttgcaacaagatcaaagccttcgatggcaagaaccttgaagcagagcattgaaagggtacatatcaatgccaattgggtggagagtatcaagaaggaagataatctcccgcagctcgttgctcagctctcttcaaactaaaagaactccgctactcgagaattaactaatcatctgtgactcgtgatgctcatgttttctataagccaaaaacatctgttgtttcttcttctcaacaccgaattttaaaagcacttttcgaacttttggatttgccatcaataaagtttgcctttcgaggtccgttccgaaaaaaaaatgagaaactaagggcggccgctctagaggatccgagcttacggacgcgtgcatgcgaaatcaagcnnnnnnnnnnnnnnnntaa

SEQ ID NO: 124981 - DNA, 510 bp, Arabidopsis thaliana
  unsure (1)..(510): unsure at all n locations
cccacgcgtccgcccacgcgtccggtctgagctgattgcgtgttctcttaaaactccagttcaccgacgaacaacgaagtatcgtggaatccatttcatgggccgaagatttctcacttctcttcagtgaatctgggaaagtaatcgtttttggcttaattctgatttgggttcttacttatatagtcaacatgcttctggtttctcctgcttgtagaggtgtttatcttcagaccatagatccaaagccaattgatttctcagctagagcctcttatgcactttgctttcagattcctacttcaatccctaaaagagagtgtttgatgaggttaggaacggtcttttgttttaatcagaagcatagagagcagacaagttttaagaaacggtatgtatctacgcagaatgtggatcttcctcctattttaccaaagaacaggaggaaaccttatcctattcttttaagaaatccaagnagnggttggaaggtaggaanttntcagatgt

SEQ ID NO: 124982 - DNA, 492 bp, Arabidopsis thaliana
aggcggttttggaagcttctctctccattttctccttctcttcttcttcttcctcttcaaaaccttatctcttttctaaacgctcttcttccttaaaacttactgcccttagtcttcgaattcccagcaatctctctcccgtcttctctctacgttccggcagcgataactcacggcggctcgtctccgtactctgttccgtcgcggagaaagaaacatcggcggatgaagaaacgtcgcaggaggagaagactgaagaaacccagaattcaaatctgaaaaggaagctttttgtattcaatcttccttggtctatgagtgtaaatgacatttccgagctctttggacaatgtgggactgtgaacaatgtcgagattataaggcaaaaagatggaaagaaccgaggatttgcttttgtaactatggcttctggagaagaagctcaagcagctattgataagttcgatacttttcaagtgtcaggggggatca

SEQ ID NO: 124983 - DNA, 631 bp, Arabidopsis thaliana
cgaatctctctctctctcttcaacccctcttctcaatctagggttagggtttcgattctgctagaggttttttttctcccaacttatacttctaagccctctcgtcataagccttgttgactcttcttcttaatttgaagaacttcgtaggctaagcatgtcgtgattatcccaaatttctggtgtttattcaaactccattgttacaaagattttctttgataagttaaagcaatgtatacctccgaggcagcccctgattttgttgttgaccagggcatgtattaccccgttgatgccagttatggctattactgtacaggttatgagtcacccggtgattgggagaaccatcagatgttttttggtgtagatggttcagaagtccaatacacaggtgggcagaatgaaaattctccctatatatgctatacacctagttatggatatgcacagtctccttataatccattcaatccttacatacctggcgcttcaattggcgttgattctgcttttgttgctcctcaacaattttactctattcctccttaccagagtgttgcaacgtcgcctacttttgttccatatgcaattcaacctgagattgtctcgaatagctctacaaact

SEQ ID NO: 124984 - DNA, 357 bp, Arabidopsis thaliana
agcaaagatgcaggtggtgacaacaatttaattggtcaatttggtgtagggttctattcagcatttttggttgcagatcgggtaattgtgtcaaccaagagccctaagtctgataaacaatatgtatgggaaggagaagcacattcaagcagttttaccattcacgaagatactgacccacaatctctcattcctagaggaactcgtattactttgcatcttaagcaagaagccacaaactttgcagatcctgagcggattcagaagctcgtgaaaaactattcccagtttgtttctttccctatttacacttggcaagaaaaaggatacacaaaagaggttgaggttgaagatgat

SEQ ID NO: 124985 - DNA, 653 bp, Arabidopsis thaliana
  unsure (1)..(653): unsure at all n locations
taatacgactcacttagggaaagccggtacgcctgcaggtaccggtccggaattcccggtgtcgacccacgcgtccgcaaccactagctctttgctctaccaagaggagtttgataagatgaaagcaaaggcccccgagaacttcagggtggattacgcgataagcagagaacaaccgaccgataaaggagagaaaatgtatatccagactcggatggcgcaatacgcagctgagttatgggagttgttgaagaaagacaacacttttgtttacatgtgtggactcaagggaatggagaaaggaattgatgacattatggtctcattggctgcaaatgacggtattgactggtttgattacaagaagcagttgaagaaggcagagcaatggaacgttgaagtctactgatcaaaaagcctttgacatttctgtagcaaagtatagctgaacaaaactgtaattttcgcttctgaatttctgtattttgaagataagttttttagatatgttatactaaaaaaagagttctttaatcattatcatttacttcttcccaaaaaaaaaaaaaaaaagnnnnnnnnnnnnnnnnnnnnnnnnnnnnnnnnnnnnnnnnnnnnnnnnnnnnnnnnnnnnnnnnnnnnnnnnnnnnnnn

SEQ ID NO: 124986 - DNA, 1128 bp, Arabidopsis thaliana
  unsure (1)..(1128): unsure at all n locations
nnnnnnnnnnnnnnnnnnnnnnnnnnnnnnnnnnnnnnnnnnnnnngtcaaataacgataaccacccccgcgtccaacgagatactctcttcttaaaacctcatccacccaaacacaaatgtcttgtaatccttctcttatctttctccttgtgattcctttttatattcctctgatattttctctcagtttgatctcatttgctctgcaatggcgactaccatgaatgctgctgtttctctcacatcttcaaactcttcttcttttcccgctacaagttgtgccattgctcctgaaaggatcaggtttactaagggtgctttttactacaaaagcaacaatgtagtgacaggtaaaagagtgttttccataaaagcacaaatcacaacagaaacagatactcctactcctgcaaagaaagtagagaaagtgtcaaagaagaacgaggaaggtgtgattgttaacaggtacagaccaaaagagccttacactggaaaatgccttctcaacaccaaaatcacagctgatgatgctcctggagagacctggcacatggttttcagccatcaaggagaaatcccgtacagagaaggacaatctgttggtgtgattgcagatggaattgacaagaatggaaagcctcacaaggtcagactttactccattgcaagcagcgctcttggagatctcggcaattctgaaaccgtttctttgtgtgttaaaagacttgtttatactaatgaccaaggagagactgttaaaggagtttgctcaaatttcttgtgtgatttggcacccggaagtgatgttaagctgactggtcctgtacgcaaagaaatgcttatgccaaaggatccaaacgccaccgttattatgcttgccacagggacaggaattgctcctttcaggtctttcttatggaagatgttctttgagaaacatgatgactacaagttcaatggcttagcttggttgttcttgggtgtaccaaccactagctctttgctctaccaagaggagtttgataagatgaaagcaaagggcccccgagcaacttcaagggtgggtttacgcggttnagnangnggaccangcggancgnttaaagggggggaaantttntttncc

SEQ ID NO: 124987 - DNA, 414 bp, Arabidopsis thaliana
gcgtccggatgaaagagcgtgtcaagtttcttcacatgttattgcttaccattgaagatatcaacggttaccctcttgttcttgggggtagcgtcaacaagaacatggttccggttcttgattatctcgggaaactaggcgtcaggaaatcgactttcactgagtttcttagaagatacccgcaggttcttcactctagcgttgttatagatcttgcaccggtggttaagtatcttcaaggactggatattaaacccagtgatgtacctcgggtgcttgtgaggtatccagaagttttggggtttaagctggaagggactatgagcacatcagtcgcttatttggttggtataggtgtagctaggagggagattgggggtattttaacacggtaccctgagattttgggaatgc

SEQ ID NO: 124988 - DNA, 763 bp, Arabidopsis thaliana
  unsure (1)..(763): unsure at all n locations
gccttccgaacatttgaagcgtttaagattccatcntatgaagagcaactctctagatgggaatgacctgaggatgatcttatatggtggcctatcgtgggaataaaggacccatgtcgcccagtggtaaaaattcaagtttacctggtgaaccagcctgaatcaagggtcggatggtgaccggtgagaacattcagactgccaaagcaattgcactggagtgtggtatattagcttcagactcagatgctagtgagcctaatctgattgaaggaaaagtatttcgatcctattcagaagaagaaagagataggatttgtgaagagatatctgtaatgggtagatcatcacccaatgacaaacttcttcttgtgcaatcgctgaagaggaggggacacgtcgtggctgtgactggtgatggaaccaatgatgctcctgcactgcacgaggcagatataggtctcgcaatgggtatccaaggcaccgaagttgcaaaggaaaagtcagacatcattatcttggatgacaactttgaatccgttgtgaaggttgtccgttggggtcgatctgtgtatgcgaatattcaaaagttcatccagtttcagctcacggttaatgtcgcagctcttgtcatcaatgtggtggctgccatatccgcgggtgaagttcctctaacttgcagtacagctccttttgggtcaatcttataattgggtactctttggggctcttgctttnccactgggcnccaaccgntnaattt

SEQ ID NO: 124989 - DNA, 445 bp, Arabidopsis thaliana
  unsure (1)..(445): unsure at all n locations
ctngaanttcgctacgtcgatcttcttccggaaaatggatgggagatcgatcttgatgctgtcgaggctcttgcagacgaaaacacggttgctttggttgttataaaccctggtaatccttgcgggaatgtctatagctaccagcatttgatgaagattgcggaatcggcgaaaaaactagggtttcttgtgattgctgatgaggtttacggtcatcttgcttttggtagcaaaccgtttgtgccaatgggtgtgtttggatctattgttcctgtgcttactcttggctctttatcaaagagatggatagttccaggttggcgactcgggtggtttgtcaccactgatccttctggttcctttaaaggaccctaagatcattgagaggtttaagaaatactttgatattcttggtggaccagctacatttattcaggctgcagtt

SEQ ID NO: 124990 - DNA, 375 bp, Arabidopsis thaliana
gaactcttgttgcttccctctcttcatctttgcattcgttatctttctccggtgtttaagtcccattgaagctgccacgtgtcatcctgatgacgaggcgggtcttttagcttttaaatcgggtataactcaagatcctacgggtattctcagctcttggaagaaaggtactgactgctgttcatggaagggtgtcggttgtctcaccaaccgcgtcaccggactcactatcaacggacaatctgatgttactggaagctttctttctggcactatctcgccgtcattggccaaactccaacaccttgttggtatttacttcaccaatcttcgaaacatcactggttcttttcctcaattccttttccaattacc

SEQ ID NO: 124991 - DNA, 737 bp, Arabidopsis thaliana
  unsure (1)..(737): unsure at all n locations
aattcccgggntcgagcccaacgcccgtccgggcaagaaagcttccaaattggcananntgagaagaaagtctctgtatgtaatnncgactanttcatcntnnccaaaatgggagagagtnnactaacantnnatcgcggacgctgnnngaacggctttaaatacnnncctcgagaaacccnnaaggtnnatggacccagccanngaaannggcagccnnngcatcaaccagcaannnaataatnngcaacttgngnnattcaagggtggcnnagcaatanntgggttctcaatggtnngtaaacgatgcagttattcggnnggccggacagtttcaaattatggacaaccttacanagttctcgggtgggatggtcagcccgtccttcagtcttccggttttacaccgcctctgctttacactgctacccaaacggcttatatgacttcaccagctcatgtctataacatgcagtctcctgctgtttattctcctcagtatggttatggaccatacaccaacatgatccctcagtttatgcctggatacccttcccatggttctgttcctgttgttgtcagtccagatttcattcctcagttatctgggccaagtgcaggaagtgtggtccatggaggtgaaatgcagtatgcggagaagctctatgttccaccaggacaaccttcttttccagattctatgtatatgcagtactgtcaacagtcatttgggcaga

SEQ ID NO: 124992 - DNA, 589 bp, Arabidopsis thaliana
cccacgcgtccgtggaaatggttctatgctggttactggtgttggagtcaacactgaatggggattgctgatggccagtatttctgaagacaaccgcgcggccgctcccttgcaggtgcgcttaaatggggtagctacttttattggttcaattggcttagcggtggctgctgctgtgctagtgattcttctgactcgatatttcactggtcacactaaagacaataatggaggtcctcaattcgttaaaggcaagacaaaagtcggtcatgttattgatgatgtggtcaaagtccttaccgtagcggttacaattgtcgtagtggcagtgcctgagggtcttcctttggctgttactttaacccttgcctattcaatgaggaaaatgatggcagataaggctttggtgcggaggctatctgcttgcgagacaatgggctctgccaccactatttgcagcgataaaactggaacactaactctgaatcagatgactgtggttgagtcttatgctgggggcaagaaaacagatactgaacaattgccagcaactatcacttcgctagtagttgaaggaatatctcaaaac

SEQ ID NO: 124993 - DNA, 323 bp, Arabidopsis thaliana
acaacactgagagagacttttcttttaaattccttcaatttttttttgttgttgtaaagaataataatttattcgattgaatttgtttattcgtgtctttgtttttactcaatcccctgtttccggttctgttcgattcttctctgtctctgttttgtttttcgtcattttgcctaaagccacatgcaacagtgattaactgaatttttattatccatatccattttgattcgccggaaagtttattcttttccggcgacaaatgcgaaagattccgaaaacccattttaaccaaatcaattctatgacgatgtctatattca

SEQ ID NO: 124994 - DNA, 1000 bp, Arabidopsis thaliana
  unsure (1)..(1000): unsure at all n locations
atacgactcactttagggaaagctcgtacgcctgcaggtaccggtccggaattccctgggtcgacccacgcgtccgcagcgttgaaacagaaaccgatctcgtcgctgattctcttttcttcggatccttctagataatggctcgatctttctctcgttcactttctctatccaaaggccgtttcgccgccgcgtcatcctctctcctcccttcgtcgcaccttgtttcattccgatctcaatcttccgatcgtcggggagatctgtacgagattgatacctccgcggcttctcaatcgccgtcggatcctttaatacagaagctagaagacgccgttcaccggatttttgtgcgccgagctcagcctgattggctcccttttgttcctggtgcgtcttattgggtccctcctcctggatctggatctcagtctcatggaatcgctcagctcgttgtgaaactcgcgaatccgttaacacacgaagaatctttatctaccaattcttctcatggatggccttcctccgattatttccttaaaggtgttcaacctcaattgatgggggccaagcccgggacaacttcaaattccgagtctcactctgaggacgaggaagtgtaaaaatgacactgcttgtttgggctcttcaggatctcttgtcaagaccaagagctgccgaattcggacaaccaagagcaagtgaaaagacgtgaaatagaacgaccatatttctatacctgataccaaaatgtggaatatcgaataagactagtgttgtaggcttgtgtagcatgtcccgctgtttctcttttaaacagttgttgtatatgtatatctctgtttccttgctctttcacttatttaacaaagagttcatgttaatgaaattggaaatgaggtactcttagataaaaaaaaaaaaaaaaaaagnnnnnnnnnnnnnnnnnnnnnnnnnnnnnnnnnnnnnnnnnnnnnnnnnnnnnnnnnnnnnnnnnnnn

SEQ ID NO: 124995 - DNA, 1195 bp, Arabidopsis thaliana
  unsure (1)..(1195): unsure at all n locations
ccnnnnnnnnnnnnnnnnnnnnnnnnnnnnnnnnnnnnnnnnnnnnnnnnnnnnnnnnnnnnnnnnnnnnnnccacgcgtccgcggacgcgtgggcggacgcgtgggttttgcacaacttcaattttgtccctcaagattctccttattacaaaacgtccccttttcccacatcatccttcttcaacgttcgctttcccatcaagaacaaccaaatctcttgtaacaaagcaaagaatttgagaatggatccgtctaagggaatccaagaacagaggattgtgattccaaacagacacaacgagaagctggttggtctgcttcatgaaactggttctacagacatcgtagtcttgtgccatggctttcgatcaaacaagagtaaccaaataatgaataatgtggctgctgctatacagaaagaagggatcagcgcttttcgttttgatttctccgggaatggagagagtgaaggcagtttctattatggtaactataaccatgaagctgatgatttacattctgttgtccaatacttctctaacaagaaccgtgtggttcctataatcctcggtcacagtaagggaggtgatgttgtcctcctctacgcctccaagtatcatgatgtccgcaatgtaatcaatctctcgggacgttatgatcttaaaaagggtataagagagcgtcttggagaagattttttggaaagaattaagcaacaaggattcatcgatgttggagatggaaaatcggggtatcgtgttactgagaagagcttaatggacaggttaagcactgatattcatgaagcttgcctcaagattgacaaagagtgcagggtcttgacggttcatggatcggaggacgaggtaatacctgtggaagatgcgaaggagtttgcgaagatcataccaaaccacaagctggagattgtggaaggagctaatcatggttatactgagcaccaaagtcaattagtttcaacagttatggagttcataaagacagtcattgtgaagaacaactagaattgagttacgtttgccttttaaatcatgaaagtttgtaattcatttttaagctacgaaaaactgagaaaatccaaaaaaaaaaaaaaaaaagggcggccgctctagaggatccaagcttacgtacgcgtgcaggcgacgtcataagctcttctatagttgttccta

SEQ ID NO: 124996 - DNA, 421 bp, Arabidopsis thaliana
agaaaaacgcgtctccgagaggaaaatttagagaaaagcttctcgcgatcgcatcgggctcgtagatcgatctcctcctccatccaatcttccgttttcgtattcaccgtccggtaagaccttccggtacttgtgaatcggagaagaggaaggagaaaaattatcgcgttcctggaaattgaatttctagggtttcgtttttttctgaattattctgattctgatttcgtcaagggtgtttttcttaattggttgattgatcgtctttctagttcaattgttggaaagtaattgaacatctattgaaatctgcttctcgtgatttgattctgggtttcgttgattggtttttttcgaggggtttgtttgttttatccttttttatttctataagatcaatttctcattgagaagaatacga

SEQ ID NO: 124997 - DNA, 618 bp, Arabidopsis thaliana
gcaaaactgaatctggaattgtcgtcgggatgggttctaagtccgttgttgacatgatcgaagctgccgcgcgggcagatttttctggtttacacgtgaatgggcacatgaatgggttggcaccaggtgcacttaacgaaaccacgtctgcatcagaagatatccacaggcagccttttgtaataggtgttgctggaggcgcagcatcgggaaagactactgtttgtgatatgataatccagcaactgcacgatcagcgtgttgcacttattaacctggactcgttctatcataatctgactgaagaagaacttgctagagttcatgaatacaactttgatcatccagacgcatttgacacagagcatttattgtcttgtatggagaaattgaggcaagggcaagctgtagatattccaaaatatgattttaaaacttacaggagcagtgttttcagaagggtaaatcctacagatgtaataattcttgaagggatacttttgttccatgatccacgcgtccgaaagttgatgaacatgaagatttttgtttgcacagatgctgacgttcgtttggcaagaaggataaaaagagatactgtcgagaatggtagagata

SEQ ID NO: 124998 - DNA, 618 bp, Arabidopsis thaliana
gccgccccccgggtggactgtatcgataagctagatatcgaccttgctgccaatggacgcgtaccaaccaccacctcaatacctgagaccgccgtctggaccaccgcctccgacggatccttaccaccaatactatcagcatcaggcgagaccaccggtgcctcctcctacgcagcccggtggtcctcctgcatggtactccaaccaatttcatcaccctcactctccatcgccaccgcctccacctccgccgcagtgggggccaccttcaccgcattatcctcaaggccaaccttactcttctcccgcttatcctccttaccagccgccattcaacgccggcgctaacggtaacagtcagttttcctcctccatctaccgggtgcgccgattcctctcgccatattcctcaggctaactgaggaatggcgccatccaagttgggtgtatcaacagcaacagtggcacacccctgagactaagtatcatacatcccaagactgtgctgtgaaagcccaaataatggggccgtgccaacaaggatcagctgtcacagcaggtcgcaccctaaccgaacctgagggggccaaattcttaccagccagccaggcttcccta

SEQ ID NO: 124999 - DNA, 386 bp, Arabidopsis thaliana
ctctgtgtttctattattcacatgaaacaatggaaccacatgaccaaactcacggcggcgacggaggagaaggagagaactgttcagtttccggattcgattcagctgaaaaagtcatcatccgatgggacgcgacggcgtcagaagaagcaagagagaagatgatattcaacgatccacaagaagttaacctttacctcaacgccgtcgatgaaatccagaaatatgtatcttccggcggagagattgagaatcgagctaattcagctatccagatagctatggctcgtcttgaagacgagttcaggaatattctcgtttctcatagttctccgatcaactctgattcgttaatgctgtcttcttcatcttcttctcaccttgag

SEQ ID NO: 125000 - DNA, 851 bp, Arabidopsis thaliana
  unsure (1)..(851): unsure at all n locations
nnnnnnnnnnnnnnnnnnnnnnnnnnnnnnnnnnnnnnnnnnnnnnnngaagtcatgaggatgagagaaatgataattcttctgttgtgatggagcttagtctcatcaagctgcaatctttttcgttcccttcttcagtttcaagtgtgaaggatgtgaggttcttaaaccttgatttgaaatcctcacatcagagagctaagagatcatcaactgttgttcctgctttagctgaaacagctgtttctatagcgattgcagccacggttgttggtactgcagctactattcttgttaggagaaataacaaagcctccgaagaagccgaggcttctatgaaagaatgtgaagcttgtctcggttcaggaatatgtcctgaatgcaaaggtgaaggatttgtattaaagaaactatcagatgcaaatgctgagaaagcaagacttgcagctaaaaacatggccacgcgatatacagccgggcttcccaagaaatggagctattgcactaaatgttcttccccgagatcttgtatgatatgtggtggtagtggaaagacaagcatctagctccttacgcagagtttacaaattctttaatgtgatctgtttctgagacgtaaaccccactantattaaatgcttcttcttaaggtatgactagttgtgcctcaaaacactcttctcattttcagtatttgatcgattttgttaaatcaataatatgatcttggaagacttttaaagacaaaataataaacaataagattttagaaaaggatttaaacaaagggcgaccgctctagaggatccaagcttacgtacgcgtgcgtgcgacgtcataatnctctatag

SEQ ID NO: 125001 - DNA, 345 bp, Arabidopsis thaliana
gcagctaaaaacatggccacgcgatatacagccgggcttcccaagaaatggagctattgcactaaatgttcttccccgagatcttgtatgatatgtggtggtagtggaaagacaagcatctagctccttacgcagagtttacaagtacgttaaactcttttcttcagaagccgattcaaaggtttagcatagctttcttgttttgtttcatttatgaaagattctgcaatgtttgaaacctttcatataactttaagttttacatttgcaatcttcacctgtcatactagttaagttgcttcttactctttccagattctttaatgtgatctgtttctcagacgt

SEQ ID NO: 125002 - DNA, 861 bp, Arabidopsis thaliana
  unsure (1)..(861): unsure at all n locations
nnnnnnnnnnnnnnnnnnnnnnnnnnnnnnnnnnnnnnnnnnnnnnnnnnnnnnnnnnnnnnnnnnnnnnnnnnnnnnnnnnnccacgcgtccgcggacgcgtgggttttgataggagcgactctgttccttcgccgccgatacgcactcttcttcatcggatttgttcctctggtgggattgtagctctccatgtgttgtactagtgcctcttaggacaatgttttggagcttatagtcaaattctgtgaaaactttgaggtgggaattgtgagatcctgtatgatgaagatatccttgaattgcatatatggctttgttgattgatgttctcatctcttgccacctaagggttttgattcggccactgtatctgctaggggttcgcttctggaagaaatatgggtgagactctcatcaccaccctgtctatggagaactatcacccgtcaacactgctatccatggattcaggtgcttttactcatgaagaatcagagagggatatgaatgggtctctcatacttactggaccgcctgatattaatctaccactctcttctgaagctaggccatctctgcttttgtggaacgaacactgtgacatcttagacgttggacttggacctcagctatatgagcctgaggctgttgttcatgtgcctaaggttgctaagaagtacaacaagcgtgttgatagtgcatggggtgcttggcttttcttcagtttctacttcaaacctgttttggatgagaagtctaaaagtaagttaacgaggggcagcaatggcttgtctggggatgataaatctgatttgcagctcgactcgttcttggttcagcatgacatggagaatatgt

SEQ ID NO: 125003 - DNA, 765 bp, Arabidopsis thaliana
  unsure (1)..(765): unsure at all n locations
ttgcagtacccgtccggaatttccgggtcgacccacgcgaccgggagagagaaatggaggaaggtctaaagattcaatctttggtcatttatccgatcaaatcttgccgtggaatctctgttcctcaggctaccgttactcatactggttttcagtgggaccggtattggttagttgttaactataaaggaagagcatacactcaaagagttgagccaacccttgctcttgttgaatcggagttgcctaaggaagccttcttggaagattgggagccaacaaatgactcattgttggtgataagagctcctggtatgagtccgttaaagataccgttgactaggccaagctcggtagcagaaggtgtgtcgatgtgggaatggtctggctctgcttttgatgaaggagaagaagctgcgaaatggttttcagattatcttggaaaacaaagccgcttggttcggtttaaaaaagatactgaaactagaccttcacctcctgagtttgcagcgggttactctacaacattcatggatatgtttccgttcttggttgcatctcanggttctttaaaccatttgaatacccttctgccagaaccggtgcctataaaccgttttagacccaacattctttgtgataattgtgatccttttggtgaagatctttgggatgaaatcaaaataaacgattttatttttcaaggaatttaggctatgtacccgctgcaaagtacccactgtgaatcaagaaaccggggttttg

SEQ ID NO: 125004 - DNA, 517 bp, Arabidopsis thaliana
  unsure (1)..(517): unsure at all n locations
ccggcannnnnnnnnnnnnnnnnnnnnnnnnnnnnnnnnnnnnnnnnnnnnnnnnnnnnnnnnnnnnnnnnnccacgcgtccgcggacgcgtgggcggacgcgtgggcggacgcgtggggtttgtgaaagggagagagaaatggaggaaggtctaaagattcaatctttggtcatttatccgatcaaatcttgccgtggaatctctgttcctcaggctaccgttactcatactggttttcagtgggaccggtattggttagttgttaactataaaggaagagcatacactcaaagagttgagccaacccttgctcttgttgaatcggagttgcctaaggaagccttcttggaagattgggagccaacaaatgactcattgttggtgataagagctcctggtatgagcccgttaaaggtacccgttgactagggccaagctcggtagcagaaggtgtgtcgatgtggggatgtggccttgggcccctcgtttttaaatnnaagggggaaganncttcg

SEQ ID NO: 125005 - DNA, 782 bp, Arabidopsis thaliana
cacttttgttttttctctctctcacagagaaaaagaacacaaggccagtttctgcagagccttcttcatcttcttcaacaacaatcggtcaacacatgagactctaacgacctaggaatcatcgacatctcccacccatttccaccgccgacgaacctctaatccccaaacctagccgcgtctctaaatccgccatgtcgtccttcttcctcttgccagaaactactaacacgaaacccaacggaacggcgtcgtttcgtggtctaggctgcacaacctccgcatctcagcaagtttcagtcccggcagtgattcgctcctccgcggattgggatgctagtaatttcaaaattaagaagacgaagaagaagaacaagaacaagggtagtagtagctacaatggtggttcgattaagatcttgagcgaagctagtactagtagtagcgtcgcttgcgcagcgattcctgatgtttggtgtggtcctggagttgggttttcaacggatgctgtcgtcggaggctccattgacacagttgtttcagatcctccgagaaggaatattccggtgagacgcaaaatcgatggagataaaaccaatagtaacagtaataatcatagagcagggttcttcttctcttcttcctagcacgatctctaatcaagagtctaatccttattttgattctattcgagttttttgacatcgcgggctgagcagactgatagaatcatcgtcatctaagactgccttaccctgatggactcctgagatgatgatgat

SEQ ID NO: 125006 - DNA, 384 bp, Arabidopsis thaliana
gcgcccaaatcgaagcgaaggtctctcaacaatggcgaaatcagtgtcgacggcggcttcctcgcttgtgcagaaaccttaggcggtacatcaagaagccatggcagatcaccggaccttgcgctcacccagaatacctcgaagctgttccaaaggcgacggagtatcgtctccgatgccccgctacgattgatgaagaagcaatcgtgccttcctcggatccagagaccgtatacaacatcgtataccacggcagagatcagcgcagaaaccgcccaccgatccggcgatacgtattgacgaaggacaacgtggttcagatgatgaacgagaagaagagttttgacgtctcggacttccctaaggtttacttgaccaccacag

SEQ ID NO: 125007 - DNA, 441 bp, Arabidopsis thaliana
aacttcctctgtttctgattaccaaacgtcgtcaatacatttcttcaaattacgtttcttttattctttcgttactctcaacaaattttgatatctgattggtgttgattccaagtaagaaagatcaaaactttaggtaaagtatggatatgggtttccatgaaaatgagcaaaatcaagaatttgcgaatctaatggagattggatctgggcattacgggtgttcacattatagaagacgatgcaagattagagcaccatgttgtgatgagatttttgattgcagacattgccacaacgaagctaaggattctcttcatattgaacagcatcatagacatgagcttcctcgacatgaagtttcaaaggtcatatgctcgctttgtgagacagaacaagacgttcagcaaaactgctccaattgtggtgtatgtatgggga

SEQ ID NO: 125008 - DNA, 526 bp, Arabidopsis thaliana
taaagtttcattttttttttttttgaatttgattatccttgtgtgtgtgtgtttaggtgttcacattatagaagacgatgcaagattagagcaccatgttgtgatgagatttttgattgcagacattgccacaacgaagctaaggattctcttcatattgaacagcatcatagacatgagcttcctcgacatgaagtttcaaaggtcatatgctcgctttgtgagacagaacaagacgttcagcaaaactgctccaattgtggtgtatgtatggggaagtacttctgttcaaaatgcaagttcttcgacgatgatctttccaagaagcaatatcactgtgatgagtgtgggatttgcacgaccggaggagaagaagactttttccattgcaaaagatgccgatgttgctactccaaaattatggaggacaaacaccaatgtgttgaaggcgctttgcatcacaattgcccggtttgttttgagtatctgttagattcaacaagatatattactgttctacgatgta

SEQ ID NO: 125009 - DNA, 630 bp, Arabidopsis thaliana
ctcactatagggaaagctggcacgcctgcaggtaccggtccgtcgagagattgattataaaatccggtcggcgacgagacttactttcgccgcaaaatttgttctccggtaccggatatttacgtatctgttctcaaattttaccattcccaccactaaaaccctagattaaaagcttcaattaccggaaaaagtctctacttaagagatttatctgtttgttgtcttaaatcacaggaagagaatggattttcttaaggcaacgattatagttgccctaatttgcaatttcgcctcactggcgtcttctgttcctttcatagttctgcatggaattggggataaatgcagtaatgcaggagtgacacaattcacagagcttttaagcgattggtctggttctcaaggatattgcttggagattgggaatggctcatgggactcatggactatgcctctccttgatcagacatcagttgtttgtgagaaggtgaaaagtatgccagagcttagtgacggttacagcattgtggggctttctcagggtaacatgattggtcgagctctcattgagttctgcgatggagcaccacctgttaagagttctgtttcggtagcgggtcctcatgc

SEQ ID NO: 125010 - DNA, 507 bp, Arabidopsis thaliana
  unsure (1)..(507): unsure at all n locations
tgannnnnnnnnnnnnnnnnnnnnnnnnnnnnnnnnnnnnnnnnnnnnnnnnnnnnnnnnnnnnnnnnnnnnnnnnntaggccacgcgtccgctttttcccttctctctttctatttctccctcatacctttgtttattctgatgaagttgtgagcactgaaagaaaagaagagaggagaagagagatatgcacaagaagaattaaacttagggacacaaaacaacatgacttggtgcaatgaccgtagcgatgttcagaccgttgaaagaatcattccctccccgggggcggctgagtcccccgtagcctcacttccggtctcttgtcacaaaacttgcccttcttgtggccataacttcaagtttcacgaacaggctgggatccatgacttgccgggacttcctgctggagtaaaatttgatccgacggatcaagaggtcttggagcatcttgaaggcaaggtaagagatgacgcaaaaaagcttcatcctctcattgatgagtt

SEQ ID NO: 125011 - DNA, 354 bp, Arabidopsis thaliana
  unsure (1)..(354): unsure at all n locations
cccacgcgtccgcccacgcgtccgcccacgcgtccgattgaattatgttatcatcatcaccggcggtcaccaccgcctcacacttacatcctcctccgtcgccggaaacctaccaaattcctctgaatttactttcctcgccgcatattacccgccgagaccttttcaaaactctctccgtatgtattgccacaccatcactctccgtctccatcgccgcaccagctaacgcacgcggtctctttcagatgccgcctctccggctctctaatcgttattaccttgtgagagctggggaatcagattacggaagcttngggntaatcaacacaaaaccccggttggccaaaacat

SEQ ID NO: 125012 - DNA, 1433 bp, Arabidopsis thaliana
aaaatgaaaagaaagattgtcaacccacggattattcttcttgactgtcctcttgagtacaagaaaggtgaaaatgaaacgcaatgctgagttggttagagaagaggactgggaagtgttgttgaagttggaagaggaatatatcgagaacatttgcgttcaaatactaaagttcaagcctcctcgcgtccgcacagagaagggtcttagtgacttggcctgtcactatttcagtaaagctggggtaagtgcaatccgaaggttgagaaaaactgacaacaacagaatcgccaaggcttgtggagcagtaattgtgaacaggcccgacgaactgcaggagtctgatatcggtactggggctggcttgtttgaggtcaagaaaattggagatgatttcttttctttcattgttgattgcaaagaacccaaagcctgtactgtactcttaaggggaccaagtaaagatttcatcaatgaagtggaaagaaatttacaggatgccatgtctgttgcaagaaacattatcaaaaacccaaagctagttcctggtggaggagccacagagctaaccgtttctgccacattaaaacagaagagtgcaacaattgaaggcatagaaaagtggccttatgaagcagctgccattgctttcgaggctattccacgtaccctggctcaaaactgtggggttaacgtgatccgtactatgactgcattgcaagggaagcatgcaaatggtgaaaacgcatggactggtattgacgggaacactggtgcaatagctgatatgaaagagagcaagatatgggattcgtacaatgtgaaggcgcaaactttcaagacggctatagaagcagcgtgtatgcttctaagggatcgatgatatagtgagtggaatcaagaagaagcaagctcctggatctggaccttcaaagcctaccattgagacagaaggagatgcagacaacgaacaaattcttcccgactaagcgaagggagaaacactttggtctcagcataactcaatctctgttttcacttgtttaatggttgcactcttttggctattatcttcccttgacatatcttttaattctgcagtttgacttggtgagataagattttcgagggtggtttttttttgtttgttttggaatattagcttttttgaattttcgtagtcactttgttggtttttagagtgctaagttgttattgtctttttgaaatttcctggcactagagactttttttagtttgtgtcgtttttgtttgaatatcatcaagaatgtacttcaactgggtccttaaggtgcccggtaggggccaaattgggttttggtttgaaaaaaaaaaaaaaaggccgcccgctctaaaggatccaagcttacgtacgcgtgcatgcgacgtcaaagctcttctataggtcacct

SEQ ID NO: 125013 - DNA, 530 bp, Arabidopsis thaliana
  unsure (1)..(530): unsure at all n locations
aacaaaaccaaaggggaaaaacncttnggnccccaagcaaaaacccaaaccncngggtttccacctggttnaaaagggntgcaccccntttggcnattacccncccttgacatancttttaatnctgcagtttgacttggtgagataagatttncgagggtggtttttttttgtttgttttggaatattagcntttttgaatttncgtagtcactttgttggtttttagagtgctagttgttattgtctttttgaaatttctggcactagagacttttttagtttgtgtcgtttttgtttgaatatcatcaagtatgtacttcaactggatctttagttgaccggttagtgtcaaattgtgtttttgtttgaacaccattaattgcatttcagacgtacggatctgttatttagagttttgggttattattcaggttgactcggtccgaatttatttatacgggttggttttgttactgaaaacctttaaacttcgctagttaaatgaaaattgaaagtttagttaaaaa

SEQ ID NO: 125014 - DNA, 482 bp, Arabidopsis thaliana
cccacgcgtcagcccacgcgtccgcggacgcgtgggccctaaaatccttaagagcaaccaaaatcatggcgcttcatctcgccagacgccatcaaaggttaccatcaaacacatctttgattcgatttttctccaattcctcatcggactcacctccccaattcacgaacgcaccggttgaaaaaccgtctcagtcaccatcttctccgtcaccgtcagactcttctccgatcttcgacatcaagaacactctgaaactgaaattacagaaccagcacgagcaaggaaggaaaccatttgacagatccgatgcacaatctcagaatcgcggatcgactagtttctcccaaaacttggggaagaatctcgccaagtttcagcggagatccaccgttccacctccgagggattcaagcggcgtacagcctccgtcttatatttccttagcgggcctctttaagcagagcgctgcaacaaactca

SEQ ID NO: 125015 - DNA, 511 bp, Arabidopsis thaliana
  unsure (1)..(511): unsure at all n locations
gnnnnnnnnnnnnnnnnnnnnnnnnnnnnnnnnnnnnnnnnnnnnnnnnnnnnnnnnnnnnnnggctcgagtatatcaaacccgttctctttgctttctcacactgaaatcaaactcctttggtaattaaagatggagaagaatggtcacacggaaagtgaacttcaaactcaaatggttggaaatgagagactacctcaagtaacgtggcaacggaagttgaacagcaaagtgaagaacccttctgagttcaagatgagtataagagatgttcttcatctgtttcctctaggctatagattgtggcgttacactaaagaagaggcataaaaaggaagattttcgatgtacgatatcttcaaaaagcgccatgtaagaggcgaccatggtgtcccattaggtggaattggtggaggaagcatcggaaggagttacaaaggtgaatttcagcagtttaagctcttccctaaaatttgtgaagaagctccaatcctcacaaaccagttctctg

SEQ ID NO: 125016 - DNA, 490 bp, Arabidopsis thaliana
ctcttacgaagatgatcatcctcatcaatctccatctcttgctcctcttcttccttcttgctctctacctcaagatctccatggatttgccccgtttctaggtaagagacctccaagggaagggtgttgggttttagaaccagggaccggtatgattggagaagaggttttttcagatgatgggtcacaaatgggagagaagaagaggagattgaacatggaacaagtgaagacactagagaagaactttgagcttggaaacaaacttgaaccagagaggaaaatgcagctagctcgtgccttaggtttgcaaccaagacagatcgcgatttggtttcaaaatcgaagagctcgttggaaaacaaagcagctagagaaagattatgatactcttaaacgacagtttgatacacttaaagctgaaaatgatcttcttcaaactcataatcaagaactccaagctgagataatgggttaaaaaacagagaac

SEQ ID NO: 125017 - DNA, 421 bp, Arabidopsis thaliana
ctcgataattggcgctccaccaaggaacgttttgcattttcgcattgtacagagtgtacagcctttttcaaactccgagccaatgtgcctgctgatagatggtggttgagattgagatttcagctgctggttgctagagatcatgccttcatcttcatttctgtccagatgattgtagcattcttggggttactagtttacaagttctacggtgaagaactacgagaaatgtttggttatgaggaacatccttatgggttctacacattggctgttttggccattgtcttggtaggactgctatatggattcttcatcgccataatatgtggccaaaagatcaacgagcggcattaccatgttctcgccaaacaagaactcacaaaggaatatatagtggaagaccgcgactgcaagaatg

SEQ ID NO: 125018 - DNA, 883 bp, Arabidopsis thaliana
tctccccagcagagagaggggaagtctctaaacccttgcttgtcatcaaatcgattcctcgagtgaggaaacatttctcttttcgtggatcttacgagaccgagaagagagtaagatatgtccggcgcatcgtctgaggatagcagtattttcgctcgctgtgaagacgtagactgtaacaagaaaatacctgtagagcttgtaaggatgcacatttgttatgctatgttccataggactctggcagctcgaggttttgggacacaaactcaggctaagaagaaacctacaaacaagaagaagtcaacaacatctcttaccgattttgctgtcttcatgaatcatttccgtaaatcttttagaacagattataatggtgcattggtgaaagaaggttcaaagatcggttgggaaatgtggaagtctatgactgaggatgagaagaaagattatctcgataaagctgctgatgaggaagatgaggatgaggatgccgtggaggaacaagctgatgattctgatgatgctgaggacaatgaagttaaggaaacagatgatgtcaattgaccacaacaaagtagctcaagtaaaaaagtaaagattttgggtgacgactactaaatatgttagttatgcttgttcagttgttcttggggggtctttaatcttattgaaatggatttaaggtagtatataaaaacagactgatacgaatatgggcttaaaagcccattcgagttgacattagtacgtaggtttggcccatttatgttataactactataagaagaaaacaagtttagaaaatttccaaaaaaaaaaaaaaaaaagggcggccgctctagaggatccaagcttacgtacgcgtgcatgcgacgtggag

SEQ ID NO: 125019 - DNA, 508 bp, Arabidopsis thaliana
cagctacatacgactcacttagggaaagctggtacgcctgcaggtaccggtccggaattcccgggtcgacccacgcgtccgggggaaacaggtcctattcactggacagatgatgagagatctgcctttatacagggtttttcgctttttggcaagaattttgcttcaatatcaaggtactgtcgggacaagatctccagatcagtgtaaggttttcttcagcaaagttcggaaatgtcttgggttggaatctataaagtttggatctggaaatgtaagcacatccgtaagtgttgataatggcaatgagggtggtgggagcgacttggaagatccttgtcctatggagagtaactctggcatagtgaataatggagtttgtgccaagatgggtatgaattctcctacctcaccttttaatatgaatcaggatggtgttaatcaatcacgctctgctaatgggacagccgaccttagtagatcagacgatgagaatgggcagaaattt

SEQ ID NO: 125020 - DNA, 514 bp, Arabidopsis thaliana
  unsure (1)..(514): unsure at all n locations
nnnnnnnnnnnnnnnnnnnnnnnnnnnnnnnnnnnnnnnnnnnnnnnnnnnnnnnnnnnnnnnnnnnnnnnccacgcgtccggtcgacgatctccctccgtcgtcggcctccgccgtaacgccactaggctcctccgtgattccgattgtgaacaagctccaagacatattcgctcagctaggaagtcaatcgacgatcgctcttccgcaagtagctgtcgtcggaagtcaaagcagtggcaaatccagcgttctagaagctctcgtcggccgtgactttcttcctcgtggcaatgatatttgcacgcgccgacctctccgtctccagcttgttcagacgaaacctagctctgatggtggatccgatgaagagtggggcgagtttcttcaccacgatcctgttagacgtatctacgatttctctgagattcgccgtgagattgaggcggagactaatagagtatcaggagagacaaaggtgtatcagatattccgattggtttgaagatatttt

SEQ ID NO: 125021 - DNA, 494 bp, Arabidopsis thaliana
ctcctttgttcccttaacaaactctaaaccaaaaaaaaaaaaaaaaactatgggttacgacaggctcggtccatccggaccatcaaacccgaaccagaaggaccctgccacgtcactcccggaactacagaagaaaactaaaacgaagctgattctcttcactttggccgttttggtagttggagtagtctgcttcggtatctttgccggcatccgagccgtagactcgggtaaaaccgagccgaaactaacccgtaaaccgacccaagcaatctcccgaacctgtagcagatccttatacccgaacctatgcatcgacacacttcttgactttccgggatctttaaccgccgacgagaacgagctcattcacatatcattcaacgcaacgcttcaaaaattcagcaaagctctttatacttcttcgacgatcacatacactcagatgcccccacgtgtacggtcagcttacgattcttgccttgagttacttg

SEQ ID NO: 125022 - DNA, 743 bp, Arabidopsis thaliana
  unsure (1)..(743): unsure at all n locations
gtnatttcccgnggttgccaacgtttgtggtttggtccatggccgcaatttttgcctgccctggacnttntgangncccaccngaagcgaagcaaggctgatttgatnggttctgtgatgctcncatctcgatcaggnaagagatttcncagattgagaaaggaaccgcagatccaaacaacaacgttttgaagggtgctccacatcctccgtcattgctaatggcagatacatggaaaaagccgtattcacggggatacgcagccttccccgctccatggctccgctcctccaagttctggcccactacagggcgagtggacaacgtgtatggagaccgtaatctggtgtgcactctccaaccggcgaacgaagaacaggctgcagctgcagtgtctgcttaaatgaagccactatgaagcgattcgcactcgcaccaaaacccacaatggggcgattcggactcataccggatccagaaacgtatctttactggcttttacttctcttcccagcctcatcatcactttcactttcacttcctgtacaatgtacatacgtagtcctaagttcttccctcatttatttaataaaatacatttctttatgttccactttcttatacgtataacattccatttggatgatgtgatcaccatcgtggttatatttatgccatatgatctctttgnnnnnnnnnnnnnnnnnnnnnnnnnnnnnnnnnnnnnnnnnnnnnnnnnnaa

SEQ ID NO: 125023 - DNA, 625 bp, Arabidopsis thaliana
  unsure (1)..(625): unsure at all n locations
caagaccttntgtatccctcacggaggtggaggtcccggaatgggccctatcggtgtgaagcaacatttggctccattcctaccttctcacccagtgatacctaccggtggtatccctgaacccgagcagacatcaccgctgggaaccatttctgcagcaccatgggggtctgcgcttatcttgccaatctcgtatacttacattgccatgatgggatctggaggactcaccgatgcctcaaagattgcaattttgaacgctaactacatggcaaagcgtctggagagccactacccagttcttttccgtggtgtcaatggaacagtcgctcacgaattcatcattgacttgagaggattcaagaacactgctggaattgaaccagaggatgtggccaaacgattgatggattatggtttccatggaccgacaatgtcttggcctgtccctggaacgcttatgatcgagccaaccgaaagcgaaagcaaggctgagttagataggttctgtgatgctctcatctcgatcagggaagagatttcacagattgagaaaggaaacgcagatccaaacaacaacgttctgaagggtgctccacatcctccgtcattgctaatggcagat

SEQ ID NO: 125024 - DNA, 1190 bp, Arabidopsis thaliana
  unsure (1)..(1190): unsure at all n locations
acaagggcctctcgtttcatgagagaaacaaaaaatcttatctttctgacaacggtggtggtgtgtgatgttgtcagccatggcaaagacagagctacaacgatctctctctcttttcttcttcttctgtgtctgtctttaaatagagtctctttgaaacgaagcagctttgtcctgttctgatatccatggctttaccttcgtgcttaaagactggagctttaatgtctccggccactggatttaatttttccggcagtcttatgaagtcagacagcggcttcgccgttccgacaaagttacagagtactcgaaaaggtgatcgagagagattgagagtccaagctattttcagtttccctcctgcgtttctgacaagaaacggtcgagctgagaaacagaaacagctcaaacaagaacttcttgaagccattgagcctcttgaacgtggtgctacggcctcgcctgatgaccagcttcggattgatcagttagcgcgtaaagtggaagcagttaatcccaccaaggagcctttgaagtctgatttggtcaatggaaaatgggagctcatttatacaacctctgcttcgattttgcaggcaaagaaaccaaggttcttaagatcaataaccaactaccaatctatcaatgtgggtacacttaaggtgcaaaacatggggacttggcctttctataactcggtaactggagacataaaacccctcaattcgaagaaggttgctgtgaaactccaagtgtttaaaattctcggatttattcctataaaagcacctgatagcgcccgcggtgaacttgagattacctatgtggacgaggaactacggttatcaagaggtgacaaagggaacttgtttatattgaagatgtttgatcccacttatcgaatccctctttgatctaccaaacaaatggtaccgagccatccatcatacatacttgctacaacctgctatgtctctcttcatcatgtatgtaatctaacataagaaaaattaataagagggaaaaaatgagacgagcttctgtcattgtttcaacttgttcaaatcaaagattctgaatcttgatttggttgagcngttngttccaatcctaaactatgtgatgctcaagcngtacaacaagaagaccttgaagctcctcaaaaatgcttngatnattttctctct

SEQ ID NO: 125025 - DNA, 519 bp, Arabidopsis thaliana
aaaaaatcagaaaaacaaaatttggtttgctccacttctcagttcggtcggtctcgcacactgagacgcaaagcaagaacacaacaacacaacaatactgccaacaaaatccaaatcttccccattttgtcttctcaaccaaaaccctaaaactctccttccttcttctccctagagatgtcttcaacaatatccctaaagccgacgcaccttatcctctcctctttctccacaggcaaagtcctccaattccgccgctcccgtttcagccacacaccgtcgtcgtcgtcgtctcgttatcggactctcgtagctcaactcgggttcagaccagattcttttgatttcatcaaggaccatgccgagaatctgctgtacacgatcgctgatgccgccgtttcgtcctctgaaacctttgaatctgtcgccggcactactaccagaacgacccagagcaatgattggttctctggtattgctaattacatggaaactattctcaaggttttgaaagatggg

SEQ ID NO: 125026 - DNA, 515 bp, Arabidopsis thaliana
  unsure (1)..(515): unsure at all n locations
aaactacttccgtgtctccctctctgtctacacaacactcttctctattttctttctttctctctatatatattcatatctcttctccattctctcttacttcaaaattcatcacaaagagagataagagagatggagaacggtgagaaagcagctgagactgtcgttgttgggaactatgttgagatggagaaggatggtaaagctttagacatcaaatctaagctatctgacatgttttggcatggtggctctgcttatgatgcttggttcagctgtgcttccaatcaggtggcacaagtgctgttgacactgccatactcgttctcacagctggggatgctctcagggattctgtttcagctcttttatggcatcttaggtagttggactgcttacctcatcagtatnctctatgttgaatacagaaccagaaaggaaagagagaaagttaacttcagaaaccatgtcattcagtggttgaggttcttgatggattgccttgggaagccatt

SEQ ID NO: 125027 - DNA, 1118 bp, Arabidopsis thaliana
  unsure (1)..(1118): unsure at all n locations
atgatcctgccnnnnnnnnnnnnnnnnnnnnnnnnnnnnnnnnnnnnnnnnnnnnnnnnnnnnnnnnnnnnnnnnnnnnnnnccacgcgtccgcggacgcgtgggttcattagctctgttcagtataagcaagaagagagagcgaaaatggagctctgtgttatcagcacgactacgacggtgaaggcaattaatccgtttcttccgtctattacacgtcgtgttagttcccgtctcttccaatcagatagtgtgctacagtttggtgggaggttgaagaaaccaattagcaggcctttggacatgtcttgtgtctctagaaaaattggatttttcggagattttatgtcacatggtggtaattttaggctattcgcggcggcttctccagcggttgaaactagtgtaaaggaagacaaacttccagctgatcttaaggtcacggagactgtacaggcgaattcaagtgtgaaattgagtgtggaagttccagaaattgtctgtgaagattgttaccaacgagtccttaccgaattcatgaaactctcaaaggtgcctggattccgtcctaaaacaagagttccagagaatattattgttggtttcgttgggaggcaatatgttctgagagcaactgttgaatctatcttaaagagaacacttcctcacgccatggaatcagtgactggaagggctttaaaagactcgatacagattgtaagcagttttccagatatggagaaggcttattctaagctcaagactcttagttatgaggtggttgttgatgtggtacctgaactaaaatgggatcctgaggatgggtataaaaatatgaaggtcgttgtagaactaggcgatgagatagatgcaaaaaaagcttgtgaaagacaactaagacagaaatacaagtctcttggtgcgttgaagattgtaaccgagcgagggctacaggtgggagatctagcagttgttgatatttctgctacaactatagatgaggactggttaacgggtcatgcgattccagatgcttgtaagcaaaggtttttactttgcttctgaatatgggaattgttcactttctggttttcttttatgctataatattgtatttt

SEQ ID NO: 125028 - DNA, 509 bp, Arabidopsis thaliana
  unsure (1)..(509): unsure at all n locations
nnnnnnnnnnnnnnnnnnnnnnnnnnnnnnnnnnnnnnnnnnnnnnnnnnnnnnnnnnnnnnnnnnnnnnnnnnnnnnnnnnnccacgcgtccggtccttaccgaattcatgaaactctcaaaggtaaactaatattcatcttacatgaagatgaaatgttgaaacttgatccatgtaatgcttgctgttgattgtgattttacttggtttgaatcaggtgcctggattccgtcctaaaacaagagttccagagaatattattgttggtttcgttgggaggcaatatgttctgagagcaactgttgaatctatcttaaagagaacacttcctcacgccatggaatcagtgactggaagggctttaaaagactcgatacagattgtaagcagttttccagatatggagaaggcttattctaagctcaagactcttagttatgaggtggttgttgatgttgtacctgaactaaaatggaatcctgaggatgggtataaaaatatgaaggtc

SEQ ID NO: 125029 - DNA, 623 bp, Arabidopsis thaliana
aaagaaagaagaaaaaaacatatgagctgagtttgttaaccaccgtgagcgtcatccatgggacgtggttgacgcgtgcgtgattttattttaataaatgaattaacagtggaaggaaaaaacaacaacggagctgtaactgtgaggcgccgtctctcttcaacctcttcccctccactttgcttctctctctcctccccgggggttttacagtcatatcatcgtcggagactctgcgattcttcacggaatcgtatttctctctcagcgatttttttcgattctcgaagctgcaaggaccacccatcaaacattgaaactcaagcgggagaaattttctggctcgggagggaaactatggagccctaatgcccattttctgctgtctatgaggttatgtttggacgatagatacattttgactttctcatacagtgagtacacgaggaaatggcatttccaagcatcagcgaggtgataaatattgtggtgaagggccaaactggatactaattgcagggggtgcattgttgagcacatagtccattcgctttggatacaagctaaagcagtcgcttgatccgaaacctcaatcaaatggctctgctggattaaaacctaat

SEQ ID NO: 125030 - DNA, 873 bp, Arabidopsis thaliana
  unsure (1)..(873): unsure at all n locations
tgcnnnnnnnnnnnnnnnnnnnnnnnnnnncgaccacatgctctaatcacgtccttgtagaggaaaagaaaaaaaatggctgcttcatcttcctctttcactctctgtaatcacaccacacttcgtactctccctctgagaaagacccttgtcaccaaaacccaattttcagttcccacaaaatcatcagaatctaacttctttggctccacactcactcactcatcgtatatctccccagtctcttcctcttctctcaaaggcttaatctttgccaaggttaacaagggtcaggctgcaccagacttcacactaaaggatcaaaacggaaagccggtgagcctcaaaaagtataaagggaagcctgttgttctctacttctaccctgcagatgaaacccctggctgcaccaagcaggcttgtgctttcagagactcttatgagaaattcaagaaagctggtgcagaggtcattggcattagtggagatgactctgcttctcacaaggcgtttgcaagcaaatacaaactaccgtatacattgttaagcgacgaagggaataaggtgagaaaagattggggagtgcctggagacctgtttggagcattgccagggagacagacttacgttcttgacaaaaacggtgttgttcagctcatctacaacaaccagttccagcctgagaaacacatcgacgagaccttgaagtttctcaaagctgcttgatcattctctctttctcttctttctcttctttcatgcatgtctcatgtctgtctccatgagaccatgaccttcttatattgtttctgttgagtatgaattttcaataataccatgttataccaatgagaagggagttggctttggtct

SEQ ID NO: 125031 - DNA, 498 bp, Arabidopsis thaliana
tactcactttagggaaagctcgtacgcctgcaggtaccggtccggaattcccggttcgacccacgcgtgcgcggacgcgtaggaaaaaatggctgcttcatcttcctctttctctctctgttttcacaccacacttccgtactcgccctctgagaaagacccttggcaccaaaacccaattttcagttcccacaaaatcatcaagaatctaacttttttggctccgcgctcactcactcatcgtatatctccccaggctctttctcttctctcaaaggcttaatctttgcccagaacggtaacacggggccaggctggaccataccttcacactaaaggataaaaacggagaggcggtgagccctaaaaagcattaagggaaccctgttgttctctacttataccctggagaaaaaacccctggctgcccaaaggaggctttgggttttagagacttttatcaaaaattcaagaaagctggggcaaagggcattggct

SEQ ID NO: 125032 - DNA, 528 bp, Arabidopsis thaliana
  unsure (1)..(528): unsure at all n locations
nnnnnnnnnnnnnnnnnnnnnnnnnnnnnnngacgcctgcaggtaccggnccggaattcccggttcgaccccccccggcgcccacgcgtccgtacgggcgagaagacgacagaaggggaaagaagaagaagaagaagaagccgattctaggaaaaatccgatactctttggacagtctatggccaccgatctctacggcgatctctttccggttatcacttcgtcactacacatttgcttcttccgttttcgtatcggatcgaatactattcatctttcttcgaatcgggtttctttgaacctttgaagctatgggtgatgcaatcgatttgagtggagatggtggcgtcttgaaaaagattgtaaggagtgccaaacctgatgctatttcaccctctgatgatcttcctgttgtcgatggtatgttcttaagattgactagtgatcagggtcaatatattgttcatctactgcttatgctactcctaattatatgtgttgatgaaggaccataaccttgtttgattt

SEQ ID NO: 125033 - DNA, 759 bp, Arabidopsis thaliana
aaaagctttgtgatccccgcctctccaaaggttatcccggggtccgcgaaaaatatttcccgggggttcgaactcccgacgcggttccgaaattttgttattcattctttcccccccctctcgccgccttgcgaaaagcattttcgatcttactcttaggataaaaaaatgtcgacagttggagagcttgcttgcagctacgctgttatgatcctcgaggacgagggtatcgctatcacggctgacaaaatcgcgaccttggtgaaagctgctggtgttagtattgagtcatactggccaatgctattcgccaagatggctgagaaacgtaacgtgactgatctcatcatgaacgttggtgctggtggtggaggtggtgctccggttgcagctgctgctccagctgctggcggtggtgcggcagctgctcctgctgctgaggagaagaagaaggatgagccagcagaagagagtgacggagatttgggtttcggtttgtttgactaaacgcagtcacttgtctttcttctttgtagttggatattggagactatattttgtcgtatgagtgattattacttgtttgatctggctaaaggactattagttggtttataatgcgtatgttgaataactcaagtttcctagcaaaccaatcggtttgggcttttgttttttaaaaaaaaaaaaaaaaaaaaaaaaaaaaaaaagggcggccgctctagaggatccaagcttacgtacgcgtgcatgcgacgt

SEQ ID NO: 125034 - DNA, 592 bp, Arabidopsis thaliana
catcactgaatcaaaaaccctagcgatactacaacactcgagccggagccgcgttgcgaaagcatttcaatcgtagtctaagagaatgtcgacagtgggagagctcgcttgcagctacgctgttatgatcctcgaggatgagggtattgctatcacggctgacaaaatcgccactttggtgaaagctgctggtgttaccattgagtcatactggccaatgctattcgccaagatggctgagaaacgtaatgtcactgatctcatcatgaacgttggtgctggtggtggaggtggtgcgcctgttgcagctgctgctcctgctgctggcggtggtgctgccgctgctgctcctgctgccgaggagaagaagaaggacgaaccagcagaagagagtgatggagatttgggttttggcttgttcgattaagtgcattttacttgttttttcttcttcgatttgagactatttttttttcgtatcgagctattacttgttttggtctggctgaagaactataattagttgttttctgaaccatatgttgtatgacacaagttttcaagcaaacccatcggctccttctttccttag

SEQ ID NO: 125035 - DNA, 728 bp, Arabidopsis thaliana
  unsure (1)..(728): unsure at all n locations
acncccctaaccnatttgngnncnntttaaaggagcanccttttaaaccggggaanntttttnttgcccgtanatttgaaattctgagggccttgntataaccctgnctgaaccaaaaaaanannaaaaaaaaaaccncgaggacgagggtatcgctatcacggctgacaaaaatcgcgaccttggttgaaagctgctggtgttagtattgagtcatactggccaatgctattcgccaagatggctgagaaacgtaacgtgactgatctcatcatgaacgttggtgctggtggtggaggtggtgctccggttgcagctgctgctccagctgctggcggtggtgcggcagctgctcctgctgctgaggagaagaagaaggatgagccagcagaagagagtgacggagatttgggtttcggtttgtttgactaaacgcagtcacttgtctttcttctttgtagttggatattggagactatattttgtcgtatgagttattattacttgtttgatctggctaaaggactattagttggtttatgatgcgtatgttgtataactcaagtttcctagcaaaccaatcggctcgggcttttgttagaattgattttgtttattttctaccaaaaaaaaaaaaaaaaaaaaaaaaaagnnnnnnnnnnnnnnnnnnnnnnnnnnnnnnnnnnnnnnnnnnnnnnnnnnnnnnnnnnnnnnnnnntgtcctaaat

SEQ ID NO: 125036 - DNA, 724 bp, Arabidopsis thaliana
  unsure (1)..(724): unsure at all n locations
gttttagatcgcggccggccgttcgtgttttagcggacgcgtgggcaagaacagactacttagtggctcctcctgacacagagatcatagatcatcttgagataccgtcgacgattccagattggataacagaagaagagattcaagtgtatgcggaaaagtttcaaagatctggattcactggccctttgaattactacagatccatggatatgaattgggagatattggcgccgtggcaagactccaaaatcgtcgttcctactaagtttatagcgggagacaaagatatcggatatgaaggacctaatggaacaatggagtatgtgaaaggagaggtgttcaagattgttgtgcctaatcttgagatagttgttattgaaggtggtcatcattttatccagcaggagaagtctgaacaagtctctcaagagattctctctttcttaaacaagttaagcaaaacagagtaaaatcatcccgttctctgtggccttatagaagaaccatgatgctctagtcttaattaaactactaataatgtgtattcaagaacgaaacccgagtgtgatctcggcaataataatggttcttaaagtaaaggaaaaaaaaaaaaaaaaaaacacccacaaagggcggccgctctagaggatccaagcttacgtacgcgtgcatgcgacgtcatagtaatctagagtnnnnnnnnnnnnnnnnnnnnnnnnnn

SEQ ID NO: 125037 - DNA, 988 bp, Arabidopsis thaliana
tatacttctcactataggcgaaagctggtacgcctgcaggtaccggtccggaattcccgggtcgacccacgcgtccggattttcttcctctctctcacacctatcaccaacaagaatcatgacgagctctgttagagagaagaagatcaagaccaacgggatttggttaaacgttgctgagaaaggagacgaagaagggcctttggttctgttactccatggtttccctgagacatggtactcttggcgtcaccagatcgatttcttgtctagccatggttaccacgtggtcgctccagatctcagaggctacggtgactccgattctctaccgagccacgagtcttacactgtgagtcacctagtcgctgatgtcatcggtttactcgatcactacggcactactcaggcttttgtggctgggcatgactggggagcaatcataggttggtgtctatgcttgtttagaccagaccgagtcaaaggtttcataagtctctctgttccatatttcccaagagatccaaaactcaaaccttcagattttttcaaaatttttggagatggtttatactccgctcagtttcagaaacccggaagagctgaggctgcatttgccaagcatgattgtttatcggtaatgaagaagttcttgctaataacaagaacagactacttagtggctcctcctgacacagagatcatagatcatcttgagataccgtcgacgattccagattggataacagaagaagagattcaagtgtatgcggaaaagtttcaaagatctggattcactggccctttgaattactacagatccatggatatgaattgggagatattggcgccgtggcaagactccaaaatcgtcgttcctactaagtttatagcgggagacaaagatatcggatatgaaggacctaatggaacaatggagtatgtgaaaggagaggtgttcaagattgttgtgcctaatcttgagata

SEQ ID NO: 125038 - DNA, 460 bp, Arabidopsis thaliana
agaggaggctaaaaatatcttttgtataaacaaggttttgattcatcctgtgttttggagaagtaatattacagtatgcagacccaaaaggcaagaaatggatctccggatgttcctaagaaggtgtctcctcgagctgctcggccactgaagatcgcagcgctagagcctgaatcttcttcatctcctatctcagctactaacagaacaccaaaggataagagtccaaacgttctaaatcgtaggtctcctcgaagccctgtctctgagaagaagaggccgagtagaataacggagctagagttgctagtctcgcagcttcaggaggagctaaaaaaggcgaaagatcaaatctcagtgtctgaaacatcaaagaagcaagcagaacaagaagcagaggagtccaggaaacagctccaagaagtttcttctaagcttgaggagagccagaatcagtttg

SEQ ID NO: 125039 - DNA, 1034 bp, Arabidopsis thaliana
  unsure (1)..(1034): unsure at all n locations
nnnnnnnnnnnnnnnnnnnnnnnnnnnnnnnnnnnnnnnnnnnnnnnnnnnnnnnnnnnnnnnnnnnnnnnnnnnnnnnnnnnccacgcgtccggaaagagagagagagtgagagctgagaaaatcaccagaaagctacttgagagagagagatagagataagtgagctctgagaaaatccagcaatggcttcgaagcttgtagtgataattgtgtttatcctcgatctcatcgccgttgggttagccattgccgccgagcagagaagaagtgtcggcaaggttgaaacagacagagacaagcaatatgattactgtgtgtatggtactgacattgctacaagttatggagctggtgcatttgttcttctctttgtaagccaagtccttattatggctgctagtcgttgcttctgttgtggaaagtctcttaaccctggcggttcaagagcttgtgccattattctcttcctcatttgctgggtgtttttcttgatcgctgagatgtgtttgcttgcggcatcaatcagaaatgcgtaccacacacagtatagaaagatgtggaaagttgaagatccaccaagctgtgaagttataaggaaaggagtttttgcagctggtgctgcattcacactcttcaccgccattgtctctcagttctactacgtttgctactctcgtgctagagatgcgtaccagaatccctcctactaaaaatgtcaacttccacagcaagcaaacgtttaagcatcaagagttggaatttgtctttttgtgtttgtttagtattgtccagtgtttagttatcctatcaggatgtttaggttttatgttgtctcttaagcaaacactgatatgttatattctaagattcgtatattgttatgttctctgttgtaatgtgtgaatgaatactaaagaatagaaaaccatgatttgttgtgaaaaaaaaaaaaaaaaagnnnnnnnnnnnnnnnnnnnnnnnnnnnnnnnnnnnnnnnnnnnnnnnnnnnnnnnnnnnnnnnnnnnnnnnnn

SEQ ID NO: 125040 - DNA, 536 bp, Arabidopsis thaliana
agctactacgcctgcaggtaccggtccggaattccccgatagccctctcccttctgttcgctctactatcgccggttcttctaccttgctccggcgattccaccggcggcgtcgaggatgattctccagcgaccgtatgtatcgtcgggagtgggatcggaggctcatccgtagctcacttcctccgtaactactctgtttccaccggcttaaatcaagccaagatcctgatgtttgagcgtcacgagatagtcggtggacgcatgaggaccgtcactgtcgccggtgatactttcgaagccggcggttcgattctccatccgaagaactaccacgttaaggatttcgtcgaaaggttcaatctgacggttcgattaccgacgccgattgaagaatcttcagcgattggaatctgggatgggaagagatttgtcgtcaagacattcggttccggtaccaaatttccgtttttggataccatcgtctcttgggtgaagaatctctacttgttcttacgttatgggttatcactgctg

SEQ ID NO: 125041 - DNA, 696 bp, Arabidopsis thaliana
  unsure (1)..(696): unsure at all n locations
ttttttaaattttcaaccagaaaagtgtactctactgcaactacttctnctctacttctctaccttaaaacttccccaaccatttncttcttcaaatcatcatcatcatccctcgtacaaagaaaatggccatgagcatactcgcgaagatctttctcgtctttgccatctattgcgctatcgatcccttcagtcacagctccatttccaagttcccggatttcagaacttacaagattgacatgcctccgttatcgtcacttccaaaggagagagaccgccagaatctgttgcagaattcacagatcaggtttcttaacgaggttcaaggtcccgagagcattgctttcgatccgcaaggtcgtggtccttataccggagtcgccgacggtcgaattctcttttggaatggcactcgttggacagatttngcatatacttcgaacaatcggtcagagctatgtnatcctaagccatcgcttttggattacttaaaggatgaagatatctgtggtcggcctttaggtcttcgattcgacaagaaaaatggggttttgtacattncagatgcgtatttggggntaatnaaagttggtccggaggnggtttgcaacttctgttacaaacggggcttatggtgtcccttaaagntttccantgtncttncaattgtnntgnagcaatntttcctttcct

SEQ ID NO: 125042 - DNA, 1069 bp, Arabidopsis thaliana
gtacgcctgcaggtaccggtccggttttcccggggcgacccatgcgtccgctcgtagacatgctttgtgcttgagacgattcccagtttctgcgattccaagtcgaagatataacctctcctatttgcgtctcagcttctacagagcttttagcattaaaagttgttaaaatggctggggggtcaaagaggtctaaaagagcaagacttgacagtgaatcggaagacataagcgaccaagaaaaccttaaggccgaaagcgacaatgaagatgatcaattacctgatgggatagaggatgatgaagtagatagcatggaagatgatgagggagagagtgaggaagacgatgaaggagataccgaggaagatgatgaaggagatagcgaggaagatgatgaaggagagaacacggaagacgaggatggagaaagcgaggactttgaagatggaaatgataaagagagtgagagtggcgatgaaggtaatgatgacaataaagatgctcagatggaagagcttgagaaagaggtcaaggagcttcgttcacaagagcaggatatattgaagaacttgaagcgtgataagggtgaagatgctgttaaaggtcaagcggtgaagaatcagaaggctctttgggataagattctggagttcagattcttacttcagaaagcatttgatcgttcaaacagattaccacaggagcctgtgaaatcgttattttgttcagaagatgaggatgtctcaacagcatatacagatctagttacttcatctaagaagacattagattccctcttggagttgcaagaggctttgtttgagaagaacccctcggttgatcaacaagtgaatgcaacagctagtgaagaatccaataaatcagatgccgaagatagcgatgaatggcagcgaatatctgacttgcagaaaagaatgtctgtgttccgaaacaaggctgtggacaaatggcagagaaaaacacaagtcacaactggtgcagctgctattaaaggaaagctccacgcctttaaccagaacgttagtgaacacgttgcttcctacat

SEQ ID NO: 125043 - DNA, 491 bp, Arabidopsis thaliana
gcatatatctatggagctggtatcaatggaaccatcacagagttccctttcacagctgcgagatacaaaaggaatcgatgtttgggtagagaagaagtaccaccttacatgttaccagttaaccccggtggcctcttaaacgttatgagtcctctgtccttacctccagcacaagctccaaaccaggatttcatagaggctgatgtcactgagccaccactatctccggttatagcaaaagctccaacctcaacccctggaactccctcaaccattgctcaagcacctagcggaacaaacccgacttaagctatctcttctcctctctgtttttttcctctctcttctacttctatgatcaacgctatatcacatctcttcactgtttataatgtcttccaccctcataaagatttccttgtgtgagagagagtagagcttatatgtgtgcatgtttacccctttgttttatatatgtcatttggttccgg

SEQ ID NO: 125044 - DNA, 627 bp, Arabidopsis thaliana
taggtgcactatagaagagctatgacgtcgcatgcacgcgtacgtaagctcggaattcggctcgaccaaaaattcaaacttttttctctttggaaaattctgaggcaaaaatgcggcgtaattgctgccatgtttcatttgcttcaaccctcaagatccttaattttgtccaagctttcattggtgtttcgatcattatctactccatatggatgctccatgaatacagccgtcaccttcccgtggacccgcctccgtcagcttcatcaagctccggaaccgagatcgctactagtgtatctgagcccttgaagaatcctattgattttgtggcgagtatcattctcgggtctaatggtggtgatcatgggtttaacctacgctcgttggaccttcctgctccatggttcatctactctttcatggcggttggtatattggtctgcattgttaccttcattggtttcatagcagctgaagcaatcaatggctggtgcttgtgtttttactctatcctcaaaactctgctcattctacttgaagctgcacttgttgaatacatcgctattgacccgcactgggaaaaggatcttccgtatgatccaactggagaacttagtagtctta

SEQ ID NO: 125045 - DNA, 584 bp, Arabidopsis thaliana
aggtctctacgactcactattgggaaagctggcacgcctgcaggtaccggtccggaattcccgggtcgacccacgcgtgcgtacggctgcgagaagacgacagaaggggggaacggataaaataatttgctcggcttcctcagctccaatggcggcgacgatgatcggaattaacctctcctgcttcaaatcaacatcgttcttctcaccggacctcaattctctccaatcaaagctctctctcctatctctcaaaccctctccaacacagccacggaaatcaacagtcatccgtatgggcggtggtccgagaactttccccggcggtgtatcaaaatggcaatggaaaaggatgcaagcgaagaaacagaaacagcttctcaaagcaaggttatgcagagaacgtcagatctacgagatgcgaaaacgcgccgagctaaaagcggcggtggctgagctagaacgaccatgggaaccgattcataaaccaccgaatctattctcagtttgtgctgatgagcaagttaaagtactcgcggatcggtttcagaaacctggtggatttgatttatggactgatagag

SEQ ID NO: 125046 - DNA, 695 bp, Arabidopsis thaliana
  unsure (1)..(695): unsure at all n locations
cccacgcgtccgcggacgcgtgtccgcacatacaagactctcctcacagaacgatttagatttaatcgggaaaaagttcagtcagtgacactaatgttcgaatcgaacatggttcttcaaacactatcttcttcttctcctccaattcaccgtctctatcttcaccattctcagattctcccttcttctgggtcacccagcaagatttctcttcagatacatggaaggactttggccattcgatcttttcatgaaatttctgctagaggtttaccggctttgaacaaagcttccttgaagaagctaccaatcaaaggatctacctttctgctggggcagagcttgttgatggtttctgctcacccacagttggcagcagcagcagaaatcataaagcctgaaccgatttacgaagttggagagttatttgaacttagtattcagctttcttacttgctgttactactggggttgcttggagttggtactttctatgtgatccgtcaagtacttgtacgcagagaactagacctctccgctaaagaattgcaggagcaagtaaggagcggagatgcaagtncaacanagctctttaagcttggtgcagtgatgttgagaaggaagttttatcctgcagcccacaaggtttttgcaacaaggtttccagaaatgggncggtgatgntcaanattttc

SEQ ID NO: 125047 - DNA, 583 bp, Arabidopsis thaliana
  unsure (1)..(583): unsure at all n locations
cggacgcgtggggaaaccagaaatagtcttcttcttcttcctcacacacatacttctctcaccttatcctccgagatcggaaaatatggagaaatccggctacggcagagacggaatttaccgatcacttcgtccaacactcgttcttcccaaagatccaaacacatcgttagtctctttcctcttccgtaactcctcatcttacccatcaaaactcgctatcgccgattccgataccggcgattccttaaccttctctcagctcaaatccgccgtcgctagactcgctcacggattccaccgtttaggtattcgcaaaaacgacgtcgtgttgattttcgctcctaactcttaccagttccctctctgtttcctcgccgtaaccgcgatcggcggcgttttcaccaccgcgaatcctctttacactgtgaatgaggtttcgaaacagatcaaaggttcgaatccgaaggttatcatatccgtaataaactgtttgntaagggcaaaagggtttgatcttcccggtggtctacttgggcttaagaaacggnggggtccncngggccgattcgngggtttaggt

SEQ ID NO: 125048 - DNA, 522 bp, Arabidopsis thaliana
  unsure (1)..(522): unsure at all n locations
tccggtgtagtctacacaagaacgtcgcgaatccacatggtcaaggtacagcttcgtatacaacgaatggattgaatatncgtcgatctgcnatgacgaattctcttgtaagaattggtggtgttgaaggtgaatgggtgcnaagagctttgactactttaattagaccatcttcacatcaactaaagagaagatctgcttatgagcctcgtcgtagtagactcgcatctatgtcgaaagcagaagatctttgaatctctcttcaggtttgtccttgtttttgatatactcagatctgcccatgaacgaggttgaatcaagggagcagaatcggcagctgcagtcataccggaccgagtcaaattcggagctgagttataccggaccgagttatgtaaaacggtgactaagacgacaccgtttttgttttgttgggtgggagatgagatgatgatgatgcattgtacatacacatattgcttattgaagcagaacaaaaaaatttcgcaagtcgaaagtatc

SEQ ID NO: 125049 - DNA, 1563 bp, Arabidopsis thaliana
aagaaagagagagagccccaaaacaaacaaaatggatttgaaccaaatcttgatcctctcatttctctctctttttaccttagccatattcttgctcacaagatccaaacggaaactaaaccttcctccgtcgccggcgatctccttgccggtgatcggacacctccatctcctcaagccaccgcttcaccgtaccttcctttccctttccaaatccatcggaaatgctccggtcttccatctccgactcggaaatcgcctcgtttatgtcatctcttcacgttccatcgctgaagaatgtttcacaaagaacgatgtcgttctcgcgaaccgccccaagttcaccataagtaagcacctcggctacaacgccacctacttactctcggcatcttacggcgatcattggaggaacctccgccgcatagccgccgtcgagatattctccactcatagactcaattcgtttctgtatattcgtaaggacgagatccgacggctcatttcacatctctctcgtgattccttacacggatttgtggaggtagagatgaaaacattgttaaccaatttggcatccaacaccaccatcagaatgttggccgggaagagatatttcggtgaggacaacgatgacgctaaactcgtgaagaaccttgtgtcggaggcggtgaccagcgccggtgcaggaaaccccattgattatctttccattttacgttgggtctcgagttatgaaaaacggatcaagaatttggggaataggtttgatacggttttgcaggaaattagtcgacggaaaacgtgccggggaagggaaaaggtggaactactgatccatcacttgctttgccctcccaagacattcaacctgattactatacggatgtcatcatcaaaggaatcatacttaccctgataattgcagggacagatacgtcatcagtaacactagaatgggcaatgtcaaatctgttgaaccatccagaaatacttaagaaagcgagaatggaaatcgatgaaaaagtcggtttagaccgattagtagacgaatcggacattgtaaatctctcttatctccaaagcattgtattggaaacactacgtatgtacccggcagtcccactactactacctcatttgtcatcagaagattgtaaagttggaggctacgatataccaagtggaacaatggtattgaccaacgcatgggccatgcatagagatccagaggtatgggaagatcctgagatattcaaaccagaaagatttgaaaaagaaggagaggctgagaagctaatctcatttgggatgggacgaagagcttgtcctggagccgggctagctcatcggctaataaaccaggctcttggaagtttggttcaatgttttgagtgggaaagagttggtgaggattttgtggacatgaccgaagacaaaggagccacattgcccaaagctataccattaagagccatgtgcaaagcacgttctattgttgataaactgatataaatgttttacgttgaaaaatgtattctatttaatgacatgtttttaatt

SEQ ID NO: 125050 - DNA, 856 bp, Arabidopsis thaliana
  unsure (1)..(856): unsure at all n locations
nnnnnnnnnnnnnnnnnnnnnnnnnnnnnnnnnnnnnnnnnnnnnnnnnnnnnnnnnnnnnnnnnnnnnnnnnnngaatgaggccacgcgtccgaggaaaccaagtctgaaacacaatgattgattaatcacttataaggcctaaactcacttttcctagttttgcccttcttttagctcatcaacagagagagagatagatccatggagggtcttcaaagatcaacaatctctttccgccgtcagggatcttccggtatagtgtttgacgatcgtctcatcgccgaactcaacaaatcgggaaacaacgagcagaaagacgaaagtcaacgcgacgaacaacctaagcctatgtcggaaagctctgaacaggtcaaaccaatcgatgagaaagacaagcttagaccgattaaaaccggtggaggagcaccaggaggaatagagaggagtcgatctaacggtggaggagctcaacgacatcatagaacaaccggaagagtttctccggcagtggacccgccgtctccgagaatttcgtcatgcggttgttgctctgcgtttggaaagaatccgccggggaagaaagttaatccgaggaaaaggccgccgaaacgtagatcgaggtaggcgtcaggattaataatattcatgaggaaaaaatagtatacacctgtctttcaatctttcttcttcttctttttttgtatgtgtgggggtctttcgttataaaaaactttaaatttgatttttcgatttgatcaacagactctggttatttgtaaattatctgtctttctttgttttcggacaatttcccatttctgtgcagaatcgaaaaaaaaaaaaaaaaagggaa

SEQ ID NO: 125051 - DNA, 579 bp, Arabidopsis thaliana
  unsure (1)..(579): unsure at all n locations
nnnnnnnnnnnnnnnnnnnnnnnnnnnnnnnnnnncaggttttgtatgctcaaatccttcaaacgagtgatcaatccctcgcgcccgttaaaaactttcagatttatatagaatttgttttgtctgttacttatttaggacaaatctttagtgtaaattgagttgagagttttgttttttcttctctcgtaatgatgacttgccgtttggccaaaagttatggtttaatcaaattgttgttgtgtaataagaataatggccgtcgtcttcgttttcctccggctgatgggttctctgcgtttcacagttgctccaccacgaggaacagatccatgtctgcttctagttcctccacaaatcccatgtcccgtgaggacgcaacaacactgcttccgtctgttcaagacaagtacggtggcgtgatgaccgagatgactcatcccatggatccttctctcttctccacacttctccgatcctctctatctacctggactcttcagggcaaaaagggagtgtggatcaagttgccaaagcacttattggcttgctgaacctgctgttaaggagggttctggt

SEQ ID NO: 125052 - DNA, 891 bp, Arabidopsis thaliana
  unsure (1)..(891): unsure at all n locations
tcnnnnnnnnnnnnnnnnnnnnnnnnnnnnnnnnnnnnnnnnnnnnnnnnnnnnnnnnnnnnnnnnnnnnnnnnnnnnnnnnnnnnnnnnnnnnncggccgcgttgaaccccccctagatcttctgatttagaatcgagggttttcgtctgattctcgaagtcttttctttattggtaagaaaatggagcagaagagcgtgttgttgtcagctttaggtgttggtgttgggttagggattgggttagcatcaggtcaaagtttgggaagatgggcaaacgggtcaggttctgttgaagatggactcaccggagaacagattgagcaagagttgattagacaaattgttgatggtagagaaagtactgtcacttttgaagagtttccgtatttcttaagcaagagaactcgagaattgttgacaagtgttgcatatgttcatttaaaagagtatgatatatcgaagcacactcggaatcttgcacctgcaagtaaagccattctactttctggtcctgcggaattttatcagcaaatgcttgcaaaagctttgtctcattactttgaatcaaagctattgttgttagatataactgacttctctattaagatacagagtatatatggatgcaccaagagagaaccttttcacaggaggtctatttctgagttaacattacataaagtgtcgagtttgatgggttccttctctatgctctctcaacgcgaagttgaaccaagagggacattgcgtcgacacaccagtggaaatgatcttaaatcaaggagtactgagagctctaatcgtcttccaggacacaggaaaaatgcttctgctgcttctgatatcagtagcatatctttccgctcttcgaggtctggttcagctttc

SEQ ID NO: 125053 - DNA, 549 bp, Arabidopsis thaliana
aacaacaaaacacaaatcttggttcattttaaatctctccaagaaacaaaatggcagcttccatgaaatttctctgcattcttggtctgatcctcctcatcggaacagtcgttgacggtgcaggggagtgtggtagatcttcgccagacaatgaggcgatgaagctggctccatgtgctggtgcagctcaggacgctaactccgccgtgccaggaggttgctgtactcagattaagagattttctcaaaaccctaaatgtctctgcgccattcttctttcggatacagccaaagcctccggtgtcgatcctgaggttgcccttaccatccctaaacgatgcaacttcgctaaccgtcccgtcggttacaagtgtggagcatacacacttccataaaatgttaacgctgggccttatgtggaagcttggagtttactactacgtctccatgaccttataatatatgaataacggtaatgtttatatgggtaccagtgtgattgtggttattgaacctatatcaataaatatataaaaatgattccactct

SEQ ID NO: 125054 - DNA, 522 bp, Arabidopsis thaliana
ccacaattctcaactttggagctgcagacacaattccggcgacgtttacgattctgacaccgccgaacccacttgtagcaaatggaagaagttcaaaaaagagttgcctttatactaattgatggtttgggagatgtatcaataccaagattaggttacaaaacaccattgcaagcagcagcaatacctaaccttgatgcaattgcttcagctggaatcaatggtttaatggatccagttgaagttggattaggttgtggtagtgacactgctcatctttctctaatgggttatgatccaagagtgtattaccgtggacgtggcgcgtttgaatctatgggtgcaggattagctatgtcacctggtgacatagctttcaagtcaaattttgcaactttggatgaggattctggagttgttgttagtagaagagctgatcgacatttcgaagaagaaggacctatactttgtgctgctcttgatggaatgaagcttccatcattccctgagtatgaagttaga

SEQ ID NO: 125055 - DNA, 692 bp, Arabidopsis thaliana
gtggtgtggtgaaggaggctggtgatatgaatggagaggaagaaaatgaaaaggagaagttacaagctgctgttcccactggtggagctttttatatgcatgatgataggtttcaggaaatgtctgctggcggaaacaggcgaatgcgtggtgggagaagacagtggggctctggagaggaaagaaaatggggacatgacaaatttgaagagatgaatactggggaaaaacattctgataggatgtctagaggccgattcagaggtcatggtcggggtaggggacaagggcgtggatacgctagagggagcagttctaacacattaaccagtagtggacagcaaatttatgttcctaaagctgtctcacgagggagaggacccaggaaatccgacactcccctgaggaatgaaaatcaagcacattctgagcaaagcaaacagttacgaaattctaatgggtctcaaaactctcgtgagaaaatgccacacctcgattcacggcgttcaccaactgcccctgctaaaactgagaatcaaggtgcccatgccaaaaagaatgtagctgtgtcaagtttgagttccgcttctcctccattttatccttcagcgccgtccagtaatgtggtacatggtatacaagttagtatggaaagactccacacaaatgaaagtgtcacgccttctgggaag

SEQ ID NO: 125056 - DNA, 1420 bp, Arabidopsis thaliana
  unsure (1)..(1420): unsure at all n locations
nnnnnnnnnnnnnnnnnnnnnnnnnnnnnnnnngnnnnnnnnnnnnnnnnnnnnnnnnnnnnnnnnnnnccacgcgtccgcccacgcgtccgcgagcttccgtgtccaagagctcctcgaccatggcgtcttgtttacaagcatccatgaattctctgcttccacgctcttcttctttttctcctcatcctcctctatcttcgaattcatccgggagaagaaacttgaagacttttcgttacgcctttcgcgccaaagcctctgccaaaatccctatgcctccgataaatccaaaggatcctttcctctccacgctcgcttctattgccgcgaattctccggaaaagcttctcaatcggccggttaacgctgatgtgccgccatatcttgacatctttgactcccctcagctcatgtcttctcctgcacaggttgaaagatcagtggcttataacgagcaccgaccgagaactcctccaccagacttgccatctatgcttcttgacgggagaattgtttacattggaatgcctcttgtgccggcagtgactgagctagttgtcgctgagctaatgtatcttcagtggctggatcccaaggaacccatttacatttacatcaactccacagggaccactcgtgatgatggagagacggttggaatggaatcagaagggtttgcgatctatgactctttgatgcaacttaaaaacgaggtacatacagtatgtgtgggagcagccataggtcaggcctgtctattactttctgcgggaaccaagggtaaacggtttatgatgcctcatgccaaagcgatgattcagcaaccacgtgtaccttcttctgggttgatgcctgccagtgatgtcctgattcgggccaaagaggtcattacaaatagggatatacttgtggaactactatcaaagcatactgggaattccgtggagactgtagctaacgtaatgagaaggccatattacatggatgcaccaaaagctaaagaatttggagtcattgacaggattctttggcgcggtcaagaaaagattattgcggacgtggttccttcagaggaattcgacaagaatgcagggattaaaagcgtagtatgagtctagtcttaagttttcttggcctaaatcatactgcgtcatggagaagaacaaatagactgaccaaaatcacattggccgcagactgccttgtttcaaatcacttggtaaatgtgaacatgcgattaggagagtcatacttaaaggatcttgaaatattatgataaaattgtaatgtgtttgttcgttagcaatagtaaatacaatcttcaactctcttcttcacccttcaaatttgaatattgaacagtttcttacttgtttccatttggcggccgcgaattcgatatcaagcaaatcgataa

SEQ ID NO: 125057 - DNA, 539 bp, Arabidopsis thaliana
ggtcacatacgactcactatttggagagctggtacgcctgcaggtaccggtccggaattcccgggtcgacccacgcgtccggaagatagaacaatcccaagattctcctcttatttgatcaaccatgtcgaatgtcttgctatccccaaacggctacgtatttgcatcgcctaaacctcttggcagattcatcaattcaaagtccggcggacggaaacttttcttctccgtcgttagagcttcttccgatgatgctgattgtaatgccgaagaatgtgctcccgagaaggaggtaggaacagtgagtatggaatggttagctggagagaagacgaaagtggtgggaacatttcctcctcggaagccgcgtggttggactggctatgttgagaaagatactgctggtcagactaatgtttactccattgagcctgcagtatatgttgcagagagcgcgattagctcaggtactgcaggatcatcggctgatggggctgagaacacagcagcaatcgtagcaggcattgctcttatcgcag

SEQ ID NO: 125058 - DNA, 597 bp, Arabidopsis thaliana
  unsure (1)..(597): unsure at all n locations
acntccagtggngctccagatggttacngggggacctgcccaatatggagactgaggntggcaaagcgaaccttcatccatgctaccacgggtattgagagcccgttaagatattggagagatattggcctgaagaagaggaagaacagattctgcaggacggcgggaatgacaattcacaacaggctttcaattttgggaacaatcccgctgctcccgttggtggattcaaatttgcctgaaaaaggtatccagtagtacaaattgaaatcctttggtttgggaaacatgagattcagcttttgcaactgttattgacaattgccaggttcaagttcgactttttgagttctggtgcaaaaaggcttatttttctgtttttttttctttttgttgttgatgttgtccttatttgtctgaatcattctctgattctgtatcttaaactctgctatgaactatgtgtagtgtggtttctggcccacgatatggtacactttgtatttgtcactttaaaaaaaaaaaaaaaaagggcggccgctctagaggatccaagcttacgtacgcgtgcaggcgacgtcatagatcttctatagt

SEQ ID NO: 125059 - DNA, 1014 bp, Arabidopsis thaliana
  unsure (1)..(1014): unsure at all n locations
gcaaaatcacaagaaaagtataaaaaaagaagctagttggactatctcgaatatgactgctgggaatagggttgggatagaggctgtggttggcgctggaataatcctccctcttgtgcacttgctccaaaacgcggagttcgatataaagaaggaagctgcttgggctatttccaatgccacatcaggagggtcacatgagcagattcaatatttggtgacccaaggctgcatcaaaccactttgtgatcttctaatctgccctgatccaaggatcgtgacagtgtgcctcgagggtcttgaaaacattctcaaggttggtgaggctgacaaggaaatgggattaaacagtggggtgaatctctatgctcaaataatagaagaatctgatgggttggacaaagtcgaaaaccttcaatcccatgataacaacgagatatatgagaaggccgttaagatattggagagatattgggctgaagaagaggaagaacagattctgcaggacggcgggaatgacaattcacaacaggctttcaattttgggaacaatcccgctgctcccgttggtggattcaaatttgcctgaaaaaggtatacagtagtccaaattgaaatcctttggtttgggaaacatgagattcagcttttgcaactgttattgacaattgccaggttcaagttcgactttttgagttttggtgcaaaaaggcttatttttctgtttttttttctttttgttgttgatgttgtccttatttgtctgaatcattctctgattctgaatcttaaactctgctatgaattatgtgtagtgtggtttctggtttaggatatggtacactttgtatttgtcactttaatctttgtcgtcgttatagtttaataacttttacttggcccnnnnnnnnnnnnnnnnnnnnnnnnnnnnnnnnnnnnnnnnnnnnnnnnnnnnnnnnnnnnnnnnnnnnnnnnnnnnnnnnnnnnnnnnnnnnnnnnnnnnnnnnnnnnnnn

SEQ ID NO: 125060 - DNA, 960 bp, Arabidopsis thaliana
  unsure (1)..(960): unsure at all n locations
ccggctctatccaactcttatagggaaggctggtccgcctgcaggtcccggcccggaattcccgggtcgacccaggcgtccggttcttcctccttgctcaagcaaacctctttttatatattggctctctctctctcagatccgattcaagctttccgatttgcgatggacggtggagcggaaggatctcagcagcctcaccttattctagccaacaagctcttcctcctcactcatccagatgttccagacatcgagaaagtccagctcaagtctgaggttttggatttcatcagatcccatggtatggctcctttgtacgaaaccctaattgcctcttcggtgctggatttggatcaaagcttgttagagtctatgcgggccgctaatgaagaggagcttaagaagctcgacgagaagattgcagatgcagaagaaaatttgggtgaaagtgaagttcgtgaagctcatcttgctaaggctctgtatttcatcaggattagtgataaggagaaagctttggagcagctaaaactcactgaagggaaaactgttgctgttggacaaaaaatggacgtggtgttttatacgttacaacttgcttttttctatatggactttgatctggtatcaaagagcattggccaagcaaaaaaattgtttgaagagggtggtgactgggagaggaagaaccggctaaaggtctatgaaggtttgtactgcatgtccaccagnaattttaaagaaggctgccagctttattcctgggttctatatcaaccttcacaacatatgnaatttttnccatatgaggcctccatattctncaccgtcctgncaaggatcataactttngccagagttccctnagnaaaaggccgttgttgacctnggtcttacccgncttggnggntncntnccttntnggtnttnnccctgatgggcccncaagggttttta

SEQ ID NO: 125061 - DNA, 593 bp, Arabidopsis thaliana
cttattttttttttacatacacaaaaaaaaaaaaccatcggacctgaaatctttgtaagctcttcctccttgctcaagcaaacctctttttatatatttgctctctctctctcagatccgattcaagctttccgatttgcgatggacggtggagcggaaggatctcagcagcctcactcttattctagccaacaagctcttcctcctcactcatccagatgttccagacatcgagaaagtccagctcaagtctgaggttttggatttcatcagatcccatggtatggctcctttgtacgaaaccctaattgcctcttcggtgctggatttggatcaaagcttgttagagtctatgcgggccgctaatgaagaggagcttaagaagctcgacgagaagattgcagatgcagaagaaaatttgggtgaaagtgaagttcgtgaagctcatcttgctaaggctctgtatttcatcaggattagtgataaggagaaagttttggagctatttaaatttacttgagtgtaaactgtatgttgtggactaaatattggcgttgcttttttttcatttcttttcacttttttttattttt

SEQ ID NO: 125062 - DNA, 364 bp, Arabidopsis thaliana
gcatgatttgggcttagctttttcgtccccaaatattgcgcttcatcgagattgctagggtttctcctcttcgatcttcgctgctcatcaacatctattgattcaattttcgtgctattgtttccctctctgatttcgtaatcggaaatttcgtctcgattcgattcattaggttccatcactcttttctgatcggtgaaaggaggagaagacctgttgttttcttatgtaagtgattctgatattcgttatctgttggctggtttgatgatgaataagcggaaaggtagtgaaactgagggttgggagaatttaccagatgatttagcatgttcaactgcatcacgatcatccaacttcatgt

SEQ ID NO: 125063 - DNA, 422 bp, Arabidopsis thaliana
cacaaacataacaacaaaccaaaaaaaaaaagtatgagagagagagagagcaaatctccatcatcatcatggactcgtctccaaacgacggcgtacaccaaccgcttctccatcctcaaccatctccatctccgccggagtcaaccaacggcgagctagaaactgtcctctccgacgtagaaactcctctgtttctccgcctacgtaaagccaccataatcgaatcaaagcttctctttaacctcgctgcaccagccgtcatcgtctacatgattaactacctcatgtccatgtctactcaaatcttctccggccatctccgtaacctcgaactcgccgccgcttctcttggtaacaccggtaatcaagtcttcgcttacggtcttatgctaggcatggtgagtgcagtggagacgttatgt

SEQ ID NO: 125064 - DNA, 712 bp, Arabidopsis thaliana
  unsure (1)..(712): unsure at all n locations
gcacgcctgcaggtaccggnccggaattcccgggtctacccacgcgtgcgcactaatactctatagtttgtttttgttcttcttataatctttatattttcagcaaacgaaagggaagtgtgtcagaaatctcagagggtgagaatcccaatgaggatcttacccgaacctcgaggttcggttccgtgtcttctccttcttgtgtcggttctcttatcagcgactctctcactcgctcgtgtcgtcgaagttgtcggttacgccgagagcaagatcaaaaccccccatgcattttcaggacttcgagtgacgatcgactgtaaggtgaataaaggccattttgttacaaaaggttcgggaaacattgacgacaaaggaaagtttggtcttaatattcctcatgacattgtctccgacaacggagcgttaaaggaggagtgttacgctcagcttcacagcgcggcgggaacaccttgtccggctcacgacggccttgagtccaccaagatcgtgtttttatccaaatccggggataaacacattttgggtctcaaacaaaatctgaaattttcaccggagatttgcgtttccaaattcttctggcctatgcctaagttgcctccttttaagggctttggtcatcctttccctttacctccacctttggaacttccaccgttttctcaagaagccatgtccacctaaatacagt

SEQ ID NO: 125065 - DNA, 969 bp, Arabidopsis thaliana
  unsure (1)..(969): unsure at all n locations
atgatactccagctctctacgactcactattgggaaagctggtcacgcctgcaggtaccggtccggaattcccgggtcgacccacgcgtccgagacaaagaagaagacaagagtcaaacttgaaggcgacaatcggagcttccatggccgtttcttcctctttcaccaaaccctaatttcaatttcatcttcttttcccttctttctcaccggaaaatggatctctccgacatccgaaacaacaacaacgacaccgccgccgtcgccaccggaggaggagcaagacagctagttgacgcatctctctcaatcgttcccagatctacacctcccgaagactcaacactcgcaacaacctcatctacggcaacggcgactacaacgaagcggtcgactaaagaccgtcacacgaaagtcgacggaagaggacgtcggattcgtatgccggcgctatgtgcagctagagtttttcagttaacgagagagttaggtcataaatccgatggtgaaactattgaatggcttcttcaacaagctgagccagctattgttgctgctacaggtacaggaactattccggcgaactcttctactttaagtgtttcgttacgaagtagtggatcgactctctctgctccgccgtcgaaatcggtgccgctttacggtgctcttggattgactcatcatcagtatgatgaacaaggaggcggcggtgtgtttgctgctcatacgtcgccgcttttagggtttcatcatcagcttcaacaccaccagaaccagaatcagaatcagaatcagaatcaagatccggtggaaactattcctgaaggtgagaatttctctaggaaacggtatagatcggttgatttgtctaaagaaaacgatgatcggaaacagaacgagaataaatctttgaaaggaaagtgaacggcggggtcctangggnggngcnattttnggcggttnccc

SEQ ID NO: 125066 - DNA, 736 bp, Arabidopsis thaliana
aacacaaagcctggtagcctccatccgcggttgcgcgggccgctactagaaactatgtggactcccccgtttctgcttgcaaaacattttcttgagaaagaagccactttctctatcactctctactatggatcttgttgagagtttttcccatggcgatcctgatactccgcgtttcagtgacgacttcggttctggctctgcttgctctactccgttcgttagcgctccgtctaggcccggccgcggtcctccgcctggttatttcttcagtgcaccgtcgagtccgatgcatttcttccttcgctctgcttcttcttcatcggagaatcctaaaaagcttgacacgtcttcatgcggcgactttgagtttgacttgtcgccctgggtggcttccagcagtggttcctttaggcggtgtttccatgactgcagctgaagagctcctctctcatggccacatcaagccaatgaacccttcttcgcatcttaagagaacctaaaacctatctccggttctagatctggagaacgaggaagaacacgaccattattataccaaaccccaccgtgagatgaagcgtgggagataatcttaaacttataagcagttctgatcacccggaaagcccgaataccaccttttccggttcctaatacgccaatttgtattaaattggtgacccccccccaagaaaatggccatactaaaggatatttatagttcccccccgcc

SEQ ID NO: 125067 - DNA, 829 bp, Arabidopsis thaliana
  unsure (1)..(829): unsure at all n locations
aatacgactctcttagggaaagctggtacgcctgcaggtaccggtccggaattcccgggtcgacccacgcgtccggtttttcagcttcaaaccctccttgcactctccgcttccctccgttacctttacttctctattgcttagctcgaaaaatggcatcttcagccgcccaaatccacgttctcggcggaattggattcgcttcttcttcttcttccaagagaaatctcaatggtaaaggcggtacctttatgccgagaagtgccttcttcggtacaagaaccggtcctttctccacacccacttctgcttttctcagaatgggcaccagaaatggcggcggcgcttctagatacgcggttggtccggttcgtgtggttaacgagaaggttgttggaattgatttgggtacgactaactctgcagtagctgctatggaaggaggtaagcctacgattgtgactaacgctgaaggtcagaggacaacgccttctgttgtggcttacacgaggagtggtgataggcttgttgggcagattgcgaaaaggcaagctgttgttaatcccgagaatactttcttctcagtgaagaggtttattggtaggaagatgaacgaggttgatgaagagtctaagcagggttcttacagagttgttagagatgagaacaataatgttaagcttgagtgtcctgccattaacaaacaattngctgctgaggagatttcagctcaggttctaaggaaactngnggatgatgcatcaagattcttgaccacaaagtaaccaaggctgtcatcactgtgcctgcttacttcaaccgatcacag

SEQ ID NO: 125068 - DNA, 607 bp, Arabidopsis thaliana
cacattgaaggaactgttccgtttctggccaaagaaagacgaggaagaaccgcccaagtggacatctcgacttttctacacagtagtggctattgttgttgtcatgctgcttaggcgtcatgcccctgatgaagctgctcgggccaggtaccaaagaaggatgtccaacatcattgatgatgtccttgagtggtcaccaaagctagcactttctggtttgatggagaatcagcaacctgtaaacatcacagatgcggcaaacaacttcctcagattcagcaggaggtcccgaccagactgaagaggtcgacctagatgaaactcaaggcgaggacctagacgaaacgcaaggcaaggaggaagctgaaggttggactgactctgatcttaaaacataaaaaaaccaaaatatagaaacgaaagttcattgtaacaataagtcaacttaagtgaccaagacgaggtgagttctttataagaaagtcttgaaagattttgtggtactccattactcctttacattttgacacaatctggaatttagctctcaatcacagttttgtattccaaacttcaattccagctaagaaatgtttagttaagatag

SEQ ID NO: 125069 - DNA, 641 bp, Arabidopsis thaliana
  unsure (1)..(641): unsure at all n locations
gnnggcncntncagctntcttttttttnnnaagngnccccctcanaggcaacnggaactaaaaacgttgatatccgaacttcgcggccgcgccaccctccgtgagtgctcgctccggcgatattctctgcggcttgtttcgcaaaaaatccgtcgcgccttttcgttttactcagcctgtctatcgtacgtcgctgtgtccaagtttcgttgctgttcgagccatggcagagtctcagactgctcagaggaatcagccgcaatcctcaggctcctctggggagaagcaagctttgatatctctatctgacaagagggacttggcttctcttggcaacggtctgcaagaattgggatacactattgtttctactggaggaactgcctctactttggagaatgctggagtctctgtgaccaaagtggagaagcttactcattttccagaaatgcttgatggccgtgtgaaaactttgcatccaaacatacatggtggtatcctcgctagaagggatgtggagcatcatatggaagctcttaatgagcatgggattggtacatttgatgttgtgggtggcaatttgtacccgctcaatgaaaaagtactgcccaggnggncaagtttngggngggtnaaaattt

SEQ ID NO: 125070 - DNA, 391 bp, Arabidopsis thaliana
atgctggtgttccaatgtcttccatcatcgaacaaggctatggagtgggtgatgtcatttcccttctatggttcaaacgtagtctacctcgttactgtacaaaattcattgagatatgcataatgctgtgtgctgatcacggtccatgcgtctccggcgctcacaacaccattgtaacagcaagagcaggcaaagacctcgtctcaagtcttgtctcaggtttattgaccattggtccccgatttggtggtgccattgatgacgctgctcgatacttcaaagacgcgtgtgacaggaatctcacaccttatgaatttgttgagggaatgaagaaaaagggaatccgagtccccgggattggacacaggatcaagagcagagacaacagaga

SEQ ID NO: 125071 - DNA, 388 bp, Arabidopsis thaliana
aaccggttgggttgaaaaaccggtccttttctgcgaatgattgtctgcgaaaaacccgtgttctgtctcgatccaagttgggacaagaaggagacttcccggggagtggttctgacaatgctttctcctctgaggatgatatggaggattacacttgtatcattgcacatggtcctaacccgaaaaccactcatatctatggtgaccgagttttagagtgtcacaagaatgagttaaagggagatgaagataataaagagaagtttggttctgtgttcccctccgataacttcctcggcatctgcaacttctgcaacaagaaactcggaggtggcgacgacatatatatgtatcgagagaagtcattttgcagtgaagagtgtcgttc

SEQ ID NO: 125072 - DNA, 788 bp, Arabidopsis thaliana
cggaccggaatttccgggtcgacccacgcgtccgatctgttacgtacgaagagctaagggaacgcctccaccgcaaaattgatgagctcaaaggtggtcgtggaggttcagatagaccaagaagcaatgaaagaaggaagaagaatctgccaaataagagaaagagggatacagtttctgaggagaagactgtggaggagattaagtcagcagataaaggtaagggtaagttggatgtggaggaggctgctaaggaccttacatttggttatgtcaagattgatgacgatgaagaacacggaaaagagaaaaagaaacgaaggctttcaaaggcaagagaacttgaaagggctatgaagttagaggctgcaaagaaggatccagaaaaaggtgatgtaattgcaaagaagcactcatggaaggcagctacaagcagagcagctggtatcaaggttcatgatgacccaaagctattgaagcaaagcatccacaaagacaaaaagaggcaagagaagaacgcagagaagtggaaagagagaattgaagggcaaccaaagttcaaggtggagaagcagcaaaagagaacaaggaatattgccgttagattgaacagaattagatgcgccaaatcgccaagagagaaaaaaaagctcctgcgtccttggttttggagggccgcaaagaaagggttttttccttgaaaggggggaaacctagaaatttaagtgtttcccccaacgccctttttggtggtctccaaccattttttaaccgaatggtggatccct

SEQ ID NO: 125073 - DNA, 388 bp, Arabidopsis thaliana
cttcttcttcattcttctcaatatctcctaatgggttttggtacatcttcttcttcatcttcttcctcagctctgaaatggctaggtttcgttactgccgtttgggtccaatccatctccggcaacaattacaccttctcaaattactccggcgcactcaaatccttaatgaacctcactcagttagaactcaacagtctctccgtcgctaaagacgtcggaaaagcattcggaatcctcgccggacttgcttccgaccgtctttcaactccggtgatcctcctcatcggttctttcgaaggtcttcttggttatggtgtacaatggcttgtcgttagccgcacgattcaacctataccttattggcagatgtgtgtgtttctctgta

SEQ ID NO: 125074 - DNA, 314 bp, Arabidopsis thaliana
aacgcgtgggttcgtcgccttaatttcgttcaagcttcgacagaagtcccagatttgttcacctttttcggtattgaatcatgatgaattcaatcttcggaaagcgaaaaactcccgcagaacttctgcgggagaacaagcggatgctggataagtctatcagagagatagagagggagagacaaggcctacgaacacatgaagggagacgcattagcgagattaggaagaccgcagagcagggccaaatgggagctgttagagtgatggcaaaggatcttagaagaacgcgggaccagattgagaagttttac

SEQ ID NO: 125075 - DNA, 726 bp, Arabidopsis thaliana
cggacgcgtgcacaaaaggggggcgccaccattaaaatctctcgatctctatctgcgaaatttcacggtaggtatttgaaatggcgacagttccaggacaattgatctgggagatcgtgaagaacaacaactgtttcttggtgaagcagttcggtagaggaaactctaaggttcaattcagcaaggagactaacaacctcaccaacgttcactcttacaagcactctggtcttgcaaacaaaaagactgtgaccatccaggccgctgacaaggaccaagctgttgtgctcgccaccaccaagaccaagaagcagaacaagcctaagctctctgtcaacaagtctatcctcaagaaggaattccccaggatgtcaaaggctgttgctaaccaggtggtggacaactactacaggccggacttgaagaaagctgcacttgctagactcagcgccatcagcaaaggtctcagggttgccaagtccggtgccaagcaaagaaacagacaagcttaagcttcttctttcacaatctgttttttttgaagtaaaagattttgttgaacaggttttatttaagttgttgctttgaagttgaaccataatgctattctcctttttcattatccttattataaaggagttagaagtttatcttgttatgcttgatgtttctggtgtgcttgtgttacattttgttagatccttttatcgaatcaagaactttctt

SEQ ID NO: 125076 - DNA, 642 bp, Arabidopsis thaliana
  unsure (1)..(642): unsure at all n locations
cggcccccccttaggtcgactgtatcgataagcttgatatcgaattcgcggccgccgaaatttcacggtaggtatttgtaatggcgacagttccaggacaattgatctgggagatcgtgaagaacaacaactgtttcttggtgaagcagttcggtagaggaaactctaaggttcaattcagcaaggagactaacaacctcaccaacgttcactcttacaagcactctggtcttgcaaacaaaaagactgtgaccatccaggccgctgacaaggaccaagctgttgtgctcgccaccaccaagaccaagaagcagaacaagcctaagctctctgtcaacaagtctatcctcaagaagggattccccaggatgtcaaaggctgttgctaacccaggtggtggncaactactacaggccggnctttgaagaaagctgnactttgctaagactcaagggcatcagcaaagggctcaggggttgccaannccggtggcaagcaaaggaaccaggcaagcttaanttcttctttnaaaanctggttttttttgnaggnaaagttttgtttnanaggttttttaaggtgntcntttnangnacccaaatgantcncttgggnggaatnctaaccngggggcctntttta

SEQ ID NO: 125077 - DNA, 818 bp, Arabidopsis thaliana
caaacgaaaaaaaacatggccatctctttcctctgtttttgcctcattaccctcgcttcgttaatctttttcgccaagaagattaaacacttgaaatggaatcttcctccaagccctccaaagtttccggtcatcggaaatttacaccagattggagaattgcctcacaggtcacttcaacatctcgccgaaagatacggacctgtgatgcttcttcactttgggtttgtccctgtaactgtggtctcatcaagagaagcagctgaagaagtgctcagaactcatgacctagactgttgcagcaggcctaaacttgtcgggacaaggttactctcgcggaattttaaagatgtctgttttacgccatacggtaacgagtggaaggcgcggcgtaagtttgccctgcgtgagcttttctgtttgaaaaaggttcagtcctttaggcatatccgagaggaagaatgtaactttctggtcaagcaactgtcggaatccgcggttaatcgctctccggtcgatttgagcaaatcacttttctggctaaccgctagtatctttttcagagttgccttaggacagaattttcatgagagcaattttatcgataaagaaaagatcgaagagctcgtgttcgaagctgagactgccctagcaagtttcacttgttctgatttcttccctgttgccggacttggatggcttgttgattggttttccggacaacacaagagaactcaacgatgttttttacaagctcgatgctcttgttcaacatgtcatagatgatcatttaatccaggaagatcaaaagagcacga

SEQ ID NO: 125078 - DNA, 542 bp, Arabidopsis thaliana
  unsure (1)..(542): unsure at all n locations
agctctcctacgactcactatatggaaagctggtccgcctgcaggtaccggtccggaattcccgggtcgacccacgcgtgcggtgtttctaaggcttgcagagagacgtgctattagtttaggggacagtcctacccttgaacgaaggcgagacgacctaagtcaagcagttttacaggccaagaatgcgagtaatagcgatggtttagtaggttctgctcaaggtgtttctgacagtggattgcttgatctgcttgaaggaaaactcgcagttcttcagttccaaattaagatcagggacaaacttgaagctatagcttccaattttgagtcctcggttgccatgcaggactctgaccagaacgggcaagtactggatggtgattctagtgatgataccaacttagcaaatgcagcaaatgaaatggccatggaggtctcctcggaacttaaaagtgtaacacagctggataatgagtatgctgtcccatttgagctctgggagatctgtctggaaatgctntactttgccaactattctg

SEQ ID NO: 125079 - DNA, 532 bp, Arabidopsis thaliana
gtccacgcaagactctatactgagtcatattacgacagaaggggacacaaaacacaaaaaagaacaaatatggagaaacaaatctctctattgctctgtctactcctcttcatcttctcaatatcatcctctctccatgaaaccgaagctcgaaaacacaataaatataaacccgcaccgatcatgagcctagtcccaagaactctctacgaccaaatcttcatccacaaggacaacaacgcatgccctgcaaaaggtttctacccctatgaagctttcgtggaggctacaagatccttcccgaagttcgggagcgtaggaaacttttggacaaggcgacgcgaagtggctgcgtttttggcgcagatatctcacgagacaacaggtggttgggccacggcaccagacggaccatatgcgtggggattgtgttttaaagaggaagtgagtccacagagtaattattgtgatgcttctaataaggattggccttgtgtttctggcaagtcttacaaaggaagaggtcccattc

SEQ ID NO: 125080 - DNA, 532 bp, Arabidopsis thaliana
cggcttgtgtcctctctatcttactagttataaactaaagccggtcaggtgcctctttagctcttccccaccactccgattcatctttatcctctctctcatctcgtccgttgttgcataagtgctatggatctcgcgtcgaatcttggtgggaagatcgataaatccgatgttctcaccgccgtcgaaaagtatgagcaatatcatgtcttccatggaggaaacgaggaagagagaaaagccaattatactgacatggttaataagtactatgaccttgctactagcttttatgagtacggatggggagaatccttccattttgcacaaagatggaaaggagaatcgcttcgagagagtattaagcgacacgagcactttcttgctcttcagcttggcatccaaccaggacaaaaggtactggatgtaggatgtggaattggtggaccgttgagggaaattgcaagattcagcaattcagttgttaccgggctcaacaataacgaataccagatcaccagaggcaaggaac

SEQ ID NO: 125081 - DNA, 605 bp, Arabidopsis thaliana
  unsure (1)..(605): unsure at all n locations
tgcnnnnnnnnnnnnnnnnnnnnnnnnnnnnnnnnnnnnnnnnnnnnnnnnnnnnnnnnnnnnnnnnnnnnnnnnnnnnnccacgcgtccgatttgcttcactgtcttgtcgattctgcttctccaaaaaatttcttctttagttctgagtttttctctgttctgaaaaaccccaaattttgttttttttggccattcaaaatttcagaagaaggcgatacaaaatcgtctttgaattctctttgtttatgatctgttcaagtaaaggaacggtcgtaattgctactagaagctcatttcccagattactaaaccggattcaaaatcgaaatgatgttccgattagtgtcatagctactcgacgatcatcaatgtcggtggaggcgtttccgatgaggttaaaatcatcacagaagaagaggaagatgaacattggttgcggtgtttccccttcttcgccgacgacgacggtggtagatgaggaagtagccattaggcggaaattggcattgacacgggttgtgaaggataacgcgggcgatggaagctccggcagagagtgctcgctatgcaccgaccacagaggtgacaccttcttcactgag

SEQ ID NO: 125082 - DNA, 420 bp, Arabidopsis thaliana
ggaccacaaagttttctactttgcaatttagataaatctttctatccactttgagaataaattaagggctctcaatttcgaattctgcttctccaacgaaaaaaacgaaatctttaatggcgaagaaaggaggagcgacgctagctgaggatgcaccatggcgagtttcgtcaggaagaccagtgcctaagatcagtcgctctccggttttatctatctctcaaaacccagaaaccgattacgccatttccgtcatgaagcatccgaatcctgtgggaggtgggtttgcgatggaagctgtacttgaatccgcaggacctgaatgcgttgttcctggccaagtaacacctcttcggttacttggtgttaaggtgtggcctgttgaaattgatcttaaattcttgggaccaatgggaaaag

SEQ ID NO: 125083 - DNA, 548 bp, Arabidopsis thaliana
  unsure (1)..(548): unsure at all n locations
ttcgtttctcgtcggcgttttgagagacatgtgggaatcgatttgcctaacgcttgcggccaccgccggaaacaatatcggcaaggttctccagaagaagggcactattatcctccctcctctctcccttaagcttaaggtgttaagagcatatgctgaaaacaaaccatgggcgttaggttttcttatggacattgttggtgctttgttgatgctgagagcactatcacttgctcctgtgtcagttgttcagccagtctcgggatgtggccttgccattctttccgtcttttcgcatttttatttgaaggaagtcatgaatgtttttgactggattgggattactgttgccggcattgggaccataggnagttngggctggtggtgaaggagcaaagaagcantcaattaaatatntgtntttccagtttnctgtggctaagcattgggtttttgcccacctngtttgaacnacctnaaatgcggtggnttcanaattttnaaaacgccaacccaagggngnagnacctnggggaaaataaagnngg

SEQ ID NO: 125084 - DNA, 784 bp, Arabidopsis thaliana
gcccccgcgccccctttgaagccctttggagaccctctggcagtaccggtccggaattcccgggtcgacccacgcgtccgcaaaaaacaaaaacagagccaggaataatgtcagtcttcctctgtttcctctgcctcttaccccttatcttaatcttcttgaaaaatctcaaaccatcgaaatggaagcttcctccaggcccaaagaagcttccgatcatcgggaacttacaccaacgccgggaattacatcccaggaacagtcggaatctttccgaaaagtacggaccaatcgtgtttctccgatacggattcgtccccgtggtcgtgatctcgtcaaaagaagcagcagaggaagttctcaagacccacgatcttgagtgttgtagccgaccagagacggttgggaccagagcaatctcttacaactttaaagacatcggattcgcaccgtgcggtgaagattggagaacgatgcggaagctctcggtggtcgagctcttcagctcgaaaaagcttcaatctttcaggtatatcagagaggaagagaacgacttgtgtgtcaagaaactctctgatttagcttcgagacgatctttggtgaatcttgagaaaaccctttttactttagtcggaagtatagtgtgtaggatagggtttgggataaatctccgtgagtgtgagttcgttgatgaagatagcatcgatgatcttgtgcacaagtctgaagatgtcataaggaaattctatcttctctgatttctttcccgaataatgggtaggct

SEQ ID NO: 125085 - DNA, 984 bp, Arabidopsis thaliana
aaaaccgggccgacccacgcgaccggaaacggaaagagggcaaagcccttcttctttttgttcgagaaggagctgcagcctcagatagggattcttttgatgcccagtcgacaaaccaagcgactttattttaaccaacgagattttatcatcagggttggttaattggtttgctatttgacaaggatcattgatcaccctcttgagaacatctcgagctttcccagatctatctgagctcctgggtttataaatcgcttccttcacatatcgatgggagcagtggctgcgtgggttgctacagagaacacagatcaactgccgccagtctgaaggatccaccttccaattccattgctcgaccgtgtaagaaaccgagtgtctctgaagatttctggtcaacacgcacagttgatatggacaacatcaccttcccttcacaggggagcttatcatcatccaatcagacttttgattctcaatctgctgctagaaactctaatgctcctcctgaatatgtaaaatcaaggtcttcttctttggaatcagacacgggagcgttgggtgggaaaggataaacccaacaacccggtggatcacaatcaaggagccaagttaaattggaacacagcaacgtatgatagcttgctggggagcaacaagaaatggtggattttctagtggacatttgggaacaagaaggtctatatgactgaacaagacttggaagacacacacacatactggttcgggcatttctgatttattttttcttttcggttttcttttcttttctcaaagcccttgttgttaccacttatcatcttccatttggagttgatcgagaatactgggaaatgtggcttatacgttttcaccgtaaatgagaaatatcctttgtttaccatctttcagtccaaaagaattaagagcaatatctcggtttgactaatcagtatcttaatatgggacatgttcttgtgt

SEQ ID NO: 125086 - DNA, 781 bp, Arabidopsis thaliana
  unsure (1)..(781): unsure at all n locations
aagtcaaatnatttcaaagcgaaaggaaaaggagaaacgtaaagagggcaaagcccttntncttcttgttcgagaaggagctgcagcctcagataaggattcttttgatgcccagttgataaaggaagcgactttattttaaccaacgngattttatcatcaggntcattgatcaccctcttgagaacatctcgagctttcccagatctatctgagctcctgggtttataaatcgcttccttcacatatcgatgggagcagtggctgcgtgggttgctacagagaacacagatcaactgccgccagtcttgaaggatccaccttcccaattccaattggctcgaccgtgtaagcaaaccgagtgtctctcgaagcatttctggtcaacaagcacaagtttgatatgggcaacatcaaccttcccttcacaggggagcttatcatcatccaatcagacttttgattctcaatctgctgctagaaactctaatgctcctcctgaatatgtaaatcaaggtcttcttctttggaatcagacacgggagcgttgggtgggaaaggataaacccaacaacccggtgggatcacaatcaaggngccaagttaaatttggnncacagcaacgtatgntngctttctgggggggaacaaggtntttcccaacccattccttttaccgaaatggngggtttntngnggcatttgggcaagaggcttttgctnacaggcttggggnccanatttggtcgggttttgttatttcctttggttnttnttccna

SEQ ID NO: 125087 - DNA, 461 bp, Arabidopsis thaliana
gtgaattagggattcgagaatgacgatgaactcgcttccgaggagatttgggaagaatcatggctatttggatcgagattatcgaaacggaagacgatctggttcagattccgatgaagaattgaagggattgagtcacgaagagtataggaggcagaaacggcttaagatgaggaaatcagccaagttctgcttttgggagaacacaccgagtccacctagagatcagaacgaggattccgatgagaacgccgacgagattcaggacaagaacggcggcgaaagagatgataattcgaaagggaaagaaaggaaaggtaaatctgactcggaatctgaatctgatggtttgagatctaggaagaggaagagtaagagctcgaggtctaagcgcaggagaaagagatcttatgacagcgattgtgaatccgaagggagtgagagtgattccgaagaggaag

SEQ ID NO: 125088 - DNA, 421 bp, Arabidopsis thaliana
aaaaaaaaaaactttatttctctctacaaatttcatttgttccattttctcaattttagaacttaagaaacccaaaaagcaaatttttagtacattttctggtttaacgaaagtaattaatttgtgtgttttccatcaaaattccactggttttctttagaatttttttatctctctttaagacatgaactgtctgttcttgttcaaatcaaagaaacccagaaagcaacagaaagacaacaacaagaacaaaagaaaaggtaaagagttgttacaaaactcagctccagaactgacgaatcggagtgaaacgtcttcgtttaatctccagacaccaagatcgttgccttctccaagaagtatcaaagatttgtatacagagagagaacaaaatcttagggttttttcttacgaagaactc

SEQ ID NO: 125089 - DNA, 737 bp, Arabidopsis thaliana
ctagactaaacacagacaaggtaaaaaaaaaaaaaacagcttaccaaatttttctcctccttcacggcaaatcgtcaccgccacattatctcccaaactaagaatctagggttttctaagggtttttaatcttcgtccttctctccttctccagttttaggtttcagtttcagatggcgagatacgctgctggtgcggttgattgtcctggttctcccaaatctgtgcgaatcgttgtggttggtgataagggcactggaaaatcaagcttgattgttgctgcagccactgattctttccctcccaatgtccctcctgttttgcctgattacaagttgcctattgaattcttccctgatggtatacccgtcaccattgtcgacacttcctcgaggccagaagatagggacattgttgctgaggaattgaagcgcgcagatgcagtagttttgacatatgcctgtgatcgacctgagactctcgaacgtttgagtgaatactggcttccagagcttcggcgattagaggtaaaaattcctattatcgtagcaggatgtaagcttgacttcagagacgacaataaccaggtcagcctcgaacaagtgatgtcacctataatgcagcagtttcgggagatagagacttgtatcgagtgttctgccctgaagcaactccaggcacaagaagttttctattatgcacaaaagactgtccttcacccaacaggacctctgttt

SEQ ID NO: 125090 - DNA, 533 bp, Arabidopsis thaliana
  unsure (1)..(533): unsure at all n locations
ngctaaaggtctcaatctctcagtcaaaaacanaaggtctctcctttattaaactatctatcactaactagaagaagagattaccgcgcgtccgagaagatgttgtttcaggtgggaggtgaaggcacacgccccaccttctttgagatggctgctgctcagcaacttcctgctagccttcgcgccgctctcacctattccctcggcgtttttgctttgagacgatcgtttctccataagattttagactatgaggatgaattctttgctgctctgatgcttattcttgaaggacacagcttacgaaccacagatggttcctttgctgaatcattgtatggtttaaggaggaaatcagcgagattgagattgaggaaagacagtgccaggaaggattctagcgaagaagttcaacattctggtttagagaagcgtcagagaatcctttctgttgtgtttctggttgtgttaccgtatttcaagtcaaaattgcatgctatatataataaagaaaggagagctagggctccggg

SEQ ID NO: 125091 - DNA, 521 bp, Arabidopsis thaliana
cccacgcgtccgcccacgcgtccgaccaaacacaaaaatggtactcttcactttatcaacaacttcttcttcttcttctaagctaaaacaacattcacaccaaagcttctcagagtctctgagggaacacactatcgaagacgctgaatccatcatccatcgatggatttcaccagaacacgtccactcttcttccttctgcttcatctcatcgctattttcaaccgaaaaccgcgaagaagcgaaacgattcatcgacgctgttaccaccttacactccggtatgataagactaatctcagtgaatccaacgtcaatgaaactcgttaaagcagagaatctaatgcgtatctcaatgactcatctctccaaagagttttaccgcattctcaaatcgaaccgacgttatctcgaccccgaaatccgtctctatccggtccttcaaaagcttccgattccgactccgattccgattccaacaccatggatgatctaaagatgatcgcggattgtatgatatc

SEQ ID NO: 125092 - DNA, 550 bp, Arabidopsis thaliana
  unsure (1)..(550): unsure at all n locations
nnnnnnnnnnnnnnnnnnnnnnnnnnnnnnnnnnnnnnnnnnnnnnnnnnnnnnnnnnnnnnnnnnnnnnnnnnnnnnnnnnnccacgcgtccgatcaaacttaatctttcacccataatgggtttacaaatattatgtttatttcgcaaaatattcatcatcacatacatcttccatgcctcgtgttctccagataaagttttatgaaagatgcaacattagcaccaatgttcgctcggtttgattacataatcatcggaggagggacttcgggttgcgcgttagccgcgacgctatctcaaaacgctagcgttttggttcttgaacgcggtggtgctccctacgacaatcctacggcaacagatatcgaaaactttgccaccacactctcaaacacatcaccgaaatcttggtcgcaactttttatctccgaggacggcgtttacaacactcgtgcacgcgtcctcggtggtggctccgtgttaaacgccgggttctacacacgtgcgggagatgagtacgtgaaggagactgagtggaagactgatg

SEQ ID NO: 125093 - DNA, 468 bp, Arabidopsis thaliana
aacaaagagaaaatggcaaaggctatcgtttccatcttccggtggtcttttttcatcttcctccttagtcatttccgatgtgcccggagatagaagcgcaaggtaacgagtgcttgaaagaatacggaggtgatgttggtttcggcttttgtgcgcctcggatatttccgacgatttgttacacaagatgccgtgagaacaagggagctaaaggtggaagatgccgttggggacagggcagtaacgtcaaatgcttatgcgacttctgcggcgatactccacagtaaaatctaaagcaatcgctaatcaatgcactaagcctgccatagacgcaattattatacacgttgtctttacgtacattcacaagttttagtcatggtttgtgtaataaatgaatgtgaatggtctaacccaagtgatgtaatgtgaaatcagaaaataatgaaagtgtgacttttgctacta

SEQ ID NO: 125094 - DNA, 878 bp, Arabidopsis thaliana
  unsure (1)..(878): unsure at all n locations
cccacgcgtccgcccacgcgtccgagtaaactcgtcaaccactgcgcccatgacctcccaacgatactcttcccttatattcttcctcttccttcttcctttctgcgatccaaaccttcaaacacatctccggtagatatgaaaatccactcttgcctctccgccattcttctgttcctcttcttctctgcttcttccgctaaacaaaatgttcggacagagcgaatttcaggaagtgctggtgatgttttggaggatgatccagtgggaaagcttaaggtttatgtatatgagcttccaagcaagtacaacaagaaattactgcaaaaggatcctcgatgtcttacacacatgtttgctgctgagatttttatgcacaggttccttttatctagtcctgttcgaacgcgtaatcctgatgaagctgattggttttacacgccaatttatcctacttgcgacctcactcctaccggcttgccattaccgcttaaatcgccgcgtatgatgagaagttcgatacaactaatctcatcaaattggccttattggaatcggactgaaggagctgatcacttctttgttgcgccccatgactttggagcttgcttccattatcaggaggaaaaagccattgaaagagggatacttccactactccagcgtgccactttggttcagacatttggccaaaggaaccatgtctgtttggacgaaggctcgatcactattcctccttttgcacctncacagaagatgcaggcccattttattccttcagatattccacgctctatctttgtctacttccgcgtgttattttatgatgttaacaacgaccccgaaggtggatattatgcatgaggtgcaagagcagc

SEQ ID NO: 125095 - DNA, 719 bp, Arabidopsis thaliana
  unsure (1)..(719): unsure at all n locations
nnnnnnnnnnnnnnnnnnnnnnnnnnnnnnnnnnnnnnnnnnnnncccacgcgtccgcccacgcgtccggagaaagtcgacgctacttcttcttccgcccgctttcttctggatctgattcggatccatcactctctctttctctacatcaatttgttttctcagatcttcatctttttttcgtatacctgtatttgtcgaccttttctctcaatcactaaaccctcaaatcctttttttggattataagattgcttctctgattgtaattgctttgatgtgtatcagttgacttgtgaaaagtctgcgagtgacttcttcctgtttacacatcagctactccagaatctctcagattcttaaaagcttaaatcttttttcgactttgattgtttctgtgcatcgctttgacggatgtggaggaaaaaaggggtgtcttgatgaaatgagggatgttatcaacgttaatgaaactcttgagtgcttgtctgtggccgtcttcttcctcgggcaagtcctctgattcaactggaaaacaagatggattgctttggtacaaagactttggtcagcacctcgttggtgaattctccatggcttgtgttcaaaccaacaacttggctttgaggatcagaagccaagtttgagtcttgggcccttttgaagttacttcttgaacttcttgggtcccttaatgggaaaacttttttaatttgggg

SEQ ID NO: 125096 - DNA, 449 bp, Arabidopsis thaliana
cttcttctcttcagagaaaactttgcttctctttctataaggaaccagacacgaatcccattcccaccgatttcttagcttcttccttcaatccgctctttccctctccattagattctgtttcctctttcaatttcttctgcatgcttctcgattctctctgacgcctcttttctcccgacgctgtttcgtcaaacgcttttcgaaatggcgattttggattctgctggcgttactacggtgacggagaacggtggcggagagttcgtcgatcttgataggcttcgtcgacggaaatcgagatcggattcttctaacggacttcttctctctggttccgataataattctccttcggatgatgttggagctcccgccgacgttagggatcggattgattccgttgttaacgatgacgctcagggaacagccaatttggccggagataa

SEQ ID NO: 125097 - DNA, 762 bp, Arabidopsis thaliana
cgacagaaggggactcaaaatggtttttatctatcttccgacaaaattccgtgcttcattgctcttctccacaagacaacatttctctggctcagaatcgacgccatggaaatgtaaagaagaaacaaagacgagctctcaaatccagcagcaatggcttttcttctttctaatctatcatctccgtcaatccatcttcaaaccggaaaatacccaaaccttaaacccattttcagtcaatctctatcgtcttcgtcttctgttagctacgaatttgtagaagagaatctatctacactctctctattgagcatccagtctcctcctcttaaagacacgcaagttcagacaagacacagttcgcaagataagcataataaccacgacagagatgaattctatatcaatcttggtgtcgctgtccgtacacttcgtgaagatttgcctttgctcttcactagagatcttaattacgacatctacagggatgatataacatttgtggatccgatgaacacattcactgggatggacaactacaagattatcttctgggcactcagatttcatgggaagatattgttcagagatatctcacttgagatcttcagagtatggcaaccatcagagaacatggttctcatcaggtggaatctcaagggtgtgcctagagttccatgggaagctaaaggagagtttcaaggcacttccccgtataaactcgaccgtaatggcaaaatctatgagcataaagtcgataac

SEQ ID NO: 125098 - DNA, 442 bp, Arabidopsis thaliana
aaaaaaaaaaaaattcttcttctactaacttacgcttcaatggcgactccaactccatctctatctcctcctccattgaatctctggataatcttatcagaatcaaaacgaatcatcaacgcacactcacgtcacttcctagctctctccgttctcttcctcctccctctctgcttctccatcacagtttacccttccgtcttccttctcatcaccgatcaatcatccgcttctcacaacaccgtctctctcctccgcggcggactccacaacaacaaccgatgatgacatcgataccaaaaacaaacggtcttacttggtaatcgggtacatcgttgttatcaccgtcttcaatctcttagctattggatcaatcgcttatagtgtgtttcaagggatctatgggagacctgtgaaagtgaactctgcagtgaaatcgagc

SEQ ID NO: 125099 - DNA, 556 bp, Arabidopsis thaliana
acgactcactatttggaaagctggtccgcctgcaggtaccggtccggaattcccgggtcgacccacgcgtgcacccacgcgtccggttgtttgaattcgagaagttcccggaaacatccctccgtagaaaattcatcggaggcgacttgaggagaaacacggaagctccgatctcacaatttcgcgacgaactcgcttcagcgattgtttctgttcatccgattaagatgaacggaggtccttccggtttcaataatgctccggtcacgaaagccttcgtcatcgcgactgctcttttcactgtgttcttcgggatccggggaggttcttccaagctcggcttatcttaccaggatatttttgagaagtttcggatttggaagttaattatatcggcttttgccttctcgtccacaactcaattgctttctggcttatatttgctatacttcttccgagtctttgagagacagattggttcaaataagtattcggttttcatcttcttctctggatttgtatcactaatactagagaccattttgttatcattgac

SEQ ID NO: 125100 - DNA, 410 bp, Arabidopsis thaliana
aagaccttaagaaattaaggatttttgatgtgaaatcgtaattaatgaggaatgcaccacaaaattgggtttattatttataattaaaactatgcggtaaatattgtaacaaaatgaaaggatttgggctttatttgcaataatgttattatatgaattagtttaatgcataatgctgataaattattaaaatcagcaaccaataatgaaagattctggattgttctgtttcagctgattatttacattagatatctgagttgttgtttgaattcgagaagttcccggaaacatccctccgtagaaaattcatcggaggcgacttgaggagaaacacggaagctccgatctcacaatttcgcgacgaactcgcttcagcgattgtttctgttcatccgattaagatgaac

SEQ ID NO: 125101 - DNA, 557 bp, Arabidopsis thaliana
atgatactccagctctctacgactcactatatggaaagctggtccgcctgcaggtaccggtccggaattcccgggtcgacccacgcgtccggcttttgtaggaatccctaagcttaaagtctctattattctctaatctcttcttcgccgacgacttctctcaccaaggcgacgttttgatcaggcgatgatgagtatcccaatggagttaatgtctatcagaaaccctaattccaccttgctctatagagctcactctcgtccgcctgtgaagctctgtgctccacctcgttctctcctccctagccgacgccatttcagtgctcctcgagctgttgtttcgtatccaggaatacgtttcggctttacctcgccggaagtcttgcttaatcgatccgtcgttgctttcgctgcatcccacgaggattcgggagaatcaggtgttgaggtggggaaggagaagagtgatatagatgttgaagatgatacatctaaggaagcatggaaacaaactcttgagtcttttaaagagcaggtatcaaagatgcagagtgtgt

SEQ ID NO: 125102 - DNA, 793 bp, Arabidopsis thaliana
  unsure (1)..(793): unsure at all n locations
nnnnnnnnnnnnnnnnnnnnnnnnnnnnnnnnnnnnnnnnnnnnnnnnnnnnnnnnnnnnnnnnnnnnnnnnnnccacgcgtccgcttcttcttcttctaaatctcaccttttttcagattctgaaaattttggtttcattcttctccgagactctcttatggccgagttgactcaggccgatgttgtatactctcctcgttcgtttcaagtgtggaagactttggtgaactggctcgcttttttctatcagatctttcttcagatccttcgtgccgttggttatcatcctcttctctcttcttctgctaaagcctccgctgatggttttaaacctttgccggctattgagttgcttgatagggcttccgaatctcccaccaccgttgaaatcgcagccacgacgacttctgattcctgcagcgatggtgcacgcagccgttttcagaggcttaaggtagttctagacttggatgagacgttagtttgtgcatatgagacgtcgagtttacccgctgcttttacgcaaatcaaagcaatttgaaggccggattaaaagtgggtttgaagctggcagtgcttatcaacagacaaaggaatatgttggggagcctaagatcaattatgtcacggtgtttgtaccgtcctgggattgcacgagttcctagggcaacccagcgagtttgcagatcttattctgtttacagctggtcttgaaggatatgcgaggccgcttgtggataggatagataccaggaaagtgctcaccaaccgactttatcgaccctcaacag

SEQ ID NO: 125103 - DNA, 439 bp, Arabidopsis thaliana
cttgctctcttttttccgaagaatctggcacagagagaagatggcgagtggcctcgaggatatcgtgaacgagaatgttgatttggagaaaatacctattgaggaagtgttccagcagttgaaatgcagcagagaaggtttatctggagcagaaggagaaaacagactccagatctttggccccaacaaactcgaggagaagaaggaaagcatgttactcaagttcttgggttttatgtggaaccctctctcttgggtcatggaagcagctgcaatcatggctattgccttggctaatggcggtggaaagccaccggattggcaagattttgtcggtatcgtttgtcttttggttatcaattcaactatcagttttgtcgaagaaaacaatgctgggaatgctgctgcttgctcttatggctggtcttgctcccaaaac

SEQ ID NO: 125104 - DNA, 553 bp, Arabidopsis thaliana
aatacgactcactctagggaaagctcgtacgcctgcaggtaccggtccggaattcccgggtcgacccacgcgtccgcggacgcgtgggaagaaactttctacataatataaaaagtcacacattctctctattaattaaacatgttgcttgttgcgtttgtgactcttttggtagcagtagctttgcagccactaccgtcagtgttgtctttggacgttcaccttcttcggcagctagccgcaaagcacaatgtgacatcgatacttgtgtttggagattctagtgtcgatccagggaacaataatttcattaaaaccgaaatgaaagggaattttccaccttatggtgaaaatttcatcaaccataaacccaccggtagattatgcgatggattactcgctcccgattatattgcggaggccatgggttaccctcccataccggcttttcttgatccatccctaacccaagctgatctaactcgcggtgcaagttttgcctctgctggttctggctatgacgatctcacagctaatatatcaaacgtatgga

SEQ ID NO: 125105 - DNA, 375 bp, Arabidopsis thaliana
ctcagaagaagtagaagaagaagcttctccgatctctcttctctcatctcgatcttgaaatcaagcgatctagaagaatctggcaaaatcttagctgacgaatgttgggattgcaacgagaaacatcctcgatgtataagagaacgtcatcgagagattattctccgatgatcgacgtcgaagacagctcaggtcttttagagaatgatgtggacaatgaaatggaaactacaaatccttcatggaagtgttctcttccgcatgttctagtggctacaatttcgtcgtttctatttggttaccatttaggagttgttaatgaacctcttgaaagcatttcgtctgatcttgggtttagtggtgatacattagctg

SEQ ID NO: 125106 - DNA, 960 bp, Arabidopsis thaliana
  unsure (1)..(960): unsure at all n locations
cnnnnnnnnnnnnnnnnnnnnnnnnnnnnnnnnnnnnnnnnnnnnnnnnnnnnncacacgcgtccgcccacgcctccccgcccgtattaaatcacttgttgttgtctttcttttttcaaaccttggaagcaaggaattcttttttgatgatttaatcgaaagcttcttcctccaaacaaacatcaatggcggtttatcctaacgttaatggcgataagaagcactggtggttcactcacagaaagcttgttgataagtatataaaggatgcaacaactttaatggcaagtgaggaggcaaacgacgtcgcttcagctcttcatttactagacgcagccttatctatctccccgcgtttggaaactgcgttagagctcaaggctagatctctcctcttcctccgtcgtttcaaggatgtcgccgatatgcttcaggattatatccccagtcttaaactcgacgacgaaggatccgcttcttctcaaggctcttcttcctccgacggtatcaaccttctctccgacgcctcttcccctggctcctttaaatgcttctctgtttccgacttgaagaagaaagtcatggcaggcatttgtaaaaaatgcgacaaagaagggcaatggaggtatgtggtgttgggtcaagcttgttgccatctaggactaatggaggatgccatggttctcctacaaaccggtaaacgcctcgcctccgccgagttccgtcgccggagtatttgcttggtccgacgatagctttccttctcctctccgaatcctcctctgcttcttctccaccaacccgagagcgggaacttaacccatctccttcggtcaacataaaggtttttctccgtggttgggccgtnaaaatttgccgttttnnacgttgggctntntcngggtnnancccgaaatttccaaaatcgngggtggccntgccttngctaaaggttntttg

SEQ ID NO: 125107 - DNA, 649 bp, Arabidopsis thaliana
  unsure (1)..(649): unsure at all n locations
gccnnnnnnnnnnnnnnnnnnnnnnnnnnnnnnnnnnnnnnnnnnnnnnnnnnnnnnnnnnnnnnaaatcgcttccacgcgtccgagcatatcaccaattgggaagacagataaagtcactgatctgggtataacagttaagcttccagaatcttcgcaacctgatgattctctggatagagtgtcaggcgaggatcatgaaccgtctgctactgaacagagtttcacagatagtagaatacaagaaggtcctgaaggttccctccaatcagagatgaagagtgataaacctagacgaggtagaggtagaggtagaggtaggggtaagtctgttagaggaagatcgcaagcaacaaaagctgtgtccagagattcaaaaccatctgatggggaaactccaaggaagcggcaacgcgaacagacttctagaatcacagaaagtgaacaggcagctggtgatagtgatgagggtgtagacagtattacaactggtggacgtaggaaaaaaagacagatagcttgtccagtctctcaaacgcctggacaaacccgatatcagctcaggagacataggaatgtnnggaccgaagaaattanacccccgcctcaaggggtggccactgaaacaagaacgtgtcatgatgatatc

SEQ ID NO: 125108 - DNA, 461 bp, Arabidopsis thaliana
acacaaacactctagtctcctctctttttctctgccttctctcttttatttattccctccttccctctggtcctccatcagatacaacaacagagactccaagatggccggaggaggaggagagctcacggcggctttgttgaaaaagacggcggagaacggcggagaagagaaggatgagttagggttgaagcaaaaggtttggattgaatcaaagaagctatggattgtggcggcgccagcgatcttcacgagattctcaacgttcggagtttcaataataagtcaatctttcatcggccatcttggtcctatagagttggctgcttactctatcaccttcaccgttctcctccggtttagtaatggtatcttgttaggtatggccagtgcattggaaacactatgtggtcaagcctacggagctaaacaaaatcatattgctcgggatcttacctcca

SEQ ID NO: 125109 - DNA, 891 bp, Arabidopsis thaliana
  unsure (1)..(891): unsure at all n locations
nnnnnnnnnnnnnnnnnnnnnnnnnnnnnnnnnnnnnnnnnnnnnnnnnnnnnnnnnnnnnnnnnnnnnncccacgcgtccgactctagtctcacacaaaaagaaaaacaatagctaatttaatatcttcttgtgatcatcacaataccacattgatccaaggccagttaaaatctctttcaccatgaagataaagattatgagcaaaacacatgtgaaaccaacaaaaccagtactagggaagaaacaattccacctcaccacatttgatcttccttaccttgctttctactacaaccagaagtttctactctacaagttccagaaccttctagatctcgaggaacccacattccaaaacgaggtcgtggagaatctcaaagatggtttgggtttggttcttgaagacttctatcaactcgccggtaagctggccaaggacgatgaaggagtcttccgtgttgagtacgacgctgaagactcagagatcaacggcgtagagttctccgtcgctcatgctgctgacgtaaccgtcgatgatctaacggctgaggacgggacggctaagttcaaggagttggttccttacaatgggatcttgaacttggaaggacttagcagaccactccttgctgtccaggtgaccaagctaaaagatgggcttgcaatgggccaactttcatcacgcagtcttagacgggacatccacgtggcattttatgagctcatgggccgagatctgtcgtggagcccaatccatctcgactcaacctttccttgaccgatcgaaggcgcgtgacacgcgcgtgaagctcgacctcactgctcccaaggaccccaacgagacctccaacggcgaagatgctgccaatccgacggtggaaccgccgc

SEQ ID NO: 125110 - DNA, 1050 bp, Arabidopsis thaliana
  unsure (1)..(1050): unsure at all n locations
acggacgcgtgggtttggtttctgcagcatcaacaacagccgagccctgttcgttagggttttcggtttttgttagcttttcttcttcttcttcttcgtttccttccacctgaattgttgtaaccatggcggagaaagtatcggaggacgttatgcttctacacggtgacctcgatttgaaaattgttaaggctaggaggttacctaacatggatatgttctcagaacatttgcgccgtctcttcaccgcctgtaacgcctgtgctagacccaccgataccgatgatgtcgatcccagagataaaggcgaattcggtgataaaaacatccgtagccaccgtaaggttatcaccagcgatccttacgtcaccgtcgtcgttcctcaagcgactctagctcgaacacgtgttttgaaaaactcacaagagcctctttgggacgagaaattcaacatttctatagcgcatccgtttgcttatctcgagttccaggtcaaagacgacgatgttttcggtgctcaaatcattggcacggctaagatcccggttcgagacatcgcatcgggagaacgcatttctggttggtttcctgtactcggtgcttcgggaaaaccgcctaaggcagaaactgctattttcatcgatatgaaatttactccgtttgaccagatccatagctaccgatgtggaatcgccggagatccggagcgtaggggtgttagacggacttatttccctgtgaggaaaggaagtcaggtgaggctttaccaggacgctcatgttatggacggaacgttgccggcgattgggttagataacgggaaagtttatgagcatgggaagtgttgggaagatatatgttatgctatatctgaggctcaccatatgatttacattgttggttggtctatcttccataagattaagcttgtttagggaacaaaaagttccaagagctaaggntattaccctttcgggaatttctcaaatacaaaatcccccggagggttcgccgtgttctnctccatngggtgggaggcttccatgnttg

SEQ ID NO: 125111 - DNA, 783 bp, Arabidopsis thaliana
  unsure (1)..(783): unsure at all n locations
gcggaaaactttcccggttaagcataattcgccatggatgctcaacaacggagaactgatattcctcgtgcaccaccggtcggagaacccggtggcgatatatcttcgattctcattgctttcggtgttttcgctgcaatcgccgccttggttatgtttccctcatcgttggtgcaccaagttcctgaaggtcacgttggagcgtattggagaggtggtgctcttctaaacataatcacagagccaggttttcatctgaagctgcctttcataaccaactatgagcctgttcaagttactctacagacagatcaagtgagggatataccatgtggtaccaaaggaggtgtcttgattacctttgagaagatagaagttgttaatcgactacgtaaggattttgtttatgacactttgcttaactatggtgtgaactatgataacacatggatttatgacaagattcatcatgagatcaaccagttctgtagctctcattcacttcagcaagtctacattgacatctttgaccagattgatgaacgaatgaaagatgctcttcaagctgattgtacacgttatgctccaggaattgagattcttagtgtgcgtgtcaccaagccgaaaattccagagagtgtaaggcgtaactttgagcaaatggaagaggaacgtaccaaggtcttgattgctattgagaaacaaagagttgctgagaaagaggcacaaggaaatattgtcctttgggngcttnaggccccctttagaaagttttnttcanca

SEQ ID NO: 125112 - DNA, 1023 bp, Arabidopsis thaliana
gattcaagagtatttatatcgacatgtcgttttaagtagcataccgaaacaacttcactggtgagggcttaaactagccaacgaacactcgataaacgcagcggcgcgtctccagcttccagaagctgagcttgtccctatgttggtagacaacaactactttcactttgtcttggcttcagacaatattcttgcagcttcggttgtggctaagtcgttggttcaaaatgctttaagacctcataagatcgttcttcacatcataacggataggaaaacttatttcccaatgcaagcttggttctcattgcatcctctgtctccagcaataattgaggtcaaggctttgcatcatttcgattggttatcgaaaggtaaagtacccgttttggaagctatggagaaagatcagagagtgaggtctcaattcagaggtggatcatcggttattgtggctaataacaaagagaacccggttgttgttgctgctaagttacaagctctcagccctaaatacaactccttgatgaatcacatccgtattcatctaccagagttgtttccaagcttaaacaaggttgtgtttctagacgatgacattgtgatccaaactgatctttcacctctttgggacattgacatgaatggaaaagtaaatggagcagtggaaacatgtagaggagaagacaagtttgtgatgtcaaagaagttcaagagttacctcaacttctcgaatccgacaattgccaaaaacttcaatccagaggaatgtgcatgggcttatggaatgaatgttttcgacctagcggcttggaggaggactaacataagctccacttactatcattggcttgacgagaacttaaaatcagacctgagtttgtggcagctgggaactttgcctcctgggctgattgctttccacggtcatgtccaaaccatagatccgttctggcatatgcttggtctcggataccaagagaccacgagctatgccgatgctgaaagtgccgctgttgttca

SEQ ID NO: 125113 - DNA, 538 bp, Arabidopsis thaliana
  unsure (1)..(538): unsure at all n locations
attccggggtttcgtggctttcactcgtaaccggaagagaggacaagatcctccactaatttcacaaaaagctcatctttttattcgttttcgaatcgattcgttatctgggttcaagtatcaaattctctggtttcgtttttcgtttttgatttgttctctctctttcggaaaaagtttggttttttttttgtttgaaacaatgggaagaggcaagttcaagggtaaacctaccggccaacgccgattctctagtgctgctgatattcttgctggcacatctgctgcacgtcctcgatcattcaaacagaaagaagctgagtacgaagaagatgttgaagaagagtcagaggaggaatctgaagaagaatccgaagatgaagctgatgtgaagaagaaaggaggtggcttgaaacttggtttattccggagtttgnttaacccctaaacaggnggtaanggccnaaaaggccctttgnaaagncaaaaaggcccccganggctnagntaaaanccncttggnccccnnaagggcggg

SEQ ID NO: 125114 - DNA, 557 bp, Arabidopsis thaliana
  unsure (1)..(557): unsure at all n locations
atgatcctgccagcannnnnnnnnnnnnnnnnnnnnnnnnnnnnnnnnnnnnnnnnnnnnnnnnnnnnnnnnnnnnnnnnnnnccacgcgtccgattcattgttccagtacttcatcgtagcgccgctcctctcttgtccagactccagaagattcaatggcacccaagaaagacaaagttcctcctccgtcctctaaacccgccaaatccggtggcggcaagcaaaagaaaaagaagtggagcaaaggaaagcaaaaggagaaagtgaacaacatggttttgtttgaccaagcaacttacgacaagcttctctctgaggctcccaagttcaaacttatcactccttctatcctctctgaccgtttgaggatcaatggatcgcttgctagaagggcgatcagagaattgatggctaagggaacaatcaggatggtctctgctcactcaagccagcagatctacactagggcaacccacggctaacttcctttcgaaggttttagttggttccttgtattttacctaatgtctttatgaaccattatctttctagaat

SEQ ID NO: 125115 - DNA, 492 bp, Arabidopsis thaliana
  unsure (1)..(492): unsure at all n locations
gaacgaaatgtgaacccttgtctcgcctaggttggatgggcgtgcttcgttggaaagcatggatccgcctaggctgtcccgagtgtgagcgaggtgtgagtgtcgcccatgggcatcgacaccttgcggctaggaactggaacgagacgggtagcaaagatttcgagtagcacttcatactaccgtgggttttttaaaccttcccctagttttgttgatgttattccgagaattagcaaaccgtaacgaagatgttcttggcaaccatcttttgatgggagtccggctgttcgaaagccggccaagggtgatgaacgaaatgtgaacccttgtctcgcctaggttggatgggcgtgcttcgttggaaagcatggatccgcctaggctgtcccgaaggtatcttttcgcttgtactgccgnnnnnnnnnnnnnnnnnnnnnnnnnnnnnnnnnnnnnnnnnnnnnnnnnnnnnnnnnnnnnnnnnnnnnnnnn

SEQ ID NO: 125116 - DNA, 521 bp, Arabidopsis thaliana
  unsure (1)..(521): unsure at all n locations
atagctatagacagacacacccaaaccctagatctaaccccagccgtcagatcagattgatcgggcaatcgcttctagaccgttggaatcaagcaatggtagaggtagaatcgtatttgtgggtatctagaagaggcgttaggattgtctccaagctgggtgttttttcatcttgatggccaactaatcgaatctcctactctaaagatatttttgtttatttctgtcatgtgtgatttggtcgcgcgtacgggtcgtctccagcagcggtacgaggatggctctcgtctcgtcgccgggtgtattccgtttaggtatgtaaattctgacaaagatggtaattctgaatctgggaaagtgattcaaggtgttgatgatcagctcgtctagtggacctggacttttgtttcccaagggaggatggggaattattgagacagtcagggnggttcaccgagggaacaattgaagaagcagnnnccctgggntnttaangggttttttggggantnttgggtnaa

SEQ ID NO: 125117 - DNA, 516 bp, Arabidopsis thaliana
  unsure (1)..(516): unsure at all n locations
caaaaaacctctcactgcaaagtgccaacaaacaacaagtcttcaccttcttcttcttcttcttcttcaaaatctcttgtacgcaaataatccatgagaaactagggtttaacttgagatctctcttccgaagtattaccatcaatggcgacttcttcttcttcatcgtcgtctctgcttttaccaaacatcaatttcaactcaagacaatctccaacaatcactcgttccgtttcaatcgccgggatcttcttacccagaaaccgattaagctacaatcacaatctccggattcgtacgagattaatcagagcttctaaagacgataatgtcgctgttgaagatcgtgataatgcagtgaagatcaacggtgattacaacggaagtgcacgtttaaacggtaacggctctgcgagaaaatccgtcaacgggggattttaaacgggaggtgctccgtttgaacggtaacggnnaggttttgggtgaagtattttancgggaaggnttnncggnngg

SEQ ID NO: 125118 - DNA, 429 bp, Arabidopsis thaliana
aattcaccttctctctctctcctcctcatctcaccgccggcgttacgccggatctccggtgacttttgttgagcttttttgttgattcatgattcgatatagagaaaaaagaatttcctatttcagctctttgttcttagatttatctttttgtttgttcttatggataaaggattaggttgggggattaaaagagtagtttttgtttggttgtgagattacttgactttgttaaggggataaattaggcgactttgtagggacactgtaccgaaaaaccctagttctgatttatccatggaagtatcatagcacttactattgtcggctttacttcttctacttttgtataatccttttttttttcttaggttctgtgattagatattttttttgtgtgggtttagttgttaatctgatcatggattt

SEQ ID NO: 125119 - DNA, 488 bp, Arabidopsis thaliana
catggcttcgcttcctgttcaattcacgaggaatcaaatctcttcaccgtttttctctgtaaacctccgccgtgagcctagatctttagtaacagtacactgctccgcaggagaaaacagagaaaatggtgaaggtgtaaagaagagtctctttcctcttaaggagcttggatctatcgcttgcgcagctctctgtgcttgcactcttacaatagcttctcctgttattgctgctaaccagagacttcctccgttatcaacagaaccagaccggtgtgaaaaagcatttgttggtaacacgataggtcaagcaaatggtgtctatgacaaaccactggatcttaggttctgtgattacacaaatgatcaaactaatctcaaaggcaagactctctctgcagccttgatggttggggctaagtttgatggtgcagatatgactgaagttgttatgtcaaaagcttatgctgtagaagcaagctttaaag

SEQ ID NO: 125120 - DNA, 430 bp, Arabidopsis thaliana
cacacgcgtcagaactttatcacgctattctcaaacaagcaaagaaccttaaccaaaaagaaaacgtctacggagacatatggagaggaaacatcacttcgtgttggtgcacaacgcttatcatggagcctccatctggtacaagctcaagcccctccttgaatcagccggccaccgcgttactgctgtcgaactcgccgccttctttatcgacccacgaccaatccaagccgttgaaaccgtcgacgaatactccaaaccgttgatcgaaaccctcaaatctcttccagagaacgaagaggtaattctggttggattcagcttcggaggcatcaacatcgctctcgccgccgacatattttcggccaagattaaggttcttgtgttcctcaacgccatcttgcccgacacaacccacgtgccttctcac

SEQ ID NO: 125121 - DNA, 439 bp, Arabidopsis thaliana
acgtcaactccccctcaaaaccagcagaaccagtctcactcgatccttaatccaccatggcaacgacttctcgccggtttaccaccggtttattcgcctcgatcacctcggtcaaatcccattccgcaaaccgacctcaatccatctccctaatccgtcgaaaccacatcgatcatcgtctaccgttgatcgttccaagttccaggcggtggattatccaagcggcgagatcctgggatggatttgacgacggagctgacgcggagattaagaagccaggcgcgtatggttacgcgatcggcgataacgagatcgaacggagcagtagtagtactgtccatgtgatcgacggagagcatgttaagacggcggagatagtgatatgggcggcggttacggcggcgtttggcgtcggaaacagagtgatgtataagctcgc

SEQ ID NO: 125122 - DNA, 566 bp, Arabidopsis thaliana
acggacgcgtgggtatcaatcgaatcagacattgacgaggagctttggtcgtaatccgaggaagagattaaaatcggaaagtgcgaaaatgccggtcatggagaaattgaggatgttcgtggcgcaggaaccagttgtggctgcttcttgcttaatcggcggtgttggactatttttgcctgcggttgtgaggcctattctagactctctcgaggcttccaaacaagttaaagctcctccacttaccgatgtgattgctggtgtcacagggaagaaacagagttaaaacaagcaatgacttcccctgttttcttacattcagatgatccctattccttttttgtcttttactctctctattcacaatgaataagccagactcatttgtttgttatgaaacttaatataaaggcatgtgtgtacactcacttttgttcatcacttgatcagatgtattcatttcttaacaacaaatgaaaaaagcttgaaacttttcttgccaaaaaaaaaaaaaaagggcggccgctctagaggatccaagcttacgtacgcgtgcatgcgacgtc

SEQ ID NO: 125123 - DNA, 767 bp, Arabidopsis thaliana
  unsure (1)..(767): unsure at all n locations
nnnnnnnnnnnnnnnnnnnnnnnnnnnnnnnnnnnnnnnnnnnnnnnnnnnnnnnnnnnnnnnnnnnnnnnnnnnnnnntcccccacgcgtccgctaactcttattatcctctcccaattgaatttttcaaagcttgaagaaactagtagtagtaatcttcgctctgtcgtctgatccatttttttatcaaaatctcgagctaaaaactcttgtgtttaagcaaatgaaatgcactgtgtttgattttgagatttgatggaagtgaagctgtttcttcgaagaatttcatggaggttttagttccctgttgtaggctctttgttagtaatcttagattcgtcatttcctgggtttcgttgattctattgttattgggagcgtctgatgcgaaagctaggcatcatcatcatcatcatcaacgaatagcagtggaaggtgtggaaagtggagtagcttcacactcgtgtattcatgatcagattatagagcagaggaagagaccgggtcggaaagtgtattcggttactcctcaggtttatcatgagccaaggagtgttgaaaaagcttttcatcataatggaagggttttgcttagtgtttttgatgaggagaaggatgtgaaacaacctattaggatttatttgaattatgatgctgttggtcattcgcttgaccgagattgtcaacgagttggcaatattgtgaagttgggtgagcctccttcaagtacttttcctgctgttcctgcttgtaatcctaatacaaa

SEQ ID NO: 125124 - DNA, 1656 bp, Arabidopsis thaliana
  unsure (1)..(1656): unsure at all n locations
nnntgatttgccagcactaatacaactcatttagggaaagccggtacgcctgcaggtaccggtccggaattcccggtgtcgacccacgcgtccgaaaaaaaaacaaaaaaataataaaacaaaaaaatatcttttttttttctaataaaaaaaaaataataaataaatatgagatacacaaatgtgtccattttattaggcatgttggtgatctttgtttcaccaatggtgttcgcagatgatttgacaccaatcccagagggcaaaccccaagtggtgcagtggttcaatacccacgttggtccattggctcaacgtaaaggcttagatcctgctctcgtagctgctgaggctgctccacgtatcatcaacgtgaatccaaagggaggtgaattcaaaacactaacagacgcaataaagagcgttcccgcagggaacacaaagcgggtgatcataaagatggctcatggtgagtacagagagaaggtcactatcgacaggaacaaacccttcattacattgatgggacaacccaatgccatgcctgttatcacctacgacggtaccgccgccaagtatggaaccgttgatagcgcctctctcattatcttatccgactatttcatggccgttaacatcgtcgttaagaacactgcgccggcaccagatggtaaaactaagggagcacaagctttatccatgagaatctccggaaactttgctgctttctacaaactgcaaattctacggtttccaagacacaatctgtgacgatacaggaaaccatttcttcaacgattgttacgtcgaaggaacattcgatttcatcttcggaagtggaacctctatgtacatgggaacacaattgcacgtggctggagacggtattacagtgatcgcagcgcatgcaggaaagagcgcacaagaagatactggatactctttcgtgcactgcaatgtgactggaactggaggaggaatctatttgggaagagcatggatgagccaccctaaggttgtcgatgcctacaccgagatgaccagcgttgtcaaccccaccggatggcaagcaaacaagactcccgcacatgacaaaaccgtgttctacggagaggtacaagtgttcaggcccaggatcacacgaagccaagagagtgccattcacacaagacattgacgacagagaagctaaccgtttcctatccctcggctacatccaaggatccaagtggcttctcccaccacccgctttgtaaactcttcaatatcaagtctaaaatcatattttgcacatatatcacttttaacaaaaaaattatttttacatatatcacttttagcaaactttttctttacctagtcgtcactacttacgaccctatgtatgcttttatgcaaagaaccgagaggtcgataatctgagaaacatataagcaatcgagacttagccgaaataaattgattttctctctcaaataaaagtataaatggtaccctatatttatgtagcttttctaaaatagccgaggttttatttaattatcaaaaaagtcttttaagtctaaaagtaaaaaaaaaaaaaaaaaaaagnnnnnnnnnnnnnnnnnnnnnnnnnnnnnnnnnnnnnnnnnnnnnnnnnnnnnnnnnnnnnnnnnn

SEQ ID NO: 125125 - DNA, 619 bp, Arabidopsis thaliana
  unsure (1)..(619): unsure at all n locations
nnnnnnnnnnnnnnnnnnnnnnnnnnnnnnnnnnnnnnnnnnnnnnnnnnnnnnnnnnnnnnnnnnnnnnnnnnntcgacgcgtgcgcggtcgcgtgggaaaaaaacgaaaaaaaacaaaaaaaaataataaaacaaaaaaaactttttatttttaaataaaaataaaataaaaaatgggatacacaaatgtgtccattttattaggcctgttgatggtctttgttacaccgatggtgttcgcagatgatgtgacaccaatcccagatggtaaaactaagggagcacaagctttatccatgagaatctccggaaattttgctgctttctacaactgcaaattctacggtttccaagacacaatctgtgacgatacaggaaaccatttcttcaaggattgttacgttgaaggaacattcgatttcatcttcggaagtggaacctctatgtacttgggaacacaattgcacgtggttggagacggtattagagtgatagcagcgcatgcaggaaagagcgcacaagagaagagtggatactctttcgtgcactgcaaggtgactggaaccgggggaggaatttattttggaagagcatggatgagccaccctaaggttgtt

SEQ ID NO: 125126 - DNA, 885 bp, Arabidopsis thaliana
  unsure (1)..(885): unsure at all n locations
aatacgactcactttagggaaagcacgtacgcctgcaggtaccggtccggaattcccgggtcgacccacgcgtccgcccacgcgtccggtgatgataccggaaaccatttcttcaaggattgttacgtcgaaggaacattcgatttcatcttcggaagtggaacctctatgtacttgggaacacaattgcacgtggttggagacggtattagagtgatcgcatttcatgcaggaaagagcgcanaagaaaagagtggatactctttcgtgcactgcaaggtgactggaactggaggaggaatctatttgggaagagcatggatgagccaccctaaggttgtctatgcctacaccgagatgaccagcgttgtcaaccccaccggatggcaagaaaacaagactcccgcacatgacaagaccgtgttctacggagagtacaagtgttcaggaccagggtcacacaaagccaagagagtgccattcacacaagacatcgacgacaaagaagctaactgtttcctatccctcggctacatccaaggatccaagtggcttctcccaccacccgctttgtaaattctttaatatcaacctattaaaattaaaattaaaacgtaaaactaaaattaaaacttctacttacatccttttttcaccgaaatatgtttatcggtgtatattatttttgtcgatattttctttcaatttccagaaatcctctcttctttaaatatcatggaggagttgagatttatgtaattttggtttcattataataaaatgttgtttccgttcaaaaaaaaaaaaaaagaaagggcggccgctctagaggatccaagcttacgtacgcgtgcatgcgacgtcatagctcatctatgtcctaan

SEQ ID NO: 125127 - DNA, 487 bp, Arabidopsis thaliana
cgcctgcaggtaccggtccggaattcccggttcgacccactgcgtccgataatacatctccatgaccaaaatctccacttctaccgtggtaatttcgatggttttgaaagcggatatgagcagcgtcgcaaggagatgaacaaaaaatttgatgtctacgacaaacagatgaaagcagcgaagaggactggaaaccggggtcaacaggagaaggtaaaggacagggccaagtttactgctgcaaaagaagcatccaagagtaagtcaaagggcaagacagtggatgaagaaggcccagcaccagaagctccaaggaagtggagagattacagtgtggtgttccacttcccagaaccaactgagctcactcctcctcttctgcagttaattgaggttagcttcagctatcccaacaggccagatttcagactctcgaatgttgatgtaggtatcgatatggggacacgggttgcgatagttgggccta

SEQ ID NO: 125128 - DNA, 506 bp, Arabidopsis thaliana
cgcctgcaggtaccggtccggaattcccggtttttttgattgtttaggataaaggagattcctttacctcgattttttgcttttcatttttattaaatctccgatttttgatttttgggggaagaagtagaagaagaagatgattaagttgtggatgatgacttctctccaactcgcggagctcttcgtgagctctattgtgcatttgctttatgggttttatatatttagctccgccgttgccggagatatctctcagacgttgaatgattacttgtttaagtccaatgtcgctttcggagaaaccggtcaaaatcaaaccaatgttgagggtttgcctcctattgtattggttcatggcatctttggatttggcaaaggagattaggaggcttatcttactttggcggtggctgagaagaaagatcgagagggttcttgtccctgattccggcttcctaccacacctccctgcacggctcgggatttctcttcttatccgaaag

SEQ ID NO: 125129 - DNA, 1025 bp, Arabidopsis thaliana
  unsure (1)..(1025): unsure at all n locations
tgacaacagctatcaagacaactggtttgacatctttcccagattatttggtcttggacatgcggaaatttgttatggaggaaggctgggtgccaaagaaacttgatgtatacattgatgttccggatgttattgatatcagccacatgcgtagcaaaggactccaacctggggaagaactgttgccagatggcgttccagaagaagtgatggaatcagcgcagcccgtggcaaatgaggagatagttgcacagctagtctcaatgggatttagccagcttcactgccagaaagctgccataaatacttccaatgctggggttgaagaggcaatgaactggttactttctcacatggatgatccagacatcgatgcaccaatctcccaccagacatctgacattgatcaatcaagcgttgataccttactctccctttggttttgctgacagatgttgctccggaaggcactaacaagcctcgtggaggagacattgcagaaagcaacagactgggtattcaacaaccctaatgcatctgtttcagacatggatgtatcctctagcaattcagcgcagactccggctcaaagtggattaccagatggaggagggaaatacaagctgtttggaatagtaagtcacatgggaacatcagtgcactgtggtcattacgtggctcacatattgaaagaaggccgctgggtaattttcaatgacgacaaagttggtatctcgactgatcctcctaaagacatgggttatgtctacttctttcagcggcttgattgattcgatggagccagtttcagagtctccacctcctccttattatttaaattgnngcttttaaggtcgatagggtttttaacatttggattgaggtgacccatgtaactagtttcggttccaaaatcttacatgtggattagtaaatttggttcacttgatgattttatctgtggaacttcgtcacaaaaaaaaaaaaaaaaaggcaaccgctctagaggaccaagcttcgtacgc

SEQ ID NO: 125130 - DNA, 465 bp, Arabidopsis thaliana
gaaaatggaagagagaaaagtgaagagaattatcatgttccctctaccgtttacagggcgcttcaaccctatgatcgagcttgctggaatattccacaaccgtggcttctccgtcacgatactccacacttctttcaacttcccggatccttctcgccatccacagtttacttttcgaactatcactcacaaaaacgaaggagaagaagaccctctctctcaatcagaaacttcttcgggtaaggacctcgtcgtccttattagtctgctgaaacaatactacaccgagccgtctcttgcagaggaagtaggcgaaggagggacggtgtgttgtttggtctccgacgctctatgggggaggaacacggagattgtagcgaaagagattggagtgtgtacaatggtgatgaggactagtggtgcggcaacgttttgtgcttatacagctttccctctccttataga

SEQ ID NO: 125131 - DNA, 506 bp, Arabidopsis thaliana
cgcctgcaggtaccggtccggaattcccgggtctgacccacgcgtccgattcaattagactcgccttgtggaataaaggcattttcgacgagaatttctgtagagatgaggccttcttgtgcttcttcctcctcctcctctgcttctccttcgttgaggctatcgtcagtgacagtggcggtggacaaagccccgcccgagcttctccgcactcctgattggaccatcatcatcgccatctgcgattctctcaattctaatcgctggcaatgcaaagatgccatcaaagccgtgaagagaagatcgcagcacaagagtgtctagagttcaattactcactttaaccgttgttggaggcaatgctgaagaactgcggtgacttttgtgccttctaatatagctgaagaaacatcttctttgaaactatggttaaccttcgccaggaaaaaacggtgattttgaacttaaggaaccaaccccttagatctcggctgggatccctggaa

SEQ ID NO: 125132 - DNA, 763 bp, Arabidopsis thaliana
  unsure (1)..(763): unsure at all n locations
cactcccatttgnnnnnnnnnnnnnnnnnnnnnnnnnnnnnnnnnngtgccgtaccggttccgaattcccgggtcgacccacgcgtccggaagattttttgaaattgaagaaacagttacagatcaaatcgacgggtaaaaacgatgcgttttgtttcagatctaaaggattagtggagatgatgaagatgtcgaaagatctgagacagaaagtaccggcggtcttggcggttgaggtagatccaaccggaggaccaagattacaagaggcggcgatgaagctttacgcgaggaagacagagtgcgataagattcatttgcttcaggggatgcaagcggtggaagcggcggcgaagagtttcttctttgggtataggcagttagtggcggctatgatgggaagtgcggagatgaacgcgacggcgagtcaagagtcgtgtgactcactgagtcagatatttatggagccgacgtatttcccgagccttgacgcggcaaagacgtttctgggagagttttggagtcatttgggatgattaaattttaatttctgctggtataattatttaatataaatttaaattggtggtttggtttaatttagtttgtaagatagtgaaatttttggaacatttgacgatccatatttgaatacaaattcatttttataaaaaaaaaaaaaaaaaaagaaggggcggcccgttccttnnnnnnnnnnnnnnnnnnnnnnnnnnnnnnnnnnnnnnnnnnnnnnnaacnttca

SEQ ID NO: 125133 - DNA, 798 bp, Arabidopsis thaliana
cgcctgcaggtaccggtccggaattcccggttcgacccacgcgtccgcccacgcgtccgggaaaagcttcaaacgatgtttacttgctggagaagatctggaaaattttagcggagattgaagatcttcatatgttgatggatccggaagattttttgaaattgaagaaacagttacagatcaaatcgtccgccttaaacgatgcgttttgtttcagatctaaaggattagtggagatgatgaagatgtcgaaagatctgagacagaaagtaccggcggtcttggcggttgaggtagatccaaccggaggaccaagattacaagaggcggcgatgaagctttacgcgaggaagacagagtgcgataagattcatttgcttcaggggatgcaaccggtggaagcggcggctaagagtttcttctttgggtataggcagttagtggcggctttgatgggaagttcggagatgaacgcgacggcgagtcaagagtcgtgtgactcactgagtcagatatttatggagccgacgtatttcccgagccttgacgcggcaaagacgtttctgggagagttttggggtcctttcgccccccttaaaatttagtatctgctggtataattatttaatataaatttaaattggtggtttggtttaatttagtttgtaagatagtgaaatttttggaacatttggcgatccatatttgaacacacattcatttttatatgttttaaaaaaaaaaaaaaaggttaacacacctgagcaaccgctctagaggatccaagcttacgtacgc

SEQ ID NO: 125134 - DNA, 1381 bp, Arabidopsis thaliana
  unsure (1)..(1381): unsure at all n locations
nnnnnnnnnnnnnnnnnnnnnnnnnnnnnnnnnnnnnnnnnnnnnnnnnnnnnnnnnnnnnnnnnnnnnnnnnnnnnccacgcgtccgcccacgcgtccgccaaaatgcaactccaaacccaatccttcgctctcaatcttctgccatctccaaatttcgccaaacccatcgagagacgtgaattcatctctctaaaacgagacccatctcgtccaatttcactccgatgttccgtttccacgactttggatactccggcgaccgcttcgacccacaagccctttccggcggaggtttcaaggagtatcatggagctttcatctgttggaactctctccactttgacccacgacggttggcctctcggcgtaggagttcgcttcgccgttgacaaagatggcactcctgttctttgcctcaatcgctctgtctctcctgacaagaggtctgctcttcatgttcaggtcctcatttgctaattccactctgtttcttctttgaaaaaatggcanagtttacttctttntgaaggaacaatcatgaattgtggttgtttagggaatcagttagaacaatgtggattgaggcctcctcagtgtacgatacaaggtagcattggtcgacctggagacgatactgttctaaagcgtcttagtgctacatggagggaaaagtttggcgaagaagttaaggaagacagtttatatgttgttgcagttgaccgtgttctccaaatggaagatttcatggaggacggaatctgggtggcgtcatcagattacaaaaatgcaagtcctgaccctcttcgagatattgcagaagatattgtcaaccagattaacgctaacaacatggaagacatcttccgtttctgcaatgtatacgtggatctagactttgtggtttcagaaacaaagatgatatggatggataggcttggattcgaccttcgggtatggtctccacgaggtgtatatgatgtgaggattccatttccaatggaagtaacagatgaaaagggagcaaaatcatccttcaatggaatgtcacagctcgcttgggaagtagagaaaagctattgccctgcagatttcaacaaggtcaaactacttaagcaagttgtgggatcatctcattctcacaagggaggaggacaataacaatactaatgacttttttttgcttgtccccattattctttatttacaagttgatgccaaaattgtgcattggctctcgtggaatagtatatgtttacttgaagtaatgtttgtcatctttttttaaaaaaaaaaaaaaaaaagtnnnnnnnnnnnnnnnnnnnnnnnnnnnnnnnnnnnnnnnnnnnnnnnnnnnnnnnnnnnnnnnnnnnnnnnnnnc

SEQ ID NO: 125135 - DNA, 528 bp, Arabidopsis thaliana
  unsure (1)..(528): unsure at all n locations
gagagcaaccaaaatgcaactccaaacccaatccttcgctctcaatcttctgccatctccaaatttcgccaaacccatcgagagacgtgaattcatctctctaaaacgagacccatctcgtccaatttcactccgatgttccgtttccacgactttggatactccggcgaccgcttcgacccacaagccctttccggcggaggtttcaaggagtatcatggagctttcatctgttggaactctctccactttgacccacgacggttggcctctcggcgtaggagttcgcttcgccgttgacaaagatggcactcctgttctttgcctcaatcgctctgtctctcctgacaagaggtctgctcttcatgttcagttagaacaatgtggattgaggactcctcagtgtacggtacaaaggtaggattggtcgncctggggacggtactntttnaaaggggttanggctaantggaggaaaanntttgggagaagtttggagcagttnattttttcagtnccngtttcaaa

SEQ ID NO: 125136 - DNA, 628 bp, Arabidopsis thaliana
  unsure (1)..(628): unsure at all n locations
ttccggtttctccagggtccgacccacagcgatccggttcctctgtctttctttcttccttattctactccattacgcttcttggttccaagacacgcacaagaaaaagaccgaatctttcaccttcccggtgaaccaaacgatgtctccttctctcacttctctggttacattaccgtcaacgagtcagcaggaagagcactattctactggctcactgagtcaccaccgagtgaaaaccctgagtctaagcctcttgtcctctggctcaacggtggacctggttgttcctccgtagcttacggtgccgctgaagaaatcggaccttttagaatcaatcctgatggcaaaactctttaccacaatccttactcttggaacaaattggcgaatttgctcttccttgaatctcctgctggtgttggtttctcgtattcgaatactacctccgatttgtatactgccggagatcagagaactgcggaagatgcttatgnggtttcttgtgaaatgggttnagagggttncccaatacaaaccacagggnggtctacaatgctgggggaagnttttcaaggncaannagttccccagttttnacanattttttntgggaaannngaatccc

SEQ ID NO: 125137 - DNA, 1116 bp, Arabidopsis thaliana
  unsure (1)..(1116): unsure at all n locations
cgcgtccgcactaaagaaggagcgaattgctcttcggcagtggaaagaagcggatgccctctcacaaattgcagcacattgccttctaatccttcttctgctgaagctgagtccaacagcgattacattgtcccaaagaagccatcttcaaagaacgaagacaacaattctccgtcagtcgatgaaaagtctgcgaaaggataaagggcaccgactcagacatgtcagattagaggacgttacagattgtgttgttggatgatgaagaacaagaagctgttctggataagacggaatctgaaactccagtcgtggttactacgaaaagtcttgttggtaatcgaaacagttcagatgcgagtttgccaattactcccttcaggtcagatgaaatcaagaaccgtcaagctagaatcgaaatatcgatgagagacaactgtaacaacggtgatcattcagcgaatggaggaacagaaagtggattagagcattgtgtgaagatcataagacaactcgagtgttcaggacatatcgataagaatttcagacagaagtttctgacttggtatagcttgagagcaacgtcacaagagattagagttgtgaagatattcattgatacatttattgatgatcccatggctttggctgagcagctcattgatactttcgacgaccgtgtttcgataaagcgttctgcggttggtggtagcggtgcgtctgcagttgttccatctggattctgtatgaagttgtggcattagagaatgggaacttgtgctctgtttttttcaagtcattttcaaaacgttattctaattattgggaaatttgcattattggaacatttccatgcaagaacagtagtactgttgctatcgaatagatcgtctttgtcggattattaaaaaaaaaaaaaaggatttgattccatttataatttagtaattagtcctagactgaattattcttatttcgttgactattggattatgttattttatcaagtaggttatgaaaaaaaaaaaaaaaaaaaaaagnnnnnnnnnnnnnnnnnnnnnnnnnnnnnnnnnnnnnnnnnnnnnnnnnnnnnnnnnnnnnnnnnnnngctcctaa

SEQ ID NO: 125138 - DNA, 910 bp, Arabidopsis thaliana
  unsure (1)..(910): unsure at all n locations
nnnnnnnnnnnnnnnnnnnnnnnnnnnnnnnnnnnnnnnnnnnnnnnnnnnnnnnnnnnnnnnnnnnnnnnnnnnnnnccacgcgtccgagagaaacaaacccactccattaaaaaccaaagctttaagcttagattcaatcccaagtcagtaaaaatagggttaatcgaagaaccccaccggaattccactgaggaattgcatcagtcgcgttcttgttgcggcttgaggaagaaaaagaacacctacactaaccaaaacaagaacaaggacgaattgaaaccgaagatgacaacaacgaatgaagctactacacagcctcctcagcagatgatgagcttgagttttagtagtcagatgtctaaagaagacgaagagatggctcgttctgctctctctgcttttagggctaaagaagatgagattgagaagaggaaaatggaagttcgtgaaagggttaaggctcagcttggtcgtgttgaggaagagactcgtcgtcttgctagtatccgcgaggagcttgagacaatggcagatcccatgaggaaggaagttaattgggtgcgtaagaagattgatagcgtcaacaaagatctcanaccattaggctctactgttcaaaagaaggaaagggaatacaaagaagcattggatacgttcaacgagatgaatcgtgagaaagttcagctgatcaccaagctaatggagttggttggaaaaagcgagaagctgaggttgaaaagctggatgagctagcaggagctagcacagagagtgttntatctcacaagacaggacctaccatcaagactaattggngatttttctatttattttacgtttggatgtttctagttctggggtttaagttctctgcttgatggggtgtttgaaatttatggggtttggg

SEQ ID NO: 125139 - DNA, 797 bp, Arabidopsis thaliana
  unsure (1)..(797): unsure at all n locations
agtatcgcgaggagcttagacaatggcagatcccatgagaaaggaagttaattgggtgcgtaagaagattgatagcgtcaacaaagaactcaaaccattaggctctactgttcaaaagaaggaaagggaatacaaagaagcattggatacgttcaacgagaagaatcgtgagaaagttcagctgatcaccaagctaatggagttggttggagaaagcgagaagctgaggttgaagaagctggatgagctaagcaggagcatagacacagagagtgaatctatctcacaagacaagaccataccaatcaagaactaatttggtgtattttttctattttatttttacgttttggaatgttttcttagtttctgggtgttttagttttcttttgctatgatttgtgggttgatttgtaaaattatgatggggtttttcgtgtttttgattaaccattattgttagggaagggaaatgggataatgcttcttctgcttaggctactgaatgctaaaagggtttgtaagtttgaatttttttcttgctttgttttttctaatattattttatttgttatattgtttagctttattttaatttcttttccccccccaaattatgtttagctttttgagaaagtagcctctcgccgtcgagcgtgtgtggtgggtgttttgaaattgaaacgacttcttcttgtcaaagtaaaaaaaaaaaaaaagnnnnnnnnnnnnnnnnnnnnnnnnnnnnnnnnnnnnnnnnnnnnnnnnnnnnnnnnnnnnnnnnnnnnnnnnnttca

SEQ ID NO: 125140 - DNA, 533 bp, Arabidopsis thaliana
tggcggagtagtcactgctgttttctcgtgtacacgagcttcttgtgttcgttccacctcttgaagatgaagaagttcaactacgaaatcgttcttctctcgatctcggatttttctgatcgatggcggttcccacactctgtatcgccgatggaatctaccccactgcttttttctaccggaattcagtccgacgactgacctccgtcgcgcatgatcggtttacgaacccgaaattcggaatcgatggacgtctacggaacggaccgaaggtgacggcaacggtgaatccatatacgtacacggaggcggcgcagcccgaagagcggaagagtttgacggattttttggtggaagctagagatttcgttagatctgacggcggagatggtggtccacctcggtggttctctcccttggaatgtggcgcacgcgctccagaatctcctcttcttctctacttacctgggatcgatggtactggattaaggctcattcgccagcataagaggcttggagagatatttgacata

SEQ ID NO: 125141 - DNA, 530 bp, Arabidopsis thaliana
  unsure (1)..(530): unsure at all n locations
aaaagtttggcccgggttacaactttaaccagacagtgggttgatactgctgtgagcacagagattcttgtgcaaggctttgaccaagaaactgctgcagtggttatggcaagattaacttccttaaaaatggaaacagaggagggatttgatgcaactcggtggctagatcggactctcattcgtctgtgttcaaaatttggtgaatatagaaaggatgatccaacctcgtttacgctgaaaccatatcttacattgttccctcaattcatgtttaacctgaggcggtcacagtttgttcaggtctttaacaatagtcctgatgaaaccgcatacttccgcatgttgctaaaccgggaaaacatttcaaatgcaattgtcatgatccaaccttctctgacgtcatattcattcaattcaggacctcaggcagctttgctggatggtggcttccattgcagctgacaagattcttctattagatgcatattttagtgttgttgtcttccatggantgnctatatcgcaat

SEQ ID NO: 125142 - DNA, 430 bp, Arabidopsis thaliana
cctcaaactctctctttctctctctctctctggttccctagaatttgagcaaaatttctaccataattgctaattattaaaaggaaacataagtaatcgttgcttcgatcctttgttacatggatggatcctgaacaggaaatctcaaacgagactttggaaactatattggtaagttcaacagaaggaagcaataataacaataagaaaatggaagaagaaatgaagaagaaagtatcaagaggagaattaggaggtgaagctcaaaattgtccaagatgtgaatctccaaacacaaagttttgttactacaacaactatagtctctcacaacctcgttacttctgcaaatcttgtcggagatattggactaaaggcggtactcttcgtaacgttcccgtcggtggtggttgccgtcgaaacaaacgat

SEQ ID NO: 125143 - DNA, 360 bp, Arabidopsis thaliana
cttttgcttttttgggtttcctccttctttctcatctttgctgcggtgcatttttttctcgggaaaatcctttctgggctttccgggaaagttttcttgtcagattcggaaaggtaccaaagaaaataaattaataaaaacttaccaaacagattttgtgtttatctctctctctatagattcttttgatcacaaatccttttcgtttttgatcatattttgattgagaacaaaacaatcttcaaagtctcaacctttaagtttgattgatctttttttggtaagtaaatcttctgtcgtagattcgatattttctgatcttctcttttcgaattcttcaatcttcaacgatcccaatct

SEQ ID NO: 125144 - DNA, 453 bp, Arabidopsis thaliana
cccacgcgtcagcaaaaacaaagaacaagtgtgaagccaaacgcagaattttgggaaaccatcgttttctacttctcagtcatctactcagccttttgatgatccatttggtgactctcctttcaaagccatcacttctgctgacactgagacaagccaacatcagagttttggagttccttttcagccaacaccaccaacttcaaatcctaacaatgaacataactttggttttggggaagcattttcagctgttaccgattctgaacctggcgttcaaaatatgcaagctccaccgaacttatccgtctttcctcaagagcagtttgatacatcgcagagcgaaatcgatattcttgccggcattctcccaccatctggaccgccagtttctctgtctccacaaccagattccactatgccaacatcccaatttcatcccaatggtaactc

SEQ ID NO: 125145 - DNA, 455 bp, Arabidopsis thaliana
tccggggccacccacgcgtccggagctctcggagattcaatcactcatggcgaacgaagacgacgacggtgagaaatccagaagtctgcaccaacagattgctagaaaacccaaaacccagatcgtgattggtgtgccatcgtaccaggaagttttggaaagctcacagacgaagtccacgcctccatctctcttcaagccttcccagagtttctctcaggctttcgctttcgtcaagtcgtccgacgtctactctcctcctcctccttcctccgcagccgcctcttcttctcagccgtcgggcgcttctcaggtgccccacagttcaagccaaacgcatcaaactgatggagcctcatcttcttctactcctgtagccactggctctgtaccatcaaacacaactcaaaatcgtaacgctattctcgttagccatcgacagaaaggaaacccgc

SEQ ID NO: 125146 - DNA, 551 bp, Arabidopsis thaliana
tgagaatagtaattcattattcttaacaataggtcctggagatttcttggttcatcatgctattgctttaggtttacatacaactacattgatcttagtaaaaggtgctttagatgcacgtggttccaagttaatgccagataaaaaggatttcgggtatagttttccttgcgatggtccgggacgaggtggtacttgtgatatttcggcttgggacgcattttatttggcagttttctggatgttaaatactattggatgggttactttttattggcattggaaacacatcacattatggcagggtaacgtttcacagtttaatgaatcttccacttatttgatgggatggttaagagattatctatggttaaactcttcaccaacttatcaatggatataacccgtttggtatgaatagtttatcagtctgggcatggatgttcttatttgggcatcttgtttgggctacaggatttatgttcttaatttcctggcgtggttattggcaggaattgattgaaactttagcgtgggctcatgaacgcaca

SEQ ID NO: 125147 - DNA, 532 bp, Arabidopsis thaliana
  unsure (1)..(532): unsure at all n locations
atgattctccnnnnnnnnnnnnnnnnnnnnnnnnnnnnnnnnnnnnnnnnnnnnnnnnnnnnnnnnnnnnnnnnnnnnnnccacgcgtccgcggacgcgtgggcggacgcgtgggcggacgcgtgggcggacgcgtggggaagatcgtgacattggtactcgtcgtcttcgtcatactttcgacatcattcccggctgccatcaaagccgaagacacgggagatacaggaaatgtgggagtgacatgtgacgcaaggcagcttcagccttgccttgccgcgattacgggaggaggacaaccctcaggtgcatgttgtgcaaagcttacagagcaacagtcatgcctctgtggtttcgctaagaaccctgcgttcgcacagtacattagctctccaaacgctcgcaaagtgctccttgcttgcaatgttgcttatcccacttgttgaaacttatctagagattttataaataaataaacgaaaggaaataaattacattatatcaaacgttatgatacaattcaaccgtttgt

SEQ ID NO: 125148 - DNA, 819 bp, Arabidopsis thaliana
aaagaagccattgtcgatgctgttctggagaatccatcaccaggaaaatctcaagtttcttaatggggttgacagaaagagcttgagggcaagattgaatcggtctcaagtctgaggaaaccaaaagaaattcccttctgatgatcaattagaacattgatgctcttgatgatgatccatgggggaaatggggtgacgaggaagaagaagaagttgacaatagtaaagcagacgagtcctatgacgatatgcagctgaaactggatttgcgtgatagaggagacagcttatttaggttcctccacaagttatcgagcctaagaacaaggaacccaccaattaaagagaaggccccaattgccttcagagagcagctttccctggcgagcccttctggaaacaaaagggctagcctacagccttataacaaaaagtgttgagcaaacaagagatacccggtttagaataccattcttcaactgttggaagatttattaaaagcggatttggaaggtttggtcttggtcaggcaaaaccaagcctggcagaccagagtgtcattcttgtctttgtcattggaggtatcaacggtatagaggttttggaagctcaagaggctgtgtcagagagcggaagaccagacattaacttggttattggaggaacgacacttctaacccccgacgacatgtttgagttattgttgggacaattcagccatttttgatatcttgcgaactgacctacactctacataatcttctggtggtagcttgtaacaataaaagcggccgcgagttcgatatcaagctaatcgat

SEQ ID NO: 125149 - DNA, 466 bp, Arabidopsis thaliana
  unsure (1)..(466): unsure at all n locations
cacacgcgtccgcccacgcgtccgcccacgcgtccgcccacgcgtccggttggttcatgtgtggaagttctctaagaacaacagaaaatttcaaaatggtttctcagataatctcgtgtttatctcaatcttcgtctcttctatgtttatccgattcaaggaggttaattcttccgaagacttgtacttacggcggtttgagccggttttctccaggatttgctagccgccggttatttacggttaatcggaagaaatggagatcggcctgcattttcaactctggaaaggaacctggaggagagggaaagttacaaggaggtagctcagagtggccgatacttcagagatgggaagttccatggngatggcagacagtttccgtaacttcgtttgcttgtgcactaagggcagtttgttttgacaggattaaccgagatggcagtcataccgtttttaggaatcg

SEQ ID NO: 125150 - DNA, 756 bp, Arabidopsis thaliana
  unsure (1)..(756): unsure at all n locations
caagctccctacgactcactatttggaaagctggcacgcctgcaggtaccggtccggaattcccgggtcgacccacgcgtgcgaaaaatgatgtcatcaatggcactctcttctacttccctctgctcttctttcatctctcaacatccaaaactctccatcactgcttctcctccattgttccatacccaaacaaccaaacccatctctgtaaaacggaaaatcataactctagcagctccagagacactcaccgctgaaacagtcaccggaattgatacttccgacaacactccacaacaaacaataaaggtggtgaagccagatgagaaatcaagagtggtactcaagtttgtgtggatggagaagaacataggattaggattggaccaacatgtacctggacatggcacaatcccacttagtccttacttcttctggcctaggaaagatgcttgggaagagcttaagtctactcttgaagctaaaccatggatctctcagaagaagatgatcattcttctaaaccaagccactgatatcatcaatctctggcaacaaagtggcggcaatttaacttctcaataatctcttttttgatttctgcatttcaagaattcactttgtctatgattattattgctattgagagttttttgtttatctaaaaaaaaccaaaaaagnnnnnnnnnnnnnnnnnnnnnnnnnnnnnnnnnnnnnnnnnnnnnnnnnnnnnnnnnnnnnnnnnnnnnnnnn

SEQ ID NO: 125151 - DNA, 964 bp, Arabidopsis thaliana
  unsure (1)..(964): unsure at all n locations
atgattctccagctctctacgactcactatatggaaagctggtcacgcctgcaggtaccggtccggaattcccgggtcgacccacgcgtccgcggacgcgtgggcggacgcgtgggatttcacggaaaatagaagcgtcgagttcctcctctccctcaggttgtcaatggccgctaggttacttgctttgagacgcgctttgtctcttttcagcaaccaacaacatcgttttcctttgtctcaagtctcaacagagcagttgtcgctatcaaactcactcttcagcagaagtcatgtttatggaagattatttcagagacagttatctgtaatccgtgaggcaaatgaagcttctgtaaccaatgtctgcaactcgtcaaactctgctactgaatcggccaaagttccctcccctgcgacgccctctgaggaaatgatggtgaagtacaagtcccagttaaaaataaacccgaggcatgacttcatgatggtcttcacttgcaaggtctgtgatacaagatctatgaagatggcgagccgagaatcatatgaaaacggcgttgtggtggtacgatgtggagggtgtgataatctacatttgattgcagaccgtcgtggttggtttggagaaccaggaagcgtggaggacttccttgcttctcaaggggaagaattcaagaaaggatccatggattctcttaacctaactcctgaagatttagctggaggaaagatttctactgaataaggagtgatcttctttgcttttgctacttaaccattatggaacagaacttcaccttatgttccagtattataattgtttcttgtagttcactgtttggtaacatttaaatgcagaagatgtttaatacaaaaaaaaaaaaaaaaggannnnnnnnnnnnnnnnnnnnnnnnnnnnnnnnnnnnnnnnnnnnnnnnnnnnnnnnnnnnnnnnnnnnnn

SEQ ID NO: 125152 - DNA, 504 bp, Arabidopsis thaliana
cgggctcgacccgacgcgtccggggactcttctctctaaattcctcagtctcgagaatcttcatcgtcttcacgagctcactcgaagatgttaacggcagatataccaccgaatcaatcaatctacatccaaaacctcaacgaaaggatcaagaaagaggaattgaagagatctctttactgtttgttctctcagtttgggaggatacttgatgtggttgctttgaagactccgaagctccgaggacaagcttgggttacttttagtgaagtcactgctgctggtcatgctgttcgtcagatgcaaaattttcccttctatgataaaccaatgcgcttacaatatgcaaaagcaaagtcagattgtctagctaaagctgagggaactttcgttccaaaagataagaagaggaagcaagaagaaaaagttgaaagaaagcgtgaagattcccaacgaccaaacacggctaatggcccaagtgctaatggtccaagtgccaataac

SEQ ID NO: 125153 - DNA, 699 bp, Arabidopsis thaliana
  unsure (1)..(699): unsure at all n locations
gagagagactttagtttctttcccagttgagaaatctcgccgccgtttgaagaaagaagaagagatgggagttttctcattcgtgtgcaaaagcaaaggcggagaatggaccgcaaagcaacacgaaggagatcttgaagcttcagcttcttccacctacgatctccagcgcaagcttgttcagactgctctctccgccgattcatctggcggcgttcagtcttctttctctcttgtctctcctacctccgccgtcttcgtggtggtcattggtggtggtggtggtggaggatttgctgccggaggaggtgcagctgctggaggtggtggtggtggtgaggctgccgcagccacaaaggaggaagagaagaagaaggaagaatctgaagaggaagagggagactttggatttgatctctttggttaagagacctaaaacaactttgttagtgttctgaggtttttctatctcaattttctttttgttttctgatattttcgagactataatgtaatgtcagaaatatatgtttgtttctggtttcagcttttcttctgcaaaaacttatagtttaaatccataattttttgtcatttttggtcaatttgttaaattntgantncnnatataatcatcttattctcttaaaaaaaaaaaaaaaaaaactngagactngttctctctctctcctcgtgccg

SEQ ID NO: 125154 - DNA, 502 bp, Arabidopsis thaliana
acgcgtccggaggattgttgggttatgtgattcagggttaaaagatgataagcctgtgttggagcttgtgcgtagagtaacatggggtttgttttgtgctgtttatgtggggatcatgttgtttgccttgttggtttctgcgtttatgattagtggttttgtgattacctatttggctcatgaaccacttgttatcaaagagagcttgaattttgattacaccaagagtagtcctgaagcttatgtgcccataagttcatgtgctggtgttgcctttggtttgagtggcaaggagagtattgaaactgggaaggtcaaagggttgaaagacaggacagagataactgtgtcaatgacattgcctgagtccgagtacaatagaaatctcgggatgtttcaggttcgggtggacttcttatccgcgagtggtcatgtgcttcctagttcaaggcggccctgtatggtaaaattttgtagcgggcctaacggctttccaaccttc

SEQ ID NO: 125155 - DNA, 769 bp, Arabidopsis thaliana
tagggaaagctggtacgcctgcaggtaccggtccggaattcccgggtcaacccacgagaagaagaagatcaatgacgttgaagaagcttgacgcgaatccatcaaccttagaatcgagtttacaggaactgaaatcagacgagacaaatcgtagcaagatcaatttcatactcttcctcgccgacaatgatcccaccaccggtcaaagctggtgtccagactgtgttagagctgaacctgtgatttacaagactctagaggaatttccagaggaggtgaatctaattcgtgcttacgccggagaccgaccgacgtggcggactccggcgcatccttggagagttgattctcggtttaagctaaccggagtaccaactcttgttcgttgggatggtgactctgttaaaggacgtcttgaagatcatcaagctcaccttcctcacttgattcttccccttcttgcaccatccacttgatttgatcgatatcgatttctcgggactatcgtgggattgaggatcaaatatcttatatatatttctagttgtgaattgttttccaataaatcctttacaatggtaaaggaaagtttgtttcttcgatgatctttacgatttcgtgctcaatgtagtgttatttctctaataaattacggtgatattagctgaattctagactctggactcgagatttcgacttatatttggttttgaagttatagttgtaataaaactacgagatttgattaaaacctaagagccttgagttg

SEQ ID NO: 125156 - DNA, 424 bp, Arabidopsis thaliana
ctttcttcttcgctctcttcctataaatctctctctgctctgtaagaaaaatatcttacaccaaacacaaacacaaaacacagattccttcttgttcttcttcttcctttgattgctttcgaagatggttggttctaggaagcgttcatcagccaagaacagacttgtttcttcttcaactcgttcttctgggaaggataaggtttctgatgctcgtaaatatggtgaagccttggtgggttcaaggatacgagtttggtggccgatggacagcaaattctataagggtgtggtggattcctatgtctcttccaagaagaaacatcgggttttctatgaagatggtgataaagagaccctggatctgaagaaggagagatgggagttgattgaagaagatgatgctgaatctgaatctgatgag

SEQ ID NO: 125157 - DNA, 603 bp, Arabidopsis thaliana
  unsure (1)..(603): unsure at all n locations
nnnnnnnnnnnnnnnnnnnnnnnnnnnnnnnnnnnnnnnnnnnnnnnnnnnnnnnnnnnnnnnnnnnncccacgcgtccggctttttttcagatttctgataatcagacagacagacacaaacaaacaccggtatcgacgaacggaactaactccgatatccaaaacccactccaagtttcacgaacgaagggcttagtatctgccatggctcctgatgcttctactgctcttgcagcgagggagaaagttcagcaaatcctgaatgcagcttgtaccggaaatctcgaattccttaagaatgttgctaagcagcttgatgaaggaaaagacttgacgaaaactgtggagagtattaaagacgcaaacaaacgtggagcgcttcacttcgctgcgagagaaggacaaactgaaatatgcagatatcttttggaagaactgaaactcaatgctgatgcaaaagatgaaactggtgatactccgcttgttcatgctgcgaggcaaggacagattgaaacggttaagtatcttttagagcaaggagctgatcccaatatagctagtgaactaggagccacagctttgcatcatgcggctgggacag

SEQ ID NO: 125158 - DNA, 518 bp, Arabidopsis thaliana
taactcgttatccgctgatttgctcgatgaagaagaagggactgatgcttcaaactctagagacgacgaaaatacaattgaagatgaagagagccctgaagtaacgttttcaggtaagaagaaatcttctaaaaagaagggcggcagtgttttggcctcagtaggtgatgactcagttgcagacgaaactaaaacctctgatactaagaatgtggaggttgtgggcactggaaagagtaagaaaaagaagaagaatcccaagagtggaaggccagtccaggaagaggaagatttggccaaacttcttgcagcgcttggggtaacccctgctaatgggaggactgcttcatttacgcctgtagaagagaaagcagctcagcctgagccagttgcacctgtggagaatgctggtgagaaggaagaagaagaagaggccgctgctggtaataaaaaaaaaaaaaaaaaaaaaagaaagcggccgctctagaggatccaagcttacgtacgcgtgcatgcga

SEQ ID NO: 125159 - DNA, 819 bp, Arabidopsis thaliana
  unsure (1)..(819): unsure at all n locations
nnnnnnnnnnnnnnnnnnnnnnnnnnnnnnnnnnnnnnnnnnnnnnnnnnnnnnnnnnnnnnnnnnnnnnnnnnnnnnnnnnnccacgcgtccgaacatttggagcaaacccgaattattccatagaggaattttacaaggtatctaaactatagatggcaaagacctctaaattcttgtttaatagtttctcatgcaccatgtcatgctgtgtgatttagtgagtaagtgaaatgttgatgcttttccgaacttctgaacatgcctgctttttcttctaagtagaaaccgttcaagatgttcgtttttggcaatcatgatgcaggagcagctccctgaagatctggtgcgtgtcgatttgctcttcaggaaagcacatgaatctggcattattatacaggtaaaactgtttggccaaacgttgctacttgcccctgtctttaaaaaaagtgctggctattttttgttccattagtgttgcttgaaatacgtgggcaattcttctactcagagataccacgacatgatcttttgttgtagacactcccctttcagtcgtgcattgtttcaggattttctgcggaaagtcacttgtcataaaatcttcccttgtgtaatccattatttatatagaaatcaaattcaatcaacctcttcgtttttgcagtgcagatcagttagtatccatgagatttcttgtttgctattgtcggggaactatattgncattgcgttagtcgaccagaacaagctaagcangtcttggttggaggaagtgcttgtctctggtcttcactcccagcattcttgttacactgg

SEQ ID NO: 125160 - DNA, 925 bp, Arabidopsis thaliana
  unsure (1)..(925): unsure at all n locations
atgnnnnnnnnnnnnnnnnnnnnnnnnnnnnnnnnnnnnnnnnnnnnnnnnnnnnnnnnnnnnnnnnnnnnnnnnnnnnnnnccacgcgtccgatcagatagagacaaggaacaactatgcaacatcatggactatcaaagactctctatagacgcttgcgctcatgcttcccataacgataggttaccgcttagagttgttctccaagtactcttctttgaacaaatgcatctcagaaccgctcttgcaggtggtctaaatgttgcaaacaccgaaacagctcatgcagtgacgatccctggtggaagaacaggacaggagatagttcagagagatggttgggtgactgttgtgcgccaaaaccaggttttgaaagttgatatgcagaaaatgaggtcaagggttggagaactagaagaggagtttcagagtattaagcaggagatgaagaagagagttagtaagtcctctagctcaatgagctcgcctcgtctggtcaagctcggctgtaagtttcttcttccacgagcttctgatgctaagaatgatacagtccagaactcagtgtccagcactcctagatcagctaccgctgaccatacactccctcgttcctcccgccattccaaacaccgtaaaagcttctctttcttcggataatcttcattcaaaaacatttatcttcctctcttctcttaaagcccaacacagagaaagttctttcctgaggcattccctcgaagaagtttctctcttttcccgggaaaccacaacagaacatgttgctntgatgaacggaaagggcccagaataaactggcctttgaagagagagatctcctgctcgtttcagtattgccgggtttctccaggactacctcaagtgaaaatttcgaaaacggctatcgggggttttggggttttc

SEQ ID NO: 125161 - DNA, 411 bp, Arabidopsis thaliana
cccacgcgtccgcaagctttcttgttggcattaattgcattacttgctacccaattgccttcactaatggctgcaggtttctctttatcgattttcctctgtttcttttctcttttaaagcttcattatttaatcctgttcttgcctaaatcaggataagattatgaatgttggattttgagcttctggattttgcaaattttgttgctttctttgactagatttgagtttcgatggaaattcgcataattttggttcattagttgcttacatgcaaaaatactctctttttaaattgaaatcagatcttgagaaaccatagaaattcaaactttgtttgttcttttcaagctattgtggttagaaagttaaaagcttgaaacttgcggaccaatctttataggttaccag

SEQ ID NO: 125162 - DNA, 501 bp, Arabidopsis thaliana
acgcctgcatgtaccggtccggaattcccggttcgacccacgcgtccgtccacgcgtccggccagtgcagccaggcctaaccctcagggatcttaccactacggaaagatcaacatcacacgcaccatcaagcttgtgaacactcaaggcaaggtcgatggaaagctcaggtacgctttgaacggagtctcgcacactgaccccgaaaccccattgaagcttgcggagtactttggtgttgccgacaaggttttcaagtacgactccatcactgataacccaaccccagaacaaatcaagagcatcaagatcgtgccaaatgttcttaacatcactcaccgcaccttcatcgaggtggtgtttgagaaccacgagaagagtgttcagtcgtggcacttggacgggtactccttctttgccagtcgctgtcgagccagggacttggaccccagagaagagaaaaaacttcaacctgctggacgcagtgagccgtccccccgt

SEQ ID NO: 125163 - DNA, 631 bp, Arabidopsis thaliana
ggttctgtttctggaaatttcacttttttcacttttttgggatcacatttagctttttttggttcctttattttgtaacgccatttatgcgttaaacttgtgtgaagtgtttgtttggtctgagctggagatggtgagaatctcactgcttttgttgtgtttactggtttcaacttgtctcttcacttcttcatcagcacaagctccaggttttgtgagcttggattgtggaggtgcagagccattcactgatgaacttggactcaaatggtcacctgataatcatctcatttatggagaaaccgctaatatatcgtccgttaacgaaacaagaactcagtacacgactttaaggcatttccctgctgattcaagaaagtattgctacactctcaatgtcacgagtaggaatagatatctcattagagctactttcttgtatggtaatttcgacaacagcaacaatgtgtatcccaaattcgatatctccctcggggcgactcattgggcgaccattgttatctctgaaacctatataatcgaaactgcagaactggtgtttctggcttcttctcctactgttagtgtttgtttgtcaaatgccacaactggacagccgtttatatctact

SEQ ID NO: 125164 - DNA, 494 bp, Arabidopsis thaliana
acgcctgcaggtaccggtccggaattcccgggttgacccacgcgtccgattgatattttaggaatggacaagcgcaatgaagttcttgcagcgttatatatggtccggactgatgttagtttgtctgttcgtcaggcggcactacatgtatggaaaaccatcgtagcaaatacaccaaagacgttgaaggaaataatgccaattttgatgagaatgaatctgttcgtgatgcagccctgggggctggccatgtactggtggagcaccatgcaacaacgtctctgcctcttcttcttccagttgtggaggatggtattttcaatgataattggtcttggtgaacttattgaagttactagcgagcaagctttgaaggagttcgtcatacctataacagggcctcttattcgaatcattggagaccggtttccatggcaagtcaaaagtgctatcttggctacattaatcatcctaatacaaaggggtgggatggc

SEQ ID NO: 125165 - DNA, 1016 bp, Arabidopsis thaliana
tctgcggtaccggtccggaattcccgggtcgacccacgcgtccgggcttgatgtttgtatgggaggccgggtagccgaagagttgttttttggggaaagtgaagtaacttcgggtgcatcttctgatcttgagcaggcaaccaaactcgcgagagcaatggtcacgaaattcggtatgagcaaagaggtgggtcttgtggcacataactacgacgacaatgggaaaagcatgagcaccgagacaaggcttctcattgagagtgaagtgaaacaacttctggaaaaggcttataacaatgcaaaaacaatcctcacggtttacaacaaagagcttcatgcccttgcaaatgctttgcttcagcacgaaactctgtccggtaagcagattaaagaattgcttaccgatctcaactctccactgctgcaaaagcgtcaagaagtggttacaaagcaaagcaacccggttcctccatcaacccctagctcagcatcatcagcagccgcagcagctgccgcagctgcagccgccgccgccgcagcagctgcaacagccgcaaccaaaggtaaagacatggcgccagtatcgtaaaaataaaggagctagcgtttggtagagaaggcgttttcatgtatttgtgtatgttggggtaattgaattgggaataactctttattttgagagtttttagaatcagtgagaggctggtgagggttaagagcattaagcttaggacaatgagattaacatctcaggtttttctctatctctatctcgtacacacggaatctcgctgcgaaatggtatgtgttcactttttctctaaatgttttcggaatctcgtgggatgttatttagaagtttggctcgtacagtttcaggttacactaaattctaaagcctgcttgtaagactcaatgcaataaattttatagtctctagaaaaaaaaaaagggcggccgctctagaggatccaagcttacgtacgcgtgcaggcgacgtcaagatcttctatagt

SEQ ID NO: 125166 - DNA, 465 bp, Arabidopsis thaliana
  unsure (1)..(465): unsure at all n locations
cacacgcgtccgatttttggaacgaaatagattggccatcgagagaggagcttcattgacaaagagtcctatagccggaagtgaagaaatttccggtgcgtataatgctaaaggccgtccagatcttgggttggtcatcagggttaaccatctcacagagattgaccaagactcgcaagtcctctaccgtctctttcatctcgtcatctctcaatctctcctctgtcacttcgagctctcctcggagaatcttctctttcaagccaaccagaatgtcttcctcacttcccgggtctgacccagttgcaaattccccgactttcgtctctgttcaatcagctggagatgttcgtaagataaagttctgtcaatggtgtgggagggcccacccaagcatggaataccctgncggntgaggggaaatttnangggctttttnncccaaatttggggaaaatcngtttt

SEQ ID NO: 125167 - DNA, 534 bp, Arabidopsis thaliana
ttcttcttcttcttcttaatctcagattcttgtctgaaaactttctctttcattttctctcaatttaacactttcaagatgccgatcaacaaagacccatcaacacctcctcctgttatcggaaaaatcggtccttacactgtctttatgactcctcctgcgactcctaaaccacctgaatctccctccgctgtgtctcagaagcctgtgatggcaccaccggttcttcctccgccgcagcagtttaaatcggtggcttcttctgaccaggacggctcagttttggggttctttaaaaacgccgtcacaaaggttcaaaatgcacattcaagtgtggatgatcatttggtgaggtggtttgggttaaaccaatctaagtatcagtgggctttggatgagtactacgaaagcaaagaatcagatatgaagaccgtgaaagcaaaggagatgccggggaaagtacagagtgtataagcaaccatgtataaactcatttcccctttggccaattctaaaatctgtttttctgagaga

SEQ ID NO: 125168 - DNA, 1108 bp, Arabidopsis thaliana
  unsure (1)..(1108): unsure at all n locations
nnnnnnnnnnnnnnnnnnnnnnnnnnnnnnnnnnnnnnnnnnnnnnnngctcacaccaatcggtccgttcccatactccacgcgtccggcttctgagagatatttaagtttagcaaaaaaatcctaagcttctacaatggcgaatcttcccaccgttctcgtcaccggcgctagtggcagaacaggccagattgtgtataagaagctgaaggaggggtcagacaagtttgtagcaaagggtttagttagaagtgctcaaggaaaagagaaaattggaggagaagctgatgttttcattggggatataacagatgctgatagcattaaccctgcgtttcaaggaatcgatgcgcttgtgattctcactagtgctgtgcctaaaatgaaacctggttttgatcccactaaaggtggaagacctgagttcattttcgaagatggacagtatcctgaacaagttgattggattggacagaagaatcaaattgatgcagccaaggttgctggtgttaagcatattgtcgtggtcgggtcaatgggtggtaccaatccggatcatcctttgaacaaactgggaaatgggaatatactggtttggaagagaaaggctgaacagtaccttgctgattctggaactccttacacaattatcagagctggaggacttctagataaggaaggcggtgtacgagagctgctagttggtaaagacgatgagctacttcagacagacacgaaaaccgtccccagggctgatgttgcagaagtctgcattcaggcattgctgttcgaggaggccaagaacaaagctttcgatctcggctcaaagccagagggaaccagtaccccaaccaaagacttcaaggctctcttctctcaagtcacctctcgtttttaaatcattatctttgttgccaataagaacatttgggatcaaaccttctaaaataaattctgtagtgtctatttgaaaggatacgttctttcaattcaatgagaatattggggttgaatgttaaaaaaaaaaaaaaaaaaagnnnnnnnnnnnnnnnnnnnnnnnnnnnnnnnnnnnnnnnnnnnnnnnnnnnnnnnnnnnnnnnnnncacgt

SEQ ID NO: 125169 - DNA, 520 bp, Arabidopsis thaliana
cacacgcgtccgtctctatcgacggtagcattaggaaactttgattacgaaagctacaccaattttacaaaattgccatcctcccagtggggtgatcagttcctcaagttttccattgctgactcggattttgatgtccttgaaagagagattgaagtactaaagcctaaagtaagagagaacatattcgtgtcgtcttccacagacaaagacgcgatgaaaaagacaattctttctattcattttctggacagtcttggtctctcttatcattttgagaaggaaatcgaagagagcctaaaacatgctttcgagaagatagaagatttgatcgctgatgaaaataaattgcacacaatctccaccatcttccgagttttcaggacatacggttactacatgtcttcggatgttttcaagatattcaaaggagacgatggtaaattcaaggaaagtttaatagaagatgtcaagggtatgctaagcttctacgaagcagtgcactttgggacaacgacag

SEQ ID NO: 125170 - DNA, 885 bp, Arabidopsis thaliana
  unsure (1)..(885): unsure at all n locations
gccacnnnnnggttgataggcgctgccatatgtgttttggttgacctcctaagcttctcgagtcagaaaaggcaccacgcgtccgaaaggatcttgcaccatacgtgcagaataagtgttatgacagtgtctcagcacttcttgcagatgtagataaagaacttgaatttctatgtgctgccgtgaagaaagagaacaaggacagtgaagcaattccacctgctataataattgagaaatcactttttatgggacgccttttgtttgcattgctgaaccactcaaaacatgttcccttaattctcggttctccaagattgtggtgtagagaaactatgactgcagtttctgataagttgtcatccttgttgaggcagccaagatttagctcgaatactccagccactgctgacagccctggaaagcaattgcataccgatcttagaaagcagacttcattagctgttgctgcactactgggagcggaagagaaaacaagtccaaaatttgaagagcttaatagaactatgcgagatctgtgcatcaaggctcatacattgtggataaagtggttatctgatgagctttcagctattctcttgcgtgatcttaggagtgatgatggattgtctgctacaactcctttaaggggatgggaagagaccatagtgaagcaagagcaggacgagagtcaatctgagttgaagatatcacttccatcgttgccttcactctatatgatttcatttctctggccggcatcagaggaaattcatcgaattggaggtcacgtactggataggtctattttgcaaaatttgcttcagcctggtggagagatcacattattatgaggattctatctgcagggagccgcgacccaat

SEQ ID NO: 125171 - DNA, 425 bp, Arabidopsis thaliana
ctctcgctttgctttctcgcggcaatggcggcggcgacgggaaatgacgacaacggctgcttcgataaaccagaatctgaaccggcaccggttaacgtttcgcctcccctgtcgaagaatgctcagaagaagcagctgaagcagcaaagatacgaagcgaagaaagctgagaagaaggcacaggagaaggagcataagagaaaagaaggagagagaaagcttaaggaatgggaagaaaccctagcgaacgcgacggaggaagagaggctgaagcttattgagtcgaggaagagtctgcggaaggagagaatggagaagagatcggaggagaaggagaagaagatagagaggctgaatcaagctaaagaaataggtcaaaagatcgtagtagatgttgattttgctcatctcatgtctgagtctga

SEQ ID NO: 125172 - DNA, 460 bp, Arabidopsis thaliana
atcaaaactttgtctcatcgcatctttttccccaaattctcacaaaccttctcttctcaattccaccaaaccctcagattctcaatctccgatcgtcggaaattctcagcgatggccggagctggcgtcgatgatttcgttaaaggaaatgtttttccgaatggtgtcgctctcatcactctcgatcgaaccaaagctctcaacgccatgaatttagatatggatataaagtataaaagctttcttgatgaatgggaatctgatccgagagtgaaatgtgttatcgttgaaggaagcacatctagggccttttgtgcagggatggatattaaaggagttgctgcagaaatccaaaaggacaaaaacacacctcttgtgcaaaaggtatttacagcagagtatacactgatatgtgcaattgctgcgtacaaaaagccatatatttcattgatggtataac

SEQ ID NO: 125173 - DNA, 847 bp, Arabidopsis thaliana
  unsure (1)..(847): unsure at all n locations
nnnnnnnnnnnnnnnnnnnnnnnnnnnnnnnnnnnnnnnnnnnnnnnnnnnnnnnnnnnnnnnnnnnnnnnnnnnnnnccacgcgtccgcaagaaagcaaatttttttgtaacgatgcctatcaacagaattgcgattggaacgccgggggaagctagtcgtcccgatgcgattagagcagctttcgcggagtttttctcgatggttatattcgttttcgcgggtcaaggctctggaatggcttatggaaaactaactggagatggtccagccacacctgccggtcttgtggccgcgtctttgtctcatgcgtttgcgttgttcgttgcggtttccgttggagctaacgtttcaggtggtcatgtgaacccggcggttacttttggggcttttattggtggaaacataacgttgttgagagctattctttattggatcgctcaattactcggagcagtcgtagcttgcttgttgctcaaggtaagcactggcgggatggaaacggctgcgttttcgctatcatatggagtgacgccctggaacgcagtcgttttcgagattgtgatgacgtttgggttagtttacacggtttacgctactgccgtggatccccagaaaggtgatattggaatcattgcgcctttggcgattgggttaatcgttggagctaacattctggttggtggtgctttcgacggtgcatcgatgatacccgcggtttcattttggcccggccgtggttagctggatttggacgaatcattgggtctattgggttggtccttttatcggtgcagcctttgcagctattggttatgattctatctttatcgggaggaatggacat

SEQ ID NO: 125174 - DNA, 529 bp, Arabidopsis thaliana
cactcaccaaactgatcctcgaagacttcttgatcttgaagggcccttgcccaaactgtggaacagagaatgtatctttctttggaacgatactatccatccccaaatgatagtaacaccaacaatgtcaaatgctcaggctgtggaacggagatggtctatgactcaggttctcgtttgatcacattaccagaaggagggaaagcttaaatctaagagccaagggttatgtagaagtgtatgtaaaattaatactaacaaatgaagaaggtggagaaattgaagaagaaggagaaaaaccaaagtttgtatgctgttttgtataatcttcagatcttttcatgtagctctcattggcttgtgttgtgtttgtaagtaagtgtgaggcacattcaaagaaaaacatcatatgattacttctttgagaaactttgctctcattaggaaagtaaaataattcaagaaataagcacaaccttgtgtagttttgaaataatacttgtattttttttgttgttataaaaaacaa

SEQ ID NO: 125175 - DNA, 328 bp, Arabidopsis thaliana
cgccaacagcatcacaatcaatcacttgcttttctcaccaaaacggcaatctccccaaagcagggcatgcattggttataactcacaatggagcaagcggagactatccaggctgcactgatctggcttaccagaaagcaatcgacgatggagcagacataattgactgctctgttcagatgtccaaagacggaatcgctttctgccatgatgctgcagacctctcagcaagtaccaccgccaggactactttcatgtcccgagccaccagcgttcctgagatccagcctaccaacggaatcttctcttttgatcttacatgggccga

SEQ ID NO: 125176 - DNA, 497 bp, Arabidopsis thaliana
acgcctgcaggtaccggtccggaattcccggtgtcgacccacgcgtccaggcttaaaaaccaatggcgctagttgtgatttgtgggcaaccttgtagtggtaagtcaatagctgcagtaactttagctgaaacattgaaagagtctgaaacgaaacagagtgttaggatcatcgatgaggcttcgtttcatctcctccgcaaccaaaactatgctaacatgcctgctgagaagaatctgagaggaaagcttaggtcagatgttgatagatcagtttcgacaggcgagattgttattgtagattccttgaatagtatcaaaggttacagatatgagctatggtgtatcgctcgggctgctgggattaggtattggggtgtttattgggatgtaaatgaaacttatttgctagcaatggaataagggaccggagtgatagaggggaagatggatttgacgatggtttattcgaacatctggttaaagatttgagaaacc

SEQ ID NO: 125177 - DNA, 1311 bp, Arabidopsis thaliana
  unsure (1)..(1311): unsure at all n locations
atgatatctnnnnnnnnnnnnnnnnnnnnnnnnnnnnnnnnnnnnnnnnnnnnnnnnnnnnnnnnnnnnnnnnnnnnnnnnnnccacgcgtccgtctcgctcgcataaaaggttaacctcaaaacaagtagctcctccttccattaggatggcggcaggactctcaaccgccgttacattcaaaccactccaccgctctttctcctcctcctctaccgatttccgactccgcctcccgaaatccttatccggattctctccgtctcttcgatttaaacgcttttctgtctgttacgtcgtcgaagaacggagacagaattctccgattgagaacgatgagagaccggagagcacgagctccacaaacgctatagacgctgagtatctggcgttgcgtttggcggagaaattggagaggaagaaatcggagaggtccacttatctaatcgctgctatgttgtcgagctttggtatcacttctatggctgttatggctgtttactacagattctcttggcaaatggagggaggtgagatctcaatgttggaaatgtttggtacatttgctctctctgttggtgctgctgttggtatggaattctgggcaagatgggctcatagagctctgtggcacgcttctcctatggaatatgcatgagtcacatcacaaaccaagagaaggaccgtttgagctaaacgatgtttttgctatagtgaacgctggtccagcgattgggctcctctcttatggattcttcaataaaggactcgttcctggtctctgctttggcgccgggttaggcataacggtgtttggaatcgcctacatgtttgtccacgatggtctcgtgcacaagcgtttccctgtaggtcccatcgccgacgtcccttacctccgaaaggtcgccgccgctcaccagctacatcacacagacaagttcaatggtgtaccatatggactgtttcttggacccaaggaattggaagaagttggaggaaatgaagagttagataaggagattagtcggagaatcaaatcatacaaaaaggcctcgggctccgggtcgagttcgagttcttgactttaaacaagttttaaatcccaaattctttttttgtcttctgtcattatgatcatcttaagacggtctatgttgataaatcctatatgccgattttgattttaatgaatatctccaaaaatataaatacctctctttcttgcaaaaaaaaaaaaaaagnnnnnnnnnnnnnnnnnnnnnnnnnnnnnnnnnnnnnnnnnnnnnnnnnnnnnnnnnnnnnnnnnnnacc

SEQ ID NO: 125178 - DNA, 1116 bp, Arabidopsis thaliana
  unsure (1)..(1116): unsure at all n locations
nnnnnnnnnnnnnnnnnnnnnnnnnnnnnnnnnnnnnnnnnnnnnnnnnnnnnnnnnnnnnnnnnnnnnnnnnnnnnnccacgcgtccgctggactctgcctatagttatttggcaatggtggattatccgtatcctgctgacttcatgatgcctttgcctggacatcccattagagaggtatatttgggaagtaacactttatgagtttatacgaatattgtagaagaaatctgagaatgcattcgctagatcatttggattttcatctttacatcaacgatccggggaggctatgctttaaagatttgcttgttgcgtcaggctattgttcaaccacgtccgttaaagtctttgttcaatgtggtgtatctttctataggtctgcagaaaaattgacggtgctggtagtaatgctagcatcctagatcgcatatatgcagggataagtgtgtactacaactatactggaaatgttgactgcttcaagttggatgatgaccctcatgggttggatggatggaattggcaggcatgcacggagatggtaatgcccatgtctagcaaccaagaaaacagcatgtttccagcttatggttttaattactcttcatacaaagaggaatgctggaatacattccgagttaatccaagacccaaatgggtcacaacagagttcggtggacatgatatagcgaccaccttgaagtcatttggaagtaacatcattttctcaaatggtctgttagatccttggagtggtggcagtgttctcaagaacttatctgataccattgttgctctcgtcacaaaagaaggtgcacatcacttggatctacgaccttcaacaccagaagacccgaaatggcttgtggaccagcgggaagccgagatacggttgattcaaggatggatcgaaacttatcgagtagaaaaagaagctaaggtttctctgttaaaacgttcttggtaagagaacaatgtaaagaatcgtctcagtgtgttttccacgaaactcggaatctgcaaactttgtattgcgaacacatgctttgaataaatccatgcggccgcgcatccgagatctagcttaccgataccgtcgacccgagggggt

SEQ ID NO: 125179 - DNA, 730 bp, Arabidopsis thaliana
  unsure (1)..(730): unsure at all n locations
atttggcggnnaatttcccggggaccctttccnttttcccaatnttaccccccctttgggaacttttccccntnaggtcccggccgggatcccgggntnccccccngtccccancnttttcccgggtttgggtttnaattcccccncatacaaagggggattctggaatccnttccggnttaacccaagccccnaatggntcccaacagagttccggggaccatggtatagcgacccccttgaagtcatttggaagtaacatcattttctcaaatggtctgttagatccttggagtggtggcagtgttctcaagaacttatctgataccattgttgctctcgtcacaaaagaaggtgcacatcacttggatctacgaccttcaacaccagaagacccgaaatggcttgtggaccagcgggaagccgagatacggttgattcaaggatggatcgaaacttatcgagtagaaaaagaagctaaggtttctctgttaaaacgttcttggtaagagaccaatgaaaagaatcgtctcagtgtgtaactcggaatctgcaaactttgtattgcgaacacatgctttgaataaatccatgtacctaggtaacctcccaatgatccctaatcttttctactaaaaaaaaaaaaaaaaaaaagggcgcccgctctagaggatccaagcttacgtacgcgtgcatgcgacgtcataatctttctatagtgtcacnnnnn

SEQ ID NO: 125180 - DNA, 778 bp, Arabidopsis thaliana
  unsure (1)..(778): unsure at all n locations
gctgcttcaagttggagagaccctcatggttgatggatgaatggcaggcatgcacgaggatggtaatgcccagtctagcacccaagaaaacagcaagtttccaggttatggttttaattactcttcatacaaagaggaatgctggaatacattccgagttaatccaagacccaaatgggtcacaacagagttcggtggacatgatatagcgaccaccttgaagtcatttggaagtaacatcattttctcaaatggtctgttagatccttggagtggtggcaggtaagaatattgttccctttactcaaatcccaagagctattttacaaatcgaatctcgtaatcgtgacaaatgcttgagtttgactcgtaatatgcagtgttctcaagaacttatctgataccattgttgctctcgtcacaaaagaaggtgcacatcacttggatctacgaccttcaacaccagaagacccgaaatggcttgtggaccagcgggaagccgagatacggttgattcaaggatggatcgaaacttatcgagtagaaaaagaagctaaggtttctctgttaaaacgttcttggtaagagagcaatgaaaagaatcgtctcagtgtgtaactcggaatctgcaaactttgtattgcgaacacatgctttgaataaatccatgtaactatgtaaactctcaaaaaaaaaaaaaaaaaaaaaagnnnnnnnnnnnnnnnnnnnnnnnnnnnnnnnnnnnnnnnnnnnnnnnnnnnnnnnnnnnnnnnnnnca

SEQ ID NO: 125181 - DNA, 521 bp, Arabidopsis thaliana
  unsure (1)..(521): unsure at all n locations
nnnnnnnnnnnnnnnnnnnnnnnnnnnnnnnnnnnnnnnnnnnnnnnnnnnnnnnnnnnnnnnnnnnnnnccacgcgtccggaagttttaacttttaaaggataagagaagagtagctttcttcttcttcctctcggctactgcgacagagaagaagctgcgaactttaaatgtcacaggctgtaattttcaagccgtttgtttcagttccatcaagtaatcacagccagaggaaactacagaacaatattatcaatgttggtgttaaaatccaaaaccgattcagagttgtttgtatgggaatgttggctccaaggaaattcctgcaaaagaggaggaaaatggaggttttcaaggatgcagctgacgagacggatcagaagagatggagagggcttatgctagagattgaatcgacgggttctgctgttccggtgcttaggcaatacaaaactgacggtgaccaaggtcttccaagggatcttgttttgggtactttggttagatttaagcagcttaag

SEQ ID NO: 125182 - DNA, 505 bp, Arabidopsis thaliana
cgcctgcaggtaccggtccggaattcccgggttgacccacgcgtccggaaaacaggtattaggtgcccccatcatactactcaggctctttgttttgctgcgacctacttatggcctctataagggaactttatgagaaggtttgtgctttgacaggggtaccacaagaaaaggctcatatctgggattacttcgataagaggaaaaacggactcttggattctttatcttacaagagcctggaagagtcaagccttcatatggaccaagatattctacttgaagttgatgggtcgtcttcctctcagtctgctatgagctcgacaggaaatgagttagctctggtacctctggaaccttccaggtcgagtgttacaattgctggggggcctaccctatcaaatggtcattccactaccgtcaacttttttttttttccgaaaataactctctaaaaacaacgggagaaatttttttaagatttcttggaaaaagaaaaaagggg

SEQ ID NO: 125183 - DNA, 473 bp, Arabidopsis thaliana
ctgcaaccgagtcagaacgggaatgcatagctagtatatcttcaggaaacagaggaatggctgtatgaagatggcgtgggcggacccgtgggtgcgtacatcgagaagttgaatgatgtcaaaaagctcatcgatcctattgaaaaccggttcaaagatggagaagagcgagttcaagcatcaaaagatcttctgaaaactattgcagataaccgaatggctgcagagtctcttcctcctccaagaaagaatgcggttctcgatgaatgccataaagctgagaggtggctccacgagaaaaccacagaacaggaatctttacccaaagacgctaatccagagctgcaatctgctgaaatcaggagaaaagctgatgctctaaacgcgacatgcaagtacattgggaaatcaaactctccccccgcgaaaccggaacataacggatcatacggaagtagaaaatcagatgatat

SEQ ID NO: 125184 - DNA, 535 bp, Arabidopsis thaliana
atacgactcagctaggagaactacaacgcctgcaggtaccggtccggaattcccgggttgacccacgcgtccgaaaaaaagtataaacaaaattcaaaactattcagtattgatatttgtttacattgaaaaaaaaattaacttaaaaaatatagtttacacaaaaaaagaaaaaccaaaaaaaaaattgttagagattttttcagagtagtgagaggaaaatggcgcagatgcagcgagaagaagtagagtccgtcacgacggagaagaaaagattagacggaggcggtggatcttccggcgctcaggcaacggcgttcaaattcaacgctcaagcgccggaatttgtaccgcgatcacataccaccgcaccagcaccgcaggtttctcctgtctccggttacttttatccttgttttcattacaacggtggttgcataggaggatgtggcggcggagtctgcggtggtggagggaccggcgttggtcctcaatggtcggattgggtctacgtgggagggggagaaccttctga

SEQ ID NO: 125185 - DNA, 504 bp, Arabidopsis thaliana
cgcctgcaggtaccggtccggaattcccgggttgacccacgcgtccggaacacggcacagcgtttggtcaccggtgacccaaacgacgaagcatgcttgacgaatctccgtcagagtttagaagatccagctaataatctccgtaactggacaaaatccttcttcataaatccttgctccggcttctcttcttctcgccttggagtcatttgcaacaatggcagaatttacaaactctccttaacaaatctctctctccgtggctcaatctctccgtttctctctaattgcacaaatctccaatccctagatctatcttccaaccagatctccggcgagatcccgccgcaattacagtttttcgttaacccaagccgttcttaacctctcttctaatcgtctctccgggcaaatctcaccacaaatcgctctctgcgcttacttaaacgggatcggtcttcacgaaaaccactctgccgtcaaattccggttaagtccgggctt

SEQ ID NO: 125186 - DNA, 561 bp, Arabidopsis thaliana
cgcctgcaggtaccggtccggaattcccgggtaaaatacttaaaggagacgattctcggactaccttgatgattaaaaacattccaaacaaatacacctcgaagatgttgttagctgcaatcgatgaaaagaaccaaggaacttacaactttctctatttgcccattgatttcaagaacaaatgcaatgtgggcctcgtcattcatcaacatgctcaatccagaactcatcattccattttatgaggcttttaatgggaagaagtgggagaagttcaacagtgagaaagtagcttcattggcatatgctcggatacaaggaaaatctgcccttatagcccattttcagaactcaagcttgatgaatgaagatatgcgttgtcgtccaattatcttcgacactcccaacaatccagagtctgttgaacaggttgttgatgaggaatctaagaatatggacctcctcgactctcagctcagggatgatgatggcagagagagaagctgacacaggagttgagagacgactcaatgttgtgataatggctgttttttttctttc

SEQ ID NO: 125187 - DNA, 850 bp, Arabidopsis thaliana
  unsure (1)..(850): unsure at all n locations
atgatttnnnnnnnnnnnnnnnnnnnnnnnnnnnnnnnnnnnnnnnnnnnnnnnnnacgcgtccaaaaatctctcaataaccatgtgtgctccgcagccctccaacgagtttccgctgatttttcgcaaggatggtaagacatgtgtgttttgggatgtggaggattacccaatcccagctgatctccatcctcgttcgatccggcggagaatcgtaaaggatgtgaagaaatatggttgtgatgcggaggtgtcgattcatgcttatgctaatgataatacggtctcggtaacaatgaggcgtcaattttcggctgctggaatcaaattggaagtgttcacccaagcaggggataaatatgcgagacattgttccttgtatggtgacattatgctgtggtcactggaaaatcctccaccatcaaatattattgtcatcgcaaaaataatcgatgacgacttggctgatcgtattggatgtttgactaccgtctggtcatatgggcttctcatatcccaagttaagccagaatggctagaacggctttttcctgttggaagctatccctcgtttttggcagccatatttgatggaggattgccgaaatcatcgaaagcgaacaaggatcgctttcctctcgatgagtccgacgactaacttttgtgtctatgttattgttttgtgcctatagttgatatcaagtttggattgaaatgtttttagtattgtctatctataatatttatgtgattttggacaaaaaaaaaaaaaaaagnnnnnnnnnnnnnnnnnnnnnnnnnnnnnnnnnnnnnnnnnnnnnnnnnnnnnnnnnnnnnnnnnnnnnnnnnn

SEQ ID NO: 125188 - DNA, 634 bp, Arabidopsis thaliana
aaggcagagctctttgcttctgaatattattattttcttaaattcttccgttttttttttttaatccaaccacaaggatcgataacgaaatcatcagatcgccagaaaaaaaaaaaaaaattgcgaaatggagaatctgagctgcagatctgcgtcaatctccatctagatgttgttgctacttcttcctctatagaaccataatttcatcagatctcgctgattaatcatccccatttggatctgatcgaaactcttagggaagaacatggcaggagctgcctccgcgctgtttctgcttgatatcaagggacgcgttctcgtctggcgtgattatcgtggcgatgtctccgctgctcaagccgagcgattcttcactaagctcatcgagaaagagggtgattcacagtcaaatgatccagttgcttacgataatggggtgacttatatgtttgtacaacatagtaatgtatacttgatgatagcatccaggcagaattgtaatgctgccagtcttctcttctttcttcaccgcgttgtcgatgttttcaagcattacttcgaggagttagaagaggaatcattgaaggataactttgtggtagtgtatgagctacttgacgagatgatggac

SEQ ID NO: 125189 - DNA, 493 bp, Arabidopsis thaliana
cgcctgcaggtaccggtccggaattcccggttcgacccacgcgtacgaccagatacagtttgctcttgagcgtggtgtgcctgcaatggtggcagcattcacaacacggagattgttgtatccaagccaagcttttgatttggtacattggtcaagatgtagaatcaactggactcgggatgaggggactcctgctccttgaagtgaataggatgcttcgcgccggaggatattttgtttgggcagcacaacctgggtataagcatgaaaaggccttggaagaacagtgggaagagatgctaaacctgaccactaggctgtgctgggttcttggaaagaaggaaggatatatagctatctggcagaagcctgtaaataacacttgttacctaagacgaggagctggagtcagtccttctttgggcaattctgaagaagacccaaataatggttggtccgtggatctgaaggcatgcatcactaggaatgaaaa

SEQ ID NO: 125190 - DNA, 494 bp, Arabidopsis thaliana
cgcctgcaggtaccggtccggaattcccggttcgacccacgcgtccagtacttttctcttcggtttggtttgttttcacgcatttcctagctcggagtaagctaatcgaagaaaacaagcttgttattgatcgatctttcggtttttgttttgacgttttgtgtgaacgagttacttttggatatgagctctgtctgtggtgggttggatttcaaagatgcagagagcagctctgcttccagtcccattatatgttctactggcgtaaagcatatctcttgtgttggatctgatgatgctcaagagtctgatggtgatgatagtggttatatacaccaaactgtgattgaagaatccaaagacaaggcgatcagcgaacccatccctgagtctttacctctcaattctttggatgatgaaagtgaagataagaaccttgctactgcattgcaagaaatgttctctgagaatatgagtgggggtactctgattct

SEQ ID NO: 125191 - DNA, 485 bp, Arabidopsis thaliana
cgcctgcaggtaccggtccggaattcccggtgtcgacccacgcgtccagacggtgagagttcaagtgttccaacgatggcgaaatccccggtagaggtgaaactgatcccgatcgaagctactcctgagaatttcgcagactatggtcaagtcatcgaagcctctcgtgacggtgcaggtttcggtcccaacgacgctcaactggatctctccagaggaatcccacggttctatataatgcggatcagagatacaccctttgacttttccgtactcactcaccacgcgagcgtgacacagtgtctaggatcaataggaggtcatgtttggtaccttggagtggctaaaccgacacttattgaagatggtgatgatggaaagacggcagataaatcgaaaccaagggcggggcactggtaccccccccccggggaagaagaaaccgcggctccagggcctcgggacccaagcttacaaaccgaacc

SEQ ID NO: 125192 - DNA, 560 bp, Arabidopsis thaliana
  unsure (1)..(560): unsure at all n locations
gttttatgttgcacaaaaaaattaaagatgtaatgattttttatacagtactatttcgtaattgatgtttgatttcgaagcaaaaaattcttggaaacttccttctcatcagaaagaagaagataaaaaggttggttgttgttgcatcgatctccaaatccagattgattcgtcacgaaatctgctcaccggttgtttcgtcgccgtcctctgttcacccaacgaagatgaacggcggtccctccggtttccataatgctccggtaacgaaagccttcgttattacgagcgctcttttcactgtcttcttcgggatccaaggtcgttcttctaagctcggtttgtcttaccaggacatttttgagaaatttcggatatggaagttaatcatgtccacttttgccttctcctccacaccagaattgatgttcggattgtatttgctatactacttccgagtttttgagagacagattggccaaaaagtccngggttatntgtcnagggctgntccatnccngggcatttgtnccngtnagnnccagaantntaccctggcc

SEQ ID NO: 125193 - DNA, 710 bp, Arabidopsis thaliana
  unsure (1)..(710): unsure at all n locations
cccacgcgaccacggacgcgtgggctttacgtgaaaaaccccaaggtcatcccacccggggttctcgtctgtggtggttccaaacaagacgcgtattacaaggctggtaaaaaaatatacgaaccagcactacaagactgcgccaggataaggatcaacagcgcaaagccacgatggaagacggagatgatgccaaccccacgaatcatgagtgatactgtcatcctccctaacggagacatccttctagtcaacggagctaaacgtggttgttcaggctggggatatggtaaagaccctgcctttgctcccctcttgtacaagccccatgctgcacgtggcaagcgtttcagacagctcaagcccaccaccatcccacgtatgtaccactccagcgccatcattcttccagacggtaaggttcttgtcggtggcagcaacaccaacgacggttacaagtacaacgttgagttcccaacggagcttcgcgttgagaaattctccccaccttacctcgacccggctctagccaacataaggccaaagatcgtcaccaccggcaccccanaacaggtcanatacggacaattcttcaacgtgaaggtcgaccttaaagaaaagggagcaaccaagggaaatctcaaggttaccatgttagcccctgccttcacaacacacagtatctcaatgaacatgaggatgctcatctt

SEQ ID NO: 125194 - DNA, 445 bp, Arabidopsis thaliana
cggacgcgtgggcggacgcgtgggggggaatttgggaaaagtatggagaagaagacgaaagtgctaattgtgggaggtactggatacttgggtcagcatcttcttcaagctttcgccggcaactatggcggtgaatgtgagctatacgacgtcgctttcactcaccattcttctccacttcccgctcgtttgctcgacgctttccctcattcccccgcgtttcctgtcgatcttaaatccggtctagggctcaattccatatcccaggactttcgtcagcctgatgtggtcgtgaattgtgctgctctgtctgtcccacgagcttgcgagcaagatccagattccgccatgtccatcaacgtacctacttctgttgtaaactggttatcaagttttgagactaacaaaaccttgttgattcatctctctactgatcaagtttatc

SEQ ID NO: 125195 - DNA, 432 bp, Arabidopsis thaliana
ctctatctccggtcatgcctccattaccgtcctccacggcgccttcgtcttcgagacatcttcgatcgccggaaagtatcgcgaaatttgcagggagagcaatatttcctgctttacaggggaaatcgtgtccgatatgcctcgaaaatctaaccgagcgaagatccgccgccgtgatcacggtgtgcaagcacggatactgccttgcttgtattcggaagtggagcagcttcaagaggaattgtcctctttgtaacactcgttttgattcctggtttatcgttagtgattttgcttctagaaaataccataaggagcaattaccaattcttcgtgatcgtgagactttaacttatcatcggaataatccttccgatcgccggaggataattcaaaggtcgggggatgttttggaaaactctagctcaagat

SEQ ID NO: 125196 - DNA, 511 bp, Arabidopsis thaliana
  unsure (1)..(511): unsure at all n locations
aaaagattttaagagagaaagggggagaagtgagagagatggagcataagagaggacatgtattagcagtgccgtacccaacgcaaggacacatcacaccattccgccaattctgcaaacgacttcacttcaaaggtctcaaaaccactctcgctctcaccactttcgtcttcaactccatcaatcctgacctatccggtccaatctccatagccaccatctccgatggctatgaccatgggggtttcgagacagctgactccatcgacgactacctcaaagactttaaaacttccggctcgaaaaccattgcagacatcatccaaaaacaccagactagtgataaccccatcacttgtatcgtctatgatgctttcctgccttgggcacttgacgttgctagagagtttggtttagttgcgactcctttttttacggagccttttgctgttaactatgtttattatccttctttcataaccaatggaggtttaanttncccttngggant

SEQ ID NO: 125197 - DNA, 501 bp, Arabidopsis thaliana
taatacgactcatatagggaaagctggtacgcctgcaggtaccggtccggaattccccggtcgacccacgcgtccgcaagtgaagaggttccctcgtcagaaactcccaaggtagtagaagaagaagtgatagctaccaaagctgaagatgattcgccggaaaaagaagagcaaacggaaacacttgctgcagcagctgaagctgaagaggtggttcctccaattccagaaaccaaaagtgaagaggaaattgttgagaactctattcctccaaactcagccactgatgaagtttcatctccagaagctttagcaagtgaagaggttgagaaggagcaagtggttgccgaaacacctgttgatgaagtcaagactcctgcacctgtagtcacagaagcttcttctgaggaaagtggcaacaccgctactgctgaaagcatcaaaggcatttcaccagctctagtggagcagctgagagaaaaacaggggcaggaatgatgg

SEQ ID NO: 125198 - DNA, 975 bp, Arabidopsis thaliana
  unsure (1)..(975): unsure at all n locations
tccnnnnnnnnnnnnnnnnnnnnacgccatggtcgaaacatctnnnnnnnnnnnnnnnnnnnnnnnnnnnnnnccacgcgtccggacggatagcatcagcggtgtatttggtgagagttctgatggtgtatctgtcgctcttggagtagctgctgctgctggattaagtgtttttgcatttacagagattgaaaccatactccaactactaggttcagctgcacttgttcaacttgcaggcaagaaacttctatttgctgaggaccgaaagcaaactctaaaacaggtggatgagttcttgaacacaaaggttgcccctaaagaacttgttgatgagttaaaggaaataggaaaggctcttcttcctcaatcaacaagcaacaaagctctcccagcaccagcaacagtaacagcagaagcagaatcagctacagctacaaccaccacagtcgataaaccagtacctgagccagaaacagttgcagctacaacaaccactgtagataaaccagtacctgagccagagccagtgccagagccagtgcccaggccagcgattgaagctggaatcgctgcacaagtaatcacagaaccaacccgaacagaagccaaaccaaaaccttattcaagaactctctctccatatgcattcgaccctgacttggagccttcatttttttcgatgccattgcagccctgaaaacaggtaaaaaccggtcttttctcggtacttaatctgggtttggccttctgcaaacagaaaaacaaaaaggggccgaaaattggaacctgggtcttttttctctcggtttttctcccgaacctagaaggcttctttggggccaaactgaataagtggactttgttttgtttttctcnnnnnnnnnnnnnnnnnnnnnnnnnnnnnnnnnnnnnnnnnnnnnnnnnnnnnnnnnnnnnnnnnnnnnnnnnnnnnnnnnnnnnnnnnnnnnnnnn

SEQ ID NO: 125199 - DNA, 634 bp, Arabidopsis thaliana
  unsure (1)..(634): unsure at all n locations
aaccgncctggcagacagtncagttcaacacccctntggtaacccgtccctgnccagngccagtncnggngccagnccagtgcccnggattgaagctgcactccctgcacaagtaatccccggaccccaccggaaccggaacccaacccaaaacctcattcaagacctctctctccatatgcatcgtaccctgacttgaagcctccatcttctccgatgccatcgcagccctgaaaacagctaagaacagtctctctctcgttacttagtctggttttgtcctcctgcaaacagaagaacaaaagtggtcgaatattgtaacttgttcttttttctctcgttttttctcccgaacttagatgctactttgtgtcgaatctgagataagtggactttgttttgtttttctccctttataccaccattgagttcaaacaagagtctgtcatcgcgttaaaggggatcagaagctgtgtgaggggtgtattggacgaaataaaagttgtggggaaatttccaaatatcttgtgattactggatcttgtgggatagatctctttctttctcttattctggattccctatacataacaaaaaggttaaatggggtaatgaaaagtgtgacatatactta

SEQ ID NO: 125200 - DNA, 528 bp, Arabidopsis thaliana
  unsure (1)..(528): unsure at all n locations
cagtcgctgcacaagtaatcacagaaccaaccgaaacagaagcccaaaccaaaacctcattcaagacctctctctccatatgcatcgtaccctgacttgaagcctccttcttctccgatgccatcgcagccctgaaaccagctaagaacagtctctctctcgttacttagtctggttttgtcctccggcaaacagaagaacaaaagtggtcgaatattgtaacttgttcttttttctctcgttttttctcccgaacttagatgctactttgtgtcgaatctgagataagtggactttgttttgtttttctccctttataccaccattgagttcaaacaagagtctgtcatcgcgttaaaggggatcagaagctgtgtgaggggtgtattggacgaaataaaagttgtggggaaatttccaaaaaaaaaaaaaaaaaaaaaaaaaaaaaaaaaaagggcagccgctctagaggatccaagcttacgtacgcgtgcatgcgacgtcntagctctnctatannnnnnnnnn

SEQ ID NO: 125201 - DNA, 430 bp, Arabidopsis thaliana
agtctaacgcttgtgcaatggcagatagttcgtctaggaggaaccttaaacgatccttcttagaatgatgaagattccgataaacaacctcccgataagcgagtacggtttccaaaggggaagaagtcgaaacctgaacagctcttagaggaagaagctttagcccgccgcaaagcccgtgatgctgctaaggagcgtgcaaagattcgcaatcagaatactactaagctctttatcgaagatgacagtgatgatattaatcaggctcaggagacttatgaggatgatggcaatcgcacagaagatgggatccagattgaagcttttagtctggacagagagaaagaagaaggttactttgatgctgatgggaactttgtagaatatgttagagaaaaggaagtcaaggatgcatggcttgacagtattg

SEQ ID NO: 125202 - DNA, 535 bp, Arabidopsis thaliana
tctctacgactcactatagggaaagctggcacgcctgcaggtaccggtccggaattcccgggtcgacccacgcgtgcgtcgaactcgtatgactaggcctgtgcctcgtattggagacagaagaattaggaagatattggcatctagacattggaaaggaggttcgaagaacaacacagatgcaaagccatggtattgctcaaagaggagttattacttgcaccatcatcagaggagttatcccatcaagaaaaggaaatactttgacagtgtttacgactcgaactctgatgattaccgtttgcaaggaaagactcataaaggaagcagaacaatatcttccatgaaaagtcgaaatgcgtcctttgtgtcaagggatcatcatgtgaagctgcggatcaagtcttttagggtgcctgagcttttcgtagagattccagaaactgctactgttggctccttgaagccggtggtgatggaagcagtgaccaccatactgggtgatggactgcgagtgcgcctgtggttcaaggaa

SEQ ID NO: 125203 - DNA, 1414 bp, Arabidopsis thaliana
cacaatctcaaatctctgattcttcgatacgataaattcttcctcgatatagaaaccactgattagatcctaattcgtcgcctagctcaaaagatggtgctttcgcaaaagcttcatgaagcatttaaaggaacagttgagaggatcacaggtcctcgtacgatctcggcgttcaaggagaagggagttctcagcgtcagcgagttcgtacttgccggagataatctcgtctccaagtgtcccacctggtcttgggaatctggtgacgcaagcaaaaggaagccatacttgccctcggacaaacagtttttgattactagaaatgtaccttgtctacggagagctgcttctgtggcagaggattatgaagctgctggaggtgaagtgttggttgatgatgaagataatgatggttggctggctacacatgggaaaccgaaagataaaggcaaggaagaggataacttaccatccatggatgccttggatataaacgagaaaaatactatccaatcaatacctacgtattttggaggtgaggaggatgatgatattccagacatggaggagttcgatgaggctgacaatgtggtagaaaatgatccggcaactcttcagtcaacttatcttgtggctcatgaacctgatgacgataacattctccgaactcggacatatgatctcagcataacgtatgataagtattacccaaactcctcgtgtttggctgacccggttattgatgagtcaaggatgcttctgcaacctgaacttgtaatgggggttgttagccaagcccatgctcgtaaaccggccacaatcgaagatcatccacacttgcctggtaaacatgcttcagttcatccatgtcggcatggagctgttatgaagaaaatcattgatgtattaatgtcgcgtggagtagaacctgaagtcgacaagtacctcttcctgttcttgaagttcatggcatcagttattccaacaattgagtgcgattacccaatggactttgatctcggtagctcaagcacctaatatcagatttaaacaagtatgtgctcgtgaatccgggaaacaagtatggtctcatggatggctggatggctctgccctgtacataaaacagagtcctcactttcatttctctccaagataaactttaaggtgttgtggtttaatcactcgtttatctaaagtttacgctgatgaatagtaatttgtgacaaaactctgaaaacgggtatttgatcaaaactgattcggtgtggttcaaaaaacagaatgtgatttagtgtgtttaatacactcttgctttggagaaaaaaaaaaaaaaaaaaaaaaaagggcggccgctctagaggatccaagcttacgtacgcgtgcatgcgacgtacatagctggtcgatagtg

SEQ ID NO: 125204 - DNA, 956 bp, Arabidopsis thaliana
accaaagtttctgaatctgaccaccaatgttttcctgacttatgtcttctgaatctgaccaatgtagagtatttttgtgatcgtctttcctgacttatgtcttgtttcgttttgtttttcattaaaattcatgggttttgttttgttgcttgtttatatttcctgttatctacttaaaagctacgatgtatcttgtagtcaaggatgctgctgcaacctgaacttgtaatggaggatgttagccaagaccatgctcgtaaaacggtaaaaggaagacaatctcaactgcatcaattaccctttttgttattccaccaaagttttcctgacttatgtcttctgaatctgaccaatgtagagtatttttgtgatccgcctttcaaaaaatgcacagggcacaaatcggaggtccattccacaactttgcctcgggaaacatgcttcagttcatcccatgtcggcatggagctctgttttagagaaaatcatttggtgtattaatgtcgcgtggggtagaacctgaagtcgacaaggacctcttcctgttcttgaagttcatggcatcagttattccaacaattgagtgcgattacccaatggactttgatctcggtagctcaagcacctaatatcagatttaaacaagtatgtgctcgtgaatccgggaaacaagtatggtctcatggatggctggatggctttgccctgtacataaaacagagtcctcactttcatttctctccaagataaactttaaggtgttgtggtttaatcactcgtttatctaaagtttacgctgatgaatagtaatttgtgacaaaactctgaaaacgggtatttgatcaaaactgattcggtgtggttccaaaaaaaaaaaaaaaaaaaaaaaaaaagggcggccgctctagaggatccaagcttacgtacgcgtgcatgcgacgtcaaagctcttctat

SEQ ID NO: 125205 - DNA, 389 bp, Arabidopsis thaliana
  unsure (1)..(389): unsure at all n locations
ccctttctggaggtcccngggccccgggtttcccccccattggggtcccggttccccccaagggcctttgacccccggtagccccaagcccccctaantccccggttttaaacccagtatgtgccccgtgaatcccgggcaaaccaagtatggtccccatggatggctggatggctctgcactgtacataaaacagagtcctcactttcatttctctccaagataaactttaaggtgttgtggtttaatcactcgtttatctaaagtttacgctgatgaatagtaatttgtgacaaaactctgaaaacgggtatttgatcaaaactgattcggtgtggttcaaaaaacagaatgtgatttagtgtgtttaatacactcttgctttggag

SEQ ID NO: 125206 - DNA, 1322 bp, Arabidopsis thaliana
  unsure (1)..(1322): unsure at all n locations
nnnnnnnnnnnnnnnnnnnnnnnnnnnnnnnnnnnnnnnnnnnnnnnnnnnnnnnnnnnnnnnnnnnnnnnccacgcgtccgcttatatacaagaacttgctcattcctcaaagcatccacacataatcacgatgaagctctttgttcatctctctatcttcttctccatcctcttcatcactctcccatcttcttacagctgcaccgaaaatgacaagaatgccctccttcaaatcaagaaagcacttggcaatcctccccttctatcctcctggaacccccgaaccgactgttgtaccggctggaccggcgtcgaatgcactaaccgtcgcgttaccggtctcagcgttacctccggcgaagtctccggtcagatctcgtaccagatcggcgacctcgttgacctccgtacactagatttcagctacctgccacacctcaccggaaacatcccacgcaccatcaccaaactcaagaacctcaacactctctacttgaagcacactagtctctccggtccgattcctgattacatcagcgagctcaagagcctcacgttcttggacctttcttttaaccaatttaccggtccaattcccggttcgctatctcagatgccgaagcttgaagccattcaaatcaacgataataagctaaccggttctataccaaactctttcggttcttttgttggcaacgtccctaatctctacttgtctaacaataagctgtcaggaaaaataccggaatcgttgtctaaatacgacttcaacgcagggaatttgtcgggaaatggtttcgaaggaggggcctttatgttcttcggacggaacaaaacaacagtacgagtggatttgtcgagaaacatgtttaatttcgatctcgtcaaggttaagttcgctagaagcatagtttcgttggatctgagccagaaccatatctacgggaagataccaccagcactgactaaactacacctcgagcatttcaacgtgagcgacaaccatctctgcggaaaaatcccaagtggcggtctacttcagacctttgaaccatctgccttcgctcacaacatctgtctttgtggaactccccttaaggcttgttaatttggtttaatcttggcggaagaataaaaataatgttgaatatgttatgatgatgtgttcattatcaccgccaaaccaagtttattgtttctttgttatgaatttaatttaatggcaagaattggttacgtaaaaaaaaaaaaaaaaagggcgcccgctctagaggatccaagcttacgtacgcgtgcgtgcgacgtcataactcttgtata

SEQ ID NO: 125207 - DNA, 529 bp, Arabidopsis thaliana
accacgcgtccgcggacgcgtgggggaagataagccagaagggtttccatttgaaatcattgataattcaggggagagaactgtgttgctgacaaggaaatttgaggatgaaaccatccaagtggaagttgactctgttgcttcttatgatgatgaagatgaagaagaggaagcagaaccaaacaatgaagaagacgatgaagatcaagagagctcgggtaaagtccgggttccgatggttgttagtgtgcagaaaggtgatggtgtgtgtcttgagtttggagtcagcgcatacccggatgagattgtgattgatagtttatcgatcaaacaaccgcaagatctgataatgaccttgcttacgaaggacctgactttgatgaccttggatgagaatttgcagaaggctttccacaggtacttggagatcagaggtattaaaccaagcttcactacctttctggcagattatgtggccaacaaagatagcagagagtatcttcaatggctcaaggatctcaagtctttt

SEQ ID NO: 125208 - DNA, 602 bp, Arabidopsis thaliana
  unsure (1)..(602): unsure at all n locations
nnnnnnnnnnnnnnnnnnnnnnnnnnnnnnnnnnnnnnnnnnnnnnnnnnnnnnnnnnnnnnnnnnnnnnnnnnnnnnnnnnnccacgcgtccgtttctctctcagcttacgaacaagaaaaaaagaagaatctttagccacctttgagatcaaaagatgaacatcgctcacactatcttcggcgttttcggaaatgcaactgctctgtttcttttcttggctccttcgataacattcaagagaatcatcaagaacaaatccactgaacaattctctggtatcccttatccaatgactctcctcaactgtctcctctctgcttggtatggacttccctttgtgtcaaaagacaacacacttgtgagcacaatcaatggcacaggagcagtgatcgaaacagtctacgtgttaatctttcttttctacgcaccaaagaaggagaaaattaagatctttggtatcttctcttgcgttttggctgtattcgcaacagtagctctcgtctctctctttgctcttcaaggaaacggtagaaaactcttttgtggtctcgcagctactgttttctccatcatcatgtacgcttctccactctccatca

SEQ ID NO: 125209 - DNA, 435 bp, Arabidopsis thaliana
cccacgcgtccgcccacgcgtccgattcaagctgcgattgcgaggaagagaagagacttcagatctagcttgatccggtgataatggcgctcgagtgggtggttttaggttacgcggcggcggctgaagcgattacctggtgctattgacgatgccaggactcgacggactccgcaagggattagtcgccgtcacgcgtaatctcctcaaaccgtttctctccatagttcctttctgtctcttcctcttaatggacatctactggaaatacgaaactatgccttcgtgcgatggcgattcctgcacaccgtcagagcattttcctcaccagaagtccatgtattaattcctgcgaaacgcgcttttcattgcggcttgacttgtaatatactggatccttgtacgaatctcctatttggtcgataagatccctct

SEQ ID NO: 125210 - DNA, 568 bp, Arabidopsis thaliana
tgaaggaagtctttactcagagaaccaaaagaaaaataaagagaaaagaacccaaaagaaaaaaagccattgtaaattcagaataaatggaagaacatctaaatccattagcagtgactcatcttcttcaacacacactaagaagcttatgcatccatgagaactctcaatgggtttatgctgttttctggaggatcttgcctagaaactatcctcctcccaaatgggatggtcaaggagcttatgatagatcaagagggaacaggagaaactggatcttggtttgggaagatggtttttgcaactttgcagcttctgccgcggaaatgagctccggagaaggtagtggtggcggtggtggctcagcggcttatggaaatagtgattttcaacaataccaagggcttcagcctgaattgttcttcaagatgtctcatgaaatctacaattatggagaagggtctgtgaggataatttttcagcaaaaattaaatgatatttacacaaagaaatataaccttttttctatttatatttttggatatagtactttctctcttttgggttt

SEQ ID NO: 125211 - DNA, 464 bp, Arabidopsis thaliana
acaatttagtttaagatctcaaatacgatctgaaaaataatgatgatgggaaatacatttggttcaagtttggcgagtttattcttcttgtgggcaactattcaacaaatcttcccaaaccatctcagaatcgccattaaagagtttcttatctccacaatacaacaactctcatttgtccagagattttccgacagattcatcaacttcttttcgccttatgtcgaaatcagcttctctcaatacgaagattatcaattcaatcacgcatttgcagccattgagacttaccttggggcaaaagcaactgataaagccaagcatctaagagcaagccaagttaaagagagtaaaggtttggtcttgaaacgagacgagactaaagtccgagatgagtatgaaggaggtactgtctggtgggagatggaaaccgactccacaggatatagaacattcaaactcac

SEQ ID NO: 125212 - DNA, 419 bp, Arabidopsis thaliana
cggacgcgtgggcgcgactctactctactctactctactcaaaaccaatcaaaaacccaactttgaatcacaaccagtagaatcacgagtcatgcaattcctccagaactctcgtagaatcgctacggtcttaaaacccattgttaccaccgagactaatctgagattcttctcctctgcttctcaaatctcaagatccttccaatggcggagtcaagcatcttcgtcttcctctgtattaaaagggattgatagtagtagtcacttgtcctctatgagcttgttgatccccagatcgagctttacgtctgaagcggaaaagcttgcgggaaatcctacagtgactgtgaaggatttgcatgataaaatgcttaattctgtaaatgtcaagagatcaatgcctccaaatgcgtggttgt

SEQ ID NO: 125213 - DNA, 1150 bp, Arabidopsis thaliana
  unsure (1)..(1150): unsure at all n locations
atgatactccnnnnnnnnnnnnnnnnnnnnnnnnnnnnnnnnnnnnnnnnnnnnnnnnnnnnnnnnnnnnnnnnnnnnnnccacgcgtccgtgggaaaggacttttcaccaaagaaatagacgaggccttgataaatggtcatattgacatagctgtgcactcaatgaaagatgtcccaacttacttaccagaaaaaacgattttaccttgtaaccttccgcgtgaggatgttcgagatgcggtggggtgtctaactgcagccacgttagctgagctaacagctggaagcgttgtgggaacagcttctctcaggagaaaatcgcagattctccacaaatatcctgcattacatgttgaggaaaacttcaggggtaatgtgcagacaagactatcaaaactacaaggaggaaaggtccaagcaactctattagcactagctggtcttaagagattgagtatgacagagaatgtcgcatctatcttatctctcgatgaaatgcttccagctgttgctcaaggagctattggaattgcctgtagaactgatgatgataaaatggcaacttacttagcctcactgaaccacgaggaaacaagactagcgatttcatgcgagagagcttttcttgaaacgctagatggctcatgccgtactcctattgctggatacgcatccaaggacgaagaaggcaactgcattttcagaggattggttgcttcccctgaccgtactaaagttcttgagacctcaagaaaaggtccatacgtgtatgaagacatggtgaagatgggaaaagacgcggggcaagaattgctatctcgtgctggtcctggcttcttcggcaactgagccattcgaagaagaggaggaagagatgtgacacggacaaagtctagtgtttaggagtgattcaacatcttgaagtcccgtttcttcctccgaactgttgtaacttttttgattttgagagaaacatgaccttttgtttattgattgttttgttgtatttagattaaattcatcttgcaattgtacccctttttttctgtcccacgatgaaactaggacccaagaaattagagagacaaaataaaatccaaaaaaaaaaaaaaagggcggccgctcgcgatctagatcttgacgcgtgg

SEQ ID NO: 125214 - DNA, 413 bp, Arabidopsis thaliana
  unsure (1)..(413): unsure at all n locations
agaagagtttacttgttctggaaccctaaatctcgaatctggtaactcggatccgataaatcgttccagagatctgttacttctctattcaaggatctgttatcggtgcgaggatctacggattcttctgttcgcgcataatcggaaatggcagataacaattcaccacctggctctgtagaacagaaagcagatcaaattgttgaagctaatccattggtgaaggatgatacttcgctggaaaccatagttcgaaggttccaggattcaatgtcagaggcaaagactcataagttctgggagactcaaacctgttggggcagtttaagggatatttgggggtacggagtttgccctgaagggcccgtttgagccttcaaactcccttatttttnggntnaacaaangncgga

SEQ ID NO: 125215 - DNA, 538 bp, Arabidopsis thaliana
  unsure (1)..(538): unsure at all n locations
atgatattgccgnnnnnnnnnnnnnnnnnnnnnnnnnnnnnnnnnnnnnnnnnnnnnnnnnnnnnnnnnnnnnnnnnnnnnnccacgcgtccgtgcgagttttgatggaagcggttagaacttcaggtctctctactatctctgacacattggacgaaacagcatacggcgaggggaaagagcaagctgacagagaaattactagtgagatggaggctttggctgctgcttaccatgtcttcagaaatgttgctcagcccttcttcaattacatagaggaagaggacttgcttaggtttatgattaaggaagaggttgatcttgtgttcccattgtttgatggtgccgctgagaccgggagaattacaagaaaagctttcacagaatgggtggttaaggtgtacacgagccggagagctttagcgcattccttaaacgacacagaaacagcggttaagcagttaaacaaacttgtgacagcaatcttgatggtggttaccggtgtcatttggctgctccttctagaagtagcaacgac

SEQ ID NO: 125216 - DNA, 496 bp, Arabidopsis thaliana
  unsure (1)..(496): unsure at all n locations
ctacaatacgactcactttagggaaagctcgtacgcctgcaggtaccggtccggaattcccgggtcgacccacgcgtccgatctacacttggtgccaataggaagtctcaagaattctttgaaagggtaccagctagggacaataatgtgagagttttgtttactgagaaagttatggaaagtattgaaagggagaccagctgcaagattaaattggatgagaagttcataattgttagtggcaaggacagattgatcttgaggaaaggtgttgatgctgttcacaaggttaaggaggatggtgagatgaaaagttcttctgtttctcacaggagcagatccaggtcacctaggcgaacttctgttggaccatcacgtgctcgaaactctgaacctcaaaggcagcagctgccatcacatggttcgtcaagtttcccagagcgctctggaaggcaagataagtttgtggataatcgnttccgcgaagagactcgtg

SEQ ID NO: 125217 - DNA, 458 bp, Arabidopsis thaliana
cttatcgtttcccagaatttgggtcgccattgattcgcacctcgcaagatggaaagcactagatcagatccagagcttgatgatgactttagtgaaatctacaaggagtatactggtcctgcaagtgctgtgaccaacaacaatatccaagacaaagacaaacctgtcaaacaacgttctgaagaaagatgtgatgaagaagaagagcaacttcctgatcccaactctgtaccaactgatttcactagccgtgaagctaaggtttgggaggctaaatccaaagctactgagaggaattggaagaagaggaaagaggaagagatgatctgtaaaatttgtggcgagtctggtcattttactcagggatgtccatctacacttggtgccaataggaagtctcaagaattctttgaaagggtaccagctagggacaataatgtgagagttttgtttactga

SEQ ID NO: 125218 - DNA, 401 bp, Arabidopsis thaliana
  unsure (1)..(401): unsure at all n locations
actttaccggattttggttttggtgctcgacgactctgagtcgaaatctctctctctcggaaaagctgaatctggatcatcaaagtatcattttaaagtttgatcatttcttctttgggtatatagggtagtattcaaaatggcagcttcagaaacagttctacgtgttccattaggatctgtatctcaatcttgctatctagcttccttctttgttaactcaacaccaaaacctctcgtttaaacccgttagtagaaacagaaagaccgtccggtgtacaaactcgcatgaggtctcaagcgtaccaaaacattcatttcatangtcaaactctgttttgaaaggtaaaaagtttgtttccacgatatgcaaatgccaaaaacatgatgttgaggagagt

SEQ ID NO: 125219 - DNA, 473 bp, Arabidopsis thaliana
ctttatcggttttttgctttggtgctcgacgactctgattcgaaatctctctctctcggaaaagctgaatctggatcatcaaagtaagtctccatcgttacttttatctcttcgtgaagattctttaatcccatttatttgttcatatttgcaatcttcgaaaattcctgaagctaaacaaaaatgggatatagcgacaaagcactgaaattggacttgatcaacagtgtttctctgtaattagagcgaaatttggaaaaaagatgacatttttctatgatttgcgatgtctgattcattcattcccacatgtttaggttctcttgtgtaaagtttgttcctttcttatgtcttcttatccaatttttgcaggtatcattttaaagtttgatcatttcttctttgggtatatagggtagtattcaaaatggcagcttcagaaacagttctacgtgttccattaggatctgtat

SEQ ID NO: 125220 - DNA, 421 bp, Arabidopsis thaliana
cccacgcgtccgaaaaggctcatctttgcgactgctcccgtgttcttcgtctctctgtcaatggctcgcctcctcagatgtctgagaagaagtttcatatttagttcatcgacttcgattgcgtacagaaaccctagaatatgtgttcagtcaaatcaaagctatattttcttaagcagccgcaagtttctcagctcggggagttacgtttcagaaatgcggagaacagctttcgagggtaacattctcagattaattcgtttggagattcagtccgagcttgatcactcgcctattcttcagcctgaagagagttttggtccattcacggtggatgagcgtccgggggagcagtggattagcttgagaagaaaatttggggagaaggaagatattaagattgaagcaaccatgtttgatg

SEQ ID NO: 125221 - DNA, 403 bp, Arabidopsis thaliana
atcatttcaactctgaacactctatgactaaaagaaaaaatcattcacctcgataccagaaagaagaaaagtcatcgcttttgggaaatttgatgaacaaagaccaaatcttaaaactcgaattcttctggttcctaaaaagtggctgtcaagaagagtgagacatgcatcaaactctctcttctcctgccatggcgtcaaacctccggaaaccctatttcctcaggtacttaactattcttccccaatcgatgatggtcgaaagctgaaacctttttctgcaaatcgattaaccgacaagaaaatccagcccaacccacccactttgttttgtttggatgataaaaatgtcggaaaagagtttgctttcttcaaaattcctcttttacacgataactgtttc

SEQ ID NO: 125222 - DNA, 547 bp, Arabidopsis thaliana
  unsure (1)..(547): unsure at all n locations
tgatacttcnnnnnnnnnnnnnnnnnnnnnnnnnnnnnnnnnnnnnnnnnnnnnnnnnnnnnnnnnnnnnnnnnnnnnnccacgcgtccggcgtgtagcatatacaaggacatgaaagaaaaagacgtgacccctgacgaggtgttttttagtgcattgattgatgttgcaggacatgcaaaaatgttagacgaggcttttggcattcttcaggatgcaaaatctcaagggatacgtcttggaactatatcatatagctcactgatgggagcttgttgtaacgcgaaagattggaagaaagcactggagctctatgaaaaaatcaagtcaatcaaacttagaccaacaatttcaacaatgaatgcccttataactgctttgtgtgaaggtaatcaactgcccaaggctatggaatatcttgatgagataaagactttagggttaaaaccaaatactatcacttactctatgctcatgctggcaagtgagagaaaggatgactttgaggtaagctttaagctcctttctcaagcaaaaggagatggag

SEQ ID NO: 125223 - DNA, 533 bp, Arabidopsis thaliana
caaggtctctacgactcactatagggaaagctggcacgcctgcaggtaccggtccggaattcccgggtcgacccacgcgtgcgagagagataaagagatcacacgtgggaatccaacttaccaattgcaatggcgtcaatgaccatgacatcttcatttctccctaccgtctcaaaccttccggcaaacatctccagcaacagcagacgaagcctcacggtggtcaaagcctccgggagtgaaaacacaaccagcttggagaacaagaagcaagaacagagcatgaagatgaggagggatcttgtcttcacagctgcagctgcagctgtgtgctccttagctaaggtggcaatggcagacgatgagccaaagagaggaacagaagctgccaagaagaagtatgctccagtctgtgtcacaatgcctaccgccaagatatgccgtaactgagtttgctatttaaccaggaactgggtgtatggggggcgagcacggtcgattgggagaggggcgcgggggggccttggatggct

SEQ ID NO: 125224 - DNA, 602 bp, Arabidopsis thaliana
  unsure (1)..(602): unsure at all n locations
tttaaaacacaatccatcaccaagtcatcagataaacaagaaacagagagagataaagagatcacacgtgggaatccaacttaccaattgcaatggcgtcaatgaccatgacatcttcatttctccctaccgtctcaaaccttccggcaaacatctccagcaacagcagacgaagcctcacggtggtcaaagcctccgggagtgaaaacacaaccagcttggagaacaagaagcaagaacagagcatgaagatgaggagggatcttgtcttcacagctgcagctgcagctgtgtgctccttagctaaggtggcaatggcagacgatgagccaaagagaggaacagaagctgccaagaagaagtatgctccagtctgtgtcacaatgcctaccgccaagatatgccgtaactgagtttgctatttaaccagcaactgtatctatgtcgtataactattctcagtgtggtttgtaaggatcatatttgattaaatctataaaacccgttgttaatgtattgaatcaacgaaaggatcccaaaccctttttaacttccaatctgganaaacttctctttnnnnnnnnnnnnnnnnnnnnnnnnnn

SEQ ID NO: 125225 - DNA, 394 bp, Arabidopsis thaliana
  unsure (1)..(394): unsure at all n locations
gggagctagctacgcctgcaggtaccggtccggaattcccgggtcgacccacgcgtgcggccttctgttggcattggagcactttcttctagagaagccgatgggagagctaatgcctctgcgggtgaaaaagaggcccataaattactacaaccccgcagacaaaactttaaggaccatggctattgaactcgctgaatactattttttggggagtgtgggaanccncaacccccgccttccaaaaaaaacacttccctcccctttttccccactttccccttttccattccgatcacccccaaattcccccatcctcccacccattccgaattttccctccaccctcctccccctttttttccccggtctctcccccttttgcgttctgcct

SEQ ID NO: 125226 - DNA, 416 bp, Arabidopsis thaliana
ctaattttttagaaacactggagcgactttcttctagagaagccgatgggagagctaatgcctctgcgggtgaaaaagaggcccataaattactacaacccgcagacaaaactttaaggaccatggctattgaatttgctgaataccaggtctgtgtagatttgtttatcacaactcaagcgtatgttgacatggcttcaatttctgagatcccaagaacaactggaggacaggtttattgttattaccctttctcagctctttcagaccccccaaagttatacaacgatcttagatggaatatcacgaggccccaaggttttgaggctgtcatgcgagtcagatgcagtcagggtattcaagtgcaagaatactcagggaacttctgtaagcgcataccaactgacatcgatcta

SEQ ID NO: 125227 - DNA, 1004 bp, Arabidopsis thaliana
tgatacttcaggtctctacgactcactattgggaaagctggtccgcctgcaggtaccggtccggaattcccgggtcgacccacgcgtccgggctgaaatcacaaaggagtcaagcactggaagtggggcttggtctacccaattggtggaatcccagaacgagaagaaagcacaagtgtcctcaattaaatggaaagtctgcaatgtgacagctggaccagactacatcccttgccttgacaattggcaagctatcagaaagcttcattcgacaaagcattatgaacatcgtgagaggcattgtcccgaggagtctccacgctgccttgtttctcttcccgaagggtataagcgatccatcaagtggcctaagagcagagaaaagatctggtacaccaatattccacacaccaagcttgcagaagtcaagggacatcaaaactgggtgaagatgagtggtgaatacttaacattccctggtggaggtactcaattcaagaatggtgctcttcactacattgatttcctccaagagtcatatcctgatattgcttggggaaataggactcgtgttatattggatgttgggtgtggggttgctagctttgggggatatctttttgacagagatgtactcgctttgtcatttgcacccaaagacgaacacgaggcacaggtgcaatttgctctggaacgtggtattcctgcaatgtcaatgttatgggaaccaagagattaccttttccaggatctgtttttgaccttatccattgtgctcgttgtagagttccttggcatatcgaaggtggtaaactacttttggagttgaaccgtgcattgaggccgggtggtttctttgtctggtcagcgactccagtctataggaagactgaggaagatgttggcatatggaaagctatgtcgaagctaacaaaggcaatgtgctgggaactgatgacgattaagaaagatgaactgaatgaagttggtgctgccatttacca

SEQ ID NO: 125228 - DNA, 445 bp, Arabidopsis thaliana
ccctcgcgtccggtgaagaatgggcactcgaggctttggtttctgggtcagtatgtgcttgagcttgctcttacggagtttttcttgcagaggtatccgagggaatctccgggacctatgagggagagagtgtttgctttgattgggaagaggtatctcccgaaatggattaaagcagcgagcttgcaaaatctcatctttccttatgatgatatggataagttgattaggaaagagcgtgagccaccggttaaatctgtgttctgggctttgtttggtgccatctatctatgttttgggatgccggaagtgtatcgtgtactttttgaggtgtttgggatggatccagatgctgatgagtgtcagcctcgaagcaggagacagctcgaggatgtagattatgtttctggtgaatttgaagggaaaaagctaggttggcaagata

SEQ ID NO: 125229 - DNA, 1326 bp, Arabidopsis thaliana
  unsure (1)..(1326): unsure at all n locations
nnnnnnnnnnnnnnnnnnnnnnnnnncnnnnnnnnnnnnnnnnnnnnnnnnnnnnnnnnnnnnnnnnnnnnnnccacgcgtgcgcccacgcgttcgtccacgcgtccgaaaaaagacaaaaatatatataaaaaaaagaaaaaaaaaagaaaaaaaaataattgtcttgctctgttctatttaacttttcttatatataaaaaaaatggcgaaaaatttactagcaatatgtctggtgtttatggttgcatcaagtgtggtttatgaagtgcaagggactttcttgttaaagctttacttgaggaggaagtttcccagacgttgtatcgactttgccccttatgctggcaaaggtatgttgatgctcgtgagcaaccttgaaggtggatgtcccgcaactagagagttcaaacaattcttttcaacgttcaagtcttacatgagctttatcagctcagcatcgatatccgcatcgaaaaacatcgatgtggagatgaatgggagatgtgaattgctttccaaggctatgtctgcattgactggaagcaaaagcagccaatcatcggagttaaaaatgaccatgttgtcaatgggaaagactttggttgagcagaagaggcaaggttcaaggatgatgtcattgaagcaaaagaaagagttggttgtggctatggtgaaatggactcgaatggttataacattcgtaaagagtgtcgccgagaagagaggaaagtcgattgatgaatcgtcttacggtcttgatgttgatgttaatgccagcattggaagttctagtggaagtgatggctcctcttcatccgataatgagagttcctcaaacaccaaatcacaaggcacgtccagcaaatccggaagtgaatcaacggctggaagcatcgaaactaacaccggatcaaaaactgaggctggtagcaaaagttcttcttcagccaagacaaaagaagtcagcggtggaagttctggtaacacttacaaagacactactggttcatcttcaggcgccagtccaagtggaagccccacgcccaccccttctacacctactccttctacacccactccttctacacccactccttctacgcccactccttctacacctaccccttctacgccagccccttcaactcctgctgctggcaaaacctctgagaaaggaagtgagagtgcttcgatgaaaaaagaatctaattctaagagtgaaagtgaaagtgctgctagcggaagtgtttccaagacaaaagaaaccaacaaaggaagctctggagacacttacaaagacactaccggtacatcttcgggaag

SEQ ID NO: 125230 - DNA, 535 bp, Arabidopsis thaliana
  unsure (1)..(535): unsure at all n locations
nnnnnnnnnnnnnnnnnnnnnnnnnnnnnnnnnnnnnnnnnnnnnnnnnnnnnnnnnnnnnnnnnnnnnnnccacgcgtccgactacatccaatgacagcctaagacgtaccttatcactcattgggtctgaaagtttcagctttacgcaaggtcttaaggacacggatccacaacatttgcatctcgaagaaggcactgtctcaggaagacctccatcgctgagcgcgtgggtggttgacaagaacaaagagaaaggacgactcggtttaagtaaaccaaacggattgggccctattgatgaaacaggtcctgtctcagcctttgatagtctctccatcaatagcagcaccgagcatcctgcgtcttcctattcgcctcctactccgtctgctccactactgcctgaagacgcttcttggtttcataatgacgctagtactaacaaagcagagagcttctatgatcagacacgatatatggaactccccggtatcatgaagccatacacaaacccaccctttgttgggatttct

SEQ ID NO: 125231 - DNA, 1391 bp, Arabidopsis thaliana
  unsure (1)..(1391): unsure at all n locations
acgactcactattgggaaagctggcacgcctgcaggtaccggtccggaattcccgggtcgacccacgcgtgcgcccacgcgtccgcaaccctctctctctctctctcagtacaacttatcatccatcaccatatatagagaatatgagcaaaacggaagcaatcagcttgaccaaaaggggaatgttgccgccaagtagttgcaatagcctaatggaccgctctgagtcccttaagagggacagtgtgatgggcaatggtgcagccaaagtgagaggaagcttggagcgcaagaaatcaaagagttttaaggaaggagatagttattcttcgtggctcataacggaggctcctgggagtatagccgccgtgaggagagagcaagtggcggcacaacaagcactaaggaaactaaagattgctcattacggtagatccaaatcaaccattaatttcacttcttccaaagtcgtccctcttcttaaccctaaccctaaccctcatcctcagagatgcagcttcctcacccccacttctgatcctatttacgtggcctaccatgatgaagaatggggagttccagttcatgatgacaagacgttgttcgaactgctgaccctaagcggcgcacaagtaggctccgattggacttcaaccttgagaaaacgccatgactataggaaggcctttatggagtttgaggcggaagtggttgccaaactcaccgagaaagaggtgaatgcaataagcatcggatacaaggtagggatgagcaaagtgaggaggtgttgttggaaaacgcttaaaaagatccttggggtccagaaagcgtttgtgtcattagagaaatacctttggggatttgtgaaccacaaaccaatctccacgaactacaagcttggacacaagattccggtcaagacatcgaagtcggagagcatcagcaaagacatggttcgtcgaggcttccggttcgtgggtcccactgtggttcactcattcatgcaagccgctggtcttacaaacgaccacttgatcacttgctgtcgccacgctccttgcactctccttgcaaccaatccctaattattaatttttattttaattgaaagtggtgtttttatttaactttcgagtgcaaaatgtaggtttaggagaaaagagattgcagttttttaaaattggcaatgtaagataaaccagctggtttgatttttttcttgtgtgtgaggtgtttaaaatcacatgtataatggtttttgatgtatgtgtggtgtggcaaattgaaatagtaattgattttcataaaaaaaaaaaaaaagnnnnnnnnnnnnnnnnnnnnnnnnnnnnnnnnnnnnnnnnnnnnnnnnnnnnnnnnnnnnnnnnnnnaac

SEQ ID NO: 125232 - DNA, 1331 bp, Arabidopsis thaliana
  unsure (1)..(1331): unsure at all n locations
tanttcagntttcctgnactncctgggcnacccactgngtcctgaaaaatatgggtatccaagaaactgacccgttaacgcaattgagtttaccaccgggtttccgattttacccgaccgatgaagagcttatggttcaatatctctgtagaaaagcagctggttacgatttctctcttcagctcatcgccgaaatagatctttacaaattcgatccatgggttttaccaaataaagcattatttggagaaaaagaatggtatttttttagtcctagggatagaaaatatccaaacgggtcaagacctaaccgggttgccggatcgggttattggaaagctacgggtacggataaaataatctcgacggaaggacaaagagttggtattaaaaaagctttggtgttttacatccggaaaagctcctaaaggtactaaaaccaattggatcatgcatgagtatcgtctcattgaaccttctcgtagaaacggaagcactaagttggatgattgggttctatgtcgaatatacaagaagcaatcaagtgcacaaaaacaagtttacgataatggaatcgcgaatgctagagaattcagcaacaacggtacttcgtccacgacgtcgtcttcttctcactttgaagacgttcttgattcgtttcatcaagagatcgacaacagaaatttccagttttctaacccaaaccgcatctcgtcgctcagaccggacttaaccgaacagaaaaccgggttccacggtcttgcggatacttctaacttcgattgggctagttttgccggtaatgttgagcataataactcggtaccggaactcggaatgagtcatgttgttcctaatctcgagtacaactgtggctacctgaagacggaggaggaagtcgagagcagtcacgggtttaataactcgggcgagttagctcaaaagggttatggtgttgactcgtttgggtattcggggcaagttggtgggtttgggtttatgtgatgatgaaatgctgacccaataaaaataagtcgttaatttttgtcccgtggcaaatcttatatgtatttgaatttcaattcttttgggttaagagggagactcatagatttagatgtagatttgtaatctttcatgcatagaaaatttgacgaatagatttcgtaactttattttgttgctgtttggttatctttgtattggtataaatttagtggattgaaattgcctattaatataaaaaaaaaaaaaagatcatccagggcggccgctctagaggatccaagcttacgtacgcgtgcgatgcgacgtcatagctcttctatagt

SEQ ID NO: 125233 - DNA, 1402 bp, Arabidopsis thaliana
cagctctcctacgactcactattgggaaagctggtcacgcctgcaggtaccggtccggaattcccgggtcgacccacgcgtccgcggacgcgtgggcggacgcttccccccttcgttcatcaaatcctcaagagaaaaaaaaaatccccaaaagcttcctcaaaaccctaacacagatctctcgatcttctccgatctgtcttttctcctaatctggtttagtttgatttaattggattgaagatgtcagacgctttgaatatgactcttgatgaaattgtgaagaagagtaagagtgaaaggtctgcagctgcaaggtctggaggtaaaggagtttcccgtaagagtggacgtggacgtggtggacctaatggtgttgtaggagctggaagaggaggtggacctgttcgtagaggtcctcttgctgttaatactcggccatcatcatccttctccataaacaagctttcccgcaggaagaggagcttgccatggcagaatcagaatgatttgtatgaagaaacccttagagctgttggggtgtcaggagtggaagtcggaaccacagtttatattaccaaccttgatcagggagtgacaaatgaagatataagggaactctatgctgagattggagagctgaaaagatatgcaattcactatgacaaaaatgggcgtccaagtggatcggctgaagttgtgtatatgagaagaagtgatgcaattcaagctatgaggaaatacaacaatgtacttttggatggaaggcctatgaaactggagattctgggtggaagtactgaatctcctcctgtcgcagctcgtgttaatgtgactggattgaatggaaggatgaagaggagtgtcttcattggacaaggagttagaggtgggagagtaggaagaggaagaggttcaggtccttctggaagacgccttccagtccaacaaaaccaacaaggtggtcaaggtggtcgaggcggggtccgtggtagaggcaggggtgctggtggaggcagagggaataaaagtggtggccgaggtggaaagaagccggtggagaagtctgctgcggatctcgacaaagatctcgaaagctatcatgctgaagctatgaacatctcttaaagcaagacttcgcatcttgtcatgtacttttgtgttctttattcgtagtctctgactaaatatgtgccaaagtctggtttggtttaattacgtttaggatggctctactctgctttcgttttcctcttttcttgtttcacactttcacagtcacttttggttattgaagttaaaagagatttagctgttaacaaaaaaaaaaaaaaaaaaaaaaaaaaagggcggccgctttaaaggatcccagcttacgtacgcgtgcatgcgacgtcagagc

SEQ ID NO: 125234 - DNA, 502 bp, Arabidopsis thaliana
  unsure (1)..(502): unsure at all n locations
ctatttccccccttcgttcatcaaatcctcaagagaaaaaaaaaatccccaaaagcttcctcaaaaccctaacacagatctctcgatcttcgccgatctgtcttttctcctaatctggtttagtttgattttattggattgaagatgtcagacgctttgaatatgactcttgatgaaattgtgaagaagagtaagagtgaaaggtctgcagctgcaaggtctggaggtaaaggagtttcccgtaagagtggacgtggacgtggtggacctaatggtgttgtaggagctggaagaggaggtggacctgtttcgtaggaggtcctctttgctgttaatacttccggccatcatcattccttcttccataaacaagtggcaagctccggaaatctttgatttggaactcttgtgccaccaaaattcccgaggcatttttaaaaacttnaagatgggttgatctttttaatngccttanntgcccttggggnggnntnattaaang

SEQ ID NO: 125235 - DNA, 369 bp, Arabidopsis thaliana
  unsure (1)..(369): unsure at all n locations
ggagagctgaaaagatatgcaattcactatgacaaaaatgggcgtccaagtggatcggctgaagttgtgtatatgagaagaagtgatgcaattcaagctatgaacatctcttaaagcaagacttcgcatcttgtcatgtacttttgtgttctttattcgtagtctctgactaaatatgtgccaaagtctggtttggtttaattacggttaggatggctctactctgctttcgttttcctcttttcttgtttcacactttcacagtcacttttggttattgaagttaaaagagatttagctgtaaatgagaaagctgttcttgttagttggttgaatctaataatcaatattaccggattttttntcntt

SEQ ID NO: 125236 - DNA, 430 bp, Arabidopsis thaliana
cccacgcgtcagaacgatactcaaagctcgtaatctccttctactctccagatccgaggattcccttcgtttacagatttgtaaacgttcgtgaaattggatttgttgatctctttggtaaacaagcatggctgctccagtgcctccaggagcatatagacctaataacaatcagcaaaactctggtggtcctccgaattttgttcctggttcacaaggaaaccccaattctttagctgctaatatgcagaatttgaacattaatcggccacctcctcctatgcctggttcaggtcctagaccatctccaccttttggtcagtcaccacaatcttttcctcaacaacaacaacaacaaccaaggccttctccaatggctagacctggacctcctcctcctgctgctatggctagaccaggtggacctcct

SEQ ID NO: 125237 - DNA, 642 bp, Arabidopsis thaliana
  unsure (1)..(642): unsure at all n locations
nnnnnnnnnnnnnnnnnnnnnnnnnnnnnnnnnnnnnnnnnnnnnnnnnnnnnnnnnnnnnnnnnnnnnnnccacgcgtccggtaggcttgaagcatgatgacgacagtcgccgccgatctccaccgttatcttttcctgattaccgtttttcttttcttcctctgcgacaaaacctctcttgctctgaccacagacggtgttcttcttctctctttccgttactcaatcgttgacgatcctctttacgtttttcggagctggagattcgacgacgagactccttgctcttggcgtggtgtcacgtgcgatgcatcttcccggcacgtgactgttctgtcacttccaagctcgaaccttaccggcacactaccttcaaatttgggttcactcaattcacttcaaagacttgatctttccaacaattccatcaatgggtctttcccggtttcgcttctcaacgcgacggagcttcgatttcttgatctgtccgataatcacatctccggtgcactaccggcgagttttggcgcgctttcgaacctccaagtgttgaatctctccgataattccttcgtcggcgaattaccgaacacattaggatggaaccggaacttaacggagatttcacttcagaaaaact

SEQ ID NO: 125238 - DNA, 740 bp, Arabidopsis thaliana
  unsure (1)..(740): unsure at all n locations
nnnnnnnnnnnnnnnnnnnnnnnnnnnnnnnnnnnnnnnnnnnnnnnnnnnnnnnnnnnnnnnnnnnnnnnnnccacgcgtccgtagctgcgagaagacaacagaaggggctctgctccgtcaagctgaggaggataaaaaccctagggtgagtgagacagagagaagcgaaaatggtgcagcgccttgtttaccgatcacgacacagttacgccaccaaatccaaccagcacaggatcgtcaaaactccaggaggtaaattgacgtaccagaccactaagaagagagctagtggacctaaatgtcccgttaccggcaagcgtattcagggtattcctcacttgaggccaactgagtacaagaggtcacgtttatcaagaaacaggaggaccgtgaaccgtgcttatggtggggttttgtctggttctgctgttagggaaagaatcattcgtgccttccttgtggaggagcaaaagattgtgaagaaggttttgaagcttcagaaggcaaaggaaaaggttgctcccaagtgatctagaccctattagtttttatgttttatggctctgttctagcgatagtactggttgcagagaaaaacattgtgtactcatcaaaaaatttaagcttttttgtattggttttggatctttggctctgtctacaattcgtttcggttttcgtttcttgttcatgttgagttcacatttcacgttttcaaannnnnnnnnnnnnnnnnn

SEQ ID NO: 125239 - DNA, 1297 bp, Arabidopsis thaliana
  unsure (1)..(1297): unsure at all n locations
ccaaaaaccaataagccaagagcttttntcattttttttcttgaaacccatggctcgattttccttcttgaatgttgtaaaggatgttgtggctattctaaatgaatcccgcaaactgtttctcaagaacaaaaagttgatgttctcagtcttggtattccctctcttactcaattgtttagtttacttcttgaacatctttgtcatcgtaccggagatcacaaacttgatccttgaagcaagtttgttgccttcgacagatccaacctccccggaatacgcagcccgccttatgagagtctttacagattttcgccaatttgtgggttcttcatacattttcgcggctgtctcctccatcatcaacctcttttctgttctagtcatcgtccacgcatcggctattactcttaaagatgaaaacttcaatatcaaagattttcctgttctgagccttaaatcttggaagggacctcttgtgacatatttctacattgctcttttcagtcttggctttggcttcctcttctttataatcctttgtcctatccttttgttctctataaaatccggttccgtggaaaatatcggtttcttggcggtcgaggctggtgttttattgattatattcaccgtctctcagtcctattttggtatctattggaacttatctatggtcatatcgatactaaagggaaagttatgggttccaaagctttggggaaagcagcaaagattgttaaagggatgaagacaaaactgtttctcttgaatcttttctttggtttattggcatccggattagctcaaatcttgcagctgatcaatatgggaagatcgttagcggttaccttaaccacaggttttgtccttgtgtgtttggtctttgcggtgaggatgtttcagcttgtgacttacaccgttgcatatttccaatgtaaaagcctccaaggcagagacgttgagtcgctcagggatgtggaatatatggcattgtcttccactactctcacggaatgattgccttgatatttcaagagaagggcatatatgatatgatatttaatctgtggattgtttgtttgtttgagaatattgttgaacttcaccatggatttggtaaagtattttgaataatcaaaggttttgttacatatatgttttgttaatggttttaaggtttggttgaatatatttggttttatatatagaccaaaaaaaaaaaaaanaaagggcggccgctctagaggatcccagcttacgtacgcgtgcatgcgacgtcatgctggtctatagc

SEQ ID NO: 125240 - DNA, 583 bp, Arabidopsis thaliana
gctctctacgactcactatagggaaagctggcacgcctgcaggtaccggtccggaattcccgggtcgacccacgcgtgcggagaatggagcaataacaaggattggacggacaatgtctgatcttccactagaaccatcattgtcaagaacattgatagaagcgaatgaaaccggttgcttatctcaagctctaacagttgttgctatgctgtcagcagagacaactcttcttcctgctaggagtaaacccagtgaaaagaagaggaaacatgatgaagattctaatcttcctaatggatccggatatggtgatcacattcaactgctacagattttcgaatcttgggaccgtactaattatgatcctgtatggtgcaaagagaacggcatgcaggtgcgagggatggtgtttgtcaaagatgttagaagacagttatgtcagattatgcagaaaatatccaaagatcgattggaagttggggcagttggtgggaaagagtcaagccgagccggctacaggaagtttggaagcctttgggttgggatttaaaccaatttttgggatttttcccaaaggaccgt

SEQ ID NO: 125241 - DNA, 708 bp, Arabidopsis thaliana
accacgcgtccgcccacgcgtccgctgggtttttccttactctctaagaaaaaccactactttggttaattgggaagacagagagattcgtaatccatggataagcctctgctttcaggatcagagaaaacgaatgaatccgagaggttggattcataccaatacctgcagagaaatagctcatctgctcgtaacccatctttcgccggagctggcgtcgtcaccgtcgaagaaatccgtaccgcttctgctgtttcttctgatcctccgtctctttatcctcccgttatcaagacccctgtttcgttacccattcctcaagctattggttatccaagtgcatctggagcaggtcatgaattgcaacaaaggcagtttcttgatgagattgaaataagagagctgcttattgatcatattggtcatcgttgctgttggggaagccgtcctgctcgtacatggaagattcatgctgttgaagactgcaatgtttatgtcggaactcttgatactttcattgaggagagggaagctttgacacagactgtgcctttcactggtggtgaattcaatggaaagaaacatggatctgaaccggggttatgggaactggacctgagaccgcagtttcctactctgtttgtcccgtataaagaaactcaagtcctggttcctaattctgagactgttgagaagtgcacaggtttc

SEQ ID NO: 125242 - DNA, 511 bp, Arabidopsis thaliana
  unsure (1)..(511): unsure at all n locations
agctctcnnnnnnnnnnnnnnnnnnnnnnnnnnnnnnnnnnnnnnnnnnnnnnnnnnnnnnnnnnnnnnnccacgcgtgcgcccacgcgtccgcccacgcgtccgcccacgcgtccggcagctgatttagatggttctgaggaatcctctgaaacaggggatgagaatggctcctctgattatgactctgaatcttctaatggttcggattttagcagtgaaggtgatgaaagaacggtgtctaatgacgccaatgacccagctgctcctttaattcaaatttcagagacttctgtttccgctgaccaggaagaactaaggtccagaagggccctggatttgtggttagatgatcagcctagtacatcaaaccaaactccatctgcattaaatagtaatcagagctcttatgcgaagatatccattggtgatgtaggaagccgagttaagcctaaaagctatagtctcgtagaccctggaaatggcagtggcttgaaggtagactatgcct

SEQ ID NO: 125243 - DNA, 471 bp, Arabidopsis thaliana
gagaatccttttgaactcgaggttaaagctgcagataatcgcatcattcagcaaacactctatgaaaagacatgtgaatgtgaagtgttgcaagaagaagttgcaaatctaaagcagcagctctctgaggccctggaactagcacagggaactaagattaaagagctgaaacaagacgccaaggaactaagtgaatcaaaggagcagttagaactcagaaacaggaaacttgcagaagagagttcatatgcaaaaggtcttgcatcagcagctgcagttgagctcaaggcattatccgaagaagttgcaaagcttatgaatcagaacgagagactagcagctgagctggcaacacagaagagcccaatcgcacaacgaaataagacaggaacaacaacaaatgtaaggaacaatggaagaagagagagtcttgcaaagaggcaagaacatgacagcccatcaatggagctg

SEQ ID NO: 125244 - DNA, 482 bp, Arabidopsis thaliana
gagccaccttcattcacttcacaaaccgctcggcgacaaagacgaagaagccgaggaagcaccgatacgacgattgagacttagttttgctcagattcatttaaccaccggcgccaagtgacgacgacgacggagggagcagattcgaattgtgtgaagacagcaatggagtctactgagtcatatgcggcaggttcaccggaagagctggctaagagatcccctgaaccgcatgattcttccgaagctgattctgctgagaagccaacacacattcggtttcttgtatccaatgcggcagctggttccgtcattgggaaaggtggctcgaccatcactgaatttcaggcaaagtctggggcaaggattcagctttcacgtaatcaagagtttttcccggggacgactgacagaattattatgatatcgggatcaatcaaagaagttgtcaatggactggaacttatccttgataaattgca

SEQ ID NO: 125245 - DNA, 549 bp, Arabidopsis thaliana
  unsure (1)..(549): unsure at all n locations
nnnnnnnnnnnnnnnnnnnnnnnnnnnnnnnnnnnnnnnnnnnnnnnnnnnnnnnnnnnnnnnnnnnntctccacgcgtgcgcggacgcgtgggcggacgcgtgggttgtgcttctgttaatgccggggacgtcgacgtccgtctctgtcatcgagtacacgatgaaaaaccacgagggaggttccaattcgaggggtccgaagaattacgctgtgatttttgatgctggaagttctggaagccgtgtgcatgtttactgtttcgatcagaatttggatcttgttcctttggagaatgagctcgagctcttcttacagctaaaaccgggtttaagtgcatatcctaatgatcctcggcaatcagcaaactctttagtaactcttctggacaaagcagaagcttccgttccccgtgagttgcgtccaaagactcctgtcagagttggggcaactgcaggtttgagagctttgggtcaccaagcctctgaaaacattttgcaagcggttagggagctcctcaaaggtagaagtaggctgaagactgaggca

SEQ ID NO: 125246 - DNA, 1053 bp, Arabidopsis thaliana
  unsure (1)..(1053): unsure at all n locations
gactcactttagggaaagctgctacgcctgcaggtaccggtccggaattcccgggtcgacccacgcgtccgcttggctgctctcaacaagaacgaagctctaaatggtggtggaacactgtttgtcaacaagcatcctgaccttagagttcgtgtggttcatgggaacactttaactgcagcagtgattctctatgaaattccaaaagatgtgaatgaggttttcgggactggagccacttctaagctgggaagagctattgctctttacctttgtcgccgtggagtgagagttctcatgttgacattgtctatggaaaggttccaaaagattcagaaagaggctcctgttgagttccagaacaaccttgtacaagtgaccaaatacaatgctgctcaacactgcaagacttggatcgttggaaaatggttaacaccaagagagcagagctgggctcctgcagggacgcatttccatcagtttgtggtgccaccaatccttaagtttagaaggaactgcacttacggtgatctagcagctatgaagctccctaaagatgttgaaggactcggaacttgcgagtacacgatggagagaggggtggtacatgcgtgccatgcaggaggagtggttcatatgcttgagggttggaagcatcatgaggttggagccattgatgttgaccgtatcgatttggtgtgggaagcagccatgaagtatggtcttagtgctgtttcttcactcacaaattgagtgaagagagagacacgtttcattgttgtcttttgactctcccaagattggtcattctttgtacaggtgaaaggagatgcaagcaggaaaaaaaagtagaatttcaccttatgtattgttttatcttttattaatgatgtattactttctttttagatttccttaatattaatatatgcccctaatttccggggataaaaaaaaaaaagnnnnnnnnnnnnnnnnnnnnnnnnnnnnnnnnnnnnnnnnnnnnnnnnnnnnnnnnnnnnnnnnnnnnnnnnnnnnnnnnnnnnnnnnnnn

SEQ ID NO: 125247 - DNA, 386 bp, Arabidopsis thaliana
gttcagatcttttgcttcaatgccatataccacaaggatattcttgctgccgatgtggccattcacgggctgtgttatgttgggcatgtgggcttggtcaaagacttttcttttcagcttctataccctctggaacaatctttgtcagactcggggcgctcctagattcggatgccaatactccttaccggttgctacagacggaattaatgatcagattgaggctgcgattcttagagctgataagattggtgttaaagttataagcttggctgctctcaacaagaacgaagctctaaatggtggtggaacactgtttgtcaacaagcatcctgaccttagagttcgtgtggttcatgggaacactttaactgcagcagtgattc

SEQ ID NO: 125248 - DNA, 521 bp, Arabidopsis thaliana
acgactcactattgggaaagctggcacgcctgcaggtaccggtccggaattcccgggtcgacccacgcgtccgcccacgcgtccgcattgctaatctaacatctcattctccaaaaactcaggaactcgaactatcttccacaactcacgaaaatgtttctcttaaagacatggagatcaaccgcttttggggtttatggctacatgaatttcaccaagagtggtttcttagatcattcaaagaagtttaaacctgaagatatgcagttacaaattgaaggaaagaattgtgtagttactggagctaattcaggtattggttttgctgctgcagagggtcttgcttcacgtggagcaactgtttacatggtgtgccggaacaaggaaagaggacaagaggctctttctaagattcaaacctcaacaggaaaccaaaatgtgtacttggaagtatgtgatttgtcttccgttaatgaaatcaaatcatttgcttcgagtttcgcttccaaggatgttccggt

SEQ ID NO: 125249 - DNA, 536 bp, Arabidopsis thaliana
  unsure (1)..(536): unsure at all n locations
atgannnnnnnnnnnnnnnnnnnnnnnnnnnnnnnnnnnnnnnnnnnnnnnnnnnnnnnnnnnnnnnnnnnnnnnnnnnnnccacgcgtccgcgatgtgaaacccaacttaaagcattactcttgtcttgtggatcttctttccaggtctggtaatttggaggaagctgaaagcacagtcatgtctatgccattctcaccagacggggtcatatggggaacattgttgagctcatgcatgacccatggggagtttgagatgggaattcgaatggcagaacgtgcggttgctagtgatccgcagaacgatgggtattatataatgcttgcgaacatgtacagtgctgcaggtaagtgggaagaagcggaaagggcacgagagatgatgagggaaagcggagttggtaagagagctggtcatagtgtagtctaataatctttgatacaatgaatatccttgtgattcatctgtttgaaacacatgttcaatggacaatgatgcatagattagaagattaattagctcaccaaataagt

SEQ ID NO: 125250 - DNA, 553 bp, Arabidopsis thaliana
gactcacttagggaaagatcgtacgcctgcaggtaccggtccggaattcccgggtcgacccacgcgtccggagacagaaagaggacatatacagtaagaaaatataaagagagagacagtagtaagaaagaagaagaagaaaaatggaagatacgaagaagaaaaagaagaagaatattaacaacaaccaagattccaagaaaaaagagcgtcatattgttacttggtcacaagaggaagatgttatactaagagaacaaataactctacatggaactgaaaattgggcgatcattgcatcaaagttcaaagacaaaagcacaagacaatgcagaagaagatggtatacatacttaaactctgatttcaaaagaggaggttggtcccctgaagaagatatgcttttgtgtgaggcacaaagagtatttggtaatagatggactgagatagcaaaggtggtttcaggcagaactgataatgctgtgaagaacaggtttacaacactttgtaagaagagagccaagcatgaagctatgactaaagacagcaactc

SEQ ID NO: 125251 - DNA, 777 bp, Arabidopsis thaliana
gcgcatcgttaacatacataaagagtcactcctctagttgcaagataacgcctcattgtgttcagtcccgcatcaaagtcctatcaggagcatcgatctagtggaagaaaggttgttatctaaatcctcactaggtggttccgtttaagcttagcaacgccaaagatctagccaataattgcaagttccgccgttgatcctatcttccgtcccgaagccgtccttgatccagcccaagatgttttgtggtcagatgacaaagtagatccccgggtatatattatggtaaagttggcggcccaaggattgaagttcaataatgatatgttttctggtggttgcatcccatctgaagtggttatagcccccaaaaacaaaaaatctctacaattttgaaaggtgttcgtggcaggaaatctgctaagcaaggaaggatctccaagaatccaactgggaatagaaggatccatcaatcattctctaatgaggaggaatctgtttaactttgttattgactaataatcctattatcgcctaaagctgtttatcgttacaacttgttgttgctagttttgctacattcttattctaacccaatctataacaaatagtttatcatgctatgaatgataactcaataccctgtgttcttattgctaatataaaacggccattccaaaaaaaaaaaaaaaaaaaaaaaaaaaaaaaaaaagggcggccgctctagaggatccaagcttacgtacgcgtgcatggtacgtcatagtaatctatagt

SEQ ID NO: 125252 - DNA, 563 bp, Arabidopsis thaliana
tgatacttcagctctctacgactcactattgggaaagctggtccgcctgcaggtaccggtccggaattcccgggttttgagatgacgatgaaatcgattaaagagagagaagttgaacaacttgcaactacttatgtgactgtccaagagctattatacgccctacaatttgttgtttttcaagtcacacccgctattcaagaaggtccttatccaaggagacagtcgattctgagtcggaagaagaggttgttgatctaaatcctcactaggtggttccgtttaagcttagcaacgccaaagatctagacaataattgcaagttaccgcgttgatcctatcttccgtcccgaagccgtccttgatccagcccaagatgttttgtggtcagatgacaaagtagatccacgggtatatattatggtaaagttggcggccgaaggattgaagttcaataatgatatgttttctggtggttgcatcccatctgaagtgggtatagcccccaaaaacaaaaaatctctacaattttgaaaggtgttcgtggcaggaaatctgctaag

SEQ ID NO: 125253 - DNA, 443 bp, Arabidopsis thaliana
  unsure (1)..(443): unsure at all n locations
ttgtcatattaatcaagagaacaatgctaatccgaagagttgcgttgttttgtttctcattcaactgctttttctatcagtactagtcttatttcgtctctttctctctgtttttcttttttttttccgatgttcaaattgattctccaattcaagtgtggggttttccgatcaattcgtccaaatgacgatgaaatcgattaaagagagagaagttgaacaacttgcaactacttatgtgactgntccaagagctattatacgccctacaatttgttgtttttcaagtcacacccgctattcaagaaggtccttatccaaggagacagtcgattctgagtcggaagaagaggttgttgatctaaatcctcactaggtggttccgtttaagcttagcaacgccaaagatctagacaataattgcaagttaccgcgttgatcct

SEQ ID NO: 125254 - DNA, 483 bp, Arabidopsis thaliana
ggcggacgcgtgggctcatcctcaaaaaaaaaaaaaaaaaaaaaagtttaaaacaaaaactaaaaaaatagaataatggcaagagttcaactattgttatgcttcaccattctatttgcatctgtgacccttcttgacctagtatcagcacacctgaaatttaagccatctttgcctcaaatcgaagatccaaagacggtgaaggatgtagagccttacaccgttaaagtagtaatggtctttgtggccgacctcgagaaggaatgtcccaagacaaacaagttcaaggccttctttgagaaacttagaggattcgccaagtatgtttgcccaataagaaggattggccaagtagattacgaccgggacatgaaggccaaagccgggggtatcttcaaggccatatcttcttttgcgattggaaagattagggaggaaattcacgaggaaaaacaggaggctattgatacctttaggttcatg

SEQ ID NO: 125255 - DNA, 360 bp, Arabidopsis thaliana
ctttcagcttgatgtgcgctctcgtcctcgtgatactctctctgacgaaccgggtgtctttgtcaacgatccgccacccacgcagcctacccaagcaccacctccgatgggtcataaactccttcttgaagacattaatgatcttcttgagatagggaagcgcatacgacgtcgcttgacaggtaagttgttttcttgcttcatgtggtgctttgcttattgtgttcttgccttgtgttttctggaattttgatgttgtggctcctgtagttgaggaagaacctaggaagaggaagaggaagaatttgatcctggctgagttactatagcttggggtctaagtataaggggaggaaatgt

SEQ ID NO: 125256 - DNA, 528 bp, Arabidopsis thaliana
  unsure (1)..(528): unsure at all n locations
nnnnnnnnnnnnnnnnnnnnnnnnnnnnnnnnnnnnnnnnnnnnnnnnnnnnnnnnnnnnnnnnnnnccacgcgtccgcccacgcgtccgcccacgcgtccgcccacgcgtccgagccggttgaagttctaccactgttgccatattttgataggtacgatgagcagtttgtggtagcgaattttgatggtgctcctatagctgattctgaattctttggcaagttggacccttcaattcgtgatgcacatgagtcacgggccattttgaaaagctatgtggtggctggatcagacactgccaatccagaaaaatttctggcgtacatggttccttccttggatgagttgtctaaggatatccatgatgaaaacgaagaaatctcttacacttgggttcgcgaatacctctgggatgtacaacccaatgcaaacgatcctggcacatacctggtatcatttgacaatgggaccgctagctatctgcccctacccatgagggtgaacttgaggaagaaaagggccaggg

SEQ ID NO: 125257 - DNA, 442 bp, Arabidopsis thaliana
  unsure (1)..(442): unsure at all n locations
tccggaatcgccgcacgcgtccggagagatgggtgattctgacgtcggtgatcgtcttccccctccatcttcttccgacgaactctcgagctttctccgacagattctttcccgtactcctacagctcaaccttcttcaccaccgaagagtactaatgtttcctccgctgagaccttcttcccttccgtttccggcggagctgtttcttccgtcggttatggagtctctgaaactggccaagacaaatatgctttcgaacacaagagaagtggagctaaacagagaaattcgttgaagagaaacattgatgctcaattccacaacttgtctgaaaagaagaggaggagcaagatcaacgagaaaatgaaagctttgcagaaactcattcccaattccaacaagactggatanagctcaatgcttgatgaagctatagaatat

SEQ ID NO: 125258 - DNA, 475 bp, Arabidopsis thaliana
  unsure (1)..(475): unsure at all n locations
atactccnnnnnnnnnnnnnnnnnnnnnnnnnctccaaatatattttctccacactatctttgtcgtcttcttccccccacgcgccccatcgctcaccacataaaccctagcgatcgatttctccagaaatcaaccaacaatcgttcatggcgtcttcttccacctttctggaattaactccatttcaatggaatcaacctctcccatacacacaacgaccccatcatcgtactgttcttctctactccaaacctcaaaggagatcaaattcgattcgtctccaaatctccgtcaaatacaagcaatcaacatcttcttcagatccagatttgagatccaatttcaatccatttgaacaaatcgcgattcaggtcaaaaaagcgttagattcgttgaagaaacctgctatagctgcggttttacttggtttgcttttgttctatgatcctaattccgctttagctgcgtctgggg

SEQ ID NO: 125259 - DNA, 969 bp, Arabidopsis thaliana
  unsure (1)..(969): unsure at all n locations
nnnnnnnnnnnnnnnnnnnnnnnnnnnnnnnnnnnnnnnnnnnnnnnnnnnnnnnnnnnnnnnnnnnnnnnnnnnnnccacgcgtccggagaatttcaaatttcatttctgaggcaatcgcataattcccaccggcgatcggagatgagcagcgcgagactgtgctctcttgtggcggagctaggttacgaaggcgccggaaaattggatcccgatagcttcgaatggccgtttcagtacgacgatgctcgacctatcctcgactggatctggtcctctcttcggccttccaatggcctctctctcggcgaactatcactatatgagcaatttcaacgagatgggaaactcttagagggcgatgacctaaaccaggcctatgatagcatatcagcattctcttcaagagaaacaaccaggaggcccgctcttgggccccgacaaacccttacagaaacgaccagaccccccttctccggccaaaggccggcagccctaacgcccgcccgcgccggcagcggggctccacgcgcgccgcgcgagcgtggccgggcgcgcgctccccgtggtcaccgcgcgcgcgcacacccggcgtcggggcgcgccgcccgcggctccccgggccggcgccacgcacgacccccgcccgcccccctccgccgcgcgcggcgccggcccgccgtcgcgtcgggcgccacgtgctcgctcgccgcatcgcggacgaggcggcgcgagggttggcgactccccaccggcccgcgcacgcgcgacgcgagccgcgcgcgcaccggccnacgccggacgcacggcgcgggcgcgggcgagcgccccgcgagcgccgcccacgccggccccgctccctcccgcccgcgcgcgcgcgccccgccacggccgtgtggcccgcggggagcgccncccaccgcgcgcgcactgcccccgccgccccgccgagggacagaggccgagcgc

SEQ ID NO: 125260 - DNA, 536 bp, Arabidopsis thaliana
gcggggcattatggtaaaatatcacatatggtctgaaaaaaaaacagtttgtgtggggaggagcgagcagagtcggttcacgtgaaagcacagagacataaatctttctttcacagcctaaaacccctaaaaatgtctaatctctcttcttcttctccgtttctctttagattatctcaaccatacagccataaatccatcggaagaggaggaagataatgcaagaatcagtcgctgagtctgaatctgaaggggaagagttgcacaataagctcaagctcctcttcaatggctttcactagcatggtttccaccgttcctgttctcttcttcttcttcactcttcttttgatttctgcgaattcgtcgtctttatctcacaacattaaggttcaggaacaagacaaagatcccttcgttgctttcaacatcggcacagatgtctctaatcttctctcgccgacggaattagtcaaatttctccaagctcagaaagtaaatcacgtccgattatacgatgctgattcagaattgct

SEQ ID NO: 125261 - DNA, 541 bp, Arabidopsis thaliana
  unsure (1)..(541): unsure at all n locations
nnnnnnnnnnnnnnnnnnnnnnnnnnnnnnnnnnnnnnnnnnnnnnnnnnnnnnnnnnnnnnnnnnnnnnnnnnnccacgcgtccggtaaagaaacacaaaaatgaagtgtccgtactgttcatcggcgcagggacggtgtaccaccacgagctccggtagatcaataacggagtgctcatcttgcggtcgcgtaatggaagaacgacagacgcaaaaccaccacctcttccatctccgagcccaagacactcctctctgcttagtcacttccgatctccaaacggcggcgcaaccgtctcctgaagacgaggaagatccgttcgaacctaccggattcattaccgccttctctacctggtccctcgagccaagcccgattttcgctcgctcttccctctctttctccggtcatctcgctgaactcgaacgaaccctagaactcgcttcgtcaacatcgaattcgaattcgtcgactgttgtggtggataatcttagggcttatatgcagattatcgatgtggcatcgattttaggattgg

SEQ ID NO: 125262 - DNA, 759 bp, Arabidopsis thaliana
  unsure (1)..(759): unsure at all n locations
tcggaattcccgggtcacccacggtccgagcagccagagagagagacaagtgagagggatctaccaaacgaagcaacaatggtgaagttcttgaagcagaacaaggccgtgatccttcttcaaggacgttacgccggaaagaaagccgtcatcatcaaatccttcgacgacggtaaccgtgatcgtccttacggacactgcctcgtcgccggactcaagaagtacccgagcaaagtcatccgcaaagactcagctaagaagacagctaagaaatctagggttaagtgtttcatcaagcttgttaattaccagcatctgatgcctactcgttacacactcgacgtggatctcaaggaagtggcgactcttgatgctcttcagagtaaggataagaaggttgctgctcttaaggaagctaaggctaagcttgaggagaggttcaaaaccggtaagaacagatggttctttaccaagctcaggttctgaagaaattttctatttcgtgaggaattcattttgagcgttttgttatcgtgttttttagtttctagggttcatttcccatggtgaaaaatgtggatcctgttttggattgtggaagatgttttgttgaagtttggattatggatttgatcttttattttgattctctaatgcattcttatttactcaaaaaaaaaaaaaaaaagnnnnnnnnnnnnnnnnnnnnnnnnnnnnnnnnnnnnnnnnnnnnnnnnnnnnnnnnnnnnnnnnnnnaac

SEQ ID NO: 125263 - DNA, 784 bp, Arabidopsis thaliana
agctctacacgactcactatttggaaagctggcacgcctgcaggtaccggtccggaattcccgggtcgacccacgcgtgcgcgtggatctcaaggaagtggcgactcttgatgctcttcagagtaaggataagaagcttgctgctcttaaggaagctaaggctaagcttgaggagaggttcaaaaccggtaagagggatctaccaaacgaagcaacaatggtgaagttcttgaagcagaacaaggccgtgatccttcttcaaggacgttacgccggaaagaaggccgtcatcatcaaatccttcgatgacggaaccagtgaccgtcgttacggacactgcctcgtcgccggactgaagaagtacccgagcaaagtcatccgcaaagactcagcgaagaagacggcgaagaaatcaagagtgaaatgtttcatcaagctcgtgaattaccagcatctgatgcctacacgttacacgctcgatgtagatctgaaggaagtagcgactcttgatgctcttaagagtaaggataagaaggtgactgctttaaaggaagctaaggctaagcttgaggaacgtttcaagactgggaagaacaggtggttctttactaagctcaggttctgaagaagaacctttgagatttttatctatctatctactttttgtttagttctagaatgaatttggatcattgtttaagaccttttggtttggaattgattctggattttgtctcttacttataatcttttgctatattgatgcctcattttatataaaaaa

SEQ ID NO: 125264 - DNA, 732 bp, Arabidopsis thaliana
  unsure (1)..(732): unsure at all n locations
gnccccncccgggngnccctttnnaccnngnnaccccccggnttcagggattcnccgncccccttttttaagggccgttcccccnggaaagaaccccgtcatcatnaaacncttcggccgccggtacccgtgatccccttaccggccactgcctcgtcgccgggcctcaagaagtccccggancaaagttcatccgcaaagactcagctaaggaagacagctaagaaatctagggttaagtggttcatncaagcttgttaattaccagcatctgatgcctactcgttacacactcgacgtggatctcaaggaagtggcgactcttgatgctcttcagagtaaggataagaaggttgctgctcttaaggaagctaaggctaagcttgaggagaggttcaaaaccggtaagaacagatggttctttaccaagctcaggttctgaagaaattttctatttcgggaggaattcattttgagcgttgggggatcgtgttttttagttcctagggttcatttcccatggtgaaaaatgtggatcctgttttggattgtggaagatgttttgttgaattttgcactatacattttaacatttacttatattaatacttttgtgctccctttatatttatttcttgttttcgtactcttactttctaaattattactcttttttttttattcctttaatttatattattggggggggggggggggttatatttttctttt

SEQ ID NO: 125265 - DNA, 476 bp, Arabidopsis thaliana
  unsure (1)..(476): unsure at all n locations
gaaaancgggtcgaccacgcgtgcgaacaatggtgaagtttctgaagcagttcatagcggtgatcctccttcaaggcccttgcgcgggcggaaaggcaggggtcatcagatccttctatcacggaaccagtgaccgtcgttacggacactgcctcgtcgccggactgaagaagtacccgagcaaagtcatccgcaaagactcagcgaagaagacggcgaagaaatcaagagtgaaatgtttcatcaagctcgtgaattaccagcatctgatgcctacacgttacacgctcgatgtagatctgaaggaagtagcgactcttgatgctcttaagagtgaggataagaaggtgactgctttaaaggaagctaaggctaagcttgaggaaccgtttcaagactgggaagaacaggtggttctttactaagctcaggttctgaagaagaacctttgagaattttatctatctatctacttt

SEQ ID NO: 125266 - DNA, 683 bp, Arabidopsis thaliana
agttgagtatgaccgagcagggaggattataaaaggacaggaggtgatattgccaaagagtaaatatgaagaagatgttcatgctaacaatcacactagtgtgtggggatcatggtggaaagatcaccaatggggatataaatgttgccagcagaccattcgcaacagctattgcacaggttctgctggaattgaagctgcagaggcgtccattgatctgatgaaggctaatattgctcgcaaagaagcttctaaagagagtccgaagaaggttgaagagaagaaaatggcgacatggggaactgatattcctgaagatttggaattgaacgaggaggcacttgcaaatgctcttaaaaaggaggatctaagtaggagggaagaaaaagatgagaggaaacgcaaatacaatgtcaattacaccaacgatgtgacctccgaggagatggaagcttacagaatgaagagagttcaccacgaggacccaatggagaaatttccccggctgataaatgtcttttccctttcaccatattaagctgaagaaaaccttgtttttaagtttcatgtctttaaaataagacccttgttattcatggccattatttgtaaccggcttcatggccaccccaaggtcccatttttataccggtggaccccttaattcctttgcccaaaaacgc

SEQ ID NO: 125267 - DNA, 547 bp, Arabidopsis thaliana
tcggtcctattatgcccggcaccaactacactgaccatttccagcctaaggatcagatcggaagctatttctactaccccagcaccgcgatgcaccgttccgctggtggattcggtggtctccgtgtgaacagccgtctcctcatcccggtcccttatgctgacccagaagatgactacaccgtcttgatcggtgactggtacaccaagagccacacccagttgaagaaattccttgacagcggtcgtactcttggccgtccagatggtattctcatcaacggaaagtccgggaaaggcgatggatccgatgcacctctctttaccttgaaacctggaaagacctacagggttaggatctgtaacgtgggtctcaagacatctcttaactttaggattcagaatcacaagttgaagcttgttgagatggaaggatcgcacgttctccagaacgattatgactctctcgacgttcacgttggtcagtgttacggaaccatccttaccgctaatcaggaagctaaagattactacatggttgcatcctc

SEQ ID NO: 125268 - DNA, 1108 bp, Arabidopsis thaliana
  unsure (1)..(1108): unsure at all n locations
attggccgtctgcggtaccggtccggaattcccgggtcgacccacgcgtccggaagaaactacaatagttaatcaatcaaagaaaaagtaaaagaaaagcttgagaaatgcaccaaagagaaactgtgggagttttgtgatgtgttggacatacacattaccaaggctacaacaaagaaggaagatattattacaaaactgtttgagtttttggagaaacctcatgtgacaggtgatgtgaccggtgacactacagtttctgagaaagagaagtcaagtaagggagcaaaacgcaagagaactcccaagaaaacttcacctacagctgggagttcatcctccaaacgatcagcaaagagccaaaaaaagtctgaagaagcaacaaaagttgtcaaaaagagtttagctcattctgatgatgaatctgaagaagagaaagaagaagaagaaaaacaagaggaggagaaggcagaagagaaagaagagaaaaaagaggaggagaatgaaaatggcattcctgataaatctgaggatgaggcgcctcagccttctgaaagcgaggagaaagatgaatctgaggagcattctgaagaagaaactacaaagaagaaacgtggttctagattgtcagctgggaagaaagaatcagcagggagagccagaaacaagaaagcagtggtcgctgcaaaatccagtccaccagagaagattacacagaagcggtcatcagccaaacgaaagaagactgatgatgacagtgatacaagtccaaaggcgtcctctaagaggaagaagtctgaaaaccctatcaaggcctccccggctccttcaaagtctgcatcaaaagagaagccagtaaaaagggctggaaaagggaaagacaagccgagtgataaagtgctgaaaaatgcaatcgttgagatcttgaaaagagtggactttagtacggctacgttcacggacatccttaaagaacttgctaaggggttcacaggaaggtctcacttccaagaaaagtccatcttttaatgattggtnattcccaaggggggctttacccaattttgcaggtttgggnggtggnggngggtnngganggnggggtttt

SEQ ID NO: 125269 - DNA, 497 bp, Arabidopsis thaliana
cccacgcgtccgcaaggtaatgaggaagaggtctgatgaaactttgaagctgcttcacccaattctatttggtgggaggagagggaaggctgctcagatcaagacaaacatattgggcttctctggtttcgtttggcatggagatgagaagaaagcaaaagaaaaagtaaaagaaaagcttgagaaatgcaccaaagagaaactgtgggagttttgtgatgtgttggacatacacattaccaaggctacaacaaagaaggtcattatggttatcaatttctaagtttttgttcttgagattcatttttttcctctgtgaatagatacatgtgaaggtttaaatttctgtctttgttgagcagcttgattagccatttctggttgtccaagtttatgcttattcatttccccatttaatcgaatctggcaacttcttgttgcatgctttttcaacacaggaagatattattacaaaactgtttgagtttttggagaaa

SEQ ID NO: 125270 - DNA, 586 bp, Arabidopsis thaliana
  unsure (1)..(586): unsure at all n locations
cannnnnnnnnnnnnnnnnnnnnnnnnnnnnnnnnnnnnnnnnnnnnnnnnnnnnnnnnnnnnnnnnnnccacgcgtccggtaataaatgaataatatgtttctcttgaaaaaaaaaaaaaaaggattcagagaaggaggaagcaggagggtctggtggtggtgaggaggtgaaagcctaaactcctttctgatcacatcgcacatattgagtctctctgtcagatactgttgcctaatgcctagtagtcatctggcaaatgtgtaagttaaatctgtggatgtaatattttgttgttggagtctgaactgcgtaaagcagctttacttttggtagagacaagaggaagaagctgcatagccaaaggataggttgcttgtatgtctatagcatttaacataaaagcctccttggattgtctttgatttgtgaggctcccttttcgagacattgtcaaggtttcttttgtttatgccttttggtttgaaggaggccaatggtaataaatgaataatatgtttctcttgattccaaaaaaaaaaaaaaaaaggaaagccctctagaggatccaagcttacgtacgcgg

SEQ ID NO: 125271 - DNA, 669 bp, Arabidopsis thaliana
aaaagagaagccagtaaaaagggctggaaaagggaaagacaagccgagtgataaagtgctgaaaaatgcaatcgttgagatcttgaaaagagtggactttagtacggctacgttcacggacatccttaaagaacttgctaaggagttcacagaagatctcactccaagaaagtcatctataaagatgataatccaagaggagctcaccaaattagcagatgaggaggaggaggaggaaaagaaagaagaggattcagagaaggaggaagcaggagggtctggtggtggtgaggaggtgaaagcctaaactcctttctgatcacatcgcacatattgagtctctctgtcagatactgttgcctaatgcctagtagtcatctggcaaatgtgtaagttaaatctgtggatgtaatattttgttgttggagtctgaactgcgtaaagcagctttacttttggtagagacaagaggaagaagctgcatagccaaaggataggttgcttgtatgtctatagcatttaacataaaagcctccttggattgtctttgatttgtgaggctcccttttcgagacaaaaaaaaaaaaaaaaaagggcggccgctttagaggatcccagcttacggacgggtgcatgcgacgtcatagtttttctatagtgttcacctta

SEQ ID NO: 125272 - DNA, 873 bp, Arabidopsis thaliana
  unsure (1)..(873): unsure at all n locations
ttcactacttgggaaagctggccctgggccggccggatcccggctgagaaacacagagggtcggtgcaaaacacagaggtcggtgcaaaacacagagggcggtggtaaacacaaaggctagtttgtgcccaatatataatcgggttttatgtccagcatctccgacttccggagttgtgatggctggccctctgtttggcatcatccggcttctataaggagcgttggccagcttcgtcgttttttctagtcgtccggtgtatgaggttcgtatcacgtttaatattcgctgtttggttattataaatccagtagatccggttatgtctctacttttgttcaattatttcgaggattaatagttctgctccggtggcctctaacaaggttatgtgttgatagctttgttggatctagatgtttctttcgatttagttgtcaagacagttctgcgcctaagttagctggttaaaagctcagtatattgatgttttgtcctccatactcgtgattgccataatcggtgagaaaaaagaagattcgttgttcggcttcgttttccgacgacgttctatgattcaccgtgatttgaagtctcatccagcagagattgtggaagtaacacgtgtcctcagcttatctttatgattctgacacgttccttgaactgtatctctaatgggcctatttcatggctgtctgttatgggcttttatgccctttgtagctttattcagaaagttcaaatggagacatatcaataaaataatacttatgagaataaaaaaaaaaaaaggannnnnnnnnnnnnnnnnnnnnnnnnnnnnnnnnnnnnnnnnnnnnnnnnnnnnnnnnnnnnnnnnnnnnnnnnnn

SEQ ID NO: 125273 - DNA, 504 bp, Arabidopsis thaliana
acgcgtccgagacttctctctctcttctctctaaaatatttcagagatgagagaagcatctcctttggccgaccaaatttcttctagttttgctgtcccaatatataatcgggttttatgtccagcatctccgacttccggagttgtgatggctggccctctgtttggcatcatccggcttctataaggagcgttggccagcttcgtcgtttttcctagtcgtccggtgtatcagctttgttggatctagatgtttctttcggatttagttgtcaagacaagttctgcgcctaagttagctggttaaaagctcagtataattgatgtttttgtccctccataactcgtggattgccataatccggtgggggaaaaaaagaaggtttccgttgttccgggcttcggtttttccgacggccggttctatgattcaccgtgatttgaagtctcatccagcagagattgtggaagtaacacgtgtcctcagcttatctttatgattct

SEQ ID NO: 125274 - DNA, 423 bp, Arabidopsis thaliana
gagacttctctctctcttctctctaaaatatttcagagatgagagaagcatctcctttggccgaccaaatttcttctagttttgctgtcccaatatataatcgggttttatgtccagcatctccgacttccggagttgtgatggctggccctctgtttggcatcatccggcttctataaggagcgttggccagcttcgtcgttttttctagtcgtccggtgtatgaggttcgtatcacgtttaatattcgctgtttggttattataaatccagtagatccggttatgtctctacttttgttcaattatttcgaggattaataagttcctgctccggtggcccctctcaaggttatgtgttgatagctttgttggatctagatgtttctttcgatttagttgtcaagacagttctgcgcctaag

SEQ ID NO: 125275 - DNA, 333 bp, Arabidopsis thaliana
aagagacactagatcggaaacacttggggatttttttgagagaaacattctctcggttcctctactaccacctctcaaatctcaattcgccgattagtaactccgtccaagaccattttccgccgtgacaccgtccacggtctctctcagtccggaagaagataccatagttagaagctggtgatcattttcaataaacctcgaacatgtttaagaagttttgtttggaggagatttcatcacaaaaccaagtgaaggcatctgttcaacgtaggatccgccagagtatccaagatgagtacccgggacttgaatcagtgatggaggatctac

SEQ ID NO: 125276 - DNA, 554 bp, Arabidopsis thaliana
  unsure (1)..(554): unsure at all n locations
cactcactttagggaaagcacgtacgcctgcaggtaccggtccggaattcccgggtcgacccacgcgtccggaaaagcaaaatcaaagacaataattttttccccgagagagaaaatgcagaggttgaagcagcagcagcagcagcaacaagttatgatgcagcaagctcttatgcagcaacagtctctctaccatcctggtctccttgccccgccacagatagaaccaatcccaagtggaaatctcccccctggttttgatccaagtacttgccgcagtgtgtacgttggaaacatccatattcaggtgacggaacctctgcttcaagaggtttttgctggcactggtcctgtagaaagctgtaaactaattaggaaagaaaagtcttcttatgggtttgtgcactactttgatcgaagatcggctggtcttgcaatcctttctctcaatggaaggcatttgtttgggcaacctatcaaggttaactgggcttatgcgagtggccagagggaggatcactaggctcttaacntttttggggtttngccggggt

SEQ ID NO: 125277 - DNA, 695 bp, Arabidopsis thaliana
  unsure (1)..(695): unsure at all n locations
gcgacccacgcgnccgcggacgcgtgggacaaaatggctcgtcgcgatgttctcctccctttcctcctccttctcgccaccgtctccgccgtagctttcgccgaagatgatccagactgtgtatacacattctacctcagaaccggatcgatctggaaagccggaaccgattcgatcatcagcgcaagaatctacgataaggacggtgactacatcggaatcaaaaaccttcaagcttgggctggattaatgggacctgattacaattacttcgagaggggtaatctcgacattttcagtggaagagcaccgtgtttacctagtccgatctgtgccttaaacctaacctccgatggctccggcgatcaccatggttggtacgttaattacgttgagatcacgacggctggtgttcacgcacagtgctcgacgcaggattttgagattgagcaatggctcgctactgatacttctccttatgagctcaccgccgtacggaacaattgtccggtcaagcttagggatagtgttagtcgggtcgggtctgagattcggaaaaagctttcttgggtcgtttaagtgatgtgttgtgattcgtgagacttgtctgtattgtttgtattctcgttgttcttgtgagtgtaatgtggcgttaatgaaatatgattcaataaaataaaacctttttagttaaa

SEQ ID NO: 125278 - DNA, 641 bp, Arabidopsis thaliana
  unsure (1)..(641): unsure at all n locations
aggacgcgtgggcggacgcgtgggtgagaaaatgcgtaaagagattgagtctagtcaggaaaatgcgttaagtttgtgtaccgagaaggttttattggcccgacaagcgtatgatcttatagatagtcatgtaaaacgacttgatgaagatctgaataattttgcagaagatttaaagcaagagggaaaaattccaccagacgagccctctgttcttcctccactacctatagttcctaaagcggaaaagcgtaagtccttctatggcacacctcagcccaagaagattgattatagagatagagactgggatcgtgacagggattttgagctcatgcctcctccaggaagcaatcggaaagaccttatgccaattgaagagcagccaatcgatccaaacgaaccaacttactgtgtctgccatcaggtgtccttttgngacatgattgcctgtgacaatgngnatttcaaggaggtgaatggtttactatacaatgcggtggctaaaacctgnggcccgnttnaaaggggaatggacttgcccacctgaagnnttctccacagtaaactatatcanttgnccnctgagaggattntttcctttanagactaggttccctgaattcctgatttntggtnta

SEQ ID NO: 125279 - DNA, 479 bp, Arabidopsis thaliana
cgacctaacattttcgttcgctgcaaactcatggctgtaagtttttaatcttccttcgctaatccacgatttcgattccgttatttctttttggaacccagttttagaatttacttctagggcttgcaaaagctctgaagttcgagctcttctcttgttaatttgtccaattagaactaattaatggagtgttcacgaatcagaactgatgggtttggttttaggtttcgaaaaaatttgcttttttcattattatatgtatgaatgaagcttggtttgtaattgaacgtctatagttgatttttaggttactactgttttagatgtaattaaagagtatattaatactaagtagtttcattcaattattcagtggaaacatgagcaatgatccatttttgtttattgttttgaagaccataccagttaacccgaaaccagcttaaatggggaatggaatacaaaggtattcctattct

SEQ ID NO: 125280 - DNA, 597 bp, Arabidopsis thaliana
  unsure (1)..(597): unsure at all n locations
tgatttttccagctacnnnnnnnnnnnnnnnnnnnnnnnnnnnnnnnnnnnnnnnnnnnnnnnnnnnnnnnnnnnnnnnnnccacgcgtccgtgtaacagtgccatttgtatctctgaactccaaccatggctcctctggttctctaccttctcactctcctcatggctggccataccagtgcctcatggtgtgtgtgcaaaacagggctgagtgactcagtgctacaaaagacattagactatgcttgtggaaatggagctgactgtaacccaactcacccaaaaggctcttgcttcaatcctgacaatgttagggctcattgcaactatgcagtcaatagcttcttccaaaagaaaggtcaagcttctgagtcttgtaacttcactggtactgccactcttaccaccaccgatcccagctatacaggatgtgcattcccttctagtgctagtggttctagtggaagcggtagcaccaccgtgacgccaggcaaaaacagtccaaaaggaagcaacagcatcaccacatttcccggcggaaacagtccatactctggcacaccatccaccggcttattaggaggcaatatcactga

SEQ ID NO: 125281 - DNA, 427 bp, Arabidopsis thaliana
agcggacgcgtgggcgcgggagactctctctctctctccactctctctctcttttttctttgttttttcgtcacttgctcgtaaaatcccaaatcgagtaatggaagaaaaatcaaatacgatgatttagcttcccttcttattcttcccctatattcactgcgataactttgcctctcatctcataaattaaaaaaagaacactcttctcacaaattctttataattccccttttgatgtgtacggacacaccaccgaagcagaagcaggagaagaagaacacttctatctccgccgccgccgtcgtcgtcatcatcatcgccgccgttaaatgggtgagcctaaagacagtctcgctctctttctctgtcactaatcggagtcttctctaaacgaagactacgtcgtgacgattgagagatctga

SEQ ID NO: 125282 - DNA, 623 bp, Arabidopsis thaliana
  unsure (1)..(623): unsure at all n locations
accacgcgtccggttcggggccaaataactctttaattttctgcagtctcatttgttattcgaccaaaaataatttatatccctttcctcaagaaatcttcagaaccgacttatctagagcttcgagtctcctcaaatcttcttctacgattttttcttctaggtttagagcttttgattctccgatcaatttcgcgatttgttgaactaggatctgaaattagaatgggtggtgaagcagattcgaggcagccgctgactgctgaaggcgtagctgtttgccgtgaacgtcagatgctccaatggcacgaaatttagtgtgacgacgagcctcgattccacggtggagtctttcaaagagttaattgcgcagaacagcgatgtgccggcaaatcagcagcgtttgatttacaagggacgtatcctcaaagacgatcagactctcctcagctatgggttgcaggctgatnacaccggtcaaaatgggtccanggtttgtgccctcttccctnctggtcccgntgnaaatgctggaancaancaatggcccaagnggtggtcaatgnnanccaacccgnggggggaccttggcccggctgggtaaccttgggggaannaaggng

SEQ ID NO: 125283 - DNA, 552 bp, Arabidopsis thaliana
tctactacgactcactattgggaaagctggcacgcctgcaggtaccggtccggaattcccgggtcgacccacgcgtgcgccttctccaacttcatcatctctctctctctctctgtttttctttttcaaacaaaatattgaaatttcactagacccacatgaagctcctcctttatagtagtaattcttgaatccaactcaaaaatgtttgctatatacaaatcaacccttcttcttcttcctctcattctcattcttctcatcactccacaagtctcatcctttcttcaacctatccaacctcctatttctcctcaagtcgctttgattgaagataaagcaagattaggttcaacaccaccaagctgccacaacagatgcaacaactgccatccttgcatggctattcaagtaccaactctcccgactcgctcccgcttcacacgagttaacccgttttccggtggattcgtacgacctccttcttctctaaccaccgttcttgatcagtactctaattacaaacctatgggatggaaatgtcattgcaat

SEQ ID NO: 125284 - DNA, 503 bp, Arabidopsis thaliana
ccacgcgtccgcagacgcgtggggtttccctgccttgataaagttatcaagtccgcaactgaagctagtgatggattcaattatctgggcatttagacatactgagagaaatattgctgaaaccgggcttaatcttttgcttgagatgctgaaaaactttcagcaatctgaattttgtaatcaattctaccggtcatactttatgcaaatcgagcaagaaatatttgccgttttgaccgataccttccataagcctggcttcaagctacatgtgttggtgctgcagcaactgttttgcctgcctgagagcggtgctttgacagaacccttgtgggatgctacaaccgttccttacccgtatccggacaacgttgcatttgttcgcgaatacaccattaagctactgagctcttcattcccaaacatgactgcagcagaggtcacacaatttgtgaatggactatacgagtctagaaatgacccgtctggatttaagaataaca

SEQ ID NO: 125285 - DNA, 519 bp, Arabidopsis thaliana
  unsure (1)..(519): unsure at all n locations
ccacgcgtccactttctctcatcttcaaattaaaatcaaacagtttcttaataacattttacttcatggctcgtaccaagcagacggctaggaaatcaaccggaggaaaggctccaaggaagcagctggcgacaaaagcggcgaggaaatctgctccggccaccggaggagtgaagaagccacacagattcagacccggaactgttgctttaagagaaatcaggaagtaccagaagagcactgagcttcttatccgtaaactccctttccagaggcttgtcagagagatcgctcaggacttcaaaaccgatcttcgtttccagagcagtgccgtcgccgctcttcaggaagctgctgaagcttacctcgtcggactcttcggaggcaccaatctctgcgccattcacgccaagagggtcacggtcatggcccagggccccccctncgngcgagaagtatcagagggggancgggttngatnttagnatttttgggtaacccttgggttttttnttngga

SEQ ID NO: 125286 - DNA, 476 bp, Arabidopsis thaliana
  unsure (1)..(476): unsure at all n locations
cgggggacacaaagagaagtagagtcctctcttcaatttcaaccggcactttcttctcttcttcttcttcttcccaatcttcctcgtctctttacctacacccatatatatatatatatatatatatatatatctccttccctcacacacatacctgcacagctacaataatctacttcccctctttcaataacggaattattagtaatctaatcggaagattcaagcgngaaatcgtattntgntgcctgtaaatttgtngggaaataaattgaaataggagattgattggatggtgagaaggcaagaggaggngaagaaggcggagaagggaatgcgtctggggnaatacgagctagggaggncgctcggcgagggtaatttcggtaaagttaaantccgctaaagatnccggctccggtcattccttcgncgtnaaaatcatnggcaagctcgtatcgccggtctcaacttct

SEQ ID NO: 125287 - DNA, 464 bp, Arabidopsis thaliana
tcaccctgaactagactcaatacacaagaaactgaaggagttggagaagaagatgaaactagctggatacaaaccggaactagagtttgctttacacaatgtagaggaagagcaaaaagagaagctattgttatggcacagcgagaagttagctgttgcatttggttgcataaaactccctcaaggttcacagatacaagtgttcaagaacttgagaatctgtggtgattgtcataaagcaatcaaatttatctcggagatagagaaacgagagatcattgtaagagacaccacaaggtttcaccatttcaaagatgggtcttgctcttgtggcgattactggtgaaaagagaagagctttgactctctcatttggtcaaaccctgcctggtttttatatgcgttattgtgtggtaaagtttcgacctttgacttgacaagtctgccgtaagaagagagatgcg

SEQ ID NO: 125288 - DNA, 429 bp, Arabidopsis thaliana
acaaactccgaaattataagaagtaaagacaaccatggtgagtgctaccttctccttctgtcccctctctcaatcccatccccattcttctctaatcaaaccgacaccgtttctcagatatggcaagaaactacaccatcttcaccaccacatcttcatcaccatctcttacccatctcaccattctcgctacttggccgtttcaagagacgatgccgcgacgcctctttcttcttccgaccaaacccaagagacagagaccaaagaagtggaagacactatagagaaacgaagaatggaggagaagtttgctgttctaaacactggaatctatgagtgtagatcatgtggttacacgtacgatgaatcagcgggtgacccatctgtacccggactcaccgggtttcagtttgataagttgcctgaaga

SEQ ID NO: 125289 - DNA, 536 bp, Arabidopsis thaliana
  unsure (1)..(536): unsure at all n locations
cnnnnnnnnnnnnnnnnnnnnnnnnnnnnnnnnnnnnnnnnntaaaaacacaaactttcctgaaaaagtcgtccccgcgtgcgagcattgataaatccgacaagaagtccgattttgttccatagcttgcttgtgtttttagtggattgagtcactgaaagagaaatcataaggctttgttgatgatggatcatttggtggagacgaattcagttccgagcagattggtggaagaaaggcttgatgagattcgtagagtaatgggtaaagctgatgacgacccgttaaggatcgttggtgtaggagctggtgcttggggaagcgttttcattgcaatgttgcaggaaaattaccggtaagtttaggggcaaagttagtgtgagaatctggagaagaggaggcagagcattcgataaagccacagctgcacatttgttcgaagtgattattcgagggaagaatttgtgaggaggttgatagaaggggtgcttatctcaggattgggcagctagattaggggatagggtttatatgct

SEQ ID NO: 125290 - DNA, 1036 bp, Arabidopsis thaliana
  unsure (1)..(1036): unsure at all n locations
nnnnnnnnnnnnnnnnnnnnnnnnnnnnnnnnnnnnnnnnnnnnnnnnnnnnnnnnnnnnnnnnnnnnnccacgcgtccgtgcaaacttgagctttgtattccgacaaaaaaatggcgactgcgtctctagttccgacatctaaaatcttctctgtctctccgaaatcctcagcttcgattaaagcaaggagcagagtagttgttgcatcgtcgcaacaacaacaacaaccaagaaggagagagcttctgctgaaatcggcggtggcgattccggcgattctgcaattgaaggaagctccgatatcagcggcgcgtgaggtggaagttggatcgtacttacctctgtctccgtctgatccttctttcgtcctgtttaaagccaaaccttcagatactcctgctctccgcgcaggaaatgttcagccctatcagtttgttctaccgccgaattggaaacagttgcgaatagccaatattttgtcaggtaattactgtcaaccgaaatgtgcagagccatggatcgaagtgaagtttgagaacgagaagcaaggcaaggttcaagtagttgcatctcctttaatccgcttaaccaacaaaccaaatgcaactattgaagatctcggtgagcctgagaaagtgattgcttctcttggtccttttgtcaccggaaactcttatgactctgatgaacttttgaagacttcaatcgaaaaaattggagatcaaacgtactataagtatgtgttggagacgccatttgcgctcacgggaagtcacaatcttgcaaaagcgacagcaaagggaagcacggttgttttgtttgttgtaagtgctactgaaaagcaatggcagagctcacagaagactcttgaagccattcttgattcttttcaactgtaaatcagagtttttgttatgactctggacttgagaaactaaagagcaaacagtttatgctaaaaaaaaaaaaaaagggcggccgctctagaggatccaagcttacgtacgcgtgcatgcgacgtcatagctctctat

SEQ ID NO: 125291 - DNA, 1161 bp, Arabidopsis thaliana
ggcagacggactatgcaccccccggccccgcgggcgtagtatcgccggcacatatacgactcatatagggaaagctggtacgcctgcaggtaccggtcctttatccacttggagcttcgacaatggcgtctccttcgcttctgcagtcttccgcttcttcgtttcacggacgtttctcaccattagcggctccatcctccgcacgaatgctctctccgccgctcagaaacgtggtgaaagtctcggcgtctggaactgtactggtcgagaaatctgaagccgagaaaactcaacgcctcaaaaccgcttacctcgagaggattatccctgcgctcaaagaagagttcaagtacgttaatattcaccaggttccaaaggtacagaagattgtagtgaattgtggtattggagatgcggcgcagaacgacaagggtttggaggctgcgatgaaggatatcgcgcttatcacagggcagaaacctattaagacacgagctagagcttccattgctactttcaagatcagggaagatcaacctcttgggattgctgtcactctcagaggagatgtaatgtactccttcttggatcgtcttatcaacttagcccttccgagaactcgagatttccaaggtgtgagtcccagtagctttgatgggaacggaaactacagtattggtgtgaaagaccaaggtgtattccctgaaatcaggtttgatgccgttggaaaaacgagaggaatggatgtatgcatcagcacaacggctaaaagcgatcaagaaggacagaaactattggctctaatgggaatgcctttcagggaaggaggtggtggcagcacaggcgcgatagtgcggaagaagaaactaaagtctcatcactttgatgctaaaggaaaaggaaagagatgatgaacatagctgcctattgtatgtatcgtcttctgtaaccaaccatttcatgtttcagaaaaaccatctccttttgtaatgctttatgagtcaatttgaaaataatatcagggatcttgttgttatggtaaaagcggccgaaggtttttctgtaatttaaaaaaaaaaaaaaaaaaaaagggcggccgctctagaggatccaagcttacgtacgcgtgcatgcgacgtcaaagtcttctataggttcacc

SEQ ID NO: 125292 - DNA, 567 bp, Arabidopsis thaliana
  unsure (1)..(567): unsure at all n locations
gccnccannntcttnaagnccgggaagcccccccttgggattctccccccccgcgggggtttattgccccctcttggaccgcttaccaactttcccccttccgggaacccgggattcccaaggtgtgacccccattanctttgatgggnaccggaactnccagtattggttttgaaagccccaggctgtatccccctgaaaccaggtttgatnccgttggaaaaccgagaggaatggatgtatgcatcagcacaaccggctaaaagcgatcaagaaggacagaaactattggctctaatgggaatgcctttcagggaaggaggtggtggcagcacaggcgcgatagtgcggaagaagaaactaaagtctcatcactttgatgctaaaggaaaaggaaagagatgatgaacatagctgcctattgtatgtatcgtcttctgtaaccaaccatttcatgtttcagaaaaaccatctccttttgtaatgctttatgagtcaatttgaaaataatatcagggatcttgttgttatggtaaaaatttatcaaggtttttctgtaatttattg

SEQ ID NO: 125293 - DNA, 416 bp, Arabidopsis thaliana
gaaaaaagcatatcaatctctgtgcctctctcaattctcaaattctgaattctgagcgtatcttcttctctttgaggttatcatttgaatatcttcttcatcttcttctccaagcccctctctctctgtatcgatcaatcatcaataggaggagctagcgaggggattcaataaagagatcttcttcttcttcttcgattcactttcctttcttttccattttccctttcgtcgtcgtcgtcaatggtgatggaggacaacgagagttgcgctagtagagttattttcgacgccttacctacctcccaggccactatggaccgccgtgagcgcatcaaaatggaggtcttcgatgaggttctccgccgtctccgtcaatcggacattgaagacgcccatctccctggtttcgaaga

SEQ ID NO: 125294 - DNA, 641 bp, Arabidopsis thaliana
tgtgctggatatcgagttctcggccgcccggtggctacgtcatgtgtctttctcatattccggcaatcctcaagaggaaatctagaatcctccatacatttcttatttccttactagggttttgtgtgtgttggcaggtggaagctgacgaagaacaacatcatatatcattcaccaagtaagtaatgtaaagtaaagtagcagctctatttattttctttcctatgattgagatgaaaaattcgattgttgttgtgtgagacagtggtacgagaaaaagatatctgctgggaatacgcagagaaactagatggtaacaaggttaaatgcaagttttgctctagagttcttaatggcggcattagtagattgaagcatcatctctctcgccttcccagtaaaagggggttaatccatgttgccaaggttagggccggtgttacctcgatagagtccgttccattttatctgccaaggatgatccccccattaccaacaagtacaagcctccaccacctttatctcctccgtttgatgctcctgcgtccaaactaatctttcctagttctcctgctaatgcgcaggacattgcagagaggagtatttctctcttcttctttgagaacaagattgacttcgct

SEQ ID NO: 125295 - DNA, 536 bp, Arabidopsis thaliana
gctctctacgactcactattgggaaagctggcacgcctgcaggtaccggtccggaattcccgggtcgacccacgcgtgcggtgctcgtcgaagaaacttctccaacctaaaattttccgaagaagtaagagttgagcaagttatcaatggaaatcgatgaagaagagccaatggtgttcttggaccgtacaacaagagcaacacggggtaaacggatgaccaagttgcttgatgacgaagtagaagaagatgaacagttttggaatcaagaagctcttaaagaggaagaacatgatgatgaatatgaagcagaacgtgaggttgctgatgagtttgacagtgacttcaatgacgatgagcctgagcctgatgcagtcgctgtaaatgaaaaagaattgagggatctgccaaagaagcggctgatttaccctgggaaaactgcttcaaagaaaagaaaaaatggacgaaggtagtttcacaactagaatttatccctggagatgagaggcccaggtgaagaattggaaaacaggaac

SEQ ID NO: 125296 - DNA, 1015 bp, Arabidopsis thaliana
  unsure (1)..(1015): unsure at all n locations
acgatattttaggtgacactatagaagagctatgacgtcgcatgcacgcgtacgtaagctcggaattcggctcgagcttcgtctctctctcgcgctcccaatttctccgccggcgggaaaaccatgtcgcacttcggaaggtcaggtccaccggatatcagcgacacctactcacttctcgtccttaacatcaccttccgtacgactgctgatgatctctatcctctattcgcaaagtatggaaaggtcgttgatgtgtttattcccagagatcgaaggactggtgattcgcgtggttttgcgtttgttcggtataagtataaagacgaagctcacaaagcagtggaaaggcttgatggaagagttgttgatggcagagaaataactgttcagtttgcgaaatatgggccaaatgctgaaaaaatttccaaaggaagagttgtggaaccaccgccgaagtcacgaagatctagaagccgtagtcctaggcggagtcgtagtcctaggaggagccgtagcccgcctagacgtcgtagtcccagaagaagccgcagtcctcgtaggaggtcccgagatgactatagggaaaaagactaccggaagcggagcaggagcagaagctatgacaggcgtgaaaggcatgaggagaaggatagagatcatcgtcgtcgcactaggtctcgtagtgccagcccagatgaaaaacgcagagtcagaggccgttatgataatnagagccgcagtcacagtcgttccttgagtgcatctcctgctcgccgcagccctagaagttcctccccacagaaaacctctcctgctagagaagtttctcctgataagcgtagaaatgngaggtctncatcttctcgtcgcagcctcagcccaagaagncctgcttttcaaaaangnctctccttctaaaggagatgttttcttgaaggcgtanaaatnnngaggtccccatntcctggtagccctgttccttttngnaaaanattattncttgttnttgaag

SEQ ID NO: 125297 - DNA, 512 bp, Arabidopsis thaliana
aatgaatttaggtgaactatagaagactatgacgtcgcatgcacgcgtacgtaagcttggaatctctatagagcgctcggcctctctgtcgcgctcccaatttctccgccggcgggaaaaccatgtcgcacttcgggagggcaggtccacccgttagcagcgacacctactcacttctcgtcctttacatcacctttcgtacgactgctgatgatctctatcccctcattcccaaagttttgaaaggggggggggcgcgcccattcccacagatctaaggaatggtgatttcaagggtatacgtttggttggtataagcctaaacacaaaggtgaaaaataggggaaaggtttgagggaaaaggtttttttgccgaaaaaaaactgttttttgtggggaaaatagggccaaatgctgaaaacattatcaaaggaaggagttgtggaacctccgcccgaaatctcaataatctagaccccccactcctaggcggagttttatttttaggaaga

SEQ ID NO: 125298 - DNA, 480 bp, Arabidopsis thaliana
acccacgcgtccgcaaatctcaatcatcctgcttcccattaagaaaccccttatcttggagtaatcagagagtttgaaaacaccagaaatcatggcgacaggaccagttgttcatcctcaaccagttagaggtgatcccatcgacctcaaaaacgcagcagcaaagaatcgtcgtgctcttggcgacattggaaacgtcgattctcttattggagtcgaaggaggaaagcttaaccgccccattactcgtaactttcgtgctcagttgctagaaaacgcacaagttgcagccgccgctaacaaaaaggctccgattcttgatggagttactaagaaacaagaagttgtaagagcggttcaaaagaaagcaagaggtgataagcgtgagccgtcaaaaccaatcgaagtgattgtgataagtcctgatacaaacgaggttgctaaagctaaagagaacaagaagaaagtgacatactcttc

SEQ ID NO: 125299 - DNA, 481 bp, Arabidopsis thaliana
attttcttagcgtcgctctctgtcaccttcaagttcactatctccgacttatcttctgtcaagtactgaacaagaatcatggaggagatcaccaaaccggtccttgttggaatagttaagaaagaagctccacagctagcatccgtgttgagagaaatgaagaatgttctagatgtggttaggagcaaagtggaagctctgactgcattggtaaaagcaaacagttttccgacagcgggtgggataagttatcttgaggccaagcatctgttacttctaagttattgccaggatcttgtatattatattctaaggaaagcaaaaggactctctattgatggccatcctcttgtaaggagccttgtagagatacgtatgtttctggaaaagattcgtcccatagacaaaaaacttcagtaccagattcagaagctcaccacagccggtgggcctgtgacagagctagctcattccgagggaa

SEQ ID NO: 125300 - DNA, 598 bp, Arabidopsis thaliana
atttttcactcatactaataattaaaagggactaggaaaaataaaggcacattttctccgttggaataatcaacggttacgtatggagaagattgtgtcacgtggaagctaatccaccacgatccagtttcatctctattaacaaagatcactccttccctcgcttcaattttagtttctattgttgttcatctctcaatcgtctctttcgatattttctcaggaaaatctttacaacatccgtggagaagcatcaccagaatccgaattcagcgatggatccagcgcgggaatgcgaaggcaaaggagcttgcgaattgaaatcgaacaagcgatttgctgataaaatcatgcctcatcttctcaacttgtacgggtctaggtgcaaaagccaacgattttgacatgtatgcaccaattgcttcattggaagaccctttgacccgcgctcagggagtgaagcatatcaaaccatcattttattcactccctaaagtgtttggtgagtctaaaattgttgaatatcatattcaagaaagtgaaacctctccggtgaagaaagagatactaatttacaacaaacaacacttcaagatca

SEQ ID NO: 125301 - DNA, 694 bp, Arabidopsis thaliana
aaactcttctgtttactattactactatagttagctttttaatataaaacgggtgttagaattccgcaacaaagaaatcggcgggagtcgtgtgctttagcccaaaaacatcggcctcgttgtccaacgtgtgtatttggaggaaaacatcattagagggccacatatacatctctctaattacactctacgaatattaaacacatttaattgtacttaatcctcggcataacacttgtccattaagtcaccatgtacttgctataaatatggtcaagtccagtccataatatatgcatctctgatctttcttggtgagagtaatagacatgggagctcttgattctctttccgagtatatctccgactacttccgcgtcaccagaaaaaggaggaagcggaaagtcatgcagacggtgaatataaaggtgaaaatggactgcgatggttgtgaacgcagagtcaagaacgcggtttcctccatgaaaggttcgaatctccaactcgtagactacttatgtcatgaatggtttccgtaagtttttttgtaattttgatttccattaaacgagtactcatgtaagcacgccaaaccatttctacatacaacaagccaaattaacacggtctttatatcaatataaaaatcgcgcaggtgtgaaatcggtggaggtgaatagaaagatacataaag

SEQ ID NO: 125302 - DNA, 605 bp, Arabidopsis thaliana
cagctctctacgactcactattgggaaagctggcacgcctgcaggtaccggtccggaattcccgggtcgacccacgcgtgcgatcagatcaaccaaaggaagcgaagaagaagaagactttatacactctcgacgctattgatttcgtctgtgcagttttgtttctctatcagttagttttaaagatgagttcttcagagagtgtggaaaacgagtgcatgtgttgggctgcaagagatccatctggtcttctttctcctcatactatcactcgcaggtctgttacaactgacgatgtttcactcacaatcactcattgtggagtgtgttacgctgatgttatctggagtagaaaccaacatggagactccaagtaccctttggttcctgggcatgagattgctggaatagtgactaaggttgggcctaatgttcaacgattcaaagttggagaccatgttggtgttggaacgtatgttaactcctgcagggagtgtgaatattgtaatgaaggacaagaaggtaattgtgcgaaaggagtttttactttcaatggcattgatcatgatggctctgttactaaaggaggctactctagtcacatt

SEQ ID NO: 125303 - DNA, 399 bp, Arabidopsis thaliana
acgagccgagacgaaaaaaggctcagaatcgtatccgatcaggaccatcgtcgttttggttcaagagaatcgttctttcgaccacacacttggctggttcaaagagctaaaccgggaaattgacggagtcatgaaatcggaccagaaattcaacccgggtttttcctctgacctaaattcccacaacgtcgtctttggcgaccagtctcagtacgttgacccgaatccaggtcactccattcgggatatttacgaacaagtgttcggtaaaccatgggattcgggtcacccggacccaaacccgggtccagctacaatgtccggattcgcccaaaacgccgagcgaaagatgaaagggatgtcttctgcggttatgaacggatttaaaccggacgcttt

SEQ ID NO: 125304 - DNA, 1027 bp, Arabidopsis thaliana
  unsure (1)..(1027): unsure at all n locations
attgccctttcggtccggaattcccgggtcgacccacgcgtccgattgcctctgatgagaagatagcactattgggtgctatccagtcgctctttgaaggatctatgtatacttttgtattcctctggactcctgctctaagtccgaacgatgaggagattccccatggtttcatttttgcaacatttatgctagcttcgatgctaggcagttcccttgcatctcgtctgttgtctcgttcaactcccaaagtagagagctacatgcagattgttttcctagtttccggtgctgcactattgcttccaatattaatgactttgttcatagcaccttccaaggtgaaaggtggaggaatctctttctcgggttgctttcagctccttgggttctgtatattcgaggcgtgtgtaggactgttttggccatccataatgaagatgagatcccaatacatcccagaagaagccagaagcacaataatgaactttttccgcattcctctgaatatctttgtctgcgttgtattgtacaatgtaaatgcattccctatcacggtcatgtttggaatgtgctcgatcttcctctttgttgcaagtctcctacaaaggcggctcatgatgattgttgacaaaccaaaaacaaatgactggacaccccttgaagaaagaaacacagaagaagatcccctcaacatatgatgaattaactatacatatgcacattctggattcagtaatggagacagatagaagaagaggactttaaggtatatggtatatagaacgcaacaatgcatccaaagagatcatagcgttgtaagactcgatgcagtagttcgattgtttaatttttcttggctatatttttgaatatgttccattcaaacccacagtataagttttatgctgtcccatgtgttattctttctttctaaaaaaaaaaaaaaaaagnnnnnnnnnnnnnnnnnnnnnnnnnnnnnnnnnnnnnnnnnnnnnnnnnnnnnnnnnnnnnnnnnnnnnnnnnn

SEQ ID NO: 125305 - DNA, 461 bp, Arabidopsis thaliana
cgattttccatttcaatttcttcttcagccggcgattaagcttcccaataagacaatctccgaccgccgcaacatcacgaaggattcttcaccgtgtgaactttacgcagtctttcctctttcgtagacgctaaagaagttgaaattgatctgatctcgtttagcagatctaccttcgattcgattcttctccttcctgatatcgcttcattgttcaaattcggcacaaaatggtttatcactcgagttttgtggatgaagaaggagtaacaaaggcatgtggttgtccattgcttcctctcaagagtcatataaaaggtcctgcacctgtttcagaacaagataaaactgatatagtagacgaggcaatcaccttctttcgtgctaatgtcttcttcacaaactttgatatcaaaagtcctgctgataagctccttatttacttgacgttttatataaat

SEQ ID NO: 125306 - DNA, 905 bp, Arabidopsis thaliana
  unsure (1)..(905): unsure at all n locations
nnnnnnnnnnnnnnnnnnnnnnnnnnnnnnnnnnnnnnnnnnnnnnnnnnnnnnnnnnnnnnnnccacgcgtccgctgaatcagagaattggtaagtagtaagaaccctagctttagattcgtcagattctgattactcgaatcaaagcagggtttttgacactaaaaatccgatctcgtgaagtgtgttttgcatcgaatcggaaaatatgaaagaagggaaatcatcgaagtcgtcgagtcaacaagagcagcatgaacagatttatcatcaaaacagtcacttgggttctttcaacttcgccaaattgtttgattctgaagcttcctgggacaaggatcaactgggagatgtgttgcattggatcaggcaagtagttggtttactctgcggattgttgtggggtgcgatacctttggtaggaggcatatggcttcttctatttcttgcaatctcctctggcatagtatatggttactatgcattggttctaaagatcgatgaagaagacttcggtggtcacgcagctttgctccaggacggtctatttgcttctctaagtttattcctgcttgcgtggattctggtgtatagcttgtctagcttctgatagagacacagtatctcgcgcttgagctgctccgtgaagaagtttagcagaacgtacctttcatggtttctccaatttacgatgtgcccttcatgcttttgttttctgaagatgggaactagcattggtagattttcatttttctgatggaacttttggtttccttttgttcttgttaattactttgtgtaataaaaatgagtattattatgcaaggatacagtatgtgtttagtacaaaaaaaaaaaaaaagggcggccgctctagaggatccaagcttacgtacgcgtgcat

SEQ ID NO: 125307 - DNA, 804 bp, Arabidopsis thaliana
  unsure (1)..(804): unsure at all n locations
atcacattctaatccaagggaatctcctaaaagatgcatacattgtagtgaaggacaatgcgaagatgatctcacagcctactttaaagaaatttggcagagcttttatgatctcgggtaatattaatttagtgaatgatgttctgaaagtattgcatggttctggccacaaaatcgatcaggtaaatagccaaccggtaacaatttgatgctattttgccaacgttttacttggaaataattttcattacagttgagaaataaggaaaatttcgttctttaatcatactgaatctcatttcttgccttcactgtgtacttttgttttcaggttcagtttgagattgcgatttctcgatacatttcgcagcccgataaaaaggaattgcttcttcaacttctacaatggatgcctggtcaaggatatgttgttgactcctccacaagaaacctcattctcaagaactctcatatgtttggtcggctactcattgcagagatcttgtcaaagcatcatgtcgcttcaagaccgatgataaaatcacgaccagagcaaaaatttagatgtaaataagaatgtaaattttctgtttctttttttttttgtggcccgtcgtttggaatgagaaaaatgtatgtacgtagttcatgaaatagatgagagtctaatttgtagatgtgccaaattttatcgaatcttacatactaaaaaaaaaaaaaaaaagnnnnnnnnnnnnnnnnnnnnnnnnnnnnnnnnnnnnnnnnnnnnnnnnnnnnnnnnnnnnnnnnnnnnnnnnnnnncat

SEQ ID NO: 125308 - DNA, 499 bp, Arabidopsis thaliana
gactcactatagggaaagctgctacgcctgcaggtaccggtccggaattcccgggtcgacccacgcgtgcggttccatctctctctctctttctcactgatctcatttcattccttatctttccaattttaccctcacgttaccttcgaattctccatctcctaccattcaaagcttctctcagatgtctatagtctctaagcttcgttctccggttaaaccaataggtgagtcacgagctatcctctgttcgaccgggaacagatttaaggttacgaaaacagaaatgacgaagaagccacaactgaatccacgagtgacgaaatctccggcgacgaagaagcccgattccaatttctcagtttcgactgatgattcctcttcttcttcttcatcctcggaacgttcgtcagtgaacacgacaaactctgggaaagtaaccactccgtcgaaacggaacggagttgagaagctcaataatgtcgttgcctccgtcgcc

SEQ ID NO: 125309 - DNA, 390 bp, Arabidopsis thaliana
agaacctctaatggctttatctccgtcgtctcctccatgtctcagatctctttcgccttcgttttctcgccaaattggcttccttgttccacgcgtacagtctctagtctttggtagcgtccggaagcatgagttgcggaggccgagcgcactcagggaatggcgggagtacgaagatgctgtgaagagaaaagatctcgccggggctcttagattcctcaaatctattgaaaatgatgaacagcgtgattcggttgaatctattgtcacggctaagttaagcggcttgggagctcttgaattggggagggattggcaagttttagatgcgtgtttgaatgcagatgatatgagacttgttggaagtgcgtttggtttcttaaggagaga

SEQ ID NO: 125310 - DNA, 677 bp, Arabidopsis thaliana
  unsure (1)..(677): unsure at all n locations
nnnnnnnnnnnnnnnnnnnnnnnnnnnnnnnnnnnnnnnnnnnnnnnnnnnnnnnnnnnnnnnnnnnnccacgcgtccgggagcttaataaacagaagccgttctccttcactttcgttcctctcacttccatacaacatttgaaacctcagctatgcctaaatcaaagcgagatagaccagtgactttgtctaagacgaagaagaaaggaagagagcataaggagtgtattgtgaatggaattagggaggctgttgaaaaatattcctctgtctatgttttctcttttgaaaacatgagaaatatcaaattcaaggagtttaggcagcagtttaggcacaatggaaagttcttcctaggttcgaacaaagtgatgcaggttgctcttggtcgttctgcagaagatgaactccgttctggtatctacaaagtctccaagctgcttcgtggtgatactggacttcttgttactgatatgccaaaggaagaagtcgaaagcttatttaacgcttatgaggattccgacttttcaaggaccggaagcattgcagtagaaacggttgaactgaaggaagggcctctagaacagttcacacatgagatggaaccacttcttcggaagccggaaatccctgtacgactaaacaaaggtactggggaggtggtcgctgactttg

SEQ ID NO: 125311 - DNA, 524 bp, Arabidopsis thaliana
  unsure (1)..(524): unsure at all n locations
aatcaggggagcttccgattaatacgagttggttggtttttgctgaattttcgaagctttgtttcttcaatctttgatgctagaaaggtgttttctgcaacaagcaatatgcgacaaagaaatatgatgactggttcagacatggagcagaattctcaaagctttgttccccatcctgaacctcgcattggaactaactatctgtatccagatatcccaccagtgaacactgttcctcatttagaagctcattctctgcaagaaccttatgacaacaactcaatgttctacggggcctccacagtaccatcatcaacatgcttcaaatcttggttctggcatgtcaaccgcaccaaatttctatgtcccttatgtgaattatgaagctccgccgagttttctgttgtctcatggaagtaatggtgcagttgttgggggtacttccacttgaaaatgagtggaattgccccnntttttggttnnggnttntaaannatagnggtnttgangaatnnccgggantt

SEQ ID NO: 125312 - DNA, 603 bp, Arabidopsis thaliana
atgatactccagctctctacgactcactatatggaaagctggtcacgcctgcaggtaccggtccggaattcccgggtcgacccacgcgtccggcaacctattcgttggttggttaatagaagctctctttctctgtctgtctttctctctcagagaaatggctcttcttctagtttcttcttcctcctcctatgccctcagagtcaccattttcttgtctttcttcttctttctctgcaatggcttctcttaccctactacttcttctcttttcaacacccatcaccatcgtcaccacttggccaagcacaactacaaagatgctctcactaaatcaatcctcttctttgaaggccaaaggtcagggaaacttccttctaaccagagaatgagttggagaagagactctggtctctctgatggctctgctcttcatgtggatttggttggagggtactatgatgcaggagacaatatcaaatttggtttcccaatggcattcacaaccacaatgctttcatggagtgtaattgaattcggtggactcatgaaatctgaattacaaaacgctaagatagcgattcgttgggctactgattatct

SEQ ID NO: 125313 - DNA, 521 bp, Arabidopsis thaliana
gcgtctctacgactcactattgggaaagctggcacgcctgcaggtaccggtccggattcccgggtcgacccacgcgtgcgcttaatgttcctcgtaaggtgactcttttagatccgttatgtgatacaagaaactcaattcctgagaatttccctcgtgttctcgatatgtccaagtttaaggttcgagaattgggtcgtgaattcaagcttcattatttcaatactgttggtgatattgtagagagtttgtatttggagaaagctgttgttaagtatctagattgtgatggagattataaatttgtgttgcttacgattcatgtttcggggaagttagctgtgtttaggtcttgggatcgagcatggactgtgattaatgacatgccttctccttatgatgatgtgatgttgttcgatggacgtttctttgcggttgataacaacgggaggactgtggttgtggattacagttccttgaagttgacgttggttgcgagtcctgtgtttggtggtgataag

SEQ ID NO: 125314 - DNA, 648 bp, Arabidopsis thaliana
gggtaagtaaagataataaatatgcggggtttgatctttacttatttattaggactcaaacttagccattattaactcaaaaatcaaaattactcctaaaacaagcagataggaaaaacacaaataaataaaaaaaaggaaattgaatgcagagttgtcagagtgtatttaaaaaagaaaaaaaaagcacgttaggaggagtatcctttagactagagtaagggagtgggtgctttaaagaagcagagaagcgggagaagagtgtgcagcagcaacagccaacagaagaaaatggcaaaagagaaagatctggagaagcaaatcggcggttgcatggccggcttcttcaacatcttcgatcgccccagtctcctctctcctaataagcgtctctcttcctctccgagcgctgaatctgaatctgcctcgggtaggacgaatcagcagagtgtgtactctacccctgagctacgctctcctgcgccggctcaacaaagatcttcttcttcttcttcttcttcctctaggccttggaggttctctaaagaagctccgaggctctccctcgatagcagagccgtcgtggatgccaagggctgcctcaaacacagacagatccgagccgatggcggtgaggctgagaaccag

SEQ ID NO: 125315 - DNA, 767 bp, Arabidopsis thaliana
  unsure (1)..(767): unsure at all n locations
naatacgactcactttagggaaagccggtacgcctgcaggtaccggtccggaattcccgggtcgacccacgcgtccgggattgcgaaatagtaatattttataatcgccgacaaattcttcagatctccaaaattgaatcttattataaaccctaagatttgcatctgatctgctctcgaagacgaaagcttcgagtactggttgaagctaaagctatgggacacgtgaatctacctgcatcaaagcgtggtaaccctcgtcaatggcgtctcctcgacatcgtaaccgctgctttcttcggtatcgtacttctcttcttcatccttttattcactcctcttggtgattccatggcggcttctggtcggcaaacgctgcttctctctacggcgtcagatccgaggcaacggcagcgattagtgactttggttgaagctggtcagcatttgcaaccgatcgagtattgtcctgcggaagctgttgctcatatgccttgtgaggatccgagaaggaatagtcagcttagtagagagatgaatttctatagggagagacattgtcctttgcctgaggagactacgctctgtttgattccctccgccttctggttataagattcctgttcccgtggcctgagagtcttcacaaggtttggcattcaaacttgccctataacaaaattgctgcccggaaaggtcatcaaggatggatgaaaagggaggggggctttacttcccagcggggcacgnttttccttgggggggtc

SEQ ID NO: 125316 - DNA, 989 bp, Arabidopsis thaliana
  unsure (1)..(989): unsure at all n locations
gttatgacggtgccacgaagaagaagaagacgaagatggatggtcagaacaagcttgttcttgctcccatggttcgtgtgggaacgctctctttcaggatgttggcggcggaatacggcgccgatatcacatacggtgaagagattattgatcataagcttgttaaatgcgaacccacgcgtccggttgcttctgggacatctgagtttgtggagaaaggaacagataatgtagtctttagcacatgtgatgaagaaaaaagtagggttgtttttcagatgggaacttctgatgctgttagggctctaaaggcttctgagattgtgtgtaatgacgttgcaactattgatattaatatgggttgccccaaggcattctctatccaaggtggaatgggtgctgctttgttaagtaaacccgagctaattcatgatattttggcaacacttaagaggaacttagacgtaccgggtacttgcaagattcgtctattaaaatcaccagcagatactgttgaattggctaggagaatcgagaaacttggtggaccagctcttgctgtacatgggagggaaattgcagaccggcgcagagatcctgctaatgggatgagattgcaaatgtggggncagcatttttcattcccgtctttggaaatggcgatgtttaaaatatgatgatttttctcgcttaaacccgcgcaggtaccctggtacctttctggatccgattctgaaactggcaattagccctcaacatttttatcgccctgggctaggttaatctgatcaaccctggttatatacccttactgttgctgttttttggtccctaaagccctgttatgtttggtgaaagagcttgtgatgctcaatttttctcaaagaaatcccttggaaatggaaaaaaaacctaaaagagctttgggataacttgtagacccaatccccgtagggaggtatccctctttttctttacctccggggagt

SEQ ID NO: 125317 - DNA, 921 bp, Arabidopsis thaliana
  unsure (1)..(921): unsure at all n locations
cggacgcgtggggtgctgctttgttaagtaaacccgagctaattcatgatattttggcaacacttaagaggaacttagacgtaccggttacttgcaagattcgtttattaaaatcaccagcagatactgttgaattggctaggagaatcgagaaacttggtgtaccagctcttgctgtacatgggaggaaaattgcagacaggccaagagatcctgctaaatgggatgagattgcagatgtggtggcagcattatccattcccgtcattgcaaatggcgatgttttagaatatgatgatttttctcgcattaaaaccgcaacaggcgctgcatcagttatggttgcaagaggagctatgtggaatgcttcaattttctctccaaaaggaaaatcacactgggaagatgtgaaaaagaaataccttagaaagagcatcttgtggaataacgatgttaagagcacgaaatacacgataaaggagatgatagcgcatcattcttgtcttgaactaccggaagggaagtctatcaacaaagcagacactttagaagatttagcgcggctttacgatttagaagattacttttggacagtgaagaacattggtccactgacacataacttaaaccatgttttatgatactgaaagaaaatgccaacactttgcattttcatttatatcattttgtaatctctattgatttttatatatagaggcatcccattgtttttactcaaatgagtaaattactaaaactagcccgattggtaaacaaactgtagaattctttattgtagtatagaaatcaaattcccatttgatnnnnnnnnnnnnnnnnnnnnnnnnnnnnnnnnnnnnnnnnnnnnnnnnnnnnnnnnnnnnnnnnnnnnnnnnnnnnnnnnnnnnnnnnnnnnnnnnn

SEQ ID NO: 125318 - DNA, 670 bp, Arabidopsis thaliana
  unsure (1)..(670): unsure at all n locations
atgagacgacaatggttgacctctggactctcgagtctccctggattactacactcgagctcgacgatccttagaccaacttcgtcttcttcctcgagagcttctctgatctccttcgccgttaataatttccacacgatcgcttcttcttcgtctactctctcttctcgcttgacaactgtatcatcgtccatggcttctggtgacgaaggagctgttttcaatttgtctgattctagccttcttaagatccttaaaggagacatcaccaagtggtctgttgattcttcctccgatgctattgtcaatccagcaaatgagcgtatgttaggtggtggtggtgctgatggagcaatacatagagctgctgggccacaactcagagctgcatgctatgaggttcctgaagttcgtcctggagtccgttgtccaactggagaagcaagaattactccgggttttaacttgcctgcatcgcgtgtnattcacactgttggacctatctatgactcanatgtcaaccctcaagaatctctcaccaattcgtacaaaaatagtctgagagttgcaaaggnaaacaatatcaaatacattgcatttcctgccatatcttntgggntttacggntatncctttttnatgaaagctgctncggtagggttttnaaacc

SEQ ID NO: 125319 - DNA, 574 bp, Arabidopsis thaliana
  unsure (1)..(574): unsure at all n locations
ccctcgcgtccgattgaaatctctagatgtctcttatcttaagatcacaaatgattcgatccggtctatagcgttgctggtaaagcttgaggttttagatatggtaagttgtcctttgatagatgatggtgggttacagtttctagagaatggctctccttcattacaggaggttgatgtcactaggtgtgaccgtgtgagtttgtctggcttgatctctatagtcagaggccatcctgatattcaacttcttaaagccagtcactgtgtatcggaagtctctggtagcttcttaaagtacatcaaaggtttgaagcatctcaagactatatggattgatggagctcatgtttctgattcctctcttgcacgtttaagctctagctgtagatctttaatggagattggactgagcagatgtgttgatgtnacgnatattgggatganaagtcttgcacgcaactgcttaaacctgaaaacattaaatctggcgtgtngcggattcgtgacggatgtagccatctctgctgtagctcagtcttgccggaatctagggactttaaagttagagtct

SEQ ID NO: 125320 - DNA, 287 bp, Arabidopsis thaliana
tagttcttctaacttcgccctgatctccatccgagcagagagtcagaaatcgattcgaattctcagtattttgaatcattcgttgggttgatgtagtttttaatctaatggtagtagtgttgcttagagcttaatggattgttgtttcttctttatgttccttgagactgctttcaaacaagtttaagtattcaacgcttttcttttcgagggaccgctatagaggatccaagcttacgtacgcgtgcatgggacgtcatagtaatctataggtgtcccaatcagtc

SEQ ID NO: 125321 - DNA, 542 bp, Arabidopsis thaliana
  unsure (1)..(542): unsure at all n locations
nnnnnnnnnnnnnnnnnnnnnnnnnnnnnnnnnnnnnnnnnnnnnnnnnnnnnnnnnnnnnnnnnnnnnnnccacgcgtgcgcatcttttgtctcatagccatgggtctagttcaagatgagggaagcggtcctgttcatggctttcggttatcaaccgtgagtgcgtccctgccgtcagagacaggtacgacccacgagcccaccggtttagacctcgccatgaagctccactacctaaaggcggtttacatttactcggccgggacagcacgtgacttgactgtgatggacgtgaaggcgcctttgttttcagtgttctaccagatcccttgcatcattggcaggttcaggcgacatgaatcgggacgtccgtacctaaagtgcaacgactgtggcacacgtttcgtggagagtcattgtgatctcactgtggaggagtggctccgtgtaccggaccggtccgttgatgagtctttggtttaccatcaaccagttggaccagatttggcattctctcctttgctctatattcagatgacc

SEQ ID NO: 125322 - DNA, 499 bp, Arabidopsis thaliana
  unsure (1)..(499): unsure at all n locations
accgntccggcaattncccgggnncgnacccacgtcgtccggtgagcttctgtctcgttcatctacacaatctgactcggttgagaagaaatggcaggacacaaggttgcgcatgccacattgaaaggcccgagtgttgtcaaggaattgattattggtttgacgcttggtttagctgctggtggtctctggaagatgcaccattggaatgagcagaggaaaactagaactttctatgatttgcttgagagaggtgagatcggtgttgtcgcctctgaagagtgaatgggaatgcctctctctcactctcaatgttgttggctcgatttttctgtttttatggtttcttgagatctcagataagttacctaagaaagttggttgcttgagaaataaacaaccactcagacatcaaaattggggtatttgttaacacattgttttccggggagtaccaagtggttgaaacttggagacatctggccttgacttttccctt

SEQ ID NO: 125323 - DNA, 736 bp, Arabidopsis thaliana
  unsure (1)..(736): unsure at all n locations
atgctacgcgagctctaatacgacttacttagggaaacctggtacgcctgcaggtaccggtccggaatttccgggtcgacccacgcgtccggtaaaacaataacagatcaagcgaagaagaaaagtgaagaagctcagcaacaatgtcgtggatgaaaggtgatttactttccaaaaccaggaggcttgttggtggcttagctacacgagagcctgtttggcttaaagccatggaagcatcaccacctcctgtgtttcctcgctccaatggaaaaatccagaagattgttctccctgaggatccttacgttcgtaaattcgctaataagcatcctggaaccaaaattgatgaccctgccaagatatcagcatttattccagatcaagcacgtgtgtatggttgccgggtacttgaattgaaggagcatggcatcagtgagggtgacgccatgtctgtagctaatatggaatatctttcagagagaaagggaatgaagaaagcatccaaacgcttaaaaggagcttgcggtaatgcaaggataagggatccacctccctcaaaaccggatcctagtgccaaggaaaagggttaataaccccaattcgaaggccatccggctaaggggtcgcttccagcactccctangcggccgaagggtnggtaaccnagttgnaaaaatgggaaaannntgggttcctnaaanncaaganccggnggaanngcgtaccccgggga

SEQ ID NO: 125324 - DNA, 425 bp, Arabidopsis thaliana
gtaaaacaataacagatcaagcgaagaagaaaagggaagatgctcagcaacattgtcgtggatgaaagatcaccacctcctgtgtttcctcgctccaatggaaaaatccagaagattgttctccctgaggatccttacgttcgtaaattcgctaataagcatcctggaaccaaaattgatgaccctgccaagatatcagcatttattccagatcaagcacgtgtgtatggttgccgggtacttgaattgaaggagcatggcatcagtgagggtgacgccatgtctgtagctaatatggaatatctctcagagagaaaggaaatgaagaaagcatacaaacgcttaaaggagcttgcggtaatgcaagataaggatccacctcctaaaccgtatcctagtgccaagaaagggttaataactcaatc

SEQ ID NO: 125325 - DNA, 513 bp, Arabidopsis thaliana
  unsure (1)..(513): unsure at all n locations
gtacatcaaacttacatcattaactgttgtttcacatcgtcgaagcaaaaatgattatatatctaatttcattactccctatcatcgtcgccaccctcatgctttatcaacgatggtggagatccaacataccgccgggaccaaaaccaaagtttctgcttggaaaccttcatcaaatgaaaccactttggacgcattctttctcggagtggtcagagacttatggtcctatcatatcggtgtggatagggtcacagctcactgtcgtggtctcgagctctgatctagccagacaagtgttgagagacaaagaccatcagttgtctaaccgacacaggatcgcaaggatgactcagaccggtactgatcttgtttggtccgattacagtccacattatgtgaaactgaggaaactctgtacatcgagccttctctctgaaaagcatcgaaaatttcaggtccttgagagagatggaccaaaccaaggttcgcccatctgatggntangngnat

SEQ ID NO: 125326 - DNA, 419 bp, Arabidopsis thaliana
cccacgcgtccgcggacgcgtggggcaaattaagatcataaaaaggtttagagcttttctaacaaacgtcaaagcaaatcatcatcggagcaatcttcaaatcatcatgataacagtagccatcgcagccgagttgcttgaagaatatacggcggcgctcacacgcatcaccgccacactcctccctccaccacctacaagtcaccgtcgaagtgtccgagctcctactagcggccgagctgactcttccttgcctcgtaacgataacaactcatcatcatgcgctccaaattacaccgcttttctcttaaatttctgagtatttttttaatagacgaagagattttcgaattttctttgtcttgactgtaataatgtttgtgttattcaattggaactttctatttattttcgatatt

SEQ ID NO: 125327 - DNA, 833 bp, Arabidopsis thaliana
  unsure (1)..(833): unsure at all n locations
nnnnatacgactcacttagggggaagaacgtacgcctgcaggtaccggtccggaattcccggttcgacccacgcgtccgaagaaaatatcacagcaaaaattttctcgagaaaatccgaagaagacaaaaaaaatggcggatcagctaaccgatgaccagatctccgagttcaaggaagcttttagcctattcgacaaagacggagatggttgtatcaccacaaaggagcttgggactgtgatgagatcacttgggcagaacccgacagaagccgagctccaggacatgatcaacgaagtggatgcagacgggaacgggacaatagatttcccagagttcctgaacctaatggcacgtaagatgaaagacactgattcagaggaagagcttaaggaagccttcagggtttttgacaaggaccagaacggtttcatctcggcggctgagcttcgtcacgtgatgacaaatcttggggagaagttgacggatgaggaagtcgatgagatgatccgagaggctgacgtcgatggtgatggtcagatcaactatgaagagttcgtcaaagtcatgatggcaaagtgagattcttcttatccctcgaaatcctaagcatgtttttcttttacatctttaactgagaaaagtaatttattgaaccaaaagaaacagagagatttgcttccttgtttgtnttgttgaccgtagttttttggtaccggtgcttctcctttgcctttgggtttcgtaattgcccctnccggttgaccccataattggcttaggctctgggcatgncncttatntgtattncccttncnaaaaatgnngtttt

SEQ ID NO: 125328 - DNA, 545 bp, Arabidopsis thaliana
  unsure (1)..(545): unsure at all n locations
cagggtttttgacaaggaccagaacggtttcatctcggcggccgcgccccgtcacgtgatgacaaatcttggggagaagttgacggatgaggaagtcgatgagatgatccgagaggctgacgtcgatggtgatggtcagatcaactatgaagagttcgtcaaagtcatgatggcaaagtgagattcttcttatccctcgaaatcctaagcatgtttttcttttacatctttaaaactgagaaaagtaatttattgaaccaaaagaaacagagagatttgcttccttgtttgttttgttgatcgtgattttttggtaacgttgcttcttctttgccttttggttttgttattgtccgtgacgtttgaactcataatttgctttagtctctcgagtcatgaccacttgatgatgttattttctcttttctctaaaatattgcagtttattgagatcgactaaaaaaaaaaaaaaagnnnnnnnnnnnnnnnnnnnnnnnnnnnnnnnnnnnnnnnnnnnnnnnnnnnnnnnnnnnnnnnnnnnnnnn

SEQ ID NO: 125329 - DNA, 611 bp, Arabidopsis thaliana
cagctctctacgactcactatagggaaagctggcacgcctgcaggtaccggtccggaattcccgggtcgacccacgcgtccaatggcgcttccttatcaccaatcagatcacaccacgtggcagttatcggcgccggagccgccggattagtcgcggcgcgagagcttcgtcgggaaggtcactcggtggtcgtcttcgagagacaaaaacaagtcggaggaacctggatctacaccgatcatatcgaacccgatccattaagcgttgacccgacccgatccgttgttcattcgagcgtctatggatctctccgaactaatctcccccgtgagtgtatgggatacagggacttcccgttcgtggttcgttccggtgtgtcggaatctagagatccgaggaggtttccgagtcatggcgaagttttggcgtatttgaaagatttcgctaaggagtttgggattgaggagatggttaggtttgagacggaggttgtgaaggtttctccggcggcggaggaaggaatcgcgaagtggaggattgaatcgacggagaaggagaagaaagttcgtcgtgatgagatttatgatgctgttgttgtttgcggacgcgt

SEQ ID NO: 125330 - DNA, 423 bp, Arabidopsis thaliana
catcttctgcatactgcgaggcaagagctaagtcacgctttgtatcagcatgatgctgcttgtcgtgtgattgctaggcttaaaaaagaaagagacgaatcacgacaattgcttgcagaggctgtaaggcagttgcctgcagcccccgaagttgccacatcgaatgctgctcttagtaatggtaaacgaggtatcgatgatggtgagcaggggcctaatgcaaagaaaatgcgtcttggaatttcggctgaagttatcacagaactcacagattgtaatgctgctctttctcagcagcgtaaaaagagacagatccctaaaacattggcttcagtcgatgctctggagaagttcacccaactctcaagccacccccttcacaagaccaacaaacctggaattttttcaatggacatcctacat

SEQ ID NO: 125331 - DNA, 545 bp, Arabidopsis thaliana
acgactcactatttggaaagctggtccgcctgcaggtaccggtccggaattcccgggtcgacccacgcgtccggttcccaaggaaaatattctgccaaaagaacctgctgctgcatatctggctttggctgaaggtattcctgaccaaaaagtattcttggatgatgccgcacttttgttatttgcagaagctattttcgatcaaaagttttcaccagaagttccggattccacgtatccttctttgaaagaaccagaaatgcatgttgccgcaccatgtgtagtaacagatcttcctgctaaaaacatcaaggtaaaagaaggtgaagtacataatgagccctacacagcatctgatgtttctatgaatcagaagagtggtttattggaaccagaatctactgaaagaacatttccctcgagcggtggtactgttacgatttctccagatactcagaattctcttccaaatggtacaagtgttgaatcaataagtatatggagcaatggaggactccttggactcgcgccattgaaacctccag

SEQ ID NO: 125332 - DNA, 789 bp, Arabidopsis thaliana
  unsure (1)..(789): unsure at all n locations
ccggcannnnnnnnnnnnnnnnnnnnnnnnnnnnnnnnnnnnnnnnnnnnnnnnnnnnnnnnnnnnnnnnnnnccacgcgtccgcggacgcgtgggctcaccaaaataataacatgtaatgtgtatacagtatacctaatcaatcattatctttctttaattttgttggattttttgcatattgcaaagtttagaacgcgagcgaattctccgcggaattggggttaaaaggaagaacttttagggtttttgattcttcgggttttctcgtgctttgattcctttcaagtcaaagcaaagcattaccttttctcgtccatccatcagcctgggcttgattagccaaccctgttaaggcagggtttgaactaaaagtgagatagtgagatggatgtcgcagcacttttaacgtctgctgggattaatatagcgatatgcgtagtgcttgtatcgctttattccattctacgaaagcagccagccaattattgtgtttactttggtcgattgctttctgacggaagagttaaacgtcatgatcctcgttggtatgagaggttcgcgccctctcctagttggctcgtgaaagcttgggaaaccactgaggaagagatgttggctgctgctggtctggatgctgtggttttcatcaggatggtcatttgcagcattcgtattttctcaatcgtcgcagtcgtttgccttgcctttgtgttacctgttaactattatggacaaaagatggagcacangggaagccatntnggagtcattgggagtattcacaat

SEQ ID NO: 125333 - DNA, 522 bp, Arabidopsis thaliana
ctttacgtctagagaaatatcctcaccaaaataataacatgtaatgtgtatacagtatacctaatcaatcattatctttctttaattttgttggattttttgcatattgcaaagtttagaacgcgagcgaattctccgcggaattggggttaaaaggaagaacttttagggtttttgattcttcgggttttctcgtgctttgattcctttcaagtcaaagcaaagcattaccttttctcgtccatatcttttgacgacctaagtttctgctgtgaattgttaaacagccatcagcctgggcttgattagccaaccctgttaaggcagggtttgaactaaaagtgagatagtgagatggatgtctcagcacttttaacgtctgctgggattaatatagcgatatgcgtagtgcttgtatcgctttattccattctacgaaagcagccagccaattattgtgtttactttggtcgattgctttctgacggaagagttaaacgtcatgatcctcgttggtatgag

SEQ ID NO: 125334 - DNA, 499 bp, Arabidopsis thaliana
acgaagaaaataaaatttcaaaccaaaaaaaaaaaaaaatgagaactttagaagaatcgaagatctctattgtcttcttgttgcttcttctcttctcaatcttcatcagttccagtcaccaggcaaatgaggtattaccagctgaaggagataatgagatgatgatggtgccattgggggaggagaagtttatggtaatgaatgaaacaagaaggaaacttggaagttttcagatatgttcagtttgtacttgttgtggtggtgctaaaggtctttgcttgccttctccttgttgctatgctattaactgcaatatccctaatagaccctttggttactgttctttcactcccaaaacttgcaattgctttggttgccatatctgagatcttctacttcattgtaatttgggagagaaacaagtgaatctaaatcttgattcatcttcaagtgtgaaagggaggaaaaaaagaagaatatctgttcttggtttgagtct

SEQ ID NO: 125335 - DNA, 548 bp, Arabidopsis thaliana
  unsure (1)..(548): unsure at all n locations
nnnnnnnnnnnnnnnnnnnnnnnnnnnnnnnnnnnnnnnnnnnnnnnnnnnnnnnnnnnnnnnnnnnnnnnnnnnnnnnnnnccacgcgtccgcatttccaaaaggtcttaaccgccattggtaacttctgtatctgttcaatcggaataggaatgttgattgagataattataatgtatccgatccaacatcgaaagtatagagatggaatcgacaatcttcttgtccttctcattggaggaatcccaatcgctatgcccactgtgttgtctgtcacaatggctattggatcacataggttgtctcaacaaggtgccatcacaaaacgaatgaccgccatcgaagaaatggctggtatggatgttctttgcagcgataaaactggaactctaactctcaacaaacttacagttgacaagaacttgattgaggtattctccaaagacgtagacaaggactatgtgatactactttcagctagggcttcaagagtagagaaccaagatgcgattgatacttccattgttaacatgttgggtgacccaaa

SEQ ID NO: 125336 - DNA, 512 bp, Arabidopsis thaliana
tgatactccagctctctacgactcacttagggaaagctggcacgcctgcaggtaccggtccggaattcccgggtcgacccacgcgggcgcttggatcttaatggccaaattatcttttggaactcgatggcggagaagctttatggattctcagctgcagaagcgttagggaaggactcgattaatatactcgtagatggtcaagatgctgctgttgcaaaaaatatctttcagcgttgcagcagtggagagaggtggactggagagtttcctgttaagaataaaatgggagagaggttttcggttgtgactaccatttctcctttttatgatgatgatggtttgcttattgggattatatgtatcacgaatgattcggcactttttcaacggccgagaggtcctcccgctaaaaacagggggcaagagggggattcaagcttttgccgggggactaatggggttgcttctaggcttggttttgattccaaagaggctgttgtgtcgaaact

SEQ ID NO: 125337 - DNA, 562 bp, Arabidopsis thaliana
  unsure (1)..(562): unsure at all n locations
nnnnnnnnnnnnnnnnnnnnnnnnnnnnnnnnnnnnnnnnnnnnnnnnnnnnnnnnnnnnnnnnnnnnnnnnnccacgcgtccgcggacgcgtgggtcgccatcgtcgctaccgattgtcttgaggtttacgacttttggactaatctcctctgtggagagcaatgactaaaactcgtgggactgatatgacaaagaaaaagggtaaacatgtttctgaaatggatttcaagactcatcagcatactgaatttttcgataagttgatagagctcacgcctgctagattctacttacctgatgagacagaaaggaaatggtatccaggtcttagcaaggctcaaaaagctagagccaagaaaaaaacaaatgacaacctaaagaaggcgaagagagataagttggacccagagaagtctgctttgacgactctcgatttactgaaggagaagatagagaaggaaagattggcttcacagaagcagaagcttaagaagaaacacgcggatttacgggagcagaagctagagcaggaaaaatcaggtactgagcttcctgatgat

SEQ ID NO: 125338 - DNA, 591 bp, Arabidopsis thaliana
gctggtacgcctgcaggtaccggtccggaattcccggggcgacccacgcgtccgaaaaaaaaattcacccaaaaaaaaaaaacctcgttgccttcttcttcgccgttacaggcctctttctttcttcaattcgccggcaaaatcttctctttctcttcccccgccggtccttcaccaatcctctgatctctctacacacgaacctttgattttgaccaacgtcgatgcatgttcatgactagtctcttcctcaatccttcaatttcatcaattcacgtcgatttcgtatccgattcgttgttctagctctttgtgtggtgttagggttttaagattttggaattggggtttggagtttgtgatgtttgaagtcaaaatggggtcaaagatgtgcgtgaacgcttcatgtggtacgacttctactgttgaatggaagaaaggttggcctcttcgatctgggcgtcgcgctgatctctgttatcgttgcggatctgcgtatgacagttctctattctgtgaacaatttcataaggaccaatctggttggagggaatgctacgtgtgtagcaagagactacattgtggatgcat

SEQ ID NO: 125339 - DNA, 776 bp, Arabidopsis thaliana
  unsure (1)..(776): unsure at all n locations
atgatcttnnnnnnnnnnnnnnnnnnnnnnnnnnnnnnnnnnnnnnnnnnnnnnnnnnnnnnnnnnnnnnnnnnnnnnnnnnnccacgcgtccgcccacgcgtccgtacgggcgagaagacgacagaaggggaaaaaccctaaaccctaatctctaatttgagaaattaggttagttcacctttttgtcgattcctcttgcggagagatgcaatcgattcgtggcagtacacggttgcttcagaggcatcgtttctccatctccaacactcttcgtttcacttcttcttcttcttgtggaagctggtctgaaaatgaatccagaaaactagggtttgattcttgcccttctagcagagctgcgacatatctcattagctcgttgaaaaatgcaggcttttcctcttcagctatacctaaacaaaactttacgtatgcgtcgaggtgtttttccaccactggagattcttctgttcaaggatctcctgagtcagattgtgttgtgcctcagagaatcaagtttaagcggcttgataaaaccgctaagcatattaatgcagattgtagacaaggaagcggttgaggaagtgagatctcttagagagattcccagagataaagcccgggttacattgtggcagctaaaagtgggaagtgccggaggaacaagagacgggtatcaatcgggaaaggcgtgtcatagcaaggggaaatcctggcngnacccacnattnggantanaggcttttnccgagngggngtgaccagttccctttc

SEQ ID NO: 125340 - DNA, 475 bp, Arabidopsis thaliana
cccacgcgttcgcggacgcgtgggttgtgatcgcatagatcgattccttttgcggagaaatgcaattgattcgtggcagtacaaggttgcttcagaggcatcgtttctccatctccaacactcttcctttcacttcttcttcttgtggaagctggtctgctaatgaatcgaggaagctaggctttgattctttccctagtactagagctgcgacatatctcattagctcgttgaaaaatgccggcttttcctctttggcagtagtacctaaacaaaacttttcgtcgaggtgtttttccaccactggagattctgttcaaggatccctgagtcagattgtgttgtgcctcagagaatcaagtttaagcggcttgataaaccgctaagcatattgcagattgtagacaaggaagcagttgaggaagtgagactcttagagagattccagagataagcctgtacattgtgcagctaa

SEQ ID NO: 125341 - DNA, 543 bp, Arabidopsis thaliana
atgatactccagctctctacgactcactatagggaaagctggcacgcctgcaggtaccggtccggaattcccgggtcgacccacgcgtgcgcggacgcgtgggcggacgcgtgggttcgcattgttaattaaggtcgccggacttttggccactgtcaccgttggagccaacgtagtttcctactctcgtttccgtcgccagaatctcgcgaagtttcgctctccaatcgacgaatctaaagaagttctcgctgatttcaattccattgaacacgaggaaggaaaattcttctttgggttagctactgcacctgctcatgcggaggatgatttagatgatgcttggctccagtttgctaaagaaacaccatgttcagcagaagaagcagaggctgctgataagaaagctaggaggaagaaggttaagcttgctgtgggagctataaccaaaggcttggccaagaacactcatggcaaagaagataagaatgcagctgataagcccccctctaaaaagtgttgccgcgtggcataacgctcctc

SEQ ID NO: 125342 - DNA, 652 bp, Arabidopsis thaliana
  unsure (1)..(652): unsure at all n locations
atgannnnnnnnnnnnnnnnnnnnnnnnnnnnnnnnnnnnnnnnnnnnnnnnnnnnnnnnnnnnnnnnnnnnnnnnnnnnnccacgcgtccgattcaattcgtttaaaaatggagagtcaaaagcaagaagataatgaatacattttccgcagtttgtatccatctgtgcccattcctgacaaacttacactgcctgaatttgtgctccaaggagttgaagaatacacagagaatgtagcgtttgtagaagcggtgaccggaaaagctgtgacgtacggtgatgtagtgagggacacaaagaggctagccaaagcgttgacatctctcggactaaggaaaggtcaagtgatggttgtggtcctaccaaacgtcgccgagtatgggattattgcccttggtattatgtctgccggtggagtcttctccggtgcaaatccgacggctcttgtttccgagatcaagaagcaagttgaagcttccggtgctagaggaatcatcactgatgctactaactatgaaaaggtgaaatcactaggtttaccggtgatagtgttaggtgaagagaagatagaaggagcagtaaactggaaagatcttctagaagcaggagacaaatgcggagataccgacaatgaagagattcttcagaca

SEQ ID NO: 125343 - DNA, 583 bp, Arabidopsis thaliana
gtttatcatcatttcccgtaatcgtaatcggaggtcaggcttcagcattctctcgtcttctctctcgcagccgtagtttttgatcttctcttcaattctctctcctgatggccacgtccgccgtcctctccggtgccagatcgatgcttcgagctgcttcctcacgcagcgccgctgcttctactggccgcttcgcctctcaagcgaaatccgctccaccattgtttagagccactgccagaagaagcccactgctttctcctctccgaaatcctgtggaactgagcttctgtgtggagtcattgttaccatatcactcggctacagcttcagcgctaatgacttcaaagctttctatctctggccaaacctatggctggctctctgacgcttgcaaagaggacttttgatgatgtctacgcgtacccaatgcgagattgttgattgcgagagaaggtttaagagtatttaggcaaagaataattgttgtactgttcaaacacaaatcatctctttgtctttagttttcatatcacacccaaatgtccaatatcccctccatcaaatctctatgatttctatt

SEQ ID NO: 125344 - DNA, 554 bp, Arabidopsis thaliana
cccacgcgtccgcggacaaaacaccaaaacagagttcacagaaacatattcaaagatttttcacaaatattaccattttaaatctataaacaatgacgaactcggtggctaagttggcactactagggttttgcattctgcaagtgacgagcttacttgttccgcaagcaaatgctagggctttccttgtgtttggagattctctcgttgacaatggtaacaatgactttcttgctaccactgctcgtgccgataattacccttatggtatcgatttcccaactcatcgtcctacgggccgtttctccaatggtctaaacattccagatctcatcagtgaacatttgggtcaagagtctccaatgccgtaccttagtccaatgctgaagaaggacaaactcttaaggggagctaacttcgcctccgcgggtattgggatccttaacggcaccggaatccagtttctgaattttattaggatcacaaagcagctagagtacttcgagcagtacaaggttcgagtaagcgggttggtcggagaagaagagatgaat

SEQ ID NO: 125345 - DNA, 582 bp, Arabidopsis thaliana
  unsure (1)..(582): unsure at all n locations
tcnnnnnnnnnnnnnnnnnnnnnnnnnnnnnnnnnnnnnnnnnnnnnnnnnnnnnnnnnnnnnnnnnnnnnnccacgcgtccggaaaatcctgaagcagagaaagagagatttgaaaaggagtgggaaatattggatgagaagcaagcagtatacaataaagagcggataagaatatctgaagaaaaagaaaagttcgagaggtttcaactactggaaggagaaagattgaagaaagaagagagtgctttgagggtgcagataatgcaggaactggatgacattagactgcagagagaatcatttgaagccaatatggaacatgaacgatcagcgttacaggaaaaagtcaaacttgagcaatctaaggtgattgacgatcttgaaatgatgagaaggaatcttgaaattgaacttcaggaaagaaaagaacaagacgagaaagatctactagacagaatggctcagttcgaggacaaaagaatggcagagcttagtgatatcaatcaccagaagcaggctttgaacagggagatggaagaaatgatgtccaaaaggagtgctctccaaaaggaaagtgaag

SEQ ID NO: 125346 - DNA, 791 bp, Arabidopsis thaliana
  unsure (1)..(791): unsure at all n locations
tcnnnnnnnnnnnnnnnnnnnnnnnnnnnnnnnnnnnnnnnnnnnnnnnnnnnnnnnnnnaaacttgctccaaccacgctatctcaggatctctctcagacacagtttcttccatccatggcgtctctttcttctacctctctctctctccccaagaattctcaccaactccatccttcatctggtttttctctgaatccaaatgctcgttgtgtcagtgtttcatttggactgaatcactccaacaaacttcatatttctgctcctagaaccaaaaggatcctaaccattcaatctgcatacagagatgatgatggttcaggcagcacaggcctattcgtcggagggtttattttgggcggacttatagtcggtgccctcggatgtgtatatgcaccacagatcagcaaggctatagctggagcagaccgaaaggatctcatgaggaagttgcctaaattcatatatgacgaggaaaaagctttggagaaaacacgtaaggtactagctgagaaaattgctcagcttaactctgctatcgacgatgtctcctctcagctcaaatcagaagatactccgaatggtgcagctctaagcaccgatgaaatcgaggctacagcctgaaatcatctgtttttaggatttgaaattgaatcatgggagattacttactatgatcccaataattgttttcctttctgtgtaatgttgcacaacttttcgtctactatcttcaaatgactgcaatacaaccttcttcttttaaaaaaaaaaaaaaaagggcggccgct

SEQ ID NO: 125347 - DNA, 601 bp, Arabidopsis thaliana
  unsure (1)..(601): unsure at all n locations
tcgggttcatggctganccccnacaacttcannttcggccctgacccaaaggccntaccattcaatctgcatncgggtgtgtggttcagccagcacagcntatcgtcggnggtttattttggcggacttatagccggtnccctcggatgtgtatatgcaccaccagatccagcaaggctatagctggagcagaccgaaaggatctcatgaggaagttgcctaaattcatatatgacgaggaaaaagctttggagaaaacacgtaaggtactagctgagaaaattgctcagcttaactctgctatcgacgatgtctcctctcagctcaaatcagaagatactccgaatggtgcagctctaagcaccgatgaaatcgaggctacagcctgaaatcatctgtttttaggatttgaaattgaatcatgggagattacttactatgatccccaataattgttttcctttctgtgtaatgttgtacaacttttcgtctactatcttcaaatgactgcttaaaaaaaaaaaaaagggcggccgctctagaggatccaagcttacgtacgcgtgcatgcgacgtcatagtattctatagtgcgcctaaa

SEQ ID NO: 125348 - DNA, 719 bp, Arabidopsis thaliana
  unsure (1)..(719): unsure at all n locations
ccagctacatacgactcacttagggaaagctggtacgcctgcaggtaccggtccggaattcccgggtcgacccacgcgtccgctgatctaaaaaatcaacgaacacaaaactcatcaaagctcctcaaaaccctaaacacagtctctccatcttcttcaatctctctctcgttcggattctcatctcttcttctggtttcagattgagtcttgttactgtgtttcataagactattgaagttaagatgtctggagcattgaatatgactcttgatgagattgttaagaggggtaaaactgcaaggtctgggggaagagggatttctcgtgggcgtggtcgtggacgtggtggtggtggaagaggagctggacctgctagaagaggtcctcttgctgtgaatgctcgtccatcatcttttcaccattaacaagcctgtccgtagggtccaggagctttgccatggcaaaagcgggttttgttttgaagaattgggcctaaagagcttgcccggggcaatcaaggaagttttaagtttggaacccaggtccccattgttacaaaatttggccccaggggtgtgacaaaattgnaggtttaaggggaccnntttttcttnnnatttggggaggtagggcngtaattcnggtcatttttgncaaaaattgggggnccaagtnganaccttagtgggtttccaagaggaggttcatnaagnttc

SEQ ID NO: 125349 - DNA, 994 bp, Arabidopsis thaliana
atacattcattcattattgagagactactgatctctctctctctgcatgcatctttctctctattaatctctccagtatttgtcaggatttgggtatttttttaataacgatcagtgtccaatctctcttatcgtcttcataagtttcctattatttcattcttcttcttctttattctcatttctctctctctctctttttactcacagacaaatctttttcacatctctttgcaaattcttgagaattcattcaagttacataaaaagctgagagcaatgaagaaaattgtgttaaagctggatttgcatgacgatagggcaaaacaaaaggcccttaaaacggtttctactctcccaggaatcgattccattgcaatggacatgaaggagaagaaattgacggttattggaaccgtggatccggtaaatgtagtaagtaagctaagaaagtattggccgatgacggatatcgtactagtgggacctgcgaaagagccggaaaaggagaagaaggaggagccgaagaaggaaggtggtggcgagccgccaaagaaagaaggagaagctccaaaagaagaagggaaaaaggaaggagaagcaccgaagaaggaagaagagaagaaagaaggtggcgataagaaggaaggagagaagaaagatcaaccacaagcgcagccgcaaccagttgtgccgccacctgatcatgtgttggaacttgtaaaggcgtataaagcatataatcctcacctaacaacgtattactacgcccaaagcatcgaagaaaaccctaatgcttgcgttatatgttgaaatatttataatgtgatatattttggggaaaagatggaccgatctatatatagtcatgaggatgaagaataagaaacaaaggatatatcttagacttcggatgggatcggatatgtttttgtctcctcgataatgcggggaagttttatttccttaaatcgatttcgatgatatgttttgt

SEQ ID NO: 125350 - DNA, 536 bp, Arabidopsis thaliana
cacctacataatagggagggctgctccgcctgcaggcaccggcccggaattccggggtggacccacgcgtccgttcttagcaacagaccaaatgggaagcatcgatgctgcagtgttgggttcagagaagaaatcaaacccgggaaaagccacaattcttgctctgggaaaagcctttcctcaccagctagtaatgcaagagtacttagtcgatggctacttcaaaaccaccaagtgtgatgaccctgaactcaaacagaaacttactcgtctctgcaagacaacaacggtgaagacagggtatgttgtgatgtcagaggagattctcaagaagtacccagatcttgccattgaaggaggatccacagtgacgcagcgtctagacatctgcaacgatgcagggaccgagatggcagtagaagcctccagagcctgcatcaagaactggggacgttctatttccgacataactcacgttgtctatgtctcctcaagcgaagctggtcttcctggaggggacttgaccttgcccaagg

SEQ ID NO: 125351 - DNA, 547 bp, Arabidopsis thaliana
  unsure (1)..(547): unsure at all n locations
ccgttctggccgtattgaccgtcggctgtatattgggttgcctgatgcaaagcaaagggtgcaaatatttggagttcacagtgctgggaagaaccttgcagaagatatagactttgggaagcttgtttttcgaacggttggcttttccggggcagatatccggaatcttgttaacgaagcggctataatgtcggtaaggaagggacgttcttacatatatcaacaagacattgttgatgtgttagataaacaattgctcgagggtatgggtgtacttcttacagaggaagagcaacagaaatgtgaacaaagtgtatcttacggaaaagaagagacttcttggctgttcatgaggctgggtcatatagtgtttggctcatttggtttcccccgatttgactgggcatgcattttcgcaagctccttcctggtggcaaggaaactgctgtatcggttttctatccacgggaagacatggtagaccaagggtgtttccccggtttggtaaattnaaatccaantnggggganccaatgggtggncnttt

SEQ ID NO: 125352 - DNA, 454 bp, Arabidopsis thaliana
  unsure (1)..(454): unsure at all n locations
ctggcacgcctgcaggtaccggtccgngattcccgggttcgacccacgcgtccgcccacgcgtccgtagagcggcgcagatcgagattgtgaaatcgaagctaagagaaacgggaagaagctggatgccgtataaggagtttgttagcgtttgtggtgaagcttcttcagatccagatctcggatctaaaatcgcgaagatgcttgatgattcagcaaacgtcatcgttttgggagattccgtttgtattagacctgatcaggtactttcttcgttcttcttctctagccttttagcattttgaaatcgtgctttgtctctgagatctctctgagtattgcagctgattgattgggagagataagagagagatttaaaaactctctgaaaaaaacggattatgttctcaaaagtttttgttcgattttgattttggaagctataccgaaaactg

SEQ ID NO: 125353 - DNA, 386 bp, Arabidopsis thaliana
tcaattccaaaacactgcgccgggaagacatggacaccgagatggagacagaacaaatataccaggtcgatgtcggaaatctcttggctttcaatcccaatcaccgcttcccatctgctccttcttcaaggggggagcttgtgaaggagatcctaacggagggaacaaaacttgttcaggaaatagccaataaacttttcaactttccttctactgaaacaaatgatggtcctattgtccaattgcctccgcctacaaccaaacttcctagagagaaacatattccaaggcctaagcctcctacgaagtgggaagagtttgcgcttaagaaaggtatacagaagcgcaagaaggaaaaagttgtatgggatgaacaaactaatcag

SEQ ID NO: 125354 - DNA, 532 bp, Arabidopsis thaliana
tgatactccagctctctacgactcactatagggaaagctggcacgcctgcaggtaccggtccggaattcccgggtcgacccacgcgtgcgcggacgcgtgggacttttttctccttctattctcttgtatcttctcattatagtctcgatgaagatgctgagacttagaaagaagcaacatttggtgtttctactatgcgtgtggtgtttggtggtggattggagcaaagcagaaacagaggaaagtgatggaagtcccatggagaaaacagagcaagctgctctatactctaccattcaaggctttgttggtgaatcttggaatggctcttatctttatcctgacccttgtggctggactcctatccagggtgtgacttgtgatatctatgatgagctttggtatgtaactgctctaagctttgggactatgaaagacaactctcttgcttgttctgaaagtccagtgatcagaccacaactctttgagctcaagcacctcaagtctctctctcttttcaactgcttcaca

SEQ ID NO: 125355 - DNA, 559 bp, Arabidopsis thaliana
  unsure (1)..(559): unsure at all n locations
nnnnnnnnnnnnnnnnnnnnnnnnnnnnnnnnnnnnnnnnnnnnnnnnnnnnnnnnnnnnnnnnnnnnnnnnnnnnnnnacacccacgcgtccgctctgccccattcaatacatgaagaagaacacagctgatgaagctacttccactaccctttgattccaattcgaattctcccccattgtaatcatcggatgcagcagaaaaatacctacaaatttcgattcttttcgtaatccattggactctttctgtttctgaaagagagtgtgtgtttttgcggtgatgggtcagcaattgcgtcgagctgttgggaaaatcaaagaagttgagagatcatcaccatcaagagtctccattgatcggagatcgcttcctacggaggagctcagtgccgtgaaatcgtctccgtctactgccgccgttgatggagtttctgataaaggtcgaagaaccagtgaggataatgttttagaggaacgagaccccaagtatggtacattttggaccaaatngttnggggataaaagctnaanctgggggaaanttnnttggggnggg

SEQ ID NO: 125356 - DNA, 609 bp, Arabidopsis thaliana
  unsure (1)..(609): unsure at all n locations
nnnnnnnnnnnnnnnnnnnnnnnnnnnnnnnnnnnnnnnnnnnnnnnnnnnnnnnnnnnnnnnnnnnnnccacgcgtccggatagattcatctttcaatctttttttatcttaaaacaaaactttgtgtgaagagaaagatggagatagaatcaaagttcaagagaatatgtgtgttttgtggaagtagtgctggtaataaagtcagttacaaagatgctgctatcgaactcggaaccgaactggtatcgagaaatatcgatcttgtctatggtggagggagcattggtttaatgggtttgattgctcaagctgctttcaatggagggcgccatgtcattgaggctcgtgtaaacctctctttttttttttttcttaaaatttcaatgttctccagtacttaacaaaaaatggataattttgccatacgtgtagtatttgtgacgattactttttaaccaactttttttgtcttgatactgccttcagggttatccccaagacactaatgccaagagaggttcgttcgaaatataactccagaatagtattcatggactatgtgttttctcttaccactttcataacaacatattctagagtttaaaga

SEQ ID NO: 125357 - DNA, 463 bp, Arabidopsis thaliana
tacgactcactttagggaaagctcgtacgcctgcaggtaccggtccggaattcccgggtcgacccacgcgtccgggtagaactttaggtacaaatgcttcagttacgggatttggcaatgagtatgatgctctagcctctattcaaccccctggatccgggattggttcttctgctgctgaggcattaggaaaaaagagcactggtaaacatcagtcatctcagtggtggatggaagaggatggtttgtttaatctagacgatgaagggagatcagagaaacaaatgtgtgctattgctgcatcgaacgttatccgcaacttctccttcatgcctgataatgaagttgtaatggctcagcatcgccattgcttagaaactgttttccagtgcatacacgatcatatgaccgaggatgaagagctggtcacaaactcgctagagacaattgtaaacctagcgca

SEQ ID NO: 125358 - DNA, 694 bp, Arabidopsis thaliana
  unsure (1)..(694): unsure at all n locations
aactaggaacccttggnntccccactcccccgngnattacccggccaaccggtttccccngacagngttatcccgcttccttccccgggaatcatcacggacagcgccccgttttccctcatggaagtggaaaaaggaccagtgagaggtcggagaggcaagagagggacggttcaggggtaggagacaagcaagccctaaccgaggagggagcccgggtggcgggagggaaggaagtgaggagaggagggcaaggattgagcaatggaacagagaacgggaggagaaggaagagggaggagcataaaaacagttgtttactcaaatcacaattgctgctatgtggtttctgcgtctgcttctctgcgtttattctgaaatcggtaaaatctggtgatggatttttcatttggctgttctaatttggaacttgaaatgagtggaatcaacttctttagattataaaatgtttggggttactttcttgtagttttgattaggaaaaaccgctctgtccccttgttattgattttcaccagtgttctttagaactttgtactatcttctgttggttaaaacttaaaagagttctagtttaattaaaaaaaaaaaaaaaagggaggccgctctagaggatccaagcttacgtacgcgtgcatgcgacgtcaannnnnnnnnnnnnnnnnnnnnnnnn

SEQ ID NO: 125359 - DNA, 546 bp, Arabidopsis thaliana
  unsure (1)..(546): unsure at all n locations
cnnnnnnnnnnnnnnnnnnnnnnnnnnnnnnnnnnnnnnnnnnnnnnnnnnnnnnnnnnnnnnnnnnnnnnnccacgcgtccgcccacgcgtccggtactgtaatttcatgcatgtgaagcttgtttcgagggaactaaggagaaaactctttgggagatatcggcgatcataccgcagaggaagtagaagcaggagcagaagcaggagtattagccccaggaacaagagagataatgaccgacgtgatccttctcacagggaattcagtcatcgggacagagatcgcgagttttaccgtcatggaagtggaaaaaggagcagtgagaggtcggagaggcaagagagggacggttcaaggggtaggagacaagcaagccctaaacgaggagggagcccgggtggcgggagggaaggaagcgaggagaggagggcaaggattgagcaatggaacagagaacgggaggagaaggaagagggaggagcataaaaacagttgtttactcaaatcacaattgctgctatgtggtttctgcgtctgcttctc

SEQ ID NO: 125360 - DNA, 667 bp, Arabidopsis thaliana
  unsure (1)..(667): unsure at all n locations
tcccggccttnacgccaggcttaagnttggcaccggccgggnggggccgttccatacttgtcttttaaagcaccctgagttggtttccagaagaggatgttgggtctcccaggaggatttcccggtggctaaaagggtttaaaaacgtttatcgaaaaaaatccaccacctcctccaccaccaccacctgcaaaacaaggaagcgatgcatccgcggttgctacagataagaagccgaaagcgcccaagctaccccttctcatgccggggatgattgctatagtcaagaaccagaacagtccgtatcacatgtattgtggaattgtgcagaggatcactgatggaaaagctggtgtcttgttcgaaggaggaaactgggaccgtctcattactttcaggcttgaagagcttgaacgaagagaaaaaggtccaccgggtaagaatccaaagtcttgtattctcgagcctcttatcgaacagatgcaaaaggaagaggcagcaccataagtgatcttctcttctctgtatgtaagttcctgtgaatgtatatgtaacgtacctttgcgttttaggctacaatatttctgcctggttcttaaagagccaaaaaaaaaagccgagggcggccgctctacaggatccaagcttacgtacgcgtgcattcaag

SEQ ID NO: 125361 - DNA, 579 bp, Arabidopsis thaliana
  unsure (1)..(579): unsure at all n locations
ttttcggaanggtntggtccncggngatnccngtgcgaagggttaaancgtttacgaaaaaatccaccacttcttccaccaccaccacctgcaaaacaaggaagcgatgcatccgcggttgctacagataagaagccgaaagcgcccaagctaccccttctcatgccggggatgattgctatagtcaagaaccagaacagtccgtatcacatgtattgtggaattgtgcagaggatcactgatggaaaagctggtgtcttgttcgaaggaggaaactgggaccgtctcattactttcaggcttgaagagcttgaacgaagagaaaaaggtccaccgggtaagaatccaaagtcttgtattctcgagcctcttatcgaacagatgcaaaaggaagaggcagcaccataagtgatcttctcttctctgtatgtaagttcctgtgaatgtatatgtaacgtacctttgcgttttaggctacaatatttctgactggttctaaaagagcttcatcatgtgatataaaaaaaagaataaacgatgaatttcccccaaaaaaaaaaaaaaagggcggccaacaaa

SEQ ID NO: 125362 - DNA, 763 bp, Arabidopsis thaliana
ctcacgcgtccggtcgtgtttcggagtttctgaaatttgtaaaaatcgaaagattggcttcgcaatcgagacaaggaacaactctagaacatggatgaaagagatcgagaaattcgtgcttctcatggtgattctaatgctggtaatgtcgttagtcaaagcatagagaatactagagaagaagattctggttcatgtgaaggctttgttgaagagagcaaaagactggaaccggaacaacaaaagcatggtaaatattttttctatgacacaccgctttctgaggaaaccggggtttggatacctgtttcagtcccacccatgttagaacctgatcatgaggaatggtcaagaggtcttagtttcaatggtggttacttccctgaaggagatatgggatgggaccagatatttgatgaagataaggagttaactatgtgggatgtgatagttgatatgttacttgcagcgcgtggtaaagcgagtgctcttagttctggcaacctcgagagatgtggcattaattttttgtcgggacatcttcttgaacaagcttggcaagatatggctcatactcttactgaggctaactttggtaatgcaagagagattctggagactgagccacccaagtggctaccggatagcgctgcttctgcttgtatgctatgtagtgtgaggtttcatccaattatgtgttcccgtcatcactgtcgatattgtggaggaatattcttgtcggattgttctaaaggaaaaagct

SEQ ID NO: 125363 - DNA, 796 bp, Arabidopsis thaliana
  unsure (1)..(796): unsure at all n locations
atgatttttccagctacnnnnnnnnnnnnnnnnnnnnnnnnnnnnnnnnnnnnnnnnnnnnnnnnnnnnnnnnnnnnnnnnnccacgcgtccgtggttgacacaaattttgctctgagtaaaacttgggaatagagagagactctgagtgagagagagattctgagtgagagacggagatggaggcagacgaaagcggcatctctctgccgtcgggacccgacggacgtaagcggcgagtcagttacttctacgagccgacgatcggagactactactacggtcaaggccacccgatgaagcctcaccggatccgtatggctcatagcctaatcattcactatcacctccaccgtcgcttagaaatcagtcgccctagcctcgctgacgcctccgatatcggccgattccattcgccggagtatgttgacttcctcgcttccgtttcgccggaatctatgggcgatccttccgctgcacgaaacctaaggcgattcaatgtcggtgaggattgtcctgtcttcgacggactttttgatttttgccgtgcttccgccggaggttctattggtgctgccgtcaaattaaacagacaggacgctgatatcgctatcaattggggcggtgggcttcaccatgctaagaaaagcgaggcttctgggttttgctatgtaaacgacatcgtgctagggattctggagttgctcaagatgtttaagcgggttctctacataaatattgatgtccaccatggagatggagcggaagaagcgttttacaccactgatagagttatg

SEQ ID NO: 125364 - DNA, 494 bp, Arabidopsis thaliana
  unsure (1)..(494): unsure at all n locations
nnnnnnnnnnnnnnnnnnnnnnnnnnnnnnnnnnnnnnnnnnnnnnnnnnnnnnnnnnnnnnnnnnnnnnnnnnccacgcgtccgcaaaactgattttgcctgtttggttttggatccgagatggttccttcgagcgagacagcgaccgtacgagtcctttgccaaaagctgcttctctcaccgaaccatcctggaactctccaatggctcattggttccccatttttcccgcctttcaccgtcgtctccactttccgatgtatccatcactctcctgatttccagcaagaatctgatgatctccggaagttgttaccaaaaggttttgaagtcattggaggtctgataattggagattctgatgctgagaaaagcgcatttgaggcggctcgagctgctcgtagattgcgaaagcatttatctgaaggtggagagttagatgatgaaaagatagttgggtgctagttgcgatgtaggcactggtaccattcac

SEQ ID NO: 125365 - DNA, 438 bp, Arabidopsis thaliana
  unsure (1)..(438): unsure at all n locations
atacgactcatttagggaaagctcgtacgcctgcaggtaccggtccggaattcccgggtcgacccacgcgtccgtgttattctagtattcgtttcacagtacctgcctcatgtgatcaaatcagggaaaaatgtgtttgaccgatttgctgtgatattcgcggtggtgattgtgtggatctatgctcatcttcttacaggtggtggggcctacaatggtgctgcaccagctactcaaacaagttgccggacagatcgtgctggaatcataggtgctgccccatggataagagttccatggcctttccagtggggtgccccatcgtttgatgctggagaagcttttgcaatgatgatggcttcttttgttgctctagttgagtcaaccggtgcttttgtcgcggtgtcaagatacgcaagtgcnacgatgttgccacct

SEQ ID NO: 125366 - DNA, 836 bp, Arabidopsis thaliana
  unsure (1)..(836): unsure at all n locations
atgatactccagcactatacgactcacttagggaaagctcggtacgcctgcaggtaccggtccggaattcccgggtcgacccacgcgtccgcccacgcgtccgcccacgcgtccgtatatttgaagctactaaaatcccatgccagagcaatgagtttgttcttgagcttctcagaggtgttcgccagcattttgataggtttatcaaggacttaaagcctggtgatcttgaaaaatctcagcgttggattagctcacagctacagcagagccaaggtgaagttcaatgttaaccgagtggataacatggttattcaagctatcttcatgcttgacacgcttgataaggatatcaattcctgtgccatgagagtcagggaatggtattcgtggcacttccgcgaactagtgaagatagtcaatgacaactatctttacgcccgtgtttcaaagatgattgatgacaagtcagcgttgactgaagatcacatccgcatgcttactgaagtcttaggggatgaagataaggcataggaggtcatcgaagctggataacatccatgggctcggattatcaccgcttgactaatcaacgtacagacctttgctcagaaagttatggacccttgctgactacaggaagaagctctatgattatctagtcactaagatgagcgacattgncnctaatttggctgctatgattggagaaaatggtcggtgcccgtctgatttcacatggctggaagtctgactaaccttgctaatgcccatcttcaccctccagatcttggacgcagatgctctatcagggccttaaacactgaacactccca

SEQ ID NO: 125367 - DNA, 603 bp, Arabidopsis thaliana
  unsure (1)..(603): unsure at all n locations
cnnnnnnnnnnnnnnnnnnnnnnnnnnnnnnnnnnnnnnnnnnnnnnnnnnnnnnnnnnnnnnnnnnnnnnnccacgcgtccgtttcttctcgctcagtaggtctttagggttttagtttcttctcctcaaaaaatggcgatgtatgttatctacgagtcttcttccggctatggtctcttcgaggttcacggactagatgagatcggacagaacactgaggcggttcggacttctgtctccgacctcagtcgctttggccgtgttgttcagctcacagcgtttcatccctttgagtctgctctcgatgctctcaaccaagtcaacgccgtctctgaaggtgttatgactgatgagcttagaagttttctggagttgaatcttcctaaggtcaaggagggaaagaaacccaagttcagtttaggattggctgagcctaaactcggttcacatatatttgaagctactaaaatcccatgccagagcaatgagtttgttcttgagcttctcagaggtgttcgccagcattttgataggtttatcaaggacttaaagcctggtgatcttganaaatctcagcttggattagctcacagctacagca

SEQ ID NO: 125368 - DNA, 495 bp, Arabidopsis thaliana
cagctacaatacgactcactttagggaaagctcgtacgcctgcaggtaccggtccggaattcccgggtcgacccacgcgtccgagaaaatgagagaaaaatggaaactttgaccgccattgaacactcacgagatctcttcttcttgtatttcttctctctcctctctgtctgatgcgtgttcttgattcatcggctcagatcagtcaccaaatagaataaatagcaaacaagatcctctgtggaatttgatacatagagaaactgtctagtgctgtggtgtcttttgagattttcttgtggttctgtggattgtttgttggttggttgcttcttggataaatggcagaagtccataatcaactagagatcaagtttcggttaaccgatggttcggatatcggtcctaaagcattccctgatgctacaactgtttcggctttgaaggaaactgttatttctgaatggccaagagagaaggagaatgggccgaaaa

SEQ ID NO: 125369 - DNA, 454 bp, Arabidopsis thaliana
cacgcgaccgcttaatcatctcttcttaaaccccaaaacaaacaaacaaacaaacaaaaaataccaaaacaaagaagaaaaaaaaaataactatggatcttctctttctctttttctctcttctcctctcttacctctttttcaagatctggaaactcatagactcaaagcaagacaaagattgctacattttagactaccaatgtcataaaccaaccgacgatcgaatggtgagcactcaattcagtggagagatcatttatcgaaaccaaaaccttggtttaaccgaatacaagttccttctcaaagccatagtaagctcagggattggagaacaaacctacgctccaagacttgtctttgaaggtcgagaagagcgtccttcgttacaagatgggatctccgagatggaagagttctacgtggacagcatcggaaaactcctggagagaaa

SEQ ID NO: 125370 - DNA, 720 bp, Arabidopsis thaliana
  unsure (1)..(720): unsure at all n locations
ctctcatacgactcactttagggaaagctggtccgcctgcaggtaccggtccggaattcccgggtcgacccacgcgtccgagggaagctcttcttcttcctcttcctccacctccagcgaccagcccccatctccctcacctccctttgtcgtcaaacctcctgagaagaagcagaggctcccatctgcatacaaccgcttcatgagggatgagatccaacgcatcaaaagtgccaatccggaaataccacaccgtgaagctttcagtgctgctgccaaaaattgggctaagtacatacccaactctcctacttccattacttccggaggccacaacatgatccatggcttgggattcggtgagaagaagtgaacaaaactcaggggaaaagaagcctaaaaataacaaacgcatgcacgtgtgcgagtggctgcgtcgtttttctcatcttgtgttgttcttctgtgtaattatcttatgtatgtcatgttgcagaaaatgagggtgccctagtttttatgactttatatttctgtctgtctttagatttaaagaacagtcacttgctatgtccctttggacgtttatgtctggtctttatttgtcttaatcctatcaaaattattatatgcgaaaaaaaaaaaaaaaggtnnnnnnnnnnnnnnnnnnnnnnnnnnnnnnnnnnnnnnnnnnnnnnnnnnnnnnnnnnnnnnnnnacc

SEQ ID NO: 125371 - DNA, 977 bp, Arabidopsis thaliana
  unsure (1)..(977): unsure at all n locations
gctctctacgactcactatanggaaagctggcacgcctgcaggtaccggtccggaattcccgggtcgtcccacgcgtgcgcccacgcgtccgcccacgcgtccgctcaaaccaacgcaaaagaacaatgtctaacgttgtagtaatcgccgttgttctcatcgtagcatcgctaacaggacatgtgtcagcacaaatggatatgtctccgtcgtcaggaccatcgggtgcaccagactgcatggcgaacctaatgaacatgacaggctgtctctcgtacgttacggtcggagaaggtggtggtgcggccaagccggacaagacgtgttgtccggcgctagcggggctagtggagagctcgccgcaatgcttatgttacctcctctccggtgacatggcggcacaacttggaatcaagattgataaggcaaaggctctcaaacttcccggagtttgcggcgtgatcactcccgatccttcactttgttctctttttggaattcctgttggagcacctgtagctatgggagacgagggagcctccccagcctatgctccaggttcgatgtcaggtgcagaatcaccaggaggatttgggtcgggtccttcggctagtagagggagcgatgcaccaagcagtgcaccttattctctttttctcaatcttataattttcccattagcttttgcattttacatcttttgctgatttcattctcttccaaccattaacaacaccattatttgttatgtattttcttaaaagagtattattgcttttgtaggctatgttcttgaatttattactttgtgtatccacggattatttcttcattcatcttattgaataaagattgtttttttttctaaaaaaaaagcttgatgcatattctagagtgtcacctaaatctgcggccgcagcnnnnnnnnnnnnnnnnnnnnnnnnnnnnnnnnnnnnnnnnnnnnnnnnnataatcg

SEQ ID NO: 125372 - DNA, 738 bp, Arabidopsis thaliana
  unsure (1)..(738): unsure at all n locations
atgattcttccaggtctacatacgactcactatttggaaagctggcacgcctgcaggtaccggtccggaattcccgggtcgtacccacgcgtccgtacggctgcgagaagacgacagaagggggaagagagattcgatttctctggatttttcaaaaatgtttctccaatcgcaaaaactatggacgatgcttctaattctagcgatttggtcaccaatttcacactcgcttcacttcgatctacactcaggtcgcacaaagtgtatcgccgaagacatcaaaagcaattcaatgactgttggtaaatacaacatcgataatcctcacgaaggtcaagctttaccacaaactcacaaaatttccgtcaaggtgacgtctaattccggtaacaattaccatcacgcggaacaagtagattcaggacaattcgcattctcggctgttgaagcaggtgattacatggcttgtttcactgctgttgatcataagcctgaggtttcgttgagtattgactttgagtggaagactggtgttcaatctaaaagctgggctaatgttgctaagaagggtcaagtcggagttatgggatttgaagtaaagagtcttcttgatactgttaacccggttcatgaagggtgtttttctcggggtgggggggagggttcaagcnttgacccggccctacnnaaaaatggggggtngggtcnccgttttcgctcaaagggtcaggtcagttc

SEQ ID NO: 125373 - DNA, 585 bp, Arabidopsis thaliana
aggtctctacgactcactatagggaaagctggcacgcctgcaggtaccggtccggaattcccgggtcgacccacgcgtccgtacggctgcgagaagacgacagaagggtacggctgcgagaagacgacagaagggtacggctgcgagaagacgacagaagggtacggctgcgagaagacgacagaagggtacggctgcgagaagacgacagaagggtacggctgcgagaagacgacagaagggtgcggctgcgagaagacgacagatgggtacggctgcgagaagacgacagaagggtacggctgcgagaagacgacagaagggtacggctgcgagaagacgacagaagggggaagagagattcgatttctctggatttttcaaaaatgtttctccaatcgcaaaaactatggacgatgcttctaattctagcgatttggtcaccaatttcacactcgcttcacttcgatctacactcaggtcgcacaaagtgtatcgccgaagacatcaaaagcaattcaatgactgttggtaaatacaacatcgataatcctcacgaaggtcaagctttaccacagactcaca

SEQ ID NO: 125374 - DNA, 764 bp, Arabidopsis thaliana
  unsure (1)..(764): unsure at all n locations
aatgcttttgaatctgttagctaagtatggtacaacacatcttgttttcaatgacgatattcagggcacagcatcagttgtgcttgctggacttatcgctgctcttagatttgtggggggatccttgtcagaccacagattcctcttccgcggggctggagaggctggcactggaatagctgaactaattgctcttgagatttcaaagaagtcccatattccattggaagaggctcggaagaatatttggctcgtggattcaaagggattgattgtcagttcccggaaagaatccattcaacatttcaaaaagccctgggctcatgaccatgaaccaataagggaacttgttgatgccgtcaaggcaatcaagccgacagttctgatcggaacatcaggtgtaggtcaaacattcactcaagacgtggtggaaaccatggcaaagctaaatgagaaacccatcattctttctctttcgaacccaacttctcagtcagaatgtacggcagaagaggcctatacgtggagtcagggacgggcgatctttgcaagtggaagcccatttgcgccagtagagtatgagggaaagacgtttgtgcctggacaggcacacaacggatacattttcctgggtttngcttcggnttaatatttcagggccgtccntgtccatgatganatnttttggaanttaaaaagntttgctttggnncttntnggggcnctttggnggggtttantcccncctnagggttnanaaatgc

SEQ ID NO: 125375 - DNA, 758 bp, Arabidopsis thaliana
  unsure (1)..(758): unsure at all n locations
atacgactcacattagggaaagctggtacgcctgcaggtaccggtccggaattcccgggtcgacccacgcgttcgcggacgcgtggggaccaaatcccagccgtttaacttgatcatcccaaagatgtttgagattattcaggcggtcttctccgccggggttgcactagctcttttgacattcgccggtataaccctcggcggctcagtggtcgcatgtatcataagcacaccactttttgtcattttcagtcccgttctcgtgccagcgactatagccactacattgctagcttcaggtttcacagcctccggttcctttggtgccacggctttcaccatcctttcgtggctctacaagaaacgtacagggagggacctaccaaaaattccaggattgacgccaccggctccggcgtctaacccagcaggttccggcgtctaatccagcagaatcggggaaatacgattaggcgtttcctaatttgggatgatgtatgaaggaacttgatcatactaaattactggggttccataaataaaaataaaaattgatctatcctctctttaataaaaatactagttacctccgaatatcattccattgatgtatatcgtgtgttacaaaaagtataataaaatgtaatcgtctttattgtatttttttaatgaagtaatatcattgagattgccatnnnnnnnnnnnnnnnnnnnnnnnnnnnnnnnnnnnnnnnnnnnnnnnnnnnnnnnnnacaatc

SEQ ID NO: 125376 - DNA, 502 bp, Arabidopsis thaliana
  unsure (1)..(502): unsure at all n locations
cccacgcgtccgaacaattcttgatacagtcgaggagctggtcgaagaacagagtttggatcccttgttttctgataagactgatgtaatggcaatagcatatgatcttacaacatctaagaagaacgagatacaaaagttaacagttttgctccaaagggctgaagaacagaatcgccagaaggaagcccggatcagcatgctcaaaaaacaaacacaagatctctcaggcacagcggacagaatcgaaaagctgaatgccggggtctccggctactttgaaggaaaagacaagctacctccaatatagtttcgagaaaattgcaatgaagaagcgtgtcatttccattccctgcatttgtatatacttnatnatagagtcttaacaatctagtcagtagtcacaataacttgcttcatgtgtaaaccactgagaatctgaatgagtttgtactttggtattggtttgacgncaattcatgcaaaatatttnccaagggtt

SEQ ID NO: 125377 - DNA, 1005 bp, Arabidopsis thaliana
  unsure (1)..(1005): unsure at all n locations
cnnnnnnnnnnnnnnnnnnnnnnnnnnnnnnnnnnnnnnnnatcctcttccttgcgttctctctttctctctctcgccgacgacgaaaacatgggtgccaaggcgaagaaagctttgaagaagaacatgaagaaggttgctgcttcggcttcttcttctcagctacctcttccccagaacccgaaaccttcagctgattttttgccactagaaggaggtccagctcgaaaagctccagttaccaccccacctcttcagaataaagctactgtgctatacatcggtagaatccctcatggcttctatgagactgagattgaagctttcttctcgcagtttggaacagttaagagagttagagtcgccagaaacaaaaagactgggaaatcaaagcattttgggttcatacagtttgaggaccctgaggtggcggaaattgcagcgggtgcaatgaatgattatttgttgatggagcacatgcttaaagtccatgtcattgaaccagagaatttaaccccaatctgtggagagggtttaaatgtaactccaaaccagtggattcggttcagattgagcgaagacaacttaataaggaaaggacattggaagagcataggaaaatgttgcagaagatagttaaaaagggtcagaaaaggaggaagagaatcgaagccgctggaatagaatacgaatgccctgagcttgttggaaacacacagccagtcccgaagaggatcaagtttagtgaagaagactaaaagctgaagctgaacaacacttttccgataaccttttttgaatagaaatctgttctgttggactcttgatattggatcaataactaaactttaaagtttgcaatgaaaacttctgtttccatgattccaaaaaaaaaaaaaaaaaaaaaaaaaaaaaaaagattaaaaacacaggcgaaccgctctagaggatccaagcttacgtacgcgtgcgtgcgacgtcntagctctnctatagtgtnnnnnn

SEQ ID NO: 125378 - DNA, 480 bp, Arabidopsis thaliana
  unsure (1)..(480): unsure at all n locations
gcgttctctctttctctctctcgccgacgacgaaaacatgggtgccaaggcgaagaaagctttgaagaagaacatgaagaaggttgctgcttcggcttcttcttctcagctacctcttccccagaacccgaaaccttcagctgattttttgccactagaaggaggtccagctcgaaaagctccagttaccaccccacctcttcagaataaagctactgtgctatacatcggtagaatccctcatggcttctatgagactgagattgaagctttcttcttcgcagttttggaaccgtttaagagaagtttgagtccgcccagtaaactaaaagaactggggaattcccaaagccatttttgggtttcattccagttttggaaggacccttgagggttggcgggaaattttcaagcggggtgcaaatnaaattgnnttattttttttgattngggnancatnctttaaaggccntgttnatt

SEQ ID NO: 125379 - DNA, 818 bp, Arabidopsis thaliana
ctcaaaggcagatgatgttctgagctctctacttaaacagtacctagatgtggctcaaatggaagaagctaagcctctatgtaatgctaacgatgatctcaacaaacaaattccctcaacagaagaaatgacaaactcggagcatgtagctgatcaaaacctacctccttcaaacactcgagtggaagaacttcaagacaatgagcagaaggattcctcgtccttagaaccggaaaaatctacaaaaccacagttcaaaaatgtggttgctatagtcgatccacctcgctctggacttcatccagctgtaatcaaagctctaagaacccatccccggttaaagagacttgtgtacatttcgtgcaaccctgaaacgctagttgcaaacgcgatagagctttgcacgccatcttttgatgaaccggatagaggaaacaaaaattacagagggcgcaagaaaataggcattgccgctttggctcgacatagagccaagtcaatgccaacttctgaggcttttagacctgtcaaagccatggccgttgaccttttcccccacactgaccactgcgaaatggtaatgctccttgagaggtaagaatacgcaataaactctttaagagaatgatgtagcaccaaaagaacaagcaacaactatttttgttttgcataaacacaatttaaggattatatatatgtttaagaactgaaacaagttttttatatcaaaaaaaaaaaaaaaagggcggccgctctagaggatccaagcttacgtacgcgtgcaggcgacgtcaagactcttctataggtgtacctaa

SEQ ID NO: 125380 - DNA, 643 bp, Arabidopsis thaliana
  unsure (1)..(643): unsure at all n locations
gggacagatcaggagcaaaccaccaatgtcttgactgaagctcggattcatgatcacattaacaaccttcggttcagcatatccccaacagcattttttcaggttaataccgtcaccgcagagaagttatactcaattgctggagactgggctgaccttggtcccgacactttgctcttcgatgtatgctgtggaactggaacaattgggcttacactggcacatcgtgttggcatggtaattggcatagaaatgaatgcttcggctgtagcagatgccgaacggaatgcaacgatcaatggcataagcaactgcaagttcatctgctcaaaggcagaggatgttatgagctctctacttaaacagtacctagatgtggctcaaatggaagaagctaagcctctatgtaatgctaacgatgatctcaacaaacaaattccctcaacagaaggaatgacaaactcggagcatgtagctgatcaaaacctacctncttcaaacactcgagtnggaaggactttcaaggcaattntggcaggagggtttcctcggnccttagganccgggaaaaatnnttcaaaanccncaggtttaaaaaatgtngggttgctttnggggggtncccccttggnnttgggcnttt

SEQ ID NO: 125381 - DNA, 683 bp, Arabidopsis thaliana
  unsure (1)..(683): unsure at all n locations
aatggattaagaggtgacaatttccctttgataatagccaatgccacgatttgcaaagagttgaatcgccttgaagaagagtttcatccaaaagacgtgatagaggaacaaatacagaacttagatcgtccaagatcaagagaagaagttctttgcttcttgaatgagcttggttggctatttcagaggaaatggacatccgatattcatggagaacccgactttnctcttcctcgcgtccgaatttttgctcgtatgctctgttgaaagagattactgttctctcataagaaccgtcctggatatgatggtagagagaaatttgggaaaagacggtctgttgaacaaggagtccttagatatgctggctgatattcagctactgaatcgcgctatcaaaaggagaaacacaaaaatggctgaaactctgatccattattccgttaatccctctactagaaacttcatcttcttgcctagtatcgctggacctggcgatatcacacctttgcatttggctgcttccacatctagttctgatgatatgattgatgccctgactaatgatccacaagagattggattatcttgctggaataccctaggcggtgcaaccgggcaaactccctttagctacgctgcaatgagagacaaccacagttacaacaccttggtggctcgta

SEQ ID NO: 125382 - DNA, 625 bp, Arabidopsis thaliana
  unsure (1)..(625): unsure at all n locations
acgactcactatagggaaagctggcacgcctgcaggtaccggtcncgaattcccgggtcgacccacgcgtggcccgaagtgtgagatcaattattaatattcatctggagaattatcgtctcttttctccattgctatggctctctcaactactccttctcagatgtccgttgcacttccaactagaattgatgggtcgagccgatctatgattaaggttcaaagtataagcttcactgataagtcatggggtcctcctctgctgagactagattcgaaatctagaagcttaggtgtgaaaaaaaggtccacaatatgcatgtcacttcagcaatcaagcaaatccaaagtcttggttactcctctagaacttgaagatcccaaagagactcccttaaacttgtttaggcctaaggagccttatactgcaactattggtttcggttgagagaattgttggtccacaagcacctggagagacttgccacattgttattgatcatgatggtaatgttccttaccttggggagggcaaagcttttggggcattcccccccgggnggnatccccaagaaacctggngnncnnaaaanngttcgccttttnttcgtttnanaacangntc

SEQ ID NO: 125383 - DNA, 401 bp, Arabidopsis thaliana
caggtcccaattccaagtaaattacattgaccgtggggaaaagtaaagaagatccaacacagacaaaaagcatttggtccactaagatctctcgagagccaaaaaaaagttgagaaatttgcagtcagtatgggctgctctgttgttgtctcttctgggccttgaaaggatcttcttcttcccctcaccttcttactataaacccagaatcatcctctgcgtcttttgttcctcaaatcatttttttcctctcgattgggagatcaattattaatattcatctggagaattatgcgtctcttttctccattgctatggctctctcaactactccttctcagatgtccgttgcacttccaactagaattgatgggtcgagccgatctatgattaaggttcaa

SEQ ID NO: 125384 - DNA, 918 bp, Arabidopsis thaliana
  unsure (1)..(918): unsure at all n locations
cggagtgaaaaaaagtctcgctctcttctctctctaacattcttcagagagggagactttatccttattctgccgttcggacgtggtccgatatcgccgttagtttagccgtgacacggctttccgttgccgcgttctttgtcgtccggtttcatgccggcttatgtaccaaatctccgcgatggtcagctctcgtctagcaccgcttagcttcttcagcaacggtggctagctcttgcccggcacgaccggctattctagcggtcatggccggtttatgttcttctttaatttctgaattttgttttagttttgctaataatctcatcggatttatgttgggggtaataatctgtcatatcctcgatggttcttttccctctctatcctttgagttttcaagatgggtttcgccggatcgttttttgaacttagggtttacataatggtttcaaagaaattttccccttttgttgaaggattgaagattcttccgtcgtttatcacgattccttaagccgttatctttaatttggagctttgatgttttcattctggtgcaaaacacaagaatcatctcaccggaatcagctcaacggcgaaggttgttgccggaaaacttttgattattcatccagcgtgtgacgtggtatatcccggttgtcgacatgtgttcatggatggagttccgatagaatttcttctgcagaaggttatctaatgggccttttttgggctttatgtaattccaaagttggagcttttgtttaagctcttgtatgatatgatgatgtttaataaaacttatgagacaaaccaaccggccggaatncnccggnaaaaatgggganctcngaanctggccangggaaaacattgancccaaaaagcccccaaagggcntggaaccaaacaggc

SEQ ID NO: 125385 - DNA, 548 bp, Arabidopsis thaliana
tctcatcggatttatgttgggggtaataatctgtcatatcctcgatggttcttttccctctctatcctttgagttttcaagatgggtttcgccggatcgttttttgaacttaggatttacataatggtttcaaagaaaatttttctcttttgttgaagggattgaagattcttccgtcgtttatcacgattccttaagccgttatctttaatttggagctttgatgttttcattctggtgcaaaacacaagaatcatctcaccggaatcagctcaacggcgaaggttgttgccggaaaacttttgattattcatccagcgtgtgacgtggtatatcccggctgtcgacatgtgttcatggatggagttccgatagaatttcttctgcagaaggttatctaatgggccttttttgggctttatgtaattccaaagttggagcttttgtttaagctcttgtatgatatgatgatgtttaataaaacttatgagacaaaaaaaaaaacttatgcgcggacgctctagaggatccaagcttacgtacgcgtg

SEQ ID NO: 125386 - DNA, 472 bp, Arabidopsis thaliana
atacgactcactttagggaaggctcgtacgcctgcaggtaccggtccggaattcccgggtcgacccacgcgtgcgcgccctcttctgccccttctgtaaattcccaatccaacccttctctccttcctcctccgtctttgccccttcccccaatttcttcttcccgattctctcctttccctttttctttttacccgccaaaatcacatccaccttcactaacggctccggccccaatttccatttcccatttcattcatactcgaaaccctagatttctaattcctggatcggtgcttggatcttcttcagttttctcgtgttttgggtgatacccagaatttgattcaactccaaattctccgttttttctcaaagagtaagttgctgtttttcgctgaggaattcactgtccagtgaaattgacgatgcacaagattaagctagacgaccgtactgataatgtgagaga

SEQ ID NO: 125387 - DNA, 460 bp, Arabidopsis thaliana
ccggctcaatcgactcatttagggaaagctcgtacgcctgcaggtaccggtccggaattcccgggtcgacccacgcgtccgctaaaaggagaggagactttgaagaagaaagaaaacattcaaagcttataaaacgcagcgttttaggaaaaaagaggtagagagtgattctggctttcccaacaatggaagctttcagtctccttaactactggaaaaacagtggtggtgctgttactttccttcctcactcctccgaatcttcttcttcttctctttgccgttactccgccggtgaatccatcggaaccaccaccattgtcacctctgttaccgaaactgaggacgaagaagctgatgacaacgacgacgaaggaccgttcttcgaccttgagttcgctcttccagccgaagaagaagacacagacggaggagtcggaagagagggagactccgattg

SEQ ID NO: 125388 - DNA, 1008 bp, Arabidopsis thaliana
  unsure (1)..(1008): unsure at all n locations
nnnnnnnnnnnnnnnnnnnnnnnnnnnnnnnnnnnnnnnnnnnnnnnnnnnnnnnnnnnnnnnnnngcggacgcgtgggcggaccacgcgtccgcgctcttcttcttctcttcatcctccttctggagcagagcttagagctccatcatcaaatcttatcaatggcttcctcactcgtctcatcttttcaacccaggtcagcatttttgggagatagaaatgtgttcaaggtctcaagcacaccttttgctcaagtgggttactccagtaagaccattgagtgcaaagaatcaaggataggaaagcaaccgatcgctgtaccttccaatgtaaccattgcattggaaggtcaagacttgaaagtgaagggtccattaggagagctggctttaacttacccacgcgaagttgagcttacaaaggaagaatccggtttcttaagggtcaaaaaaaccgtcgaaactagaagagccaaccaaatgcacggccttttcaggacgcttaccgataacatggttgtgggagtatcaaagggatttgagaaaaagcttatacttgtgggtgttggttatcgtgcaacagtagacggaaaggagctggtgctaaatctcgggttttcacacccggtgaagatgcagataccggatagtctgaaagtgaaagtggaagagaacacaagaatcactgtgagtggatacgacaagagcgaaatcgggcagtttgctgcaacggttaggaagtggaggcccccagagccatacaaggggaaaggagtcaagtattccgatgagatagttcggaggaaggaaggaaaagctggaaagaagaaatgatcttcatttttcattattatctacttacttatctcttcctttcaatgtttatgtgtatttgcctcaaattttgtttagaaatgaagatgtttgtgttgggaaaaaaaaaaaaaaaaaaaaaaagggcggccgctctagaggatccaagcttacgtacgcgtgcatgcgacgtcag

SEQ ID NO: 125389 - DNA, 516 bp, Arabidopsis thaliana
  unsure (1)..(516): unsure at all n locations
cnnnnnnnnnnnnnnnnnnnnnnnnnnnnnnnnnnnnnnnnnnnnnnnnnnnnnnnnnnnnnnnnnnnnnnnccacgcgtccgcccacgcgtacggtgttggttatcgtgcaacagtagacggaaaggagctggtgctaaatctcgggttttcacacccggtgaagatgcagataccggatagtctgaaagtgaaagtggaagagaacacaagaatcactgtgagtggatacgacaagagcgaaatcgggcagtttgctgcaacggttaggaagtggaggccaccagagccatacaaggggaaaggagtcaagtattccgatgagatagttcggaggaaggaaggaaaagctggaaagaagaaatgatcttcatttttcattattatctacttacttatctcttcctttcaatgtttatgtgtatttgctcaaatttgtttagaaatgaagatgtttgtgttgggattcttgagtaagtttttaaaggaaccctataaaaaaaaaaaaaacaaaaa

SEQ ID NO: 125390 - DNA, 637 bp, Arabidopsis thaliana
gttggtttgtttgcctatgacaagaatcttccttggggggttcgtcatcacgtgtaacttcttcgcgaatagagtcgcagaacagtacaacggaaaattgaggagcggaactaaaagttggggacgtgaagcaggttttaggggtgcaaaatttgtctatgtcgacatgtacaacactcttatggatgttattaaaaattatagaagatacggattttctaatgagaaaaatgggtgttgttgtatgattacggctataataccatgccccaacccagataaatacgtcttctacgacttcgttcatccatccgagaaagcttacagaacaatttctaaaaagcttgtccaggatatcaagaatggccttgcctgatttattatatatacaatgctttattttaattttaataacagccatcgttaataatagaaatgagaagacaaaaatcatacatggcgatctctctgtttttcttatgttaaagaatgtataatccagtttatgtattgttcactttatataatcccagaacaacaaaggagtttgtttacaaatgaaaaaaaaaaagggcgcccgctctagaggatccaagcttacgtacgcgtgcgtgcgacgtcataactcttctatagt

SEQ ID NO: 125391 - DNA, 555 bp, Arabidopsis thaliana
tccgactcatttagggaaagctactacgcctgcaggtaccggtccggaattcccgggtcgacccacgcgtccggaatttcattgttgacattcaagacaagaaagggaatgttatcaacactattgctgccaaacttgcatctgatggaagtggcgtttatgagtactacacctgggctagtcttggtgaaaagattagctttgttcctcaagattctaggggtaatgtagagaagaagatgttgttttaccctaaagagattcatgctgtagtgtcaaaagatggatgtcaagcttctgtttctccatttactggtcggcttggtctttacatacaaggatcagtctctcctcctcttcctggtgttaatattaagatttttgcggcaaaggacagccttatttcttcacttaagaagggggaaatagctattgaaacaagcactttatcagctggttcatttgttgctgggcctttgtatgacgatataccatatgccactgaagcttcaaagcctggctaccatattaaaaggttaggaccatattccttct

SEQ ID NO: 125392 - DNA, 390 bp, Arabidopsis thaliana
atcaaccttctcctctttcttacgcaattacaacttcaacgcctctctatctcttcgccgtgaatgtcgagatagtcgtaagctctctgcttttcaaatttctctcaaattgaggtagagagagagggcacagagatagagagagaggggcataggaaacggtgattttcccagttcccggaggaacaatcggctgatttctctgtaatcgaagaatctaaacctcacccactcgaaatcagctcgtgggttttggggggtctctattaatttccaaattctggagaaaaatcttgtatttcttcaagatgtttgggtgtgattgtttttactggagcagaggaatctccgagttggattcggaatcgtccgagccaaagcccttctcac

SEQ ID NO: 125393 - DNA, 902 bp, Arabidopsis thaliana
  unsure (1)..(902): unsure at all n locations
atgatttnnnnnnnnnnnnnnnnnnnnnnnnnnnnnnnnnnnnnnnnnnnnnnnnnnnnnnnnnnnnnnnnnnnnnnnnnnnccacgcgtccggttccgattccggataagaacatctacgcaatcgacaagcacttggcggctgatggtaacgccgagcactgcgcgacgctctacgaggagtgtctaaagaatctggtgaaagaaaagattatcccaatatcgaaaaagacagggtatcctgagtttgatctacaacttctagggatgggtcctgatggccacatggcgtctctcttcccaaaccatccacagatcaatgagaagcagaaatgggtcacttacatcaccgactctccaaaaccaccaccaaagagaatcacattcactttaccggtcatcaactctactttgtacaatcttatggccatttgtgacaaagcaccggccaaatccgtggctgagatcatgaagcacaacaacctctcgttaccttctgctcatcttagtgctcaagtcgaaaatgtttggtaccttgaccaagcagctgcctccgagctctagagaggtagcctaaacacattaatattggtgttttgtttgtagtctctacgttgctttgtgttgaataaccggttaatacatttgcgtacgtttacttcgtacaaaatgtgttgaatattcgagctagttgtttcttgtagttgtgatgtgagtccctggctatgactatatatcattataaaaatatatagtgggcttcatttaatctgtcatttcatgaatggtgtttaattaaacttttcttttagggtttatcattaaggaaaaaaaaaaaagggcgaccgctctagaggatccaagcttacgtacgcgtgcgttcgacctcntagctcttctat

SEQ ID NO: 125394 - DNA, 784 bp, Arabidopsis thaliana
gaagtgcagcaactgccgatagtggagatgctgctggtgccgatagtggaggtgctgctggtgccgatagtggaggtgctgctagtgccgatagtggaggtgctgctgctggtgaaaccgctagtggtggagctgctgccgctgacacttctggtggttcggctgaaaccggtggtgaaagtgctagtggtggagctgcttctggtgctggagctgcttccggtgcctcagctaaaaccggtggtgaaagtggtgaagctgcttctggtggttcagctgaaactggtggtgaaagtgctaccacgcgtccggataccggtggctcagctgaaaccggtggtgaaagcgctagtggtggagctgcatccggtgggagaaaggtgctagtgggtgggagcttgctttccagtgggctcgggttggaaagtgggtgggtgaaaagccactggagctactttccggtggctcagctgaaaccagtgatgaaagcgctagtggtggagctgcatccggtggtgagagtgctagtggtggagctgcttccggtggctcggctgaaaccggcggtgaaagcactagcagtggagttgcttctggtggctcaactggtactgaaagtgctagtgctggagctgcttccggtggctcgactgacgccaatggtggagccgctgccggaggctcaactgaagccggtagtggaactagcaccgaaacgagttcaatgggtggtggaagcgctgctgccggtggcgtgagtgagagttctagtggtggaagcact

SEQ ID NO: 125395 - DNA, 362 bp, Arabidopsis thaliana
cccacgcgtccgcccacgcgtccggaaatcttgcagttgtctgcagattcttattcagtggcgtcatctgatagcacaagcagctgcagtgaagatgataattatgattctgaatctgagtattcaaatcataaagaggggcggttgactgatcttcttaatgtgaatagacttgggaaggagatcctggaatgtacaccgaaaggaacaagatttcttggttctcaaccggagaatggtagcacaataaaaactttgagaacagatgaatcaatgaaggaaactaccactaactttccttctggattgcataatggtaaacatggtgttaaccagacagaccgtttggttgagaaaaggaa

SEQ ID NO: 125396 - DNA, 540 bp, Arabidopsis thaliana
  unsure (1)..(540): unsure at all n locations
atgatactgccnnnnnnnnnnnnnnnnnnnnnnnnnnnnnnnnnnnnnnnnnnnnnnnnnnnnnnnnnnnnnnnnnnnnnnnccacgcgtccgcccacgcgtccgctcttcttctggtgtaaaagcttttcttccacacacatttgagaaagaagacgaagaagaagagagaataactattccttcttcgccaagttctctgagctatagaagaaggagggatttcttcagaccgccattgttgcccaccttctctcctttctatttttcgccgcattttactcgcttactgacaaaagtcttctactcaagtctctctctcgctctctttggaggctcaattagggttttgttgtcgtgagatttgattacacaaattgctgaatttggtttcgattattggtgttattgttttcgaagatttccagtgagtttccgtttatggatctgactggaggatttggagctagatccggcggtgttggaccgtgccgggaaccaataggccttgaatcgctacatctcggtgacgaatttcgg

SEQ ID NO: 125397 - DNA, 1583 bp, Arabidopsis thaliana
  unsure (1)..(1583): unsure at all n locations
cccacgcgtccgcccacgcgtccgcggacgctaaacgtttcttctcattcgtcatctagtcccattctctgtccataacaatgaatatcaattgttctccattagggtttctaatttcactcttcttcattgttacttttcttgcaccacaagtcaaatctagggctttctttgtctttggtgactctctcgtcgacaatggaaacaacgactacctcgtcaccactgcccgtgccgacaattacccgtatggtatcgactacccgacccgtagacccaccggacgtttctctaacggccttaacattcccgacattatcagtgaggctataggcatgccgtcgactttgccgtaccttagcccgcatctcaccggagaaaatcttctagtcggtgctaattttgcctccgcaggaattggaatcctcaacgacactggaattcaattcgtaaacataattagaatttctaaacagatggaatacttcgaacagtaccagctacgagtgagtgcattgatcggaccagaagctacacaacagctagttaaccaagctcttgtcctaattacacttcggggtaatgatttcgtcaacaattattatctaattccgttttcagctcgttctcgccaatacgcgttaccagactacgttgtgtatctcatttccgaatacggaaagattctcagaaaactctacgaactgggtgcaagacgagttttggtaactggaactggtgcaatgggatgtgctcccgcggagctggctcagcatagccgcaatggcgagtgctatggcgccctccaaacagcagccgctttgttcaatccgcaattagttgatttgatcgcatcagtcaatgctgaaattggtcaagacgtgtttgtagcagccaatgcctatcaaatgaacatggattatctatctaatcctgaacaatttgggtttgtgacatcgaaggtggcatgttgtggacaaggaccgtacaatggcataggactatgcacaccagtctcgaatttgtgtccgaatagagacttatatgcgttttgggatgcgtttcatccgacagagaaagccaataggatcatcgttaatcagatcctgtctggttcctccaagtatatgcaccctatgaatcttagcacggccacgctattggattcttctaaaatctagtttaagtgatttctgtcaactaaatgtcaggtcattccttctgtactttgcattgttgttaatgtgttgattaataagttcaatggctccaattagtttaagcatgcaagagagtttttattgtcggtcgtctagtttgatgtctttgcttgttgtatctggtgattttttttattttataaaagaaccgttgtatcttggttagcttagtttagtcttttttggtttgtatgcccagtatatcatgtaatttttgaaaacttgtagtgattgatatatgattttcttttctaaaaagnaaaaaaaatacacaaaatagtagaacacatagnnnnnnnnnnnnnnnnnnnnnnnnnnnnnnnnnnnnnnnnnnnnnnnnnnnnnnnnnnnnnnnnntgcacc

SEQ ID NO: 125398 - DNA, 632 bp, Arabidopsis thaliana
  unsure (1)..(632): unsure at all n locations
gtccgagaggtttgaagaagcatttgtagaggctcaaagctccnaagcatcggatgcttgataaactcggtggagtctttgcacactttttgtctaactaaccacacaagctaaggacgctcggacgtaatgatctcatcaacaagaactatctagataccgttttcagcttgttcttgacaatactcgttaccagactacgttgtgtttcttatttccgaatacggtaagattctcagaaaactctacgaactgggtgcaagacgagttttggtaactggaactggtgcaatgggatgtgctcccgcggagctggctcagcatagccccaacggccattttttttggggggggggggccccccaccattcccccccctgactacccccccgcccccggcccctcgcctcgccccctcccccgccccccgccccggtccgggtgggcctaccctcggtcgccggccccccccccctgccccgccgccccccccgcgccccctcgctccgcccctcctccctgcacgcccccccgccgtaccccccccctctccggcatcacccctccgtccccggtcctccacccgcccccgggttgcccgcggccccgcccaggccgcccagagccctcgg

SEQ ID NO: 125399 - DNA, 1000 bp, Arabidopsis thaliana
  unsure (1)..(1000): unsure at all n locations
atgactcgccggannnnnnnnnnnnnnnnnnnnnnnnnnnnnnnnnnnnnnnnnnnnnnnnnnnnnnnnnnnnnnnnnnnccacgcgtccgcgatctctctctgatcacaacaatcataagcgatgagaggagctagacccgatgaattcaattttagtacgaatccatcaacgccaaacactggtcagccgacaccgacgtaccccgccggtgttggcggcggcggcggtggaaggaaaaaaggcgttggcgtgaggacgtggttggtacttaactcgtcagggcaatcggagccgaaggaagaagggaaacactccatcatgcggcgaacgggattaccggcgcgtgatcttaggattctcgatccactgttgtcgtatccatctactgttttaggtagagagagagcgattgtcatcaatttggagcatatcaaggcaatcatcactgctcaagaagttttgttgcttaattccaaggatccttcggtctcaccctttattgatgagttgcagaggcggattctctgtcaccatcacgccactaaacctcaggaggagcagaactctgggggagagcctcatacgagggtagatcctgcccaaggagaagctggaacggaacaatcttctggggatcaagggagtgaagccaagaaggatgcgaagcaaagtcttgagaatcaagatggatcgaaggttcttccatttgagtttgttgctctggaagcctgtcttgaagctgcatcaagcagtttggaacatgaggccttaagattggagttagaggctcatccagccctggacaagcttacttccaagatcagtacccttaatttggagcgggttcgacagattaaaagcaggctggttgcaataactggacgtgttcagaaggtgagggatgagctagaacatctgcttgacgatgatgaaggtaatggctgagatgtatcttacagagaagttagcttagaaacttgatgattcgtcaaatttc

SEQ ID NO: 125400 - DNA, 573 bp, Arabidopsis thaliana
  unsure (1)..(573): unsure at all n locations
cagctctctacgactcactatagggaaagctggcacgcctgcaggtaccggtccggaattcccgggtcgacccacgcgtccgcccacgcgtccggccttctgcagacgttatttggaccgccttggtgaaacaaaatacttgatggctttaaagaatctttgtgattctggcataattgagccatgtcctccagtgtgtgatgtcaaaggaagctatatttctcagtttgagcatacaatcctgttgcgaccaacttgcaaagagattatttccaaaggagacgattattgaaatagtgattttcacagaacttgaagcagttgttcttcttgagtttgtataatagttttggaaggctttttaagtcttgggctcaaatatttgtatgttcttcgaagatgattctaagtataagagcttaggggatccttcatcaattatagctacatgttagcttattttttattctgttatagaattttggtttttttaaatatgccccccccccagttccccnnnnnnnnnnnnnnnnnnnnnnnnnnnnnnnnnnnnnnnnnnnnnnnnnnnnnnnn

SEQ ID NO: 125401 - DNA, 917 bp, Arabidopsis thaliana
ttcagctctctacgactcactattgggaaagctggtccgcctgcaggtaccggtccggaattcccgggtcgacccacgcgtccgcccacgcgtccgatgaaatatctcactatctcctctaaatttcatcaatacttcgccattactagttacttatttgaattaatagtatgatacatgttgaaacttcattatctcttatatcattcaaattgttttgtagaaaatgtacgatttgggtgctcgacgtgtccttgtgactggaacaggaccaatgggttgcgtcccggccgagctggcgcaacgtagccgcaacggcgagtgtgctaccgaactccaacgagccgcgtcactattcaacccacaactaattcaaatgataacagacctcaacaacgaagttggatcttcggccttcattgccgctaatactcaacaaatgcacatggacttcattagcgacccacaagcatatggattcgtcacgtcgaaggtggcttgttgtggacaagggccgtacaatgggatagggctatgcactccattatcaaatctttgcccaaacagagatctctttgccttttgggatccttttcacccatcagaaaaagcaagtagaatcatagctcaacaaatcctcaatggctctcctgaatacatgcatcccatgaatcttagcaccatcctcaccgttgattccatgacctaagcttctattcctcatctatcccaaatccactttatgctttgtttttgttttgcctttctcgtttattatatatttttacattggtgctttaattagtttccttgagttatgttgtgagttttgtgttgttcctcaataattagtcaccaattgtgagctgaggagtaatattcaacaatcttacgaatgttcactatcaaaaaaaaaa

SEQ ID NO: 125402 - DNA, 787 bp, Arabidopsis thaliana
  unsure (1)..(787): unsure at all n locations
nnnnnnnnnnnnnnatacgactcacttagggaaagacggtacgcctgcaggtaccggtccggaattcccgtgtcgacccacgcgtccggctctctcgatttcagccaagagatgtcggcatacgacaatgttattggtgggaagctaaagctaaaagggaaggctttggatgtgaaagcaggtggagtaaagaagaagaagaaacataagagacaggaagaacaagctcttaaaattactgatcatgaactcatagaaggagaaagcactgaagcattgggtaaattgattgaaggagaagaaggagatgaagaaatgaacaggagtgaaaaggcaagcgaggatgcgaagttgcagcagcagctcgatgatgatgatcacttaacgccagcagaaaggcgatacatagagcagaaacaaagattggatgtgcagaagctagctaaggaagcgaacaagtctcaccgtaacaggattgaggatttcaatcagtatctggctaacatgagtgagcactacgatatccctaaagtcggacctggttaatataattctttcttgtctttgttttactctgcttatctattttgcatcgttaaacgactactttggatgtctgttatgtttagtccctttaacttttgaatgatgtgatcgcaaatctgtaatgtcaaaacacattttcttggaaaaaaaaaaaaaagggagggcgtctaaggaccaagctaccacgcgtgatcgacgtatagcttnnnnnnnnnnnnnnnnnnnnnnngtccnnnnnnnn

SEQ ID NO: 125403 - DNA, 409 bp, Arabidopsis thaliana
  unsure (1)..(409): unsure at all n locations
agaaagtactctcaccagcactgagatcgtacgtagagaggctagtgagttaaaagaatctctgagccctggtcagcaacacgtttctcaaaatactgccgtaaaacctgaaggaagacgtagcagatccggtaagaaagccaaaaagagacattcacagcaaaaattacatgcaaaaaacggatggttcctcagggttaaatgaagaaagtacttcacgaagagatgatattgctatgagtgacacagaagaagtattaagttccagttctagatgtgcttctcctgaagattccagaagtaggaaaacacctcttgaagtaatgcaagagtcttccccaaatcagcttgtaatgtcaagtaagaagttcattggaaagtcaagtgagctactganagatggatatgt

SEQ ID NO: 125404 - DNA, 802 bp, Arabidopsis thaliana
agacgacagaagggggggttaggtttgtcttcaaaatcgtcagaagaagaagaagaagtcaaagacgataacaatgacgtcatcatcgtacctccgatttgcgatcgccgtcgtagctttcctctcaatcaccaccatcaccaccgcacgtccttgcaaaaccttcctaatctcctcatattccctctcaataaccccagaaaaccctaacctcgaatccgatttcacctccacacgattcgtcaccgttttcacaatccgtcgtctaaatcctcaccacgtggttcctttcttcgtcaatcgtcgtcacgagaagccacagatccaatcggatcgttccctccctttgatctctgataacatcaattcgtttagagatcgaaccagagatattcttagcgtcgtcgtcgcgcttttgttcggtgttggttgtggtgctttaaccgctgctactatgtatcttgtttgggctcttgttgtgaatcgtcaaagctatgattttgaggaagaagaagatgattatgagaatgatgaatctgatgctgctagcttgaagaaattgggttatgttaagattccagctccagctcctgctcctgtgaaggaagctgcttgatttgaggttgtgaatttcagtttctgcatattatcatgatttacgttgttgcttatctatgttgttgcgtacaagtaaattcgtctctgttatggatttatctaaacttactatactctaagtatcggtgtttttacgatttgtagttgatgtttcttagatatatataagtgtgattatgatgtg

SEQ ID NO: 125405 - DNA, 937 bp, Arabidopsis thaliana
  unsure (1)..(937): unsure at all n locations
ggggaaggtggcacgcccggcgggaccgggccggaattcccgggttggcccaagcggtccgagccaccgaaggggggggtagggttggtctccaaattcggagaagaaggagaaggaggccaaggccgttaccattggcggtcttattggaccttccgattggcgatcgccgtggaagctttcttttaattaacaaccttaaccaccgtttttcctggcggaaccttcctaatctcctcatattccctctcattaacccaagaaaaccctaacttggaatccgattccacctccacacgattcgtcaccgtttccacaatccggcgtctaaatcctcatacacgtggttcctttcttcgtaaatcggtggtcacgagaagccacagatccaatcgggtcgttccctccctgtgatctctgataacatcatttcgtttagagatcgaaccagaagatttcttagcggcgtccgtcgcgcctttgttcggtgttggttggggggcttttaccccttgctcctatgtatcttgtttgggctcttgttgtggatcgtcaaagctatgatttttaggaagaagaagatgcttatgagaatgatgagatctgatgctgctagcttgtagaaattggggtatgttaagattccagctccagctcctgctcctgtgaaggaaactgcttgatttgaggttgtgaatttcaggttctgcctattntcctggtttncgctaccccctaaacaaggagatgcggcccagtaaattcgtctctggtatggatttatctaaaccttctatactctaaggatcggtgttttttccatttgtaggttatgtttcttagatataaataagcgcggttatgctgtgtgaccccccataaaaaggaataaaccccccaggcgaacgctttagaggatcccagcttacggacgggg

SEQ ID NO: 125406 - DNA, 432 bp, Arabidopsis thaliana
  unsure (1)..(432): unsure at all n locations
cccccgttggaggagtcntccnttctgggggagctgntccgnttnangcggnctccgtcggtgattgctcaggttccnatgccttcnccctttcgagaggtctttttactgctgtgagccctatctgcagcccggctggagacggaatggagttggtttagattccatgttgatctccgcaaatcctgagactgagaggcctctttatcttccgtagaataacttcccttttctctttcttttggacaactatggagtatgagacattgtgctattgctctcgcagggaggtctaggcatatcctccctgccttaaagagagcttttatcttagtaatgttgaactttatgtagtacttatgtaggagagactttataattctaatgctttattctggatcttactgctgtcgtatttaggtgatgtttgat

SEQ ID NO: 125407 - DNA, 854 bp, Arabidopsis thaliana
gcctgcaggtaccggtctggaattcccgggtcgacccacgcgtccgaggaaatctcgctagcgaaaacgtagacgatgtcaaaatcagcaaccgtttggctgacactccatgtgtagtcgtaacatccaagtttggatggagtgctaatatggagaggatcatgcagtcccaaactctctcggatgctaataagcaagcttacatgcgcggaaagagagtcctcgagatcaacccacgacaccctatcatcaaagaactcaaggatagaattgcaagtgacccagaggatgagagtttgaaggaaacagcacagctcatgtaccagacagctttgatcgagagtggattcatactcaccgacccaaaagactttgctgcccgtatttataactcagtcaagagcggtctgaacatcagccctgatgcagtagccgacgaggaaatcgaggcagcagaggaaccagagaccagtgaggcaactgagacgaaatcagatgacttggctggtggtctaaacattgaagccgaacccgttgagcaacaagaagagaacaccaaggacgaactgtagatttcacttctgatgtttctcctttgtgtttacctctttagtttaaagcagaacatcgttttactcgaatatcaagattagtttaattaagcagtttttgatggattatgtaaacgcactacttgcattctagagatcaaggaacctaaacttcttcttttcaatgtatgagttttttatctttcaagattaataaaaaaagaaaaagggcggcacgctctagaggatccaagcttacgtacgcgtgcatgtgacgtcatagatcttccacaataaatcatt

SEQ ID NO: 125408 - DNA, 1686 bp, Arabidopsis thaliana
  unsure (1)..(1686): unsure at all n locations
aaccgagattagattacatcttagggatgaagctggcgagtacctagaagaaagtaaacttaaggaattggtgaagagatattctgaattcattaacttccctatctccctctgggctagcaaagaggttgaaaccgaggtcccagttgaggaagatgaatcagctgatgaggaaactgaaaccacctctaccgaggaagaaaaggaagaagatgctgaggaggaagatggtgagaaaaagcagaaaaccaagaaggtgaaagaaacagtttatgaatgggagcttctgaatgatgttaaggctatatggctgagaagtccaaaggaggtgacagaggaagagtacactaaattctaccactctctctcaaaggattttaccgacgagaagccaatggcttggagtcactttaatgctgaaggtgatgttgaattcaaggctgtgttgtatgttcctccgaaagctccccatgatctatacgagagctattacaacagcaacaaggcgaacttgaagctatatgtcaggagggtgttcatctcagatgaatttgatgagcttctgcctaagtatttgagtttcttgaagggtcttgttgactctgacacattgcctctaaatgtatcaagagaaatgcttcaacaacacagcagcttaaagacaattaagaagaagcttatccgaaaggcgcttgatatgatccgcaagcttgctgaagaagatcctgatgaaatccatgatgatgagaaaaaagatgtggagaagtctggtgagaacgatgagaagaagggtcaatacacaaaattctggaacgagtttggcaagtctgtcaaactaggtatcattgaggatgctgctaacaggaaccgcttggcaaaacttcttcgttttgagacaacaaagtccgatggaaaattgacttccctggatcagtacattaagagaatgaaaaagagccaaaaggacatattttacatcacaggaagcagcaaggaacagctagagaaatctccattcctggagaggctcatcaagaagggctatgaggtcatcttcttcacagacccagttgatgaatacttgatgcaatacctgatggattacgaagacaaaaagttccagaatgtgtccaaggaaggactgaaggttgggaaagattcaaaagacaaggagctgaaggaagcattcaaggagctaacaaagtggtggaaaggaaatctcgctagcgaaaacgtagacgatgtcaaaatcagcaaccgtttggctgacactccatgtgtagtcgtaacatccaagtttggatggagtgctaatatggagaggatcatgcagtcccaaactctctcggatgctaataagcaagcttacatgcgcggaaagagagtcctcgagatcaacccacgacaccctatcatcaaagaactcaaggatagaattgcaagtgacccagaggatgagagtgtgaaggcaaccagcacaggtccatgtnnccagacagcttttgatcgagagtngggtccatctcanccggccccaaancntttgctgnccggattttttacncnggccaangcggcttgacatcagncctgattnagatccggcggggaatcggggncccgggnccnggnccagtgggnactnggccnatccatgcttggtggggncaacattnaccgnccggc

SEQ ID NO: 125409 - DNA, 659 bp, Arabidopsis thaliana
  unsure (1)..(659): unsure at all n locations
ggtggaggaggtatttggtggtggacatggtggaggtgttggtggtggagttggcggtggacatggcggaggagtcggtggtgggtttggaaaaggtggagggatcggaggtggaattggaaaaggtggaggagttgccggtggcatcggtaaaggcggcggcattggtggtggaataggcaaaggtggaggagttggcggcggtatcggtaaaggtggaggtatcggtggcgaaatcgaggcagcagaggaaccagagaccagtgaggcaactgagacgaaatcaaatgacttggctggtggtctaaacattgaagccgaacccgttgagcaacaagaagagaaccccaaggcggaactgtagatttcacttcggatgtttctcctttgggttcacctctttagtttaaagcagaacatcgtttaactcgaatatcaagattagtttaattaagcagtttttgatggattatgtaaacgcactacttgcattttagagatcaaggaacctaaacttctttttnnnnnnnnnnnnnnnnnnnnnnnnnnnnnnnnnnnnnnnnnnnnnnnnnnnnnnnnnnnnnnnnnnnnnnnnnnnnnnnnnnnnnnnnnnnnnnnnnnnnnnnnnnnnnnnnnnnnnnnnnnnnnnnnnnnnnnnn

SEQ ID NO: 125410 - DNA, 480 bp, Arabidopsis thaliana
  unsure (1)..(480): unsure at all n locations
tgatactctcnnnnnnnnnnnnnnnnnnnnnnnnnnnnnnnnnnnnnnnnnnnnnnnnnnnnnnnnnnnnnnnnnnnnnnnccacgcgtccgggagaagagaacgactgtgtatccttcagagtcagacgagcctatgaatcaacaaatgatcgaaggagccgaagttgttatagatggaaacgtgattacaaagtttggggctcgcaactgttaccaaattttccctggctattgttagcaagctgttcggacatgctagagcaaggagtgtttcagaagggcttgtgcatgagtatccaaggcagtaaccgtttgaaagcatcttgttcaagaaacacagttagaagatgtctcattactgatcttaaacccgagtataacggtccgatggtatcaaaccacctcaactccagagacttttcacaagtatcatctgttcaacgttgatgcaccttatcctgaaacgggatgctatctg

SEQ ID NO: 125411 - DNA, 578 bp, Arabidopsis thaliana
  unsure (1)..(578): unsure at all n locations
ttccagctactnnnnnnnnnnnnnnnnnnnnnnnnnnnnnnnnnnnnnnnnnnnnnnnnnnnnnnnnnnnnnnnnccacgcgtccggcttaaaccccattttatattttagtcggagctccggtgaaataaaatggcggcaaagattattggtggatgctgctcatggcgacgcttttacaggaagagaacatcatctcgatttctgattttctctgttcgagcctctagttccatggatgacatggacaccgtctacaagcaattgggattgttttcactaaagaagaagattaaagatgttgttcttaaggctgagatgtttgcaccggatgctcttgagcttgaagaagagcagtggataaagcaagaagaaacaatgcgttactttgatttatgggatgatcccgctaaatctgatgagattcttctcaaattagctgatcgagctaaagcagtcgattccctcaaagacctcaaatacaaggctgaagaagctaagctgatcatacaattgagtgagatggatgctatagattacagtctctttgagcaagcctatgattcatcactcgatgt

SEQ ID NO: 125412 - DNA, 621 bp, Arabidopsis thaliana
gtccaattgagaaaaacgcgtatcgtcgtcttcttcatcaaaagcgaacaaattctaaaacacacctataggacaaaatccagtcttctctctgtgaaaatctcacagagtagagaaaagctttgtgttttccaattaaagttacattttttgtttgaacaaatcactttctgtgatctacatttgtgtggtcgtgaaatcaatgacggaaccagaaagattaggaggaatctccctgagttttccggtgaatgaagaagatacggtaacgacaacatcaccaaagactcttccacggaggctccgtcgtcgtcttctcgaaccgaagagtcctgtctccgccgcagagatcgattccaaactcagagaagctgatctccgtcgtcagcaatattatgaatcactatcgagtaaggcacgacctaagatgagaagtccgagatcaggaagtatagaggagcttagtcagagacttgaatcaaagcttaatgctgctgaacaaaagaggttaagtattttggagaaggagctggctcgtttggctaagatggatgaagctagacaagctgcgaagaatggacttgagcaacgagttgagaaagagcgtgatgagttagagag

SEQ ID NO: 125413 - DNA, 1493 bp, Arabidopsis thaliana
cccaagcgtccgctttaatctctctatcggagagaacacgagcgttgacggagaaagaatctctcagcttctttttttttttataatctttttccgagtcaaatcattttcagtctccacccaactctcaaatccgcggcaaacgtttaaggcattcgcggccgcggtcatctcaaagttccttgctttttccccggaaactccatcaatgtcgacccttttcgtttctcgctttatctgcttatagagaccaaaaaccctacaaaaatatgattcctacgacggcgacggttgatgatgagccgggacagattaaacgtgctctgattgatgcttctgccggagctatctctggtggtgtttctcgttctgtaacttctcctcttgatgtcattaagattagatttcaggttcagctagaaccgacgacttcatggggtttggttcggggaaacttgtcaaggagcttctaagtatactcggattggtacaggcgactaaaggtatatttagggaaaggaaggcttttcggggggtttttggcggggtaatgtgcccgccttttgcccaatggtcatgccgtatacttcaattcagtttaccagtactacataagctgaaatcttttgcatctggttctactaaaacagaggatcatatacatttgagcccttatctattctttggcaggggagcgttagcaggatgtgctgctactctaggatcttatccttttgatcttttaaggacaatattggcctcacaaggggagcctagggtgtatccaacaatgaggtctgcttttgtcgatattattcagctctcgaggtataagaggattgtataatggattaacaccaactcctggtggagattgtgccttacgctggcctgcaatttggcacatatgatatgtttaagcgttggatgatggactggaatcgatacaaattatcctccaaaatcccgatcaatgtggacaccaacctttctagcttccagcttttcatttgtgggcttggggcgggcactagcgccaagctcgtctgccatccccttgatgtggtcaaaaaacgattccagattgaaggtttacagagacatccaagatatggagcccgagtggagcgacgtgcatacagaaacatgttagacggtcttagacagattatgatatcagaagggtggcatggtctgtacaaaggcattgtgccatcgactgtgaaagctgctcctgctggtgctgtaacctttgtggcctatgagtttacctccgattggttggagtcaatttcttggtagagattttactcttttgatacttatatcttactgtctctagcatttattataggctcatatgaacatcgatcatttttggaatgtaaacgtcaaagtgttgtcggcaactgcagcggccgcaaattcaaacagcccgggggatccactagttctagagcggccgccaccgcggtggagctccagcaaatgtt

SEQ ID NO: 125414 - DNA, 558 bp, Arabidopsis thaliana
  unsure (1)..(558): unsure at all n locations
gggaaagctcgtacgcctgcaggtaccggtccggaattcccgggtcgacccacgcgtgcgggttcctcgcactttcaggctgaacaaagtactgacagatgctaataaatacacggaggaagaatatgctcctttaattattatctgagatttttcaattcaagttcgtgtggattcagaatcaaaatggaagaagatttgttgggcatttgtgggtttgattcgtcgaagaaatatcgattagaagaacttgccaagtatcagtcgggttcatgtattgagtttgaagatgatgatgaaatggcagtggattatccatgcccgttttgctcagatgattatgatttagttgaattgtgtcaccatatcgatgaggagcatcaactagacgccaacaatgggatatgtccggtttgtagcagacgagtgaagatgcatatggttgatcacattgccactcagcatagagatgtcttcaagagactttacaaggatgagtcatattcngcatttcntccagggnctaggnaatacttacagtctctaatcgntgagccg

SEQ ID NO: 125415 - DNA, 1600 bp, Arabidopsis thaliana
  unsure (1)..(1600): unsure at all n locations
cggaatcccgggacgacccacgcgtccggtggatcggagtgcaaattttgttattcaagcatgaatctcccatgcaagagaccaagagcagatgggtattatgtgggaagaattagctccaagattcaaggatcttcttgagcaagggaagtcaggtgttgcggcttctctgatagcagttagccaaaggcttcaaagtcatgaaaataagtgtggtgaggcccttgttggtgcagtatgctccacaaaggaatcccgtatctccattcttccacggttgctgtttcttgattactactttggttgtcgagataagtctacatgggagtgggcacctggtgcaaagatgcatgtcatggggtgtttgatacttcaggggatttttaagttttctagtgatcatatacagccatacataacaagcttaacttctatgaaagctgagtatatcactgaaacggcaaaagattccagtggagcacgtgtcatcgaggcctttcttgcctcagatgctgctacaaaacagaaacgtagactaattataaaattacgtggacattttggcgagctctcattacacacgtctggttcatttacagttgagaagtgcttcgatgcatgtaatttgacactaagggaagccatagcatctgaactgttggatgtgaaagttgatctctcgaaaacaaagcaagggccttatctgcttaggaaacttgatatcgatggttatgccagcagacctgatcagtggaaatcaagacaagaagctaagcaatcaacatataacgaattttgctctgcatttgggtccaacaaatcaaattttccaaagaacacctttgtctctgacgcatctgaggatgcagctcaggaaatagaagtaaagaatacaaggaaagagattgaccatcatcctacttccgggtttaagcgtcaccgagaaaaacatgcaaaggataaggatgaaccttttgcaggtgaaaaaagatcgaaacagaagaagaatagatctagtgaagcaacagataaaccaaaactagctggcagcaaaagacctttcctttctggtgagatgactggaaagaatcggcattcaaataaaatgagaatttgaagggctggagccagtccttgggattcttcggaagctatctttttcacctcttagagactctcctttcatctcctggcttatcttcaaatctctcacacctttactagaagctaaatccatggaagctggcgccatctgacgacactctacattatacttgctgctaaacaaagctagaagtaacagacagagagctgctgagatcgatgccgatgtatggaatctcttcattgtgaaatttctttttgatctgttgtggtcttaggttgttgtgttccttgagactgctattgagaaaactttagggtagcgagcttatgtttgagttaaagagcgagaatctttgttgctttgtagattatattatcgattcatgaaactttttgggatctaaaaaaaaaaaaaaaaaaagnnnnnnnnnnnnnnnnnnnnnnnnnnnnnnnnnnnnnnnnnnnnnnnnnnnnnnnnnnnnnnnnnnnnnnn

SEQ ID NO: 125416 - DNA, 575 bp, Arabidopsis thaliana
  unsure (1)..(575): unsure at all n locations
ccgccccccccggttacccccggaaccnccaaggntaggtccctttccccggggaaaagccgaccgggggaggattaaacttgggaccaccggtacccaaactcgctggcagcaaagcctttcccttctgggggtggctggaaaggatcggcattccaataaaatggggatttgaagggctggagccagccttgggattctccggaagctatcttttccacctcttagggactctccttctcatctcctggcttatcttccaaaatctctcacacctttactagaagctaaatccatggacantggcgccatctgacgacactctacattatacttgctgctaaacaaagctagaagtaacagacagagagctgctgagatcgatgccgatgtatggaatctcttcattgtgaaatttctttttgatctgttgtggtcttaggttgttgtgttccttgagactgctattgagaaaactttagggtagcgagcttatgtttgagttaaagagcgagaatctttgttgctttgtagattatattatcgattcatgaaactttttgggatctaatcac

SEQ ID NO: 125417 - DNA, 635 bp, Arabidopsis thaliana
  unsure (1)..(635): unsure at all n locations
cagctctctacgactcactatagggaaagctggcacgcctgcaggtaccggtccggaattcccgggtcgacccacgcgtgcggcacgaactcatttcagcttcttgcagccggcggaacggaggaacaaaaagcagagaagctaatcaatcatgggaaaggttcacggatctttggctcgtgccggtaaggttagaggacaaactccaaaggttgcgaagcaagataagaaaaagaagcccagaggtcgtgctcacaagcgtctgcagcacaaccgtcgttttgtcaccgcagttgttggtttcggaaagaagagaggacccaactcttctgagaaatagaagaagttagagagaaagatgttgtcgtgaaacttctcaaggtcatttgtaactttttgttttctttggcaccgaactattatgttttgattctatgctatgaaatactgttttttcacttatgattttggtcaattaaacataagatatgatttttgcccatacattacaacaagaccaatgatcaaaaaaaaaaaaaaaaaaaaaaaaagnnnnnnnnnnnnnnnnnnnnnnnnnnnnnnnnnnnnnnnnnnnnnnnnnnnnnnnnnnnnnnnnnnnnnnnnnnntacaatcg

SEQ ID NO: 125418 - DNA, 572 bp, Arabidopsis thaliana
atgatacttcaggtctctacgactcactattgggaaagctggtccgcctgcaggtaccggtccggaattcccgggtcgatccacgcgtccggccgttctcctcctcctccactatagctgcctgtattcgtcttctctatcaccctcgttatctggatctgaaatattaggtgatacgaagccatgacagtttcagaagcttatagtccacctctgttcagtatagccccgatgatgggatggacagacaatcattacagaactctagcgcgtcttataacaaaacacgcatggctctacactgaaatgttagctgctgaaaccattgtctatcaagaagataacctggacagctttttggcattctctccagaccaacatcccatcgttcttcaaattggtggaagaaacttggaaaatttggctaaagcaaccagacttgctaatgcttacgcctatgatgaaattaattttaactgtggatgtcctagcccaaaagtaagtggacgaggttgttttggtgctcttcttatgcttgacccgaagtttgttggtgaggctatgtctgtcat

SEQ ID NO: 125419 - DNA, 857 bp, Arabidopsis thaliana
  unsure (1)..(857): unsure at all n locations
ttctaacaagaacaacgaaaaaccacaagcgaaacatacaactcaatcagtaaccactccgcctcatacaggatgatatgtgcgagaccacgactgtgctcttccagacgaaaaaaaacatttataactnggtactcatccacaagcatcgtagcatccaaatacataagtggtgacagtcatcgcggctcttaaggaccatattcccaagtgcacaaccagaggctctcgcactgttcaataccatcacatcccaatatggttaggaaccatcatcagacaacacaagattgcccaacaagatgtccaacaaggctatctctatctcaaacgacaagacggggataaaactggaacttggcaagggtttgagagcaaaatttcacccatctgctgcaatcacactctcattcacgtttgaagcccaagacccttcagatggtacccagactaaacggtaccaagcagtggttcgaaacttgtcctttgatatcgaagtttgctcttgcaatcctgaaccatcttcttcttgaattctcttctgaaagttttccaccggcgagtcttatgcatctatctatctatctatctaggggaagcaaaagggcactagcaagtttcaatttgttccttgaacttctctatttgaaattaagttgtatttttatgcccaaatgttggtctctcggtgttttactgttattgcgactaagtcactactctttccattagctacttctattattatatggataatgttgttacaaaaaaaaaaaaaaagggcggccgctatagaggatccaagcttacgtacgcgtgcatgggacgtcatagtaattctatagtgttgcccaaat

SEQ ID NO: 125420 - DNA, 548 bp, Arabidopsis thaliana
  unsure (1)..(548): unsure at all n locations
nnnnnnnnnnnnnnnnnnnnnnnnnnnnnnnnnnnnnnnnnnnnnnnnnnnnnnnnnnnngggttcgttatcatcgccatctcgaccccccgtccgcataagcgatgttatctccgattgagaatgagagatccgaaattccttcccctgagaagctgaagttagtggaggagccatccgacgatgaatctaagttctctaattatgattcggacgattgggaaactttgtcagatgatcttcgactgttagatgaagagtggggcaagagcgggggttttgatgtggacttctcgaaagtgcgtcacagatttggtcgcggagctgttcatctcgacgacgacaatatggttagcgagcctcatgagaccaacagagatttgctcaacaggttgtccaacatggctatctccttctacaacgacaagacgggggataaaactgggaacttggcaaggttttgaggagcaaatttcacccttttgctggaatcacactctacatcacggtttgaagccattgaccctcccagatgggacccagactaa

SEQ ID NO: 125421 - DNA, 636 bp, Arabidopsis thaliana
  unsure (1)..(636): unsure at all n locations
nnnnnnnnnnnnnnnnnnnnnnnnnnnnnnnnnnnnnnnnnnnnnnnnnnnnnnnnnnnnnnnnnnnnccacgcgtccggtttctcgccatcgacgacgacgacaacaaaatcacatatcttctctatcgatctccaatcatcatcttcttcctaactacaggtgtattgatgttctttgcagagatgtctccagcaacaaagtcaaagtctaaggataaaaaaactggtaaagaagctcaaaaggcatcaccaaagccttcactttcggttaatgggaatagcagcttggcagctagtggttataatcctcttttaggaacatttcaagctcttgattcagtgtcgatagcttctatctcaccattacagtatagtcgtttccggagtatagatgaggcagatgtaaatgggattgagtctgattcagtttcgaataatggtagctgttctggtgagtcagaagatcacaaggagaaaacaacttatcctgcccttaagcaggaggtgataccaggtgccgattatgacaagcgggaaaaagtgtcgtcaaaagaatgaggggatacatcaccgccagaagggggaggnggggctcncggngtttganttnggangtgtagcntnttctttattt

SEQ ID NO: 125422 - DNA, 413 bp, Arabidopsis thaliana
aaaaagagcacaaggaacagttaaaagtcgggatttttgggtatttgagaagcaatcggaacaacaacggcgtttgtaacgcggatttatgtcggctgtgtctgaatcggctgcgatttcgtctctgtttctaatctcctttgcaattcaatcgtcttcttcttcttcctcgtctgtcttgttctttggtctgagtctgacggctgttcttaacgctcttcgcttctgctccgaacagaggcttattcttgaggttccttccatttccatgggcttaagacttaacaggacttgttctggtgttgaagtatttgggggttttcacgaaaagcaaaaaataccctttttcatagttcgctgaaacagagaaatctttttcctgaaaaaaacctcatccgatttagcagtttttt

SEQ ID NO: 125423 - DNA, 679 bp, Arabidopsis thaliana
  unsure (1)..(679): unsure at all n locations
nnnnnnnnnnnnnnnnnnnnnnnnnnnnnnnnnnnnnnnnnngttgaaaccaaaggagttagcttcttcaactttctccactaattcatgccattgtcgttacctttttgtttctcagactgttaccttacctgtaaagaagagagttaaagatctattgcaaaaaaactcaacctttaatctctctgcttcttctaattaagtaatttcaactacccttttggcgaaacctctcgatctattggtttggtactgaagaaaccgacttgagtctgatttgtttttggtgaaagccatggaagctataagaaagcaagctgcgaagctcagagagcaagtcgcgaggcaacagcaagcggttttgaagcatttagggcatgttaatgctgatgctgttgttgttgatgaagaagagcttcattgtcatcagaaacttcaagatctttatagctctactaaagctgctaagcgtttgcaaaggaacattgttcgtggactcgaaggtttcattgcgactggcacaaaggttgttgagatagggttgaagtttgctgaagatttcaagaaatatggagatgagaatcctgatgctaatactcctctatcaagagtcgcacatcactttgggacctcttacaagtcggtggaaggcgagagggaaactctcctcggagttctt

SEQ ID NO: 125424 - DNA, 541 bp, Arabidopsis thaliana
ctctctaaaaccctattaaatcttctctctttcgttcttcttcttcttctcctcctccatcctccaaatctcgatttcccaaaaaaaaaaacctaatctcgccgtactctcctcggttccatctttctctgcggccagtacgtgtgcagatatggctaccgagggagttgttccttcagcgcaggatattgctgctgaatttgtgagacagtactatcatgttttaggacagcttcctcatgaagctcgtaggttatatgttgatgctagtgttgtcagcagacctgatgttactggtactatgatgtcttttacttccgttgaggctatcaacaagcatatcctgtcctgtgactttgagaatactaaatttgaggttctgagtgttgactctcagaattctttggaagatgggatttttattatggtgatcgggttcatgactggaaaagacaaccagaggaggaagttttctcagatgttctatcttgctcgtcaatataccctcgttgttctcaatgacatgttacgatacgttgat

SEQ ID NO: 125425 - DNA, 436 bp, Arabidopsis thaliana
  unsure (1)..(436): unsure at all n locations
gatttatattcctcttaaaaaataatttatttccttcctaagaagaattattagatttattttctttgctagtatagattgatgaaagtgaggaaatgggagaagaaatgaagaacacaggatgtgtcttcttcttctaagtcactaacaaaatcaacaaagaggagaagccattattatataatagagagattgagagaagagatttatccaaaaaaatattgcaattcttcttggagtgaataatgccagtccctcttgcaccatatccaacacctccggcaccggcactggctccgtcgtacaacactcctccggcaaatggaagtacaagtgggcagagccagttagtgtgttcaggttgcagaaaccttctgtgtttcccggtnggngaaaccnccntttttnggccgtttaaaaagcngttangggnttt

SEQ ID NO: 125426 - DNA, 595 bp, Arabidopsis thaliana
  unsure (1)..(595): unsure at all n locations
nnnnnnnnnnnnnnnnnnnnnnnnnnnnnnnnnnnnnnnnnnnnnnnnnnnnnnnnnnnnnnnnnnnnnnnnnnnccgggcgtgcgcggacgcgtgggttatttccttcctaagaagaattattagatttattttctttgctagtatagattgatgaaagtgaggaaatgggagaagaaatgaagaacacaggatgtgtcttcttcttctaagtcactaacaaaatcaacaggggggagaagccattattatataatagagagattgagagaagagatttatccaaaaaaatattgcaattcttcttggagtgaataatgccagtccctcttgcaccatatccaacacctccggcaccggcactggctccgtcgtacaacactcctcccggcaaatgggaaaatctttcttagatggacaagctatttttaatccaaaaagatcctctgttttcatattcttttacaaaagtttagtttcttataagaatgatttttgggttatttaacaagatggttttggtctgcatacctggaaaaataaatattttagaatcccaattggtttctcttcatgggaaaaattgctcaatatt

SEQ ID NO: 125427 - DNA, 546 bp, Arabidopsis thaliana
ggaagaaagaagatagaatcagagatttgtagattttatcgatcgaagatgaatactgacatcactgccttggagaaggcacaatacccagtggttgatcggaatcctgcttttactaaagtcgtcggcaatttcagcactctcgattacctccgtttctctactatcaccggcatctccgtcaccgtcggctatctctctgggattaagcctgggattaagggaccgtcgatggttactggaggattgatcgggctcatgggaggtttcatgtatgcgtaccagaactctgccggtagactcatggggtttttccctaatgatggtgaagttgctagttaccagaagcgtggtggtttctccaaatgaatgactttagtgttttattttctggatctggcttcattttggaatttgaaaccctctctttttctctgtaatttgattgcatttctctgctgtttgaggataatatgtgcctctgtttgtctgttatgacttgatggtgatgatcaataagatttgagacaaggaattgtggtgaaa

SEQ ID NO: 125428 - DNA, 518 bp, Arabidopsis thaliana
  unsure (1)..(518): unsure at all n locations
nnnnnnnnnnnnnnnnnnnnnnnnnnnnnnnnnnnnnnnnnnnnnnnnnnnnnnnnnnnnnnnnnnnnnnnnnnnnnnnnnnccacgcgtccgcggacgcgtgggtcctggtatatcgaaagaggagaaaaggaggctgttacattgtgttgtggttggtggtggaccaactggtgttgagtttagtggtgaactgagtgactttattatgaaagatgttcgtcaacgatatgcccatgttaaggacgacattcatgttactttgatagaggccagggatattctttcatccttcgatgatcgtctcagacgttatgctatcaagcagttaaacaagtctggagtacggtttgtgcgagggattgtgaaagatgtgcagtctcagaagttaatacttgacgatggcacagaggttccctacggactcttagtgtggtccactggtgttggtccttctcctttcgttaggtctcttggtcttccaaaagatcctactggaaggattgtcattgacgaat

SEQ ID NO: 125429 - DNA, 541 bp, Arabidopsis thaliana
actatagggcaagctggcacgcctgcaggtaccggtccggtatcccgggtggcccacgcgtccggtgattttgaaatttcagataacgcagaatttttttattctcgccggagttttctcctcccaccgtctctgattctcgtcgccgccgtacacagttgttgttctctgccgtttctgcaagatgattggatcgtttcttacaagaggattggtgatggtgttgggctatgcttaccctgcgtatgaatgttacaagactgttgaaaagaataggcctgaaatcgagcaacttcgcttttggtgtcagtactggatattggttgcttgcttgacagtttttgagagagttggtgatgcgtttgtttcatgggttccgatgtacagtgaagctaagttggcattcttcatatacctgtggtatcctaaaaccaggggtactacatatgtctacgagtccttctttaggccatatctctcacagcatgagaatgacatagaccatagtttgctcgagctaaggactagagcaggagatatg

SEQ ID NO: 125430 - DNA, 495 bp, Arabidopsis thaliana
ctaattgagagagagcgcgcgacaaaatcgaacctaaccctaattttgcgatttccccctaatttcgacgatctgatggtgagtgacaagcatgtagaatcaaaccaccgcaaacaccgacggtcgttttcgccgtccgacgaggtctttaaatctccgaagcggcacaagtcccgtcatcaccatcgcaggcatggccaccgtcatcatcgtgatgaggaagttcaatataacgatgatgagaatgttaacggtggtgaccttgatatggaagaaggggagatattaggaaaagaagggattggggagacattgaagaagaaattagagtccgtcgacgagtttggggatataaaatgtggtcaattccgggagaataatctggggagaaatcagcggagggaaagagaatgtgagaaaagaaaagagatagagcctgaccgtgaaaggagaaaagagaggggaagcgttgatagagatagcaggggagacagg

SEQ ID NO: 125431 - DNA, 378 bp, Arabidopsis thaliana
ggagtctgtcggcaattctcaggtgctgtcaccacaatgcatgttatgggtcaacatcaagttactgaaaaagaaaagaagaagaagaagcctaaaggtgatctgaaacagaacaaatgtgtctgtttatgttttggagctcgttgttaacaattgtgcaagacaagtagagagagttaaaaaagcttgggagattcacattctgttcttgagccttcttcaataccttttgctcttgttccttgtaattcttttttctgacatgacatgacatgattggctttttgatcgcttgaggtttggtttctattgtatttcggattcgcaacaccgtggaaattattaggtaacaaacaacagataaaaaaaaaagggcgg

SEQ ID NO: 125432 - DNA, 666 bp, Arabidopsis thaliana
  unsure (1)..(666): unsure at all n locations
atgatttttccagctacaatacgactcactttagggaaagctgctacgcctgcaggtaccggtccggaattcccgggtgaccccacgtccggtttcgttttcctgtacctcttttaagaataaaaaaaaaaaaaagaaatgggaaaaatttcattagcgatatgtctaacgttgcttgtcacattaagcactgtttatgaaacacaagggacgttctcattacccctttacttgaaaaatttccccaaactgggcaaagactatgaggctttcgcaaacaaaggtatatcggactttttgggtgacctagagggtatgtgtcctaaaaccgcagagttcaaggatttctttgaaaacttgaaggattacatggccttcttcaattcagcagcacccgggtcaaaagacaaccagttcgagatgttcgtaaaatctgaaaagctgttcaaggctttgtctgctttcaacagtagtaaaggcggaacatcagaggattcgtggaagctggtggatggattgttgtcaatgggtaaaaggttttgttnagatgaagatagnggttcnagggntaccttttaagggngaggggcctaccagtcttggnaatgggtaggnctcggctttctnagngccctnaggtaaggcacnttttnctggatttttggg

SEQ ID NO: 125433 - DNA, 639 bp, Arabidopsis thaliana
  unsure (1)..(639): unsure at all n locations
actactatagggaaagctggtacgcctgcaggtaccggtccggaattcccggttcgacccatgcgtccggaaaagcacacgaagttatcgatggttttgctgaacgtgggcttcgttctcttggtgttgctcaacagactgtgcctgagaagactaaggaaagtgatggtagtccatgggagttcgttggtctgttgccactctttgaccccccaagacatgacagtgcggaaactattagacgagcccttgagcttggtgtcaatgttaagatgattaccggtgaccaacttgccatcggtattgagactggtcgtaggcttggcatgggaaccaacatgtacccatccacttcactccttggcaattcaaaggatgaatcattagttggcatccctatcgatgagctcattgagaaagctgatggatttgctggagtcttccctgagcacaagtatgagatcgtaaagaagctacaagagaggaagcacatttgtgggatgactggagatggtgtaaacgatgctccagctntgaagaaagcggatattggaattgcagtggcagatgctactgatgcggcaagaagcgcctcagacattgttctaacagaaccaggactaagcgtgataataagtg

SEQ ID NO: 125434 - DNA, 636 bp, Arabidopsis thaliana
  unsure (1)..(636): unsure at all n locations
atgttacttcnnnnnnnnnnnnnnnnnnnnnnnnnnnnnnnnnnnnnnnnnnnnnnnnnnnnnnnnnnnnnnnnnnnnnnnccacgcgtccggtctcacacagcatagaaataatcgaaagatttctttttaaaatctgggatttgttttttttgttcattgatcattttcgattgttagagaagaatcaaatggcgatggctatggatcggatcgtcttctccccttcatcttacgtctatcgtccttgtcaagctaggggatccagatcttccagagtttccatggcttctacgattcgctctgcgactacagaggttacgaatggaaggaaactgtatatccctcccagagaggtgcatgtccaagtcaaacattcaatgccgccacaaaagttagagatctttaagtctttagaaggatgggctgatgaaaccctgttgacttatttaaaacctgttgagaaatcgtggcagcctaccgattttcttcccgaacctgagtcggaaggattctatgaccaagtcaaggagctaagggaaaggtgcaaggaacttcctgatgactattttgtggtgcttgttggggatatgatcactgaagaagcactttctacttaccagaccatgttgaaca

SEQ ID NO: 125435 - DNA, 520 bp, Arabidopsis thaliana
  unsure (1)..(520): unsure at all n locations
cagctannnnnnnnnnnnnnnnnnnnnnnnnnnnnnnnnnnnnnnnnnnnnnnnnnnnnnnnnnnnnnnnnnnccacgcgtccgatcaaatccatcatccatggatttacctgaagaatgttgggaattaatctgcaaagctatcgatgaagacgattatcgattcctggaatctgtttcactcgtatcaaccttgttcctctcaatcaccaatcgcgttcgctctactttcgtcgtcaccgatcgagctgttcctttactcaatcgtcatctccttcgattccgcaacttgaagcgaatcaggttctctgatttcactcaggatctcaattcgattcttctccaggtttctcgttccggtttggatttcgaatcggtagatgtctcgcaaacgcgctatttcccagattttgagatgaagaatgtcaaggaattgaaatgttatggagttggaggttttagtgatagcgatctggtttccatcggagtgaattctccgttgctagagaagctggacatt

SEQ ID NO: 125436 - DNA, 590 bp, Arabidopsis thaliana
tgtaccctcacaactagagctctcaggtctctcagaagcttgcaacaaactgtgggagctcgatttaaaccgccttgttcctggaagggattatcaaatcgactgcggagatgggaaaagggtccatgagagagctgatatggctgaaggactactgttctcttgggtgagcgaggaagtctctagaaaaccgactttcgccagattctgttcattgcttgacaactacaaccccaacgaaggttacaaagaagtggtcacagaagaagagaggcaagagcaagcggctttcattgaagaaattagcagaacctctgtgatcaagtaccttcacaggtaccttgtgctcaaggacgtcgctcctggaagctacttagagttcaagagaatgttgacaagtctctggttcgatctgtatggccgcggaggtacatctggctcatcttctgcgtttgagcatgtctttgtaggtgagatcaaacaatctggtggggaacaagtctctggattccataactggcttcaggtaaaacactttttgtcctccacctaccatgaattcaaatctctagaaagtccgattcaaaaca

SEQ ID NO: 125437 - DNA, 738 bp, Arabidopsis thaliana
  unsure (1)..(738): unsure at all n locations
cggtccgcgccgccaatntggggaggggggggagaatcgccggctcctatacgactcatatagggaaagctggtacgcctgcaggtaccggtccggaattcccgggtcgacccacgcgtccgcccacgcgtccgcggtcttggatatgctaaagcaccacgaccttgggaagatccgagcacccttgcatcctctcagaaagaagatgcagattcagcacgcttaccagcagatacatcaggggtcaaaactgttgaagatggaccggatgatgttgagagggaccaaaagaaggataggcgtgaggaaaggaaacctgcaaagagagagaaggaagaaagacatgataggcgtgaaaaacgcgaaaggcatgagaagcgaagcgctcgtgattcagatgatagaaagaagcacaagaaagagaagaaggagaaaaaaagaaggcatgactctgattctgattgaagcgaattgtcccaggatggaacattttgctcttcagaggaagagtggtcggctaggtaccaaaatccagctaccacttctgcaagatttaaatctgttgcttatttcatttacgaatcgtggagtaaagtgttgttgaacattgttgaaaatgtttgttaaaacacatgaaaaatgtggtttgatattataacaaaccgaaacaaaaaaaagaaaaaaaaagggcggcaactctagaggatccaagcttacgtacgcgtgcatgttacgtca

SEQ ID NO: 125438 - DNA, 675 bp, Arabidopsis thaliana
  unsure (1)..(675): unsure at all n locations
caaagttctggcttttagcctcctgagtgtaaaatcaaggttgcaactttcagggtttcgaggtatcatccaacgaggggaggtgttcgcggtggtcgagatcaattcagttgggatgaagtcaaggctgataaatatagggagaactatttgggtcacagtatcaaagcccctgttggaagatggcaaaaaggtaaagatcttcattggtatgctagagataaaaagcaaaagggttccgagatggatgctatgaaagaagagattcaaagagttaaggaacaagaggagcaggccatgagggaggctcttggcttggcaccaaagtcctctacaaggccacaaggaaatcgccttgataagcaagagtttactgaacttgtgaagaggggttcgacagcagaggacttaggtgcagggaatgctgatgctgtgtgggttcacggtcttggatatgctaaagcaccacggcctttggaagatcccgagcacccttgcatcctctcagaaagaaggttcaggtttagcacggttnccagcaggtncatncaggggtcaaaacttttttaaggttggcccngnttntttttngggggccccaaanaggntttgcgtntgaaaggaaccttcaaagggggaaggntgaaagcnttttgggttaaaccggaagcttta

SEQ ID NO: 125439 - DNA, 484 bp, Arabidopsis thaliana
gatcttcattgctatgctagacataaaaagcaaacgggttcctagatggatgctatgaaagaagagattcaaagacttaacgaacaagacgagcaggccatgagggaggctcttggcttggcaccaaagtcctctacaaggccacaaggaaatcgccttgataagcaagagtttactgaacttgtgaagaggggttcgacagcagaggacttaggtgcagggaatgctgatcctgtgtgggttcacggtcttggatatgctaaagcaccacgaccttgggaagatccgagcacccttgcatcctctcagaaagaagatgcagattcagcacgcttaccagcagatacatcaggggtcaaaactgttgaacatggaccggatgatgttgagagggaccaaaagaaggataggcgtgaggaaaggaaacctgcaaagagagagaaagaacaaagacatgataggcgtgaaaaacgcgaaaggcatg

SEQ ID NO: 125440 - DNA, 734 bp, Arabidopsis thaliana
  unsure (1)..(734): unsure at all n locations
tnnnnnnnnnnnnnnnnnnnnnnnnnnnnnnnnnnnnnnnnnnnnnnnnnnnnnnnnnnnnnnnnnnnnnnnnnnnnnnnnnnnnnccacgcgtccgagggtttaaagggagtttagttgactgggtgagtcagtatttgggtactggtagaagcaaagacgctattgatagaagcatatgtgataaaggacacgatgaggagatattgcagttcctgaaaatcgcatgtagctgtgttgtgtccaggcctaaggaaaggccaacgatgattcaggtgtatgaatctttgaagaacatggcagataaacacggtgtttcggagcattacgatgaatttcctctggtcttcaacaaacaagaagcttgagtatctttaccagaaagtagtcttttttggcagcttaagcgctaagaaggtatgagaaatctacttttgtatcagaagctttttttttttactttatatctcattctttgttccttccctcagtgttgttagtttttaaccgtgtcagtgctcgtgtttgtcttgtatctcccaccgtataattctgtacattcgtttgggtcattaatgtactctttggaatgtaacctcttctgatgaaatgagaagatttcagtcttatttccnnnnnnnnnnnnnnnnnnnnnnnnnnnnnnnnnnnnnnnnnnnnnnnnnnnnnnnnnnnnnnnnnnnnnnnnnnnnnnnnnnnnnnnnnnnnnnnnnnnn

SEQ ID NO: 125441 - DNA, 521 bp, Arabidopsis thaliana
  unsure (1)..(521): unsure at all n locations
nnnnnnnnnnnnnnnnnnnnnnnnnnnnnnnnnnnnnnnnnnnnnnnnnnnnnnnnnnnnnnnnnnnnnnnnnnnnnntnacccacgcgtccgcccacgcgtccgggagagagaaaatccgccgataagattccgtacgactgcacgtctccgatctcgccgtgaatctgtctcgagagtctgttaactcaccggatctccgtcgttgatctgcctctgtttcgatccgtgttaaactcgatttaaaactatggatccgatggatatagttggaaaatcaaaggaagatgcttcgcttccgaaagctaccatgacgaaaattataaaggagatgttacccgcagatgttcgtgttgctagagatgctcaagatctattgattgagtgttgtgtagagttcataaatcttatatcgtcggagtcgaatgaagtgtgtaacaaagaggataaacgaacaatagcccctgagcacgtactcaaagctttacaggttcttggctttggggaatacgtagaagaag

SEQ ID NO: 125442 - DNA, 599 bp, Arabidopsis thaliana
  unsure (1)..(599): unsure at all n locations
tttnngganncnggcccgggcnaaccnggngnngcccccagacccatttccgggcgnggnccttggctggatgatggcnaatgtgggcaataccaccctgaaacggccttggccgagaattctcagtaccgacacgggcccccgatccaggccgagacgactcctcaggacgagacgaccactcaggacgagaactctccgtaacaacagggaaagccgacccagctcgagtatttttaataacgatacggaagatagccgacccaggaagacaactgaagacgggttacgagtgttcacggaaaatgaaattggtttcaacaggaaagatgctggtggtactcgtttttgtccctttgactgttattgttgcttctaaatcttcttaaaccatttcgttttgaaccttttgttttatggtgccaaaggagatttaactcgttctgctattaatggatgtatgatcttataacttaaaaccatatttttcgttcttgttcataataaaaaaaaaaaaaaattacattttactaaaaaaaaaaaaaaaannnnnnnnnnnnnnnnnnnnnnnnnnnnnnnnnnnnnnnnnnnnnnacatt

SEQ ID NO: 125443 - DNA, 542 bp, Arabidopsis thaliana
  unsure (1)..(542): unsure at all n locations
atgatactccnnnnnnnnnnnnnnnnnnnnnnnnnnnnnnnnnnnnnnnnnnnnnnnnnnnnnnnnnnnnnnnnnnnnnccacgccgtccgcccaacctgacccgtctgggctcgccgcctcctatatctcttctctctcgattaatatctccaagagcaagcttcgttttcgtgtggtgtcgtttctaattgtgattttttaatattgcatcaaaatgtcgaagaagaggaaggctcgtagcggctacttgaagaagtcatcacaaggaggagacgaagctgtggtacagcgaagaaaactagttccaaaacctggtaaaattgggaaagagattgatgatatctttgctgggagatctcagaggacgccagaggtccaaaatcccgagtcgagagacacgccagaagcccaagtatccgagtcgagagacactagagctgagatgaatgagctcaatgttggggtcaataacaacactgaaagccgacctaggacgagaattctcagtaacgacacgggaccccgatccaggacgagacg

SEQ ID NO: 125444 - DNA, 803 bp, Arabidopsis thaliana
  unsure (1)..(803): unsure at all n locations
atgatacttccnnnnnnnnnnnnnnnnnnnnnnnnnnnnnnnnnnnnnnnnnnnnnnnnnnnnnnnnnnnnnnnnnnnnnnnccacgcgtccggaccggtttaactcccaagagctacttggagttgtcgtaaacacagagatcacaatcttaccaaattttcacacaccgacatgtctagatccttagctctcgtttacttagccttactttgtcttcaaacccatctctcaatctccgtcacagttccgattccgtcggtaaacggcgaaatcgacgcaatgctgaaccggaacggcgtaatcggagaggaagaaggagaggagatgatgccatcggagataagtcggagagtaatgatgatgcggaaacagtacataagctacgaaactttaaggagagatatggttccttgtcagaaaccaggtgcttcttattacgcttgtcgctctggtcaggctaatgctttcaacagaggatgtaagtgtcattactaggtgtgctagagacactaacgacatcaagacttgaaaacattggggtctttaagtacattttagttttaaactcagatgctctagaggcaagtgaaatcttattattcntgtcttttgttttgtaatgttgttgtttacattagatttcttaattattgatatgtaattttggctattaatgttcaagtaattgatatttatagtcttgaaaaaaaaaaaaaaaaaaaaaaagggcggccgctctagaggatccaagcttacgtacgcgtgcatgcgacgtcatagtattctatagttgtcctaaat

SEQ ID NO: 125445 - DNA, 534 bp, Arabidopsis thaliana
  unsure (1)..(534): unsure at all n locations
tacgactcactttanggagagctagcacgcctgcaggtaccggtccggaattcccgggtcgacccacgcgtccgaaatcataaccggtggaaatggaccagctcttctcataaatggtgtcaaaaggccaatgccacttgttcggattttggaagttgaattgtatcctactttgctttcaaaagcccggagttttggtctgagtgatgaatggatccaagtcctagtcaagaaggatcctgttagacgtcaagttctgcgtgttaaaggttgcctggcaggatcaaaagctgaaaaccttcttgaacaaggcgatatggttctggcagtcaataagatgccagttacatgcttcaatgacatagaagctgcttgccaaacattggataagggtagttacagcgatgaaaatctcaatctaaccatccttagacagggccaagaactggagctcgtagttggaactgataagagagatgggaatgggaccacaagagtgataattggtgcggatgccgttgtcaagaatcttat

SEQ ID NO: 125446 - DNA, 530 bp, Arabidopsis thaliana
  unsure (1)..(530): unsure at all n locations
cccacgcagacactgtgacactctagcaccttcagttccgtacaacaatggctctccaagctgcctattctcttcttccttctaccatttcaatccaaaaagagggcaaattcaatgcttctctaaaggagacgacttttactggttcttcattttcaaaccatcttagagctgaaaagatatccaccctgttgaccatcaaggaacagagaagacagaaaccgcgattttccaccggtattcgtgcacagacagttacagccacgccgccggcaaacgaagcatcgccggagcaaaagaagactgagagaaaaggcactgcagtgatcactggagcttcgtctggtttaggtttagctacggccaaagctttagcagacacagggaaatggcatgtgatcatggcttgcaggaactttctcaaggccgagaaggcagcgagatctgttggaatgtccaaggaagattacacagtgatgatctgctcgtttaacngaanattcgtgaattcggggaaganacnncgtttc

SEQ ID NO: 125447 - DNA, 369 bp, Arabidopsis thaliana
gctctccgcaccatgtgaaaggttggtgtagtggcaagaactctttcgaatctgaacgccttaagctctgagagacgagcattttccagaaaattcccattacctaatccccaggattcgatgaacccagaaatgatggttttcgaaaggctctagctttctcaaatccagattttgctgaggagctcgttgaaagaatgcacgctagaccatctctctcttgtcctttgtcgttcagatcgtttctctttcagcgtgatattagagtacaatactagataccgtgaggtcctttgtattattggaccttgagttgtcctgtctaagtgggataacctttctagtgaacattttcttggtcagttcatc

SEQ ID NO: 125448 - DNA, 527 bp, Arabidopsis thaliana
  unsure (1)..(527): unsure at all n locations
atgatactccnnnnnnnnnnnnnnnnnnnnnnnnnnnnnnnnnnnnnnnnnnnnnnnnnnnnnnnnnnnnnnnnnnnnnnccacgcgtgggcccangcgtgcgagatatgacagatcgagcgccccaaaggattgccgtgtatcaggatggctaggtgacatagatatggagactgagacaatgccccttcttacagaattcagttacgacttagacaggtccaatgcacagacattcgacattgcagacgctgctcactcaggacttgtcaacactgtcaggctagacttcaattccaaccatggaagctcttcacacacttgcatctaccgcttcagggttcatggccgtgaactagactcagtctctgttgctcatgcttgatctgaaagtccacgtcaaacttttcttctctttggaacattccctctaatagatatctctcttctttttttggggtagtttatgtgggggggaaagcttttcttagtctgtaatcagaatcatttgggtggattgcggatta

SEQ ID NO: 125449 - DNA, 564 bp, Arabidopsis thaliana
  unsure (1)..(564): unsure at all n locations
tnnnnnnnnnnnnnnnnnnnnnnnnnnnnnnnnnnnnnnnnnnnnnnnnnnnnnnnnnnnnnnnnccacgcgtncgcggacgcgtgggttgagactaccctgtggagaaacttgcttgctacttgtcagacgatggaggagctttgctaacatttgaagccttggctcaaacagctagctttgcaagtacatgggtgccattttgcaggaaacacaatatagagccaaggaaccctgaggcctactttggacagaagcgtaactttctcaagaacaaagtcaggctggattttgtgagggaaaggaggagagtgaagagagaatatgatgagtttaaggtcagaatcaactcattgcctgaagcgataaggagaaggtctgatgcttataacgtgcacgaagagctaagggctaagaagaaacagatggaaatgatgatgggaaacaatccacaagaaactgttatagttccaaaggccacttggatgtcagatggttctcactggccagggacttggtcctctggagaaaacgataactctcgaggagatcatgctggaatca

SEQ ID NO: 125450 - DNA, 470 bp, Arabidopsis thaliana
  unsure (1)..(470): unsure at all n locations
cggacgcgtgggtttagctatttcacctccattttcttcgatcagtgcttgaaccatgagcctacctagctcgcaccttaaggaggtgattcagtttacaagcaaaatggtgaagatttgctgcattggagctggatatgttggtggtccaaccatggctgtcattgctctaaagtgtccatctgttgaagtagctgttgttgatatctctgtgccaaggatcaatgcctggaacagtgatcagttaccgatctatgagcctggtcttgatgatgtcgttaagcagtgccgtggaaagaatctcttcttcagcaccgatgttgagaaacatgtgagagaggctgacattgtttttgtgtctgtcaacacccctactaaagacccggggcttggagctggcaaagctgcggatttgacttactgggagagcgctgctcgtatgatttccgatgttttgggtttccnacaaa

SEQ ID NO: 125451 - DNA, 529 bp, Arabidopsis thaliana
caaagatacaaagcaatagaacaacaagaacaagaaaacagagaaaaaaacaatggctgccttgtcggataagttagcggatgcttaccagaacgcaaggccgagatatccgatcgattggttcacgaaacttgctgctcgaaccggtcagcacaaatcagcttgggatgttggtactggcaacggtcaagcagctattggtcttgcagagtatttcgagaaagttacagcaaccgacataaacgaagcacagttaaaacgagcggtaaaacacgaaagaatcagttaccatcacactcccacaacaatgtccgaagaccaaatggttgctctagtcggcggagataactccgttgatctaatcgtggcagcacaagccgttcactacttcgttcttggcaccattcttcaacgtggcataaccgctgttcttcgcaaagaaggaggattaatcgcagtttttgtctacaacgacataatcatctctcctgaagttgattccatcatgaaacgtcttgtggactccacg

SEQ ID NO: 125452 - DNA, 517 bp, Arabidopsis thaliana
acgactcactattgggaaagctggcacgcctgcaggtaccggtccggaattcccgggtctacccacgcgtgcgcggacgcgtgggcggacgcgtgggccaaattgcacttccttcaaacttattcgacagtagactagctcaagtacctttggatggcgtcgaggcccggagctcttacggagtggccatggagtccccttggtagcttcaagtacctcttggtggccccggtggtgatggcgagcatgcactcgtacgtgacggctgtggatgaggagaaagacctcagcagacttatgatagtcgtgttgatgctgtggagaatagttcacagccagatatggatcagcgtgtctcgccagaggacggctaagggaacgaacaagatcgtggacaagcccattgagtttgagcaagtggaccgagagcgcacttgggacgaccaagtcatcttcaacactctcctcatgtatctcgcaaacatcaagctcccaggcgcctcccaccttcccccat

SEQ ID NO: 125453 - DNA, 531 bp, Arabidopsis thaliana
  unsure (1)..(531): unsure at all n locations
nnnnnnnnnnnnnnnnnnnnnnnnnnnnnnnnnnnnnnnnnnnnnnnnnnnnnnnnnnnnnnnnnnnnnnnnnnnnnnnnnnccacgcgtccgcccacgcgtccggcagaagagatgaatcctgaaggttcacgataccagcttcttctctcatgtccttctggcctctctccgtctcaggtctcagtggatttctcgaaatcgcatgatcggattcctcgtcaagatcctggtctagaagattctatttcacaggtttgggagcagagatcacagggaaattcatcattgttcaatggccaaaaatttaggtatggaggatattgtttagatgatgatgatggtagtaccaatgaagtgccacacgtttgtcttcgtcttggcctgacagattacaggacttttgtaggaacgaatttgagttctctgtgggagaagttccttgttacatcagaagatgactctgttagatgtcgacacacctcaagtccattgggaaatggtgcagttatcgaaacttctgataagaag

SEQ ID NO: 125454 - DNA, 434 bp, Arabidopsis thaliana
tcccactcactttagggaaggctggtacgcctgcaggtgccgggccggattccgggtcacccagcgtccggggagcggatgattggtcagataaatgtcaatcgaagtcggtacaaagaaacggtgcaaaagacaggtctgcgttgtttgacataaccaacgactcaccgatcgtaggtctggcgatgcagacaccgtcctcaggagttgttgggaagaggaacatgagcagaatcaataacactcctggatctggtgaggctctcttgagaggccaagtcaagactctcttgcagaaggttgaggaagaagcagatctcaccaagatttcgttggaatctcgccctttcatccatctcgttacttctcccatgggtcttctcgccccaactccggccaacaccccccaagttcttggtttctcagacgaagtg

SEQ ID NO: 125455 - DNA, 452 bp, Arabidopsis thaliana
  unsure (1)..(452): unsure at all n locations
ctcatataatagagttttctttctattctcctctgcttaatttcccagaaatnactctttctgtgcttatcggattcaatagattcttagtaaatcgtaatggagacaccatcatcgacaagaagagtcacgagatctcagacccgctgtgctatcaataatctcttatcctcaaagaaagcggatgattggtcagataaatgtcaatcgaagtcggtacaaagaaacggtgcaaaagacaggtctgcgttgtttgacataaccaacgactcaccgatcgtaggtctggcgatgcagacaccgtcctcaggagtttgttgggaaggggaacatgagcagaatcaataacactcctgggtctggtgaggctctctttagaggccaagtcaagacctctcttgcagaaggttgaggaagaagcagatctcaccaagatttcgttggaatctcgt

SEQ ID NO: 125456 - DNA, 537 bp, Arabidopsis thaliana
  unsure (1)..(537): unsure at all n locations
tacgactcactttanggaaagctggtacgcctgcaggtaccggtccggaattcccgggtctgacccacgcgtccgcccacgcgtccgcccacgcgacaaggacgaggttccaagagaacttagcttcttgttctacgtacgacaccaaaaattaattcaaaaaagaaaaagaagagagttcaatgagaaaacattctcttgatcgatggcttttaacagctgttcttgtcgttctcctctcgtcttcttcctccttcgcggccaagaaggacgccaagaagaagaagaagagtaataaggaggtgacatatgatggaacctctttgatcatcgatggcaaaagagagcttctttattctggctctattcattacccgagaagcactccggaaatgtggccaagtatcatcaagagagccaagcaaggcggtttgaacacgattcagacatacgttttctggaatgtacatgagcctcaacaaggaaagttcaacttttcgggacgagctgatttggtgaagttcataaagttgattc

SEQ ID NO: 125457 - DNA, 494 bp, Arabidopsis thaliana
aatacgactcactttagggaaagctcgtacgcctgcaggtaccggtccggaattcccgggtcgacccacgcgtccgcatggatcataacgttgtacacactgtggcaaatggtggagatgcatgagattgttccagggaagaggcttgataggtatcacgagctaggtcaacacgcttttggtgaaaagcttggcctatggatcgtcgtgccgcagcagcttatcgtggaggtcggtgttgacatcgtttatatggtcacaggaggagcatccctcaagaaagtccatcaactagtctgtcccgattgcaaagagatcagaactacgttttggatcatgatctttgcttccgtccactttgttatctctcaccttcccaatttcaactctatctccatcatctcacttgccgcggctgttatgtccttaacttactcaactattgcttgggctgcatccgtgcacaaaggggtacatccagatgtggactactc

SEQ ID NO: 125458 - DNA, 864 bp, Arabidopsis thaliana
  unsure (1)..(864): unsure at all n locations
nnnnnnnnnnnnnnnnnnnnnnnnnnnnnnnnnnnnnnnnnnnnnnnnnnnnnnnnnnnnnnnnnnnnnnnnnnnnnnnnnnccacgcgtccggtaaaatcctaaaccgtcagagaatatctatcctcctcttaaatatcactcttatctttatcctcctaaaatcttcttaattgtatctaatctctttctcaaaaaccaaacactatctctcgattatatcacaaggagatatggggaacagtgaaatgtcagcgagtgaggttgcggcggccaagcagaagaacgtcgacgattggttaccgatcacatcttccagaaacgctaagtggtggtactctgcttttcacaatgtcaccgccatggttggtgctggtgttcttagcttgccctacgctatgtccaatctcggatggggacctggagtgacgattatggtgatgtcatggatcataacgttgtacacactgtggcaaatggtggagatgcatgagattgttccagggaagaggcttgataggtatcacgagctaggtcaacacgcttttggtgaaaagcttggcctatggatcgtcgtgccgcagcagcttatcgtggaggtcggtgttgacatcgtttatatggtcacaggaggagcatccctcaagaaagtccatcaactagtctgtcccgattgcaaagagatcagaactacgttttggatcatgatctttgcttccgtccactttgttatctctcaccttcccaatttcaactctatctccatcatctcacttgccgcggctgttatgtccttaacttactcaactattgcttgggctgcatccgtgcacaaaggggtacatccagatgtggactactctc

SEQ ID NO: 125459 - DNA, 885 bp, Arabidopsis thaliana
  unsure (1)..(885): unsure at all n locations
gatcctnnnnnnnnnnnnnnnnnnnnnnnnnnnnnnnnnnnnnnnnnnnnnnnnnnnnnnnnnnnnnnnnnnnnnnnnnnnccacgcgtccgtggagaagacgacagaagggagcctaagagaggacgaggacgtcctgtaggtagacccagaaagattggaacatcagtcacgactgggacacaagattctggagaactcaagaagaagtttgatatttttcaagagaaagtgaaagaaattgtgaaggtgttgaaggatggagttacaagtgagaatcaagcagtggtgcaagccataaaagatctggaagcactaacagtgacggagaccgttgagccacaagttatggaagaagtgcagccagaggagactgcagcaccacaggctgaagctcaacaaactgaagctgctgagacacaaggaggacaagaagaaggacaagaaagagaaggagaaacacagacccagacagaagcagaggcaatgcaagaagctctgttctgaagaataataatgatctagaaaacaacctagacataatagccttggtgtttggcgttaggagtgtttttttttagttgttttaggtgttggaatcgcatcttaaattatataaaaatctataaggaattttaatttttctaggttttgttgtctgcagaagaagaaatagtagactcgttaatggtgttgttgtcggtgtgtctttaaccaaaccataagacgtggctgtaaattagcgatgtttctagtcttccatctttaataatctcttattgcgtcaaaaaaaaaaaaaaccccccaaaaagggcgnnnnnnnnnnnnnnnnnnnnnnnnnnnnnnnnnnnnnnnnnnnnnnnntgctcctaatnnnnnnnnnnn

SEQ ID NO: 125460 - DNA, 1229 bp, Arabidopsis thaliana
  unsure (1)..(1229): unsure at all n locations
atgatatgnccnnnnnnnnnnnnnnnnnnnnnnnnnnnnnnnnnnnnnnnnnnnnnnnnnnnnnnnnnnnnnnnnnnnnnnnccacgcgtccgcttttttttttgttactaattttttttttctgtgtgtagatgatttgcgctgcgattgcggcgttaaacgaaccggatggttcgagcaagatggcaatttcgagatacatcgagagatgttacaccggtttaacttctgctcatgctgctttgttgactcaccatctcaagactttgaagaccagtggtgttctttctatggttaagaaatcttacaaaattgctggttcttctactcctcctgctagtgtagctgttgctgctgctgccgccgctcaaggtctcgatgttcccagatctgagattctccattcaagtaacaacgatcccatggcttctggctctgcttctcagcctctgaaacgaggtcgtggtcgtcctcctaagcctaaacctgaatctcaaccacaaccactacagcaacttccaccgaccaatcaagtccaggctaacggacagccaatctgggaacagcagcaagttcaatcacctgttccggttccgactccggttacagagtcggcgaagagaggacctggtcgtccaaggaagaacggttctgctgctcctgctactgcaccaatcgttcaagcttcggttatggctggaattatgaaacgtagaggtagaccaccgggtcgtcgagctgctgggagacagaggaagcccaaatccgtttcttctactgcctctgtgtatccttatgttgctaatggtgctagacgcagaggaaggcctaggagagttgttgaccctagcagtattgttagtgttgctccagtaggtggtgaaaatgtggcagcggttgcgccagggatgaagcgtggacgtggacgaccacctaagattggtggtgttatcagtaggcttattatgaagcctaagagaggacgaggacgtcctgtaggtagacccngaaagattggaacatcagtcacgactnggacacaagattctngagaactcaagaagaagtttgatatttttcaagagaaagtgaaagaaattgtgaaggtgttgaaggatggagttacaagtnagaatcaagcagtggtncaagccataaaaagatcttgaagcactnaacagtnncggngaccnttgannccacaagtttttggaagangntncaccca

SEQ ID NO: 125461 - DNA, 486 bp, Arabidopsis thaliana
tctcagagcaaaaaaacataaaaaaagaaaaaaaaaccctatatctaaatctcaccttccacctctgcctttgttttttttgttcttttttttttttttactgcatcttctcttctctttgctctgcaaaaatctcacatccatggatccatctcttggtgatcctcatcatcctcctcagttcaccccttttcctcattttcccacctccaatcatcatcctttaggaccaaatccgtacaataaccatgtcgtcttccaaccgcagccgcaaacgcaaacgcaaatcccgcaaccgcagatgtttcagttatctccacatgtttcaatgccccaccctccttactccggaatgatttgcgctgcgattgcggcgttaaacgaaccggatggttcgagcaagatggcaatttcgagatacatcgagagatgttacaccggtttaacttctgctcatgctgctttgttgactcaccatctcaagac

SEQ ID NO: 125462 - DNA, 1418 bp, Arabidopsis thaliana
  unsure (1)..(1418): unsure at all n locations
atgatactgccagctgcaatactgactcactatatggaaagctggtacgcctgcaggtaccggtccggaattcccgggcgacgctctctactaagaaactcaatcttactttctctgtaattcgtagcttccgaaatcttttctcaagaatctcataaccatggcgaatcctgctccgaatctagaatgtcgtatgtacgaatcgagataccctgatgtagacatggcggtgatgattcaggtgaagaccatcgctgacatgggagcttacgtatctctccttgaatacaacaacatcgaaggaatgatcctgttctccgagctctctcgccgtcggattcgtagtatcagtagcttaatcaaggtcggtcgtaccgagcctgttatggtccttcgtgtcgatagagagagaggttacattgatctcagtaaacgtagggttagtgatgaggacaaagaggcttgtgaggagaggtataataagagcaagcttggtcactctatcatgcgtcatgttgctgagactgttggtgtcgatttggaggagctatacgtaaacatcggttggccattgtataagangcatggacatgcttttaaggctttcaaaattnttgtcactgatcctnattcanttttcgatgctcttacccgagaagttaaagaaactggacctgatggtgtggaggtgaccaaagttgtcccggctgtgtctgaagaattgaaagatgcatttttgaaggacattaggaggcgaatgacaccccagcccaatggaagattcgtgctgatattgaattgaagtgttttcagtttgatggagttctccacatcaaggaagccatggaagaaggcagaggctgtagggtacctgattgattgttccagtcaacaatcaacgctccgttgcttccacccacttttatgtgctcacaactcacacccattacaaggaaaaaggaatagtgactctgaataaagcaattgaagcatgcattactgcaattgaggaacacaagggtaaacttgtcgttaaacgaaggtgctcgtgcggtgagtgagcgtgatgacaaattgcttgctgagcacatggctaagcttagaatggataatgaagaaatgagtggtgatgagggaagcgaagatgaagaagacactggaatgggagaagtcgatatcgatggaggtagcgggataattgaatgaacaaaagcaaaagcattgtaactgctgtttctgctttagatcctacaattttgtttccctttgagcaaaaacagtattttttgtttgaccccaaacatggttagtagtacaagcatctcttattccaaaaaaaaaaaaaaaagggcaagggcggccgctgtacaggattcaagatgagggaagcgtgcatcagacgtcatagatagtgtaaa

SEQ ID NO: 125463 - DNA, 554 bp, Arabidopsis thaliana
  unsure (1)..(554): unsure at all n locations
nnnnnnnnnnnnnnnnnnnnnnnnnnnnnnnnnnnnnnnnnnnnnnnnnnnnnnnnnnnnnnnnnnnnnnnnnccacgcgtccgcccacgcgtccgcgagcagcctctgaactacgctagaagctacttagcggatctgctggagccttgtgttaaccgtgtcatatacttggattcggatcttgtcgtcgtcgatgacatcgctaagctttggaaaactagcctaggctcgaggataatcggagctccggagtattgtcacgcgaatttcacgaaatacttcaccggaggattctggtcggaggagagattctccggtacctttagagggaggaagccatgttacttcaacacaggtgtgatggtgatagatcttaagaaatggagaagaggtggttacacgaaacgtatcgagaaatggatggagattcagagaagagagaggatttacgaactaggctcgcttccaccgtttcttctagttttctccggtcacgtggctcccatctctcaccggtggaaccaacatgggccttggggtgataatgttagag

SEQ ID NO: 125464 - DNA, 539 bp, Arabidopsis thaliana
  unsure (1)..(539): unsure at all n locations
tgatactccagctctcnnnnnnnnnnnnnnnnnnnnnnnnnnnnnnnnnnnnnnnnnnnnnnnnnnnnnnnnnnnnnnnccacgcgtgcgcccacgcgtccgctaatcttctcgttgctatggcgtcgcaattaatgggttctgctaattacggtttgaaacgttttagtgatagtttaggttacttgaatagagctaataggattcttgtgaagttagaggcggatggtgattgtgttgtggaagacgttaggcctgttttacacgctgtgcagcttgagcttgctaatgttaagaatgctatgggaaggagagaggaagctattgagaatttgaagaagagtttggagataatcatggagatagcgcgaaagacgaaatgaaagaagcgaaaagacttgtttaggatttgggattgaaggcctccagggagggttcaaccaataagcttgtgataaggctttacgtttggcccaaggcaagccatggatagtaatggagttgtgtgaagcgtcaacccctaaacaacaatggaaaga

SEQ ID NO: 125465 - DNA, 603 bp, Arabidopsis thaliana
  unsure (1)..(603): unsure at all n locations
tgatacttccnnnnnnnnnnnnnnnnnnnnnnnnnnnnnnnnnnnnnnnnnnnnnnnnnnnnnnnnnnnnnnnnnnnnnnnccacgcgtccgagtggatccgccgtagctggaggatccgtcgttacaaaatcatgtcatcttctcccaagctgtttcacgcgcgtccatcattcttcacgcgccgatcgacgcctttgatcgtcttcacctctctcgctatcggtctaaccggtttccttttcggattatcaacgatccttttccctggtctccggttatctggccggtcctgcctcaccaacttgccaccgaagactgttaaaatcgtctgggacgtcgctggtaatagtatcgttaatggcgaagtcaagaggcacaaagtgatgggattcgtcggaatccagaccggattcagatctgctggccggagacgagctctcaggaacacatggatgccgtccgatcccgaaggccttcgaagattggaagaatcaacaggattagccattagatttattataggcaaaaccaaagacgaggccaaaatggttgagctgagaagcgaagttgcaatgtacgatgactttatactgctcgatat

SEQ ID NO: 125466 - DNA, 447 bp, Arabidopsis thaliana
gcgtccggcaacattcaccggtactcatctgaccaagctagggtttcgcagtcatcatcatgtaccgtacggcagcttctcgagccaaggcccttaagggcattctaaaccacaattttcgagcttctcgttatgcaagttctagtgctgttgcaacgagctcttcttcctccagctggctaagtggaggctactctagttcacttccttctatgaacactcccttggctggtgtctctcttccaccaccactctctgaccatgttgagcctagcaaacttaagaccactactcttccaaatggtctgactatagccactgagatgtctccgaatccagcagcttccattggtttatacgttgactgtggttctatttatgagactcctcaattccgtggagcgacgcacttgcttgaaaggatggcattcaagagtacattgaaca

SEQ ID NO: 125467 - DNA, 461 bp, Arabidopsis thaliana
tacgactcactttagggaaagctgctacgcctgcaggtaccggtccggaattcccgggtcgacccacgcgtccgcggacgcgtgggcagaatcgctgcttctgcagcctctcgtctcttttcccattctaaggctgtgcttccttttggatcatctaaacgtcaagacaacgaagaagcttctctactggctactgctgattcggttactgcagtcgtggcagccaaagaggaagttaagcaggccgtcgcagatgatctcaaatcaaaccgttcaccgccttgtgaggggtttgtatgtgatgatgataaaagcggcaccaggttcttctttattcagggatcagattcactggcctcatggcaagctaaccttctgttcgagcctgttccatttgaggaccttgatgtgcttgttcacagaggcatatacgaagctgcaaaaggaatatacgaacagat

SEQ ID NO: 125468 - DNA, 881 bp, Arabidopsis thaliana
  unsure (1)..(881): unsure at all n locations
atgatctccaggtctctacgactcactttgggaaagctgctacgcctgcaggtaccggtccggaattcccgggtcgacccacgcgtgggcgagcacattgttgcgattgtgaagcgacctagcgttaactgctcgaagaagttctcagatcctggtcagctcaactacccaagtttctcggttttgtttgggggtaaaagagttgtgcggtacactcgggaagtaacaaatgttggtgcagcaagctcggtttacaaagtgacggttaatggagctcctagtgtcggaatctctgttaaaccatcgaaactttcgtttaaaagcgtgggagagaagaagaggtacacagtcacgtttgttagcaagaaaggagtgagtatgacgaacaaggctgagtttggttccatcacttggagcaatccgcagcacgaagtgagaagtcccgttgcattctcttggaaccggttttgataaaaaaactaacatccctagtgatgatgttttctatttaagttatcttgattgggtttaggctaaaccaaagcccatcatgagccataagtagtgggaagtgttcttgtgtggtttggtttgagtcattgagtgtgtaggtgaaagcatcccaaaaaaagttagggatgataaaagaaaatgttgtcaggaaaagaacgttgatgtcgtcatatgtagtgcttcaagtttcttcattttaaccatcatactgatgtaatagtatctttcaaataagccaccaaagtaatgtggccaaaaaaaaaaaaaagggcggccgctttaaaggatcccagcttacggacgggtgcatgcgacgttaannnnnnnnnnnnnnnnnnaacgaaagccannnnnnnnnnnnnnnnnnn

SEQ ID NO: 125469 - DNA, 517 bp, Arabidopsis thaliana
atacgactcacgttagggaaagctggtacgcctgcaggtaccggtccggaattcccgggtcgacccacgcgtccgcccacgcgtccgcgtttttgaaaaaactcaaattatcgtcgttttgttctcagatttcttctgctctcttcttcttctccttcttcttcgttccaccgcctctgttgctttatcttcttcttccttccttcgattgttgattacgtcggtggatctttgttctcctctgtgttgttttcattgctagatttcgtcaatgattggcttctcacgattcgatttttccggctcctgttcttaatttcctctgagagaatgatggatgagggatcagtaggggatgtgagtaggattgatgaagctgatgttgctcaccttcaattcaagaatagtgagcagtcgtttaaaccggagaacattgaagtccgggaagtaaaagaagtgcaggttcagagagaagctggttctcctgattgttcttatggcggaatagcagattttt

SEQ ID NO: 125470 - DNA, 545 bp, Arabidopsis thaliana
  unsure (1)..(545): unsure at all n locations
nnnnnnnnnnnnnnnnnatacgactcacttcaggggaaagctgctacgcctgcaggtaccggtccggaattcccgggtcgacccacgccgtccgaaagattcttcaagggaattccatgttgaaaagggaaaagggacacctctcaaagatattcccaatgttgcttacaaggtatcaaggaagaagtctgatgaagttttcaagcagttacacacaattctattcggtgggaagagagtaaaagctactcagctcaaggcacacatattacgcttttctggttacaaatggcaaggagatgaggaaaaggcaaaattgaaagtcaaagaaaagtttgagaaaatcaacaaagaaaaattggctggagttttgcgatttatttgacatatcagttgctaaggctaccacaaagaaggaagatattgtgaccaagctggttgagtttttggagaaacctcatgcaacaactgatgttctagtcaatgagaaagagaagggagtgaagcgcaagacgactgctaagaaaagctcacctggaacttgg

SEQ ID NO: 125471 - DNA, 558 bp, Arabidopsis thaliana
  unsure (1)..(558): unsure at all n locations
nnnnnnnnnnnnnnnnnnnnnnnnnnnnnnnnnnnnnnnnnnnnnnnnnnnnnnnnnnnnnnnnnnnnnnnnnnnnnnnnccccacgcgtccgcggacgcgtgggttcgtttctgagattcccttcttgttgttgtagccatggacaacgaaggcataggtctttacccgcttcatcgttgcaaaaccattcacctggtgagacatgctcaagggattcataatgtggctggtgaaaaagatcacagtgcttactcttcggaggattactttgatgctcatcttacccctcttggttggcaacaggttgataatctaaggaaccatgttcgtgcagctcaactcttaaacaaggttgaacttgtcattgtttcccctatgcttagaactatacaaacagctgttggtgcttttggaggagaagaagatactaatggagcggatgcaacaccgttaatggtggctaatgctgggagcagcgatcgtcctgcgatttctagcttaaatagtcctcctttccttgctgttgagctttgcagggaaactatngggtgatcat

SEQ ID NO: 125472 - DNA, 543 bp, Arabidopsis thaliana
  unsure (1)..(543): unsure at all n locations
cnnnnnnnnnnnnnnnnnnnnnnnnnnnnnnnnnnnnnnnnnnnnnnnnnnnnnnnnnnnnnnnnnnnnnnnccacgcgtccggatcaagaacatccgggacagtgtgaagcatgtgaaaacgtcagagtcccatgaggagaggtttactgagctcaaggaacagcttcaagttccaagcgagaaggtgctttctcttgatgatcagacgcaatggaacacaacatatatgatgcttgtggctgcttcagaattaaaggaagtgttctcgtgcttagacactgctgatcctgactacaagaaacctccttcagcagaggattggaggcatgtggaggcactttgcacattcctgaagcctcttttcgaagcagtctccactcttcaatctactggaaacccatctgctgttaccttcttccatgaagtgtggaagacacagtcagatttgtctcgggcgatagctggagaggatccttttgtcacaggtattgctaaaaccatgcaagagaaggtagacaagtactggagagactgtagcttg

SEQ ID NO: 125473 - DNA, 430 bp, Arabidopsis thaliana
ggagagccaacgagaagagaaaaagtatcttcctttgagaagtgcaagtccatggcagctctctgttgttgtcccaccaccatcatcgtctccgggaaggtttcttcacggattaaaaccgcaggcccattaccccgaatcaacccttttaagaatcagaaacgattgattacagagagaagaaacttgatcgttaaatcgatcattgaagacagagaagcaatcgatgttaaaaacgacaatttcaacgcagaggaagaactatcagaagataaagtagaagatacagatcggctgatgagtcgaggtatcaacgcagctatagttctcgccgccggtaccgttgcggttactaagcttttaaccattgatcatgactattggcaaggttggactctctacgagatacttaggtatgcacctgaacata

SEQ ID NO: 125474 - DNA, 826 bp, Arabidopsis thaliana
accaagggcttctctctcttaacacacctctatcctttagagagagagggagatttccggttcaccggaattatcgccgccgcttttgttctgtaatatagaagttttccgactgcagtcagattgttgtttttccgcttcgtcggaccaatctccggttaatccggatctaataagatccaatttggttacttaagattggatcaagttttttttgtttcctctttctacaaggctttcaatccattatcctcttgcgatctctggatctcttcctcctaccgtcggcttgcctcctctctttgatcggagtaacatcttcgccgcttcatatgactctgttgtagtcgaggactttcttttggtctcaggcggagcttccaatttaggagattgggttaagggataaagatttcttcaagtcttctttgagcttctttcagacggaaccggtgattgttcatcagatctgcaagacgaaaactgtagaaggagtacggtggtggttgcttgaagccaacggaggtgctgagtcaactcgcagatttgcccggcgccgactgcttctccttctccttcttatgtgttaacacgtggtgttacacgtggtgttacacgtggtggctccttattttcttaatcttttactttatttagtttaagattaagcagttgttaacctaatcaaggatgtatatgttggagaatgggcttatgtaattttcacttctttgtactgcccattgggcttccgttttaatggaatttggccgcctaaaaaaataataaaaaaaaaaaaaaaaaaaaaaaaaaaaagggcggccgc

SEQ ID NO: 125475 - DNA, 732 bp, Arabidopsis thaliana
  unsure (1)..(732): unsure at all n locations
aatacgactcactttagggaaagcacgtacgcctgcaggtaccggtccggaattcccgggtcgacccacgcgtccgcgcgcgcgtgggcggacgcgtgggcggacgcgtggggtttctctctcttctcgctctctgaatattttagagagagaatacgctcttcttctcgccgtccggtggttatccggctacatgtccggcgtcttccgtttttctcaacggtgatggccggctttcgtctagcaccgactggcttcctaagtagcggtggctagcttttgcccggcatcgaccggctaacctagcggccatggccggattctgtttttgctttaatttttcaattatgtttttaatttgctaataatctcatcggatctacgattagggatgttgatctgccatatccacggtggttcttctttgtctctgtcctttgagttttactccgatccgaattaagtttcttatctcttcaagataaatttcgggatccttttcttttgtaccctggatttaccagaatgatttcaaaagagattccacccctttggttgacgggaagaaaaatttccctggggcgctaacaagggcccctaaagcggnancttnaaatggnggctccnanggttcnaaancgggngaaaaaaaaangccncggncggncccnaacggggggngttctaccggaacgggccaacgggggggggttnccgnaaaatgggaacngc

SEQ ID NO: 125476 - DNA, 517 bp, Arabidopsis thaliana
  unsure (1)..(517): unsure at all n locations
nnnnnnnnnnnnnnnnnnnnnnnnnnnnnnnnnnnnnnnnnnnnnnnnnnnnnnnnnnnnnnnnnnnnnnnnnnnnnnnnnnnccacgcgtccgaaagatcctcactctccttctctgatctcgccatggaacctgacgtcagtatcgagactgtgtcgatcatgcggatcgccgtccttccgatcggcactattccgccgacgcttctccgggactaccactcgatgctgctccgtcatcacacgatcgcgctctcagctattagctctttctacactgaacatcagaaatctccattcacgaatcagccgtgggattccggctctctccggttcaaatctgtgcttggtggttctcctccgagtccttgggaggattgtcagtctaatcggaagatgctcgccgtgatcggcctttgccactgtccctcgtcccctgatcttgattctgtcactgaaaaattcaatgtcgcttgtaagagtgatccctaggctcttgaccggcgctgcttcgctt

SEQ ID NO: 125477 - DNA, 526 bp, Arabidopsis thaliana
cagctctctacgactcactatagggaaagctggcacgcctgcaggtaccggtccggaattcccgggtcgacccacgcgtgcgcccacgcgtccgctttctctctcgttttctaacgcatacactttgaatggcgcccatgagtttgcctccaggattcaggtttcatcccactgatgaagaactggtggcttactatcttgataggaaggtcaacggccaagccattgagctcgagatcatcccagaagttgatctttataaatgcgagccatgggacttgcctgaaaagtcatttttgccgggaaacgacatggaatggtacttttacagcacaagggataagaagtatccaaatggctctaggacgaaccgtgcgacccgagcgggttactggaaggccacggggaaagatcgtacaggagaatcaaagaagatgaagatgggaatgaagaagacactggtttattatagaggaaggggtccttatgggccttgggactaatgggggcttgcatggatatcggc

SEQ ID NO: 125478 - DNA, 702 bp, Arabidopsis thaliana
  unsure (1)..(702): unsure at all n locations
gcaaagtcttgtggctacagagcttagggtttaaactttcttcacgataattttccgatgggagttccgtcgttctacagatggcttatccagaggtatccattgactatacaagaagttattgaagaagagccactcgaagttaatggcggcggcgtcacgattccaatcgattcaagcaaacctaatcctaatggttacgagtatgacaatctttatctcgacatgaacggattcattcatccatgtttccatcctgaagacaaaccttctccaactacatttacggaagtgtttcaatgtatgttcgattacattgataggctttttggtatgggttcgacctcggaagctcttattcatggctattgatggtggtgctccaagagctaaaatgaatcaacagagagctagaagggttagagctgctaaagatgcagctggagcagcagctgaagaagagcagctgcgggaagagtttgagagagaagggaagaagtgcccccctaggggggcctcgcaagtttttgactctaatgttattactcctggaacagagttcatggctactctgtcctttgcgttgcgatactacattcacgttagactaaattctgatcctgggtggaaaaatattaaggttatactctcggatgctaatgttcctgncgaaggggaacacaagatcatgtcatacatacg

SEQ ID NO: 125479 - DNA, 534 bp, Arabidopsis thaliana
cagctctctacgactcactatagggaaagctggcacgcctgcaggtaccggtccggaattcccgggtcgacccacgcgtccgctaaaaccttagaatagccggagagaagaaggcgagaagaggagcgacaagggcgaagctgcagaattcttcggtaattttcagattcggttgaataatggcggctgcggcttttgggcagttaaatctagaggagcctccaccgatttggggatctcgtagtgtcgattgcttcgagaagcttgaacagattggtgaaggaacttacggccaagtgtacatggctaaagaaattaaaactggtgaaatcgtggctctgaaaaagatccgtatggacaatgaaagagaagggtttccgataaccgctatccgggagatcaaaattctgaagaagctgcatcatgaaaatgtcatccatttgaaagagattgttacttctccaggtcgagatagggatgatcaaggaaagccagataataacaaatacaagggtggaatctacatggtctttg

SEQ ID NO: 125480 - DNA, 786 bp, Arabidopsis thaliana
cgattgcactttcgctccggaattcccgggtcgacccacgcgtccgagatacatatcaagagattaaaccttatccaactaagagaagccatttttttttttttgggtctctgagttgtgtattgagcttcatctccttcaaatggcttccttatcaaccacttccctaagcttcaaagctccgtccaccacaatttcacaggttttaaggaaagcctcaagttctcagtctgtgacctttggtcgtttcacgtcttcaacaaagagccttcgtcttcaaatcagttgtgccgcgaaagcagagacggtgcagaaagtgagtgacattgtaaaagaacaattggctttagctgctgatgttccgctcactgctgaatccaagttctctgctcttggtgccgattctctcgacaccgtggagatagtgatggcgttggaggaaaagtttaacataagtgtggaggaatctgatgctcaaaacattacgaccatccaagaggcggctgatttgatagaggaccttgttcaaaagaaacccgcggcggaaacttcctgaaccggctgtcttttctttcctgacctattcttgccttcagagcgttttattacggtatattagaccgtttgttatttttatttatttcggaagctaagattgggtgttgacaatgagacaactttggtacctttgagattgattctttgtggtgatcggccttatgacgaaattcataatgggtattggtttcccttccaaaaaaaaaaagccgtctctcctccatacac

SEQ ID NO: 125481 - DNA, 423 bp, Arabidopsis thaliana
cccacgcgtccggaaaacgatacctaagctcaattatcttctctgcaacaaactccaaaggatccgagagagagagctctggaacgatattaacatatatcatgaagaaaaagattgaagtattgatatgggaataactaaaacttctcctaatactacaattctcttgaagacttttcacaataattctatgtcccaagattatcatcatcatcatcatcataatcaacaccaaggaggtatcttcaacttctctaatggattcgaccgatcagattctcccaatttaacaactcagcagaagcaagagcatcaaagggtagagatggacgaggaatcttcagtcgccggaggtaggattccggtctacgaatcagccggtatgttatccgaaatgtttaatttccccggaagcagcggtgg

SEQ ID NO: 125482 - DNA, 527 bp, Arabidopsis thaliana
  unsure (1)..(527): unsure at all n locations
nnnnnnnnnnnnnnnnnnnnnnnnnnnnnnnnnnnnnnnnnnnnnnnnnnnnnnnnnnnnnnnnnnnnnnnnnccacgcgtccgcggacgcgtgggcggacgcgtgggcggacgcgtgggcttttgcaggattggaaaactgagaggtataaagaaatcataaaatcaggaagtgtagaaccaagacctggtgtaataagactaatggatgaagcaaaagctgctgggaaaaaactagctgtttgttctgcagctacaaagagttcagtaatcttatgtctcgagaatctaatcgatatcgtaagttgtttcctttcgccaatctctgatctaccatgcttctttcaagttttttctttatcgattatactttatgtcgtttaggagcggttccaaggacttgattgcttccttgcaggtgatttcatcacattctctctcttcttatacttgcattttatgtgttaaacacttttctaaagtttgaatccatttggttgtatatttggctttgtangggatgatgt

SEQ ID NO: 125483 - DNA, 1293 bp, Arabidopsis thaliana
cgttttctttatttattcgggagaggttaaaagccacagaaacttattggctagaattggttatttataacaacaacacatgagcaaaaagctcaaaacatctacatactctttggaatcctcgattttttgtacgtgtaaagaagtcacacaagaaaatcttgggttgttgtaatcttcatcacactagtatgtcaacgggacaagcgccggagaagtccaatttttctcagagatgtagtctgctcagccggtacttgaaggagaagggaagttttgggaatattaatatggggttggctcgaaaatccgatcttgaactcgccggaaaattcgatctcaaaggacaacaaaatgtgattaagaaggtagagacctcagaaactagaccgttcaagttgattcagaagttttctattggtgaggcctctacttctaccgaagacaaagccatatatattgatctcagtgaaccggcaaaagtagcaccggagtctggaaattcacagttgaccatattctttggaggaaaagttatggttttcaacgagtttcctgaagacaaagctaaggagataatggaagtagctaaagaagcgaatcatgttgctgttgattctaagaacagtcagagtcacatgaatcttgacaaaagcaacgtggtgattcccgatcttaacgagccaacgagttccgggaacaatgaagatcaagaaactgggcagcaacatcaggttgtggaacgcattgcaagaagagcttctcttcatcgattctttgctaaacgaaaagacagggctgtggctagagctccatatcaagtgaaccaacacggtagtcatcttcctcccaagccagagatggttgctccatcgataaagtcaggccaatcgtcgcaacacattgcaactcctccaaaaccaaaggcccataaccatatgccgatggaggtggacaagaaagaaggacaatcttccaaaaaccttgaactcaagctttagggcgtataaaatgcacgatcgagttcacgtttctagttttcacttatttaggatttgaacccaaatacccttttatattttcttccattacttttgaccaatttaagttatttatagtactgtattacgtagctagtatttatatttcaaaacatacatattttgatacttgttttttagattctttaattaaaattgtcatctggattaaaaaaaaaaaaaaaagggcggccgctctagaggatccaagcttacgtacgcgtgcatgtgacgtcatagatcttctatagtt

SEQ ID NO: 125484 - DNA, 542 bp, Arabidopsis thaliana
cccttcctcacgctggtctcttcattattcgatatcattcctttttttccattgcccaggccaggagccttccccacccttgatgaacgatgaggacagaagatgatctccaaggggctccaggtctccaataattatgccctatccagtaagagcaaagttctggtagatgtcgaacaaagtgaacccttactacatttcactcatcaacaagtattttccggcgaaactaaaatggtgagataaagctacgagtcaattaattaactatcttttatgaggagaacgagatcgaaggttaacgagtttctattgtatacaacggaagataaatctatctaataaaaaagttggtgtgttcatttgtaatttttttcccccatcagtttaaaagttatgttgtatgaaataagtatttcaataataatataataaaatctaattaaaataaaaaaaaaaaaaaaggggcggccgctatagaggatccaagcttacgtacgcgtgcatgtgacgtcatagtacttctatagtgtctcccaaat

SEQ ID NO: 125485 - DNA, 494 bp, Arabidopsis thaliana
gaaaaagcttcttgtccttgatgattgctttcctcctccaacatcgtcgtcaatggaaacgagaatcctttgatctctcctctcaatcgtctctctctctgtcgccatctccgccgtcgtcaatggaaacgagaagtcgaagcccaccgtgtcgtactctgaaaaatctgagaagtctcttttcgtctttgatcaaaagttgatcgtctctcatctctttgtctggtacatggattctttgattggggtttcttcctcatgttagagttcctcctaggtcgagatcaaaaccttcctaggtgctcttcgctttcactgcccccaatctcttccttctccgcttgtgttctgaaatcatcatcgattggggctgacatagaggatgtgggagaagttattcaaccaatcacgaatcatcattcatcccgcgatcaggcaatcttcgtttttggagcagaagccagattctacaggacttgcctgatacagcacac

SEQ ID NO: 125486 - DNA, 1016 bp, Arabidopsis thaliana
  unsure (1)..(1016): unsure at all n locations
attntcttttcgcacactttctcgacacctcaatataactcagctgagagaaacgcgtctctcagatttcaatccttcactttcccttttctttttttctcgttatcggatcagaacaaaattttgggaaattcgaggtttccctggattgttggattcgattattgttgaaattcgatatgggtgtttgttgtttgtgttaatcgttgtcaaagttttgatttttttcctcgagaaaatttgagattttttcgttcgtctaatcgagagaaaacgcagccattttactacgatcaaattcaaacccctgaatactgaagcgaaattgaggttaatggttagggagcttagggtttatgaatgatcaggtggtatttggtatttgacatgaattacggaacacgagtgatatctctatcttctccagattgtttaagcttggggtttagtttccatagattgaagatttgctatggatacgggtcgcggagagggtaaagaagctaatggatgtgagaataaggctatagttagttgaaatagcagcgaaattgaagatcaaatctttgaggaagaagaaagtgagtcacaatgtttattgcctccaaggaaaggaggcatgtctagaagcactgacaagattaagaggactgtgctgtggaatgacattaaaggagacaatcgtgctgaggttttactttatgaaccaagcgaagttagcggtacagaggccgttgtttcagattcctgcatctgcacaattatgtagtctaccaatccgcaatcaaccaccattaacatggagtttaacaatgagctcgtccttgcaatctgacttcttttcacccatcagtttttgtgaggacagacaaacgagaacctgagcgattgggcattacactcatgttactgtctgatttttatgcctaaagggacttctgaccaagaagcccttccaaacaagggatttagactcataagcctatatcagattggtctcatctctcagggccaag

SEQ ID NO: 125487 - DNA, 938 bp, Arabidopsis thaliana
  unsure (1)..(938): unsure at all n locations
atgatactgccagctannnnnnnnnnnnnnnnnnnnnnnnnnnnnnnnnnnnnnnnnnnnnnnnnnnnnnnnnnnnnnnnnnnccacgcgtccgaaaacgttttatcctgagtttctttcaccatccagcttcatttgtgaaaaatcgtcaatccctctcaaactcttctcaccactaatttcttcctctggaacattctcttctctattattttgattcccttggcctcaacactggtttctcaattgcatgatcttggctcgtcttcagttactttgattcactgagaaaaatggcgactggagtattgccagctccggtttctgggatcaagataccggattcgaaagtcgggtttggtaaaagcatgaatcttgtgagaatttgtgatgttaggagtctaagatctgctaggagaagagtttcggttatccggaattcaaaccaaggctctgatttagctgagcttcaacctgcatccgaaggaagccctctcttagtgccaagacagaaatattgtgaatcattgcataagacggtgagaaggaagactcgtactgttatggttggaaatgtcgcccttggaagcgaacatccgataaggattcaaacgatgactacttcggatacaaaagatattactggaactgttgatgaggttatgagaatagcggataaaggagctgatattgtaaggataactgtccaagggaagaaagaggcggatgcgtgctttgaaataaaagataaactcgttcagcttaattacaatataccgctggttgcagatattcattgtgcccctactgtagccttacgagtcgctgaatgctttgacaagatccgtgtcaacccaggaaattttgcggacaggcgggcccagtttgagacgattgattatacagaagatgaatatcagaaagaactccagcatatc

SEQ ID NO: 125488 - DNA, 609 bp, Arabidopsis thaliana
ctgtcccgctccatcgcacccgctttgcttaccacatccatcattcattcatttcctttctttctttcttcttcttccgtttcttttgcctctttcttttgtcttcttccttctatttttttgtggctttaaatttattgggttttgttcttcttcttcttctatagccgtttcatcttcacaatagcatcttcttctttttttccctgtcaagatcctgaatcatcggatctagaaggaaactagagtttgtgaaatcagattaaatcttgtgagaaatctctgaaaaagctgcaggtttctatacttctgttagtactctaattcaaccgagaaagtcgaatacatacacacattcataacacttttgaggaagatgttaagtggaaacaatggaaacactgcaccaccggttttcatgaacgagaaccagttgcaataccagacaaacctacgatcgaatcagcttcacttgctcggaaacatgggaggtggatgcactgttgatccagtaaactactttgctaacggtaacctcgttccaatgatccgccctaacaaaagaggaagggaagccgtaagcctagtaacaacatccaaagacaacag

SEQ ID NO: 125489 - DNA, 761 bp, Arabidopsis thaliana
ccatttaaggaggccttcaaaagggcccattgccagtttttctttcattaagggtatggtcaaacccgccggtgtgtttcaccagaattttccaagtcttcccagggttgttctttgatgaaaagctttcagtacgtgttgcagacagcggttgggcttatatgttacccccacgcccatcgagtcagatggcgggttatgccgctcctaaggttgagtatggaagctacacttgtcagagcgacgtatttagccttggggttgtaatgtttgaactgccccctgggcgcagcccatttgcccgggcaaggccggggggccatcaaacccttgcccagtgggcgatcccccggcttcatgccatcgatgcgttgacaagaatggttgacccgtcattacacggagcgtatccaatgaaatcattgtcacgttttgcagatatcatatcacgttcactgcagatggaaccaggatttagaccgccgatatcagaaatagtccaagatcttcaacatatgatctaagatacacaaccttggactaagacgcagaagcaatagtttattgtcagattcttgttctttgtcctttgatgaatgaaagtatttcttttgtattataataacactttatgtatgttgttggctgtatgaaatgagctatgggatcatcattatgtaaccccaatcccattaccggctcaaacattattcaccaacctgatgcggccgcgaattcgatatcaagcttatggatacaat

SEQ ID NO: 125490 - DNA, 469 bp, Arabidopsis thaliana
ataaaactttggttcctccgaatttcgagttcttgttcttcccaaggcccctacttcggccctagcatcaaccattgtcgttttaaagctccaggttttcatggccaagaaagaagtaactatcgttgagatcttctgaaattaatcagtcttgaagtctctggagattgtcttataacatggactccatggatattgatcaaagtaacataggtgaatcgcctcaccttctgctgagaccagtaagtccattggaatctggtgaaggtttaccttatgctcctgagaattggcctaatcctggagatacttggcattggaaggttggaccgagaattagcggtaaaggctacttcgtggatagatacttatatcctcctaagtatcttcccggtttagatactgaaatattgcggaaaaataaggtgtttaagagcaggctctcgctccaacgatatattcgtgtaca

SEQ ID NO: 125491 - DNA, 649 bp, Arabidopsis thaliana
tagctcattcttgcctccaaacaaatattcctgacagaccagaccactcgtaagacagaccaaaccctaaactaaaagcatccacgttctttgtttttgtattgatggtctgatctcatatccatggagatggagaatcaccgccccggcagtttcacctacatgggccgcaaattcagcgatttaagtctcaacgatgactcctctgctttcagcgattgtaacagcgacagatccggcgaattccccactgcttcctccgagagccgtcgtctcctcctctcttgcgcctctgagaattccgatgatctcatcaatcatctcgtgtcgcatcttgattcctcctattcgatcgatgagcagaagcaagctgctatggggatcaggctcttatccaagaacaaacctgagaatcggatcaaaatcgccaaggccggtgcgattaagccgttgatttctctgatctcttcttcggatcttcagcttcaggagtatggtgtcactgcaatcttgaatctatctctctgcgacgagaacaaagagtcgattgcttcttccggtgcgattaagccgcttgtcagggctttgaaaatgggaacaccgactgctaaagagaacgctgcttgtgctctgctccgtctatcgcaga

SEQ ID NO: 125492 - DNA, 555 bp, Arabidopsis thaliana
  unsure (1)..(555): unsure at all n locations
nnnnnnnnnnnnnnnnnnnnnnnnnnnnnnnnnnnnnnnnnnnnnnnnnnnnnnnngaaatcccgggttggaccacgcgtccgcgcacgcgtccgcccacgcgtccggaacaaaagaaagagagatgcctcattcctcccacctgaggagcctatgaacaacaatagcaacgcaaacaaatcagaggatggaaagaatgatataaccgagttaacaaattccttgaagagcaagacgaaggagttgaaaaagcagaaaaagacacacgagagagtgaatgcggaggagtatattgctggtccatcttcttctgctgataaatcttccaagaagtccaaaaagattagagattaattctaaatcctgtttttttttaaaaaaaaaaaagagagaaaagattgaaacttatctatgctcaaaactgtaaaaacaagttaaatctttatttcagccgtcaagttaaaaaaaaaaaaaaagggcggccgctctagaggatccaagcttacgtacgnnnnnnnnnnnnnnnnnnnnnnnnnnnnnnnnnnnnnnnnacaa

SEQ ID NO: 125493 - DNA, 1138 bp, Arabidopsis thaliana
  unsure (1)..(1138): unsure at all n locations
atctttgtntgagcaagancttgttgattgtnacacaagttacaatgatggatgtggtggaggtcttatggattatncttttaagttcattattgaaaacggtggtattgatacagaggaagattatccttatattgcaactnatgttaacgtgtgcaattctgataagaagaacactcgtnttgttaccatcgatggttatgaggatgtncctcaaaacgatgagaagtctttnaagaaggctcttgctaatcaacctattagtgttgccattgaagctggtggcagagcttttccagctttacacatctggtgtgtttacaggaacatgtggaacatctttggaccatggtgttgtagctgtgggatacggttcagaaggtggtcaagactactggattgttcgtaactcatggggatcaactgggggagaaagcggatactttaagctcgaacgtaacatcaaagagtcatcagggaaatgcggtgtggcgatgatggcttcttaccctaccaaatcatcaggctcaaacccaccaaaaccgccagcgccttcaccggttgtttgtgacaagtctaacacttgtccagctaagtccacttgttgttgcctatatgagtacaatggtaaatgctatagctggggatgttgtccgtatgagtcagccacttgttgcgatgatggttctagctgctgcccccagtcataccctgtctgcgatttaaaggccaatacttgtagaatgaagggaaacagtccgttaagcataaaagctttgacacgaggaccagcgattgcgaccacaaagtctacaaacatgctagtgggcagcgcttgaggagagataatacaaacgaagaaccgatttgttttcagcccacgttatcaagattcagtcttttgtctttagacacttccaagttggatcatagtttgattactcttgtcaaatttaatgttatcttggatttgattttacttgatgtaaatgtttaagaagtaatctgatatttgcttccataaaaaaaaaaaaaaagggcggccgctctagaggatccaagcttacgtacgcgtgcatgcgacgtgatagctnnnnnnnnnnnnnnnnnnnnnnnnnnnnnnnnnnnnnnnnnnnnn

SEQ ID NO: 125494 - DNA, 1526 bp, Arabidopsis thaliana
  unsure (1)..(1526): unsure at all n locations
nnnnnnnnnnnnnnnnnnnggaaaggctggcccgcctgcaggtcccggcccggatttcccgggccgcccccccccggccgcacttgttctaaagatcaaagcttaagtgagaagcagaaaaaaaaatggcgaaatctcagatctggtttggttttgcgttactcgcgttgcttctggtttcagccgtagctgacgatgtggttgttttgactgacgatagcttcgaaaaggaagttggtaaagataaaggagctctcgtcgagttttacgctccctggtgtggtcactgcaagaaacttgctccagagtatgaaaagctaggggcaagcttcaagaaggctaagtctgtgttgattgcaaaggttgattgtgatgagcaaaagagtgtctgtactaaatatggtgttagtggatacccaaccattcagtggtttcctaaaggatctcttgaacctcaaaagtatgagggtccacgcaatgctgaagctttggctgaatacgtgaacaaggaaggaggcaccaacgtaaaattagctgcagttccacaaaacgtggttgttttgacacctgacaatttcgatgagattgttctggatcaaaacaaagatgtcctagtcgaattttatgcaccatggtgtggccactgcaaatcactcgctcccacatacgaaaaggtagccacagtgtttaaacaggaagaaggtgtagtcatcgccaatttggatgctgatgcacacaaagcccttggcgagaaatatggagtgagtggattcccaacattgaaattcttcccaaaggacaacaaagctggtcacgattatgacggtggcagggatttagatgactttgtaagcttcatcaacgagaaatctgggaccagcagggacagtaaagggcagcttacttcaaaggctggtatagtcgaaagcttagatgctttggtaaaagagttagttgcagctagtgaagatgagaagaaggcagtgttgtctcgcatagaagaggaagcaagtacccttaagggctccaccacgaggtatggaaagctttacttgaaactcgcaaagagctacatagaaaaaggttcagactatgctagcaaagaaacggagaggcttggacgggtgcttgggaagtcgataagtccagtgaaagctgatgaactcactctcaagagaaatatcctaaccacgttcgttgcttcttcttaaaagtcatatagcttgaagctaagagaataggagtcgagagagtttataactgatactgttttgagattttatgtttgtcaagatcaagaacgtctgtggttatttctggttagttctgaaactctttttgaacccaagtttatctgtctctggtgaccaagcgaccacgataatcataaacttcaatcccggtaaaaaaaaaggtcagaaantggccaggtcngattcattattaatggntnggnngtgtnanaaaaagcctnaatggcatttngggtcaaagggccccnntaataacatttccccnttttaagg

SEQ ID NO: 125495 - DNA, 545 bp, Arabidopsis thaliana
ttagtttcagctagtaaagatgagaaaaaggcagtgttgtctcgcatagaagaggaagcaagtccccttaagggctccaccacgaggtatggaaagctttacttgaaactcgcaaagagctacatagaaaaaggttcagactatgctagcaaagaaacggagaggcttggacgggtgcctgggaagtcgataagtccagtgaaagctgatgaactcactctcaagagaaatatccctacccacgttcgttgtttcttcttaaaagtcatatagcttgaagctaagagaataggagtcgagagagtttataactgatactgttttgagattttatgtttgtcaagatcaagaacgtctgtggttatttctggttagttctgaaactcttttgaacccaagtttatctgtctctggtgaacaagcgaccacgataatcataaacttcattcgcgttagaaaaaaaaaaaaaagcgcggccgctctagaggatccaagcttacgtacgcgtgcatgcgacgtcaagctattctatagttcgcctaaat

SEQ ID NO: 125496 - DNA, 595 bp, Arabidopsis thaliana
  unsure (1)..(595): unsure at all n locations
ggcgatcgagacaaagaaaaaagttgctggagattttgaagatgaccgaaccaaagagggggcgtgttcaatgggatgaagctaatatagtggagattgaatcgaacaaacctgttaggcagaagattactgaaccaaagacaccataccacccgatgatggatgatgatggttctttgtctcctagaggaagagcgtttgatgaatgtgttgatgatatgcaacgagctgaagaactgaggaatgttctgaatgatgcagcagcttcttccagtagaaatagtagccagggttctggtggtggtggctggagctcgtctgatgaagaagaagaagaagcagatccaatggatcaagatgaagaaggttctggaagtggtaaaaatgaacgtttcaacgcacacagaaaagcacatttccggcggggtttcggaagggttaaggacctnagatncncagggtcatnctttnaagnagaaggggaagggggnttattgtncaaaaggttgtaaatccggggcaaccaacaaaccttanggcaccccttaangggggaaccaaagggtttgttcacccaaacgggttnagggcgntc

SEQ ID NO: 125497 - DNA, 442 bp, Arabidopsis thaliana
gcgatcgagacaaagaaaaaagttgctggagattttgaagatgaccgaaccaaagaggaatcgtaaaacagatatattttctactacacccattgaaaaaggaaatggaagagggaggtcttattgtgttaatgttcatggattttcatattccagcagaattgtttaactggggcgtgttcaatgggatgaagctaatatagtggagattgaatcgaacaaacctgttaggcagaagattactgaaccaaagacaccataccacccgatgatggatgatgatggttctttgtctcctagaggaagagcgtttgatgaatgtgttgatgatatgcaacgagctgaagaactgaggaatgttctgaatgatgcagcagcttcttccagtagaaatagtagccagggttctggtggtggtggctggagctcgtctgatgaagaa

SEQ ID NO: 125498 - DNA, 528 bp, Arabidopsis thaliana
aggtctctacgactcactattgggaaagctggcacgcctgcaggtaccggtccggaattcccgggtcgacccacgcgtgcgcttcaggtaggttcgttgctcactcacgtcacgccggagaagacacatcggagatcgacaaatcgattcagagagagagagagatagcaattttcttctgtagtgttactttctgagagagtctggagagatcggtgttgagatttgggtaaatggaaacgagggagagagatctagaacgattgatcccgatgcataaatccggagcttctcctcgcgacgtcgttttgtctgttccgccgtctcctctcgcttctccgatccacgtcgccggcaaagaggcgatttacaaagtcattagaagctgggcctccaaaaagttcatgaccggatgtgtcattctgctaccaatcgctgtcacattctacttcacgtggtggtttatacatttcgttgatggattcttctccccgatctatactcatctcggaatcaatatgttcggtc

SEQ ID NO: 125499 - DNA, 449 bp, Arabidopsis thaliana
cccacgcgtccgaaagttctaccaagtactccttctgattggcaaaacgaggatgcaaattccatgggaaggagttctatgaatgatgagaattcaacgcagcaagatggcacaaccatgagagaaacccagagcatgctattggaaagaatagctagtgaaatgaatcggctcaagttctatatggctcatgcacagaacctgcctttcattgagaacatggagaagaggattcagagcgctagtgtgttattggatgctagcctaggtcattgcttcattgatgggctaaacaacagcgatacaagtgtcctttacaactgcttacgtgcatatgctgccattgataacaccaacgctgcagaagaaattttccgtacaacgattgtagctccatttattcagaaaattattacacatgaaacaacaacgaatgctgctggaacatc

SEQ ID NO: 125500 - DNA, 825 bp, Arabidopsis thaliana
tgagatacgattacgaattgattgaaactaccttgtcactgtgtacaaaggcaatttacagtaatggcagagactaaaccattgataggtcttacgtgggaaccaaagcttccaggcttatccttagacacgaaaacatgttccacttcaagcaaaagagttgagagtcacgaaagcagttctctctggatgtctaagtcagagcttgttgatggtctttgtcttcctcctaatgatccaaagaagattaataagatgattaggaaacaaatcaaagacacaactggttcaaactggtttgatatgcctgcaccaacaatgactccggagttgaaaagagatcttcagttgcttaagttgagaactgtaatggatcctgctgtacactacaagaaatctgtgtcacggtcaaagctagctgaaaaatatttccagattggtacagtaattgaaccagctgaagagttctatggaagattgactaagaagaatagaaaagcaactcttgctgatgagttggtttcagatcccaaagtttctcagtacaggaagcgtaaagttaaggagattgaggagaagagtagagctgttacaaataagaagtggaagaaaaagggaaaccaaaccacgaacaaaaagcaaagaaggaactgatttacttttgttagaatatgattatagttttgggatacttattttctgttttgattagaatattgatcatagtatcgggacacactttctgttggtgctatagattcaccttaccctgtaatgactcttgttgttttataaaaataaattaaaggatttctgttatcggtt

SEQ ID NO: 125501 - DNA, 526 bp, Arabidopsis thaliana
  unsure (1)..(526): unsure at all n locations
atgatactgccnnnnnnnnnnnnnnnnnnnnnnnnnnnnnnnnnnnnnnnnnnnnnnnnnnnnnnnnnnnnnnnnnnnnnnnccacgcgtccgagaagagacttcaggttcctaccttgttatggctgctcgaatgtcagggatctcaagcaaattttcttaatcgggatatcccagatgcaggtgtagagacggaaaaaaacggtgaccctgtggtttctgtgaggttctggaagctttgtgttgatcctcatttactacacgaagctttcttgttagaaaattttgacatatttgaatggtcaaaatctaaaccattggaagattggagcgatatgtacagagaagtaatcaggaagaatgagctctatgtgccatgcaatcaagatggtcgaagtagtaatgaggtggcttcacttgcaaaccacgcttcaaattcttcaccaaaagctgcggtaactgccaatgaaaactctgcgttccagaaccccaaagaaatccataagaggaccggggagcttataga

SEQ ID NO: 125502 - DNA, 539 bp, Arabidopsis thaliana
  unsure (1)..(539): unsure at all n locations
cnnnnnnnnnnnnnnnnnnnnnnnnnnnnnnnnnnnnnnnnnnnnnnnnnnnnnnnnnnnnnnnnnnnnnnnccacgcgtccggttatgggtcaggtagagaaacggccgatttctaccatcgtcttcatcgttgctatgcaaaaggaagctcagcctctgatcaacagattacgcctcgttgaagaagttaatactccgtttccaaaagaggtgacttggattatgtttaagggaatgtataaagacttgaacatcaatatagtgtgtcctggaaaagattcaactcttggggttgagagtgttggcacagttcctgcatcactcgtgacttatgcttccattctagcaattcaaccagacttaatcattaatgcgggaaccgctggtggctttaaggccaaaggagcatgtattagcgatgtttatgttgtctctactgttgctttccatgacagaagaatacctgttcctgtccttgatatatatgngtgttggtatgcggaacaccttccccacacccaaccttataaaggagct

SEQ ID NO: 125503 - DNA, 558 bp, Arabidopsis thaliana
  unsure (1)..(558): unsure at all n locations
tgatacttcnnnnnnnnnnnnnnnnnnnnnnnnnnnnnnnnnnnnnnnnnnnnnnnnnnnnnnnnnnnnnnnnnnnnnnnccacgcgtcccgcttctaacggcgcctcatcggtcgtcaagccttaccttctcatcccagctttgatggcatggcttgggggttctggttctctgattggtatatgggtggcttctttctgcaaaatattctttccgagcaacatctatctccggagctgctattcttgatgatggtaaaacccctcagaagaaaaatgtactgtttgttatcgcacatcctgatgatgaatcgatgttcttttctccaacaataaactacttagcttccaatgcttgcaatcttcacatgttatgcttgtccactggtaacgctgatggtatgggaagcattaggaacaatgagctgcatcgggcatgtgcggtgctcaaggttccgcttcaacagttaaagattctgaaccatcctaatttgcaggatggttttggccaattatggagccacgatttgctaacagagatcatcgaagaagaagtca

SEQ ID NO: 125504 - DNA, 659 bp, Arabidopsis thaliana
  unsure (1)..(659): unsure at all n locations
cnnnnnnnnnnnnnnnnnnnnnnnnnnnnnnnnncgcctgcaggtaccggtccgctatacaggggtcgacccacgcgtccgggcgacggagagaatcggagaagaagatgggaacggcggtgggacagtggctagaggaagcgcttgttgacctctgccgcaaaccagagaccggtttgaatttcgatcgtgatgtcatctccggtttagtctcctattgcgatcttgctcagcctgtcgatgccaaggaatatctcgacaatattattggaaaagaaggcaaaagcatcattgcagaatatctacagcgaagaggatacaaagatccatctaaccatgtagcagccagttcaggtccagaactgcaaatgtatgttaagccaaaagtggataatggtgcttctagtggaaccaagaaaccgtttaaaacaccaaaagagggaacatcttctaatcagcaagctggaactgggaaattaacagctccggcccgcaagttnatccttnggngganaanagttnggaaggtgattttttttnccgaggggttaangttcantnagtgttttgcaagnaaaccgtttnatgccaantcgtggaccccttgtggcactctttngtttgggaattgttcgccaantgtaggcttnntttcgntc

SEQ ID NO: 125505 - DNA, 562 bp, Arabidopsis thaliana
  unsure (1)..(562): unsure at all n locations
atgattatttcccagctctcnnnnnnnnnnnnnnnnnnnnnnnnnnnnnnnnnnnnnnnnnnnnnnnnnnnnnnnnnnnnnnnccacgcggccgcccacgcgtccggcagcggatttggtgttgggtggagatgaaggagatgagtgtactttcccaaagggttacatgaaaaggcaagcaattttctcatgcattacatgtacaccagaggggaatgctggaatttgcactgcttgttgcttatcttgtcatgatggccatgagcttttggagctgtggactaagagaaattttcgatgtgattgcgggaactcaaagtttggaactttggcttgtaagcttctcccgagcaaagatatagaaaactctgaaaattcttacaaccataatttcaaaggcttgtactgcacttgcgaccgaccttaccctgacccaaatgtggaagaacaagtacagatgattcagtgttgtctctgtgaggattggtttcatgaggagcatctcggtctcacaccttcagacagtgttggtagccagattccaagggatgaggaaagtgag

SEQ ID NO: 125506 - DNA, 586 bp, Arabidopsis thaliana
  unsure (1)..(586): unsure at all n locations
accacgcgtccgagcgagatgaggccggagatagttctgttcggcgactcgatcacggcgcagtcttttaggtccggcggttggggatctgctcttgccgacgcttactctcgcaaggctgatgttgtggttcgaggctacggcggctacaacacccgatgggctctcttcttgcttcatcacatcttccctctcggctcttcgtctcctcctgttgctacgacgatattcttcggtgcaaacgatgcagctctcaaaggaagaaccagtgatagacaacatgtgccggtggaagagtacacagataatgtcagaaagattgttcagcatttgaaggaaatgttcacctacaatgctaatttgtgcttataactccaccaccaattgatgaagctggacgtcaaagttatgcaggatcaatctacggtgagaagctntgaaagagcctnaggggncaaacggancaacaggggtttttccaacattgtntncaattgnccnggacnggtttcagtttgtacttatggctaggtcaggaccatntttnagnaagncctagtntggtcnttnggctaggattggtngc

SEQ ID NO: 125507 - DNA, 907 bp, Arabidopsis thaliana
  unsure (1)..(907): unsure at all n locations
nnnnnnnnnnnnnnnnnnnnnnnnnnnnnnnnnnnnnnnnnnnnnnnnnnnnnnnnnnnnnnnnnnnnnccacgcgtccgcccacgcgtccgcccacgcgtccgcccacgcgtccgtacggctgcgagaagacgacagaagggggagtgtaagtcactcgcttctcatgtaaactataatatattgaatctcctctctcttctctttttcgcaactttcacagagaggtagtttttgatgtttgccggccggaatattttccggtgaatagccgtcccgagtggctcggacttctgcccggtatctttcagctttgatagtggagatagccggtttacgtctggcaaacccaatttctatgaatggttttggccgggtttttatcttttctcgccgtcgatcggtttataccgattgcttttcacttttatttcaataatttctacagatctgagttaggaattgatttttaggtactagatcctaaaaattaataattctggcttgtgatttgaaacacctcgatttgcgggaaatctatcaagcggttattcttggtcgaaagattgaagaatattccggaggcatataccatgcccctattgtcggggactttaggagttccgttcagcgtcatttctgttgtaaccaaacaatttccggcaagttccgaccatatttctgacccgcatcttgcgcttctgacggcaaggttatggccctaatttctataatgctaatcgcctgtgttcaacttaattctaagccaccccgctttccgatagaccccccgatacgattctgagctgagaagtactaaagcactatgaaggctccatgccctgtccccatctactagcctatccctatgtttcgaaataatgcttgggagaatactaaagaacaa

SEQ ID NO: 125508 - DNA, 806 bp, Arabidopsis thaliana
  unsure (1)..(806): unsure at all n locations
gtttttnatgtttgccgaccggaatattttccggtgaatagccgtcccgagtggctcggacttctgcccggtatctttcagctttgatagtggagatagccggtttacgtctggcaaacccagtttctatgaatggttttggccgggtttttatcttttctccccgtcggtcgggttataacccattgcttttcccctttattccaaataatttctccagatctgagttaggaattgatttttaggtactagatcctaaaaattaataattctggcttgtgattttggaaacctcgatttgcaggaaatctatcaagcggttatttcttggttgaaagattgaagaatattccgatgcatattaccattcccttatgttgtgttctttaggagttccgttcagtgttatttaggtggtaaacaaaaaaatttcgtgcgatgtttcgacgatattttcttccccggattctgggcttctcgacggcaaggttgatgtcgttaaatttctgatgatgacttatcggcatgtgttacagttgaattctaaagtcaacacgtgttttcggataagagtccaacgttaagaatctttttgctgtacatgttactctaatgggctattgttgggctccaattttcttgctgcacaatcgttgtaggctttaagtcttgtatcttttgtttaataaaattcactcgggaaaaaaaaaaaaaaaaaaaaaaaaggcgacccgctctagaggatccaagcttacgtacgcgtgcatgcgacgtcannnnnnnnnnnnnnnnnnnnnnngtcattc

SEQ ID NO: 125509 - DNA, 577 bp, Arabidopsis thaliana
  unsure (1)..(577): unsure at all n locations
cnnnnnnnnnnnnnnnnnnnnnnnnnnnnnnnnnnnnnnnnnnnnnnnnnnnnnnnnnnnnnnnnnnnnnnnccacgcgtccgctcatcttctctggcagaacagaaaacgatgactaacttctcccgatccaaatccaccggaactatcgggttcccggagtttaaacccactcgacccggtccagacaaatacgagaacatccacaacgatgacgacgagtacgaagaaggacatagcactacgagtacagactactacgacgcttcaacgccgttgagctcacacgcgtcaagatccgggaacgggtccggctcgggtcagttaacggtcgtagaccttcttgcggcggttctgaggaagtcgttggtgatgtcgtgtgcgatggagagaggggaagatgacgtggtggcgtctatggatataggttggccgacggaggttaagcacgtgagtcacgtgacttttgatcggttcaatggttttcttggtcttccttctgagctcgaaccggaggttcctcctcgagctcctagcgccagtgtaagtgtatttggagtatcggcgaagtcaatgc

SEQ ID NO: 125510 - DNA, 758 bp, Arabidopsis thaliana
  unsure (1)..(758): unsure at all n locations
atgatacttccnnnnnnnnnnnnnnnnnnnnnnnnnnnnnnnnnnnnnnnnnnnnnnnnnnnnnnnnnnnnnnnnnnnnnnnnccacgcgtccgcggacgcgtgggtttaatcgttgggaaaagtttgatgatacggagtggacaattcttggtgtagaaggagaatctgagagagagagagtcatggaagctctgaaaaccgcaacttttagccctatgtcggtgttatccgagaaaagatcagaaccacgaaagcctttctcgctccctaacctctttccaccaaaatcacagagaccaatctcccaagaaagcttcttgaagagattcaatggtggattggctcttctaacttctgttctaagcagtgcaacagctcctgctaaatccctgacgtacgaggaagctctgcaacaatctatgaccacttcttcatcttttgattcggatggtctgattgaagggatatccaattttgtcacagacaatcctttggttattgccggtggagttgctgcattggctgttccatttgttctgtctcaggttctgaacaagaagcccaaatcatggggagttgagtctgctaagaatgcttataccaagttgggtactggatgataataggctcagttgcttgacataagagctactgctgatttcagacaagtgggcagtcctaatattaagggtttgggtaaaaaagcggtttctactgtttataacggtgaagacaagcctggtttcctgaagaagc

SEQ ID NO: 125511 - DNA, 616 bp, Arabidopsis thaliana
  unsure (1)..(616): unsure at all n locations
nnnnnnnnnnnnnnnnnnnnnnnnnnnnnnnnnnnnnnnnnnnnnnnnnnnnnnnnnnnnnnnnnnnnnnnnnnnnnnnnnnccacgcgtccgcggacgcgtgggagagaagacatttttatacaaaagagtttatcattatataagtttcaaactttgaagatatggcatcggcttttagatcatccacgaggttgattcttgtattaggtatactgattttgtgttcggtttcttctgtccgaagctggagcaaagaaggtcatattcttacttgtagaattgctcagaatcttttagaagccggaccagcacatgtagtagagaatctgttaccggattacgtgaaaggagatttatcagcattgtgtgtgtggcctgaccagatccgacattggtacaagtatcgttggaccagccatctccattacatcgacactcccgaccaagcctgctcttacgaatactctagggattgtcatgatcaacatggattgaaggatatgtgtgtggatggagcaatcccgaatttcacggctttaagtttcagcattntcgggtgganggnccanctngnncgtaggtantanatnnccgaggcccttttnttcttgnc

SEQ ID NO: 125512 - DNA, 534 bp, Arabidopsis thaliana
tgatactccaggtctctacgactcatatagggaaagctggcacgcctgcaggtaccggtccggaattcccgggtctacccacgcgtgcgggtttattgtttactgaactagaccggccaaatggtcagccttgttttgatacaaaagagttcgatctagtaaggaacatgatgcaagctgttgatgaagaacggtatgatgaagccgctgagtggagagacaagcttggcaagtttcaggcaaaacgcgggggtggggaaatacacatgacagctcgcagacgggagtgtttttaatacataatttatgtaaataataaagaagccattgccatttgccagaagttgtgatcatgaagaaaaatatctctctcggtatgagatatacttttctctatcgacacttgggcacgtagttgattctcaaggaacgggcaaaataaaatgttattttataattgtagggggatggggaatggatctctccataatcttaaatttgttgaataactgagggggagggtacgccttgctc

SEQ ID NO: 125513 - DNA, 444 bp, Arabidopsis thaliana
ggtttattgtttactgaactagaccggccaaatggtcagccttgttttgatacaaaagagttcgatctagtaaggaacatgatgcaagctgttgatgaagaacggtatgatgaagccgctgagtggagagacaagcttggcaagtttcaggcaaaacgcaaattaaggaaatacacatgacagctcgcagacgggagtgtttttaatacataatttatgtaaataataaagaagccattgccatttgccagaagttgtgatcatgaagaaaaatatctctctcgtatgagatatacttttctctatcgacacttgtgcacgtagttgattctcaaggaacggacaaaataaaaatgttattttataattgtagcgtgatggtgatgtgatgtgtacatatacattaatcttctgtaataatatatggtaagcctacgctttctc

SEQ ID NO: 125514 - DNA, 977 bp, Arabidopsis thaliana
  unsure (1)..(977): unsure at all n locations
cnnnnnnnnnnnnnnnnnnnnnnnnnnnnnnnnnnnnnnnnnnnnnnnnnnnnnnnnnnnnnnnnnnnnnnccacgcgtccgcggggagaaaagaagggagaagaacctgaacacccggtgaatcgaaattcatgactcggatcttagcccccacgtctccgcggactgtgagctccactcggtcgttcaaggaagcatctctgacgagatcggcggcgtgggcttgcataagattgactctgtcgacggagatggtggcctcaacgttcttcgtactgtgcgcatcctggtagaatccaggcaccgtcgccctccccagtggcatgcctttgtacatgaccgtgaagctggactcaccgtacctgattccgaccttgtttgggttgacggcggtgaagagcatccggatggtgagggagagggaggcggtggttgcatccagaacagcgcttgggttggagatccccatgtacaccactgccacttgctgcagatcgaactgcggcttcttcggcttcaccgccagtattacgatgagcaccaccgccagtaccagcagcgccaggaacgcgaacagcaagaacaagcagcagcagcatcccttcagcgacgccgacgacgacgatgagtagctccggtaatacggctgctggttctgagcagcaatcggatcgccgttgagacctgctctagaactagaaggaggaggaggcatagtaagtgaaagcaggaagctccctctcccttttcactcttcttctgtaatagcggtgttgaaattatacacaacaagagagagagaccctgtttccgtgtctggactctagtattattgacaaattaatgtttcacaattttaaccaccaataaaaatatcaataatgtaaaaaaaaaaaaaaaaagnnnnnnnnnnnnnnnnnnnnnnnnnnnnnnnnnnnnnnnnnnnnnnnnnnnnnnnnnnnnnnnnnnnnnnnnn

SEQ ID NO: 125515 - DNA, 528 bp, Arabidopsis thaliana
ccagctccctacgactcactatagggaaagctggcacgcctgcaggtaccggtccggaattcccgggtcgacccacgcgtgcgtccaagcagcttctctttggccatctcttcttgaagctgctttcttcctcaaattcttttttttccagattcttctcctttcttcttccttcttccttatttcgatttcgaattttgaattttctcaatggctcaatcgtgtcttaaaattgttcgaatcaacaatctaaggaacagagtgaatcgtcggattttgattctccgacgattcacacggttgttatggagtagaatcgttgcttgtactcctggcaaatctcggagatatctcttgctttctcgcgctcttccgtctccgactggttctcgtccttctccttctccgatccccgccgtcgatgtcgtcgtcggtggtggtggtggtggtggtgagtttgttcgtcgttcgtcggttgtttacgataatgataacagtcatcggagatcggattctgatttggtttct

SEQ ID NO: 125516 - DNA, 522 bp, Arabidopsis thaliana
ccagctccctacgactcactatagggaaagctggcacgcctgcaggtaccggtccggaattcccgggtcgacccacgcgtgcgcccacgcgtccgcctccttcttcgtcttgttaataagtccaatttgctcggatttcgcttaactttatcgcatttcctaaattgccctcgtcaccactttcacactctctctctccctatggccaccgtcgcgcttcttaggtctctccgccgccgtgaactccacgcagctcacatctctgcatataaattcagttctgctagcgccggcgggaggacgacggagctccgactacacggagtcaaagatatcatcgccgttgcgtctggtaaaggcggagttggaaagtcttcaacagctgtaaacttagctggtgcattggccaacaaatgtgagctgaagattggattgcttgatgcggatcgctatggcccatccgggcctatcatggatgaaggtctctcaaaagcctcaagttaaccaagatatgaagatgat

SEQ ID NO: 125517 - DNA, 443 bp, Arabidopsis thaliana
tttgcactctttcaagttcacaaggtgaatctgatcttactttctggtccacctctaagcacttttaaatggagaagaaaggccagcatggtacatatgaatcaatgatgactcatcatccgatcctctgtatcattgctttatctgtacttttcatagcaatcgacccctttcacatgagtccaatcgggggtcgtgagttcaaacccgtgaagcatgaggttgctccatataaggaagtcatgggaagctggcctagagacaaccttagtcgactgggtaatcatgggaaactggagttcgtggaccaagtctttggtccagagtcattagagtttgatagtttaggtcgtggtccatacacagggttggctgatggaagagtggttagatggatgggtgaagcaatcggatgggagacattttcggtggtaacatcaaaa

SEQ ID NO: 125518 - DNA, 747 bp, Arabidopsis thaliana
  unsure (1)..(747): unsure at all n locations
gctannnnnnnngctgagagcccacaaaaatctttggatgataatgtcgcgtccggcagaggtttagatgccaaagacagtggtgatattatcttggaacttagaaatgagctgatggaaaagtccaataaactgagtgaaatggagtccaagctaaatggtgctatggaagaggtatccaatttgagcagagagttggaaacgaatcagaagcttctcgaagaatcccagatgaattgtgcgcatttggagaactgcttacatgaagcaagagaagaagcccagacccatctttgtgctgctgatcgtagagcttctcagtatactgcacttcgtgcatcagctgtgaagatgcgaggtctctttgaaagattccggagctctgtctgtgctggtagtgggattgctgattttgctgactccttgcgaactttggctcaagctttagccaactccgttaatgaaaatgaagatgatggtactactgagttccggaaatgcatccgagtcctggcagacaaagttagcttcctctccaaacaccgggaggaattattggagaagtgccaaaatcttgaagccacaagtgaacagacaagacaggatttggaggaaaagaaagagctggtgaaaacattgtacactaaacaccaacttgggaagcaggcaaataaggaaaagatatcattccgtcgtcttgaagtccatgagatagcagcatttgtgctaaacccaagcaggcattac

SEQ ID NO: 125519 - DNA, 553 bp, Arabidopsis thaliana
  unsure (1)..(553): unsure at all n locations
atgannnnnnnnnnnnnnnnnnnnnnnnnnnnnnnnnnnnnnnnnnnnnnnnnnnnnnnnnnnnnnnnnnnnnnnnnnnnnccacgcgtccgaatatctaacccatagtttttctttatatataatgtgaatatggaaaacacaagacttcatcttatattcatcaatcttattcttattttctctctgcagttttcaaaaactttctcactgttatctgcgtctcttttttggatcaatggcaaacgctgaacgtatgataacgcgcgtccacagccaacgtgagcgtttgaacgaaacgcttgtttctgagagaaacgaagtccttgccttgctttccagggttgaagccaaaggtaaaggtattttacaacaaaaccagatcattgctgaattcgaagctttgcctgaacaaacccggaagaaacttgaaggtggtcctttctttgaccttctcaaatccactcaggaagcaattgtgttgccaccatgggttgctctagctgtgaggccaaggcctggtgtttgggaatacttacgagtcaatctccat

SEQ ID NO: 125520 - DNA, 230 bp, Arabidopsis thaliana
tgatcatcttgagatggtgatgaaactcttaagatcctcctcttctgcttctctttttatttgccgtgtcataatgaaaattgcatattcagatgggcctgtgtgttgagtaagtggacctgtgtccagagagttgattgagatgggcttcattttaggcccacatgtttatcgatcaggttcattctcttcattatatgaaagtgtcctatatcgcaacattctcttcc

SEQ ID NO: 125521 - DNA, 506 bp, Arabidopsis thaliana
  unsure (1)..(506): unsure at all n locations
nnnnnnnnnnnnnnnnnnnnnnnnnnnnnnnnnnnnnnnnnnnnnnnnnnnnnnnnnnnnnnnnnnnnnnnnnnnnnnnnnnnccacgcgtccgcggcgatctagtttccggctatcaattcagttttttcagctaaaggtttgatttttcgaaattcgaatttctggggaaagtagaactcgcactcgcacttgctcctggacaacgtgagagatagaatcgaatcgaaaaggacgaaaaaatgtcatatgaaagcaaaggtttttgggttatgaagaataatgagcatacaagtgaggaagattcagtgtatgatcattcaacaagagatgattcaaagcgtcctcatccttggtttgttgattcttctcgttcagagatgttcccaaacaagaaacaagctgtgcaagatcctgttgtaggattaggaaaatcaaatgttggtcttcctttgtgggaaagctcatcggtttttcagtctgtttctaaccagtttatggatcgg

SEQ ID NO: 125522 - DNA, 503 bp, Arabidopsis thaliana
  unsure (1)..(503): unsure at all n locations
cgaatcaaaattcaaatggcgggctaaacttcgagtcagtctctctctttctctctttggtgatggtacaaattagcacacatcgctggtggagacacaacgatagagactatggcagtctctgggtctcatctgtgagaaagatattcatgaacagcgtcttaaaatcgattctttcatcgcttctcctttccggagatcgatgaactctttagtggagcgagctcaagccactgctcaaagccaagtggactaatgaatttgaaagcggatctttagnagaggcagaggntgagcctagttaaaagttttggcaagtgaaaancccgtaaaagnggcancgggaaaattgggggtaagnggattnccatttttttgnaacacnaattcttggggntttaaggaccttttgnaggaaattttcaagcttccaggaggccnaangaagggttgntttttttnaggantttttnccccaccanttncaaagnccttttcaaaat

SEQ ID NO: 125523 - DNA, 574 bp, Arabidopsis thaliana
  unsure (1)..(574): unsure at all n locations
atgatatgccnnnnnnnnnnnnnnnnnnnnnnnnnnnnnnnnnnnnnnnnnnnnnnnnnnnnnnnnnnnnnnnnnnnnnnnccacgcgtccgcggacgcgtgggcggaagctgagctctaatcctgatcggagatggcgactagcgattctgaattcaattctgatcttcttctcgctcacaagcttcccgagacgcgttacacctacaatgaaagagatgtagcaatctatgctttgggaatcggcgcttgtggccaagatgctgtggattccgatgagctcaagtttgtgtatcacagaaatgggcaggatttgatccaggtcttaccaacttttgcttcactattcacacttggatctttgacagaaggactggatttgccaggttttaaatatgatcctagtctcttgttgcatgggcagcagtatattgaaatatacaggccattaccttccaaggcttccttaattaacaaagtaagcctcgctggtttgcaagataaaggtaaagcagctatccttgaattaggaaccngaagttacggggaagggtcagggggactgttatgcatg

SEQ ID NO: 125524 - DNA, 751 bp, Arabidopsis thaliana
  unsure (1)..(751): unsure at all n locations
taggtgcactatagaagagtcttgacgtcgcatgcacgcgtacgtaagctcggaattcggaatcgaaaacgctcttaccggtgagaaaacctgtaaatggcaaccgcaaaaccgctggttacaagctttgggttctaatcgctgttctactcttggcctttggttctatgttaaccggttccgtctctctcaaaggaatcggtttgttccattctgctgacggcgttaacgcattctctttcggcgatgatctcgacgttctggaaattgaagagagagagaaagtggtgagacagatgtgggatgtgtacggacgctccggtggcgttaaggttcctcggttctggcgagaagctttcgaagcggcgtatgagtttctcatcagtgattccgccgccgttcgaaatgctgccgtttccgatatcgcaaagttgtctcttgttcgttttgttaagtcagagtctacttcggcccagcccaatcttcattgacttgtgaagcccatgaggatcacataagattttaattgtatataggattaaatattaaataccgaatatgtagccttaataatgtattgagaaaataaagaaatgaaaaagcatgaattgcttcgttcaacataattgacaaccaaagttgtgttctcnnnnnnnnnnnnnnnnnnnnnnnnnnnnnnnnnnnnnnnnnnnnnnnnnnnnnnnnnnnnnnnnnnnnnnnnnnnnnnnnnnnnnnnnnnnnnnnnnnnnnn

SEQ ID NO: 125525 - DNA, 494 bp, Arabidopsis thaliana
  unsure (1)..(494): unsure at all n locations
ttcacattgatcctgtgttttataaaaccgaattttgattcagagatcagctcaaaaatgaagtttgatgaatcgaaaacgctcttaccggtgagaaaactctgtaaatggcaaccgcaaaaccgctgggtacaagctttgggttgtctaatcgctgttctactcttggcctttggttctatgttaaccggttccgtctctctcaaaggaatcggtttgttccattctgctgacggcgttaacgcattctctttcggcgatgatctcgacgttctggaaattgaagagagagagaaagtgttttgacatattttggattttttccttctctcctattgttttatatttctattttttattctaaatttggggggggggggnnnnnnnnnnnnnnnnnnnnnnnnnnnnnnnnnnnnnnnnnnnnnnnnnnnnnnnnnnnnnnnnnnnnnnnnnnnnnnnnnnnnnnnnnnnnnnnnnnnnnnnnnnnnnnnnnn

SEQ ID NO: 125526 - DNA, 516 bp, Arabidopsis thaliana
acgactcactatagggaaagctggcacgcctgcaggtaccggtccggaattcccgggtcgacccacgcgtgcggaattcttgacgtcttctactccattttccatcaatacccatttcttctatcgctctcgtttccaagaaaaaagagggttttagagagaagcaaaactcaaatggcgacgaacatcggaatgatggatagtgcatacttcgtcggaagaaacgagattctgacttggattaatgatcgtcttcacctcaatctctctcgcgtcgaagaggctgcatctggtgctgtgcaatgtcagatgcttgatatgacatttccaggagttgtgccaatgcacaaggttaactttgatgcaaagaacgagtacgatatgatacaaaactacaaggtcttgcaagatgtgttcaacaagctgaaaattacaaagccattggaaattaacaggcttgtcaaaggccggccactggataacttggagtttctgcaatggctgaaacgtttctgt

SEQ ID NO: 125527 - DNA, 846 bp, Arabidopsis thaliana
  unsure (1)..(846): unsure at all n locations
nnnnnnnnnnnnnnnnnnnnnnnnnnnnnnnnnnnnnnnnnnnnnnnnnnnnnnnnnnnnnnnnnnnnnnnnnnnnnnnnnnnccacgcgtccggttttgtttttttatgataaccatagatggagaagatgaccttcttcttacagtattcaacaaatacagaacaggactaaacctaaaaaccttaacaaagaacgaaaacgcagaatgtctcgcagacgaagtcgtagaccaactaaagaaccaaccctgcacaaacactaataactcagctccagtccctggaaataacctcctcgctaaatgcagtctcaacacaaccgtagtcagagacggtgtgatcatgcaagtctgttttcctaagcatgataagaaccctgacttgagcaatttcaacagtgtcgtactcaagaacttgaatgattctaagatcactggaattggtattggttctggtgatatttgggttgttgtcatcctcactacaaacacaccggaaggcggctattctcttttaacaactactaactcaggagcttatgcattcggagttaatggccttgtttcttcaagtttcttgtttcttctctttttgtttcttcatgttttgagtccccttttttgggtgttttttatgtcacctcgttgtctttggttcttgaatatgttgtgattatggtgagcaaatcgcctttcttaaagtttcctcttactaattgtgattgagtaaatacgaaaaatccttttataagccccaaaaaaaaaaaaaaagnnnnnnnnnnnnnnnnnnnnnnnnnnnnnnnnnnnnnnnnnnnnnnnnnnnnnnnnnnnnnnnnnnnnnnnnn

SEQ ID NO: 125528 - DNA, 390 bp, Arabidopsis thaliana
  unsure (1)..(390): unsure at all n locations
aaaaaaaaaaacctctgcatcaatggcgatttccaaactccttctactctgtcttctctcagtctttctctcccttcatcgtcttgttctttccggcaccgatggagaagaagaccttcttcttacagtattcaacaaatacagaacaggactaaacctaaaaaccttaacaaagaacgaaaacgcagaatgtctcgcagacgaagtcgttagaccaactaaagaaccaaccctgcacaaacactaataactcagctccagtccctggaaataacctcctcgctaaatgcagtctcaacacaaccgtagtcagagacggtgtgatcatgcaagtttgtttttcctaagcatggttaagaaccntntnttngggnantttnaaacagnngt

SEQ ID NO: 125529 - DNA, 529 bp, Arabidopsis thaliana
  unsure (1)..(529): unsure at all n locations
atgatactgccagctacnnnnnnnnnnnnnnnnnnnnnnnnnnnnnnnnnnnnnnnnnnnnnnnnnnnnnnnnnnnnnnnnnccacgcgtccgtccctcccgagattggggagctgaagagactaacccatttgtacttgagcttcaatagcttcaagggagaaattcccaaggaactagctgctcttcccgagcttcggtatctataccttcaagaaaaccgtctcattggtagaattcctgccgaactggggactctgcaaaaccttcgccacctagatgttggtaacaaccatttggtgggaactatacgggagctcatccgttttgatggaagtttcccagctcttcgcaacttgtacttgaataataactatttgagtggagggattcctgctcagctgtcaaatcttacaaacttagagattgtttacctgtcttacaacaaattttattggaaacattccttttgccattgctcatattcctaaactgacatacctgtaccttgatcacaacccaatttacc

SEQ ID NO: 125530 - DNA, 777 bp, Arabidopsis thaliana
  unsure (1)..(777): unsure at all n locations
aattgatccggcgagaatggcgagcagcaatgagtatgaggaaggtccgggggagagggagagtgggtacgacccaaatatggtgccggattcggtgaagtcgttcgtgtcacacatgtacagacacataagggataagaacgtgtacgagatccaccagatgtgtgagacatcgttccagagcatatcggagcgtctgttcaaggacacgccgtggccaagtgtggaagcgattgctccttacgtagacaacgaccatgtgttctgtcttctgtaccgtgagatgtggtttcgacatttgtatgcgaggttgtctccgacgttgaagcagaggattgattcttatgacaactattgcagcctctttcatgttgtgttgcacggcgtagtgaatatgcagttgccgaaccagtggttgtgggatatggtggatgagtttgtctaccagttccaaagtttctgtcaattcagagcaaagctcaagaacaaaacagaggaggagattgcattgctcagacagcacgataaggcctggaatgtctatggcgtgctcaacttcttgcaagcacttgtggagaagtcttgtatcatccagatccttgagcatgacaaggatggccttgagttcactgagactgatggctacgatttcagcggtggcagcaacgtcttgaaggtcctcggttacttcagcatggtcggtctcttncgtgttcactgcctcctcggtgacttaccacactgctctcaaatggttgcagnccatttnncatcact

SEQ ID NO: 125531 - DNA, 539 bp, Arabidopsis thaliana
  unsure (1)..(539): unsure at all n locations
nnnnnnnnnnnnnnnnnnnnnnnnnnnnnnnnnnnnnnnnnnnnnnnnnnnnnnnnnnnnnnnnnnnnnnccacgcgtccgcccacgcgtccgcttttatgttgcgatggcgattgagctctgtgacgttcatcaactcacgcatttttgttcatcaaatcattccattatattgatggaattcgtttatcatccaccgtcctcaacctttcaaccgccggtggtcaacttgaacgagtttggtgaagcaaatcggaaagtactgtgaaccaaatcagagattggtgtgaagccatggtccaatcgctttctaaaggtatgaatctaaccgtttaattagacatcaccgaagaaactcgtcccctttccgacggtgctcaacatctgcgacttcgatgaactaaatcagagactttgatgaaccaaatcgttttctgaaggtatgatgctatctgtttggtgtgtggttgtttgatttgtttctggagatttaaattctgttgatgtgattgaactttgaaagtcagatgttgttattg

SEQ ID NO: 125532 - DNA, 561 bp, Arabidopsis thaliana
  unsure (1)..(561): unsure at all n locations
atgatatnnnnnnnnnnnnnnnnnnnnnnnnnnnnnnnnnnnnnnnnnnnnnnnnnnnnnnnnnnnnnnnnnnnnnnnnnnnccacgcgtccgagcttatagtgcacaaaagactgatttgaatataagtttgactgccattggcctgttgtggactttgactgatttcgtagcaaaaggactccaccatgggtctctagtggagaaaggatcgggattcaataatgcagattccactccacagcaaacaaatggcgaggacggggaaaagcatatgggtagcaattcgggcaagtcagattatgaagctccaatacaagtggtcaatcatgagaaattactgttcttagtcttttcgttaattcagaaacttgttgatgacgaacgaccagaggtcaggaattcagctgtcaggacattttttcagattttgggaagtcatggaaacaaactttcaaaaagcatgtgggagggattgtctatggaactatatcttcccaatgttggatggcgcctttcacaaggctgcaacatcatcgaaggacgaatggcaagggaaag

SEQ ID NO: 125533 - DNA, 852 bp, Arabidopsis thaliana
acgacccacttagggttagctggtccgcctgcagggaccggtctcggaattcccgggtcgacccacgcgtccgcggattctgtagctctttcaatacgactgcggagatcagagccaattatttggttatggcgtctctgatctcagatattgaaccgccgacgagtactacttcagatctcgttcggagaaagaagagatcctctgcttcatccgccgcatcgtctcgttcaagcgcatcttccgtctccggtgagattcacgcgcgatggcgatcggagaagcaacaacggatctactcagccaaactgttccaagcgctccaacaagtccgcctcaactcttccgcctcaacatcatcatctccaacggctcataaacgaggaaaggccgtccgtgaagccgccgatcgagctcttgccgtttccgctcggggaagaacactctggagcagagcgatcttagctaatcggatcaaactgaaatttcgtaaacagagacgtcctcgagctacgatggcgattccggccatgactacggtggttagtagcagcagcaacagatcgagaaaacggagagtgtcggtgttgagattgaataagaagagtataccggatgttaaccggaaagtacgtgttctaggccggttagttcccggttgcggtaaacaatccgtaccggtgattctagaagaagccactgattatattcagggctcttggagatgcaaagtgaggagcccatgaacctcttttagtttcagctttctttttccttcctaacgggttcaagcttcctttcaacccgattttggatgaagggttaaaaaattcgtcctttttttaaatttct

SEQ ID NO: 125534 - DNA, 558 bp, Arabidopsis thaliana
  unsure (1)..(558): unsure at all n locations
gataaattcggattctgtagctctttcaatacgactgcggagatcagagccaattatttggttatggcgtctctaatctcagatattgaaccgccgacgagtactacttcaaatctcgttcggagaaagaagagatcctctgcttcatccgccgcatcgtctcgttcaagcgcatcttccgtctccggtgagattcacgcgcgatggcgatcggagaagcaacaacggatctactcagccaaactgttccaagcgctccaacaagtccgcctcaactcttccggctcaacatcatcatctccaacgggctcagaaacgggggaaaggccgtccgtaaagcccgccgatccgagctctttgccgtttcccggtccggggaagaaccacttttggggcaagagcggttcttaggttaatcgggtccaaaacttgaaatttcgtaaaccaggggccggtccctngagcttccggttggcgnttccnggccattgnctttcgggtgggttagttnggagnaggaaccagntntgnggaaaccgggngnntttntggttttta

SEQ ID NO: 125535 - DNA, 565 bp, Arabidopsis thaliana
  unsure (1)..(565): unsure at all n locations
atgannnnnnnnnnnnnnnnnnnnnnnnnnnnnnnnnnnnnnnnnnnnnnnnnnnnnnnnnnnnnnnnnnnnnnggggtggttctttagagagagagagatttataagcttctctttgggcattacaattttttttgtgaacatagaaacactcaaaacttcaaaccaaaaaaaataaatgggagaggaagagaagaaaccagaagcagcagaggaaaagaaaatggaagagaagaaaccagaagagaaaaaagaaggagaagacaagaaagtggatgctgagaaaaaaggagaagattctgacaagaagcctcaagaaggagaatctaacaaagattccaaagaagattctgctccggcggcgcctgaggctccagcaccgcctcctccgccgcaagaggttgttcttaaggtttacatgcactgtgaaggatgtgctagaaaagtccgccgttgtctcaaaggcttcgaaggagtggaagatgtgatgactgattgtaaaacggggaaagtggtggtgaaaggtgagaaagctgatccattgaaagtattagctagagttcag

SEQ ID NO: 125536 - DNA, 523 bp, Arabidopsis thaliana
  unsure (1)..(523): unsure at all n locations
nnnnnnnnnnnnnnnnnnnnnnnnnnnnnnnnnnccctgcaggtacccgtcccgaattccccgggtgggccacgcgtccaccaaaatctctctcatttcgccatagctgagagcttcttctactttcccttagcttcttttttccttcatttttgttctacccttgcgaatctctgaaatgaaccctcaagctaatgaccggaaggagtttcagggagattgttcggcgacgggagatctcacggcaaagcacgattcagctggaggaaacggaggtggaggtgctaggtataagctgatgtcaccggccaagcttccgatctcgaggtcgactgatatcacgattcctcctgggttgagtccgacttcgtttttggaatctcctgttttcatctccaacatcaagccagaaccttcccctactactggttctttgttcaagcctcgaccagtgcacatttctgctagctcaagttcttatacaggcagggggttccatcagaacacctttactgagcagaag

SEQ ID NO: 125537 - DNA, 555 bp, Arabidopsis thaliana
ggctttcatgagctcaattgctctcttaaaatctgtggtaatctctcttccattgctattcttcaagtaaataatgccctttgctcctctctcaacaccatttatcttataaaccctagacactccgccgaatttttacccttctccactggtcatccgcgttttttttccgggtctaaggtcaccggaaaaatggctttccggcgagtgttaaccactgtaatcctcttctgctacttactaatttcatctcaatccattgaattcaaaaactcccagaaaccccacaagatccaaggaccaatcaagactatagtcgttgtagtcatggagaatcgctccttcgatcacatcctcggttggctcaaatcgacccgacccgaaatcgacggattaaccggcaaagagtcaaatcccctcaacgtctccgatccaaattccaaaaagatcttcgtctcagacgacgccgtcttcgtagacatggatccgggtcactcattccaagcgatccgagaacagatattcgggtccaacgatacatccggcgacccgaaa

SEQ ID NO: 125538 - DNA, 571 bp, Arabidopsis thaliana
  unsure (1)..(571): unsure at all n locations
ctcttgtacttaagcatggtggttaatcagaagatatccggccttgcatccgctatgaacgccaaaatcatcggttcaggagagagatcgatggtcttggcacacggtttcggaggcgaccagtcggtttgggataaaataataccggtcttgtcccaatccttcaaagttttggtctttgactggcttttctctggagccattaaagatcaaactctctatgacccttcaaagtataactccttagacgtcttctctgacgatctcattgctcttatggaggagttgaagtttggccctgtcgtgttcgtaggccattccatgtcgggggtgatcggttgtgctgcttctattaaaaggcccgacttgtttacaaatcttctccttattgctgcttctccaaggtatataaacactgaggattataaagnagggtttnagtcaaaancattgacacgnccatnncagcaattggtccaacacggagcttggcggtaattcccccatcggggcgnccggancnnttttcggccaaggccnaaagccctaanagtaaccaacannnttnngc

SEQ ID NO: 125539 - DNA, 689 bp, Arabidopsis thaliana
  unsure (1)..(689): unsure at all n locations
acgcaactatcacgagcctctctgcgntattatgactcntcagngnnncncngannngggaaagaatcaaacttttgaatgtgaaggcgcttctttcgnctcaagatctctctttatctctctatctgtttgattggaactcgagcattggttataaacgaaaccatagtctatggcagctcagaagttcatcatttcgtgctaaatctgtgatatttcattgttcatcgtccttaagacagtcaccatctaatgtggaggagatagatgataatccttcggtatcattagaggatgaatcagcacatgcgatgcaagtcaagtggtctgattttaggattcttgatcgtgttagcattggtcatggcggcagggctgatgagcttgtgtttgaagctatagttcaggttccagatagccctttgtttaaccaaggagttgttcttcggaaattgaataccactcgagctcaaatacgaggaagaagagctatagaagtttttaagaagctagttcgtcggagacttctctaccattcttactcaatgcaagttcacggttatatcaccaataacttaagcgatgatcagtactcatttacccttgtacatgggtgccatggaagtttctcgattaggcactggcttcaacaatctgattggattccaacattagaagctactcttgca

SEQ ID NO: 125540 - DNA, 508 bp, Arabidopsis thaliana
ttttgatcatcagtgccaacattgtgaaaaggcatccgataaatcattcattagaaaggctgcttgggtacccgtggatagaagagaaagtgcggcaaggttcactgtctctcccatggtggatactataattttgttgattgtacgttcgagaaatggacagtggattatgcagcaagcagaggtaagaagaaggaaggcagtggaatcgctgttaaagaccggtcagtttggtcttgacttacgactatctcaatcttcatagagttttttttcataatttatagagaaacatcaaaccccttttggttgggattatcatgtgtttgttccacttgtgtgttgaagtcattttccttcttctgtcttattgaggcagggactaatgtttgttttatctttcagttgtttcgtttaaattccacatttgtgcaatgaactggttggtgtttctttaagatataatcattttgccactgtagtgagatcggaggcatgcattacagag

SEQ ID NO: 125541 - DNA, 470 bp, Arabidopsis thaliana
  unsure (1)..(470): unsure at all n locations
gtttcccccaagctcttattcgcccccccttaaggaaaaaatggtacgccctccaggttcccgtccgggaatttccccggggcgccccccgcgtccggaaacatcaaacccccctttggttgggatgtatcatgggtttgtttccccttgtgtgtggaaggcattctcccccctccgtcttatggagcgcaggggactaatgtttgttttatcttccaggggtttcggttaaattccccctttgtgcaatgaactgggggggtgtttcttttaagatataaatcattttgccccctggagtggagatcgggaggcatgcattacagagaaaaaacaaaaaaaaaggggcgcccgctctagaggatccaagcttacgtacgcgtgcgtgngacgtcnnnnnnnnnnnnnnnnnnnnnnnnnnnnnnnnnnnnnnnnnnnnnnnnnnnnnnnnnnnnnnnnnnnnnnnnnnn

SEQ ID NO: 125542 - DNA, 580 bp, Arabidopsis thaliana
ccggctactatacgactcactttagggaaagctcgtacgcctgcaggtaccggtccggaattcccgggtcgacccacgcgtccgggaagatttgatcggacgaggaagctgagaaaaaaacaaaaacgacaagagattcattcaaacttgcacgccaacgccggattattcccggtgtatacgtattttatacggttctatttaggaagaagaagaagaagaagaagaagaagaggaaattttaaggaaagagtttttgtttgaattggaatggagggtgttttcttaaaaatgtcggctggttggagtatctccgatgataccggtgggaccttcttctttcatatgcgccatcggaggctctgttgaggagaaatcaacggctgcttctctgccgcgttgggtttcccttcgtcgtcttcgtccgcttgagtttcttcggatcggtggtaagagagaggaaaagggaacggtaagagacgacgacgccgttttgttggagagaagggaccggaaccgcaacgaaaacgataacggaaactgggttttgaaaattttggaggttggatcaatctggaaa

SEQ ID NO: 125543 - DNA, 595 bp, Arabidopsis thaliana
  unsure (1)..(595): unsure at all n locations
atgatattccnnnnnnnnnnnnnnnnnnnnnnnnnnnnnnnnnnnnnnnnnnnnnnnnnnnnnnnnnnnnnnnnngtcgacccacgcgtccgcttctcgtcgatgccaagtttggcgcagacttcgaagtttatggccgtggttgatactttgtcgacgcattcgccggatgaggagtatattggagagagacaacagccgtcgatttggacaggagatgcggagattgttgaagcgttttatggatttgcggcagagatcggacggatagagaaagagattgagaaaaggaacgctgatcctgaccgtagaaataggtgtggggctggtgttttgccttatgagttgttggttccgagttctgagcctggtgttacgtgtagaggtgtacctaatagtgtatctatataattaagaaggaaattatttataagaagtaaatgtagaaagcacataaataatttcttccaaaccatgatatataatatataaagataattttcgtaaaaaaaaaaaaaaagnnnnnnnnnnnnnnnnnnnnnnnnnnnnnnnnnnnnnnnnnnnnnnnnnnnnnnnnnnnnnnnnnnnnnnnnnn

SEQ ID NO: 125544 - DNA, 723 bp, Arabidopsis thaliana
  unsure (1)..(723): unsure at all n locations
tgattattctcnnnnnnnnnnnnnnnnnnnnnnnnnnnnnnnnnnnnnnnnnnnnnnnnnnnnnnnnnnnnnnnnnnnnnnnccacgcgtccgcccacgcgtccgggcacgattgttcagagttcgatttccattttcgggtcgaaaggttgattttatttggattttggatggtagattcagttcctaaacataggaaacttgaatctcagagtttttcgagttagggataagagaaagaaacacagttggagttatactgatgaatggaggaggctcgagtagtttgcgttcagcattgtcctattgtgtgcagcaagtacgaaactatgactatcatcactacctctgtctccttgaactcccaactgagatgcgtaaagcagcatttgctctccgggcttttaatgtagaaaccgcaagagccatggatgttgcatctgatcccaaaatcggcttgatgcggttactttggtggcaagaagcaattgacaaactctacaccaaaaagcccataaaccatccagctgcacaagctctgtcttgggcaatatcagaacataacatcagtaaaccttggctaaaacgctcagttgacgctagaatccgagatgcccaaagagaagtagacgatataccagagagcatttgcggantaggaggaaatacgcagaaggacacagttttccactcttctgtaccaatacacttccaaggcaggcg

SEQ ID NO: 125545 - DNA, 650 bp, Arabidopsis thaliana
  unsure (1)..(650): unsure at all n locations
cnnnnnnnnnnnnnnnnnnnnnnnnnnnnnnnnnnnnnnnnnnnnnnnnnnnnnnnnnnnnnnnnnnnnnnnccacgcgtccgctctctctgtgtgtcttctacaaagaccagatctctcatctgtgttttgttggtttatctcgaccaaagcccacacgtcacgttacgttaggttacaaaacaagttttttcccttataaaaaaaacattgataaaatcgaaaaatcaattcctattttgtttccaaagcaaatctatatatctattacccatctcgaattcgaccgaacccatgttctaatctccttcgcaacattggaaatctattttaaaaatccgttgagatatagttatataagtagtttggtgactcaattaggtttacacacaaagacatgggatcggctggtgtagcgagttcttcttctgatgttgcgatctcagctttgcgtgagaagcatgagaaggaagtagagaatctaacattaacgacacaacctttgaatacattgaagttgtttgttgaggctactattcagtacatcaagcgatccatatcgtatctattggctcatggaggttggtttatactgataaccactttgttagtggtatctggtggtttgcttgttactgttgatggacctc

SEQ ID NO: 125546 - DNA, 745 bp, Arabidopsis thaliana
  unsure (1)..(745): unsure at all n locations
nnnnnnnnnnnnnnnnnnnnnnnnnnnnnnnnnnnnnnnnnnnnnnnnnnnnnnnnnnnnnnnnnnnnnnnnnnnnnnnnnccacgcgtccgcggacgcgtgggatttccttactatatcggatttcgaccaaatggctcaaagcggagcagctttcgctagacaattcaagaaagatgatccagtactcgacatggtcgatagagagatcctgaaacgtggccgttacagagtcactcctggcgcttggtgctcgagccacagtagctggtggacagatccttgctcggagtgggatgaagtaaaccattgtcaaagctggaccctcaagctaagaagctagacgaaacaataacgaattttcttgatgatttgaattcacaatcgaatcaatgcaagtgattatacgacacacgagactacattgttttcagtctctgtaaggttaaattctttgggcaacaacacagtggctgctgtatttatacgaggagaaggagaaagagaagagaaaggagatatttttattctctttcccagattttgtaattcctttgttaaagccattagagaacttttgttcgcaaatttgataaacctttgttcctctgttgtatcttagttaattgaaagttaaagatctaaaaaaaaaaaaaaaaaacgggcgcnnnnannnnnnnnnnnnnnnnnnnnnnnnnnnnnnnnnnnnnnnnnnnnnnnnnnnnnnnnnnnnnnnnnnnnnnnn

SEQ ID NO: 125547 - DNA, 480 bp, Arabidopsis thaliana
  unsure (1)..(480): unsure at all n locations
tttaacaatgtcattctctctgaagaatgctacttccacacggtaatctgcaacgcacccgagttcagtaacacgacagtcaacggggacttacgatacatgatatgggacagtccaccaaaaatggaaccacattttcttactgtatcggatttcgaccaaatggctcaaagcgganagctttcgctagacaattcaagaaagacgatccagtactcgacatggtcgatagagagatcctgaaacgtggacgttacagagtcactcctggcgcttggtgctngagccacagtagctggtggacagatccttgctcggagtgggatgaagtaaacattnttaaagctggacctcaagctaagaaggctagncgggaacaataacggatttttnttnnntggttttgaattcaacaatcggntncanttnaagangtttttcggccanncgggggtttcnattttttttnaaccctctaaa

SEQ ID NO: 125548 - DNA, 530 bp, Arabidopsis thaliana
tataacaagtattctggaagaaagaaaagagagagaaaatgtcgtccagtaaaatccaggtacgagggcagccacttcttagggttccggcaagaaaccaccgtatgacacacttggttgtttgcggcgtttccacaaaacgccaccaccgtgaaatcaatgcactcagcagtaatagtggtccatcgttggattcggtcccaacaagaaccgacaagaggcagtttcttcgtggtgacggtaacggtaaattcgggaggttcggtgggaagtttgtaccggagacattgatgtctcgcctgatagaacttgaagacgaatttaactttgttaggtgcgatcacgaatttcaggaggagcttaccacagcgttaagagactacgtaggaagagaaacgcctctctacttcgcccaacgtctaaccgaacactacaagaacatagttccaaccatcgaaggtggaccagagatatacttgaaacgggaagatcttagccactgtgggtctcacaaaatcaataatgctctc

SEQ ID NO: 125549 - DNA, 412 bp, Arabidopsis thaliana
tgtctatccattcatttttttttttcatttcttcctccagagagagagagagaagccacaacaagaagaagaagaagaagaagaagaagaagaagttctggaatagtcatcatcttctctgtttctaggctttgtttatttgtctctaaagtttctggattcaacttctgaagaagatagtagtagtccacaagaaggatcttctttaccagaaagttgatttggtcagagccaaggaagatgggttacatgtgtgacttctgtggtgaacaaagatctatggtgtactgtcgatccgatgcagcttgtttgtgtctctcctgtgaccggagtgttcattccgctaatgcattgtccaaacgacattctcggacacttgtctgcgagagatgcaatgctcagcctgctactg

SEQ ID NO: 125550 - DNA, 441 bp, Arabidopsis thaliana
caacacgtccgcggacgcgtgggcggacgcgtgggcaacaatatccacattcgtcttcttttgagtattacatccaacgaaacgtctctttctttctctctgataggcaacaatggcgcagaggaagatgattgtgtttcccaccaagaatgaattgtccgaagcaatggctgagtacactgccaatctctccgccaagttcatcaaagagaaaggccttttcaccgttgttctctccggcggtgacctaatcgattggctctgcaagttggtgcaacctccttatattgattcaatcgaatggccaaaatggcacgtcttttgggtcgatgagagggtttgtgcatgggaagatccagacagtaactacaaactcgccatggagggttttctctctaaggttccgattccggataagaacatctacgcaatcgacaagca

SEQ ID NO: 125551 - DNA, 481 bp, Arabidopsis thaliana
  unsure (1)..(481): unsure at all n locations
accaaatctaatcgccgacatacattgaactcaaatccgctcagaatctccgacaatcagttccaatccatggctcagaatcaacaacctattttccagaccaaacctccagaacaatttgtgcaaatacctatcaacatcgagcgtgattcttcaaccacacgcatgaaccaaaccggaaacacaatccggaaaccaaaccactggccaaccatcaccatctcaatcatcttcgtcatcatcggtcaatccatagcgaaactcctcgaaaacttctactacgacaaaaccaaccgaagcgaatacaacgaaaaccgtcaaaacgatggcgtttggactcaatctcttctccaaactgttggtttccctctccttcttctcccgttcctcatcttcatcaccaagaacaaacgcaaccaccatcaacaacctccgatcacttncgattcaatccacttaaaaatccttagctgtgatctac

SEQ ID NO: 125552 - DNA, 500 bp, Arabidopsis thaliana
  unsure (1)..(500): unsure at all n locations
cnnnnnnnnnnnnnnnnnnnnnnnnnnnnnnnnnnnnnnnnnnnnnnnnnnnnnnnnnnnnnnnnnnnnnnnccacgcgtccgcacggctatggtgggaaagattattgataggggtataaagactctccagagagaaggggttgttattgaccgagaaaattggatgagtgaggctgaggcatgtgagagagttggatctgtcgctacatgccaggccattattaagaacacaataggtattggagtggaagaagaggatagaaagagaacttgggttgctgatgcagatgagtgcaagaagaggggttccattgagactcgcaagagcaatatacgcccatgctcttagtgtcttcttgaccaagaaaggtatctggcttaaagcggcgcagcttgagaagagccatgggagtcgggagtcccttgatgccttgttgcgtaaggctgtaacatatgtcccgcaagctgaggttctctggctcatgggtgccaaagaga

SEQ ID NO: 125553 - DNA, 816 bp, Arabidopsis thaliana
  unsure (1)..(816): unsure at all n locations
ggactctgagagaaactcttcttcttcactgcaaacgcttttgagacaaagttcgtcacttcgatctgaattataacacttcgtgcgagaatcgaaataatcgaaggttcaagatgggttggatcggagaaactgtagattctatcaaatctattcagattcgtcagcttttcactcaggccatcagtctagggatgattgtcacatctgctttgatcatatggaaagctttgatgtgtgtcactggaagcgaatctccggtggtggttgttctctctggaagcatggaacccggttttaagaggggggatatattgttcttgcacatgagtaaagacccgattcgagcaggtgaaattgttgttttcaatgttgatggtcgtgatattcccattgtccatcgtgtcattaaggttcacgaaagggaaaatacaggagaagttgatgttctaacgaaaggtgacaataactatggagatgacagacttctgtatgctgaaggacagctttggcttcatcggcatcatataatggggtcgtgctgtcgggttcttgccttatgttggatggggtgcctatttatcatggccagaaaagcctatcatcaaggatattcccatagggggcattgggtttacccggttataaccgggcaaaggggttttaggccttttggggaagggggtggcctcttccaggggtgaaaccccccttaaaggcctttggtttttccaatgggaaaaaaggaaaggcnanccatttaaaacccnggtttttgtgggtaggaaattttaaagggggggccccntttccttc

SEQ ID NO: 125554 - DNA, 923 bp, Arabidopsis thaliana
  unsure (1)..(923): unsure at all n locations
atgatcctgccnnnnnnnnnnnnnnnnnnnnnnnnnnnnnnnnnnnnnnnnnnnnnnnnnnnnnnnnnnnnnnnnnnnnnnaccacgcgtccgattctcttctccactgaaacgcgtttgaaggagaagggtcaaagggatctgatcctatcactttcgctgggaaaaacacgaaatcgaaggaagaatcaatcatgggtttcatcggagaaactgtagattccatcaaatctatcaagatccgtcaagttctcactcaggctatcactctcggtatgatcgttacatctgcattgataatttggaaggcattgatatgtgtcactggcagtgaatcaccagtggttgttgttctctctgaaagtatggaacctggctttcagagaggagatatattgttcttgcggatgactgatgagcctattcgagcaggcgagattgttgtgttcagtgttgatggtcgtgaaattcccattgttcatcgagcaatcaaagttcatgagagggaaaatacaggagaagttgatgttctaacgaaaggtgacaataactatggagatgacagacttctgtatgctgaaggacagctttggcttcatcgacatcatataatgggtcgtgctgtcgggttcttgccttatgttggatgggtgactattatcatgacagaaaagcctatcatcaagtatattctcataggtgcattgggtttactcgttataacgtcaaaggattgantcttttggaaaggaggtgggctctgcagagtgcaaacccttaaaggccttgtaatttcaatgggaaaaanggaaaggccaaccaatttaaataccccggtttttgtgggtaaggtaattttaangggnggncctccttncccggcnacctaaattttaacngngggaaggtaattttnggtgngc

SEQ ID NO: 125555 - DNA, 514 bp, Arabidopsis thaliana
  unsure (1)..(514): unsure at all n locations
attcccattgttcatcgagcaatcaaagttcatgagagaggagatactaaagcagttgatgttctaacaaaaggtgacaacaatgacattgatgacattggtctctatgctgaaggacagctttggcttcacaggcatcatatcatgggcagagctgttggattcttgccttatgttggatgggttactattatcatgacagaaaagcctatcatcaagtatatactcattggtgcattgggtttgctcgttataacatcgaaagactaagactacataacaagctggtcgttggtaaggaggtagcttctgcaacgctcgggtcatcatctttgtagccatcatctttgaaactgtagaatcatataaacctcaacttataattatagacacttttatctttaaatcagctacgttttgtgacaaaaaaaaaaaaaaagnnnnnnnnnnnnnnnnnnnnnnnnnnnnnnnnnnnnnnnnnnnnnnnnnnnnnnnnnnnnnnnnnnnnnnnnnn

SEQ ID NO: 125556 - DNA, 555 bp, Arabidopsis thaliana
  unsure (1)..(555): unsure at all n locations
cccacgcgtccgcggacgcgtgggttacagtttccgatctatccaaatcatagattcttttatcttcacaatctgttagtgtctcgtagctctaattaggtaataactaatgggagtgtcaaagaagaaatcaggtgagattagaggagatttaatcccagggttaccagaggaattagcaattgagtgtttggttagagttccttttcagtttcattcttccatcaaatctgtttgccgatcatggaaatgcgttatctccagtcgttcttttatcaaggaacggataggttttggtaaagctgaatctcttctctgccttgttcaacctctgacttcaccaccgtctccggcgatgatggaaggtggtgagatgagtcagaagaagaaagaggaagaagaaggcgagtctcagatgacgcagcagctgctacaaccgcgtattactggaccgccctttacggttaggggttttacgaacgtgggcacgggaccgtgtgggtcctaacggcttcctttttttcgnatcgttcgttaaggcnggggaagtnttta

SEQ ID NO: 125557 - DNA, 547 bp, Arabidopsis thaliana
  unsure (1)..(547): unsure at all n locations
acgaaatcaaaatccaccattcttttctcttccgagattttagaagtttgcgacgatgatcaggctctctaagcgctccgtctctaccctcctacgctccggtaaccaaagcttccgtatcgccgccgcagcttccacctcccgttcttccccatctgccacggatgtcaagagaagtgacactgaatcgagatggtactcatctttaaccaatggacaatctaagaatagtgggtcatttgctcaattgaacatgaaaaccaattggtttatgggataccggaacgaatccagtgcagcagcatcagattcttcctcacaagctcctccaccggctgagaaattcgagtatcaagctgaagttagtcgcctcatggaccttatttgtcaacagcttatacagcaattaaggagggtgtttttnngggggttattagnaatcnaagtaattnatttgggttaagcttcggttattttnggngttaccanccttagttnnnaaaaaatgnctcctgancttngatatnnggnttttttagcaaagggg

SEQ ID NO: 125558 - DNA, 881 bp, Arabidopsis thaliana
  unsure (1)..(881): unsure at all n locations
gccaggcctaattctgactctcttagggaaagctggtacgcctgcaggtaccggtccggaattcccgggtcgacccacgcgtccggctattgctgctgctgaagcggagaagaagaagaataagaataagaagaagagttataattggacgacggaggtgaagagtgagagagagaatggtgaggtttcgcatacttatatcatcaaggctactactggaggagagaaaaagaagaaacatgaggagaaggagaagaaagagaagatagagactaagagcaagaagaaggagaaaactcgtgttgtggtgattgaggaggaggaagaagaagatgatgagtcgtcagaacatggtgctatcgttcttaggaaggcgttttccagaaggaatggagcagttaggaccaagaaggggaagaacaaggaaatgccacctgaatatgcggctgtgatgatccagagggccttcaaagcttatttgattcgtcgctcaaaatcattgcgtgctcttcgtgatcttgctattgcaaagactaaacttaaggagctaagagcttctttccacaacttcagctaccgtcgcctgattgctcgtgatggagaggagcgtcagaaattctcagagaagatcattgtactcctcctcactgttgacggcatagagggagttgatgtgatggttcgaggagcgaagagatcaatggtggnttgagcttgaagaattttaagatgtggtaggcccgnaaccgaaggggaaatcattntncgatnnganganggccatttatatgccaacagtttanccaaagaatccaangggngtacccagatttcaantcttaaacggtgagnttttggattncnctttntttttacnaggt

SEQ ID NO: 125559 - DNA, 759 bp, Arabidopsis thaliana
atgcctacgcgcgagctctaatacgactttatatagggaacgctggtacgcctgcaggtaccggtccggaatttccgggtcgacccacgcgtccggagaagatcattgtactcctcctcactgttgacgccatagagggagttgatgtgatggttcgaggagcgaagagatcaatggtggatgagctggaagcaatgttagatgtggtagacccgcaaccgcaggggaaatcattgtcgatgagaagaagaacatttgatatgccagacagtttgatccgcaaagaaatcgcagagggagtgactcagattgtgcagatgcttgaaacggaagaagaatgatggaatggagcactgtgtgtttgtgactcaggggctgtttttgttgttgtttgtgactgggaagaactgatcagcctctttagtttgattagtgttctgaatgtttctaattatgcagacaaaattaataatgagagtggcttgaagaagagattggtgtctcgctcgcatcagtctcatctctcaaatcttgtctcttcttagtctgtttctgtttgtcaggttatgtaatccctttgtgttcccaaacttgtagactctgttttgtcaaattgcttatgtttttggttttgcttatttctactccatcatgaattagaaattgattaaaaaaaaaaaaaaagggcggccgctatagaggatccaagcttacgtacgcgtgcatgcgacgtcatagtaatctatagttcatctcaat

SEQ ID NO: 125560 - DNA, 991 bp, Arabidopsis thaliana
  unsure (1)..(991): unsure at all n locations
agcagacgaggtttatcaagagaatgtntatgtccctnacaaaaagttccattccttcaagaaagtagcccgctctatgggctacggtgagaaggatctttccttagtctcgtttccaatctgtctccaaagggtactatggagagtgtgggaaaagaggatggttacatggaggttactggattcacttctgatgtaagagagcagatatacaaaatggcttctgtgaatctttgttccaacatctctggtcaaattcttgctagcctcatcatgagcccacccaagcctggtgacgactcctatgaatcatacatagcagagaaggatggaattctctcatctttggcaagacgtgcaaagactcttgaagaggctctgaacaagctagagggagttacttgctatagagcagaaggagctatgtatctattcccttgccttcaccttccacaaaaggcaattgcagctgctgaggcggaaaagacagcaccagacaatttctactgcaaacgccttctaaaagctactggaatagtcgttgtccctggttctggctttagacaggtacctggaacatggcatttcaggtgcactatacttccccaagaggataagattccagcgattgttgatcgtctaactgcgttccaccagagcttcatggacgagttccgcgactaagcattctgttttcaagatccctctatagattatatgagtaataataagaaaaaggtcccatgccgtttctttttcatcgactttgtgtttacagaagctaagatgtgagagcattagttagtgctctctttcttattcactttttgttctgttctctttatagtgaaaacccgtaatataaattgagagagtttcttataaacggttagtcaacacgtaatctcatcaagaaaacacaagattgaaccattgttgaattccatgttcaaagtttcgatttcacagaatcattttcgtttgaaaatat

SEQ ID NO: 125561 - DNA, 1078 bp, Arabidopsis thaliana
  unsure (1)..(1078): unsure at all n locations
nnnnnnnnnnnnnnnnnnnnnnnnnnnnnnnnnnnnnnnnnnnnnnnnnnnnnnnnnnnnnnnnnnnnnnnnnnnnnnnnnnnccacgcgtccgcctctctttcgtcttcttcagattctctctgacggttgttaaaaatccgattataacgacgacgacacccaaatcctcacaaatatataattattaatttaagcttctctgtcaaaataaaaaggagtcatgacgactctttcttctataaatctctctatacctcctcatttgcttcctagcacgactaacacttgttcttcttcctctgcaacctcttgttctcctcccaggtcttcttcttttgttcttcattcccctctttcgtttggtcaccggagattacccattagcaagaaaagcaagctccgcttctgtggagtgattacaaaggaagctgtttctgggtccaacgatatgactattactcaagtcagagaagatgacgaatcggagattgatgcgccgcttctcgatcctgagtcgctctctaagcctaggagaattgctctctttgttgagccttctccctttgcctatgtatccggctacaaaaacagattccagaatttcattagatacctccgtgaaatgggagacgaggttatagccgtgacgacacatgaagggtgtccctgaagagttctatggagccagagtcatttggttcaagaagcctttcccttgcccttatttaccaaaaaggcgccacttctcgctttgcgcttaggtcccaaggatcaatctcttgaaattgcaccgggtttaagccttgccgacattatacacgcttcatctcccggagctatggtctatggtgctctggcaatagcaaaaatgctatctgaaccaatagagaagccttaccacacacacgtccctggatacatcccaagatacacttttagggggggggaaaaccaatgtggtctataataaggcgccctcacagagcggatgaacttaccttaagatccttccggtgcccatgggaaaaggaacctatagcccaccggtgcaaactgcagactaaacaaccctcgc

SEQ ID NO: 125562 - DNA, 471 bp, Arabidopsis thaliana
ccctcgcgtccgcccacgcgtccggcatgagctccggtgaaaaatggaggccaagaacaagaaagcagtagcctcccgtctctgctgcttatgcaacctgagacgtcccgtcctcaaaagacctaaaacccttcaacagatatgcagagagtgcttttatgaggtttttgaggaggagattcatcaagtcattgttcagaatcgtttattcaaatctggtgaacgtgttgctataggtgcctctggtggaaaagattctactgttctggcatatgtgttatcagaactaaacagacgccacaattatgggctagacctctttctcttgtccatagatgaagggattacgggttatcgtgatgattctcttgagactgttaaacggaacgaagtccaatatggtttgcctcttaagattgtttcatataaagatctgtatggatggacaatggatgagattgtgaaaatgat

SEQ ID NO: 125563 - DNA, 352 bp, Arabidopsis thaliana
aaaaaaacaaaaaaaaaaacaagaaccatttaaaaagcttatcaagcacaatggccatcgagaagagaaccatgattgcctccttcatcatcgttctgatgatggtaacgatgatcgcaaccaacgttgaggccccggaatcatgtcaaaatcaagccacccgcaaaccccaagttcttctttttctaaattgatgctcatatgtttacaagaaataaatggtgcttcaacaagggcttcaagccattcattgcattagttaaactaatgtttactttttatatatatatatatatatatatattgcactttcatcctcttggtttgttagctatggggagattatctaaat

SEQ ID NO: 125564 - DNA, 920 bp, Arabidopsis thaliana
  unsure (1)..(920): unsure at all n locations
nnnnnnnnnnnnnnnnnnnnnnnnnnnnnnnnnnnnnnnnnnnnnnnnnnnnnnnnnnnnnnnnnnnnnnnnccacgcgtgcggcgagagacgacagaagggggtttatcgttgaaacatatagtgatgcttgttgatcttatataaacaatgttggaactaatgtcaggaaaccaacagttgaatactcaagcgaggaatatgccaaaatcatgtcgaccaacttagaatccgctttccatttatctcaaattgctcatcctcttctaaaagcatctggtgtcggaagcattgtgttcatctcctctgtagctggcctggtgcatcttagcagtggatctatctatggtgcaactaaaggagcacttaatcagcttacaagaaatctagcttgcgagtgggcaagcgacaacatcagaaccaattgcgtggcgccatggtacatcaagacctcacttgtggaaatgctacttgagaagaaagaatttgtggaggctgtagtttcaaggaccccacttgggcgcgttggagaaccagaggaggtctcatcgttggttgcctttctctgccttcccgcatcatcttatattaccggacaggtcatatccgtcgatggaggattcactgtcaacggttttagctatgctatgaagccttaatctcgaatcgcaacattactaataaagcaagaatcctcgtgatgtgttggtcttgtttgtctttgtttagtttttgtgacttctttaaacatatagtaatatcaaaacgtttgaatttctaatgtagccgttaaataaatcaaggcacagttgtgccccnnnnnnnnnnnnnnnnnnnnnnnnnnnnnnnnnnnnnnnnnnnnnnnnnnnnnnnnnnnnnnnnnnnnnnnnnnnnnnnnnnnnnnnnnnnnnnnnnnnnnn

SEQ ID NO: 125565 - DNA, 641 bp, Arabidopsis thaliana
  unsure (1)..(641): unsure at all n locations
ggaaaaagcttcgtcctttcgcaaacccagggaaggggaaggtgaataagctctgcaaaatccctcccttcccttcttcttcttctacaagatttcaccatttctccatcctaaaccataacaacagagatatagagaagatgaagcactacagtcacggaattgatggtttacgaagcggtctttcaccttccgctaaacctttcgcaatcggttcttcttcttctcctgccttctctctcaaatctgaacacgaagattctatttggggtgattatactttagacctttcctttttatcctctgatgatcagagaagtggtctcgatgatgatgattcgttatctaacttgtctcgcgatgttgagactaataaagaaggattggttttagaggagaagatagctagttctggaaaggttttggtaaaccctaatccaagtttctcgaaattgcctgaggtattgatgaagtcctcagatgttgttggtgatgcgaagttggggtttgtcccgtgtctctnagaagtnttctacggngtntgacctgattnagtctangnagattcncctttttngaagnattctttccaaaaanggctggttttgaccaaattatactncagggnntactnataccna

SEQ ID NO: 125566 - DNA, 680 bp, Arabidopsis thaliana
  unsure (1)..(680): unsure at all n locations
ccggnattgaatgaccggaccgacgcaacacaacacatcgaaccatggagaaatcaacaagaaccctattcataaccatcgtgataacctccatgttgctagggtttggaaactctgatcttgctcaggacagagaggagtgtacgaaccagctcatagaactatccacgtgtattccgtacgttggaggagacgccaaggctccaacaaaagattgttgtgcagggtttggccaagttataagaaagagtgagaagtgtgtttgcatattggtcagagacaaagatgatcctcaacttggtatcaagattaacgcaaccctagccgctcatcttccctccgcttgtcatatcacggctcctaacatcactgactgtatttcgattctgcatctacctcgtaactcaacattggctaaagagtttgagaacttaggaaggattgaagacaactacaactccacatctcctacacaaattcataaagatgggacaggaggaggaaaagccgaaccagtgaagagtaatgggatggaaggagaagagttggttggggtttgggttttattaatttctaggttcntnactctttaanaccccctcttaaagnccttgtttttttcaaactttaggtttttttaaaaaaaaagggggccctngggcccgttggcggtttggggc

SEQ ID NO: 125567 - DNA, 634 bp, Arabidopsis thaliana
  unsure (1)..(634): unsure at all n locations
nnnnnnnnnnnagcgatctctacgactcactttagggaaagctggcacgcctgcaggtaccggtccggaattcccgggtcgacccacgcgtccgcaagattaacgcaaccctagccgctcatcttccctccgcttgtcatatcacggctcctaacatcactgactgtatttcgattctgcatctacctcgtaactcaacattggctaaagagtttgagaacttaggaaggattgaagacaactacaactccacatctcctacacaaattcataaagatgggacaggaggaggaaaagccgaaccagtgaagagtaatggatggaaggagaagagttggttgggtgttgagcttttaatatatttgctagtttctctcatcttcttttaattacttcctttctttaatgttcctttgctttattattacaataacttataagatatctatttatatatgagacacatgcatgtgtttgcgatctatatgcatgtaaatgagtcactggttaatttttaatcacgaagcgtacattttaaaaaaaaaaaaaaagggcggccgctctagaggatccaagcttacgtacgcgtgcatgcgacgtcaaagtcttcctatnagtcgtcctannnnnnntt

SEQ ID NO: 125568 - DNA, 416 bp, Arabidopsis thaliana
gttttatgcaggaaacaatctgtactagggtttggattcctataccgggaggactagtggagctctttgcgaccagacatgtcgctgaagatcagaacgtggtggattttgtaatgggacattgcaacatgttgatggacgattctgtaacgataaacatgatggtagcagacgaggtcgaatcgaagccgtacgggatgttatccggtgacatccagcaaaagggttccaaagaagaagatatgatgaatctcccttcgtcttacgatatctctgctgatcagatccgactcaatttcttgcctcagatgagtgattacgagacacaacacttgtagatgaagagtgattatcatcatcaagccttggggtatctcccagagaatggtaacaaggaaatgatgggtatgaaccca

SEQ ID NO: 125569 - DNA, 516 bp, Arabidopsis thaliana
  unsure (1)..(516): unsure at all n locations
atgatactgccagctcnnnnnnnnnnnnnnnnnnnnnnnnnnnnnnnnnnnnnnnnnnnnnnnnnnnnnnctcacgggtccacccacgcgtccgaccgactgtttatctcgaaaacaaagaagatgggcagaagatatggcgtggcacccatctgggaacactcttttctctgtgtacactgcagacgatggggattctcagatatcgatcctaaatctgaacaagacacgcgaggttactttcctggaaaataaacctcacgtaaaagggattatcaacaacataaagttcatgccttgggaaaatacatgctttgtcacagggggaagtgatcacgctgttgtactatggaacgagagtgatgatgaagaaaacaaatggaagtcgaaacctttacacagaaatctacattcagctgctgtaatgggagtggatgggatgaaaaacaagaatgttattttatcagtaggagcagacaagagaatatacggatttgatgttcaagttggtagagc

SEQ ID NO: 125570 - DNA, 569 bp, Arabidopsis thaliana
  unsure (1)..(569): unsure at all n locations
nnnnnnnnnnnnnnnnnnnnnnnnnnnnnnnnnnnnnnnnnnnnnnnnnnnnnnnnnnnnnnnnccacgcgtccgccgcgatcgcgtttcacagatcaacatcacccgcgccggagcagaaactcacactcttcgctctccgccttgcaatcatcgagaaaatcgccactaatctcggaaccctaggtttcatttgggccacggtggttcttctcggtggattcgctatcacgctcgaaaaatccgatttttggttcatcaccatcattctcctcatcgaaggcactcgaatcttcagcagaagccacgagctcgagtggcagcaccaggccacgtggactgtatccggcgtcggaatcagtagcttccgcgtgctccaatcaagctcaatttcacttctcagaaatttaaaacgaatcagcgatgggatctttaagccgatcctcgacaatggattgagagaagcgacgacgagaatcggacgacaagagatctttgatcgtcgaacaactctgacatggaagaactcagagttcctcttcttccatatgcgagatggctttacatct

SEQ ID NO: 125571 - DNA, 764 bp, Arabidopsis thaliana
  unsure (1)..(764): unsure at all n locations
angtttccattcccnanttggtcccgtgtacaaaccgngggcggatccaatgctntaanccccnggatnttaaccntggggggctccancanaantggattggngncattactttccaggctgctgnaactttcgcantgaggtncgactggctggcgaacaagnggctaaagtcagggtacttccttgggacaatgtctgcttatggtctaggtcttctcataacatacatagctctaaacttgatggacggacatgggcaaccggctctgctttacatcgtcccattcatactaggtactttgttcgtgttgggtcacaagagaggtgacttgaagacgctgtggacaacaggggaacccgacaggccatgccctcacgttcgtcttcaacctcaatcgtcttaaaacaacctgctatgtatcagatgggaacagataaaaatcagatgatcctctagtttttttttattgttaatacaacacaccccttcttaggtcaatatatatgtctctgtacgctttcacacaactagacaggagagcccataccacatttgccttaaataactcttttaacctctcttgctagtttctctctattattagacatgaaaccatgaatagacttggcttcttttcctgagtcatgatgatcagattttcttctataaaaaaaaaacacacaaagggcgaccgctctagaggatccaagcttacgtacgcgtgcgggcgacgtcataggcttctagtagtgtcacctaa

SEQ ID NO: 125572 - DNA, 525 bp, Arabidopsis thaliana
gctacaatacgactcactttagggaaagctcgtacgcctgcaggtaccggtccggaattcccgggtcgacccacgcgtccgtagggcaagatatacttggaatctcactgataatcacggttcttcaaattgtccgcgtaccaaatcttaaggtcgggtttgttcttctcagctgtgccttcatgtatgacatcttctgggtttttgtttcaaaatggtggttccgtgaaagcgtgatgattgtggtagcccgtggtgacagaagcggagaggacggaattccaatgctactaaagatcccacgaatgtttgatccttggggtggctacagcataattggatttggtgacattatcttaccaggactgcttgtaactttcgcactgaggtacgactggctggcgaacaagaggctaaagtcagggtacttccttgggacaatgtctgcttatggtctaggtcttctcataacatacatagctctaaacttgatggacggacatgggcaaccggctctgctttaca

SEQ ID NO: 125573 - DNA, 505 bp, Arabidopsis thaliana
  unsure (1)..(505): unsure at all n locations
cagctannnnnnnnnnnnnnnnnnnnnnnnnnnnnnnnnnnnnnnnnnnnnnnnnnnnnnnnnnnnnnnnnnnccacgcgtccgcttttgttgtgaacttgcgatacatatatatatagatgcgagtacaccggactgtgaaattttggaacgaattgatttgatttgaatatggcaatcgcgaagaaattggaaaatgagatctcacgctcttctccttcgtcatcatcatcatcgctgaacgaagctctgttaatctctactatgtgtatcatcggcttacaagtccatgtgcatatcaacgatggctctgtgttttctgggatattctacactgtctctcttgagaatgaattcagtattgtgttgaagaatgcaaaacttactaagaagggaagaagtaaatcgaatgtagaaagtgggaagattgtggagacacttgtgattttgtcttccaatattgttcaaattgttgcagagggagtctcgctttcgtccaatgttg

SEQ ID NO: 125574 - DNA, 666 bp, Arabidopsis thaliana
gaatttggtggggttgcattttggtgagtgaagcatctttttcaaacaatgtagaggaaataaagaggatccaaaagaacttgactttcttactcagattaatggacactaagtcatggatccaaagcatatatgagatctctattgtgtgttaacatgtctcttgagtctctaaacttacttttctccaaagattaaagcaaaagcaaagatgggcttcctctgtcactagttttgctaactcatccttttcggatagcgacactcttcgtttcccactcttggtttggtggtttctttaggattctagatttttgttttacttatctttccttgtacaagagactgtttctataggattcttcatttcctgttttatctatcttctctgtgcaacgagagtgtcatggctactctgtctcaaatcgtcgaggaggaacttgaaccatcactaagaagcaagctttcaagaacaagtgaaaccagtctcgcttctgtcgcatcgttatccatgccacttattcaggagattgttctatcagcagacatcagatgtagtgactgccaagagaaagtcgccgacataatggcgaggatgatcgaaacatattcaatattggtgagtgtgttggagaagaaagtgacactaacgtgtacatattccgg

SEQ ID NO: 125575 - DNA, 736 bp, Arabidopsis thaliana
  unsure (1)..(736): unsure at all n locations
nnnnnnnnnnnnnnnnnnnnnnnnnnnnnnnnnnnnnnnnnnnnnnnnnnnnnnnnnnnnnnnnnnnnnnnccacgcgtccgcccacgcgtccgcccacgcgtccgcccacgcgtccgcccacgcgtccgtacggctgcgagaagagccttttgcttcattctcacttccttcctcatccaaaaaagctcctccatttcaatggcgacagcatcagctctctcatcactctcttcactctcactccacacccgaacctcttctctcatctcctcttcctccacaaaatccatcgtctctttctcctccttcctcaaccgccgcttctcatctctcactctcgtcaaagcctcatcgaccgataccgaaaccatcttcttcgaagacgaaacaccagaaataaccgcaaatgtcgtcttcgacccaccaattgctcccgaaggattcgtctctcctccgtatttcgacgaaggaagcgacgagacagaggaagagatcgctaccgcttttgaagagctctatggacctgcgtatagtggtgagagtatgcttgggaaagatatttatgtgatggactcaaagcataagaagagttcaggtattggtgggaagccaaagaaagataagattagggtgggtttaagnggngtttcaagtntgggggtcccaaggttttaaggggnagnaatttnagttggntttcgtttttggganaaaggatttggttgttcnagtaa

SEQ ID NO: 125576 - DNA, 492 bp, Arabidopsis thaliana
cggacgcgtgggcggacgcgtggggtactgatgctcttgccaacatccgttccaaggtttatctttctcctaagctttggtacctcagggttaatgtaattgaagctcaagatttgataccaactgataagcaaagatatcccgaggtttatgtgcaggctatagtgggaaaccaggcgttgaggactagagtatcgcagaccaggactattaatcccatgtggaatgacgatttgatgtttgtcgcagcagagccatttggggaacctttgatcctcagcgtggaagatagagttgctccacacaaagatgaagtcttggggagatgtgcgatcccgttgcagtatttggacagaatatttgaccatgaaccggtgaacagcaggtggtacaatcgcgagaagcatattatggtcgatggagagaagaacgagaccaaattcgctaacaggattcacacgagaatatgtttggaacgagggtatcacgttc

SEQ ID NO: 125577 - DNA, 511 bp, Arabidopsis thaliana
  unsure (1)..(511): unsure at all n locations
atgatactgccagctacaatacgactcactttagggaaagctcgtacgcctgcaggtaccggtccggaattccacgggtcgacccacncgggncgcttcgtcagattcatatagctcaagttccgactcagattcagattcggaatcagaagcatattcatcttcctcctatgagtctagttcttccagtgatgggaagcataggaagaggaagtcaacaacaagacacaaaggccgacgcggggaaagaaagagtaaaggacgaagcgggaaaaagaaagctcggccagatagaaaaccaagcacgaatagttcaagtgacacggagagtagcagcagttctgatgatgagaaagtgggccacaaagccataaagtcagtgaaagttgataacgctgatcaacacgccaacttggatgactcagtgaaatcaaagagcaggagcccaattcgtaggagaaaccaaaacagcaggagcaaaagtcctagtaggagccctgtgagagttctt

SEQ ID NO: 125578 - DNA, 484 bp, Arabidopsis thaliana
gtgcgataagagtacaatcatcaaacgtgcttctgttcccgctagggatttgaggatactgggccctgtcttctctcactcctctaacattctcgccagagagaaagctattgttgtgaatttagaggtcataaaggcaatagttactgcagaagaagtgttgttgttggatcctctccgtcctgaagttcttccattcgttgaacgactaaagcaacagtttcctcagaggaatgggaatgaaaatgcactgcaagcttctgcgaatgtacaatctcctcttgatccagaagctgcagagggtttgcagagtgagcttccttttgagtttcaggtcctggagattgcacttgaggtcgtctgctcatttgttgataaaagtgtggctgctcttgagacagaagcttggcctgtccttgatgaactcactaagaatgtcagcactgagaatcttgaatatgtacgaagtttgaaaagtaatctc

SEQ ID NO: 125579 - DNA, 873 bp, Arabidopsis thaliana
  unsure (1)..(873): unsure at all n locations
nnnnnnnnnnnnnnnnnnnnnttccgcgaccggccattcgggtcgacccacgcgtccgatttaatttcccttgtctctctatctctctcaataacctcatctgggtcttcctcgtttgctccgcttaagcaccatgaaggtcaccgtcgtctcccgcagcggcagagaagtcctcaaagctccccttgacctccccgattcggcgactgttgctgatctgcaagaagcgtttcataagagagctaagaagttttacccgtcgaggcaaagactgactcttcccgtgactcctggatcgaaggacaaacctgttgtcctcaatagcaagaaatcactgaaggagtactgtgatggaaacaacaactccttaactgtagtcttcaaagacctgggggcacaagtttcctaccgcacactcttcttcttcgagtatcttggccctctccttatctaccctgtcttttactacttccctgtttacaagtttcttggttatggagaggactgtgtgatccatccggtccagacgtacgctatgtactaactgggtgcctttcactactttaaaacgggatcttagaaacgttttttcgaccactggggtaagccgacggcacccttccccaaattggggaattgtggttcaaggaaactggggccttaatttaactgggaagcttctggggtggctttacaatttggcgtttaatttacggtgcaaacccaatcccgcctttggtacaactctccagagtttaggaggggaccctcttaacaaatggaaagaaatttgggcttcttccggggtgtttgggactttggggtattgggcccagagattcgggacaaacctcttttacctttgggcaacat

SEQ ID NO: 125580 - DNA, 559 bp, Arabidopsis thaliana
ttttagatcaccttataacaaatgctggtaagatggttctcttggataaattgcttcctaagttgaaagaacgtgattcaagggtgctgatattttctcagatgacaagacttttggatattcttgaggactatttaatgtatcgtggttacttgcattgccgtattgatggaaacactggtggtgacgaacgagatgcctccatagaagcctacaacaagccaggaagtgagaaattcgttttcttgttatccactagagctggagggcttggtatcaatcttgctactgcagatgttgtgatcctctacgatagtgactggaaccctcaagtcgacttgcaagctcaggatcgtgcacataggattggtcaaaaaaaagaagttcaagtgttccggttctgcaccgagtctgctattgaggcgaaagtcattgagagagcttacaagaagttggcacttgatgctctggttattcagcaagggagattggcagaacagaaaactgttaataaggatgagttgcttcaaatggtgagatatggtgctgaaatggtgtt

SEQ ID NO: 125581 - DNA, 440 bp, Arabidopsis thaliana
gcataaatttgtcttgagtacttcccttgtagatttttcttatttgcctagcgcttgtttgtttgatgatgcgcacaatatcttttttccaaatttttggttttttctttaacagctttacacaagtttgaaccttcagaaaccatttttgctcaatctcatagacagagagagacaatttacttagctaggttctaatagctcactgtagagttgggttttgactagcagaggaaatttttggtgaagtgtgtggtctcgaaggaaaagctctttatacagatccgaacaagtttgcatttttgtcatctaatcagataatctcgcttatctggaatttgcattattggtgatctgggttttatctgtttagtgttgaagcctgttgtccgagtatttaaggttcaaattatagtacagtgttgagtgatgtgtggttt

SEQ ID NO: 125582 - DNA, 859 bp, Arabidopsis thaliana
  unsure (1)..(859): unsure at all n locations
atgatactctnnnnnnnnnnnnnnnnnnnnnnnnnnnnnnnnnnnnnnnnnnnnnnnnnnnnnnnnnnnnnnnnnnnnnnnnccacgcgtccgtgactgttgaagagagcggaaacgtcgagacctttactgatcttatgaaagaccaagaaaagcacgaggtagctcgggccttctctgcgcttctccagttggtgaacaatggagacgttgatctggaaaaacctgggaactccacaaacgaaccaatgtgttatacagcggttaaaccgttcagtgttcggttgctcaaagttcataacaggaagaatgagaaaagagggatacatttaccccaaaaacgagctaagtccccaataaccaaaggcaaatctcacgagtcaccaccacctaagaagcgaaacacatgttctgtctcaagccagactcggaaagtctcgctaaagatctcaaagatcaacggtgttggtgtaagatgcacaccaaacagtaagaagagacggaaaggtcgatctgacgatgtaactgaggtaactgaagttgcttcaatcgaaaaatctttggggaaattgtgactactcaaattagattgtgtagttaggtatgggattttaatcagtcagttatgaaactctgtaactgtcatttgtgtaagttataatgaaggcattgccagaagaagtagcatatgttgtaataacaatgaaaaattccactttagagggtcttttaacatattagaaagagtgcttgtggaaaaaaaaaaaaaaaaaaagnnnnnnnnnnnnnnnnnnnnnnnnnnnnnnnnnnnnnnnnnnnnnnnnnnnnnnnnnnnnnnnnnnnnnnnnnnnnnnnnncg

SEQ ID NO: 125583 - DNA, 510 bp, Arabidopsis thaliana
  unsure (1)..(510): unsure at all n locations
atgatactgccagctannnnnnnnnnnnnnnnnnnnnnnnnnnnnnnnnnnnnnnnnnnnnnnnnnnnnnnnnnnnnnnnnnnccacgcgtccgcttcaccggtttctttgtttatcagaatccttttaaatccatcgctgatcaaaatgttctttctttccaacctcaaatcgatcctgagtgtgatttgttcaagggacattgggttccagacaaaagaggatctttatacacaaactcgagctgtgctacgattcccgactcgaagaactgcataaaacaagggagacccgacaaagatttcttgttctggagatggaaacccgatggttgcgatcttccgaggtttaatccaaaggcgtttctcagtatggttcgagggaagaagatgaattttattggtgattctgtggctaggaaccatatggaatctcttctttgcttgttgtcaatggaagaaactcctaaggacatctacaaggatggagaagatagaaacaggatttggt

SEQ ID NO: 125584 - DNA, 1113 bp, Arabidopsis thaliana
  unsure (1)..(1113): unsure at all n locations
aatacgactcactttagggaaagctcgtacgcctgcaggtaccggtccggaattcccgggtcgacccacgcgtccggtcgttaaacaaatttcgccgacctacgtatgagccgtcgcctccaatataaaccaaagccatccctaatcctcgaattcttcctctctgagtttttattctgagatagagaaagatgtcaggtttagcttgtaattcgtgtaacaaagacttcgaagacgacgctgagcagaagtttcactacaaatccgaatggcaccgttacaatctcaagcgcaagatagctggtgttcctggagtaacagaggcactatttgaagctagacaagctgctatagctcaagagaaggttaaagctgttgaagcaccgatgctttatagttgtggaatctgtaacaaaggttacaggagttccaaggctcatgagcagcatcttaagtcgaagagtcatgttttgaaggcttcgacgagttctggagaggaggataaagcgatcatcaagcagcttccgcctcgtcgtgttgagaagaataacactgctcaatttgcaagggttccgattgaggaggaaggagagttcaagatgaattggattgtagggtgattccgatgagggtttggatgcggaaatgaatgaggatggtgaagaagaagatatggatgaagatggtattgaatttgagttggatccngcttgttgtttgatgtgtgataagaagcataagactatagagaaatgtatggttcatatgcataagtttcatgggttcttcattcctgatattgagtacttnaaggntccnaaaggggttctgacctacctcggtctaaaggtcaagaggagacttccntgtgnctgtactgcaatnaatttgtgccatcccttttagtagnttttgaagctnttccgtaagcatnntttgaccgccaaaaggnnaattcaaagtgcaattnttgnnattggtgggtntttaangaagattncagacctttaagggttcctntgacntcagcngcagctttttcnatttgggccggaaannaaaattggtttttcccctnggcaagtgnccctttagggctttttttgnggctta

SEQ ID NO: 125585 - DNA, 858 bp, Arabidopsis thaliana
  unsure (1)..(858): unsure at all n locations
cnnnnnnnnnnnnnnnnnnnnnnnnnnnnnnnnnnnnnnnnnnnnnnnnnnnnnnnnnnnnnnnnnnnnnnnccacgcgtccgtctcattcttggaactggtaccgctcaatctattgttaagatttgggatgtaaaaagtcaggcaaatgtggcaaagtttggtggacacaatggagaaatcacctctatatcattctctgaaaacggttatttccttgcgactgctgcactggatggtgttaggttgtgggacttgcgcaagttaaagaacttccgaacctttgactttccagatgcaaactcggtggagtttgaccatagcggatcttatcttggcattgctgcttcagatataagagtattccaagcagctagtgtaaaagcagaatggaacccaatcaagactcttcccgatctgtccggtacaggtaaagcaacaagtgttaagtttggactcgactccaaatacatagcagtcggttcaatggaccgtaatctcaggatatttggtttacctgatgatgacaatactgaagattcagcacaagattcatgaagagatatctcaaaagtctcatcatcaagagtagctatatcctcaattctcgcgatttttgttgtatctttacagttctgttggtactttcctgatggcccctctcacaatcacatatacacacctgagctctctccctttctttctcagtcaacaattttcctgtaacaacatcgtaccttaaggatctgcagttgatctttctctcaaaaaaaaaaaaaaaaagaaaggccaacaannnnnnnnnnnnnnnnnnnnnnnnnnnnnnnnnnnnnnnnnnnnnnnnnnnnnnnagtcacc

SEQ ID NO: 125586 - DNA, 404 bp, Arabidopsis thaliana
atcactctaaaatatctcccaccacataccacttaacccgacccgacccgaccggaaaacccgacccgatccatcccaatgtcaggagctaccaccgcttcctccggagaccacaacaacctccgtctcccaactccgacgcttgacgccgaatcgcaaactctgctgcaatcgatttctgctgaagggggttacgcttatgctcgcatggcggtgttagcggtggccggtgaccaaagcgcggcggaggcggcgcgtgatatggcttgggagcaacttcactctggtccgtggcactcggttctccccgtttggcgcgacgcttactcaatggcttgtctccacgtagctaaaatccatttcgccgccggcgagtttggtgatgcgcttggtgcgcttgatat

SEQ ID NO: 125587 - DNA, 904 bp, Arabidopsis thaliana
  unsure (1)..(904): unsure at all n locations
nnnnnnnnnnnnnnnnnnnnnnnnnnnnnnnnnnnnnnnnnnnnnnnnnnnnnnnnnnnnnnnnnnnnnnnnnnnnnntatttccacgcgtccgaaaaatccaatttttctttgtttcagtcctctcttctgctcattgatcttttaattaactttgattctctccgtttatggattaaccatttgatcgagataactctccaagaaatcgactgagttcgtaacttgttgttgtctgatcttttaaagattcaaccttttttggtccgatcatggctgttgctgagaatgctggtgtcaaagtggactcttctggtcagaatttagacaacaacaacactgctgcttcagctaccgagacgacaaagccgccatgtcctgatgatgatcaaagccctaaatctgactcatccactcctcttaccatcgattcgactcctgaaactgacgatcggatcaatgagactgctcaaaaggttcagactttaaatgggtttagtggaaatggtgagagagataacaatggagagatcaaagatttggctgatgcgttttctaagcttaatccgatggctcaggagtttgttcctccttctcttgctcgaagtcaatctggggttttgagaaatggattagggtttactaacaattttgcagccccacctaaacttgctgatgggaatgatcattttcctagaaggagaaggagttttggccaagggaagcgaagaatgaacaaaaggacaagcttggctcagaaggatgatgtaatcaggagaactgtatatgtctctgacatcgaccaacaggttacagaggagaacctcgcaggtgtctttattaactgtggacaggttgttgattgtcgtgtatgcggtgattcaaattctgtccttcgtttcgc

SEQ ID NO: 125588 - DNA, 514 bp, Arabidopsis thaliana
  unsure (1)..(514): unsure at all n locations
nnnnnnnnnnnnnnnnnnnnnnnnnnnnnnnnnnnnnnnnnnnnnnnnnnnnnnnnnnnnnnnnnnnnnnnnnnnnnnnnnccacgcgtccgcccacgcgtccggtttttatattagagtaatgtggtttattcaatctgtgttgcagatgtgtcataagcatggagtaatgcacagagatttaaaacctgagaacttcttgtttgcaaacaagaaggaaactgcatctttgaaggctattgattttggtctctctgttttctttaaaccaggcgagagatttaacgaaattgttgggagtccttactacatggctcctgaggtattaaggaggagttatggacaagaaattgacatttggagcgcaggagtgattctttacatattgctctgtggtgttccacctttttgggcagaaaccgaacatggagtcgcaaaagcaattcttaaatctgtaattgactttaaaagagacccctggcctaaagtttctgataatgcaaaagatctgatc

SEQ ID NO: 125589 - DNA, 473 bp, Arabidopsis thaliana
  unsure (1)..(473): unsure at all n locations
attcatttgaaaagagataaagatgtgataagttacataagtaatagtcggttttgatacaatggagatgatcaaggtccaaggacatggagctgagcattccatctcgtattggttttggaaattgaagaaatccaagatggtgaaagtaaagtcgaggatggaaacaagggccttgaggatgaaggagaagcccccagtttttgaaaacaagatccttcatttttttttcagagaactcttttaagaaaacttttacaaaaagtaaaacccaaagctctcttgttaattttttgggaatttaatcataaaaaaatggagagagtccttggagaggctctctcccccgggggtgctctgatactcttactatatttaacattcgttnnnnnnnnnnnnnnnnnnnnnnnnnnnnnnnnnnnnnnnnnnnnnnnnnnnnnnnnnnnnnnnnnnnnnnnnnnnnnnnnnnnnnn

SEQ ID NO: 125590 - DNA, 750 bp, Arabidopsis thaliana
  unsure (1)..(750): unsure at all n locations
cgtnnnnnnnnnnnnnnnnnnnnnnnnnnnnnnnnnnnnnnnnnnnnnnnnnnnnnnnnnnnnnnngatcgccacgcgtccgcatctgaagaagaagaagaagaagaaaggagccatgacaatgtttagatctatctccatggtaatgctgctcgtcgcactagttacattcatttctatggtttcttctgctgcttcgtccccagaagccgactttgttaagaagactatctcttcccataagatcgtcattttctccaaatcctactgcccctactgcaagaaagctaaatcagtgttcagagagctggatcaagttccttatgttgtcgagcttgatgaaagagaagatggttggagcatccagactgcacttggagagattgttggaaggcgaacagtaccgcaagtcttcattaacggaaaacatctcggaggatcagatgataccgtagatgcgtatgagagcggtgaactcgccaagcttcttggtgtttccgggaacaaagaagctgaactctaggttatatatagttggaagaattgataacactctctgtgatgcttaggtgtaagcaattcaatttccatttgtattgtgttctgcagcttgatcatgaccttgtgacagcttgatcttgccttttaaacgtatcttatcaaagaccacattctgagttatacaaaaaaaaaaaaaaaaaaagggcggccgcttctaaggaatcccagcttacgttccccgtgcaatgc

SEQ ID NO: 125591 - DNA, 732 bp, Arabidopsis thaliana
gggaaagctcgtacgcctgcaggtaccggtccggaattcccgggtcgacccacgcgtgcgggtagctgtcttctgcaagaatattgcaacaaaagtggagttcttatgccaaaacagaaaacacatgatgaagttgattattcaaatactcttttgaatcttcaatttactcattacattttcacatcaaaccatctgaccacaaacaacactaggaagtgtcactgagagaaacttaccatgtctgaaatatcatcttccatgcctttaacagagagagtttataatcatctttgtctgtccgatgtttctctggccttgttgggactgtttgttttctgttgtgtgcgtgagaaggttactaaaaagctggggccaacgatatggcctgtgttcggaattactccagagttcttctttcacaggaatgatgtttatggttgggctacaagatgtttgaaaaaatgtcgaggtacctttctctataacggaatctggcttggtgggtcgtatggagctgtgacttgtgtccctgcgaacgttgaatacatgctcaagactaacttcaagaacttcccaaaaggtgcgtttttcaaagaacggttcaatgatctgctcgaggatggtatcttcaatgctgatgctgagtcttggaaggagcaacgacggatcatcattaccgaaatgcattcaaccaggttcgtggagcattcctttcagcccacgcgtccg

SEQ ID NO: 125592 - DNA, 653 bp, Arabidopsis thaliana
tacgactcacttagggaaagctggtacgcctgcaggtaccggtccggaattcccgggtcgacccacgcgtccgtatcggtggagcattagtcaggaaacgagtactctcccccttaaatactcttttccctgtcaaattcagaggtgacctgcatgatatcagctgtggtaaccaccaacaaattacttattctggtcagtctaatggattctgcaactctgtcgcacaagatcacataaaggctaatacccctagtaggttacatctctccactactcctacaaccacaagttgctgggagtggaagaatgtctcaaacagtggtagactctcgtctatggtcttcactgatggtccattgcttgactctgtagatctccgccaacccgtcaaaggaggtgaggtttgcttatattccccactatatgaaacgtctagcacacccaataagcccttaccttgtgataaggaaatatctgtctctccgccactttgtctgtcaccacttggtccgaagttttctgagagagtaaaagctgtaagaagttgccaaactgggaaaatactggaagatttaaggaatatcagtgaagaagcagaattaagagttgatcgtagattgtttgatgatgcatatgccattaggagagcg

SEQ ID NO: 125593 - DNA, 819 bp, Arabidopsis thaliana
  unsure (1)..(819): unsure at all n locations
atgatctgccnnnnnnnnnnnnnnnnnnnnnnnnnnnnnnnnnnnnnnnnnnnnnnnnnnnnnnnnnnnnnnnnnnnnnnnccacgcgtgcgggaaacgcttccaatctatacatacaacgcttctcaatcggaagcgtaagcgatgtcgtacgacgatgttgagatagaggatatggagtggaacgaagagattcaagcgtacacgtatccttgtccttgtggtgatttgttccagattacgaaagaagatctccggctcggcgaagagatcgcgaattgcccaagttgttctctttatatcaccgtcatctacaatatggaagattttcaaaacgatacgaagaagaataacgaacctaaaactcgtcaccctgtggccgttgcctaaggatagtcatggaattgattagaagattgttcaacaaccactgcagaagagatttatctgctgttttggaaagcatatgaaagtgtgttacattaaccacatatagagagagggaaagagagtgttgtgttactgatttattaataccgaattcttgatgttttctagagtaggctctgttttggtcttgaaaaggtttctatggctacaatgcttctttgacaagaagactatcagtgaggctaagagacatttcaaaccctttcaccatcattaaagatcgttccaatgatacgcatagataacaaggaatcaatattatcagatttaacccaaaaaaaaaaaaaacaaaaagggcgaacaannnnnnnnnnnnnnnnnnnnnnnnnnnnnnnnnnnnnnnnnnnnnnnnnnnnnnnnnnnnnnnnn

SEQ ID NO: 125594 - DNA, 460 bp, Arabidopsis thaliana
aggagaccccactccctcctttatcgcaactaaccccaaatcctactcccgccgccgccgtctcttccgctattccggcgccagttaagagcgtagccgttcagcaaccgatcgatggatctccacgcgccgttgctactgataccggaggtattcctgagccacttgcggctgttcccggcgctaagcttcgtcttatgtgcagttttggtggccacatcatgcctcgtccacacgacaaatcgttgacgtactccggcggcgagactcgtattgtggttgttgatcgacgtgcgtcactgtcttcgctccgatctcgtctctctagtatgcttctcaacggccggtcctttactctcaagtaccagctccctagcgaagatctcgattcactcgtcaccatcactaccgatgaagatctggagaacatgatcgaggaatacgatcgcgcggcttcgtc

SEQ ID NO: 125595 - DNA, 742 bp, Arabidopsis thaliana
cctatacgactctcttagggaaacctggtacgcctgcaggtaccggtccggaattcccgggtcgacccacgcgtccgggattttcccgcttcagcgtctctcagtctctctctcggctttatccaaaggttccttcgtttactccgcttctatggaagaagcttgaatccttctctcttcttcttctccttcttcccttgacatttttgttctgagaagcaacatggccctcggtggcttgatttcaaatcggaacttcggttccttcatcggctcaggcaatggttgtcagagacttggaaaaagtggtgcagaggtttccaagctttttccaaatgcattgttgtgccgtaatcatcaacctctgcaagctagtttacatcatgaatcgggacacatgagaagaagttttggatgtttccttcaaccaagaatggacagtgtaattaggtttaggaacagtatcaagatcaacagatctcgggctactacaaatcagagagtcagattcacggaggagtgtgcctcggctgatggtagctgaactatttaattgaggaaatcacagaacgctctccatggtggagcagttcctagacctgggggacgtcttggatgctttcggctttctctttgcataggaccgtggaactgagcttgcattctcccatgccaagaattactggagaggcactgtgggctattcagcctcttctctgggctatactactaaatctggagg

SEQ ID NO: 125596 - DNA, 596 bp, Arabidopsis thaliana
tgcgactgccaacgccgcagcaaaaactccaaagactccatcgaacaaaaccttcagagagaatcaaacagcttaagggcagtttcttagttaaaagtaaccaagtttacatggttgagctagacattcagattccatcagcatacgatccatttgcagaagctaaagattcagatgcaccaggagctaaagagaacattcacattcgaatccagcagaggaatgggaaaaagagcttgacgactgttcaagggcttaagaaagagtacagctacgagaggattctcaaggatttgaagaaagatttctgctgcaacggtaacgttgtgcaggacaaagaactaggcaagatcatccagcttcaaggtgatcaaaggaagaaagtgtctcagttcttggtccaaactgggattgctaagaaggatcagatcaagatccacggtttctaaactgaacccgaattggatcgtttgatatatctatactatttatgcgaataattggtgtggtgtggtgtgtttgtgaccattacaagtttttaaagctttggttttgttattgacttttgcaatgataagaaatatttcgattgttct

SEQ ID NO: 125597 - DNA, 942 bp, Arabidopsis thaliana
  unsure (1)..(942): unsure at all n locations
acgcgnnnnnnnnnnnnnnnnnnnnnnnnnnnnnnnnnnnnnnnnnnnnnnnnnnnnnnnnnnnnnnnnnnnnnnnnnccacgcgtccgcccacgcgtccgcccacgcgtccgtacggctgcgaaagacgacagaagggggatccttccaaagaatctccaaaatccctaaacttcgaaaatggcagaaaccgccgagacaatcaacaccacgatctcatcgccgccaccggaatccgaaagctccaccactatttctgcaatgacagatccaacatctcaagaagcagcctcaaaagacacagatctgacgaaagaagccgaatcagagaagaaaccaggaggaatctctctccgaatctggccaccgactcagaaaactcgcgacgccgttctgaatcgcctgatcgagaccttatccaccgaatcaatcctctctaagagatacggtactcttaaatctgacgatgcaaccaccgtcgcgaaacttatcgaagaagaggcttatggtgttgcttcgaatgctgtgtcgagtgatgatgatgggattaagattcttgagctttattctaaagagattagtaagaggatgcttgaatctgttaaggctagatctaatgctagtgttggaaatggaagtgtggaggatgctaatactgatgctagtgaggtttctaaagatgatgctggtcctgcttcagaggaagagaagagtgaggcttgagaaatttggtttacttccttaatataatctcttgtctcttagggttttgctggtcttgtaatgatgatgatgaccttgtggattggtatatgcatatttgaagatgtttcttcttccgccnnnnnnnnnnnnnnnnnnnnnnnnnnnnnnnnnnnnnnnnnnnnnnnnnnnnnnnnnnnnnnnnnnnnnnnnnnnnnnnnnnnnnnnnnnnnnnnnnnn

SEQ ID NO: 125598 - DNA, 515 bp, Arabidopsis thaliana
  unsure (1)..(515): unsure at all n locations
nnnnnnnnnnnnnnnnnnnnnnnnnnnnnnnnnnnnnnnnnnnnnnnnnnnnnnnnnnnnnnnnnnnnnnnnnnnnnnnnnnccacgcgtccgggggaagagttagacggcgctcctgatgatgatgagtatgacactgaagattcatttatagatgatgctgaactggatgagtatttcgaagttgataattcaacagttaaacatgatggattttatgtaaatagaggcaagttggagcggatggaaccttcaacaacatctaaccagcaacccaaaaaacggcgacgaaaagattcagcaaaaccctgtcgtgatgcagttgacgtatccgataaacacaccaagttgtctataacagctaggaaaaaggatcaatcaactgctcctgggtcctggaaaacacaggagtcacctttgccttctggagcgcaagatgcaaatacttcagtacctctggatgatgtgaagcattctgatagagcaaatcatcagtctaggaatgatacaagtca

SEQ ID NO: 125599 - DNA, 540 bp, Arabidopsis thaliana
  unsure (1)..(540): unsure at all n locations
ccnnnnnnnnnnnnnnnnnnnnnnnnnnnnnnnnnnnnnnnnnnnnnnnnnnnnnnnnnnnnnnnnnnnnnnnccacgcgtccgctctgtctctcaaaccctcaggtctcagctcagaacaatggcagctaaacctggagccgcaactccaacgtattcacctaaaatcgtcggaagaagtcggcttcctatattcaaagattccgacctcgattggtctcgtcctgatggccgtggcttccaccaatgccgacccgcattacttcaaactggtgctgtgagttctgcttctggttctgcttatgctgagtttgggaacactaaagttattgtttcagtatttgggccaagggagagtaagaaagcaatggtttatagtgatgtaggtagattgaattgtaatgttagctatacaaattttgcttcccctactcttggccagggaactgatcacaaagaatattcatcaatgcttcacaaagcattggaaggtgtaataatgatggagacgtttccaaaaacaacccntgatgttttgca

SEQ ID NO: 125600 - DNA, 474 bp, Arabidopsis thaliana
ggcgttagccaattgtattcatcatcatcatcgtcatcatcgttggggtgagtatacatacgattaaagaaacccaaaaactccggcgtctgtttaccgctatcatcattcttccgggaagaggaaaaggtttcttcgatcgtcgaagagattctttggacaagtcccctccttcctggttcaatcttcgattcagctctcttttaatttttttggttttgggaagctgctatgttatttgagaggcttaccaagaaaccaccttcgcttgttgatctttgcgtaaggaaagcgattgataatgtaaagtacattggatatgttggtggggttgattttcagctccttgagcagattctgcaacactgtacactagaacagctgaagcacatagaggatgctactgacgacacagatcttagtccaatcaccgataagttttggaagggattctataagaagcactatggagaa

SEQ ID NO: 125601 - DNA, 762 bp, Arabidopsis thaliana
tacggctgcgagaagactacagaagggtacggctgcgagaagactacagaagggtacggctgcgagaagacgacagaagggtacggctgcgagaagacgacagaagggtacggctgcgagaagacgacagaagggtacggctgcgagaagacgacagaaggggacttaaccaaacatgtctgaaaaggggttgataaaaaaagaagaccacatgtttcaagaggagaagagaaagacaaactatggagcaattggcttggcttgcttcatttcttgtttctttgcattccaattcatgaaaatcgtaacaacacaaccttcaacaacaacaacatcatccattgccgttatcgatagcccaatgtcctcccataagctatctgataggagagaaatatggagagttatcccaccatctacctattgtctcaaaatcgaatctttcataaaattcgccacttctccaaacgccgagaagtacgaatcccgtccttttgaatccggtggatacaactggacacttattgtctatcctaaaggaaacattaaggaaggagctccacttaattacgtttcaatgtacgtccaaatagacaattcaacactccttaactctccaaaagaagtttacgcagaagtcaaattcttcatttataaccggaaagaggacaagtacttaacatatcaagagacggatgcaaaacgcttttttctgttcaaaccatattggggatatggtaatgttagaccctacaccgacgt

SEQ ID NO: 125602 - DNA, 509 bp, Arabidopsis thaliana
  unsure (1)..(509): unsure at all n locations
atgannnnnnnnnnnnnnnnnnnnnnnnnnnnnnnnnnnnnnnnnnnnnnnnnnnnnnnnnnnnnnnnnnnnnnnnnnnnnnccacgcgtccggtcccactcatggtgacctcgttgaattgggggaagctgtaggtattatcgcgggtcaatcgatcggcgaaccggggactcaactaacattaagaacttttcataccggcggagtatttacaggaggtactgccgaacatgtacgagccccttataatggaaaaatcaaattcaatgaggatttggttcatcctacacgtacacgtcacgggcatcctgcctttctatgttatatagacttgtctgtaattattgagagcgaagatattatacatagcgtgactattccaccaaaaagttttcttttagttcaaaatgatcaatatgtggaatcagaacaagtgattgctgagattcgcgagggaacatacacttttcattttaaagagagggttagaaaatatatttattctgac

SEQ ID NO: 125603 - DNA, 323 bp, Arabidopsis thaliana
cccacgcgtccgctgtggtggaaaagctcttcgcttgtggaatggaagagctgatggatgatacatgcacaccattgtttggcaaacataaagttcttctcaatggagactgggttggattatgtgcagattctgaatcctttgtcgcggagttaaaaagcaggcggcgccaaagtgaattacctcgtgagatggaaatcaagcgagataaagatgacaatgaggtaagaattttcactgatgctggtagactactccgacctctcttggttgtggaaaatctccaaaagttgaagcaagaaaaaccttcacagtatcctttt

SEQ ID NO: 125604 - DNA, 979 bp, Arabidopsis thaliana
  unsure (1)..(979): unsure at all n locations
nnnnnnnnnnnnnnnnnnnnnnnnnnnnnnnnnnnnnnnnnnnnnnnnnnnnnnnnnnnnnnnnnnnnnnnnnccacgcgtccgcccacgcgtccgaagaatggcgacgaaggtgagtttggaagggaagagagtggttttggtaccgtacatggcggaacatgtaccaaagtaccatcaatggatgcaagattcggctcttcttgaagctacgggatctgagccgttgagtcttgagcaagagtatgagatgcagctttcttggactcaagatcccaataagcggactttcattgtcttggacaaggatttcgttaagggagacctggctcatggccaacctcatgtagaagcaatgacaggtgatgtgaacatttacatgaatgatgtggatgatccaaaggttgcagaagttgaaataatgatagctgagcccagaagccgtggtaaaggactaggaaaggaatctgtgttgataatgatggcttatggtgtcaagaacttggagattcacaagtttacagccaaaattggggaatcaaacacagcttccctcagcttattccgcaaactaggtttcgaggagtcttcttacagcggtatcttcaaagaggttacactcgagtatccggtgactaatctccgtcgagaagagctcttgaagttattggatgaagtcattaggcacactcattcatcgaacaacccatcagactcactgctatcaggagaagctactgcataaagcattttcttcagtgtttattgttatttttctcttcaacttgggaaagaatttgaaatcattgtagcatgtatgagtttataaattatgattactaatatacatggtccattgtttccaaaaaaaaaaaaaaaaaaaaaaaaaacccaaagnnnnnnnnnnnnnnnnnnnnnnnnnnnnnnnnnnnnnnnnnnnnnnnnnnnnnnnnnnnnnnnnnnnnnnnnnntagaatcg

SEQ ID NO: 125605 - DNA, 560 bp, Arabidopsis thaliana
  unsure (1)..(560): unsure at all n locations
nnnnnnnnnnnnnnnnnnnnnnncgactcactatttggaaggctgagaccgcctgcaggtaccggtccggaattcccgggtcgacccacgcgtccgcttagagaaacaatccacttttgtttttaaggttcaatttttgaaattttcaaaaaacaaagcctatttcatacactcaccagtgcttcacaattcatcataattcataagccacgcaaaagaaaataaagtgaaagattccatggcggtaattggtgtggtggctactaacggtggttgtggtggcgtttcactcggcgtcggcggcagtagtagaatcaacgtgggaggttgagtataagtactggtggccggattgtaaagaaggaatcgttatggccatcaacggccagtttccagggccaacgatagacgcagtcgccggagacacggtcattatccacgtcgtcaacaaactctgcaccgaaggtgttgttatccattggcacggcatacgtcagaaagggactccatgggctgatggagcagcaggtgtgacccagtgtcctattaatcctggcgag

SEQ ID NO: 125606 - DNA, 440 bp, Arabidopsis thaliana
accagcgtttatactctgtaatgccagatccgcggtaacgcaagtcagtgacctactccggcgtttatcactgaatccgattatggctagtcttcttcgatccttaatccttttgctaatcgtgcaatcatttttggttgcgatcgctttcgggtcgaaagaagttgaagaattcagcgaggcattgctcttgaagcctttacctgatcgaaaagttttagctcacttccacttcgagaaccgagctcctccgtcaaactcccatggccgccatcaccatctcttcccgaaagctatttctcagttggttcagaagtttcgggtcaaggagatggagttatcttttactcagggtcgatggaaccatgaacattggggaggatttgaccctctatcaagtatgaatgcgaagcctgttggtgtggagctgtgggctgtgt

SEQ ID NO: 125607 - DNA, 638 bp, Arabidopsis thaliana
gatgattaggtgaactatagtagagctatgacgtcgcatgcacgcgtgacgtagctcggaattcagctcgagaacaaactattatcatctctgtctgtgacaggcccacactatccaattcgaaaagtctaaacaaaagtcgccgtcatgaaagtagaacttgtgttcataccatcgccgggcgttggccatatccgagcaacaacggcgttagcaaagcttctcgttgccagcgacaaccgcctctccgtcactctcatcgtcattccttcacgagtctccgacgacgcttcttcccccgtctacacgaactccgaagaccgtctccgctacatcctcctccccgcccgagatcaaactactgatctcgtatcttacatcgacagccagaaaccacaagtaagagccgtcgtgtccaaggtcgctggagatgtttcaacacgttcagactcacggctagctgggattgtcgtagacatgttctgcacgtccatgatagacatcgccgatgagtttaacctctcggcttatatcttctacacgtccaacgcttcttatctcgggctacagttccacgttcaatctctttacgacgagaaagaactcgacgtaagtgagttcaaagatacggagatgaa

SEQ ID NO: 125608 - DNA, 472 bp, Arabidopsis thaliana
  unsure (1)..(472): unsure at all n locations
cgnnnnnnnnnnnnnnnnnnnnnnnnnnnnnnnnnnnnnnnnnnnnnnnnnnnnnnnnnnnnnnnnnnnnnnccacgcgtccgcccacgcgtccgggaagctgaaagaactgggtttgttaaaggattcagacaagtttcaaattctgtggtaggaaagtcattacccacaacaaataacacatatggcaagaggacaagcgtgttgcagagaccccatattgattcgaacaggtttgtgccaagcggtttcagtaattcttcagtggaaatgatgaaaggaccttcagggactgctctgacatcaagacagtattgtaattccggacacattgtggaaaatgtttccagcgttttacgaagattcaggtgggggcctgctgctgaagaggcccttcaaaatctaggtttgaggatagacgcataccaagcaaaccaagttcttaagcagatgaatgactatggaaatgctc

SEQ ID NO: 125609 - DNA, 581 bp, Arabidopsis thaliana
  unsure (1)..(581): unsure at all n locations
gctaggcagaagaagcctgaacctgttcataagcgttcttattggacagagagttatgtgcagtggtctccaataggtacataccttgtgacactccacaagcagggggcagctgtttggggtggtgctgatacattcacgcgtctcatgcgttatcagcattctatggtaaaactagttgatttctcgccaggtgagaaatatcttgtaacttaccatagccaagaaccaagcaacccgcgagatgcaagtaaagttgagattaaggtttttgatgtgagaaccgggaggatgatgagagatttcaagggtagtgctgatgagttttcaattggaggacctggtggtgttgctggtgcctcttggcctgttttcagatgggctggtggaaaagatgataaatactttgccaagcttagcaaaaacactatctctgtctatgagactgagactttcagcctattggcaagaatccatgagggtaggtaaatgttgtggtatttctggccccccttntnaatccttcattgttntccntacaaggggnggacaccngcaaggtcctgccaaccggaggtntc

SEQ ID NO: 125610 - DNA, 562 bp, Arabidopsis thaliana
  unsure (1)..(562): unsure at all n locations
nnnnnnnnnnnnnnnnnnnnnnnnnnnnnnnnnnnnnnnnnnnnnnnnnnnnnnnnnnnnnnnnnnnnnnnnnnnnnnnccacgcgtccggcaaaccccatcatctcccttcttcttcttcttcttccacttccctttgtaactttcaatctcagctaatatcaagtaacgtggaaaggatttgttccgtcaaaggttggtgattatacagagactgagttcctgataagttggattgagcttgttttcatttgcggatctttgagaaaaaagtttgcaactttatggctctggaacaacaacatgtttgtgaaaagcggcttcaagccaagaccttttctacccaagagtttcagttgactctcaattgggatgatttaacttgtcccatttgtttggatttccctcacaatggtgtgcttctccagtgttcttcttacggaaacggttgccgtgcttttgtctgcaatactgatcaccttcactctaactgtttggatccgttcattagcgcctgtggtactgaatcacctcctgctcctgatgagcctcgctctaaggt

SEQ ID NO: 125611 - DNA, 574 bp, Arabidopsis thaliana
atgatcctccagctctatacgactcacttagggagaagcacgtacgcctgcaggtaccggtccggaattcccgtgtttcgacccacgcgtccggcaacggtaacaatggttacgccatcgttgagattagtattcgtcaagggtccaagagaaggcgatgctctagattacaagcctggatctacgattcgtgttggtcgaatcgttcgtggtaatgaaatcgcaattaaagacgctggaatctccactaagcatcttcggatcgaatcggattctgggaattgggtaatacaagatcttggatcttccaacggtactttattgaattcgaatgctcttgatccagagacgtcggtaaatctcggagatggcgatgttatcaaactaggtgagtatacatctattttggtgaattttgtgattgatgattttcaggagaagaagcttacgaggaacaataggcgtcaggctaatgcgaggaagcgaattagggttttagaaagtatcaatttgggggatatcactgaggaagaaaagggtttggatgtgaaatttgagaacaagccgagttcta

SEQ ID NO: 125612 - DNA, 812 bp, Arabidopsis thaliana
cccacgcgtccgcggacgcgtgggctcgatcgttcaatctgatagaagaagaatctcaagttttaattcgatggggaaggacgcaaaagctggtgggaagggtaaaggaaagcaagcaagtggtagtgaagaagctccctccaagggtaaaggaaaagcaggaaaagctgcagatggtcttgggacatgcacttatgttaaagcaagacatgttttgtgcgagaagcaaggaaagatcaacgaggcctacaaaaagttgcaggatggttggttgagcaacggagacaaggttcctcctgctgagtttgcaaagattgcagcagagtactctgagtgtccatcagggaaaaaaggaggagatcttggatggttccctcgaggaaagatggcaggtccattccaagatgtcgcctttaatacacctgttggagtcaccagtgcacccttcaaatcaacgcacggataccacattattttatcagagggaaggaagaactgacagatacatctctgctctgctacttttatggaagttgctactgtaaccttaaaaaaaacacagcctttgttgttttggccaaattgctaaaaaaacttgtctcgttttgaataatgaatgcgtaacggccataatatatgccgggtgttgatttctgaagtctgaatattgagacaccatctctattataagctcgtcgcttggtttctttggccttgagacccaaaaaaaaaaaaaaaaaaaaccaaagggcggccgctctagaggatccaagcttacgtacgcgtgcatgcgacgtcatagtcattctata

SEQ ID NO: 125613 - DNA, 521 bp, Arabidopsis thaliana
cagctacaatacgactcacattagggaaagctagcgtacgcctgcaggtaccggtccggaattcccgggtcgacccacgcgtccgcacaatgatgaagttgaaactgccagtatcatgccctttgttcaagaagcactcgacggtatcgagtttgcccgaggagatgccaattctacttggggatctgttcgagctaaaatgggacgccaagaaccttttgaacttaaatacgttgctattggaaatgaagattgtgggaaaacttactacagaggaaactacattgtgttctatgatgctatcaagaaagcctatccagatatcaaaatcatctccaactgcgatggatcctctcatccactcgaccacccagctgattactatgactatcacatttacacttctgctagcaatttgttttccatgtatcatcaatttgatcgcacttcacgcaaaggtccaaaagcttttgtcagtgaatatgctgttactggaaaagatgctggtacaggaagccttc

SEQ ID NO: 125614 - DNA, 397 bp, Arabidopsis thaliana
gacattttggtgatgtttggaagtattggaccgatgatggccttggccactttgagttctttcaaatggcagaagacatcggtgcagccccgatatgggtgtttaacaacgggataagtcacaatgatgaagttgaagctgccagtatcatgccctttgttcaagaagcactcgacggtatcgagtttgcccgaggagatgccaattctacttggggatctgttcgagctaaaatgggacgccaagaaccttttgaacttaaatacgttgctattggaaatgaagattgtgggaaaacttactacagaggaaactacattgtgttctatgatgctatcaagaaagcctatccagatatcaaaatcatctccaactgcgatggatcctctcatccact

SEQ ID NO: 125615 - DNA, 510 bp, Arabidopsis thaliana
atgatctccaagctccatacgactcacattagggaaagctggtacgcctgcaggtaccggtccggaattcccgggtcgacccacgcgtccgcccacgcgtccggaaaatatagagcttgagattgatgctagtgtcaatgttagtgatggagctagtggagtttctaataaaggattagatgagaagggtcgttggacaaggatgcgagttgctaaagttagccttgtgatttgtccgttttggtttttggcgcagcttacatttaatgtctctctcaagtacacaacagttacgtcaaataccatattaagcagtgcatcaagccttttcacctttcttgtttcactaatattcttgggtgagaagttcacatggttgaaactcttcagcgttcttctttgtatgtctgggactataattgtaagtatgggtgactcagagtccaagtcaaatgcagtagctaagaaccctcttttgggagatattctttcgctggtctcagcggcgct

SEQ ID NO: 125616 - DNA, 527 bp, Arabidopsis thaliana
tacgactcactttagggaaagctacgtacgcctgcaggtaccggtccggaattcccgggtcgacccacacgatgcgctggtgccatcattgtaagtgatcaatatcttgacaatgctcagattttcatggcacctgccaccagtgttaatagctccgttggcgatattatctaccgatatatcaactccacaagatcagcgtcggctgtgattcagaaaactcggcaagtgacaatccctgctccatttgttgcttctttttcatcaagaggtcccaatccgggatcaatacgtcttctcaagcctgatatcgctgcacccgggattgatatattggcggccttcactctaaagagatcactgactgggttagatggtgacacccagttctcaaaattcaccatcctgtctggcacctcaatggcctgccctcatgttgctggtgtagctgcgtacgtcaagtcttttcatccggaattggacccctgctgccatcaaatccgccatcattacctgagctaaaccgg

SEQ ID NO: 125617 - DNA, 773 bp, Arabidopsis thaliana
  unsure (1)..(773): unsure at all n locations
tctgattcaagcaaattaagaaaacaaataagccgacaacccgtggaatctactacttctcctggtgggaggcgtagtagacccagggatcagaggagcttgcagcaaaatgatggccaacttagccaaatgagcaataaatctaggactaaaatagaagccaccttgagtatcgaaaatggtggaaagagcccatctgttatagaggcagccaaagctgtagtctctaacttaatacagaataagtccagtccaacgtttagtgaagatggatcatcagaacatccaagtccagtttctgttctcaatgcagaaatctaccgagagatcgaaccatctcctgtgaaaatccaagctagtgaaggcagtgttaatggctctattaactcgggtgttgaacattgcgaggaggaccagtggaatccagcttatagcttctcaaagacaacaacaagcttttcgccagagatgaaccgaaagaagcttcagaatgttgagcatttggttcaaaagctaaaaagactaaactctagccatgacgaaaccagtcaagattacattgcatctttatgcgagaacagtgatcctgacaccgatcacaggtacatttccgagattctttcagcctcgggtcttctcctcagagatcttggctcaggnttaacaacttttcaactgnaccccttnagggcccccanttantccggngggtgntcctttgngattgggaaacctaaaggttcagcanttngggcaatngaaaggtncanccg

SEQ ID NO: 125618 - DNA, 516 bp, Arabidopsis thaliana
atgaactccagctacctacgactcacacttagggaaagctgcgtacgcctgcaggtaccggtccggaattcccgggtcgacccacgcgtccgcccacgcgtccggttgttttgtccaagaacacagcaaggttctcttcctcagagaatctgagccttcttgctgcaagttctgcacctagcccaacggtttctgctggaggaaatggagatgtgatctcctttggagcaatttacaatgcttcacagcatatggcagattatggtcttggtgatatagttttctcatccgaaggagtgatttcgagctatggggatgcgtttcatattcctgacattattgaaagcactgttggtcttttcgcagatgctgatgttacattacatcatcaccaaattggagattcttgtgaagatattttggataacatcttgattcgaaatggagtggctgaagaaatgaatggtgatttgatggaaactagttgccatgacgaagccgagaaagcagaggaag

SEQ ID NO: 125619 - DNA, 850 bp, Arabidopsis thaliana
  unsure (1)..(850): unsure at all n locations
atgatacgctagctctatacgactcactatanggaaagctgcgccgcctgcaggtaccggtccggaattcccgggttgacccacgcgtccgtcgctttctctctctctcaagcaacaatggatgaaggaagagaaggagagatagagaagaagaagaagaaagatgaagaaggagaagtgaaggaaggagtagcatcaatagctttgttaccatgtgggactatctctggtcatttcattcagatgcctagctctatctgttatggcctccatggcactgaactagcttgtgagactgagtgtagccgcggtgaggattatcggttgatcaaactcactatcatagactacaatagaaagaaggaacaaacagttgtagtggagtgcaaaggccatgatgctgctcgaattaatgatgtcgagcatgctcacgggtgggaggaagatgtgataggattagtcgaagaaaaacacgggaagaagaaagtatcggtttcgttcgagtgtgagacattgaaggcagatgaagcagcagaggaccatatcagacagtttatgcccaaattagctggacttgatgctgttattaacattggaccgatgaagatttccgggcttgattttgctgcggtggaagagggacacataaactaagacagcttaactctttctttttgtgtatacatcatatttcaatgctctttgagtctttgtcccatatcgtagaacacaattaacgctttaagctcaaaaaaaaaaaacaaaagnnnnnnnnnnnnnnnnnnnnnnnnnnnnnnnnnnnnnnnnnnnnnnnnnnnnnnnnnnnnnnnnnnnnnnnnnnnnnaaaacg

SEQ ID NO: 125620 - DNA, 516 bp, Arabidopsis thaliana
  unsure (1)..(516): unsure at all n locations
atgannnnnnnnnnnnnnnnnnnnnnnnnnnnnnnnnnnnnnnnnnnnnnnnnnnnnnnnnnnnnnnnnnnnnnnnnnnnnccacgcgtccgaagctgcagttttatcaatgttctccctttcgtttccatcttcttcttctgcccttttaccttctctcgttgctttcgattcttcgcgtcgtctctctttgcaaccaaagaagttaaatcgtcttcaaagtcacttattttcacctcaacatctctcattctctcagtctaatgtctctcgttacagagcgttttgtgtttcttcaagctctcctccagagggaacagtctccgtagtcgatttccatgagaaagattggtcctttctcgaatctatggaaattgactccactgaacatactcagaagattgagaggatcataaaggctggagaattatccgaatcttcgagggttttggtttcaattagctccgaaacattcgttgatcgtttggtagaatcttcaccttctcagcttttgct

SEQ ID NO: 125621 - DNA, 571 bp, Arabidopsis thaliana
  unsure (1)..(571): unsure at all n locations
cagctanncacgactcactatttggaaagctgagaccgcctgcaggtaccggtccggaattcccgggtcgtcccacgcgtccgaaacaaatccactccaaacactccaaattacttgtctctcttctcttccccaccaccactaccttacaaaaaccctaaccctaatttctccacccccaaattcttttcctcaatctctgcgatggaagacgaagaaggcatcgggttaattttagccagagccaccgagctcagactcaagatcagcgattgtatcgataactccagtaccaccgtcagcgacaacggcgatggaaacgaggatctttctcccggagaaggaagaaaaagcgagattattgggaatcaagacaaggattttgactcaatcagctctgaggatgtagatgaagcagaagctgaacggcttttgcgtattcgtgatgctcttgaagctcttgagtctcagcttgcttctttacagaatctaaggcaaagacaacactatgagaagcaactggctctctctgagattgattacagtaggaaaatgttgcttgagaagctta

SEQ ID NO: 125622 - DNA, 858 bp, Arabidopsis thaliana
cttcttcttcttcacctacctttctctctctctctcgtggtccattcgctattctatacttcttgtcggcgccggagagagtgagatgacttggtcggttttcagatccataaatactccaacactcgacctctccaccgcacttcgctccactcgtaccccattggtcgctgctggtgtcggctgcgcaacattcgctggtgtttctctcttcagaatgtcttctagatctcctcctttcgcttccctctctgtctctgcttcttctgtgaagaaggaagttgtgtctactgagaaagcaccagctgctttgggaccttactctcaggccattaaagccaataatctggtttttctttcaggtgttcttggacttatacctgagactggaaagtttgtttcggagagcgtcgaagatcagactgagcaggtactcaaaaacatgggggagatattgaaagctagtggtgctgattattcctcggtggtgaagacaacaatcatgttggctgatttggctgacttcaagacagtgaacgagatatatgccaaatacttcccagctccttctccagcacgatcgacgtatcaagttgcagctttgcctctaaacgccaagatcgagattgaatgtattgcaacactctagaacactcaaatcaatctctacgaagggtattttggtccggaagatgtcaaaacaaataagagaaacaatggtttttggggcttaacccatatttaacctacttttcattttgctgcactacggaaaatgttgcggattatcaaccattaggttggttacaaatcaaaagcctctaatcaaggataagttatttaggtgtcttgtccacc

SEQ ID NO: 125623 - DNA, 454 bp, Arabidopsis thaliana
aaaattggttatgtttagagtactttccacttgcttctctgttttggtggatgattatccacagaaaaggaggtctagcctctaggtcgtcatgatgttgtttgttggtgaaaatgtagtgagggatgacaacttaatgtgccttattctagctgagtttattgggatataaactttcatgatacaaaactaagcctttgaaacttttgggttttgctttaaaattcttgatttggttggtattagtcttcaaattaacttgttccagtgtagttgtagcaaggttgagttgctctgtttttccttcctgattttatctacttgcttctattatcttatggaatatcaaaggtactcaaaaacatgggggagatattgacagctagtggtgctgattactcctcgctggtgaagacaacaatcatgtaagggatcttgtttttttcaacagtac

SEQ ID NO: 125624 - DNA, 620 bp, Arabidopsis thaliana
  unsure (1)..(620): unsure at all n locations
nnnnnnnnnnnnnnnnnnnnnnnnnnnnnnnnnnnnnnnnnnnnnnnnnnnnnnnnnnnnnnnnnnnnnnnnnaataaattcaccacgcgtccgggaaaaacgaaagggaacaaaaagaaataggggatatggtaggcggacgcggcggagttggcggtggtggtggtaacagagtggaggcggatcagtggcttgtaacatcggagaagcttctagcgtctagtgatcttcaaggagcaaagacatttgcgatccgcgcatgcgaagctgacccgacccgagcagaagctgcagactacatcctcgcaatctgcgacattcttctcgccggagagactcgtttaggtgattccaacttgccagactggtacgccgttctccgactcggtcgtttagctcaaaaccctgaacacgtcgcgactcagtaccgtagactcgctcttctcctcaatccttccgttaatcgtctcccattcgccgatcgagctcttaaaatcgtctccgatgcttggttcgttctctctgatccgttcangaaatcattctacgaccgagaattgcaacttagtcaactcggtcaatctggattccatcctcaaacccaatcgcatcaaaattt

SEQ ID NO: 125625 - DNA, 516 bp, Arabidopsis thaliana
  unsure (1)..(516): unsure at all n locations
tcagctctatacgactcacttagggaagctggtacgcctgcaggtaccggtccgggaattccggggtcgacccacgcgtncgcggacgcgtgggcggacgcgtgggtctctctcttcctcatttctgcgcaagaatctaaaccaaatctctcatcctctcttctatgtcccaaaacaggaacataactactactactaccatgtcttgactctgttgagaatcttaaatcctacctaacctccaatgggtaagaagagcggttcttcttcttcttggctcactgccgtgaaacgagctttccgatctcccaccaagaaagaacacaacaacaatgctcatggtaatgaagtcgacgaagatgaagacaagaagaaagagaagagacgttggttatttagaaaatctacgaatcatgactctccggtgaagacctccggcgtcggaaaagacgctccggcgcagaaatccacagaaacaacgacgatcatcaacccaaccgttttatcctctgttac

SEQ ID NO: 125626 - DNA, 583 bp, Arabidopsis thaliana
gacaacttgtagaagagaagaaaaaagacatgaaggagattgaggagctttgttcagttaagtcagaggaacttaatcagttgatggaagagaaggagaagaatcagcaaaagcattaccgtgagctgaatgctatacaagaaagaacaatgagtcacattcaaaagatagttgatgatcatgagaaattgaagaggctgttggagtcagagaggaagaaactcgaaatcaaatgtaatgagttggcaaagcgcgaagtgcacaatggaaccgagagaatgaaattgtctgaagatcttgaacagaatgcatctaagaatagctctcttgaactagctgccatggaacaacaaaaggcagacgaggaagttaaaaaacttgctgaagaccaaaggaggcaaaaggaggagcttcatgagaaaatcataagactagaaagacagagagatcagaaacaagcgattgagcctgaagttgagcagttgaaaggacagctcaatgtgatgaagcacatggcatcagatggcgatgctgaagttgtgaaagaggtggacatcatcttcaaagatttaggtgagaagga

SEQ ID NO: 125627 - DNA, 613 bp, Arabidopsis thaliana
cccacgcgtccgcggacgcgtgggttcacccactactattcgccgttcgcttttccctcgccgtcgaaatcaacatggcgccgaagaaggataaggttccgccaccgtcatcgaagccggcgaaatccggaggtggaaagcagaagaagaagaagtggagcaagggaaagcaaaaggagaaggtgaacaacatggtgctgtttgatcaagctacttatgacaagcttctcactgaagctcccaagttcaagctcatcaccccttccattctctctgaccgtatgaggatcaatgggtcgctagcaaggagagcgattagggagctaatggccaaaggtgtgatcaggatggtcgctgctcactcgagccagcagatctacactcgtgccaccaacacctaagatgtttggtttctttatccacctaagatgtttggcttctttttcttatctcttgttgtttgattcttcaggaacttgttagaatcttttgtttcgtattccgtttttttgagatatatggttatttaaaacgcatcaagacttctaaaattgagtcaatcctttgatatatccgttctagaattcggtaatggagttgttccggtttagtt

SEQ ID NO: 125628 - DNA, 390 bp, Arabidopsis thaliana
  unsure (1)..(390): unsure at all n locations
actattcgccgttcgcttttccctcgccgtcgaaatcaacatggcgccgaagaaggataaggttccgccaccgtnatcgaagccggcgaaatccggaggtggaaagcagaagaagaagaagtggagcaagggaaagcaaaaggagaaggtgaacaacatggtgctgtttgatcaagctacttatgacaagcttctnactgaagctcccaagttcaagctcatcaccccttccattctttcttaaccgtatgagggtcaatgggtcccctagcaaggagagcgatttaggggggcttattgggccaaaggtgtgatccaagaatgggtcgcttgctcaacttggaggccagcaagattctttcaatttggtgcccacccaaacaccttaaa

SEQ ID NO: 125629 - DNA, 888 bp, Arabidopsis thaliana
  unsure (1)..(888): unsure at all n locations
gcannnnnnnnnnnnnnnnnnnggaaagctggtacgcctgcaggtaccggtccggaattcccgggtcgacccacgcgtccgcttagatcagtctcaaagggggaaaaaaaacttaaaagaaacattaagaggcaacacaaatcacacaaaagatcaaattgaagcctaagaagaaggcaaaaagtgagaagcaatggctaccatgttgaaggtctctcttgtattgtcattgttaggttttctggtgatcgctgtcgtgactccatcggcggcgaacccattcaggaagagcgtagttctcggagggaagtcaggcgttccaaacattcggaccaacagggaaattcaacaacttggaaggtactgcgtggagcaattcaatcaacaagcacagaacgagcaaggaaacataggatccattgcgaaaacagacacggcaatttcgaatccattgcaatttagccgagtagtgtctgctcagaaacaggtcgtcgctggactcaaatactatctaaggattgaagtcactcaacccaatggctctaccaggatgtttgactctgttgtggttattcaaccatggctccattctaagcagttgctcggtttcactcctgttgtcagtcctgtctactaactttatttcttcttattcgacttaaatttccataatatgatcaagaaaagactaaaaggtgtatgatacaaagctattaagaatgggttaatagttggttttcatgatatgtttacgttgttcataaataaaaacaagttgttattaagaatatgcgatgagacttgatgaaatatcagaaccatcaacaaactttggaatgttgtagcattctcttaacaaaaacttaacataagggttcnnnnnnnnnn

SEQ ID NO: 125630 - DNA, 1364 bp, Arabidopsis thaliana
  unsure (1)..(1364): unsure at all n locations
nnnnnnnnnnnnnnnnnnnnnnnnnnnnnnnnnnnnnnnnnnnnnnnnnnnnnnnnnnnnnnnnnnnnnnnnnnnnnccacgcgtccgctcatcttttattttcccggaaaaaaataattaaacttttactctcttccgatctcctttccttgtacatctagatccaagcggtatcgatggctcgacgtggattattgatttcgttcttcgctatcttctccgtcctgcttcaatcttccacttctctgatcagttcttctagcgtcttcgtcaatccttccaaagtcaagcaggtttcatcgaaacccagggcgtttgtgtatgaagggtttctcacggaattggaatgtgatcatatggtctcccttgcaaaagcgagcctgaagagatctgctgttgctgataatgatagtggagagagcaaattcagcgaggttcgaaccagctctggcacccttatctccaaaggaaaggatcccattgtttctggtatagaagataagatctccacttggacatttcttccaaaagaaaacggggaagacattcatgtattgagatacgagcacggccaaaaatacgatgctcactctgattactgtcatgacaaagtcaacattgtccgtggtggacatcgcatggcaacaattcttatgtatctatccaatgtgacgaaagggggagaaactgtattccctgatgcagaaaaaccttctcgccgagcactatctgaaaataaagaagacctttctgattgtccaagagaagaaatgctgtgaaaccaaggaatggggatgctttgtgtcttaaccacctccacccagacgcaatcccggacccattgagccttcacggtggatgtcctgtgatagaaggagagaaatggtcggcaaccaagtggatccacgtagactcatttgataggatcgtgacaccaagcggaaactgcacggatatgaacgagagctgtgagagatgggcagttcttggggaatgcacaaagaatccagagtacatggttggaactacagagcttcctggctattgcaggcgaagctgtaaggcttgctagactttattttacctcttctttgtcttattatgtgcctttactctcaaagttttctgtttttttccgagtttctcttagagttgttgtcgttgatgaaatttgttctaaggggagttctgtaaaactatactgttcctgaaaagaatataatgtaaacacatagattcagtcaaatacttaataggttatataaaaaaaaaaaaaaaaaaagnnnnnnnnnnnnnnnnnnnnnnnnnnnnnnnnnnnnnnnnnnnnnnnnnnnnnnnnnnnnnnnnnnnnnnnnnnnnncaa

SEQ ID NO: 125631 - DNA, 692 bp, Arabidopsis thaliana
cccaccggtcccgagacacaaacaaaaaacaaaacaaaacaaaaaccaaaaaaacaaaaaaataaatggcaagaatttcactagggatatgtctgatgttagtagtagcatcaagtgtgatctatgaagcgcaaggaacgttcttactaaaccattacttgaagaagaattttccaaaaaaatgcaacgagtttacgccttacgctaacaagggtatgataacgttggtgaccgatctcgaaggtagcagtccggccactacagagttcaagactttctttacacagttcaagtcttacatgtctttcatcgagacaacatcggcctcaacaaaaaatgttgatgccgagatgacagctaaatgtgacggtcttttcaaggccatgtctgcattgagtgctagtaaaggcgtcaaatcagcggatgctgggagtatgaagatgaccatgttgtcgatgggaaagactttggttgagcagaagaagaatacaaagataatgacattgaaggaaaagaaagagttggtcatagatatggtgaaatggactaaaatggtcgctacatttgtgaagtcggcctccgagcagaaaggaaagtctatcaatatagcatcttatggtcttgatgtcgatgttaacgatagttctattgtcggtggagctgcaagtagtgaatcatcctccactaaatct

SEQ ID NO: 125632 - DNA, 535 bp, Arabidopsis thaliana
  unsure (1)..(535): unsure at all n locations
cttcttcatcttcttcctcttgggagacttgatttattttgtgatcagtctcggattgtaacatactgcgatcttttttcagcttctctaatggcggatactgttgaagagcctcaattacaaaatggagcggcaccagctgagtccgaaaccgagcaaaatccgattccggaaccacaactccaaactgagcccaaactaaccggagaaattccggaaatagaagcggatttaacgccggaggaagtacaatcggaggtaacggatgcaaagccagaggaagtacaatctgaggtaaagccggaggaagtaaaaactgtggtaaccgatgcgaaaccggaggaagcacaatctgaggtgaagccggaggaggtacaatctgtggtaaccgatacgaaaccggatttaaccgatgtgggtctttntccgggaggttcttaggngatcccgatccggttgacgggggtttancaggatnttctcttntntttnaggaagtttttttgggcaagcatttnccttgggngcnntnggg

SEQ ID NO: 125633 - DNA, 759 bp, Arabidopsis thaliana
  unsure (1)..(759): unsure at all n locations
atgatcctgccagctctaatacgactccttaagggaaagctcgtacgcctgcaggtaccggtccggaattcccgggtcgacccacgcgtccggtagacgttaatgacagctgtcatagctccgttacttctgggttagctccgataacggcgtcaaactacggcgttaatatcctgaacgttaatacacaggggtttgtgccgttttggcctatgggtatgggtactgcgtttgttactggtgggccggatcaaatgggccaaatgtgggctattcctaccgttgctacagctccgtttctgaatgttggtgctagaccggtgtctagttatgtctcaaacgcttcagacgctgaggcggagatggaaacgagcggtggcggaacgacgcaaccgctgagggatttttcgttggagatttatgataagagagagcttcagtttttgggtggctcagggaactcatctccgtcttcatgtcatgagacttaaggaattttaactcttagttctagtttctttttagtttttagtaagtttgattcctgatttaggttaagtaagatttgtaaaagaattgggagcacaatttcaattttatgtttctgtcaaacattttggtaattaatggaactatcctatcatttttaaaaaataaaaaaaaaaaaaaaaacaaaagnnnnnnnnnnnnnnnnnnnnnnnnnnnnnnnnnnnnnnnnnnnnnnnnnnnnnnnnnnnnnnnnnnnnnnnnntagaatcg

SEQ ID NO: 125634 - DNA, 497 bp, Arabidopsis thaliana
tacgactcactttagggagagcacgtacgcctgcaggtaccggtccggaattcccggtgtcgacccacgcgtccggcaattgtagcacttccggacaaccttaagatgcctgaagtactgggctaagaagcgtggggtgtattcaaatgtgactggatttcttggcggtgtaaactgggcacttttggttgctcgtgtctgccagctttatccaaatgcaattcctagtatgctggtttctcgtttttttagagtatatactcaatggcggtggccgaacccagtcatgctttgtgcactagaagaggatgagcttggatttcctgtctgggaccgtcgtaagaatcatcgcgaccgctatcaccttatgccaataataactccagcttacccatgcatgaattctagttacaatgtctctcaaagcactcttcgcgttatgacaaagcagttccagtttggtaacaatatcttgcaggagattgaattaaataaac

SEQ ID NO: 125635 - DNA, 521 bp, Arabidopsis thaliana
aatacgactcactttagggaaagctcgtccgcctgcaggtaccggtccggaattcccgggtcgacccacgcgtccggaagctgtgtataaattggatcctcagatccggtgattacctaaatcgcgtcaattctcaacccagttttcagatttggtttttggaagctaacttattgttggaggtggagagatatggctgactttggtttgttctgtttcccttgtttaatggaagttgtttcatcatcatcatcatctctgtgattgtaattgatctcacaccatgtctgattacaatggtgatgatcttgaagatgaatatatggctgatgagtatgacatggatgatctcgaggatgatatgaatgccgcgtttgatggaagagatatcgatgcttctgattccgaagtcgaagatttcgatcaattgaacaaggctgcagatacttctgctgctcaagcacgggatggggaaggatattcaagggtataccggggggattcttcttactttttactag

SEQ ID NO: 125636 - DNA, 456 bp, Arabidopsis thaliana
  unsure (1)..(456): unsure at all n locations
cccaagcgtccgcccacgcgtccgcccacgcgtccgaaaaaaataaaaaatcgcacgtttcttcttcttcttctctctcgcaacaaatctgtattagggtttttgagaaatcttcatttcgtgattttgaaatttatttgtatttgattttgttgttgctttggaatcatctgcaaccaccatgatttctgattcgatcaccaacgcttctgctacttcagctccaaccgccagggatttcggaaaaaagaaaaggacgaacaggtcggccaaattgaaacagagcaagctaggtcttcgtcgtgaacaatggctttctcaagttgcgatgattaacaaaggggataaggaggaaatggaatccaatcgaagaattgggagtgaaaagccttttccaaggggttttttncccgggccnggtgggggntttttgnggggggtaaacaattnggcccc

SEQ ID NO: 125637 - DNA, 485 bp, Arabidopsis thaliana
gacatctgagagcttttttcgtttcttgtgagatcatctaaaaaatggcttcgactgtttcgctttctttactcagcggcggcagtggagctcttcaggcgcgttgcgcaagaaccgcgcatgttagcccacgagcggcgcattctaacaaacccgcgctttcttcgttctcgctgaccggcgcctctcgcaggaatctgttattttcgttgacggcagcgacggtagtgacgggacttcagcctgcatcaatggcggagaatattccgttatttggtataagaaagaaactgaagaaagcagaagaagaagcggtggagatcgtgaaagaaggctttgagacggcggagaaaggcgttgatgcggcggagaaaggattagaagcggcggagagaggtgtagagacggcagagaaggaaatcgtgacggcggttagctttaatggattgacacaagctggagcccgcgtggccgctgagttcgtc

SEQ ID NO: 125638 - DNA, 772 bp, Arabidopsis thaliana
tcgaatgtatccataagcttcctatcgaattcgcggccccgcgaaagagaacaagtttctgtctgtggctccttttgagtgtgcttggagtgatgatctgaagttccgggaagcgggaagaggttgtgttgcgtttgatgcgtttgctcacaatgatgtcacggtggtgtttagagagaatgtggggactcaacattaccattataagaaagataatagtcctcactacattgttatcattggtagcaataggaatcgtaggttgaagattcaggtagatggaaaatctgtggtcgatgaggaagcttctgatctttgtcgctgttctttggagtttcagagttactggattagtatctatgatgggttgattagcattggtaaaggtcggtatccgtttcagaacctggtatttaagtggcaagaccccaagcccaattgtaatgttcagtatgttggtctgagcagctgggataaacatgttggatatagaaacgtgagtgtgtttcctgtgacacataatcatatcttgctgtggaagcaagtggattgccgtgaagtttgaggagatgagtctggtgacaagaaagttgtggaggaagggactggttatgattatgaaccatggggacttgggaattttcttgaagaagttggcaattattctgaaccaagtctttcctttgttgggtgaaaaaaggaaaatgggatggtccccttggcttcaccaagggcttatttttaccatagcctttcagggtaatttttttct

SEQ ID NO: 125639 - DNA, 706 bp, Arabidopsis thaliana
  unsure (1)..(706): unsure at all n locations
ttatcattgtcttctcaaaacgtatgcgctggtttttcaaaagtgaaggcaagagattttatgaagaaagatggttgcggcgaaagagaacaagtttctgacagtggcaccttttgagtgtgcttggagtgatgatctgaagttccgggaagcgggaagaggttgtgttgcgtttgatgcgtttgctcacaatgatgtcacggtggtgtttagagagaatgtggggactcaacattaccattataagaaagataatagtcctcactacattgttatcattggtagcaataggaatcgtaggttgaagattcaggtagatggaaaatctgtggtcgatgaggaagcttctgatctttgtcgttgttctttggagtttcagagttactggattagtatctatgatgggttgattagcattggtaaaggtcggtatccgtttcagaacctgggatttaaagtggcaagaccccaagcccaattggaaatgttcaagtatgttggcctnagcagctggggtaacatggttggntatagaacgtgagtgtggttcccggtgcacataaacaaancttgnctgtggaaccaagtggnttcccgtaaggtntaagggnatnnnctggtgccnaaaagggtttgnagnanggctggtatggtntgnacaatgggnctttggaannccttggaagntncgaattcctgnnnaagc

SEQ ID NO: 125640 - DNA, 497 bp, Arabidopsis thaliana
cgactcaccttaggggaagcacgtacgcctgcaggtaccggtccggaattcccgggtcgacccacgcgtccgcccacgcgtccgcttttgtctttattcgatttaaaagttgatgtactctgcatctgattgttttgctcgtgttttattaccacgttgtggttgaaatttgacggcggaagttcatggtgaaggcaagagattttatgaagaaagatggttgcggcgaaagagaacaagtttctgacagtggcaccttttgagtgtgcttggagtgatgatctgaagttccgggaagcgggaagaggttgtgttgcgtttgatgcgtttgctcacaatgatgtcacggtggtgtttagagagaatgtggggactcaacattaccattataagaaagataatagtcctcactacattgttatcattggtagcaataggaatcgtaggttgaagattcaggtagatggaaaatctgtggtcgatgaggaagcttctga

SEQ ID NO: 125641 - DNA, 537 bp, Arabidopsis thaliana
gctggtacgcctgcaggtaccggtccggtattcccgggtcgacccacgcgtccgtctctttccccttttacgctcttttctttcttcattttctgtggaaattttcagagcttttctgtgtaaattaaagagttcttttttgaaggaaataggcaatctcatcctgagaatcaaacaaccggaaaattcaataaatgaaacgcctttaattgttttctcttacaaaacttctaagcagattactttggcggagacccatctgattggtatttttgcagatattccgttcttggagtaccaactggcctggagctacattccttagcctggagtaaataataggctgaccctttgaaatcaacatggtttcctcaagaacttaataacttttcgctggtttctgtcctggagcgttgttgtgtgtttggtcagaggtattaataagtccaatgcaaggtccacgaagcactggtgattcatcgactggaataaattatgcagatggagaacccatctgtagcaccaattcagagacta

SEQ ID NO: 125642 - DNA, 867 bp, Arabidopsis thaliana
aaagtgaataattgaagaaaagacgttataccttccccatccacattttcttgcttaactgcagaacaacaccaaattcgaccctatcaagttttgattcgtgtctacatagaaagagtctcaattgttctgtccctggacttttttttgtttcgtttttcttgttaagatcgaaaactctgttttggtagatttttgtgttcttgattttgattcaagatggggaggctgtttgtggtgaatcttgaagggaagatctatagctgcaaacactgtaagactcatcttgctacttatgaagacatcatctccaagtcttttcactgcaagcatgggaaagcttatctcttcaataaggttgccaatgtttccattggagagactgaagaaagactgatgatgactggtaaacatactgtggctgatattttctgtgtctcgtgtggatcaatcgttggctggaaatacgagactgctcatgagaagaaccagaagtacaaagaaggaaaatcagtgcttgaaagatttaagatatcgggtcctgatgggagcaactattgggtgagtagccatggaaggcatataggtggaagtgatgcagatgatgcttgaatcatctctctctctctctattctctgatttgaccatttcatgtaaatgtaaattattcaacctccattccaatttcttgtaataagactaaccaatactctttcttctcttgacttattatgtctcagtaaataaaaaatctgattctgtctaaaaaaaaaaaaaaaaaaaaaaagggcggccgctctagaggatccaagcttacgtacgcgtgcatgcgacgtcagagctgttctaagggaacgccaaccacc

SEQ ID NO: 125643 - DNA, 822 bp, Arabidopsis thaliana
  unsure (1)..(822): unsure at all n locations
nnnnnnnnnnnnnnnnnnnnnnnnnnnnnnnnnnnnnnnnnnnnnnnnnnnnnnnnnnnnnnnnnnnnnnnnnnnnnnnnnnnccacgcgtccgatcgatcaacaaagtgaggttaggttccatctccacctctttctctctcgaatcttctccgattaaaggaacaaggtctggtttacaaaagtctcatagatgtcgagtggaacagtgagaagggtttcacgtcaagatatacaactggttcaaaaccttatagaacgatgccttcaactttacatgaatcagaaagaagttgtggatactttactagagcaggctaaaatcgagcctgggttcacagaactagtttggcagaagcttgaagaagagaatcgggagtttttcaaagcttactatcttaggctaatggttaaacaccagataatggaattcaacaagttgcttgagcagcaggttcaccacatgcgtcagatgcatccactggtggtgcttctgtccaatcacaaatgggtctcatcttcaatcaatgaatcagaaacaattatgctatccctctgagcacactgaccaatctttgaagtctgaaagtgcacatcatncaatggcttctagtctgtctaagcattccttcatggctcttccacactaatacaaacgtgccctcttctataacatatcaacccatgctaggagagttgatgcttctccaatatgctctcatcgcanaccacaaacatgcntatgatgcanggaatgantggaggaatgatcaagcctgagactgctttacaaccctgcttattcatgtatggtggcgaacg

SEQ ID NO: 125644 - DNA, 281 bp, Arabidopsis thaliana
gagattgggaagcaagccagaagaaaatgcaacggaagaagaatcaagctgaaggaaataatactatgattctaagacacacatagactttttaatactagtgaagagagttttattgagagaagctctacttcatgttttgctgcttagacataagcaggctacttacatatacaagcggctaagaatacgagaccttttgctagtaatgtgaaaagaggttgaagattaaaaataacattacgccaagaatgatatcttgagcgttttatttcaatgga

SEQ ID NO: 125645 - DNA, 887 bp, Arabidopsis thaliana
  unsure (1)..(887): unsure at all n locations
nnnnnnnnnnttaggtaccactatagaagagtctatgacgtcgcctgcacgcgtacgtaagctcggcattccgcccgcctttgaggtcacattttctagctgtgttccttttctcagcaactctctcatcttgcctcgtagtctcggcttcgctcgtggaagggaaagtctcttgtttcgactgtcccaatgattatgattattcaggaatcacggtcggagttagctgtagccacacaaacacgcggttcactgtaacaactgacaagaagggtgacttcatatcggaacttccctcaaagatcgaatcaaactgtgaagcagaactccaaggcagcgtcaagcaactttatgcttccaagaataacgttaagtcgaagattgttaagcttggcggtgacaaatatggtctctcttccaagttgttcttcttgaaatcatgtccaagaagcttcggatcttttagttcgtccaagaccgttgatttaccagttcctcccgagtgggggctggctccgaccagttattacgttcctttcttgcccatcatcggtatcccatgatacgcaccgttttaatccttgttttgtgtgttttatgtaatatattcaaattatatatgtgtagaggacatgtaactatcttagctgttcttttcaagttcatgcttgaactgaagtttgtgtgtgaacttagtgtctgaagatggtttatgttgtgacccatttatgaagcataattttaatatgaaatctgttattgtttcctctaaaaaaaaaaaaaaaaaaaaaaaagggcggccgctctagaggatccaagcttacgtacgcgtgcatgtgttcgtcatagctaaggctatagtgnnnnnnnnnnnnnnnnnnnnnnnn

SEQ ID NO: 125646 - DNA, 781 bp, Arabidopsis thaliana
  unsure (1)..(781): unsure at all n locations
nnatgannnnnnnnnnnnnnnnnnnnnnnnnnnnnnnnnnnnnnnnnnnnnnnnnnnnnnnnnnnnnnnnnnnnnnnnnnnnnccacgcgtccgcttcgtcaatcgctttagggtttgattatatatatatagatgtggttagcaggagcctcccgggctaatctgataactaaggtacttgaagaagtaagccccaaagctcctgctagattatttttagcgtttgtgttgcagatttgccgtattccttaggcttttctgtgtcaaaaaagcgtctatatctctcttttctatgtatgttttgctttgagctgtgtttgttgatggaatcgagttggtatcaacgtttgtttatgtggcaatgattataaacttacccgcgcttctgagattattcaatgaagtagatacgcttgatacgccagttctgcttcagataattcttgatcgaaaaagctgtattcttatccgagcctttcattgctattttgtctttcttctgagttattatttcttgggaatgtcgatgaggatctaatccaatcttacgaggtgcagtggagctgagaccctgttttacagggagaaccccttggcagaagctgtaatttctttgacttcaatggattttactgagactttctcattcatttatcgcttttattgaaatctatttgagtttaaaaaaaaaaaaaaagnnnnnnnnnnnnnnnnnnnnnnnnnnnnnnnnnnnnnnnnnnnnnnnnnnnnnnnnnnnnnnnnnnnnnnnnnnnngaatcg

SEQ ID NO: 125647 - DNA, 491 bp, Arabidopsis thaliana
atacgactcacttagggaaagctggtacgcctgcaggtaccggtccggaattcccgggtcgacccacgcgtgcgcggacgcgtggggtttcttaaatcttatttgtattacaataaccaaaacccaagtttacaaaacaagaagaagaaatgttttgagttgtcatggatgtaatagctactacaactactatagtatccgacttggattcacgacaacccgaaatcgaagctccgatccggatccagcccgcgaagcctatttctttctcaaacggcaaacgctgccaccaccatcatcttgcatctgaagcggttgcggttgcgacttataaagaatgtctaaagaatcacgcagcaggtatcggcggtcacgctttagacggatgcggcgagtttatgccgtcaccgtcgtttaactccaatgaccccgcttcactaacgtgcgctgcttgtggttgccaccgtaacttacaccgccgtgaggaggat

SEQ ID NO: 125648 - DNA, 569 bp, Arabidopsis thaliana
  unsure (1)..(569): unsure at all n locations
cccaaacgtccgcggacgcgtggggatgttcttctgtgaaggagaccaaacattcatcgggaaagtcccttgggtgattgttaaaacagacaattactttgttccatctctgtggttaataccgggtttcgatgatgaactaaacaagctattcccacagaaagcgactgtctttcatcacttaggtaggtatctttttcacccaactaaccaagtatggggcttagtcactagatactacgaagcttacttatcgcatgcggatgagaagattgggattcaagtaagagttttcgatgaagacccgggtccatttcagcatgtgatggatcagatttcatcttgtactcaaaaagnggaacttctacctgaagtaggcacactagtggagagatctcgncatgttaatacccccaaacacaaagccgtgcttgtcacatcttttgagcgcgggtacggggggaccttaaagggntgtnttnggatntccgcanaactggggatcatcgggttanagcggncagaggttngcgccnaaaagtcctttgaaantttcggatttttttttt

SEQ ID NO: 125649 - DNA, 600 bp, Arabidopsis thaliana
  unsure (1)..(600): unsure at all n locations
accccaaccaaccggtnccactngccgggtccggnacttaaggtnntttgggatcccgcatcactggnaatcaccggtttcancancgnccnagaggtttcngcagccngaaaaaggtgcatatggcaaagctcttgcggaaatgtatcttttgagtttgacagataatcttgtgacaagtgcttggtctacatttggatatgtagctcaaggtcttggaggtttaaagccttggatactctatagacccgaaaaccgtacaactcccgatccttcgtgtggtcgggctatgtcgatggagccttgtttccactcgcctccattctatgattgtaaagcgaaaacgggtattgacacgggaacactagttcctcatgtgagacattgtgaggatatcagctggggacttaagctagtatgattttttgtgtgccttactctgtttttgattatttgatgtatcatgtaacttcttaaattagctttaataaagtcaattttttgtgcttaaaanaaaaaaanaagaaaagggcggcccgctatagaggatccaagcttacgtacgcgtgcatgcgacgtcatagtaagtctatagtgtgt

SEQ ID NO: 125650 - DNA, 775 bp, Arabidopsis thaliana
  unsure (1)..(775): unsure at all n locations
atgannnnnnnnnnnnnnnnnnnnnnnnnnnnnnnnnnnnnnnnnnnnnnnnnnnnnnnnnnnnnnnnnnnnnnnnnnnnnnccacgcgtccgctcgaatcgctggaacatttggttacatggctccggagtacgccatgagaggccatttgacagataaagctgacgtttacagctttggtatagtagctctagagattgttcatggaagaagcaataaaatagaacgatccaaaaacaataccttctatcttattgactgggtggaggttttgagagagaagaataatctgttggaactggtggatccaagactaggatcagaatataacagagaagaagcaatgaccatgatccaaattgcgataatgtgtacaagctcagaaccttgtgagagaccgtcaatgtcagaagtggtgaagatgttagaaggtaagaagatggtggaggtggagaaacttgaagaagcttcagtccatagagaaacaaagagacttgaaaacatgaacacgatgaagaagtactacgaaatgatagggcaagagataagtacaagcatgagcatgatcatgagtgatcgtagtgaatcatcagcagatcattagcagttgtgtaaataccatatcaagatggaaaccccacaaactgtctttagcatttcagaagcaatctaagtaaaaaaaaaaaaaaagnnnnnnnnnnnnnnnnnnnnnnnnnnnnnnnnnnnnnnnnnnnnnnnnnnnnnnnnnnnnnnnnnnnnnnnnnnnngaaatcg

SEQ ID NO: 125651 - DNA, 933 bp, Arabidopsis thaliana
  unsure (1)..(933): unsure at all n locations
nnnnnnnnnnnnnnnnnnnnnnnnnnnnnnnnnnnnnnnnnnnnnnnnnnnnnnnnnnnnnnnnnnnnnnnccacgcgtccgtacggctgcgagaagacgacagaagggaacgtgttcaaccattggggctattataatgactcctcttcttactaagcttcttgctggtcagcttgttcccgttgacgctgctggacttgctcttagtacgttccaagtagtgttggttcctaccataattggagttctggcaaatgagttctttcctaaatttacgtctaagatcataacagtgacgcctctaatcggagtcattctgactactctgctctgtgccagccctattggacaagttgcagatgttttgaaaacccaaggagctcaacttatactcccggtggcactccttcatgctgcagcctttgctattggctattggatttcaaagttttctttcggcgagtccacttcgcgtaccatttctatagaatgtggaatgcaaagttcagcgctcgggttcttgcttgcacaaaagcatttcacaaaccctctagttgctgtcccctctgcggtcagtgttgtctgtatggcgcttggcgggagcggccgtggccgtgttctggagaaacctaccgattccggcagatgacaaggatgacttcaaagagtaaatgaagtaggaaaggcggtttgcatcttctccaaacgatgtgattgttttgttggaatgttagtaaacattacaaaatttgtgttgaaaaacatgaaacaaaatgtgtttaagagacatagaaacaagggcgtgcatgatgacaactttgtggtcaaccttttttttatttctcaattaatggacaaatcttttttggcaaaatataaaaataaaaaaaaaaaaaatcccctntttaaaaaaaatatataaatatataaaa

SEQ ID NO: 125652 - DNA, 648 bp, Arabidopsis thaliana
  unsure (1)..(648): unsure at all n locations
ctcactatagggaaagccggtacgcctgcaggtaccggtccggaattcccgggtcgcccacgcgtccgggctactcttttagccactcctatcttctctcctttagcttcttctccagcaaggaaccgtctttcttgctctaagatccgtttcggttccaaaaatgggaaaattctcaattctgatggtgcccagaagttgaatctctcaaaattccgtaaacccgatggccaaagatttctacaaatgggttcttctaaagagatgaactttgagagaaaactctcagtccaagctatggatggtgcaggaacaggaaacacatcaacgatctctcgtaacgtaattgcgataagtcacttgttggtatcacttgggatcattcttgctgcagactatttcttgaagcaggcgtttgtagcagcgtctattaaagttcccaagtgctttggtttgggatgttctgtattttctctgttcttatgatatttgattcggttgttcctgctgctgcanatggtttgatgaatntcttcgagcctgcgtttctgtttatccaaagatggctnnctttgttctatgttccttctcttgggtgtcttcctctttctgttagagatattccggctgcttcaggtgtcaaaatct

SEQ ID NO: 125653 - DNA, 641 bp, Arabidopsis thaliana
acgactacgtttccactgttctgcttcttcttagcctccttatcttcttgagtcagcgtactgattctgcctctatcgtcaagtctcttcctggttttgatggccctcttccctttgaactcgaaaccgggtatattggtgttggtgaggaagaggaagtgcagttgttttactactttatcaagtctgagaggaatccacaagaagatcctcttctactctggttaagtggaggacctggttgctcttctatctctggtcttctttacgagaatgggcctgtgaatgtgaagattgaggtttacaatggaactcttccttccttggtctctactacatattcatggactaaggtttcgagtataatataatttggatcagcctgttggaactggcttctcctactcaagaactaaacttgttaacaaacccagtgattcaggagaagccaagagaatccacgagtttcttcacaagtggctaggcaagcatcaagagttttcctgcaaccctttctatgtcggtggggattcttattgcggtatggtcattccggcactcgttcaagacatctcaaaaggaaactatgtatgctgcaaacctccaataaatcttcagggctatattgttggaaacccatc

SEQ ID NO: 125654 - DNA, 570 bp, Arabidopsis thaliana
atgatactccagctctctacgactcactattgggaaagctggtcacgcctgcaggtaccggtccggaattcccgggtcgatccacgcgtccggttggcctccgacgacggctcaagcctatcttcgtcgccggcttctccgatggttaccaatcgcgtagacgtcttctggcacgaaggaatgctccgacacgacgccgtagaaggcgtcttcgacactggatacgaccctggattcctcgacgtattggagaagcacccggagaacgccgatcgcgtcaggaacatgctttcgattctccgacgcggtcccatcgctcctcatgtcaattggtttaccggtcttccagcaatcgtttcggagcttctaatgtttcacacttcagagtacattgagaagctagtggaggcagataaatcaggagaaaggtgtgaaattgccgcaggtactttcatgagcccaggctcgtgggaagctgctcttcttgcagctggaacaactctttcagcaatgcaacatattcttgattgccatgggaaaattgcatatgctctggtacgcccaccaggt

SEQ ID NO: 125655 - DNA, 608 bp, Arabidopsis thaliana
gattcgactctcgccgccgacctaggtctccgacttgtccatgtagatacttcacgagccgaggaaatcgcggataccgtcatggcgctcatccttggactccttcgacggacgcatttactctcgcgacacgctctatcggcgtctggttggctcggatcgcttcagcctctttgccggggaatgagacggtgccgtggtatggttttgggtatcgttggcagatctgtatcggctcggtatttagctagtagaagcttggctttcaagatgagtgtgctctacttcgatgtcccagagggagatgaagaacgaatcaggccctcgagattcccacgtgctgctcgaagaatggatacattgaatgatcttctagcagcaagtgatgtcatttcgctacattgtgcattaacaaatgacacggttcagatactcaatgcagagtgtttgcagcatataaaacctggggcttttcttgtaaatactggaagctgccagctgttggatgattgtgctgtgaaacaacttctaattgatggcactatagctggctgcgcccttgacggtgctgaaagtccacaatggatggaagcatgggtgaaggaaat

SEQ ID NO: 125656 - DNA, 414 bp, Arabidopsis thaliana
gcgtccgtgaaaacacaagtagacgaacctgaagcagtcactcaaactcaagacttctctttaatcgtcgtcacaaaaatctcagagaatcctccttcaattccaattcaaagctccttccttttggcacagctctcttcgtcaaattcaatcatcatgaaggtcgaatctttattcttcagagagcttcaatggcgaccacatcatcaaacccattactactttcttcaaatttcctcggttctcaaattataagctcagctccaacaccacaaaccaccacaaagtctcttcctttctcagtaatctctcgaaaaagataccaaatttctcaatcggagaagctaatgaaatcgttaccatcacaagctgcgttagcagctctgttgttctcaacttcatctccacaagctt

SEQ ID NO: 125657 - DNA, 667 bp, Arabidopsis thaliana
ggacgaacataaaaacaaaaacatataatttgggtttttagagttcgaaacttgaaatcttttttttttggttgctgaggaatcgaagtagaagagtataaatgggtgttagagagaaagatccgttagcccagttgagtttgccaccaggttttagattttatccgacagatgaagagcttcttgttcagtatctatgtcggaaagttgcaggctatcatttctctctccaggtcatcggagacatcgatctctacaagttcgatccttgggatttgccaagtaaggctttgtttggagagaaggaatggtatttctttagcccaagagatcggaaatatccgaacgggtcaagacccaatagagtagccgggtcgggttattggaaagcaacgggtactgacaaaattatcacggcggatggtcgtcgtgtcgggattaaaaaagctctggtcttttacgccggaaaagctcccaaaggcactaaaaccaactggattatgcacgagtatcgcttaatagaacattctcgtagccatggaagctccaagttggatgattgggtgttgtgtcgaatttacaagaaaacatctggatctcagagacaagctgttactcctgttcaagcttgtcgtgaagagcatatcacgaatgggtcgtcatcgtc

SEQ ID NO: 125658 - DNA, 459 bp, Arabidopsis thaliana
  unsure (1)..(459): unsure at all n locations
tcaagatggcnagaccttgtttaatgagctggaagttgttgagggtatgaagattgacaggggatacatctccccgtacttcataactaacccgaaaacacaaaaatgtgaactagaagatcctctcattcttatccacgagaagaaaatttccaatataaacgcaatggtgaaagtattagaactggccctcaagaagcaaaggccgctgctgatcgttgctgaggatgtggagagcgatgctcttgccaccctaattctgaacaaacttcgtgctaatatcaaggtctgtgctgtgaaggcccctggttttggagagaaccgaaaggccaatttacatgatctagctgccctcactggagcccaggtaataacagaagagttgggtatgaatctagacaacattgacctcagtatgtttggaaactgcaagaaggtaacggtatccaaagatgatac

SEQ ID NO: 125659 - DNA, 494 bp, Arabidopsis thaliana
cggacgcgtgggcggacgcgtccgcggacgcgtgggttaaaatagaaccaaagagtaaacacttaagcaaaacaattttgtcctactcttaggttatctccaatgaagaacttaaagatggttttcttcaagatcctctttatctctttaatggcaggattagccatgaaaggatctaagatcaacgtagaagatctccaaaagttctccctccaccatacacagaacaacctccaaaccataagccttctattgtttcttgtcgtttttgtgtggatcctctacatgttaacccgacctaaacccgtttaccttgttgatttctcctgctaccttccaccgtcgcatctcaaggtcagtatccaaaccctaatgggacacgcaagacgtgcaagagaagcaggcatgtgttggaagaacaaagagagcgaccatttagttgacttccaggagaagattcttgaacgttccggtcttggtcaagaaacctacat

SEQ ID NO: 125660 - DNA, 692 bp, Arabidopsis thaliana
  unsure (1)..(692): unsure at all n locations
aaaaagaagagaggaaagagataagtgaaagcaacttttaatctgatttttgcgagtgaggagaggatcatcatttcataggagtgagagaccccattaataccagaagcagtcagagtttctcagtaattgtaccaaattctctctattcttcttctctttcattttagatattttctcttacgcagactcattgctttcctctctccatggaagctactgagttatgatccttaccctcaccggtctttaactatgcttagaaacaaacctagagcagccgtgacgactaagaaacaaacatctctgttaatggctgatcaacctccacctccaaagcctgacacttgccactgctcaccatctctctttagctctcccaagtttaggtttttcacttctaagatgatgatgactccctttgactctgatttctcactcgttagccctacgtctatactcgaagctaacccatccatcttctcctccagaaaaccctgaaacccggtttcctatttcgagccaactatccctaatccccaggggtttcactctccagacgtctttgggcctagccgatctcgtgaaaggagggggaatgaacaaggggccctttttggaaaccttncaaaagggtggccctttnggggaaaaggtangggcccgnncccntnaaagggggtttnggggga

SEQ ID NO: 125661 - DNA, 681 bp, Arabidopsis thaliana
  unsure (1)..(681): unsure at all n locations
atgatctccaggnnnnnnnnnnnnnnnnnnnnnnnnnnnnnnnnnnnnnnnnnnnnnnnnnnnnnnnnnnnnnnnnnnnccacgcgtgcgcggacgcgtgggctgagttatgatccttaccctcaccggtctttaactatgcttagaaacaaacctagagcagccgtgacgactaagaaacaaacatctctgttaatggctgatcaacctccacctccaaagcctaacacttgccactgttcaccatgtctctttagctctaccaagtttaggtttttcacttctaagatgatgatgactccctttgactctgatttctcactcgttagccctacgtctatactcgaagctaacccatccatcttctcctccaaaaaccctaaacccgtttcctatttcgagccaactatccctaatccccagcgttttcactctccagacgtctttggcctagccgatctcgtgaaagacggagacagtaacagagaccactctagaaaacctgtcaacaagatggtccttttcgggtcaaagctcagagtccagatcccatcatcagctgattttggaactaaaaccggcatcagatatcctccttgtcaacttagtccttgtgtccaaacgaaggtcttagcagtgagcgagattgaccagacggaggactacacgcgcgtcatctct

SEQ ID NO: 125662 - DNA, 422 bp, Arabidopsis thaliana
ttcccgggatttgaattaaaactgtttttttactacttgtagtaaaaccatgaagcgatcatccttggtcgattcttgttcatattcgagaatatttcgcagtattttctgtctcttatccttttgtatcttcttcttgacaacgaccaatgctcaggtaatgcatagacggctctggccttggccattgtggccacggccgtatccacagccgtggccaatgaatccaccaacacctgacccatcaccaaagcctgtcgcaccacctggcccatcatcaaaacctgtcgcaccaccaggcccatctccatgcccgtcaccaccaccaaagcctcaacccaagcccccaccagcacctagcccatctccatgcccatcaccaccacctaagcctcaaccaaagccagtgccaccaccagcat

SEQ ID NO: 125663 - DNA, 850 bp, Arabidopsis thaliana
  unsure (1)..(850): unsure at all n locations
nnnnnnnnnnnnnnnnnnnnnnnnnnnnnnnnnnnnnnnnnnnnnnnnnnnnnnnnnnnnnnnnnnnnnnnnnnnnnnnnnnnccacgcgtccgcggacgcgtgggttttcgcgggcagctcacatttctctccaccgtctcctcgtcttctctcaccaaagatcagagcaaaagtggaattggacaaggtcatttttactactttctctgggttgggggttctatgatacttgtactggattgataatgagtatcaacagagatgaggctcttagagccaaagatcttgcggagggtttgatgaaaaagaccgattttactgctgctcgtaagcttgcaatgaaggctcaaaaaatggattccagcctggagaacatatctcgtatgataatggtttgtgatgttcactgtgctgcaacggagaagttgtttggaactgagatggattggtatggtattcttcaggttgagcagatcgctaatgatgttatcatcaagaaacagtacaagaggcttgcgcttcttctccaccctgacaaaaataagcctcccggtgctgaatctgcttttaaattgattggtgaagcccagaggattcttttggacagagagaaaaggacgctttcatgatcataaacgcaaacttggagatagcctgcagcaccgccatataaagcccaacagatgccgaattatcacacacaacctcattttcgggcaagcgtcaatacgagaaacatcttcactgagttgagaacccgaatcaggcatcctttncagatagctcaagcccaccagctgcntcactcacctaaacccttggacctcttgtgtctctgccgggtgagg

SEQ ID NO: 125664 - DNA, 819 bp, Arabidopsis thaliana
tacgactcactttagggaaagctcgtacgcctgcaggtaccggtccggaattcccgggtcgacccacgcgtccgaaagaaggatatatggtcatgccactgatgtagagattcgtcccttagatgaggaaaaggctgttcaagctgctgttgacctcattggagagatctttctctttggggtcggtggagctgttgttgtttttgaggtgcagagaagttcgcggtcagaagcaagaaaagaggaagcacgtaagcaagaactagaggagttgagaataaaagatgaagaactagaaaagcaagtggcagatctcaagagcaagctagaggagcttgaacaacttgctaaggcacgaggactgagcggtattttccagttaaaaccacagcctggtactaccgctagtgggaaaccagacaaatccagttgaatcatcatcatcatcatcttattcaatctagaagattcaaaccaaagttaacaatacggtaatgattctttttcacaagagttgaggagtttctgattctctcctctatatacatgtaccatccatcatcaaaaacaatctgcttttaaattatcaaattaggtgacaaataaaaaaagttttgatgttgaggttttgtcttttgcaacatttgttgcttagatttggtcttttgagaccaatggctcgattttaggtaatgttggataatgacgaattcattatgaaagagacattgagatgtaaaaaaaaaaaccaaagggcgaccgctctagaggatccaagcttacgtacgcgtgcgttcgacgtcatagtcttctatagtg

SEQ ID NO: 125665 - DNA, 672 bp, Arabidopsis thaliana
ctgattcttcgacgaaaggggaagaggttgttgaattcagaaatctctctctcttctctgtcgctctcgcgtgagctagttgcagatttttccagatctcaacattgaaattcaaactcaaagctagagagggagagagatagatagatagagggagaagaagaagacgaacacggagctgaaacaatgattacgatcccataccttaccgctgtatcaacgtatttcagctacggcttgcttttcgcgtttggtcagcttcgcgattactctcgcctaatcttcgattggtggcgcaccaacaatctccagggatacgctccgatctgcttggcgcatgaggatttctacatccgacgattgtatcatcggattcaggactgttttggacgtcccatttcaagtgcacctgatgcttggattgatgtggttgagagagtctctgacgataacaacaagacgttaaagcgaactacaaagactagcaggtgccttaatttgggttcctacaattatcttggatttggttctttcgatgaatattgcacgcctcgtgtcattgagtctctgaagaaattttcagcaagtacatgtagctctcgcgttgatgctggaactacatctgtgcatgcagaacttgaggattgtgttgctaaatatgtcggacaacct

SEQ ID NO: 125666 - DNA, 980 bp, Arabidopsis thaliana
  unsure (1)..(980): unsure at all n locations
ggccctcctcgagtcgacagtatcgataagctagatatccaaattcccggccgccaacaacaaacttttcagcataaaatctgttggtcaccaaaaatgggcaaacgaaaagctacctactggtcggatgttgacatggtacaaggcaaagttcaaggctcctcttggtaaggagccagtgattgtggacttaaatggtctcgggaaaggtgaggcttggatcaacggtcagagcattggtcgttactggccgagctttaactctagcgatgatggttgcaaagacgaatgtgactaccgtggggcgtatggtagcgacaaatgcgcttttatgtgcggcaaaccaactcaaagatggtaccatgttccacgatcgttcttgaatgcgagcggacataacactatcacactattcgaagaaatgggcggtaacccgtcaatggtgaacttcaagacagtagtggttggaacagtttgtgccagggctcatgaacacaacaaagtggagttgtcctgccataaccggccgatttcagccgttaaatttgcaagctttggaaatccgttggggcattgtgggtcattcgcggttggtacgtgccaaggagacaaggatgctgcgaagaccgtggctaaagagtgtgttggcaaactcaactgcactgtcaatgtgtcttccgacacgtttggttctactttggactgtggagattcccctaaaaaattgcccgtggaattggagtgctagattagatcttagctctagctagctagtgatcgcaataatttccaccaaataatgtcggccttgtttttgatctatcaggttttttagatgatttggatttaggattgtggaataaatattatgcccgaataaaagtttctcttgtttaaaaaaaccaaaaaagnnnnnnnnnnnnnnnnnnnnnnnnnnnnnnnnnnnnnnnnnnnnnnnnnnnnnnnnnnnnnnnnnnnnn

SEQ ID NO: 125667 - DNA, 483 bp, Arabidopsis thaliana
  unsure (1)..(483): unsure at all n locations
tggtcctgtgtccttagtcggatacaaaggagaggaaacagtcgagaaggatctctcgcagcatcaatgggactacaagattggtttgaatggatacaacgacaaacttttcagcataaaatctgttggtcaccaaaaatgggcaaacgaaaagctacctactggtcggatgttgacatggtacaaggcaaagttcaaggctcctcttggtaaggagccagtgattgtggacttaaatggtctcgggaaaggtgaggcttggatcaacggccagagcataggccgttactggccgagctccaacaatatccagggatactctccgatctgcttggcgcatgaggatttctacatccgacgattgtatcatcggattcaggactgttttggacgtcccatttcaagtgcacctgatgctnggattgatgtggttgagagagtctctgacgataacaacaagacgttaaagcgaactacaaagac

SEQ ID NO: 125668 - DNA, 714 bp, Arabidopsis thaliana
ttagaagaatcatttccacacgattttccctgtgatttcttcatttccggcgacttaaaacggtgtctagcaaaatgagccgaccacaagatccaccccgaggtttcttcccatttggaaatccctttcggatgttatcatcaaagggatcagatttatcgccatggctactttctctattgaacggctttgagctacgtttggaagagagactgaagaaacttatgcctaagaacaaagatgacatcctcactttatcctggatgaagctagctatggagtcactctgcgagactcataagaacattaacactctcattactgatctccagcttcctgtctctgattgggaagagaaatgggttgatgtttacctcaacataagcggtaggttactagatctctgtaatgcctttagctctgagctcacacgtctcaaccagggagatctcttcctcaagtgtgttctgcacaatttacaatcggattctggggaggggtttctccaggctcgatcttcgcttgatagctggaggcaacatgttaatacaaacaaccctagaattgaaaactgccgtgcggttctagacagtcttgttaaatctctgagtctgcctaaagtcaagaactcgcctaaaggaaaggttctgatgcgagctttttatggtgtgaaggttcaaacagtttatatctgcagtgtatttaccgcagcct

SEQ ID NO: 125669 - DNA, 479 bp, Arabidopsis thaliana
cggggcgatcacagagtgtcaaagcaatctgctttttctcctctcagattcaaaggttctctttgaagcttcgtaggtggttatactttgatggcggattatcatttcgtgtataaggacattgaaggagcgtcaactcaatgggatgatatccagcggaaattggggaatctaccggagaaggctccggctttcaaacctccggcgtatactccggcggaagacgagtcttcagctcctaaggatcaggcatggtttgataagaagacagaggaggagcttgaggatcttgaggacgacaaagatctcgacgatgatcgctttctcgaagaatacaggaagaagaggttgtctgagctaagagaggctgctaaagttaaaagactatggaacagtgactcccatctcgggctctgatttcgtgagggaggttacgcaagcttctgctgaagattgggttgttgtatgtctctataaag

SEQ ID NO: 125670 - DNA, 493 bp, Arabidopsis thaliana
  unsure (1)..(493): unsure at all n locations
aagctactnnnnnnnnnnnnnnnnnnnnnnnnnnnnnnnnnnnnnnnnnnnnnnnnnnnnnnnnnnnnnnnnccacgcgtccgggcaataatggcatcgttcaagtctttcgcagccgttctcagtgtcctttttcttgccatgactgctatagaaacggtagttcaagcccaagaatgtggcaacgatctagcaaatgtgcaggtatgcgccgccatggtgctgcccggttcaggcagaccaaattcagagtgttgcgccgcacttcaatctactaatagagattgtctatgcaacgctctccgtgcagccacctctcttccttcgctttgtaaccttcctcctgtggattgtggtataaatgcttagttaagctacgagtcaattccaagatgatcaaggaaaacgggaaaataaagaataatgagaaatattccagtcttatgttttttcttctaacttctgctttactataataaagttctagtagttt

SEQ ID NO: 125671 - DNA, 530 bp, Arabidopsis thaliana
  unsure (1)..(530): unsure at all n locations
tccnnnnnnnnnnnnnnnnnnnnnnnnnnnnnnnnnnnnnnnnnnnnnnnnnnnnnnnnnnnnnnnnnnnnnnccacgcgtccgaccatgtttgagtaccggtgcagctccatcgattggaagccatctccggtggtagctctggccaccagcgccgacggttctcaggtcgccgcagctcgtgaggatggttctcttgagctctggctcgtctctcccggtgcttcctcttggcactgtcagctcatcattcatggagatccaaaatcgagaatctcgcaccttgcgtggtttggtactggttctaaaggttcttcttccgctagattgttttcttcgagcattgatggctcaatttcagagtgggatcttttcgacttgaagcagaaggtcgtcctagattcaattgggttttcaatctggcaaatagctctggcccctatctctattgaagcagaaagtaaagaagctaagctgattcagaatggatacttgagtgagaaatcagacgacgaggaagaaagtggagt

SEQ ID NO: 125672 - DNA, 351 bp, Arabidopsis thaliana
tccacgcgtccgcccacgcgtccgaaaggaagctcctttttggtatgtatgcattgcctctgttatctatttgcgaaaatctgaagattggtttctctaccgagtgttttatactttgatacttcatctaaagctctaggcttttcttattttccttgtttggattgtttgttttcgctctagggtacgccaaagaggacgctctctgaaaaaagaagaagtggttcgtaacataatctgaacccgaggacacacacacgatgatgcattcgacggtgcagcatgggggaaacaagagtggcaagtcaaatgtatgggctaatactaacttggcaaagacagtggcagctg

SEQ ID NO: 125673 - DNA, 465 bp, Arabidopsis thaliana
aattggaatatgttcttcccttagtcttcgctatcagctgcgatttgaagtttgcagtgatcatggtggtcacatcaaattgtctatgaactgcaaattcttttggatgtctttaacttgatatttagttgttggccttttgtttccttgaaagtgatccctttaagactaaaatcacttggttaaatttcctaatcatctgcataatgttttgtaggccaacatatttcgggcagagaagaatgttattgatttatatgtcatgcttctgcggttttcaaggtcaaaaagctgccaactcaaatactctctgtagagagaattagttagatccttttgctttttctgaaatcagctttgtttttcgttttctctagcttggctctcgagactataccgtcccatcgagattacagaacatctctaaaaagcacgcatgggtcggtcgagccggtccgtcccggt

SEQ ID NO: 125674 - DNA, 681 bp, Arabidopsis thaliana
  unsure (1)..(681): unsure at all n locations
nnnnnnnnnnnnnnnnnnnnnnnnnnnnnnnnnnnnnnnnnnnnnnnnnnnnnnnnnnnnnnnnccacgcgttcggccacgcgttcggtttgaaccggagggttcctcccccctttggaaattccatcatcgattgacctatagctaccagatctgcttttcaatttgatgctcttccattaggtagaaaaggtgcttttgatcggagccactatgggggcgtcttttgagaccctcgatatcgcttccagtgctcggagaattggcgtagatatatcggatttctctcaaattttactccaggagccctggttatatcctcaaacaggcccacatatttcgggcagagaagaatgttattgatttatatgtcatgcttctgcggttttcaagcttggctctcgagactataccgtcccatcgagattacagaacatctctaaaaagcgattaagggagtattggagaatgagactactagatgtcttgacggagctggagaagttgataccagttgtacagcaaaggattgatgaactgtatcccaagctcaaacctcgatataacgttcaagctcatccagcaaatggttccctaggctggtcttctgccgtgaaaccgtcatttaatagctatgatcatgcaaaggtaagaaatcctcctggacataattctggctac

SEQ ID NO: 125675 - DNA, 533 bp, Arabidopsis thaliana
  unsure (1)..(533): unsure at all n locations
gtcaggnnnnnnnnnnnnnnnnnnnnnnnnnnnnnnnnnnnnnnnnnnnnnnnnnnnnnnnnnnnnnnnnnnnnccacgcgtccgcacaccactcagaggaacagagcttaacggcgactatggaagggattggactgcgaagttgcggagatgatattctccgtctcggattcaagctacgcggtggtaccggtggccggattcagattctccagcgagctatggtgataaaaatgagagaccgtagcaagaacaggaaaccattgcagagaggacgaatgctcagtatcgaagcgattcaagcggttcaagccctgaagcgagccaatccacttcttcctcctcctgccgttccttctactttcacgacttcttcttcctcagctctgcttgatcgtgtaatcatttctaaattccgtcggctcttgaaattcgatatggtcgccggtctcagagaacttctacgccaaaacgagtgctctctagctctcaaggtttttgaagagattagaaaggagtattggtacaagcc

SEQ ID NO: 125676 - DNA, 618 bp, Arabidopsis thaliana
ggagtttctaatcatgtctctctctgttttcttcttattcttctatcaaaccgtcaagttgggaaacaaaacaaaactcgcaagtttaacaacgcgtcttctacctcctcctcatcggactatttatctatagtcttcgttagatcaattcctctgttttactcctacctcgcgtccgccacatttctctttaacctcatctcatctcttagtcgagatcttcactttctgatgacaatagggtcgtttttctcttctctcttattctggcgcaattctcaggaccaggaggcgcagagagggaggatgcaggagatagatcttagtgttcacactataaagtcccatggaggaagagtcgcttctaaacacaagcacgattggatcatactcgtcatcttgattgccatcgagataggcttgaacctcatctctcctttctaccgctacgtgggaaaagacatgatgactgacctcaagtaccctttcaaggacaacaccgtacctatctggtctgtccctgtgtacgctgtgcttcttcccatcatagtgttcgtctgcttctacctgaagaggacatgtgtgtacgatctgcaccacagcatcctcgggctgctt

SEQ ID NO: 125677 - DNA, 518 bp, Arabidopsis thaliana
  unsure (1)..(518): unsure at all n locations
tttcgctctantgatggaccnggcctgaacntccngggcnacccactgngtccngacaataccgtacaagccaagaaacgggtatcatggatatggcaaagaaaacattgaggggttaaatgagatgaatagaggtccacgagctaagggtttcaacagccaagatggttccaaggtgatggctgtgtctttgaaggagcagagagtgactgagactgagaaactcagtgaagatgtgtctcttttagatcccaaggactacaataagatagatttccctgagacctacacagaagcaaagttttatgtaatcaaatcgtacagtgaagatgatattcataaaagtatcaaatacagtgtttggtccagcactcctaatggtaacaagaagctggatgcctcatataacggggcaaaacagaagtcagatggcttgtcccgtgttttccttttctctgtaaacactagtgggcatttttttgggttngccgnnntggtaggccctnttnntttnaata

SEQ ID NO: 125678 - DNA, 706 bp, Arabidopsis thaliana
cgctagtcaggcgtttactctctctctctctcacattttctcattctctcctacaacaagtttccgccgctaagccactcactacgcagccatggcaaatcctgaccatgtttcagatgtgctacataatttgtcgattgatccaacaaccaaggctttagctcctgattctgaaacaaagggggcttatggcggaaacggtaatgacttcttgctcaatgatgagttagtggaggctaccaaaattggtaaacctagtcttttgtctaaagatggaggtgtgaccaaagacaagggatccaaccttaagaaactcgggtaccaaagtgcagcttataacgcaaagggttcatatgggaagggtgcctatgcttatgggtactatcccccagcatatcagtacccaagacatggttacactgggagctatgcttcagggaaaaccaatcttcagtatcagtacctgactcagcagggaagatcagctggtaatggtcaatcttatggaggatacatggacaacatttactccaattatgggatgtgtggaccttacacgaatggctatgggtatggctcttacggttatgactcatggaaatacatgcccaattggtatgcggttaacaatacctacaagccaagaaacgggtatcatggatatggcaaagaaaacattgaggggttaaatgagatgaatagaggt

SEQ ID NO: 125679 - DNA, 678 bp, Arabidopsis thaliana
  unsure (1)..(678): unsure at all n locations
aagcccggcngnttcccggtccccccagtcagcagcccccccgggtgttaaaaggtcagaagatccaatggttgggangaagccccgagtgggagtgtcccctggttccaaaggtggggcggaacctaggcatgtttcgcctcctggccttaaacccccccggaaagggctcccgatgaaaccaaaaccagtcctaagagaagagttcctttgtttgatctaaatcagatatctggagaagaagagcaagaaacagaggcagtggacaataatcaagagaacacgagagttgaaggaaagtaattcatgtaagagattaatgatcagtagcattgagatgcagcagaaagatgtgaagccatcttcttgcaggaatggcggaaacggatcaaataagaggaaaatttcatggcaagatcctgtcgcagctctcagagtctaaaataagaagacggaaccttttgttcctcctcatagatcttgttgtaacatagcttcacatcaaagttagcttgcttatttacttatcttgattgaacaacatatccaattgtgacttgaaaacttaaaaaccttacacaatggtggcttattgcaaaaaaaaaaccacaagggcggccgctctagaggatccaagcttacgtacgcgtgcatgcgacgtcatagatcttnctatag

SEQ ID NO: 125680 - DNA, 617 bp, Arabidopsis thaliana
  unsure (1)..(617): unsure at all n locations
atgattctccnnnnnnnnnnnnnnnnnnnnnnnnnnnnnnnnnnnnnnnnnnnnnnnnnnnnnnnnnnnnnnnnnnnnnnnccacgcgtccggtttaggcctcatagccttatgcaagactatggagaattgcatatggaaaccgaagctatgagaaaaaggttacaggcagtgcgagaaagaaaggcaacactaatggctgaagtcagatttctgcgacggagatacagacatttgagacaagaccagccacaagagattaaaaaggtcagaagatcaaatggtgggaagaagatccgagtggaagtgtctcctagtaacaaaagtgaggcggaaactaagcatgtttcgcttcctgacttaaaccactcggaaaaggctcacgatgaaaccaaaaccagtcctaagagaagagttcctttgtttgatctaaatcagatatctggagaagaagagcaagaaacagaggcagtggacaataatcaagagaacacgagagttgaagaaagtaattcatgtaagagattaatgatcagtagcattgagatgcagcagaaagatgtgaagccatcttcttgcaggaatggcggaaacggatcagataagaggaaaatttc
